United States Patent Application Publication US 2012/0070457 A1 - sequence listing, part 11

SEQ ID NO: 63446 - DNA, 1047 bp, Neisseria meningitidis
atgccgtctgaagccttcagacggcatcgtgcctatcgggagaataaattgcagcctttagtcagcgtattgatttgcgcctacaacgtagaaaaatatttcgcccaatcattagccgccgtcgtgaatcaaacttggtgcaacttggatattttgattgtcgatgacggctcgacggacggtacgcttgccattgcccagcgtttccaagaacaggacggccgcatcaaaatccttgcacaagctcaaaattccggtctgattccttctttaaacatcgggctggacgaattggcaaagtcaggaatgggggaatatattgcacgcaccgatgcagacgatattgccgcccccgattggattgagaaaatcgtgggcgagatggaaaaagaccgcagcatcattgcgatgggcgcgtggctggaagttttgtcggaagaaaaggacggcaaccggctggcgcggcaccacgaacacggcaaaatttggaaaaagccgatccggcacgaagacatcgccgcctttttcccttttggcaaccctatacacaacaacacgatgattatgcggcgcagcgtcattgagggaggcttgcgttacgatactgaatgcgattgggcggaagattaccaattttggtacgaagtcagcaaacagggcaggctggcttattatcccgaagccttggtcaaataccgccttcacgccaatcaggtttcatccaaatacagcatccgccaacacgaaatcgcgcaaggcatccaaaaaaccgccagaaacgattttttgcagtctatgggttttaaaacccggttcgacagccttgaataccgccaaataaaagcagtagcgtatgaattgctggagaaggatttgtcggaagaagattttgaacgcgtccgccggtttttgtaccaatgcttcaaacggacggacacgccgcccgccggtgcgtggctggatttcgcggcagacggcaggatgaggcggctgtttaccatgaggcaatacttcggcattttgcaccgattgctgaaaaaccgttga

SEQ ID NO: 63447 - DNA, 540 bp, Neisseria meningitidis; identical to SEQ ID NO: 36581

SEQ ID NO: 63448 - DNA, 498 bp, Neisseria meningitidis
atgactgcgcttacccttccggaagacatccgccaacaagagccatccgccctgctctataccctcgtttccgcctacctcgaacacaccgcccaaaccggcgacgaatccctctcctgcctgtccgacgaccagcacacgctgaccgcattctgctacctcgacagccaagtcgaagaaggcggcttcgtgcaactcatcgcctccggctacggcgaatatattttccgcaacccgcttgccgacagcctgcgccgctggaaaatcaaagccgtgccgaaagtcttggacaaagccaaagccctctacgaacaacacggcaaaaccatcgaaacgctcgccgacggaggcgcagacatcgaatccctgcgcaaacagttccccgactttgaagaatgggacggcgcatactacgaagccgccgaacaagacctgcccctgcttgcagaacacatacagtcaaactgggaaaccttcgcccatatcgggcaggcgtga

SEQ ID NO: 63449 - DNA, 360 bp, Neisseria meningitidis; identical to SEQ ID NO: 36598

SEQ ID NO: 63450 - DNA, 966 bp, Neisseria meningitidis; identical to SEQ ID NO: 46197

SEQ ID NO: 63451 - DNA, 1077 bp, Neisseria meningitidis
atgaagccgtctatcttagaaaaactgcaacaactcggcgaccggttggaagaagttacccaccttttagggcaacccgaagccacatccgatatggacaactaccgcaagctcacgcgcgaacacgccgaactgacccccgtcgtcgaagtattccaaaactatcaactggcgcaaagcgacttggcagatgccgaagaaatgctgtccgaccccgaaatgaaagactttgccgccgaagaaatcgaagcggcaaaagccaaaatcaacacgctcgataccgaactgcaaaaactgctgctgcccaaagatgccgacgacgacaaaaacatcttcatcgaaatacgcgccggaacgggcggcgacgaagccgcgctgtttgccggcgatttgctgcgtatgtacagccgctacgccgaacgcaaccgctggcaggttgaaatcgtttccgccaacgaaagcgagttgggcggctataaagaagtcatcgcccgtattgtcggactcggggcgtacagccgtttgaaatttgaatcgggcggacaccgcgtgcagcgcgtccccgccaccgaaagccaaggccgcatccatacttccgcctgcaccgttgccgtcatgcccgaagcggacgaactggaagacatcgagttgaaccccgtcgaccttcgcatcgacaccttccgcgcatccggcgcgggcgggcagcacatcaataaaaccgattccgccgtccgcatcacccacctgcccacaggcatggtggtcgaatgccaagacggacgcagccaacacgccaacaaagcgcaggcgatgaaagtcctcgccgcccgcctgaacgacgcgcaaaaacgcgaagcccaagccaaagaagccgccgaacgcaaatccctcatcggcagcggagaccgcagcgaacgcatccgcacctacaactatccccaaggcagggtaacagaccaccgcatcaacctcaccctgcacaagctggatttcgtgatggacggcgatttggcagaaatcaccaatgccctgattgccgagcatcaggcggagcttctggcggcaatgggcgattga

SEQ ID NO: 63452 - DNA, 717 bp, Neisseria meningitidis
ttgtatgaattcaaaaggccgtctgaaaaacagcttcgacaaagacgcggttgccaaagagatcggcctacaaagggaagtaacgcaggcgttcggcaaaacgccgcccaagtcgcagcggtcgttgccgacaaactcggcaatacccgaagttacggacggtatcagacagccaaaaccctgccggaggccgaactgcaaaacaaatccgacataaaaaaccgcccgaaaaatccggacggcggttcaaacaggctgccccgtttagcgggcgcggcaggaggtttcgaccgaattgccgtaggcatcggtaaagccgaaaaaggcttcgccgcctttctgatgccactcggttccgtttccgaacaaaccgtgttcggcggtatagcgttcgccggatgcggcaacgtcggaagagaggacggcacgcctgccgtccaaccgcaacgcgattctgccgccgtccaaacggcggacgtgcacagacaaaccgttctcgcaggaaaatgcccgaaaatctgccgtgccggcttggttttgaacgggcggcatatgccctcgtccgccgtcatcatacgcctccggcacggcacaggccgccaaagacaaaaccggtacggtcagcgcgaaaaacctgatattcataaaagctccccaataaaaataagatatgaaacaaccgccctgattccaagctgcggcaacgccatactataa

SEQ ID NO: 63453 - DNA, 552 bp, Neisseria meningitidis
atgccgtctgaacgccgaccgtttcaaacggcatttttatcgaacaggaaaaccgtcggtaaacttgcagagcgtgtgcaatcccgatatgatggtttgcataaatttaaacatatatgttccgcagctatggcactgattaaagagccgttggacaaagtgaaacaaaggaacgaagaacttgaagcggcagaagaagcggcggcgcaggaggcattgggtcgggagcaggaagccgcccgcgtatccgaatgggaagaacgctacaagctgtcgcgcagcgagttcgagcagttctggaaaggattgcctcaaaccgtacagaataagctgcaagcctcacagaaaacatggaaaagcgggatggataaaatctgtgccaacaatgcgaaagctgaaggtaaaacgccaaacggcataaaattcagcgaactggcatgcaaaacggcgaaaaccgaagtacgcttggaagagctgcacaaccgtaaaaaagcccttatcgacgaaatggccagggaagcggacaagaaagaactgtcaaagcggctctga

SEQ ID NO: 63454 - DNA, 225 bp, Neisseria meningitidis; identical to SEQ ID NO: 38459

SEQ ID NO: 63455 - DNA, 990 bp, Neisseria meningitidis
atgaaacagcctgtttttgccgttacttccggcgagcctgccggcatcggccccgatatttgtttggacttggcgtttgcacgcctgccctgccgctgcgcggtattgggcgacaaacacctgttgcgcgcgcgcgccgaagccttgggcaaaagcgtcgtcttgcgcgacttcgatccggaatcaggcggcgcggcatacggcgagctggaagtgctgcacatccctgccgtcgaagcggttgaggcgggcaaactcaatcccgccaacgccgcctatgtgctgcaacttttggacaccgcgctcgcaggcatttcagacggcattttcgacggcatcgttaccgcgccgctgcacaaaggcatcatcaacgacgcgcgcgcaagcacaggttttttcagcggacacaccgaatatctggcggaaaaaagcggcacggggcaggttgtgatgatgcttgccggccaaggcctgcgcgtcgccctcgtaacgacccacctgccgctgaaagacgttgccgccgccatcacgcaaccgctgattgaaagcgtcgcacgcattttgcatcacgacttaaaacacaaattcggcatcaaaaatcccaaaatcctagtcgccggactcaacccccacgccggcgaaggcggacacctcggacacgaagaaaccgacaccattatccccgcgctcgaaaacctgcgccgcgaagggataaacctcgccggcccgtatccggcggataccttgttccaaccgtttatgctcgaaggtgcggatgccgtattggcgatgtaccacgaccaaggcctgcccgtgttgaaataccacagcttcggacagggcgtgaacatcacactggggctgccctttatccgcacctccgtcgatcacggcaccgcgctcgatttggcggcaaccggcagggcggattccggcagcctgataactgccgtggagaccgccgtcgagatggcgcgcggcagcctttaa

SEQ ID NO: 63456 - DNA, 1596 bp, Neisseria meningitidis
atgagtatcgtagaaatcaaagtccccgatatcggcggtcacgaaaacgtcgacatcatcgccgtagaagttaaagcgggcgacaccatcgccgttgacgacaccctgattactttggaaaccgacaaagccacgatggatgtgcctgccgatgcggccggtgtcgtgaaagaagttaaagtcaaagtcggcgacaaaatctccgaaggcggcgtaattttgaccgttgaaaccggtgccgccgctgccgaagccgctcctgctgctgccgaagcacaacctgcacctgctgccgcacccgttgccgcaggcggtgcaaccgttcaagtagccgttcccgacatcggcggccataccgatgtggatgtaatcgccgtcgagatcaaagtcggcgataccgttgccgaagacgacacgctgattactttggaaaccgacaaagcaacgatggacgtaccttgtaccgctgccggtgtcgttaaagccgtattcttaaaagtcggcgacaaagtgtccgaaggtactgccattatcgaagtagaaaccgccggctctgccgcagcagcccctgctcaagccgctcaagctgccgcaccggctgccgctccggctccgactgctgtcgccgcgcctgcaccttctgcacctgccgctgccaaaatcgacgaggccgctttcgccaaagcacacgccggcccttccgcacgcaaactggcgcgcgaattgggcgtggatttgggccaagtcaaaggtaccggcttgaaaggccgtatcgtgggcgacgacatcaaagcctttgtgaaatccgtaatgcagggtggcgcggcaaaacctgccgcagccggcgcatctttgggcagcagtctggacttgctgccgtggcctaaagtggacttctccaaattcggcaatgtcgaagttaaagaattgtcccgcattaagaaaatctccggtcaaaacctgtctcgcaactgggtggtgattccccacgttaccgtacacgaagaagcagatatgaccgagctggaagaattccgcaaacaactgaacaaagaatgggaacgcgaaggcgtgaaactgtcaccgttggcgttcatcatcaaagcctccgtttccgcgctgaaagccttccccgaattcaacgcttctctggacggcgacaacctggtgctgaaaaactacttcaacatcggtttcgcagccgatacgccgaacggcttggttgttcccgtcatcaaagacgtggatcaaaaaggcttgaaacaaatcagccaagagctgaccgaattgtccaaaaaagcccgcgaaggcaagctcaaaccgcaagaaatgcaaggcgcgtgctttaccatttccagcttgggcggtatcggcggcacaggcttcacgccgattgtaaacgctcccgaagtcgccatcttgggcgtgtgcaaatcccaaatcaaaccgatttggaacggcaaagagtttgccccgcgcctgatgtgcccgttgagcctgtccttcgaccaccgcgtcatcgacggtgcggccggtatgcgctttaccgtattcttggcgaagctgttgaaagacttccgccgcattaccctgtaa

SEQ ID NO: 63457 - DNA, 1407 bp, Neisseria meningitidis
gtggaatttagcacaaaaaccgaaatcttgcaggaacagcaggcaggcgcacagttatttgtctgcaccgaagaggcgcaattaaaccatccgaccgcccttgcccttttgtcttcgcttgaagaaggtcaaaattttgccgacacaaaaatcccgacaggcaacggtttgcaggctgttgccgtatgctgtctgaaaagcaccggccgcgccgcattgaacaaggccgccgccgaagccgccaaatgggcgcaaaatcaggaaacggtcaatacggacgttcacgcctttgaagaagcgcaagccgccgccgtagccgaagcgtttgcgattgcgttcggcaacgccgcctaccgtttcgaccgctacaaaaaagaagccaagcccgccaaatttgaaaccgccgtgttccacagcgcacacgaagccgtcgttaaagaagccttgcgcgtcgccgaagcgcaagtttacggacaaagcctctgccgcgacttgggcaacgccgcgcccaacgaatgcacgcccgaatttttagcgcgcaccgccaaagccgaagccgaaaaactgggcgcgcacgccaaaatcatcgaaaaagactacatcaaagaaaacatgggttcgttttggtcggtcgccaaaggcagcgcggaagccccctatttggtcgaactgagctatttcggtgcagccgacaaagaagccgcccccgtcgtcttggtcggcaaaggcattaccttcgacaccggcggcatttccctcaaacccggtctgaacatggacgaaatgaagtttgatatgtgcggcgcggcaaccgtcatcagcaccttctgcgccgccgtcaaactgcaactgccgatcaacctgattgccatcgtcgccacttgtgaaaatatgccttccggcgcggccaacaaaccgggcgacgtcgtaaaaagcatgaaaggcctgaccatcgaagtgttgaacaccgatgctgaaggccgtctgattttgtgcgacgcgctcacttacgccgaacagttcaaacccaaagccgtcatcgacgtcgccaccctgaccggtgcgtgtattgttgccttggggcacgatgtcagcggcgtgatgggcaacaatcaagatttggtcgacagcctgcttgccgcttcctacaacgtggacgacaaagcgtggcaactgccgctctttgagacctacaaagaccaactcaaatccaactttgccgacattccaaacatcggcacgcccggcgcgggcacgattaccgccgcaacattcctatcctactttaccgaagactatccatgggcacaccttgacatcgcgggtacggcgtggaaatccggtgcggaaaaaggtgcgaccggccgtcccgttcccttgctgctgaactatctgcggaatctttaa

SEQ ID NO: 63458 - DNA, 330 bp, Neisseria meningitidis
atgacgacttatcgtgatttggtgcaacgcacggtcgcctgccgccatgcggacttggagttaggcttaagccgcgcacgcgaacaagagccgtttgtcattcatgtttccgaactgttggataaggcaggcattgagtacgcagtgcgtatggataaggattttcagacgaccttttgtgtggagttttccgcgaccgcccctgctgatgtgattggtattttgcaaaagtattattcagtcttttttgacggccaaaaggtcgaggcggcgagccgaaatcccgaaggctatgcggtgcgtatcgtattcggcgatgtgccggtttaa

SEQ ID NO: 63459 - DNA, 288 bp, Neisseria meningitidis; identical to SEQ ID NO: 36916

SEQ ID NO: 63460 - DNA, 3216 bp, Neisseria meningitidis
atgcccaaacgtaccgacctaaaatccatccttatcatcggcgccggccctatcgttatcggtcaggcctgcgaatttgactattcgggcacacaggcctgcaaggctttgcgtgaagaaggctataaagtcattctggtgaattccaatcccgccacgatcatgaccgaccctgaaatggcggatgttacctacatcgagccgattatgtggcagacggtggaaaagattatcgccaaggagcggcccgatgcgattctgcccacgatgggtggtcagaccgcgctgaactgtgcgctggatttggcgcgcaacggcgtgctggcgaaatacaatgtcgagttgatcggtgcgacggaagacgccatcgacaaagcagaagaccgcggtcgctttaaggaggcgatggaaaaaatcggtttatcttgcccgaaatcttttgtctgccacaccatgaacgaagctttggcggcgcaagaacaggtcggcttccctaccctgattcgtccttctttcaccatgggcggttcgggcggcggcattgcctacaataaagacgagtttttggcgatttgcgaacgcggtttcgatgcctcgcccacgcacgagctgctgattgagcagtccgtccttggctggaaagagtacgagatggaagtcgtacgcgataaaaacgacaactgcatcatcatctgctcgattgaaaacttcgacccgatgggcgtgcatacgggcgactcgattacggttgcgccggcgcaaacgttgacggacaaagaataccaaatcatgcgcaacgcttcgttggcggtattgcgcgaaatcggcgtgaacacgggcggctcgaacgtgcagtttgcggtgaaccctgaaaacggcgagatgattgtgattgagatgaacccgcgcgtgagccgttcgtccgcgctggcttccaaagcgacgggcttcccgattgcgaaggtggcggcaaaactggcggtcggctttacgctggacgagttgcgcaacgacatcaccggcggcaaaacccccgcgtcgttcgagccttccatcgactatgtggtaaccaaaatcccgcgttttgcgtttgaaaaattccctgccgcagacgaccgcctgaccacgcagatgaaatccgtgggcgaagtgatggcgatgggccgcacgattcaggaaagcttccaaaaagccctgcgcggcttggaaacaggcttgtgcggcttcaatccgagaagctccgacaaagcggaaatccgccgcgaactggcaaaccccggccccgaacgtatgctgtttgtggcagacgcgttccgcgcgggcttcacgctggaagaaatccacgaaatctgcgccatcgacccttggttcctggcgcaaatcgaagacttgatgaaggaagaaaaagcggtttcagacggcattttgagtgatttggatttcgccgccctacgccgtctgaaacgcaaaggcttctccgacaaacgtttggcacaattgttgaacgtaagcgaaaaagaagttcgcgaacaccgctacgcgctgaagctgcatccggtttacaaacgcgtcgacacctgtgccgccgagtttgccaccgaaaccgcctacctctactccacttacgaagaggaatgcgaatcccgtccttccgaccgtaaaaaagtgatgattctcggcggcggcccgaaccgcatcggtcagggcatcgagtttgactactgctgcgttcacgccgcactcgccctgcgcgaatcgggctttgaaaccatcatggtcaactgcaacccagaaaccgtgtccaccgacttcgacaccagcgaccgcctctatttcgagccgctgacattggaagacgtgttggaaatcgtccgcaccgaaaacccgtggggcgtgattgtgcattacggcggtcaaaccccgctgaaactcgccaacgcgttggttgaaaacggcgtaaacatcatcggcacgtccgccgacagcatcgacgccgccgaagaccgcgaacgcttccaaaaagtgttgaacgacttaggtctgcgccaaccgcccaaccgcatcgcccacaacgaagaagaagcactcgtcaaagccgaagaaatcggctatccgctggtcgtgcgcccgtcttatgttttgggcggccgcgccatgcagattgtccactctgccgaagccttgcaaaaatacatgcgcgaagccgtacaggtttccgaagacagccccgtgttgctcgatttcttcctcaacaacgcgattgaagtcgatgtggactgcgtttcagacggcaaagacgtggttatcggcggcattatgcagcacgtcgaacaggcgggcatccactccggcgactccggctgctcgctgccgccctactccttaagcgaagaaatccaagacgaaatccgccgccaaaccaaagcgatggcgtacgcgctgggcgtggtcggtctgatgaacgtgcagtttgccgtgcaggacggcgtggtgttcgtgttggaagtgaacccgcgcgccagccgtaccgtgcccttcgtctccaaagccaccggcgtgccgctcgccaaagtcggcgcacgctgcatggcaggtatttccctgaaagaacaaggcgtggaaaaagaagttgtccccgatttctatgccgttaaagaagccgtgttcccattcatcaaattcccgggcgtagacacgattttgggaccggaaatgcgctccaccggcgaagtgatgggcgtgggcgcaagcttcggcgaagcctactacaaagcccaactcggtgcgggcgaacgcctcaacccgaccggcaaaatcttcctctccgtgcgcgaagaagacaaagaacgcgttatcaaaaccgctaaaaacttccaggttttaggctacggcatctgcgccacacgcggcacggcgcaatacctgaccgaacagggactgattgtacaaaccatcaataaagtccccgaaggccgcccgcacatcggcgacgcactgaaaaacggtgaaatcgcactggtcgtgaataccgtttccagcgatccgcaatccgtgtccgacagccacatcatccgccaaagcgcattgcagcaacgtgtgccgcaatacaccaccactgccggcggcgaagcgatgagcgaaggtgcgaaaagccgagaccatctgggcgtgtacagcgttcaagagttgcacgggcgtttgaaaaaccgcaactga

SEQ ID NO: 63461 - DNA, 423 bp, Neisseria meningitidis
atgagcgagcagacggcattggccgtgtgtgccgacggtgtggaaacggcattggcggaagcggcatcactgttggaagagggatgcgggtcggttttggttttggcggcggacgatccgctgccggaaggatatgtcgtatcggcaacgcgcgcgccgtttgcttatgctttggcgatggttctgactaaagggacgcgttacagcctgactttatctgcttcggacgatatgccgtctgaagccggtatgctgcccgaggcatattggagcggtttggaatgggtgcgctttctgctgaacggcagtcgggaatgccgccgggtatatcgcaatcgtgaatggctgtggcagcccgcaagctgcaggctgaagatttccgcaatgtccgcaccgtcaacgacgtggtacaggcggtattga

SEQ ID NO: 63462 - DNA, 627 bp, Neisseria meningitidis
atggctgatatgaaacgcttgaaacacttgatgttttcaccctttatcgacaacaacccgattgccttgcaggttttgggtatttgttcggctttggcggttaccaccaaacttcagacggccatcgtgatgggtatttccgtagctttggtaaccggtttttccagcttcttcatttcgctggtacgcaactacatccccaacagcatccgtattatcgtgcaaatggcgattatcgcgtcgctggttacgctggtcgaccaactcttacaggcctttgcctacgaattgtccaaacagctttccgtattcgtcggtctgattattaccaactgtatcgtgatgggccgcgccgaagcatttgcgatgaaagagccgccgctggaaagcctgatcgacggcatcggcaacggcgcgggctacgggatgatgctgcttgtcgtcgccaccgtccgcgaactgattggctcgggcaaactcttgggctacaccgttttccaaaccgtgcaggacggcggctggtatcagaccaacggcttgttcctgctcgcccccagcgcgttcttcatcatcggctttttgatttggggactgcgtacctggaaacccgaacaggcggaggaataa

SEQ ID NO: 63463 - DNA, 621 bp, Neisseria meningitidis
atgaaaccgcaattcatcactttggacggcatagacggtgccggcaaatccaccaaccttgccgtcatcaaggcatggtttgaacggagggggctgcccgtgctgttcacgcgcgagccgggcggaacgccggtcggtgagaccttgcgcgaaatcctgctcaaccctgaaaccaaagccggtttgcgtgcggaaaccctgatgatgttcgccgccagaatgcagcatattgaagacgtgatattgcccgcgctttcagacggcatacacgtcgtgtccgaccgttttaccgacgcaaccttcgcctatcagggcggcgggcggggaatgccgtctgaagacattgaaattttggaacattgggtgcagggcggtttgcgccccgatttgaccctgctgttggatgtgccactcgaagtgtcgatggcgcgtatcgggcagacgcgcgagaaagaccgtttcgagcaggagcaggcggatttctttatgcgtgtgcgcggcgtttatctcgaccgagccgccgcctgtcccgaacggtacgccgttatcgacagtaaccgcaacttggatgaagtcagaaacagcatagaaaaagtgttggacggacatttcggctgctga

SEQ ID NO: 63464 - DNA, 612 bp, Neisseria meningitidis
atgattacgacttataaaaccattacttcctcgacgcaggctgagtttaaagataaaggcagccgttttattgcatttgcctatccgattcggacattggctgatgtgaaaaaatacctcgatccgttaaaggaagagcatcataaagcacgacactggtgctatgcctatcgtttgggtgtggatggtgtgcaatttcgtgccaacgatgatggagagccatcaggaagtgctggacgaccaattttgggacagattgattcggtgggtattaccgacgttttggtcgtggtcgtccgctatttcggtggtactttgttaggtgttccaggtctgatacatgcgtacaaagaggcgacggctcaagcgttggcagttgcagaagtagttgaaaagaatattgaaaaaactgtttggctgaaatgtgaatatccgtttttgaatgaagcgatacgcattgctaaacaatatcaggcggatgtattggagcgggatttgcagttggattgccgattgacggtcagtttgtcgttggtaaattatgaggcctgtgttgcggcttggaagagtacacggcagattgaagtaaatacggaaaagccttttgaatga

SEQ ID NO: 63465 - DNA, 1515 bp, Neisseria meningitidis
atgactacctccaaatgccccgtcacccatctgaccatgaacaacggcgcgcctgttgccgacaatcaaaacagcctgaccgccggtccgcgcggccccctgctggcgcaggatttgtggctgaatgaaaaactcgccgacttcgtgcgcgaagtcattcccgaacgccgtatgcacgccaaaggttcgggcgcgttcggtacgtttaccgtaacacacgacatcaccaaatacacccgcgccaaaatcttcagcgaagtcggcaaaaaaaccgagatgttcgcccgtttcaccaccgtggcaggcgaacgcggcgcagccgatgccgaacgcgacatccgcggctttgccttgaaattctataccgaagaaggcaactgggatatggtcggcaacaacacgcccgtgttcttcctgcgcgatccgcgtaagttccctgacctgaacaaagccgtcaaacgcgatccgcgcaccaatatgcgctctgccacaaacaactgggacttctggacgctgctgcccgaagcactgcaccaagttaccatcgtgatgagcgaccgcggcatccccgccggctaccgccatatgcacggcttcggttcgcatacctacagcttctggaacgaagcaggcgagcgtttttgggtgaaattccatttccgcacccaacaaggcattaaaaacctgaccaacgaagaagccgccaaaatcatcgccgacgaccgcgaaagccatcagcgcgacttatacgaagccatcgaacgcggcgagtttccgaaatggacgatgtacatccaagtcatgcctgaagcagacgcggaaaaagtaccttatcatccgtttgacttgaccaaagtttggccgaaaaaagactatccgctgattgaagtgggcgaattcgagttgaaccgcaatcccgaaaacttcttcgccgatgtggaacaatccgccttcgcaccgagcaacctcgttcccggtgtcggcgccagcccagataaaatgttgcaagcccgtttgttcaattacgccgacgcgcaacgctaccgcttgggcgtgaacttccgccaaatccctgtcaaccgtccgcgttgccctgttcacagcaaccagcgcgacggacaaggacgcgccgacggcaactacggcagcctgccgcactacgaacccaacagcttcggccaatggcagcagcagcccgacttcgccgaaccgcctttgaaaatcaacggcgacgcggcacactgggactaccgccaagacgatgacgactatttcagccaaccgcgcgccctgttcaacctgatgaacgacgcgcagaaacaggcattgttcggcaacaccgccgccgcaatgggcgacgcgcccgacttcatcaaataccgccatatccgcaactgctaccgttgcgatccggcatacggcgaaggcgtggcaaaagccctcggactgactgtcgaagacgcacaagccgcccgcgcgaccgaccccgcactcggccagcccggtttgctgtaa

SEQ ID NO: 63466 - DNA, 432 bp, Neisseria meningitidis
atgaaaaataatatttttctaaacttaaataaaaaatctataaataacaaccattttgttatttcgattttttttgaaacaatttaccaatttgaaactaaagatacgcttttagagtgttttaaaaatattacaattaccggacattttggagtaataggtgctcaatatgaaaaaatagatgctaccagatggattggagattatgaagaggtaaacggatttgagtatattgataaagctccttctatttatttttcagttggagatgatttcaatcctgaagaattaattatacctattaatttagcatattattactttaatattgcaatatctgatttcttaatagctcaccctgaatatcaaaaaaagtgtaaagaaatacaaaaaacatattctcaaacaaactgtagcctgcatgaaacctaa

SEQ ID NO: 63467 - DNA, 966 bp, Neisseria meningitidis
atgagctacacgcaactgacccaaggcgaacgataccacatccaatacctgtcccgccactgcaccgtcaccgaaatcgccaaacagctgaaccgccacaaaagcaccatcagccgcgaaatcagacggcaccgcacccaagggcagcaatacagcgccgaaaaagcccagcggcaaagccagactatcaaacagcgtaagcgacaaccctataagctcgattcgcagctgattcagcacatcgacacccttatccgccgcaaactcagtcccgaacaagtatgcgcctacctgtgcaaacaccaccagatcacgctccaccacagcaccatttaccgctaccttcgccaagacaaaagcaacggcagcacgttgtggcaacatctcagaatatgcagcaaaccctaccgcaaacgctacggcagcacatggaccagaggcaaagtacccaaccgtgtcggcatagaaaaccgacccgctatcgtcgaccagaaatcccgtatcggcgattgggaagccgacaccattgtcggcaaaggacagaaaagcgcattattgaccttggtcgaacgcgttacccgctacaccatcatctgcaaattggatagcctcaaagccgaagacactgcccgggcagctgttagggcattaaaggcacataaagacagggtgcacaccatcaccatggataacggcaaagagttctaccaacacaccaaaataaccaaagcattgaaagcggagacttatttttgtcgcccttatcattcttgggagaaagggctgaatgagaacaccaacggactcatccggcaatacttccccaaacaaaccgatttccgtaacatcagtgatcgggagatacgcagggttcaagatgagttgaaccaccgaccaagaaaaacacttggctacgaaacgccaagtgttttattcttgaatctgttccaaccactaatacactag

SEQ ID NO: 63468 - DNA, 198 bp, Neisseria meningitidis; identical to SEQ ID NO: 36305

SEQ ID NO: 63469 - DNA, 1056 bp, Neisseria meningitidis
atgccgtctgaaacacgcctgccgaactttatccgcgtcttgatatttgccctgggtttcatcttcctgaacgcctgttcggaacaaaccgcgcaaaccgttaccctgcaaggcgaaacgatgggcacgacctataccgtcaaatacctttcaaataatcgggacaaactcccctcacctgccgaaatacaaaagcgcatcgatgacgcgcttaaagaagtcaaccggcagatgtccacctatcagcccgactccgaaatcagccggttcaaccaacacacagccggcaagcccctccgcatttcaagcgacttcgcatacgttactgccgaagccgtccgcctaaaccgcctgacacacggcgcgctggacgtaaccgtcggccctttggtcaacctttggggattcggccccgacaaatccgttacccgtgaaccgtcgccggaacaaatcaaacaggcggcatcttatacgggcatagacaaaatcattttgaaacaaggcaaagattacgcttccttgagcaaaacccaccccaaggcctatttggatttatcttcgattgccaaaggcttcggcgttgataaagttgcgggcgaactggaaaaatacggcattcaaaattatctggtcgaaatcggcggcgagttgcacggcaaaggcaaaaacgcgcgcggcgaaccgtggcgcatcggtatcgagcagcccaatatcgtccaaggcggcaatacgcagattatcgtcccgctgaacaaccgttcgcttgccacttccggcgattaccgtattttccacgtcgataaaaacggcaaacgcctctcccatatcatcaacccgaacaacaaacgacccatcagccacaacctcgcctccatcagcgtggtcgcagacagtgcgatgacggctgacggcttgtccacaggattattcgtattgggcgaaaccgaagccttaaagctggcagagcgcgaaaaactcgctgttttcctgattgtcagggataaaggcggctaccgcaccgccatgtcttccgaatttgaaaaactgctccgctaa

SEQ ID NO: 63470 - DNA, 549 bp, Neisseria meningitidis; identical to SEQ ID NO: 37155

SEQ ID NO: 63471 - DNA, 180 bp, Neisseria meningitidis
atgccgtctgaacgcacgttttgccgttcagacggcattttcatttcctttttccgcctgccgccccttgaaaatcccttacgcgccgccctgtttgaaacaaagcaaacgcccgccgcgaaccggacaatcttgatacgcagccaaagcaagtccggcggtaagttgttaaacatataa

SEQ ID NO: 63472 - DNA, 312 bp, Neisseria meningitidis
atgaaatacaaaagcgaggcattagccgccattcatgaaatgatggaagggtcttacaacatcggcgcaatcgacaaaaagactatgcgcggctttgacaagtcctgcctgaccgaaatcaaaccgttgagcggcggagatatcaaggcaatcagggagaaggaggcactatcgcaagccgctttcgccatctatctcaacgtgggaaaaaatcacgtttcggcttgggagcggggcgttaaaaagccgagcggcgcggcgttgaagctgctgaccatcgtcaaaaacaagggtatcgaagccattgcgtag

SEQ ID NO: 63473 - DNA, 249 bp, Neisseria meningitidis; identical to SEQ ID NO: 49651

SEQ ID NO: 63474 - DNA, 2277 bp, Neisseria meningitidis
atgacaacattacatttctcaggcttcccgcgtgtcggcgccttccgcgaattgaaattcgcccaagaaaaatactggcgcaaagaaatcagcgagcaagaattgctggctgttgctaaagacttgcgcgagaaaaactggaaacaccaagctgctgccaacgccgattacgttgccgcaggcgatttcactttctacgaccacatcctcgacctgcaagttgccaccggtgccatccctgcccgtttcggcttcgacagccaaaacctgtctttggaacaattcttccaactggctcgtggtaacaaagaccaattcgccatcgaaatgaccaaatggttcgacaccaactatcactacttggtgcctgaattccacgccgataccgaattcaaagcgaacgccaaacactacgtccaacaactgcaagaagcccaagccctcggtctgaaagccaaaccgaccgttgtaggtccgttgactttcctgtgggtgggtaaagaaaaaggcgccgtcgaattcgaccgtctgagcctgttgcctaaactgttgcctgtttacgttgaaatcctgactgctttggttgaagccggtgccgagtggattcaaatcgacgagcctgctttgactgtcgatctgcctaaagaatgggtagaagcctacaaagacgtttacgctactttgagcaaagtaagtgccaaaatcctgctgagcacttacttcggttctgttgccgaacacgccgcattgttgaaatccctgcctgttgacggcctgcacatcgacttggtacgcgctcccgagcaactggacgcatttgccgactacgacaaagttctgtctgcaggcatcatcgacggccgcaacatctggcgcgccaacctgaacaaagttttggaaactgttgagcctctgcaagccaaactgggcgaccgtttgtggatttccagctcttgctctctgctgcacactccatttgacttgtcagttgaagaaaaactgaaagccaacaaaccggacctgtactcttggttggcatttaccctgcaaaaaacccaagaattgcgcgttctgaaagccgcattgaacgaaggtcgcgattccgttgccgaagaactggccgccagccaagctgctgccgattcacgcgccaacagcagcgaaatccaccgtgcagacgttgccaaacgcctggccgatttgcctgccaacgcagaccaacgcaaatctccatttgccgaccgtatcaaagcgcaacaagcatggttgaacctgcctctgctgccgacgaccaacatcggttctttcccgcaaactaccgaaatccgccaagcacgcgcagccttcaaaaaaggcgaactgtctgccgccgattacgaagccgcgatgaaaaaagaaatcgccttggtggttgaagaacaagaaaaactggatttggacgtactggtacacggcgaagccgagcgtaacgacatggtcgaatacttcggcgaattgttgagcggttttgcattcacccaatacggctgggtacaaagctacggctcacgttgtgttaaaccaccgattatcttcggtgacgtaagccgtcctgaagccatgactgtcgcctggtctacttacgcacaaagcctgaccaaacgcccgatgaaaggtatgttgaccggccctgtaaccattctgcaatggtcttttgtccgcaacgatattcctcgctctaccgtgtgcaaacaaatcgcactggctctgaacgacgaagtattggatctggaaaaagcaggcatcaaagtcatccaaattgacgaacctgccatccgcgaaggcttgccgctgaaacgcgccgattgggatgcctacctgaactgggcgggcgaatccttccgcctgtcctctgccggttgcgaagacagcacacaaatccacactcatatgtgctactccgagttcaacgatatcctgcctgcgattgctgcaatggatgcggacgtgatcaccatcgagacttcacgttccgacatggaactcttgaccgcgttcggcgaattcaaatacccgaacgacatcggcccgggggtttacgacatccacagcccgcgcgtaccgacagaagccgaagtggagcacctgttgcgcaaagccatcgaggttgtaccggttgaacgtctgtgggttaacccggactgcggcctgaaaacacgcggctggaaagaaactctggaacaactccaagtgatgatgaacgtaacccacaaattgcgtgccgaattggcgaaataa

SEQ ID NO: 63475 - DNA, 339 bp, Neisseria meningitidis
atgacctaccgtgaattagttgaacgtcagttggctgtgcgccatgccgatttggaattgggcttaagccgcgcacgcgaacaagagccgtttgtcattcatgtttccgatctgttggataaggcaggcattgagtacgcggtacgcatggataaggattttcagacgacgtttcaccttgaatatccaattacgaactataacacctttaaacgtgcggtttggcaaactttgggggcgtattactgtgtttgtaatgatggtgatggactggagattgccagcaatcgccctgacggttacgccgtccgtatcgtattcggcgatgtgcctgtttaa

SEQ ID NO: 63476 - DNA, 855 bp, Neisseria meningitidis
atgaaaatcgttctgattagcgggttgtccggttcgggcaaatccgtcgcactgcgccaaatggaagattcgggttatttctgcgtggacaatttgcctttggaaatgttgcccgcgctggtgtcgtatcatatcgaacgtgcggacgaaaccgaattggcggtcagcgtcgatgtgcgttccggcatagacatcggacaggcgcgggaacagattgcctctctgcgcggactggggcacagggttgaagttttgtttgtcgaggcggaagaaagcgtgttggtccgccggttttccgaaaccaggcgaggccaccctctgagtaatcaggatatgaccttgttggaaagcttaaagaaagaacgggaatggctgttcccgcttaaagaaatcgcctattgtatcgacacttccaagatgaatgcccaacagctccgccatgcagtccggcagtggctgaaggtcgaacgtaccgggctgctggtgattttggagtccttcgggttcaaatacggtgtgccgaacaacgcggattttatgttcgatatgcgcagtctgcccaacccgtattacgatcccgagttgaggccttacaccggtatggacaagcccgtttgggattatttggacggacagccgcttgtgcaggaaatggttgacgacatcgaaaggtttgttacgcattggttaccgcgtttggaggatgaaagcaggagctacgttaccgtcgccatcggttgcacgggaggacagcaccgttcggtctatattgtcgaaaaactcgcccgaaggttgaaagggcgttatgaattgctgatacggcacagacaggcgcaaaacctgtcagaccgctaa

SEQ ID NO: 63477 - DNA, 1344 bp, Neisseria meningitidis
atgtttcacagtgtcaatgtatttacgggcgaaacgctttaccgccgtccagctcaagattatgcggagtttgaacggcggctggcggatttgaaaatgcgcggcggggcgttcgcgcaactgggcgtaaccgaacgtgccgcgcgcctgcaaaaatttgccgaccgtttggaggcggagaaagagcgttttgcggaaatggtgtgtgaggaagtcggacgctgcttgcacgaatgccgtgcggaaatcggcaagtctatcgaactgatacgctattacgcccgccttgcccccgaactgcttgcccacaaaaccatcgcgacgcaggcgagtttgagtcaggtgcgcttcgagcctttgggcgtggtgtttgccgtcatgccttggaactatcccgtctggcaggtattgcgtttcgccgttcccgctatgtgcgcgggcaacgcgtgcgccgtcaaacccgcgcccagcgtggcacgcgtcagtcaggcactgttcgatttggcttcagacggcattcctctggcaggcgtgtggctggatgaggcgggcacgctcaaggcggttgaagataccgatgcaatggcgtttaccggttcaacgcatacggggcgcatccttgcggcacacgcgggcgcaaaccttaagaaaaccgtgttggagctcggcggtagcaacgcctttatcgtgatgcccgatgctgatttggagcgtgccgccgcagaagcctgttattcccgtttccgcgatgcggggcaatcgtgtaacgccgccaagcgcatcatcgtaaccgaagccgcagccgatcgttttatcacgctgtttcttgccgaatgcgctaaattgaaaatgggcgaccccaaacatcccgatactacgcttgcaccgctgcaccgcgaagatttgcgggacagggttcacgggcaggttgaagatgccgtttcaaacggcgcggtatgcctgaccggcggaaaaatcccacaagggcgaggctggttttatcccgcgacggttttagacagggtaaatcctgcctgccgcgtctggagagaagaagtattcgggccggccgccctgattttgcgcgccgaaaacgaagaacatgccatcgcccttgccaatgattcaccgttcggactcggcgcctgcatttataccgccgatactgaccgggcatggcggtttgccgaaaaaatacaggcgggatcggtgtttatcaaccgccataccagcagcgatttgcgcctgcctttcggcggagtcaaagattccggttacgggcgcgaattgtccgaattcgggctgtacgagttcgtcaacgtcaaaacctactggcagaaatga

SEQ ID NO: 63478 - DNA, 738 bp, Neisseria meningitidis
atgattattttggacaaggtttccaagcattaccaaacgcgcgacaagacccgttttgccgccgtcgagccgaccagcctcgaaatccgcgacggcgaaatcttcgggctgatgggttattcgggtgcaggcaaatccaccctgttgcgcctgattaacctgttggaacgccccgacagcggcaaggtcaacgtctgcggacaagagctgaccgcgctcgatgccgccgcattgcgtcaggctcggcagaatatcggcatggtgtttcagcagttcaacctgttgaacaaccgcaccgtcgccggcaacgtcgccttcccattggaaatcgccggatggccgtctgaaaaaatcaaagcgcgcgttgccgaatgtctcgaaatcgtcggactgaccgaacgcgccggccactatcccgcccagctttccggcggacaaaaacagcgcgtcggcatcgcccgcgcgctcgcatccaagccgcaagtcatcctcgccgacgaacccacttccgccctcgaccccgccaccacgcgcagcgtcttggaatgtttggaagacatcaacaaacgattcaacgtaaccatcgtcatcgtaacccacgaaatgagcgttatcagacgactgtgcgaccgcgccgccctgttggataaaggcaaagtcgtcgaaatcgtcgaagtacgcggcaaccaaatccacgcccgatccgacatcgggcgcgaactgattcgggaggactga

SEQ ID NO: 63479 - DNA, 1368 bp, Neisseria meningitidis
atgcctgaccttcataccgaattttcccgactcctgccggcagatgaaattgccgaactttctccgacgcttttaaaagaccagcgcaaccgctttacgtctgcaccagacatcattttgcagccgcgcagcgttgaaagcgtgcaaaccattatgcgtttttgttacaaacaccgtattccggttacgccgcaaggcggcaataccggtttgtgcggcgcggcagtatcggaaaacggcgtattgctgaacctttccaaactcaaccgcatccgcagcatcaatttgtcagacaactgcataaccgtcgaagcaggttccgtactccaaaccgtccaacaggcagccgaagcctcaaacaggctgttcccactcagtctcgccagcgaaggctcctgtcaaatcggcggcaacatcgcctgcaatgccggaggtttgaacgtattgcgttacggcacgatgcgcgacctgattatcggtttggaagtcgtcctccccaacggcgaacgggtttcccatctccatcccctgcataaaaacaccaccggctacgacctgcgccatctgtttatcggcagcgaaggcacactgggcatcatcactgccgccacgctcaagctttttgcccgtccctcggacaaggcaacggcatgggtcggcattcccgacatcgaatccgccgtccgcctgctgaccgaaacccaagctcactttgccgaacgcctatgcagttttgagctgatcggccgttttgccgccgagttgtcttccgaattcagcaaattccccctgccgacacattcagaatggcatattttacttgagttgaccgactcattacccgacagcaatcttgatgatcggcttgtcgaatttctttataaaaaaggatttaccgacagcgtattggcacaaagcgaacaagaacgtatccatatgtgggcattgcgcgaaaacatctccgcatcgcaacgcaaactgggcaccagcatcaaacacgatattgccattcctatcggacgcgttgccgactttgtccgccggtgcgccaaagatttggaacagaattttaaaggcatacaaatcgtctgcttcggacatcttggcgacggcagcctgcactacaatactttcctgcccgaaatcctcagcaatgaagtctatcgttacgaaaacgacatcaacgacgcagtttatcgcaacgttcttgcctgcaatggtacagttgccgccgaacacggcataggtatcatcaaaaaacagtggctggacaaagtacgcacgcctgccgaaatcgccctgatgaaaagcatcaaacaacaccttgatccatataacattatgaatccgggcaaactgcttccgtaa

SEQ ID NO: 63480 - DNA, 342 bp, Neisseria meningitidis; identical to SEQ ID NO: 38375

SEQ ID NO: 63481 - DNA, 597 bp, Neisseria meningitidis; identical to SEQ ID NO: 43118

SEQ ID NO: 63482 - DNA, 9303 bp, Neisseria meningitidis
atgaaccgcaccctgtacaaagttgtatttaacaaacatcgaaactgcatgatagccgttgctgaaaatgccaaacgcgagggcaaaaacacagccgacacccaagctgtaggtattttgccaaatgatattgcgggctttgcgggttttatccattctatctctgttatctcattctccctttcattactgctcggttctgcccttatcctgacttcttcttctgctaatgcccaaggtatcgttgccgacaaatccgcacctgcacagcaacagcctaccatcctgcaaacaggtaacggcataccgcaagtcaatattcaaacccctacttcggcaggggtttctgttaatcaatatacacagtttgatgtgggtaatcgcggggcgattttaaacaacagccgcagcaacacccaaacacagctaggcggttggattcaaggcaatctttggttggcaaggggcgaagcacgtgtggttgtaaaccaaatcaacagcagccattcttcacaaatgaatggctatattgaagtgggcggacgacgtgcagaagtcgttattgccaatccggcagggattgcagtcaatggtggtggttttatcaatgcttcccgtgccactttgacgacaggccaaccgcaatatcaagcaggcgcattaacaggctttcaggttcgttcgggtcatgttgcgatcacgggacaaggtttggatgcccgtgataccgatttcacgcagatattgagccatgcggttaagattgatgggcctgtgtggggtaaagatgtgcgtgtgtcggcagggaaaaataatgtctcagctgatggctctatccggtcttcacactcccctgctacgaatataaattccgacaactcactgtatgccatcgatacaggggcattgggcggtatgtatgccggtaagatcaccctgatcagcactgatcgtgatgcatccgtgcgcaatcaggggcaatggtttgcctcagccggcaatgtggcagtgaatgctgagggtaaactggtcaacacaggcatgattgcagcgacgggagaaaatcatgcggtttcacttcatgcccgcaatgttcataatagcggtacggttgcctcacaggatgatgccaatattcacagccagacgctggacaattcaggtacggtcttatcctcaggtcaattaactgtccgtaatttaggccgtctgaaaaaccataacaacggtacgatccaggctgcccgcttagatatatcaacaggtggtttggataacacaggtaatattactcaaacaggttcacaagcattggatttggtatctgccggcaaattcgataacagtggcaagattggtgtgagcgacgttccacagaccggtttgaatcccaatccatcagtcataccacagattccgagtactgcaacaggttcaggcagcagcactatctcggcatctaagcctggttcaaacaatcccgtttcacctacagcacctgcaaaaaactacgccggaggacgcattcaaacaacaggagcatttgacaatgcaggatcaatcaatgcgggtgggcaaattgacattgccgcccaaaacggtttggaaaattcgggtagtctgaatgcggctaaactacgagtatcaggcgattcatttaacaatacggtaaaaggcaaactccaggcacacgatctggctgttaacactcaaactgctaaaaacagcggtcacttattaactctaaccggcaagattgacaaccgtgaactgcataatgccggagaaattgccgccaacaatctgacactcattcattcgggccgcttgagcaatgataaaaaaggcaatattcgagctgcatatttacagcttgataccgccggtttacataatgcaggtaacattcttgccgatagtggaaccgttaccaccaagaataatcttcacaatacaggaaaagtttctgttgcacgactgaataccgaaggtcagactctagataatacgcacggacatatagaggctgaaacggttaacatccaaagtcagcaactgactaaccaaagcggccatattactgctaccgaacaactgactatcaatagtcgaaatgtagacaaccaaaacggcaaactcctatctgcaaaccaagcacaattagctgtttcagacggcctatacaaccaacatggtgaaattgccaccaaccggcagttgtctattcacgataaaaatcaaaacactttggcgttaaacaatgcggatggcacgattcaatctgccggtaatgtatcgctacaagccaaatcactcgccaacaatggcacattaacagccggtaacaaactggatattgctttgacggacgatttcgtcgtagagcgcgacctcactgcaggcaaacaattaaatctaagcataaaaggccgtctgaaaaatacccataccctacaagcaggccatacgctcaaactcaatgccggcaatatagataaccaagttacaggcaaaattattggcggagaacaaacggacatcacatccgaacagcatgttgacaacaggggcttgatcaacagcgacggtttgacccacatcggtgcaggtcaaaccctgaccaacaccgggacaggcaaaatctatggcaaccatattgccctggacgcgcaaatactgcttaaccgggaagaaacgacggaaggcagtaccaaagcgggggcaatagctgcaaggaaacgtttggatattggagcgaaagagattcataaccaagaaggtgccctactatccagcgaaggtatttttgccgtaggtaatcgactggatgaacaacatcatgcggcaggcatggccgatacctttgttaatggcagtgccggtttggaagtacaaggtgatgcattgatgtccgttcggaatatgcagaatatcaataatcactttaaaacagagacatacttagccaaagcagaaaagcaagttcgtgactacaccgtactggggcaaaatacctactatcaggcaggaaaagacggtttattcgacaactcgcaaggacaaaaagaccaaactactgctacgttccatttaaaaaatggttctcgtattgaggccaaccaatggcatgtccgagactaccacatcgagacttataaagaacgcatcatcgaaaaccggccggcacacattactgtgggcggtaatttgactgcctcaggtcaaaattggctgaacaaagacagccggattgtagtaggcgggcgtattatcactgatgatttaaaccagaaagaaattaccaatcaaagtacaacaggcaaaggtcgcacagatgctgtcggcacacagtgggattcagttacaaaaaaaggatggtacagcggtagaaaaagacaacgccgtactgaaagaaaccatactccttaccatgatacccaactatttacccacgacttcgacacgcctgtatccgtcatccaacagaatgccgcctccccttcctttcaacccgctgcatctgcaatcaaactgattgacggagtatccacggcagccgtcaatggtcagcgcatccataccggtaatgtggtctcgttaaataacgctactgttactctgcctaacagcagcctctataccacccatcctgacaataaaggctggttggttgaaaccgatcctcaatttgcagactaccgccgctggttgggcagcgactacatgttgcaacaactgaaattggacaccaatcatctacacaaacggcttggcgacggctactacgaacaaaaacttgttaatgaacaaatccatcagttaacaggctaccgccgactcgacggctacaggagtgatgaagaacaattcaaagctctgatggacaacggccttactgctgccaaaacattcggtctcaccccaggtatcgccttgagtgcagagcaagttgcccgcttaacttcagatatcgtttggatggaaaatcaaaccgtcaccctgtctgacggttcgactcaaaccgtactggttcctaaagtctatgccctggcgcgcaaaggtgatctcaatacctccggtggcctgattagtgccgaacaagtcttacttaaactgcaaaacggcaacctgactaacagcggtaccattgcggggcgacaggccgtactcatccaggcacggaatattaacagcaacggtaacattcaagccgaccaaatcggcttaaaagctgaaaaaagtatcaatatcgacggcgggcaggtacaagcaggcagactgctgactgcccaagcgcaaaatatcaaccttaacggtacaacccaaacttccggtaatgaacgtaacggcaataccgccatcgatcgtatggccggcattaacgtggtcggaagccatactgaacaagtagataacagagcttcagacggcatcctatccctgcatgccgacaacgatatcaaccttaatgcagccaccgtctctaaccaagttaaaggcggcaccacccaaattaccgctggtaataatctcaacctcgacaccatccgtaccgaacatcgcgaagcctatggtgcattagatgataaaaatcatcgtcatgtccgccaaagtgccgaagtcggcagcagtatccgcacgcaaaacggcgcaatgcttagagccggcaacgacttaaaaatccgtcaaggtgaactggaggccgacgagggtaaaaccgtccttgccgcgggacgtgatgtcaatattagcgaaggacgccaaataaccgaattggacgcctctgtaagcgggaaaagcaaaggcatcctttccagtaccaaaacacacgaccgctaccgcttcagtcatgatgaagcagtcggcagcaacatcggcggcggcaaaatgattgttgcagccgggcaggatatcaatgtacgcggcagcaaccttatttctgataagggcattgttttaaaagcaggtagagacatccagttagaagcagcttctaatcgccattttgatgctgaaacacacgaatataaaaaatcgggtctgagcggaggtttccgcgatggtgttttaagtgtcggatacactaaagcttccacaaaatccaaccaagaccaaactgtcaccaccctgacaaactcccaagtcggtagtaaacaaggtaataccgtagttgttgccgaacgaaccctaaacaccaaagctgcgatactggcatcaggtagcgatatgcacctacagggacgtgatgttgctttaaatgcagggtacacggaaacaaataacaacaacgatatcgaacaaaaacaatcaggtctatccatgggcataaccctgaatcccattgatgctgccaaagctaattacaaacgcaatatgcaaggcagtggctacagcaatagcatagtgggtaagaccttacaacgcgccgatgccggagcaaaggcatccacagcagcttttactcctatcgtcatcaacggtggtcgccaaaaaactacggaaaatcgtcatcaagaagatacgcaagcagtggtaacggccgtttctgcgcaaggcaacctaaacattgttgccgacggcggcagtatcagaagtgaagggacaaaactgactgccgaaggcgatatcctgctttcggcaacagaaagtataacgttggatgttgcccgcaacactgccgatcaacacggttcccgtaagcgcagtggcttcagtatagataaccgagaattgattccggcagggacgtttaatgaccgtggcaatgcacagggcaatctcgataaagccatcggcacacaattgtccgcgggtggtatggccgtattacaagcgcaaaaagcggatatcaacatcttcggtagcagcgttgccgcgcaagatgatactaccttgtctgccggccgtaatatcaatatccgttccagccaaaacaatcaaaccaaatcagaacgtcaaatcaccagcggcatcggcactgcggtaatttccgataccgaacactttgccgggtggatgaaaaaccggaaagatagtaacagtaatcaagttgaacagattaaatcccaagttgggagcttgggcggcaacgtcaatatgcaggctggtggcaactatacccaacagattgccaatgtggtggccgccaaagacatcaatattacagcaaaaagcgttgagattctggctgaccacaatcgcaacaacagccaccaatccgagcgcgacgttaaaattggcacctttgccaaggtatcttctccactgatcgacctggtaaacgctgccgaaggcgcggtgaagagtaaagcagacgaccgcacgcaggcgctgcaaacactggctgcaggtgcacaagcttattctacctacaataccgctaccagcggcggtgcattagccaaagcagaagtaggtttcggctttaaaactgccaacagcagccaagaccaaagccaaaaccatagccaagccaatgttttgaatgccggtggtaacctcaatatccgttctaccgaaggtaacatccaccttcaaaacacccaagcacaagcggctgaaaccctccgcttagattcagccaaagatttgatactcgaatctggccaatcttcccaatccgccgatggaaaaaatagcagccttggtgcatcagtgggtgtaggcgtctccgtaggcgcgcaaaccggtgtttatgcttatggcgaagtgggtggcagcaaaggtaaaaaccattatcttgcccaaacacacgatcacacgaccctccaagctaaaaaaatcgaattggcaagcaaaggtgataccactctcaaaggggctacagccactgccagccgcattgatgccgatgtaaaaggccgtctgaacatcgaaagtgttcaagaccataccgaacaggacaacaaacaaaccggcgccggcgtacgtgtacaagtttccttgggcaccgcctgggaggcttcgggcaacttcaaccaaagcaaagcttcaggcagcagtgacagtgcggctatccaatccggactttttgcaggagaaggcggctaccacatcgaggccgacagcatccacctaaaaggcggagccattacctctaccgcgccgaaggagcaaaatgaattaactgccaaacgtcttacttttgaaaatattcaaaaccaaagcagttatagcgcatccaatgtcagcttgagcggtagttacggtagcgacagcccctctgaaacccccgacaacgccgacttccgtcaaacaaacttaggtaaagcatttgcacgctctgcaggcaaaaatggtaccgacttcaaccctggcttgccgcaatatgaaaaaggcggcgacaacagcaccacctatgctaccctgagcgaaggccgtctgaacatcggcggcaaagagaccactacgcaagaactgggtatcaatagtgacagcagtaacgcacaccgtgctgttgcggctctgcccgatttagccaagattactgaaaagcaacagattatagctaaagcaacttccgatatagtatccgctgcgcacactttcagcaggaaccgccaaaaaaccgctgcagaaaataaagccaaagccgaagcggagttcgaaggccgtctgaaagcccaaaatgacggtagctatgaagcctacgccaaactggacgaaaccgaacggcaaaaaattctaatcaactactcagaaacctatcgcaaagctaatgccgaagcccaaaattggggggtgggaggtaaacacagccgtgcccttaatgccggcatcaccctcacgaccggtctacttggtggtcaaagcgggttacaaagcgcagtcaatgccgctgcgccttatgcctccgaagcaataggaagaacatttggacacggtgaaaacaaaaacgaaaccgcccaagccgtcggacatttccttttaggagcagctattgcccgcgtcaacggtggtaattttgctgccggcggctcggcagcagttgcagctgaaaaggcggcggaacatcttgcccaacagtataacgacggtaaaaccgcaatcgatccgcaaacaggcgagttcaatgccaacctgctgccggaacatatcaaagaggaaatcaaatcaaagagcggggtgattgcatcgctgacgggcgcggccgtgggcggcacgccggtagatgcgcaaaccggaggtgcggtcggacagaatgcggtggaaaacaacctctatctgacatcggaagccttaaagaaggacaagcagacagctcgtaaaatttattccgtcataaaagagcaagtcaagcatgaatgcagttccacaggaagaattaccgaatgtcgtcaaaatataggacgcattatcgaatttacccaagacaaacgctttgacagtaggtttaaggacttaaaaaaagaatccttatattacctaaatcaacatcctgatttagtagcctcttatttgaaggctgaatacgaaaagctggatagggaagacaaaagtatcctgcaccgctacatctcacctggggctgaaatcgtttcgggcagtttgggggttgttctttcaggagtagccggaggcggatcttgtgccgagactttcggcttaggctgtgccgccgctttggttggggtaacgtcttcctacgatcatgtcattactgggacgaaaaacttcggaaaaaaagccagcgagcaacgaccgacgattacggtccagaccttgaagcagttggggttgtcggaacaggctgcggaatatgttcagttttctatagatttgttcagtgtgggtaaatcaggagccagtatgcctaaggctaagcctgtgtctgatgcaaaaccgagatgggaggttgataggaagcttaataaattgacaactcgtgagcaggtggagaaaaatgttcaggaaataaggaacggtaataaaaacagtaactttagccaacatgctcaactagagagggaaattaataaactaaaatctgccgatgaaattaattttgcagatggaatgggaaaatttaccgatagcatgaatgacaaggcttttagtaggcttgtgaaatcagttaaagagaatggcttcacaaatccagttgtggagtacgttgaaataaatggaaaagcatatatcgtaagaggaaataatagggtttttgctgcagaataccttggcaggatacatgaattaaaatttaaaaaagttgactttcctgttcctaatactagttggaaaaatcctactgatgtcttgaatgaatcaggtaatgttaagagacctcgttataggagtaaataa

SEQ ID NO: 63483 - DNA, 1806 bp, Neisseria meningitidis
atgcgctacaaaccccttctgcttgccctgatgctcgttttttccacgcccgccgttgccgcccacgacgcggcacacaaccgttccgccgaagtgaaaaaacagacgaagaacaaaaaagaacagcccgaagcggcggaaggcaaaaaagaaaaaggcaaaaatggcgcagtgaaagataaaaaaacaggcggcaaagaggcggcaaaagagggcaaagagtccaaaaaaaccgccaaaaaccgcaaagaagcagagaaggaggcgacatccaggcagtctgcgcgcaaaggacgcgaaggggataagaaatcgaaggcggaacacaaaaaggcacatggcaagtccgtgtccggatccaaagaaaaaaacgcaaaaacacagcctgaaaacaaacaaggcaaaaaagaggcaaaaggacagggcaatccgcgcaagggcggcaaggcggaaaaagacactgtttctgcaaataaaaaagtccgttccgacaagaacggcaaagcagtgaaacaggacaaaaaatacagggaagagaaaaatgccaaaaccgattccgacgaattgaaagccgccgttgccgctgccaccaatgatgtcgaaaacaaaaaagccctgctcaaacaaagcgaaggaatgctgcttcatgtcagcaattccctcaaacagcttcaggaagagcgtatccgccaagagcgtatccgccaagagcgtatccgtcaggcgcgcggcaaccttgcttccgtcaaccgcaaacagcgcgaggcttgggacaagttccaaaaactcaataccgagctgaaccgtttgaaaacggaagtcgccgctacgaaagcgcagatttcccgtttcgtatcggggaactataaaaacagccagccgaatgcggttgccctgttcctgaaaaacgccgaaccgggtcagaaaaaccgctttttgcgttatacgcgttatgtaaacgcctccaatcgggaagttgtcaaggatttggaaaaacagcagaaggctttggcggtacaagagcagaaaatcaacaatgagcttgcccgtttgaagaaaattcaggcaaacgtgcaatctctgctgaaaaaacagggtgtaaccgatgcggcggaacagacggaaagccgcagacagaatgccaaaatcgccaaagatgcccgaaaactgctggaacagaaagggaacgagcagcagctgaacaagctcttgagcaatttggagaagaaaaaggccgaacaccgcattcaggatgcggaagcaaaaagaaaattggctgaagccagactggcggcagccgaaaaagccagaaaagaagcggcgcagcagaaggctgaagcacgacgtgcggaaatgtccaacctgaccgccgaagacaggaacatccaagcgccttcggttatgggtatcggcagtgccgacggtttcagccgcatgcaaggacgtttgaaaaaaccggttgacggtgtgccgaccggacttttcgggcagaaccggagcggcggcgatgtttggaaaggcgtgttctattccactgcaccggcaacggttgaaagcattgcgccgggaacggtaagctatgcggacgagttggacggctacggcaaagtggtcgtggtcgatcacggcgagaactacatcagcatctatgccggtttgagcgaaatttccgtcggcaagggttatatggtcgcggcaggaagcaaaatcggctcgagcgggtcgctgccggacggggaagaggggctttacctgcaaatacgttatcaaggtcaggtattgaacccttcgagctggatacgttga

SEQ ID NO: 63484 - DNA, 1746 bp, Neisseria meningitidis
atggaacggcagacagatgaatttgcccaagcggcggcaagggcggcaatctggtttttggcacgctatgcgggttcaggcagcgaagtgcttgcaaactgcaccgaacgcctgtttcaggcattgcaaaacggtcattcgtttatccgtttgagcggtggcgaggctgacgcgctgtcggcactcgcacccgtggtcggaacatccgccgcgcctttgattttggaaggcagaaggctgtttttgggcaggatgtggcagttggaatacgatttggctgccgagataaaacgcttggcggcagccgacacgtccgcccccgacgcggcaggcgcgaggcaaaacctcgcaaaatggtttcaaggcacgggcagcgaagggcagcgcgatgccgccgccttggcactgttgcagtcttttatggtaattaccggcgggccgggaacgggcaaaacgacaacggttgccaaactgctggcactgatttgcggtgaagacgaaaatcttcccaacatcgcgcttgccgcccctacgggtaaggctgccgcgcatatggcgcgcgcgctgcaccgtgcaatcaacggttttgacgcgccggaggccgtccgccgccatttgctcaaactggaagggcaaaccgtccaccgactgctgaagctgcgcccgcccaaaatgcaggcggcgttcaaccctgtttacccgctgccgtttgacgtattggttatcgatgaagcctctatgctggataccgcattgatgctgcaacttttaaaagcggtcaaaaccggcgcgcgcgtgattctgctgggggatgaaaaccagctcccgtccgtcggaatcggggccgtgctgtccgtcttgtcgcaaaaaaccgttttggacggagaaacgcaccaaaggctggccggcttccttccggaacacggtttcagcgtcagcgcaaatccgcccgtgttggcgcaaaacaccgcccatttgtcgttcagccaccgcttcggcgacaacagcggcatcggctgccttgcccgtgccgccgtatcgggcgatgagggggcgtgggcattgtttgaccggtttccggacgaactggaacattcggaatgcagtccgaacgctcgagtcgaaaggttgtaccgggcacacaaagcctattggcaggcggtaaaagacggcaatatcgaagccgcatacgtgggcatctcggatatcgtggttctggcagcttggcggcaggatgcggaagacttcaacgaagcctattgcagccatgtacgccgcaaaatgaacataccggaacatcaggcctatttcgccggagaaccgattatgatcagacagaacgactacgcgcttgaactgttcaacggcgacatcggactgattatggaagatgtcggacggcagggcagccttgccgcctattttgccgatgcggacggatttaaaaaggtagcggtaagctgcctgcccgaatttgaacccgcattcgccatgaccgtccacaaaagccaaggttcggaatatcgggaagtctggctgctgccgccttccgccgcaccttcggacgaaggggacgatgcattgtccggattgagtaaggagctgttatataccgccattacccgcgcgagagagaagttcgtattcttcggcggggaagaagccttccggcaagctgccgccaccgtcaaagcgcgtcagacggcattgggcagtatgcttgggcggatattttcacaaggataa

SEQ ID NO: 63485 - DNA, 759 bp, Neisseria meningitidis
atgaaaaaagtcagcgtattgattgttgctagaaatgaagcaaaccacattcgggaatgtattgaaagttgccgtttcgataaagaagttatcgttattgacgaccacagcaccgacaatactgccgaaattgccgagagtttgggtgcaaaagtcttcagacggcatttgaacggggatttcggagcgcaaaaaacatttgccatcgaacaggcaggcggagaatgggttttcctgattgatgcagacgaacgctgcacgccggaactatctgatgaaatctcaaaaattgtccaaaccggcgattatgccgcctattttgtcgaacgccgcaaccttttccccaaccatcccgccacacacggcgcgatgcgtcccgacagcgtatgccgtctgatgccgaaaaaagacagttcggtgcaaggcaaagtacacgaaaccgtacaaaccccctaccccaaacgccgtctgaagcattttatgtaccattacacgtacgacaactgggaacaatatttcaacaagttcaacaaatatacttccatttcagccgaaaaataccgagagcagggaaagcccgtgcgtttcgttagggacattatcctccgcccgatttgggggtttttcaaaatttatatcctgaacaaagggtttcttgatggaaaaatgggttggattatgtccgtcaaccacagctattacacgatgattaaatatgtcaaactatattatctgtacaaatccggcggaaaattttaa

SEQ ID NO: 63486 - DNA, 864 bp, Neisseria meningitidis
atgaataacgctttcgcattacccgccatccaaagcggcaacggcagcctcgaacaatacatccacaccgtcaacagcatcccgatgctgtcccaggaagaagaaacccgcctcgccgaacgccggataaagggcgacctcaacgccgccaaacaactcatcctgtcccacctgcgcgtcgtcgtttccatcgcgcgcggctatgacggctacgggctgaatcaggcagacctgattcaggaaggcaatatcggactgatgaaggcggtcaaacgctacgagcccggtagaggtgcacgcctgttttcatttgccgtgcattggattaaagcggaaattcacgaattcatcctgaggaactggcgccttgtccgcgttgccaccaccaaaccgcaacgcaagctgtttttcaatttacgcagtatgcgtaaaaacctcaacgccctgtctcccaaagaggcacaagacatcgccgacgatttgggtgtcaaactttccgaagttctggaaatggaacagcgcatgacgggacacgacatcgccatcatggcagacaacagcgacgacgaggacagtttcgcccccatcgactggcttgccgaccacgattccgaaccgagccgacaactatcgaaacaggcgcattacgccctgcaaacagaaggtttacaaaacgctttggcgcaactggatgacaggagccgccgtattgtggaaagccgctggcttcaagacgacggcgggctgacgctgcaccagcttgctgcagaatacggcgtctctgccgagcgcatccgccagattgaagcaaaagccatgcagaaactgcgtggtttcctgaccgaagaagccgaagcggtttga

SEQ ID NO: 63487 - DNA, 1104 bp, Neisseria meningitidis; identical to SEQ ID NO: 54868

SEQ ID NO: 63488 - DNA, 546 bp, Neisseria meningitidis
atgggcaaaaccgtaaccttaaccgctggacacagcaacaccgacccgggtgcggtcaacggcagcgaccgtgaggcggacttggcgcaggatatgcgcaatatcgtggctgctattttgcgcgatgactacggtttgactgttaaaaccgacggcacgggcaaaggcaatatgccgctgcgcgaagcggtcaagctgattcgcggctcggatgtggcgattgagtttcacaccaacgctgccgtcagcaaagcggcgacaggcatcgaagccttgagtaccgttaaaaacaaacgctggtgtcaggtgttgagcaaagccgttgccaagaaaaccggctggaaactgcgcggcgaagacggctttaaacccgacaatgcgggccagcattcgcgcctggcttatgcacaagccggcggcattgtgtttgagccttttttcatcagcaacgacactgatttggccttgtttaagacgactaaatggggcatctgccgcgcgattgcggacgcgattgcgatggaattgggggcggcaagagtatga

SEQ ID NO: 63489 - DNA, 1020 bp, Neisseria meningitidis
atggatgctggtatttatctcgaagaaaccgccccgcgcgccctgattgaacacaacaatattttggataattcggtcggcgtctatctgcatggttctgccgaagcgatggtacgcgagaataaaatcgtcggcgatgcgactttgcgcgtgaacgagcgcggcaacggcgttaccgtttggaacgcgcccggcgcgcaggtcgtcggcaacgacatttccaaagggcgggatggcattttttccaacaccagcacgcacaacacctataaaaacaaccgcttcagcgatttgcgtttcgccgtccactatatgtacaccaacgacagcgaagtcagcggcaatatttccgtgggcaacaatatgggctatgtgctgatgttttccgagcggctcaaagtgtttgacaatatcgccgtcggcagccgcgatcagggcattatgctcaactatgtcaactattccgatattcacgacaacattatcaacaaggcgggcaagtgcgtttttgcctacaatgccaactacgataaactgtccgccaatcattttgaaaactgccaaatcggcatacactttaccgccgccatcgaaggcacgtccctgcatgacaattcctttatcaacaacgaaagccaggtcaaatacgtcagcacgcgctttctcgactggagcgagggcggacacggcaactattggagcgacaacagcgcgttcgatttgaacggcgacggcttcggagacagcgcgtaccgtcccaacggcatcatcgaccaaatcatctggcgcgcacccgtatcgcgcctcttgatgaacagtcccgcaatcagcatcgtcaaatgggcgcaggcgcagtttcccgccgttttgcctggcggcgtggtggacagcaaaccgctgatgaagccttatgcccccaaaattcaaacccgttatcaggcgatgaaggacgggctactcaaagaagtcgaaacgcggcagtcggaatggggcagggcggaaaacggttctttgaactag

SEQ ID NO: 63490 - DNA, 594 bp, Neisseria meningitidis
atggccgacggtatgggcaatctgattggctgggaaaaaacggggcttgttgtcggtaagcagtggataaccgcaaaagacgacaaggtgtccgatgtctgcaatgccaacggcgagatgggcgtaatcgggctttacgagcctttctcacacggcgcattgacgatacccggtcatccgaactgccgatgcgaggttgtttccgtatcgggtggcgaattgggggaatttgccgaaaaaaaggagcttcgtaaagcggctatgcagtatgcgcgggataactttatcggcaaaagctatgtcaatgaaaacagcgggcatgaactgaaggtaacttggcaaggtgtgaaacacgctacgtcaaaggcaaatcaggcggaattatccatcatgacaaaacttgatgacttattgcgctacgcaaaatatgagggttcttattcggataggaaaggtcatcctaatattattgcagcacataagtatcgtgccgttgccaaggttgggaatgagtctttaaatatcggggtgattgtaagggaatttccagacggacataaacattacgaccatttcatcttgaaggatgagtaa

SEQ ID NO: 63491 - DNA, 777 bp, Neisseria meningitidis; identical to SEQ ID NO: 55779

SEQ ID NO: 63492 - DNA, 1557 bp, Neisseria meningitidis
atggatttcagttggttggcagaaccgcatacctggataggttttgccacgcttttggtgttggaagtcgtattggggatagacaatcttgtctttgtggcgattttggcaaacaaggtccagcccgcacggcgcgaccgcgcacggattatcgggctggggctggcagtcgtcatccgcatcattatgcttgcttttatggcgcacatcatcacgctgaccgagccgctgttccaaatcggcggcctcgccgtttccggcaaggacatgattatgctcgcgggcggtattttcctgctttacaaagccaccaccgaactgcacgaacgcctcgaagggcacaaccggtttaccgttgccgacagccagaaaaaacacgcgccgttttggggcgtggtcgcgcaaatcctgatactggatgctgtgttttccatcgattcggtcatcaccgccgtagcgatggtcgatcacatcgttgtggcgatgggcgcggtcgtcgtcgcgatggcggtgatgatttccgccagcaaactcttgaccgaatttgtagacaggcatcccaccgtcgtgatgctctgccttggttttttgttgatgatcggtttcagcctgattgccgaagccttccatttccacattcccaaaggctacctctacgccgccatcggcttctcgattttaatcgaattgtttaaccagatttcgcagcgcaacagccgcaaaaacgactacatcggcagctcgtggcgcaagcgcaccgccgaaaacgtcttgggtatgatgggtatacgcgaaagcgtgcttgccgacgcgggcggcgaatccggggacgacgcgcattttgaagaaaacgaaaaatcgatgatacgcagcgtgctgacgcttgccgaacgcccgattatgggggtgatgatcccacgccgcgacatcgaacggctggacatttcccaaagccgcgaagaacagtgtgcccaactgcaaaacacgccttacagccgcctgctcgttgtcggtaaggcgggcgtggacgaacctttgggctacatcaacaaaaaagacctgctgtcccaactgctggaaacaggcggtctcgacattcagacggcattgcgccagccgctcgtcctgcccgacagcaccaccgcgctgggcgcaatcgaactcttccgccaaagcagcgcggattatgctttggtggtggacgagttcggcgcggtattgggcatggtaaccatgaaagacctgctcgaaaccatcgcaggcgagttccccgaagaatttgagcgcgaagaagaaccagccgttcaggggaatcccgatgaaagcctgacggtggaaggcgcgttggaatatgtggaactcgcaccgcaactcaacctgccgcagcaggaggaagatgccgatttccatacggttgccgggctgattatggaagaattgcaaaccatccccgatgtcggcgattttgccgatttccacggctggcggtttgaagtggtcgaaaaagaagggcagcgcatcgagcgggtcaaaatcaccaaattgcccgaagaataa

SEQ ID NO: 63493 - DNA, 270 bp, Neisseria meningitidis; identical to SEQ ID NO: 36672

SEQ ID NO: 63494 - DNA, 1188 bp, Neisseria meningitidis
atgactgaacactataaaacccttccggaacacgagctgctgattcagaagtctttgatcagcaatctgaatctttgggattgggtatttgccgtgctggtttttgcggctacggttttcgtacagacccgttccggtatgcatatggacatttacgaaacggtcatgttgtgggcaagtgccggtattgccgtgtttttgggttggtttttcaaaccgatgcgctggtttgttcctttaagcgtattgcttgcctatgccgccgtcggtttgtatggcggcgacatcaaatcggcagagattttcctgttgcggtatttcctcagcagccagtcggcgattatgtggcagtgcgcctttgtcttcttcgccctgttcgcctatatttcgggcgcggttttggcaagcgtaaaaaatgtgccgaccaacacgctgttgggtatgggaaccgtgtttgcatgggtgtctgccgtagcaggctttaccggtctgctggtacgttggcacgaaagctatctgctccgtcccgatgcggggcatattccggtttccaacctgtatgaagtgttcatcctgtttttggtgattaccgcgctgatgtatctttattatgaaggtaagttcgccatacagaaattgggcggcttcgtgttcggctttatggcggtcgtggttggatttgtcttgtggtacagcgtgtcccgcgaggcgcataccatccagccgctgattccggcattgcaatcttggtggatgaaaatccacgttccggcaaactttatcggttacggcgcgttttgcatttccgcgatgctcggtattgccgaactggtttccctgcgtgcggaaggaaaaggcgggaaatcgtggctgccgcaatccgtgttgattgaggaagttatgtataaggcgattgccgtcggctttctgttctttaccattgccaccattttgggtgcgctgtgggcggcggatgcttggggacgctattggagttgggacccgaaagagacgtgggcgttcatcgtctggctcaattacgccgtttggctgcacttgcggctggttgccggttggcgcggcaaagtgctggcgtggtgggcgattatcggtttgttcgtaaccgcattcgcctttatcggcgtgaatatgtttttgagcgggctgcattcttacggaacgctttga

SEQ ID NO: 63495 - DNA, 546 bp, Neisseria meningitidis; identical to SEQ ID NO: 37730

SEQ ID NO: 63496 - DNA, 435 bp, Neisseria meningitidis
gtgccactgcctgctccctgccgttttgccaaacctgccgcctcttttttaagtatggctttgctttcctgccagctttcccacgccgccacggcttatatccccctgaacgattttcaaccgaactgcgacatacgccggctcggactgacacagggtcagcacaatgaactgcgtaaaatccgcgccgccttcaaaatggcgggcgacagggcgcgtttgaaggttatgcattccgaacacagccgccgccggtctgtcgtcgaaatcatttcttcggatgtttttaatcggaacgaggcgcgcgattatgtcgaaagccgctatttgtccggtatggattttgcggtggacgaattggaaatccaacaccgcttcttccatatcctcacaccgcaacagcagcaaatgtggctttcttcctgcctcaaataa

SEQ ID NO: 63497 - DNA, 483 bp, Neisseria meningitidis; identical to SEQ ID NO: 36360

SEQ ID NO: 63498 - DNA, 750 bp, Neisseria meningitidis
atgccatccgttgaactgctgttggtgattgtcggactgccacgcggcaccttctattaccaattggccgtccaatcggcagaagacaaatatgccgatttgaaacggcatatccatgatatttatcgacgacataagggaagatacggctaccggaggattgcggcagccatccgtcacgcaggaacaccggtcaatcaaaagaaagtcagccgtctgatggcgaagacggggctgaaggcagtgatacggcggcgcaaataccgctcgttcaaaggagaagtcggcaaaattgcgccgaatatcctgcgacgctgtttccatgcagaaaagccgaatgagaaatgggtaacggacgttaccgagttcaatgtaggcggagaaaagatatacctttctccgattatggatttgtttaacggggaaatcgtcagttaccgtattcaaattcgcccgactttcgatttggccggcgagatactgaaaggtgcgccggagaaaccgggatcgtctgaaaagccgatactgcattcggatcaaggttggcaatatcagatgtttttttatagtggattaaatttaaatcaggacaaggcgatgaagccgcagacagtacaaatagtacggcaaggcgaggcaacgccgtactggtttaaatttaatccactatacaacaacgatagaatcaagttgaaattaaaagggctgagccttgttcagtacagaattcagtccctgaaagccgcttga

SEQ ID NO: 63499 - DNA, 384 bp, Neisseria meningitidis
atgaactttgctttatccgtcatcacatttaccctcgcctctttcctgcccgtcccgcctgccggagccgccgtctttacttggaaggacggcggcggcaacagctattcggatgtaccgaaacagcttcatcccgaccaaagccaaatcttaaacctgcggacgcgccaaaccaaaccggcggtcaaacccgcccaagccgacgcagggaagcgcacagacggcgcggcacaggaaaacaatcccgacactgccgagaaaaaccggcagcttgaggaagaaaagaattgccgaaaccgaacggcagaacaaagaagaaaactgccggatttcaaaaatgaacctgaaggcggtgggaaattcaaatgcaaaaaacaaggatga

SEQ ID NO: 63500 - DNA, 591 bp, Neisseria meningitidis
atgggtttggaactgcctttgattttgggtacgagttcggttttccgccgcgaacagatggaaaggctcggcattgcctttcaggcggcgtcccccgattttgacgaaacgccgatgttgggggaatccgcccctcagacggcattgcgccttgccgagggtaaggcgcggtcgttggccgggcgtttcccagaggcgttgattgtcggtgcggaccaggtggcgtggtgcgacggcaggcagtggggcaagccgatgaaccttgctaatgcgcacaagatgttgatgcatttgagcggcagggagattgagttttacagcgcggtcgttctgctaaatacggttacgggcaggatgcagcggcatatcgataagacggtggtcgtgatgaggaagttggacgagctacacatcctccgctatttggagcgcgagcctgatgcggtttattgctcgtgtgcgttgaagagcgaggctttgggtgcattgttgatcgaaaggattgagagtaccgatccgaatgctttaatcggtttgccggttttccgtctggttgattttttgaaaaatgagggcgtggaggttctgtaa

SEQ ID NO: 63501 - DNA, 1638 bp, Neisseria meningitidis
atggattttaaaagactcacggcgtttttcgccatcgcactggtgattatgatcggatgggaaaagatgttccccactccgaagcccgtccccgcgccccaacagacggcacaacaacaggccgtaaccgcttccgccgaagccgcgctcgcgcccgcaacgccgattaccgtaacgaccgacacggttcaagccgtcattgatgaaaaaagcggcgacctgcgccggctgaccctgctcaaatacaaagcaaccggcgacgaaaataaaccgttcatcctgtttggcgacggcaaagaatacacctacgtcgcccaatccgaacttttggacgcgcagggcaacaacattctaaaaggcatcggctttagcgcaccgaaaaaacagtacagcttggaaggcgacaaagttgaagtccgcctgagcgcgcctgaaacacgcggtctgaaaatcgacaaagtttatactttcaccaaaggcagctatctggtcaacgtccgcttcgacatcgccaacggcagcggtcaaaccgccaacctgagcgcggactaccgcatcgtccgcgaccacagcgaacccgagggtcaaggctactttacccactcttacgtcggccctgttgtttatacccctgaaggcaacttccaaaaagtcagcttctccgacttggacgacgatgccaaatccggcaaatccgaggccgaatacatccgcaaaaccccgaccggctggctcggcatgattgaacaccacttcatgtccacctggatcctccaacccaaaggcggacaaagcgtttgctccgctggcgactgccgtatcgacatcaaacgccgcaacgacaagctgtacagcgcaagcgtcagcgttccccttgccgccatcccggccggcgcgaaagccgaaaccgccgtcaacctctacgccggcccgcagaccacatccgtcatcgcaaacatcgccgacaacctgcaactggccaaagactacggcaaagtacactggttcgcctcccccctcttttggcttttgaaccaactgcacaacatcatcggcaactggggctgggcgattatcgttttaaccatcatcgtcaaagccgtactgtatccattgaccaacgcctcttaccgctctatggcgaaaatgcgtgccgccgcacccaaactgcaagccatcaaagagaaatacggcgacgaccgtatggcgcaacaacaggcgatgatgcagctttacacagacgagaaaatcaacccgctgggcggctgcctgcctatgctgttgcaaatccccgtcttcatcggattgtattgggcattgttcgcctccgtagaattgcgccaggcaccttggctgggttggattaccgacctcagccgcgccgacccctactacatcctgcccatcattatggcggcaacgatggtcgcccaaacttatctgaacccgccgccgaccgacccgatgcaggcgaaaatgatgaaaatcatgcctttgattttctccgtcatgttcttcttcttccctgccggtctggtattgtactgggtggtcaacaatctcttaaccatcgcccagcaatggcacatcaaccgcagcatcgaaaaacaacgcgcccaaggcgaagtcgtttcctaa

SEQ ID NO: 63502 - DNA, 1266 bp, Neisseria meningitidis
atgtctgatgccgttgcaaaagaaaccttcaatccgtttgaaatcgcgcgaaaacaggtcaaaaccgcctgcgaccggctgaaaaccgatccggccgtttatgaaatcctgaagagtccgacccgcgtgttggaagtcaatttccccgtcaaactcgacgacggcacggtcaaaaccttcacgggctaccgttcgcaacacaacaacgccgtcggcccctataaaggcggcgtgcgcttccatcccggtgtgaatctggacgaagtcaaagccctgtcgatttggatgaccatcaaatgctgcgtggccggcattccttacggcggcggcaaaggcggcgttaccttggatccgcgcgattattccgaggcggaactggaacgcatcgcccgcgcttatgcagaagccatttctccgctcatcggcgagaaaatcgacattcccgcccccgatgtgaacaccaacggcaaaattatgtcgtggatggtggatgcttatgaaaacgtggtgaaacattccgcaccgggcgtatttaccggcaaaccggtcgagttcggcggctctttggcgcgtaccgaagccacgggttacggcgtgaacctcgccgccgtccaagccttggaaaaactgggcaaagacgtgaagggtgccacttacgccatccaaggcttcggtaatgtcggttaccacacaggttattacgcgcatcaatccggcgcgaaagttgttgcggtttctactgttgacgttgccatttacaacgaaaacggcttggatatggaagcaatcatcaaagaattccaaaccaaaggtttcatcaccaatgaagccggctacggtaaagaaatcagcaatgccgaacttttggctctggaagtggacgtacttgccccttgcgcactggaaaaccaactgacttctgaaaatgccggtaaagtccgcgcgacaatcgtggtcgaaggcgcgaacggcccgactacgcccgaagccgacgttatcctgcgtcaaaacggcgtattggtcgtgcccgatattttggcgaactgcggcggcgtggtggtatcttattttgaatgggtacaaaatctgcaaggctattattgggagtttgacgaagttcaggaaaaagaaaccgtcgtcctgcgccgtgcgttccgcgatatatggaacttggcgcaagaatacgatgtcgatttgcgaaccgcgtcttacatgatgagtatccgccgtgttgaaaaagcgatgaaactgcgcggttggtattga

SEQ ID NO: 63503 - DNA, 1881 bp, Neisseria meningitidis
atgaatattttttacgaagagtccggccaattcaaagtcgccgccatcgtccaaaaaaacgacgccacctaccaagtcgatacccaacacggtaaacgcaccaaagtgaaggcaaacaatgtctttgccgagtttgacggcgatatggcggcgtttttggaaaacgcgcaggcacaggcggcggacatcgacaccgatttattgtgggaagtatgcggcgaagaagaattttccgccgaggcgattgccgaagaatattacggccatgcgccgaccaaaaccgagctggcggcgaccttgattgcgctgtacgccgcgccgatgtatttctacaaaaaagccaaaggcgtgttcaaagccgcgcccgaagaaactttaaaacaagcacttgccgccatcgaacgcaaaaaacagcaagacgcgcaaatcgacgcttgggcggaagccttgaaacgcggcgagatgccgtctgaaatcgcggcggatttgaaaaccatcctgcacgcgcccgacaagcagtcgctgacctacaaagcctttaccaaagccgccgacgcgctgaaaacctctgcctacgaattggcgaaaaaaacgggcggcattacgtccattccccaatacctgcaagacgggtttgaaatcaaatatttccctaaaggaacaggcttccccgaccttccgcttcctgaaatgcccgacctgcccaaagctgacgttaccgccttttccattgacgacgagtcgaccaccgaagtcgatgatgccttgagcctgaccgacttgggcaatggcatgaaacgcgtcggtatccacatcgccgcgccgtcgcttgccattaagcaaggcgacaaaatggaaaaaaacatcatggaacgcttaagcacggtttatttccccggcggcaaaatcaccatgttgcccgaaaactggattgccgcgttcagccttgatgcaggcgcataccgcccttccatcagtatttatttcgatgtggacggagagttcaacgtcggcgcgccaacctgcaaaatcgaagcggtcaacatcgctgaaaacctgcgcattcaaaccatcgaaccgcatttcaacgccgaagcgggcttggacgaagcgggcgaaatgatgttcgcccaccatcaagacctgatttggttttatcaattcgccatcaccctgcaaaaagcgcgcggcaaatacgaacccgaccgcgcgccgcaatacgattacagcatcgaattggatgaggaaggcaaagtctccgtcgtccgccgcgaacgcggttcgcccatcgatacgctggtcagcgagatgatgattcttgccaacagcacttgggcacaaatgctccatgacaacgacctgcccggcctcttccgcgtccaacccaccggaaaagtacgcatgagcaccaaatccgagccgcatatcggcatgggcgtgcggcattacggctggtttacctcgccgctgcgccgcgccgccgactacatcaaccaaaagcagctgatcagcctgatagacgacactgccgagccgctgtatcaaaacagcgatgccgagcttttcgccgcactgcgcgactttgatgccgcctataccgcctacgccgacttccaacgccaaatggaagcctactggagcctggtttacctgcaacagcaaggcacgagcgagctgacggcgacgattctgaaagaagacctcgtccgcatcgaaggtctgccgctagtaacacgcgcgaccggtattccgtttgacgcgctgcccaaatcacaggcattgttcaaaatcaccgaattggatgccgagaagcagtttgtctcgctcaactacatcaaggcagtcgcacccgcgggtacaacggcaggcaatgccgtctga

SEQ ID NO: 63504 - DNA, 477 bp, Neisseria meningitidis
atgaaaacaaatttcaaacagaaaattatcgaacaggcacgcagcgaaggcttgcaggtaaccgctttgcgcgagcaggtattagatattgtcttgcagcaaagcggcgtgattaaagcctacaacgtcttgtcgcagatgcagcagcaaagcgagggcgtgcttgcaccgcctaccgcctaccgcgcccttgatttttgggcggagcagggcgttttgcacaaagtggcggcggtcaacggctatattttgtgcagccacgcgcagcacgagtgcgacgaccattgccacgaccacgaagaagccgaagcgcaccacagcgcgtttattttggtctgcaccgaatgcggcacggcggacgagcaaaccctcagccacgagtgggcggcactgcgcgcaggcgttgccgaaagcggctttgcgctgaaagaagaacacgttgttttaaccgggatttgtaaaaaatgtcagaaatga

SEQ ID NO: 63505 - DNA, 1074 bp, Neisseria meningitidis; identical to SEQ ID NO: 49658

SEQ ID NO: 63506 - DNA, 495 bp, Neisseria meningitidis; identical to SEQ ID NO: 39710

SEQ ID NO: 63507 - DNA, 1788 bp, Neisseria meningitidis
atgaaacttcctttatcctatttgcctaatattcgctttttgtcttggtgctgcttattggcaggtatcattgctcctgctactttgttggcctcccccaaccctgccgaaatccgtatgcagcaagatattcagcaacgccaacgcgaagagcagttgcgccaaaccatgcagcctgaaagcgatgtgcgtttgcatcaaaaaaacacgggagaaacggttaatcagttgatgggcgatgacagcagccaaccgtgttttgccattaacgaagtggtgttggaaggcgaacaccatgctcggtttcagtttgccctaaaacgtgccttgcgcgaaacgggttttcaggctggcaagtgtctgcatgcgggcaacattaatcaaatcatgtccttagcacaaaatgctttgatcggcaggggatataccacgacccgtatcttggctgcgccacaggatttgaatagtggcaagcttcaattaaccctgataccgagctatctgcgctccatacgaatcgatcggtctaacgatgatcaaacccatgcaggacgtattgcagcattccagaacaaatttcccacccgctcgaacgatctgttgaatctgcgtgatttggaacaaggactggaaaatctcaaacgtctcccgactgcggaagccgatctccaaatcgttcccgtagagggagaaccaaaccaaagtgatgtcgtggtgcaatggcggcaacgtctgctgccctaccgtgtgagtgtggggatggataattcgggtagtgaggcgacaggaaaataccaaggaaatatcactttctctgccgacaatcctttgggactgagtgatatgttctatgtaaattatggacgttcaattggcggtacgcccgatgaggaaagttttgacggccatcgcaaagaaggcggatcaaacaattacgccgtacattattcagcccctttcggtaaatggacatgggcattcaatcacaatggctaccgttaccatcaggcggtttccggattatcggaagtctatgactataatggaaaaagttacaatactgatttcggcttcaaccgcctgttgtatcgtgatgccaaacgcaaaacctatcttggtgtaaaactgtggacgagggaaacaaaaagttacattgatgatgccgaactgactgtacaacggcgtaaaactgcgggttggttggcagaactttcccacaaagaatatatcggccgcagtacggcagattttaagttgaaatataaacgcggcaccggcatgaaagatgctctgcgcgcgcctgaagaagcctttggagaaggcacgtcacgtatgaaaatttggacggcatcggctgatgtaaatactccttttcaaatcggtaaacagctatttgcctatgacacatccgttcatgcacaatggaacaaaaccccgctaacatcgcaagacaaactggctatcggtggacaccacaccgtgcgtggcttcgacggtgaaatgagtttgtctgccgagcggggatggtattggcgcaacgatttgagctggcaatttaaaccaggccatcagctttatcttggggctgatgtaggacatgtttcaggacaatccgccaaatggttattgggccaaactctagccggcacagcaattgggatacgcgggcagataaagcttggcggcaacctgcattacgatatatttaccggccgcgcattgaaaaagcccgaatttttccaatcaaggaaatgggcaagcggttttcaggtaggctatacgttttaa

SEQ ID NO: 63508 - DNA, 1122 bp, Neisseria meningitidis
atgagtaatcaagatttttatgcgacgctgggtgtggcaagaacagctaccgatgatgagattaaaaaagcctaccggaaattggcgatgaaataccatcccgaccgcaatcctgacaataaagaggcggaagagaagtttaaagaagtacaaaaggcgtatgaaactttgtccgacaaggaaaagcgcgctatgtacgaccagtatggtcatgcggcgtttgaaggcggcggacaggggggcttcggagggtttggcggatttggcggtgcgcagggttttgactttggggatattttcagccaaatgtttggaggcggttcggggcgcgcccagcctgattatcagggtgaggacgttcaagtcggtatcgaaatcacgcttgaagaagccgcaaaaggtgtgaagaaacgcatcaatattccgacttatgaagtgtgtgatgtctgtaacggcagtggcgcgaaaccggggacatccccggaaacctgcccgacttgcaaaggttcgggtacggtgcacatccagcaggcgattttccgtatgcagcagacttgtccgacctgccacggtgcgggcaaacacattaaagaaccttgcgtcaaatgccgtggcgcggggcggaataaggcggtcaagacggtggaagtcaatattcccgccggtatcgatgacgggcagcgtatccgtttgagcggcgaaggcggaccgggtatgcacggtgcgcctgctggcgacctgtatgtaaccgtccgcattcgggcgcataagattttccaacgcgacggtctggacttgcattgcgaactgccgatcagttttgccacggctgctttgggcggggagttggaagtgccgaccttggacggaaaggtcaagctcaccgtccccaaagaaacccaaaccggcaggaggatgcgcgtgaagggtaagggtgtcaaatctttacgcagcagcgcgaccggcgatttgtactgccatattgttgtcgaaacgcctgtcaatttgaccgaccgtcaaaaagagcttttggaagaatttgagcggatttctaccggcttggaaaaccaaacaccgcgcaagaaatcgtttttagacaagctgcgcgatttgtttgattga

SEQ ID NO: 63509 - DNA, 1854 bp, Neisseria meningitidis
atgaaccgttatcctttatggaaatatctgctgattgtgttcacgattgcggttgccgcagtgtattcgctgcccaacctattcggcgaaacacccgccgtgcaggtatcgaccaaccgacaagccatcatcatcaacgaacagactcaatccaaagtggatgccgcgctgaaaaacgcaggtattcagaccgacgggatgtttgttgtggacaattcactgaaagtgcgtttcaaagacacagaaacgcagcttaaagcgcgcgacgtcatcgaaaacactttgggcgaagggtatattaccgcgctcaacctgttggcggacagccccgaatggatggcgaaaatcaaagccaatccgatgtttttgggtttggacctgcgcggcggcgtgcatttcaccatgcaggtcgatatgaaagcggcgatgcagaaaacgtttgaacgttattcgggcgacatccgccgcgaactgcgccgcgaaaaaatccgcagcggcacggtgcgtcaggctggaaacagcctgaccgtccctttgcaggatgcaggtgatgtgcaaaaggcactgccgcagttgcgcaagctgtttcctgaagcaacgctgaattcagacggcagcaatatcgtcttgatgctttcggaagaggcggtcaataaagtgcgttccgatgcggtcaaacagaacatcactaccctgcacaaccgtgtgaacgagttgggcgtggctgaacccgtcatccagcagtccggtgccgaccgtatcgtcgtgcagcttccgggcgttcaggatactgccaaggcaaaagacatcatcggccgtaccgcgactttggaattgcgtatggtggaggacgatcctgccaagttgcgcgaggcattggaaggcaacgtgccgagcggttatgagctgctttcaagcggcggagatcgtcccgaaactctgctaatcagcaaacaggtcgagctgacgggcgacaacatcaacgatgcgcaaccgagtttcgaccaaatgggcgcacctgccgtcagtctgagcttggacagcgcgggcggcagcattttcggcgaactgactgccgcaaatgtcggcaaacgcatggcgatggttttgatcgaccaaggaaaatccgaggttgtaaccgcgccggttatccgtactgccattaccggcggacgcgtggaaatttccggaagcatgacgacagccgaagccaatgatacgtctttgctgttgcgtgccggttctcttgccgcaccgatgcagattgtcgaagaacgtaccatcggtccgtctttgggtaaggagaacatcgaaaaaggcttccattcgactttatggggttttgccatcgttgctgcattcatggtggtttactatcgtctgatgggtttcttttctaccattgcattgagtgccaacatactgttcctaatcggtattttgtctgccatgcaggcaacgttgacgttaccgggtatggccgcgctggcgttgactttgggtatggcaatcgactccaacgtcttgattaacgaacgtatccgcgaagaattgcgtgccggcgtgccgccgcagcaggcaatcaatctcggtttccaacacgcatgggcgaccattgtcgattcgaacctgacttcgctgattgccggtatcgcgcttttggtattcggttccggcccggtacgcggttttgcggtcgtacactgtttgggtattctgacttcgatgtattcgtccgtcgtcgtattccgtgcgttggtcaatctgtggtacggacgcagacgcaaattgcagaatatttccattggttcggtgtggaagccgaaagccgaaatggcaggaggcaaggagtaa

SEQ ID NO: 63510 - DNA, 327 bp, Neisseria meningitidis; identical to SEQ ID NO: 45723

SEQ ID NO: 63511 - DNA, 1449 bp, Neisseria meningitidis
atgaatttgcctattcaaaaattcatgatgctgtttgcagcagcaatatcgttgctgcaaatccccattagtcatgcgaacggtttggatgcccgtttgcgcgatgatatgcaggcaaaacactacgaaccgggtggtaaataccatctgttcggtgatggtcgcggcagtgttaaaaatcgggtttacgccgtccaaacatttgatgcaactgcggtcggccccatactgcctattacacacgaacggacaggatttgaaggtgttatcggctatgaaacccatttttcagggcacggacatgaagtacacagtccgttcgataatcatgattcaagaagcacttctgatttcagcggcggtgtagacggcggttttactgtttaccaacttcatcgaacagggtcggaaattcatccggaggatggatatgacggaccgcaaggcagcgattatccgccccccggaggagcaagggatatatacagctattatgtcaaaggaacttcaacaaaaacaaagactaatattgtccctcaagccccattttcagaccgttggctaaaagaaaatgccggtgccgcctctggttttttcagccgtgcggatgaagcaggaaaactgatatgggaaaacgaccccaatcaaaattggtggggtaaccgtatggatgatgttcgcggcatcgtccaaggtgcggttaatccttttttaatgggttttcaaggagtagggattggggcaattacagacagtgcagtaagcccggtcacagatacagccgctcagcagactctacaaggtattaatcatttaggaaatttaagtcccgaagcacaacttgcggccgcaaccgcattacaagacagtgcttttgcggtaaaagacggtatcaactctgccaaacaatgggctgatgcccatccgaatataactgcaacagcccaaactgccctttccgcagcagaggccgcaactacggtttggggcggtaaaaaagtagaacttaacccgaccaaatgggattgggttaaaaataccggctataaaaaacctgctgcccgccatatgcagactgtagatggggagatggcaggagggaatagaccgcctaaatctataacgtccaacagcaaagcagatgcttccacacaaccgtctttacaagcgcaactaattggagaacaaattagtagtgggcatgcttataacaagcatgtcataagacaacaagaatttacggatttaaatatcaattcaccagcagattttgctcggcatattgaaaatattgttagccatccaacaaatatgaaagagttacctcgcggtagaactgcgtattgggatgataaaacagggacaatagttatccgagataaaaattctgacgatggaggtacagcatttagaccaacatcaggtaaaaaatattatgatgatttatag

SEQ ID NO: 63512 - DNA, 285 bp, Neisseria meningitidis
atgttcggcggtcgtctgaaaaacgctccatccattaccgccaaacactttttgaaggaaaatatcatgaaatttattaacacctgccgtaaatacggcgcaaaactggctgttgtaacagctgctcccctggctttggccgcacatgcaaatgcaacgttgcccgatacagcaaaaaacgctttggaagccgcaaaagccgacggtatggaagccggttggattgtagtgggcgttttcgccgcgctttttgtgttttccatcgttaagagagtgatgaagtaa

SEQ ID NO: 63513 - DNA, 2859 bp, Neisseria meningitidis
atgtgcaagcatcgtccccaacattcgcacgacaacgacaccatccgcatacgcggcgcgcgcacgcataatttgaaaaacatcgatttggacattccgcgccacaagctcgtggtcataacaggattgtcgggcagcggcaagtcgtcgctggcgtttgacacgctgtatgccgaagggcagcggcgttatgtcgagagcctttccgcctatgcgcggcagtttttgcagatgatggacaaacccgacgtcgatttgatcgaaggtctgtcgcctgcgatttccatcgagcagaaatccaccagccacaatccgcgttccaccgtcggcacggttacggaaatccacgattacctgcgccttttgtacgcacgcgtcggcacgccgtattgccccgaacacaatctgccgctatccagccaaaccgtatctcagatggtcgatgccgtattaaaactgccggaagacacgcgcgtgatgattcttgcgccggcagttcgtgagcgtaagggcgagtttgtcgacttctttgctgacttgcaggcgcaaggctttgcccgtgtgcgcgtggacggcgaagtttatcagcttgacgaagtgccgaagctggagaaaaacatcaaacacaatatcgacgtggtcatcgaccgcgtgaaagtgaaggcggacatcaagcagcggctggcggaaagttttgaaaccgcactgcgccacggcaacgagcgcgcgctggcgatggagatggacagcggcgaagaacattggttttccgcgcgttttgcctgtcccgtatgttcatacagcctgcccgaattggagccgcgcctcttttcgttcaacaacccgatgggttcctgtccgacttgtgacggcttgggcaacaccaatttcttcgaccccgaaaaagtggtcgcgcatcccgaattgtcgttggcttcgggcgcgattgacggctgggacaagcgcaaccagttctatttccaaatgattcagtcgctggcgcggcattacggtttcgatgtgcaggctgcttgggaaaccctacctgcaaaaatcaaaaaagtcgtgttgcacggctcgggcaaggaagtcattgatttcacctacctatccgaacgcggcaccaccttcaaccgcagccacgccttcgaaggcatcattcccaatctcgaacgccgctaccgcgaaaccgacagcgaaaccgtgcgcgaaaaattgcgcgaataccagaaccaccgcgcctgcccgagctgcggcggtgcacgtttgcgcaaagaagcgcgctacgtttacgtcagcggcgaaccgttgcacgaagtctccgcctggccgctgaccaaaacccaccaattctttgaaacgctggatttggacggcaacaaaaaacaaatcgccgaaaaaatcctcaaagaaatcaccgagcggctcggcttcctgattaacgtcgggctggattacctgaatttaagccgctccgccgaaaccctttccggcggcgaagcccagcgcatccgcctcgccagccaaatcggcagcggcctgaccggcgtaatgtacgttttggacgaaccctccatcggcctgcaccagcgcgacaacgaccgcctgctcgccaccctcaaacgcctgcgcgacttgggcaacagcgtgattgtggtcgaacacgacgaagacgccatccgcgaagccgatttcgtcgtcgatatgggccccggcgcgggcgaacacggcggcaacgtactgattgccgatacccccgaaaacgtcgccaaatgcgaaaactccgttaccggacaatacctcagcggcaaaaaatccattgccgtgccgtctgaacgcacgcccgtcaatcccgaccgaatgctcatcctcaaaggcgcgcgcggcaacaacctcaaaaacgtcaccctcgaattaccgctcggtttgattacctgcatcaccggcgtatccggcagcggcaagtccaccctgattaacgacaccctcgccaaaatcaccgcccgcgaactcaaccgcgcccaagaagaacctgccccatacgacgacatccgcggcctcgaacacctcgacaaagtcatcaacgtcgaccaatcccccatcggtcgcaccccgcgttccaaccccgccacctacaccggcctgttcacccccatccgcgaactcttcgccggcgtacccctctcgcgcgaacgcggctacaacgtcggcagattctccttcaacgtcaaaggcggccgctgcgaatcctgccaaggcgacggcgtcatcaaagtcgaaatgcacttcctgcccgacgtgtacgtcccctgcgaagtctgccacggcaaacgctacaaccgcgaaaccctcgaaatccaatacaaaggcaaaaacatcagccaagtcctcgacatgaccgtcgaagaagcccgcgaatttttcgacgccgtccccaccgtatcgcgcaaactgcaaactctgatggacgtaggcctcggctacatccgcctcggccaatccgccaccaccctctccggcggcgaagcccaacgcgtcaaactcgccttggaactatccaaacgcgacaccggcagaacactctacatcctcgacgaacccaccaccggcctgcacttcgccgacatcgccctgctgctggaagtcataggccgtctgaaaggcaaaggcaactcgattgtgattatcgagcataatcttgacgtgattaaaactgcggattggattgtggatttggggccggaaggcggcgatagcggggggaggattattgcggaaggtagcccagaggaagtggctagcatggccaaaaatagctatactgctcgatatttgaaagatatcttaaataagaattaa

SEQ ID NO: 63514 - DNA, 1419 bp, Neisseria meningitidis
atgaatattcacaccctgctctccaaacaatggacgctgccgccattcctgccgaaacggctgctgctgtccctgctgatactgcttgcccccaatgcggtgttttgggttttggcactgctgaccgccaccgcccgcccgattgtcaatttggactatcttcccgccgcgctgctgatcgccctgccttggcgtttcgtcaaaattgccggcgtattggcgttttggctggcggttttgtttgacgggctgatgatggtgatccagcttttcccttttatggacctcatcggcgccatcaacctcgttcccttcatcctgaccgcccccaccccttatcagataatgaccgggctgttgctgctgtatatgctggcgatgccgtttgtgttgcagaaagccgccgccaaaaccgacttccggcacattgccgtctgcgccgccgttgtggcggcagccggctatttcaccggccatttgagttactacgaccgggggccgatggccaatatcttcggcgcaaacaacttctattacgccaaaagtcaggcgatgctctacaccgtcagccagaatgccgactttattaccgccggcctggtcgatcccgtcttcctccccttgggcaatcaacagcgtgccgccacgcatctgaacgagccgaaatctcaaaaaatcctctttatcgtcgccgaatcttgggggctgccggccaatcccgaacttcaaaacgccacttttgccaaactgctggcgcaaaaagaccgtttttcggtttgggaaagcggcagttttccctttatcggcgcgacggtcgaaggcgaaatgcgcgaactgtgtgcctacggcggtttgcgcgggttcgcactgcgccgcgcgcccgacgaaaaatttgcccgctgcctccccaaccgtttgaaacaagaaggttacgccacctttgcgatgcacggcgcgggcagttcgctttacgaccgcttcagctggtatccgagggcgggctttcaagaaatcaaaaccgccgaaaacctgatcggtaaaaaaacctgcgccattttcggcggcgtgtgcgacagcgagctgttcggcgaagtgtcggcatttttcaaaaaacacagcaaaggattgttttactggatgacgctgaccagccacgccgactatcccgaatccgacattttcaaccacaggctcaaatgcaccgaatacggcctgcccgccgaaaccgacctctgccgcaacttcagcctgcacacccaattcttcgaccaactggcggatttgatccaacgccccgaaatgaaaggcacggaagtcatcatcgtcggcgaccatccgccgcccgtcggcaacctcaatgaaaccttccgctacctcaaacaggggcacgtcgcctggctgcacttcaaaatcaaataa

SEQ ID NO: 63515 - DNA, 999 bp, Neisseria meningitidis
atgagcagacccgtacccgccgtattcggcagcgtttttcacagtcaaatgcccgtcctcgcctaccgcgaaggcaaatggcagccgaccgaatggcaatcttcccaagacctctccctcgcaccgggcgcgcacgccctgcactacggcagcgaatgtttcgagggactgaaagccttccgtcaggcagacggtaaaatcgtactgttccgtccgactgccaatatcgcgcgtatgcggcaaagtgcggacattttgcacctgccccgccccgaaacccaagcctatctcgatgctttggtcgaactggtcaaacgtgccgccgatgaaattcccgacgcgcctgccgccctgtacctgcgcccgaccttaatcggtaccgatcccgtcatcggcaaggcaggctcgccgtccgaaaccgccctgctgtatattttggcttcccccgtcggcgactatttcaaagtcggctcgcccgttaaaatcttggtggaaaccgaacacatccgctgcgccccgcacatgggccgcgtcaaatgcggcggcaactacgcttctgccatgcactgggtgctgaaggcgaaagccgaatacggcgcaaaccaagtgctgttctgcccgaacggcgacgtgcaggaaaccggcgcgtccaactttatcctgattaacggcgatgaaatcattaccaaaccgctgaccgacgaatttttgcacggcgtaacccgcgattccgtactgacggttgccaaagatttgggctataccgtcagcgaacgcaatttcacggttgacgaactcaaagctgcggtggaaaacggtgcggaggcgattctgaccggtacggcagccgtcatctcgcccgttacttccttcgtcatcggcggcaaagaaatcgaagtgaaaagccaagaacgcggctatgccatccgtaaggcgattaccgacatccagtatggtttggcggaagacaaatacggctggctggttgaagtgtgctga

SEQ ID NO: 63516 - DNA, 315 bp, Neisseria meningitidis
atgaaacttatctataccgtcatcaaaatcattatcctgctgctcttcctgctgcttgccgtcattaatacggatgccgttaccttctcctacctgcccggacagaaagtcgatttgccgctgattgtcgtattgttcggcgcatttgtagtcggtattgtttttggaatgtttgccttgttcggacggttgttgtcgttacgtggcgagaacggcaggttgcgtgccgaagtaaagaaaaatgcgcgtttgacggggaaagagctgaccgcaccaccggcgcaaaatgcgcccgaatctgccaaacagccttga

SEQ ID NO: 63517 - DNA, 969 bp, Neisseria meningitidis
atgaaactcaccctcgccattccctcgctcaatttggatgaagacgaaacccgaatacctctctgcctgcccgccttcaacaaaatcctgcaatacggctcgctgcaccgccaaagctgcacggcttcggcattttacgcgcgttatttgtggtgcggcagactggcggaacgcgcggcacaaagcctgaatatgccgtctgaagccgtcgcgctcgccacgcccgtctggcaaaagatggggatgcatcaggcaaatgtgctaacggcggaatatctgaacgtcggtacggatgaagcggaacggctctgccgcgacctgtcggcgttttacggcgacattccatggcgtttcgttcccgtcctgcccgaattatggctggtttcccttccttgcgcgtaccgctggggcgcgaagcccgttttggacttgggcggattgttgggcgcggacgatcagccggacggggaagacgcgttggaatggctgcgcgtccaaaccgaaatccaaatgtggctggcggcgcaccccgtcaaccataaccgcaagaaacgcgggctgcccgagttgaacgggctgtggctttgggacagtctgcacggaagcagtcaaggcggcacgcttttcgccgatacggtttggagccgtttccaccccgaccgccgcgcattgcccgacaacttccgcgcctatgaagaaacggcggcatacctacccgacacgcaccatatcctgtttatggacgatttgcgcctgaccgccctgacaggggacagggagcggtatgcggcaatattgcagcagtgggaagaacgctggttcgcaccgctttacgaagccgtccgcatcggcaaaatcaaacggctggacatcgccacggacggacaacacggcggtacgctgaccttcaaacccgccgacaggtggaaattttggcgcggcgcgaaaacctttgacggaatctggtga

SEQ ID NO: 63518 - DNA, 501 bp, Neisseria meningitidis
atgtcccaatatttcaccctcttccggattgaacccgctttcgatatcgacaccgaaaacttggaacaaacctaccgcgccttggccgcccgtttccatcccgataaattcgcttcagcttccgcctttgagcaaaagcaggcagtgatgatgtcttccaccatcaacgatgcctaccgcaccttgaaaaaccccatcgaccgcgccgcctacctgctgaaaacatcgggcatcgatgccgacgcgccggagcatacctctttcgcccccgaattccttatgcagcaaatggaatggcgcgaaacgctgatggaggcacgggcgggcaaagaccttgaatccttgaaaaatctcgacaacgaaatccgcgacgaacaagaaaaactgttctgcggtctgaaacagtcgtttgcccgacaagattacgacaccgccgcacaacaagtccgccaaggcaggtttctcgacaaactccgcaacgaaatttcctcggcattataa

SEQ ID NO: 63519 - DNA, 612 bp, Neisseria meningitidis; identical to SEQ ID NO: 40039

SEQ ID NO: 63520 - DNA, 801 bp, Neisseria meningitidis
atgagcccatccccctttatcgaaatgaaagacgtcgccttcgcgtatggcgaccgcccgattctgaagaacatcaatttcagcattccgcaaggcaattttgctgccgtaatgggcggttcgggcagcggcaaaaccacgctgatgcgactgattacaggacagattcgtccgcagtcgggcaaagttctgatagaagggcgcgatttggcgggcttttcggctgacgaactctacgaacaccgccgccgtatgggcgtattgttccaacacggcgcgctgtttaccgatttgtctgtattcgacaatatcgcttttccgatgcgcgaactgacgcgcctgccggaagcggtgattcgagatttggttttgttgaaactgaacgcggtcgggctgcgcggcgtggaaaacctgatgccgtccgagttgtccggcgggatgtcgcgccgcgtcgcgcttgcccgcacaatcgcgctcgatcccgaaattatgttgtacgacgagccgtttaccggtctcgattcgatttccttgggcgtgattgcccacttgatcagccgcgtcaacaaggctttgcgttcgaccagtattatggtcacgcacgacattgaaaaatctttggaaatcgtcgatcaggtgattttcttggcgcacggcgaaattatgttctccggctcgccgcaggaaatgcgcgaactggattcgccttgggtgcgccagtttgtcggcgggctggcagacggccccgtagcataccgttatccggcgcaaacgtcgttgcagcaggatttgctcgggtaa

SEQ ID NO: 63521 - DNA, 1851 bp, Neisseria meningitidis
atgtacctaccctctatgaagcattccctgccgctgctggcggccctggtgcttgccgcgtgttcttcgacaaacacactgccagccgacaagaccccggcagacaatatagaaactgccgacctttcggcaagcgttcccacccgccctgccgaacccgaaggaaaaacgttggcagattacggcggctacccgtccgcactggatgcagtgaaacagaaaaacgatgccgccgtcgccgcctatttggaaaacgccagcgacagtgcgatggcggaaaatgtccgcaacgagtggctgaagtctttgggcgcacgcaaacagtggacgctgtttgcacaggaatacgccaaactcgaacctgaagggcgcgcccaagaagtcgaatgctacgccgattcgagccgcaacgactatacgcgtgccgccgaactggtcaaaaatacgggcaaactgccttcgggctgcaccaaactgttggaacaggcagccgcatccggcttgttggacggcaacaatgcctggaggcgcgttcgcggactgctggccggccgccaaaccacagacgcacgcaaccttgccaccgcattgggcagcccgtttgacggcagcacacaaggttcgcgcgaatacgccctgttgaacgtcatcggcaaagaggcgcgtaaatcgccgaatgccgccgccctgctgtccgaaatggaaagcggtttaagccccgaacagagcagtttcgcgtggggcgtattggggcattatcagtcgcaaagcctcaatgtgcctgccgccttggactattacggcaaagtttccgaccgccgccaactgaccgacgaccaaatcgaatggtacgctcgcgccgccctgcgcgcccgacgttgggacgagctggcttccgtgatctcgcatatgcccgaaaaactgcaaaaaaacccgacctggctctactggctggcacgcagccgcgccgcaacgggcaacacgcaagaggcggaaaaactttacaaacaggcagcagcgacgggcaggaatttttatgcggtgctggcgggggaagagttggggcgcaaaatcgatacgcgcaacaatgtgcccgatgccggcaaaaacagcgtcctccgtatggcggaagacggcgcgattaagcgcgcgctggtgctgttccgaaacagccgaaccgccggcgatgcgaaaatgcgccgtcaggctcaggcggaatggcgttttgccacacgcggctttgacgaagacaagctgctgaccgccgcgcaaaccgcgttcgaccacggtttttacgatatggcggtcaacagcgcggaacgcaccgaccgcaaactcaactacaccttgcgctatatttcgccgtttaaagacacggtaatccgccacgcgcaaaatgttaatgtcgatccggcttgggtttacggcctgattcgtcaggaaagccgcttcgttataggcgcgcaatcccgcgtaggcgcgcaggggctgatgcaggttatgcctgccaccgcgcgcgaaatcgccggcaaaatcggtatggatgccgcacaactttacaccgccgacggcaatatccgtatggggacgtggtatatggcggacaccaaacgccgcctgcaaaacaacgaagtcctcgccaccgcaggctataacgccggtcccggcagggcgcgccgatggcaggcggacacgcccctcgaaggcgcggtatatgccgaaaccatcccgttttccgaaacgcgcgactatgtcaaaaaagtgatggccaatgccgcctactacgcctccctcttcggcgcgccgcacatcccgctcaaacagcgtatgggcattgttcctgcacgctga

SEQ ID NO: 63522 - DNA, 1203 bp, Neisseria meningitidis
atgaagaactaccacgcgcccgacgagaagggctttttcggcgaacacggcgggctttatgtctccgaaaccctgattcccgccttgcaagagctggcggatgcctataaggcagcgaaaaacgatcctgaattttgggaagcgttccgccatgatttgaaacattatgtcggcaggcccagccccgtttaccacgccgcgcggttgtccgaacatctgggcggcgcgcaaatctggttgaagcgcgaagacttgaaccacaccggcgcgcacaaagtcaacaacaccatcggtcaggcactgttggcaaaacgcatgggtaaaaaacgcgtcatcgccgaaaccggcgcgggtcagcacggcgtggcgagtgccaccgttgccgcacgcttcggtatgacttgcgacgtgtatatgggcgcggacgacatccaacgccaaatgcccaacgtgttccgtatgaaattattgggcgcgaatgtcgtcggcgttgacagcggcagccgtactttgaaagacgcgatgaacgaagccatgcgcgaatgggtcgcccgcgtggatgacacattctacatcatcggtaccgccgccggccccgcgccgtatcccgaaatggtgcgcgatttccaatgcgtgatcggcaatgaagccaaagaacaaatgttggaagccatcggcagacagcccgacgttgccgttgcctgcgtgggcggcggatcgaacgccatcggtttgttccacccgtatatcggcgaagaaaacgtgcgcctcgtcggcgtggaggctggcggtttgggcgtgaacacccccgatcacgccgcgccgattacttcgggcgcaccgattggcgtattgcacggtttccgcagctatctgatgcaggacgaaaacggtcaggttttgggtacgcactctgtttccgcaggcttggattaccccggcatcggcccggaacacagccatctgcacgacatcaagcgcgtcgaatacaccgttgccaaagacgacgaagcactcgaagcctttgacttgctctgccgcttcgagggcatcatccccgcgctcgaatccagccacgccgttgcttgggcggtgaaaaatgcgccgaaaatgggtaaagaccaagtgattttggtcaacctctcaggtcgtggcgacaaagacatcaataccgtcgcgaagctcaaagggattaaactgtaa

SEQ ID NO: 63523 - DNA, 246 bp, Neisseria meningitidis; identical to SEQ ID NO: 44126

SEQ ID NO: 63524 - DNA, 4170 bp, Neisseria meningitidis
atgaccgataccgcaccgacagataccgatccgaccgaaaacggcacgcgcaaaatgccgtctgaataccgccccaccccgccggcaaaaaaacgccgcccgctgctgaagctgtcggcggcactgctgtctgtcctgattttggcagtatgtttcctcggctggctcgccggtacggaagcaggtttgcgcttcgggctgtaccaaatcccgtcttggttcggcgtaaacatttcctcccaaaacctcaaaggcacgctgctcgacggcttcgacggcgacaactggtcgatagaaaccgagggggcagaccttaaaatcagccgcttccgcttcgcgtggaaaccgtccgaactgatgcgccgcagcctgcacattaccgaaatttccgccggcgacatcgccatcgttaccaaaccgactccgcctaaagaagaacgcccgccgctcagccttcccgacagcatagacctgcctgccgccgtctatctcgaccgcttcgagacgggcaaaatcagcatgggcaaagcctttgacaaacaaaccgtctatctcgaacggctggatgcttcataccgttacgaccgcaaaggacaccgccttgacctgaaggccgccgacacgccgtggagcagttcgtcggggtcagcctcggtcggcttgaaaaaaccgtttgccctcgataccgccatttacaccaaaggcggactcgaaggcaaaaccatacacagtacggctcggctgagcggcagcctgaaggatgtgcgcgccgaactggcgatcgacggcggcaatatccgcctctcgggaaaatccgtcatccacccgtttgccgaatcattggataaaacattggaagaagtactggtcaaagggttcaacatcaatccgtccgccttcgtgccttccctgcccgatgccgggctgaatttcgacctgaccgccatcccgtcgttttcagacggcatcgcgctggaaggctcgctcgatttggaaaacaccaaagccggctttgccgaccgcaacggcatccccgtccgtcaggttttaggcagctttgtcatccggcaggacggcacggtgcatatcggcaatacgtccgtcgccctgctcggacggggcggcatcaggctgtcgggcaaaatcgacaccggaaaagacatcctcgatttaaatataggcatcaactccgtcggcgcggaagacgtactgcaaaccgcgttcaaaggcaggttggacggcagcatcggcatcggtggcacgaccgcctcgcccaaaatctcttggcaactcggcatcggcacggcgcgcacggacggcagcctcgccattgcaagcgaccccgcaaacggacagcggaaactggtgctcgacaccgtcaacatcgccgccgggcaaggcagcctgaccgcgcaaggctatctcgagctgtttaaagaccgcctgctcaagctggacatccgttcccgcgcattcgacccttcgcgcatcgatccacaacttccggcaggcaatatcaacggctcaataaaccttgccggcgaactggcaaaagaaaaattcacaggcaaaatgcggtttttacccggcacgttcaacggcgtaccgattgccggcagtgccgacattgtttacgagtcccgccaccttccgcgtgccgccgtcgatttgcggctggggcggaacattattaaaacagacggcggcttcggcaaaaaaggcgaccggcttaacctcaatatcaccgcacccgatttatcccgtttcggtttcggactcgcggggtctttaaatgtacgcggacacctttccggcgatttggacggtggcatccgaacctttgaaaccgacctttccggcgcggcgcgcaacctgcacatcggcaaggcggcagacatccgttcgctcgatttcacgctcaaaggttcgcccgacacaagccgcccgatacgcgccgacatcaaaggcagccgcctttcgctgtcgggcggagcggcggttgtcgataccgccgacctgatgctggacggcacgggcgtgcagcaccgcatccgcacacacgccgccatgacgctggatggcaaaccgttcaaattcgatttggacgcttcaggcggcatcaacagggaacttacccgatggaaaggcagcatcggcatcctcgacatcggcggcgcattcaacctcaagctgcaaaaccgtatgacgctcgaagccggtgcggaacgcgtggcggcaagtgcggcaaattggcaggcaatgggcggcagcctcaacctgcaacacttttcttgggataaaaaaaccggcatatcggcaaaaggcagcgcacacggtctgcatatcgccgagttgcacaatttcttcaaaccgcccttcgaacacaatctggttttaaacggcgactgggatgtcgcctacggacgcaacgcgcgcggctacctcaatatcagccggcaaagcggcgatgccgtattgcccggcgggcaggctttgggtttgaacgcattttccctgaaaacgcgctttcaaaacgaccgcatcggaatcctgcttgacggcggcgcgcgtttcgggcggattaacgccgatttggacatcggcaacgccttcggcggcaatatggcaaatgcaccgctcggcggcaggattaccgcctcccttcccgacttgggcacattgaagccctttctgcccgccgccgcgcaaaacattaccggcagcctgaatgccgccgcgcaaatcggcggacgggtcggctctccgtccgtcaatgccgccgtcaacggcagcagcaactacgggaaaatcaacggcaacatcaccgtcgggcaaagtaattctttcagtacctcgcccctgggcgggaaactcaacctgaccgttgccgatgccgaagtattccgcaacttcctgcccgtcggacaaaccgtcaaaggcagcctgaatgccgccgtaaccctcggcggcagcatcgccgacccgcacttgggcggcagcatcaacggcgacaagctctattaccgcaaccaaacccaaggcatcatcttggacaacggctcgctgcgttcgcatatcgcgggcaggaaatgggtaatcgacagcctgaaattccggcacgaagggacggcggaactctccggtacggtcggtatggaaaacagcggacccgatgtcgatatcggcgcggtgttcgacaaataccgcatcctgtcccgccccaaccgccgcctgacggtttccggcaacacccgcctgcgctattcgccgcaaaaaggcatatccgttaccgggatgattaaaacggatcaggggctgttcggttcgcaaaaatcctcgatgccgtccgtcggcgacgatgtcgtcgtattaggcgaagtcaaaaaagaggcggcggcaccgctccccgtcaatatgaacctgactttagacctcaatgacggcatccgcttcgccggctacggcgcggacgttaccataggcggcaaactgaccctgaccgcccaatcgggcggaagcgtgcggggcgtgggcacggtccgcgtcatcaaagggcgttataaggcatacgggcaggatttggacattaccaaaggcacggtctcctttgtcggcccgctcaacgaccccaacctcaacatccgcgccgaacgccgcctttcccccgtcggtgcgggcgtggaaatattgggcagcctcaacagtccgcgcattacgctgacggcaaacgaaccgatgagtgaaaaagacaagctctcctggctcatcctcaaccgcgccggcagcggcagcagcggcgacaatgccgccctgtccgcagccgccggcgcgctgcttgccgggcaaatcaacgaccgcatcgggctggtggatgatttgggctttaccagcaagcgcagccgcaacgcgcaaaccggcgaactcaaccccgccgaacaggtgctgaccgtcggcaaacaactgaccggcaaactctacatcggctacgaatacagcatctccagcgcggaacagtccgtcaaactgatttaccggctgacccgcgccatacaggcggttgcccgtatcggcagccgttcgtcgggcggcgagctgacatacaccatacgtttcgaccgcttctccggttcggacaaaaaagactccgccggaaacagcaaaggaaaataa

SEQ ID NO: 63525 - DNA, 2631 bp, Neisseria meningitidis
atgcaagaacaataccggcccgccgccattgagcctgcggcgcagaaaaaatgggacgacgcccgtattttcaacgtctccgaagacgcttccaaacccaaatattattgcctctccatgttcccctatcccagcggcaagctgcacatggggcatgtgcgcaactacaccatcggcgacgtattgagccgcttcaaacgcttaaacggcttcaacgtcatgcagcctatgggttgggacgcgttcggcatgccggcggaaaatgcggcgatgaaacacaacgtcgcccccgccgcttggacctacgacaacatcgaatacatgaaaactcagctcaaaagcctgggttttgcgattgactgggaacgcgaaaccgcaacctgcaaacccgaatactaccgctgggaacaatggctgtttaccaagctgtttgaaaaaggcatcgtctatcgcaaaaacggcacggtaaactgggacccggtcgaccaaaccgtccttgccaacgagcaagttatcgacggacgcggctggcgttccggcgcattgatcgaaaaacgcgaaatcccgatgtattacttcaaaatcaccgattacgccgaagagctgctcaacgacttggacaaactggaacactggccggaacaagtcaaaaccatgcagcgcaactggatcggcaaatctcgcggtatgaccgtgcgctttgctgtttcagacgacagcaaacaaggcttggaaggcgattacgcgaaattcctacaagtttataccacccgccccgacacgctgatgggtgcgacttatgtcgccgttgccgccgagcatccgctggcaaccgccgcagccgccgacaaacccgaattgcaggcatttatcgccgaatgcaaagccggctcggttgccgaagccgatatggcgacgatggagaaaaaaggcgtgccgacaggccgctacgtcgtcaatccgcttaacggcgacaagctggaagtgtggattgccaactatgtattgtggggctacggcgacggcgcagtgatggctgttccggcgcatgacgaacgcgattttgagttcgccaccaaatacaatctgccgaaaaaacaagtcattgccgtcggcgacaacgcatttgacgaaaaccaatggcaagaatggtacggcgacaaagaaaacggcgtattggtcaacagcggcgacttggacggcttggattttcagacggcatttgatgccgttgccgccaagctgcaaagccaaggcgcgggcgaaccgaaaacccaataccgcctgcgcgactggggtatttcgcgccaacgctactggggctgcccgattcccatcgtccattgcgaacaatgcggcgacgtacccgtccctgccgaccaattgccggtcgttttgcctgaaaacgtcgtacccgacggcatgggttcgccgctggcaaaaatgcccgagttttacgaaactgcctgcccatgctgcggcggcgcggcaaaacgcgaaaccgacaccatggacaccttcatggaatcgagctggtatttcttccgctatatgtcgcccaagttttcagacggcatggtatcggcagaagccgcgaaatactggggcgcggtcgaccaatacatcggcggtatcgaacacgccattttgcacctcctgtacgcgcgtttcttcaccaaactgatgcgcgacgaaggcttggtcaatgttggcgaaccgtttgaacgcctgctgacgcaaggcatggtcgtttgcgaaacctactaccgcgaaaacgacaaaggcggcaaagattggatcaaccccgccgatgtcgagctgacgttcgacgacaaaggccgccccatttccgccgtcctcaaagccgacgggctgcccgtcgtcatcagcggcacggaaaaaatgtccaagtccaaaaacaacggcgtcgatccgcaagaactgattaacgcctacggcgcggacaccgcccgcctgtttatgatgttcgccgcaccgcccgaacagtccctcgaatggagcgacagcggcgtcgaaggcgcacaccgcttcctgcgccgcctgtggcgtaccgtttacgaatacttgaagcaaggcgaagcggtcaaagcgttcgcaggcagccaagacggtttgtctaaagaactcaaagacctgcgccacaaactgcacgcgaccactgccaaagtcagcgacgactacggccgccgccagcagttcaacaccgccatcgccgccgtgatggaattgctcaaccaatacgacaaaaccgacaccggcggcgaacaaggacgcgccgtcgcccaagaagtattggaaaccgccgtacgcctgttgtggcccatcgtgccgcacatctgcgaaaccctgtggagcgaattgaacggcgcgaaactgtgggaagcaggctggccgacagtcgacgaagccgccttggtcaaatccgaaatcgaagtgatggttcaagtcaacggcaaactgcgcggaaaaatcaccgttgccgccgacgcatccaaagccgacctcgaagccgccgcactcgccaccgagggcgcagtgaaattcatggaaggcaagcccgccaagaaaatcatcgtcgtgccgggcagactggtgaacatcgtcgtctaa

SEQ ID NO: 63526 - DNA, 294 bp, Neisseria meningitidis
atgaaaaccctcgtcctcctcctgctttctttctccacaaccaccgctttcgccgcatacggtttgggtttggggcaggcaccgaaatatcctgccgactttcgcgcctacggttatgtttattccggacgacagggctgggttttaaaaacagaggcggatgccattaaattagacacgcttttcaaacgctttgtgtaccgtccttccgccgccaatcaaaaccccgtcggacaagccgtcggacagcgttcggacggcatacccgccaaccacacaaaggaaaaaccatga

SEQ ID NO: 63527 - DNA, 1860 bp, Neisseria meningitidis
atgccagaataccgctccaaaacctccacccacggccgcaatatggcgggcgcacgtgcattgtggcgcgccaccggcgtgatggaaaccgacttcggcaagcccatcatcgccgttgccaactccttcacccaattcgtgcccggccatgtccacctgcacaatatgggccagctggttgcccgcgaaatcgaaaaggcgggcgccatcgccaaagaattcaacaccatcgccatcgacgacggcatcgctatgggacacagcggtatgctgtattccctgcccagccgcgatttgattgccgactccatcgaatatatggtcaatgcccactgcgccgacgcgctggtgtgcatttccaactgcgacaaaatcaccccgggcatgctgattgctgcgatgcgtctgaatatcccgaccatcttcgtttccggcggtccgatggaagcaggtaaagttatcggcgtggcaaacatccagcccgaacgccgtttggacttgattgacgcgatgattgaatcggcggacgacaatgtcagcaaccggcaagttgaagaagtcgaacaaaacgcctgcccgacctgcggctcgtgttcgggtatgtttacggcaaactcgatgaactgcctgaccgaagcactcggtctgtccctacccggcaacggttcgtatttggcgacccacgccggccgcaaagaactgttcctcgaagccggccgtatgattgtcgaaatcaccaaacgctattacgagcaaaacgatgaaaccgtgttaccgcgcagcattgccaccaaaaaagcgtttgaaaacgctatgacgatggatattgcgatgggcggcagcaccaataccattttgcacctgttggccgttgccaacgaagccggtgtcgatttcaaaatggccgacattgaccgcttaagccgcgttgtgccctgcatctgcaaaaccgcacccaacaaccacgactactatatggaagacgtgcaccgcgccggcggcattttcgccatcctgaaagaattggacaaagcgggcaagctgcacaccgacgtgcacactatccacgcaccgacgctgaaagacgcgattgaaaaatgggacataaccaaccctgaaaacacccgcgccatcgaacgcttcaaagccgcgcccggcggcgtacgcaccacccaagcgttctcgcaaaaccgtatgtggaaaaccctcgacctcgaccgcgaaaaaggctgtatccgcgacgtggcacacgcctactcgcaagacggcggtttggcggtcttgttcggcaacatcgccgagcgcggctgcgtggtaaaaaccgcaggcgtggacgagagcatcctcaaattcaccggccgcgcccgcgtgtttgaaagccaagaagacgcagtagaaggcattttgggcaaccaaatcgtcgccggcgacatcgtcatcatccgctacgaaggcccgaaaggcggcccgggcatgcaggaaatgctgtatccgacttcctacctgaaatctaaaggcctcggcaaagcctgcgctctcttaaccgacggacgcttctccggcggcacatcaggtttgtccatcggacacgcctcgcccgaagcggcggaaggtggcgcgatcggtttggtacacgaaggcgataccgtcgaaatcgacatccccaaccgcagcatccaccttgccatttccgatgaagagcttgccgcccgccgtgccgaaatggaagcgcgcggcagcaaagcgtggaaaccggaaaaccgcgaccgctacgtctccgcagccctgcgtgcttacggcgcgatggcgacttccgccgacaaaggcgcggtgcgcgacgtagcgcaaatcgaaagataa

SEQ ID NO: 63528 - DNA, 1785 bp, Neisseria meningitidis
atgagcttagttgaattgaaagtgcccgacattggcggacacgaaaatgtagatattatcgcggttgaagtaaacgtgggcgacaccatcgccgttgacgacaccctgattaccttggaaaccgacaaagcgacgatggacgtgcctgccgaagttgcgggcgtggtcaaagaagtgaaagtcaaagtcggcgacaaaatctccgaaggcggtttgattgttgtcgttgaagctgaaggcacggctgccgctcctaaagccgaagcggctgccgccccggcgcaagaagcccctaaagctgctgctcctgctccgcaagccgcgcaattcggcggttctgccgatgccgagtacgacgtggtcgtattgggtggcggtcccggcggttactccgctgcatttgccgctgccgatgaaggcttgaaagtcgccatcgtcgaacgttacaaaactttgggcggcgtttgcctgaacgtcggctgtatcccttccaaagccttgttgcacaatgccgccgttatcgacgaagtgcgccacttggctgccaacggtatcaaataccccgagccggaactcgacatcgatatgcttcgcgcctacaaagacggcgtagtttcccgcctcacgggcggtttggcaggtatggcgaaaagccgtaaagtggacgttatccaaggcgacgggcaattcttagacccgcaccacttggaagtgtcgctgactgccggcgacgcgtacgaacaggcagccactaccggcgagaaaaaaatcgttgccttcaaaaactgtatcattgcagcaggcagccgcgtaaccaaactgcctttcattcctgaagatccgcgcatcatcgattccagcggcgcattggctctgaaagaagtaccgggcaaactgctgattatcggcggcggcattatcggcctcgagatgggtacggtttacagcacgctgggttcgcgtttggatgtggttgaaatgatggacggcctgatgcaaggcgcagaccgcgacttggtgaaagtatggcaaaaacaaaacgaataccgttttgacaacattatggtcaacaccaaaaccgttgcagtcgagccgaaagaagacggcgtttacgttacctttgaaggtgcaaatgcgcctaaagagccgcaacgttacgatgccgtattggttgccgccggccgcgcgcccaacggcaaactcatcagcgcggaaaaagcaggcgttgccgttaccgatcgcggcttcatcgaagtggacaaacaaatgcgtaccaatgtgccgcacatctacgccatcggcgacatcgtcggtcaaccaatgttggcacacaaagccgttcacgaaggccacgttgctgctgaaaactgcgccggccacaaagcctacttcgacgcgcgcgtgattccgggcgttgcctacacttcccccgaagtggcgtgggtgggcgaaaccgagttgtccgccaaagcatccggccgcaaaatcaccaaagccaacttcccgtgggcggcttccggccgtgcgattgccaacggttgcgacaacggctttaccaagctgatttttgatgccgaaaccggccgcatcatcggcggcggcattgtcggtccgaacggtggcgacatgatcggcgaagtctgccttgccatcgaaatgggctgcgacgcggcagacatcggcaaaaccatccacccgcacccgaccttgggcgaatccatcggtatggcggcggaagtggcattgggtacttgtaccgacctgcctccgcaaaagaaaaaataa

SEQ ID NO: 63529 - DNA, 468 bp, Neisseria meningitidis
atgactgaactgcaacaccccgtcctcgtcgtcgataacgaaaccgacattctcgacctgatggaaatgaccctgatgaaaatgggcttgcgcgtccataccgcgtcaggcgttgccgaagccaaaaacaagctcgacagccaacgctattcgctcgtcctgaccgatatgcgtatgccggacggctcggggctagaagtcgtccaacacatcaacagccgcctgctcgatacgccggttgccgtcatcaccgccttcggcaatgccgatcaggcacaggaagccctgcgttgcggcgcgttcgaccccgataccatgcagatacaggactatctcgaccaaatcgaacgcgacatcatcgaacaaaccctcaaacaaaccgaaggcaaccgcacgcaggccgccaaacgcttgggcatcagcttccgttccatgcgctaccgtatggaacgcctcaacatcggctga

SEQ ID NO: 63530 - DNA, 1359 bp, Neisseria meningitidis
atggatttaaatgtcgaaatcaagaatcttggcaaggttgcccatgccagggtttccattcgcccgcttaccgtcatcacgggttgcaactccagcggcaaaagtttcatcacacgcgggctgtacagtatcctgcatacgctcaatcaggatgttgtttctgcctatatcctgaacgtgctgtccctgacgaactccgccttattgaggctttcagacggcatcccgagacgttcggcggatgatgacgcactgctggccgacatcggtctgcttttggaaggtgtcaggcaaagcgtggcagacaggctgtctcccagcccgttgtaccaacctcctgcctcgcagcttgttttaaacgatttgaaaactgctgttgccgagcttgcacgccgtctgaaagtcggcaaggggacgaagatgcaggcggtcaaacaacattacacagatattgaggattacctgtccgaccttgagttctgtctgtccggagatgtcggtttctacaccgaagctgtcagcagagctttgcactcggcattttccggaaatttccaagtggctgacatcaaaaggcttttatcctccgatagtgcaaatttctcattgggcgacggtacggaggtttccattggggacaaaggtttgggattcaaactgtccgcagccatgccgggcagtctgcaaagcctgaaaaacgtcgtctatttggagtcgcccgtctactacaagatgaggaatgccttaaaggacgcaaggctgttcaggttgaatatgctccgacgcggggcggtcaatcctgtgccccagtatttctatgatttggacgaaatgttggaggccgaactgcctcctgtgaacgaagtgttcgggcagattgcggataaggtagaggcactgataaacggcagactggctgttacgccctcgggggaaatcgtgtacagcgaacgcggcaggcagtccgtgccgctcaatatggcttcgtcggggatttcaaacatcggtatgattgcgctgctgttgcggcgcaatgtgctggacgagggcagtttcctgtttatcgacgagcctgagatgaatctgcatacgtcttggcagcacgctatgctggatgttctgctcgatttgagcagggcgggtgtcaatgtggtggtggcaacgcacagcttggatatgttgcacaggctggaagccaaggtggaagccgatgcgtcattattaggcagtgtgggcgtatgcaggctgtcttcagacggcatatcccttgaagacggcagcgtcttgggcggtttacgggctgccaaagaagctttgggtgcgccttatcttgaggtcatcgaggagcggctgccttga

SEQ ID NO: 63531 - DNA, 1335 bp, Neisseria meningitidis
atggcaaaaaaatatttcggcacggacggcgtgcgcggcgaagtggggcaatttccgattacgcccgatttcgtattgaaactcggctatgcggcggggcaggttttggtgcagcacgacaccgaccagaaaccgaccgtcctcatcggcaaagacacgcgcatttccggctatatgctggaagccgctttggtggccggttttacggcggcgggtgtgaatgtggtacagaccggaccgctgcccacgcccggcgtggcttatctgacccgcgcgttgcgcctgtccgccggcgtgatgatttccgcgtcgcacaacgcctattccgacaacggcatcaaattcttcgccgaaggcggcgtgaaactttccgatgaagtcgagttggaaatcgaagccaaaatcgacggcgaaatgaaaacccaaccgtccgcccgtctcggtcgcgcacgccgcatcaacggcgcggacgaccgctatatcgaattttgcaaatccaccttccctacgcattccgatttgcgcgggctgaagctggtcgtcgatgccgccaacggcgcggcttacagcgtcgcacccaaagtgtttcacgaactgggcgcacaagtcgtcagcatcggcgacgaacccaacggctacaatatcaatgaaaaatgcggtgcgacttataccaagacactccaggccgccgttttacagcatgaagccgactacggcatcgccttagacggcgacggcgaccgcctgatgatggtcgataaaaacggtaaggtttacgacggcgacagcctgatttacgtcatcgccaaagcccgcgcccgagaaggtatcaacatcggcggcgtggtcggcacggtcatgaccaatatggcgatggaaatcgccctgaaagagcagggcgtcgatttctgccgcgccaaagtcggcgaccgctatgtgttggaacagctgaaccaacgcagctggctcatcggcggcgaagccagcggccatattttgtgtatggacaaacacaacaccggcgacggcattatttccgcactgcaagttttggcggcactgcaaacgctgaaccaagacctcgccaccgtttgtgccgattggcagccgtatccgcaaacgatgattaatgtccgtatcggcaaagggcaaaactggcaggaagcctcaaaagacgtgttggcggaagtggaaaaagaactcgaaggcaaagggcgtgtcgtgttgcgcgcttcgggaaccgaacccgtcgtgcgagtgatggttgaggcgcggcaggcggattgggcgcgcgacggtgcggaacgtattgcttccgccatcggcagcctttag

SEQ ID NO: 63532 - DNA, 780 bp, Neisseria meningitidis; identical to SEQ ID NO: 41769

SEQ ID NO: 63533 - DNA, 126 bp, Neisseria meningitidis
atggtgtacagggaaaatatccgcaacgacaagattatgaaggcaatccattgccaaataatcgtcatcattctggatattttgtcaaatgaaaaaaaatatttttcacaatgtaagcctttatga

SEQ ID NO: 63534 - DNA, 786 bp, Neisseria meningitidis
atgaatccgtttttgaatacagcctttaaagccgcccgccgtgccggtcagatgatgatacgcgccgcgggcaatctcgatgccgtcaaaaccgacagcaaagcattcaacgattttgtttccgatgttgaccgcaattccgaaatcatcctggttgaggctttgaaagaagcctatccgcaccacaaaatcacttgcgaagaaagcggctcccacggtaaagccgcagccgaatacgaatggattatcgatccgctcgacggcacgaccaacttccttcacggccatccccaatacgccatctctatggcactcctgcacaaaggcgtgttgcaagaagctttggtgtacgcccccgaacgcaacgacgtttacatggcttcgcgcggcaaaggcgcgttgctcaatgaccgccgcatccgcgtttccaaccgcatcgaattgaaccgctgcctgatcggtaccggcttccccgttgtcgatcaaagcatgatggacaagtatctggcgattttgaaagatttcttggccaaaaccgccggcggccgtcgtgaaggcgcggcttctttggatttgtgtgctgtagcaacaggacgttttgacggctttttcgagtttaacctcaaaccgtgggacattgccgccggtgcattgattgttcaggaagcgggtggtatcgtaaccgatatgacgggtgaagacggctggctggaaagcggcgatattgtggctgccaatcccaaagtgctggcgcaaatgttgaaaatcatttccgcacacgtttaa

SEQ ID NO: 63535 - DNA, 1839 bp, Neisseria meningitidis
atgtgcggtatcgtcggcgccatccgcgcccatcacaacgtcgtcgattttctgaccgacggtctcaaacgcctcgaataccggggttatgactcatcaggcattgccgtcaacaccgacggcaaaatcaaacgtgtgcgccgcgtcggacgcgtgcagcttatggaggacgcggcacgcgaaaaaggcatcagcggcggcatcggcatcggacatacgcgttgggcgacacacggcggcgttactgagccgaacgcccacccgcacatcagcggcggtatgattgcggtcgtacacaacggcatcatcgaaaactttgaaagcgaacgcaaacgtttggaaggtttgggataccgttttgaatcgcaaacggataccgaagtcatcgcacacagcatcaatcacgaatacgcgcaaaacggcggcaggctgtttgaagcggtacaagaagcggtcaaacgtttccacggcgcatacgccatcgcggttattgcccaagacaagcctgatgaattagttgtggcgcgtatgggctgcccgcttttggtcgctttgggcgacgatgaaacctttatcgcttcggacgtatccgccgtcatcgcctttacgcgccgcgtggcgtacctcgaagacggcgacatcgcgctgctggcttcagacggcatcaaaaggctgaccgataaaaacggcctgcctgccgaacgcaaagtcaaggtatccgaactctcgctcgcctctttggaactgggaccgtacagccactttatgcaaaaggaaatccatgagcagccgcgcgcgattgcagacacggcggaggttttcctcgacggcggcttcatccccgaaaacttcggcaaaaacgccaaaagcgtgtttgaaagcatccgcagcgtcaaaatccttgcctgcggcacgtcctattacgccgcgctgaccgccaaatattggttggaatccatcgccaaaatcccggccgatgtcgaaatcgccagcgaataccgataccgcagcgtgattgccgatccggaccaactggtcattaccatttcccaatccggcgaaacgctggacacgatggaggcgttgaaatacgccaaatctttgggacaccgccacagcctctccatctgcaacgtgatggaatccgccctgccgcgcgaaagcagcctcgtgctttatacccgtgccggtgcggaaatcggcgtcgcctcaaccaaagcatttaccacgcagctggttgcgctgttcggtttggcggtaacgctggcgaaagtgcgcggtttggtttccgaagaagacgaagcacgttacaccgaagaactccgccagcttcccggcagcgtgcagcacgctttgaacctcgaaccgcaaattgccgcttgggcgcaacagtttgccaagaaaaccagcgcgctgtttttagggcgcggcatccattacccgattgccctcgaaggtgcgttaaagctgaaggaaatcacctacatccacgccgaagcctatcctgccggcgagctgaaacacgggccgcttgccctggtggacgaaaatatgcccgtcgtcgtcatcgcgcccaacgacagcctgttggacaaagtcaaagccaatatgcaggaagtcggcgcgcgcggaggcgaacttttcgtctttgccgacctcgacagcaattttaatgctaccgaaggcgtgcacgtcatccgcgcaccgcgccatgtcggagaattatcccccgtcgtgcataccgtccccgtgcagctcctcgcctatcacaccgccctcgcgcgcggcacggatgtggacaagccgcgcaatctggcgaaatccgtaaccgtcgaataa

SEQ ID NO: 63536 - DNA, 2106 bp, Neisseria meningitidis
atggctcgtaagaccccgatcagcctgtaccgtaacatcggtatttccgcccatatcgatgcgggtaaaaccacgacgacagaacgtattttgttctataccggtttgacccacaagctgggcgaagtgcatgacggtgcggctactaccgactacatggaacaagagcaagagcgcggtattaccattacctccgctgccgttacttcctactggtccggtatggcgaaacaattccccgagcaccgcttcaacatcatcgacaccccgggacacgttgactttaccgtagaggtagagcgttctatgcgtgtattggacggcgcggtaatggtttactgcgcggtgggcggtgttcaaccccaatctgaaaccgtatggcggcaagccaacaaataccaagtgccgcgcttggcgtttgtcaataaaatggaccgtcagggtgccaacttcttccgcgttgtcgagcaaatgaaaacccgtttgcgcgcaaaccctgtacctatcgtcattccggttggtgcggaagacaacttcagcggtgtggttgatttgttgaaaatgaaatccatcatttggaatgaagtcgataaaggtacaacctttacctatggcgatattcctgccgaattggtcgaaactgccgaagaatggcgtcaaaatatgattgaagccgcagccgaagccagcgaagaactgatggacaaatacttaggcggcgacgagctgaccgaagaagaaatcgtaggcgcgttgcgtcaacgtactttggcaggcgaaattcagcctatgctgtgtggttctgcatttaaaaacaaaggtgttcaacgtatgttggacgcagttgtagaattgctgccagctcctaccgatattcctccggttcaaggtgtcaacccgaataccgaggaagccgacagccgtcaagccagcgatgaagagaaattctctgcattggcgttcaaaatgttgaacgacaaatacgtcggtcagctgacctttatccgcgtttactcaggcgtagtaaaatccggcgataccgtattgaactccgtaaaaggcactcgcgaacgtatcggtcgtttggtacaaatgactgccgcagaccgtactgaaatcgaagaagtacgcgccggcgacatcgcagccgctattggtctgaaagacgttactaccggtgaaaccttgtgtgcggaaagcgcgccgattatcttggaacgtatggaattccccgagccggtaatccatattgccgttgagccgaaaaccaaagccgaccaagagaaaatgggtatcgccctgaaccgcttggctaaagaagacccttctttccgtgtccgtacagacgaagaatccggtcaaaccattatttccggtatgggtgagctgcacttggaaattattgttgaccgtatgaaacgcgaattcggtgtggaagcaaatatcggtgcacctcaagtggcttaccgtgaaactatccgcaaagccgttaaagctgaatacaaacacgcgaaacaatccggtggtaaaggtcaatatggtcacgttgtgattgaaatggaacctatggaaccggggggcgaaggttacgagtttatcgatgaaattaaaggtggcgtgattcctcgcgaattcattccgtctgtcgataaaggtatccgcgatacattgcctaacggtatcgttgccggctatcctgtagttgatgtacgtatccgtctggtattcggttcttaccatgatgtcgactcttcccaattggcatttgaattggccgcttctcaagcgtttaaagaaggtatgcgtcaagcatctcctgccctgcttgagccgattatggcagttgaagtggaaactccggaagaatacatgggcgacgtaatgggcgacttgaaccgccgtcgcggtgttgtattgggtatggatgatgacggtatcggcggtaaaaaagtccgtgccgaagtacctctggcagaaatgttcggttattcgaccgacctgcgttctgcaacccaaggccgcgctacttactctatggagttcaagaaatattctgaagctcctgcccacatagctgctgctgtaactgaagcccgtaaaggctaa

SEQ ID NO: 63537 - DNA, 450 bp, Neisseria meningitidis
atgagccttatcggcgaaattttgcctttgtcccatattgttttggatatggaggtgggcagtaaaaaaaggctgtttgaggaagcgggcctgcttttggaacgcgaatcctcattgtcccatgctgatgttttcgaatgtctttttgcccgtgaaaaactcggttcgaccggtttggggcagggcgttgccatcccgcacggccgtcatgccggcgtgaagcaggcgacgggcgcgttcatccgcacgcgcgaacccgtcggatttgacgcaccggacggcaaaccggtttccctggtttttatcttgctggttccggaaaatgcgacgggtgagcatttggaagtattgtccaaactggccggcaagttttcccaaaaaagcatcagagaatcgctgatgaccgtttcttctgcggaagaagcccgcgccatcctgactgaagaataa

SEQ ID NO: 63538 - DNA, 1497 bp, Neisseria meningitidis
atgaaattgtctattcaaaaattcatgatgctgtttgcagcagcaatatcgttgctgcaaatccccattagtcatgcgaacggtttggatgcccgtttacgcgatgatatgcaggcaaaacactacgaaccgggtggtaaataccatctgttcggtgatggtcgcggcagtgttaaaaatcgggtttacgccgtccaaacatttgatgcaactgcggtcggccccatactgcctattacacacgaacggacaggatttgaaggtgttatcggctatgaaacccatttttcagggcacggacatgaagtacacagtccgttcgataatcatgattcaagaagcacttctgatttcagcggcggtgtagacggcggttttactgtttaccaacttcatcgaacagggtcggaaattcatccggaggatggatatgacggaccgcaaggcagcgattatccgccccccggaggagcaagggatatatacagctattatgtcaaaggaacttcaacaaaaacaaagactaatattgtccctcaagccccattttcagaccgttggctaaaagaaaatgccggtgccgcctctggttttttcagccgtgcggatgaagcaggaaaactgatatgggaaaacgaccccaatcaaaattggtggggtaaccgtatggatgatgttcgcggcatcatccaaggtgcagccaatccttttctaacgggttttcagggattgggagttggggcaattacagacagtgcggtaaacccggtaacctatgcggcagcacggaaaactttacagggtattcacaatttaggaaatttaagtccggaagcacaacttgcggccgcgagcctattacaagacagtgcttttgcggtaaaagacagtatcaactctgccaaacaatgggctgatgcccatccgaatataactgcaacagcccaaactgccctttccgtagcagaggccgcaggtacggtttggggcggtaaaaaagtagaacttaacccgactaaatgggattgggttaaaaataccgattataaaacacctgctgcccgacctatgcagactttagatggggaaatggccggtgggaataaaccgcctaaatctataacgtctggaggaaaagccaatgctgcaacttatcctcaattagttaatcaattaactgggcaaaacttaaaaaacattgcggctcaagatccaagattgagtctagctcttcataagagtgaaaaaaattttccaataggaactgcaacttatgaagaggcagataggctaggtaaaatttgggttggtgagggtgcaagacaaactagtggaggcggatggttaagtatagatggcactcgacaatatcggccaccaacagaaaaaaattcacaatttgcaactacaggtattcaagcaaattttgaaacttatactattgattcaaatggaaaaaggaataaaattaaaaatggacatttaaatattaggtaa

SEQ ID NO: 63539 - DNA, 1554 bp, Neisseria meningitidis
atgaaccggacttatgccaatttctacggaatgctcgccgccgcctgccgcaaaaacggcaacggcacggcagtgttcgacggcaaggaaaaaaccgcctaccgcgcgctcaagcaggaagccgaagccgttgcggcgtatctgcaaaatatcggcgtgaagttcggcgacacggtcgcgctggcggtttccaattccacggaatttattaccgcctatttcgccgtatccgccatcggcgcggttgccgtaccgatgaacacatttttgaaaaacagcgaatacgcgtatatcctgaacgactgcaaggcgcgcttcctgttcgcctcggccggcctgtcaaaagaattggcgggcttgaaggcgcaaacgcccgtcgaaaaaatcatttggacggacaaaagccgtccgaccggcgaaatggcggaaggcgatgccttttttgaagacgtgcgccgcttccccgaaaaacccgacttgggccgccaaccccggataaatgatttggcacacatcatctacacctccggcacgacggggcatcccaaaggcgcgctaatcagttacgccaacctgttcgccaacctgaacggcatcgaacgcatctttaaaatctccaaacgcgaccgctttatcgttttcctgccgatgttccacagcttcacgctgacggctatggtgctgctgccgatttatatggcgtgttcgattattttggtcaaatccgtttttccgttttccaacgttttgaaacaggccctgctcaaacgcgcgaccgtgtttttgggcatacccgcgatttacaccgcaatgagcaaggcgaaaatcccttggtatttcagatggttcaaccgcattcgcctgtttatcagcggcggtgcgcctttggcggaacaaaccatcctcgatttcaaagccaagttccctcgcgccaaattgctggaaggctacggactgagcgaagcctctcccgtcgtcgccgtcaatacgcccgagaggcaaaaagcccgcagcgtcggcatccccctgcccggtttggaagccaaagccgtcgatgaagaattggtcgaagtgccgcgcggcgaagtgggcgaactgatcgtcaggggcggttcggtgatgcggggctacctcaatatgcctgccgccaccgatgaaaccatcgtcaacggctggttgaaaacgggcgatttcgttaccatagacgaagacggctttatctttatcgtcgaccgcaaaaaagatttgattatttccaaaggtcaaaacgtctatccgcgcgaaatcgaagaagaaatctacaaactcgatgccgtcgaagccgccgccgtcatcggcgtgaaagaccgttatgccgacgaggaaatcgtcgccttcgtccaattgaaggaaggtatggatttgggcgagaacgaaatccgccgccacctgcgtaccgtgctggcaaatttcaaaatccccaaacaaatccactttaaagacgggctgccgcgcaacgctacgggcaaggtattgaaacgggtgttgaaggagcagtttgacggaaacaaatga

SEQ ID NO: 63540 - DNA, 1416 bp, Neisseria meningitidis; identical to SEQ ID NO: 62564

SEQ ID NO: 63541 - DNA, 1194 bp, Neisseria meningitidis
atggcagaggtagggattacgcctgttgcgggtgtgaacaatgtggcgcgggacgatgatatggtgcgcggccccgatgcgcccgggcgtttcgtgcgggatgcggtcaatgtggacattcatgcggacggggcgttttctatgcgcggtgcggcgcggaaaatcagcggcttgaagctgcgggatgtgtggcagagccctttgcatagggatgtgttttgtgtgcatgagggtcatttgtgcaaattggatacgggggatttttctgtgtccgtcctggtgcgcgatgcgggggcggggcgcgtgtggtatgcagtggtcaatcatgcggtgtttgcggcaacggacagggggatttttgtttatgacgggctctctgcccaaaggttgggtatcgatacgccgcccgcgccgctcgtgatgccgtccgaagggtctttggcggcggggcattatgggtttgcgctggcctggctgcgcggtggcaaggaaggcggtttgtcggctatggcttcggttgcggttgcggacggcgggggcgtggaagtcgcgctgccgttttgtacggataggacggttgacggggtaaggctttatgcgacggctgcggacggtggggaattggcgtgtatcggggattatccggtgtcggggacgattgtgctgccgctgcttcctaaacaggggaagacggcgcaaatgcgttttttgtcgcctatgccgacggggaagtttatgtgtgtgtggcgcgggcggctgctgacggcgagggcgaatgtgttgcgcttttccgagccgcttgccttccatctgcatgacggtcggttcggctatatgcagatgccgcaaaggattacgtttgtcgagccggtagagggcggtatttttgtggggcaggttgacggtgtggtgtttttgcgcggtgtcgatgtggaggctttggaaatggtgcgcttggcggtcaagccgcctgtggcgatgagttctgtgcgtttggatgcggatgaggcggggcagttttccaatggcgcggcggtgtgtttgtggttggcggacaatggtgcggcggtggggctgccggacggcggtgtggtggaagtgcacgcgggggtgttgcggggcttggcggcgggaacggcggcgcaaacggtgtctgccgataggcggtttgtttcgttaatgcttgattcttag

SEQ ID NO: 63542 - DNA, 783 bp, Neisseria meningitidis; identical to SEQ ID NO: 60415

SEQ ID NO: 63543 - DNA, 810 bp, Neisseria meningitidis; identical to SEQ ID NO: 54624

SEQ ID NO: 63544 - DNA, 1146 bp, Neisseria meningitidis
atgaccgaaactcaatccctagagcttgccaaagagctgatttcccgaccatccgttacccctgacgacagggattgccaaaaactccttgccgaacgcctgcacaaaatcggttttgcggctgaagaactccatttcggcgacaccaaaaacatctggttgcgacgcggcacgaaagctcccgtcgtctgttttgcagggcataccgacgttgtaccgacaggtcctgtcgaaaaatgggattcgcccccgttcgaaccggccgagcgcgacggaagattatacgggcgcggcgcggcagacatgaaaaccagcatcgcctgcttcgttaccgcctgtgaacgcttcgttgccgaacatcccgaccaccaaggcagcattgcgcttctgattacttccgacgaagagggcgacgcgttggacggcacgaccaaagtcgtcgatgtattgaaagcgcgcgacgagcttatcgactactgcatcgtcggcgaaccgacagccgtggacaaattgggcgatatgattaaaaacggccggcgcggctcgctgtcgggcaacctgaccgtcaaaggcaagcaaggccatattgcctatccgcatttggcaatcaatcccgtccatacttttgccccggccttgttagagctgacgcaggaagtctgggatgaaggcaacgaatatttcccgccaaccagctttcaaatttccaatatcaacggcggcacaggcgcgaccaacgtcattccgggcgagctgagcgtcaaattcaatttccgcttctccaccgagtccaccgaagcagggctgaaacaacgcgtccacgccattttggacaaacacggcgtgcaatacgatttgcagtggtcgtgttcggggcagccctttctgacccaagcgggcaaactgaccgacgtggcacgcgcagccattgccgaaatctgcggcattgaggccgaattgtccaccaccggcggcacttcggacggacgcttcatcaaagccattgcaaaagaactcatcgaattaggcccgtccaatgccaccatccaccaaatcaacgaaaacgtgcggctggacgatattccgaagctgtctgcggtgtatgaggggatattggcgtgcttgttggctggaaatgccgtctga

SEQ ID NO: 63545 - DNA, 414 bp, Neisseria meningitidis; identical to SEQ ID NO: 41572

SEQ ID NO: 63546 - DNA, 177 bp, Neisseria meningitidis; identical to SEQ ID NO: 38352

SEQ ID NO: 63547 - DNA, 429 bp, Neisseria meningitidis; identical to SEQ ID NO: 54930

SEQ ID NO: 63548 - DNA, 1221 bp, Neisseria meningitidis
atggctgtcaacctgaccgaaaaaaccgccgaacaactgcccgacatcgacggcattgccctctacaccgcccaagcaggcgtgaagaagcccgggcataccgacctgacactgattgccgtagccgccggcagcaccgtcggtgcagtcttcacgaccaaccgtttctgtgccgcgcccgtccacatcgccaaatcgcaccttttcgacgaagacggcgtgcgcgccctcatcatcaacacgggcaacgccaacgcgggtacgggcgcacagggcagaatcgatgctttggcagtgtgtgccgccgccgcccggcaaatcggctgcaaaccgaaccaagtgctgcccttctccaccggcgtgattctcgaaccgctgcccgcagacaaaatcatcgccgcgctgcccaaaatgcagcctgccttctggaacgaagcggcacgcgccatcatgaccaccgacaccgtgcccaaagccgcctcgcgcgaaggcaaggtcggcgacaaacacaccgtccgcgccacgggcatcgccaaaggctcgggcatgattcatcccaatatggcgaccatgctcagtttcatcgccaccgatgccaaagtttcccaacccgtcctccaactgatgacgcaggaaatcgccgacgaaaccttcaacaccatcaccgttgacggcgacaccagcaccaacgacagcttcgtcatcatcgccaccggcaaaaacagccaaagcgaaatcgacaacatcgccgacccgcgttacgcccaactcaaagaattgttgtgcagcctcgcgctcgaactcgcccaagccatcgtccgcgacggcgaaggtgcgaccaagttcatcaccgtccgcgtcgaaaacgccaaaacccgcgacgaagcccgccaagccgcctacgccgtggcacgttcgccgctggtcaaaaccgcctttttcgcctccgaccccaacctcggcaggctgctcgccgccatcggttatgccggcgttgtcgacctcgatactgacctcgtggaaatgtatctcgacgatattttggttgccgaacacggcggacgcgccgcaagctacaccgaagcacaagggcaggcggtgatgtcgaaggccgaaatcaccgtccgcatcaagctgcatcgcggacaagccgccgccaccgtctatacctgcgacctgtcgcacggatacgtttccatcaacgccgactaccgttcctga

SEQ ID NO: 63549 - DNA, 1281 bp, Neisseria meningitidis
ttgaaggattgttttcctcaaggtctgaatggaaaaaaaacagcggtggcattaagcggcggcttggattccgtcgttttgctgcatctgcttgtccgcgccgggaaaaaaggcggttttattccggatgcattgcatatccatcacggcttgagtccccgtgccgacgattgggcggatttctgccaaaactattgcgatatgctcggggtggggctggaaacggttaagatctgcgtggaaaaaaacggtttgggcatcgaggcggcggcgcggcaaaagcgttatgccgcgtttgccgaaaaaggctttgacgttttggcgttggcgcaccacagggacgatcaaatcgaaacctttatgctggcggtcgcgcgcggcggcggtttgcgcgctttggcggctatgcccgccgtccgcccttttggggaaaaaggcattatctggcggcccttgctgcctttttcgcgccaagatatatgggattatgcccaaaaacacggtttgccgaatatcgaggacgaaagcaatagcgatacggcttatttgcgaaaccgcttccggcaccgtattttgcccgaactttcggcgcagattccccatttcgggcggcatctgttgaacaatgtccgtgccttgcaggaggatttggctttgttggacgaggtcgtcgttcaagactgccgttgggtttgcggagccggttatttcgatacggcgcggtggctgacgttttccccgcgccggaaaacccatattttgcggcattttttgaaggaaaacggcattcccgtgccgaatcagaatgcccttgccgacattgcccgggttttgacggaggcaaaaaccggacgttggaacgtgcaaggctttgaattgcatcattatgcaggcaggctgtttgtgttccgaccggaaaaaacggataaactgcggtttttgaaagacaggcagataagcggaaatttaagggaaatattgacggggcagggatttgtgttgaagcggcatccgtttgggcttcctgagcatcttttggagcaggacggaattttgaggacggtagcggcatcggatacgttggccgtgggcggcatccataaaaatgtgaaaaaaatccttcaggaaaagcgagttttgcccaccctgcgcccaatctggccgctcgttgccgacagcggaaacagtccattggcgttggcaaactgttgtgcggatttccaatattcggtttcagacggcattttgcccgtccatcctgactttcccattttattttga

SEQ ID NO: 63550 - DNA, 843 bp, Neisseria meningitidis
atgcaaaaccatgttatcagcttagcttccgccgcagaacgcagggcgcacattgccgcaaccttcggcgcgcgcggcatcccgtttcagtttttcgacgcactgatgccgtctgaagaactgaatcggatgatggcggaattggtgccgggattggcaaaacagcacctgttgagcgaagtggaaaaagcctgctttatgagccacgccgtattgtggaaacaggcattggatgaaggtctgccctatgttgccgtatttgaggatgatgtcctgcttggcaaagacgcagaaaagttccttgccgaagatacttggttggaagagcgttttgataaggattctgcctttatcgttcgtttggaaacgatgtttgcgaaagttattgtcagaccggataaagtcctgaattatgagaaccggtcatttcctttgctggagagcgaacattgggggacggctggctatatcatttcgcgtgaggcgatgcggtttttcttggaaaggtttgccgttttgccggcagagtggattaaagcggtagattggatgatgtttacttatttctttgataaggaggggatgcctgtttatcaggttaatcccgccttatgtacccaagaattgcattatgccaagttcctcagtaaaaacagtatgttgggtagcgatttggaaaaagatagggaacaagaaagaagacaccgccgttcgttgaaggtgatgtttgacttgaagcgtgctttgggtaaattcggtagagaaaagaagaaaagaatggagcgtcaaaggcaggcggagcttgagaaagcttacggcaggcgggtcatatcgttcaaatag

SEQ ID NO: 63551 - DNA, 765 bp, Neisseria meningitidis
atgtgttcctgccttgttgtcaaaaataccgttatcggaagcggacgcaccaaaatcgccgtgccgcttgtcgcccgcgatgccgccgaactttccgccgtacttgaccaaatcaaaaacctgcccttcgacatcgtcgagttccgcgccgattttttggaatgcgcgggcagcatcggcgaagtattgcgccacacgcagaccgtccgcgacgcgctgcccgacaaaccgctgctgtttacgttcagacggcatggcgaaggcggctcgttcccgtgttcggacgattattatttcaaactgctcgacgcgctgatcgaaagccgcctgcccgacattatcgatatcgagctgttttccggcgaaacctccgtccggcgcgccgtggcaaatgctcaaaaaaacggcatcgccgccctgctctgcaatcatgagtttcaccgcacgccgccgcaagaagaaatcgtatgccgtctgaaacagatggaggactgcggcgcggacatctgcaaaatcgcggtgatgccgcaaagcgcggaagatgtgctgactttgctttccgccacgctcgaagcgaaacggcttgccgccaaaccggttgttacgatgtcgatggggcagacgggtgcggtcagccgccttgccggacaggtgttcggctcaagcatcacgttcggttcgggaacgcaaaactccgcgccggggcaaatcggcgtatccgccctccgtgcggcactcgactgtctcgaaagcggcgcagactga

SEQ ID NO: 63552 - DNA, 2142 bp, Neisseria meningitidis; identical to SEQ ID NO: 57888

SEQ ID NO: 63553 - DNA, 810 bp, Neisseria meningitidis
atgcacgccctcccccgctacgccgtttttggcaaccccgtcgcccacagcaagtcgccgcagattcatcaacaatttgcccttcaggaaggcgttgacattgaatacgaacgcatttgcgccgacatcggcggtttcgcgcaggcggtttcgacattttttgaaacaggcggttgcggggcaaacgttaccgtaccgttcaagcaggaagcgtttcatctggcggacgagcattctgaacgcgcattggctgccggcgcggtcaacacgctgatttttctgaaaaacggaaaactgcgcggcgacaataccgacggtatcggtttggccaacgacatcacgcaggtcaaaaacattgccatcgaaggcaaaaccatcttgcttttgggcgcgggcggcgcggtgcgcggcgtgattcctgttttgaaagaacaccgtcctgcccgtatcgtcattgccaaccgcacccacgccaaagccgaagaattggcgcggcttttcggcattgaagccgtcccgatggcggatgtgaacggcggttttgatatcatcatcaacggcacgtccggcggcttgagcggtcagcttcctgccgtcagtcctgaaattttcctcggctgccgccttgcctacgatatggtttacggcgacgcggcgcaggagtttttgaactttgcccaaagcaacggtgcggccgaagtttcagacggactgggtatgctggtcggtcaagcggcggcttcctacgccctctggcgcggatttacgcccgatatccgccctgttatcgaatacatgaaagccatgtaa

SEQ ID NO: 63554 - DNA, 726 bp, Neisseria meningitidis
atgccccgattctacctgcccgaaaacctttccgtcggacaaaccgtcgccctgcccgacaacatcgtccgccacctcaacgtcctacgcgtccgccccaacgaaaacatcaccctcttcgacggcaaaggcaaggcacacgccgcacagctgaccgttttggaaaaacgccgcgccgaagccgaaatcctgcacgaagacacaaccgacaacgagtccccgctcaacatcacactgatacaatccatctcctccggcgatcgcatggatttcaccctgcaaaaaagcgtcgaactcggcgtaaccgccatacagcccgtcatcagcgaacgctgcatcgtccgcctcgacggagaacgcgccgccaaacgcctcgcacgctggcaggaaatcgtcatctccgcgtgcgaacaaagcggcaggaacaccgttccccccgtactgcccatcatcggctaccgtgaagcactcgacaaaatgccgtctgaaagcaccaagctgattatgagcatcaaccgcgcccgcaaacttgccgacatccgccacccgtccggcgcaatcgtctttatggtcgggcccgaaggcggctggacagaacaggaagaacaacaggcatttgaagccggctttcaggcggttacactcggcaaacggattttacgcacagaaaccgccccactcgccgccctcgccgccatgcagacgctttggggcgatttcgcataa

SEQ ID NO: 63555 - DNA, 963 bp, Neisseria meningitidis
atgcagtatgccaaaatttccggcacgggcagctatcttcctgccaaccgcgtcagcaatgacgaccttgcccaaaaggtagatacctctgacgagtggattaccgcgcgcacgggcatcaaattccgccatattgcagccgaaaacgaaaaaaccagtgaccttgccgccgaagcggcgcgccgcgcgctggatgcagccggattagacagcggcgaaatcgatttgattatcgtggcaacggcaacgccggatatgcagtttccttctaccgccaccatcgtgcagcaaaaattgggcatcaccaacggctgccccgcgtttgacgtacaggcggtgtgcgccggctttatgtacgcgctgaccacggcaaacgcctacattaaaagtggtatggcgaaaaacgcgctggtcatcggcgcggaaaccttcagccgcattgtagactggaacgaccgcacaacctgcgtattgttcggcgacggtgcgggcgcggtggttttaagcgcggcggacaaaccgggcatcatccacagcaaactcaaggccgacggcaattatctgaaactcttaaacgtccccgggcaaatcgcctgcggcaaagtttccggttcgccgtacatttcgatggacggtcccggcgtgttcaagtttgccgtcaaaatgctgtccaaaatcgccgatgacgttatcgaagaagccggttacaccgccgctcaaatcgactggatcgtgccgcatcaggcaaaccgccgcattatcgaatcgaccgcgaaacatttaggtttgagtatggacaaagtcgtcctgaccgtccaagaccacggcaacacatccgccgcctcgattccgctggctttggatacgggcatccgcagcggacaaatcaaacgcggtcaaaacctgctgctcgaaggcatcggcggcggtttcgcgtggggcgcggtgctgttgcaatattga

SEQ ID NO: 63556 - DNA, 4125 bp, Neisseria meningitidis
atgacctaccccatccccaaaccccgtgaaaaatcccgttggtccaatctttcgcaaggctcgctgcccttggctttggcgcgttatctgccgcacaagcggctcaaggtcgtgctgacccaagatgcggaacaggcgctacgccttcagacggcatggcggtttttccgtccgcacgacacggcggtgttcctgccggactgggaaacgctgccttacgagcgtttttcgccgcatcaggatttggtgtcggaacggctgtcggcgttgtggcagattaagagcggcgcggcggacgtgttgttcgtgccggttgccacggcgatgcagaagctgccgcccgtgccgtttctggcagggcgcacgttttggctgaaaacagggcagactttggatataggccgtctgaaaaccgatttggtagatgcgggctacaaccatgtttcccatgttgttgcggcgggcgagtttgccgtgcgcggcggcattgtcgatttgttccccatgggcagcgaaatgccctatcgcatcgatttgtttgacgatgaaatcgacagcatcaaaacctttgatacggacacgcagcgcaccatctcccccgtttccgaaatccgcctgctgccggcgcacgagttccccaccgacagcgaagcgcaaaaaatcttccgcagccgcttccgagaagaagtcgacggtaatccgaacgatgcggctgtgtacaaagccgtcagcaacggccacttcggcgcgggcgtggaatattatctgccgctgttttttgaaaatgagctggaaacgctgtttgactatatcggcgaagacgcgctgtttgtctctttgggcgatgttcacgccgaggcaaaccgcttttggagcgatgtcaaatcccgttacgcgatggcgcagggcgacgaaacctatccgcctttgcttccacagcatttgtatctctctgctgatgtttttgcaggccgtctgaaaaactacggacaagtgctgcccgatgtttccggcaaggaacacaccctgcccgaccttgccgtcaaccgccaatccgacgagccgttgcaggcattgaaggattttcagacgacctttgacgggcggattttgctgtgcgccgaaagcttgggacggcgcgaaaccatgctcggtttcttgcagcaaaacggtttgaaagccaaacctgtgtccgactggcagggcttcttgtcggcgcatgagccgctgatgattacagttgcgccgttggcttacggattcaaactgggcggattgcaatccccgaaccagcagcaaactacttccgcctccgaaggagaaggcgatgcggttaccgaccaaaccgaattttccgcatccgcaacaaaccctctccctagccctctcccacaggagagggaacaaagtgcagccgccgtttcagacagtctgaaagcagccgccgtttcaaccgaaagcagcctgcccctcggtacaagtaatctgcacgggcaaatccgacagcaacctgccccttcccccgtgggggagggttggggggagggttggggagagggcaaagcagttgccgctcaaaccgaatttcccgcatccgcaacaaaccctctccctagccctctcccacaggagagggaacaaagtgcagccgccgtttcagacgacctgaaaaccaaaagcagcctgcatcccgtcgcaaataatctgcacgggcaaatccgacagcaacctactccctcccccgtgggggagggttggggagagggcaaagcagttgccgctcaaaccgaattttccgcagccgcaacaaaccctctccctagccctctcccacaggagagggaacaaagtgcagccgtcgtttcagacaacctgaaaaccgaaagcagcctgccccccggtaaaagtaatctgcacgggcaaatccaacagcaacctgccccctcccccgtgggggagggttggggagaaagcaaagcggttgccgaccaaagtgccatcgccgtcatcaccgaatccgagctctaccaatacgtcgcccgttcgcgcgcccacaaccgccgcaagaaacacgccgccgtttcagacggtctgttgcgcgaccttgccgaaatcaatatcggcgatcccgtcgtgcacgaagaacacggcatcgggcggtatatgggcttggtcacaatggatttgggcggcgaaaccaacgaaatgatgttgctcgaatactcgggcgaagcgcagctttatgtgcctgtttcgcaactgcatttaatcagccgctactccggtcaggcgcatgagaacgtcgccttgcacaagctcggcagcggcgcgtggaacaaggcgaagcgcaaagccgccgaaaaagcgcgcgacaccgccgccgaattgctcaacctctacgcccaacgcgccgcccaatcgggacacaagtttgaaatcaacgagttggactatcaggcgtttgccgacggcttcggctacgaggaaaccgaagaccaggccgccgccatcgccgccgtgattaaagatttgacgcaagcgaagccgatggatcgccttgtgtgcggcgatgtcggcttcggcaaaaccgaagtcgccctgcgcgccgcgtttgtggcggtgatgggcggcaaacaggtcgccgtacttgctccgaccactcttttggtcgagcagcacgcgcaaaacttcgccgaccgtttcgccgatttccccgtgaaagtcgccagcctttcgcgtttcaacaacagcaaagccaccaaagccgcgctggaaggcatggcagacggcacggtcgatattgttatcggtacgcacaaactggtgcaggacgacatcaaattcaaaaacttaggtttagtgattatcgacgaagaacaccgcttcggcgtgcgtcagaaagagcagctcaaacgcctgcgcgccaatgttgatatccttaccatgaccgccacgccgattccgcgtactttaagtatggcgttggaaggactgcgcgacttctcgctgattaccaccgcgcccagccgccgcctcgccgtcaaaacctttgtcaaaccctttagcgaaggcagtgtgcgcgaagccgttttacgcgaactcaaacgcggcggacaagtgtttttcctgcacaatgaagtggatacgattgaaaatatgcgcgggcggctggaaaccctgctgcccgaagcccgcatcggcgtggcgcacggacaactgcgcgagcgcgagctggaacaagtcatgcgcgactttttgcagcaacgatttaacgtgttgctctgttccaccatcatcgaaaccggcatcgacattcccaacgccaacaccatcatcatcaaccgtgccgacaaattcggattggcgcagctgcaccagcttcgcgggcgcgtcggacgcagccaccaccaagcctacgcctacctgctcacgcccgaatacatcactaaagacgcagaaaaacgcctcgatgccattgcggcggcagacgaactcggcgcaggtttcaccctcgccatgcaggatttggaaatccgcggcgcaggcgaaatcctcggcgaagggcagtccggcgaaatgatgcaggtcggcttcacgctctacaccgaaatgctcaaacaggccgtgcgcgacctcaaaaaaggccgccaacccgacctcgacgcgccgctgggcatcaccaccgaaatcaaactgcacagccccgccctactgcccgaaagctactgccccgacatccacgagcgtctcgtcctctacaaacgcctcgccgtctgcgaaaccgtgcagcaaatcaacgccatacacgaagaactcgtcgaccgcttcggcctgcccgaacaacccgtcaaaacccttatcgaaagccaccacttacggcttatggcaaaagaattgggtatcgatgccattgatgcggccggcgaagcggtaacggtaaccttcggtaaaaacaataatgtcgatccaaccgaaatcatcctgctgattcagaacgacaaaaaataccgccttgccggcgccgataagctgcggtttaccgcagagatggaaaatatcgaggtcagaatcaacaccgtaaaaaacgttttaaaaaccttgcaaaacagatgcctgcccaaataa

SEQ ID NO: 63557 - DNA, 369 bp, Neisseria meningitidis
gtgtggcgcgacggtatctatcatacgggcttggtttttgaagacggtcaggtgcgcgaggtgtcggccgaggctgcggcaaagttgttgcgccacggtgatgtgtttgtcgccgccccgggcaaacgtgtgatcaaggcggatgatacggaggctttggaaaaggcgggtgctttggaagtcgaacgggaagaggcggcgtttgatgcggtgcaggatgtgatcctgcaaatcaaccggatgggcaaggacgagcttgaactgtatgcgaaggcgaattacggtcagagtttggataagcgcaaatcggcggagaatttgcgtgaggctgtggttcagatggttcatcagtttggtatcgtgcaatga

SEQ ID NO: 63558 - DNA, 198 bp, Neisseria meningitidis; identical to SEQ ID NO: 41474

SEQ ID NO: 63559 - DNA, 270 bp, Neisseria meningitidis
atggcaatgaacaaattgaatttccttctgctgcttgcggtgtgcgtttccgctttttccgttgtgatgcagcaaaaccagtacaggctcaatttcacagctttggacaaggcgaaaaaacaggaaatcgccttggagcaggattatgcgcaaatgaggctgcaacaggcgcgtttggcgaaccacgaagcgatcagggcggcggcagaaaaacaaaacctccatccgccggtttcgggcaatacctttatggtggcgcatcaaagatag

SEQ ID NO: 63560 - DNA, 792 bp, Neisseria meningitidis
atgtccgaacaccgagtcaaccacgaacccgtcttcctgttggcttcctcgccatggcgcgaaagcagcctgcgggtcgaagcgttcagccgccgttacgggcgtgtggcacttttggcaagaagcgcgcgcaagcggcagagcgaattgcgcggcgtattggtttctttcgtgcccgtcagtgcgtcgtggtacggcagtcaggaactcaaaaccctgcaccgtgccgaatgggtcggcggatggcggcagccgcagggcagggcgttgttcagcggtctgtatgtgaacgaactggtgttgaaactgaccgcgcgcgaagacccgatgcccgaactgtacgacgcgttggcaaaagtgatggaggcggtgtgccgtgaagccaaccatattgccgatttgcgccgcttcgagtggaagctgctcaatgccttgggcgttgcccccgatttgcacgccgacggcacgggcggcgatattttggcggacaaaacctaccggctgatgcccgaagaggcggtcatgcccgtatgcgaggacgcagacgcgctttcgcacgaagccggcgcaattgtcgaagggcaaagcctgatcgatttgcgcgaaggcagtttccgcaccgccgaaagcctgcaacaggcattgaaaatcacacggctttttatccgccacctgttgcccgaggggctgaaatcgcggcaggtgttggaacagatacggcagtttgaccgcaaagaaaccgcccgggaaaccgtcccgacttcggacggcacggcttcaaatgccgtctga

SEQ ID NO: 63561 - DNA, 438 bp, Neisseria meningitidis; identical to SEQ ID NO: 43498

SEQ ID NO: 63562 - DNA, 3615 bp, Neisseria meningitidis
atgtctgcacccatccaagcattcgacccgctgaccgtccccatttccggcaccaacctgattgaggcctctgccggcaccggcaaaacctacggcattgccgccctgtttacgcgcctaatcgtattggaacaaaaaagcgtcgagcgcgtattggtcgtaacctttaccaaagccgccaccgccgagctgaaaacacgcctgcgcgcacgtttggacgatgtgttacaagttttagaaagcaaaggaattgccaaacttggagacgacacgctttcagacggcatcgccgcctactgcgccgaacaccacgaaggcgacaccttcctgcccgaactcttaaaacaggctttgcaaaaagagggccggacgcgtctgattgtccgcctcaaggccgccatcgggcaattcgacaacgccgccatctataccatccacggcttctgccagcgcatcctgcgcgactacgccttcctgtgccaagcaccgttcgatgtcgaactgaccgaagaagacggcgaccgcctgcttatcccggcgcaagatttttggcgggaacgcgtcagcaatgatccggtgcttgccgcattggcgtttaaacgcaaagctgtgccgcaaaccgtccttgcccaaatttcgcgctatctttcccgcccgtacctgaatttccgccgtccgcaggcggatttgaaacaggcgcagcgcaacgccgaaacctcatggcaaaccatctgccgcctgctgccagaactggaagccggcttttggcgcattcatcccgacctcaacggcaacagttaccgcaaaaacagcttcggcaacctttttaaagaactggcacaaaaatccgccgccggacaactgccctttctggacaaagacacacacgacagactcttgaaacttgcgtccgacaaactcgaagccggactgaaaaaaggcaaaacgcccgatgcggcagtatttgccgaattgcagaaactggcagacttcgggcgcgatttgaacgcactcgaagaagcggaagaagcaacaatgatccggctgcaactggatttaatcgaatacctcaaccgcagccttgccgagatgaaaaaatcgcgccgcgaacgcggtttcgacgacctgctgctcgatgtccacaccgcgctgaccgacaatccgcacgccgaaaccctcgcccgcgccgttgccgaaaactgggaaaccgcgctgatcgacgagttccaagacaccgacccgctgcaatacgaaatcttccaaaaaatcttcatcgcccaaaaccgcccgctgtttctggtcggcgatcccaaacaggcgatttacagctttcgcggagcggacatttacgcctaccttcaggcagcggaagacgcgcggcaccgctacacgctcgccaccaactaccgcagccacgccgcgcttatcggcagcataggcgcactgttccgcctcaaagaacgcccgttcgttttggaaaacatcggctattcggaagtcggtgcggcgcgtgccgaaagcagattgtcgcccaaacgtcctgccgtacaggttcgttggctgcacgaaaacgacaatgaaaaagccaacaaagacgttttgcgccgacgtgccgccgactattgcgccgacgaaatcgcccacgcgctcaacgaagccgccggaggccgtctgaatttcaaaggctgcccgttgcagtcgggcgatattgccgtgctggtacgcacgcacaacgaggcggtgatggtttccgccgccctgaaaaaacggcaggtgcaaagcgtcctgctttcgcgcgaatccgtgttcgcctcgcccgaagccgccgccctgtccgcactcatcggcttctggctcgaaccgcgccgcgccggaacgctgcgctttgtcctgacaagcagcatattcggctataacgcgcagcaattgcacgacttcaaccaaaacgaaagcgagattttgcattgggcggaatctgcccgaaccgcgctcgacaactggaatcaatacggcattttcgccgctatgcagcaattttcccaaacacacggcatcgaaacacgcctcttaagccggaacaacgggcgcagcctgaccaactatttccaactgctcgaactgcttgccgccgaagacgcgcaaaaccgcaaccccgccgcgctgcacaaatggctgcgcgaccaaatcagcctggccggcaacaacggcggcgacaaccgcgccatccgtctggaaagcgacgaagatttggtcaaaatcgttaccatgcacgcctcgaaaggtttgcagtatccgctggtgtactgcccgtttgcgtgggacgcgcaagataccgggccgtccgactggcaaatcctccaccaaagcgcaaaccgaaccgaactgttggcaaaggcgcaactgtcggaagacgaacagaagcaacacgccgacgaagaaatggcggaacgcctgcgcctgctttatgtcgcactgacgcgtgccgaggaacagctcaacatctacgccgcatactccaccaataccgccgacaaccccctcgcctacctaattgaaggcttgccgcaagacagccgcgaaaccgtccgctgtgcctatgcgtgtgaaaaagacggcatcgcgatgctcaaacgcaactggcagcgtttgacggacaacgccccttccggcacggatttcgccttcacagaagatgtgccgccccctgccgtatattgcggcaatgccggtcaaaccgccgaatttgccgcaaacagcattcccgaacgcggattccgatttgtccgccacaccagctttaccgccttaagccgccatacccaaacgcccgacggcggggaagaagatgcctgcccgtccttggatgccgccgaaacctcggtgccggcgatgccgtctgaaacgccgacggcttcagacggcatatcgatacacaacttcccgaaaggcacgcaggcggggctgtgcctgcacgaaattcttgaagatttcaaattcggacaagcagccgccagacaggaaaccctcattgccgacaagctgaaaaaatacggatttgaagaaatatggctgcccgccgttgccgaaatggcggaagcctgccagaaaacgccgctgacgggggcatacggtctgtccgacatcccgcccgagtgccgctgtcccgaaatgggctttaccctccacaccgaagacttcggcctcaaacggctgcgcgactggtttgcccgcgacgatgtccggctgcccgaagtctgccgtgccgccgccgaaacgctagacttccacaccgtcaacggctttttaaacggctttatcgatatggtctgccaagaccccgacggcaatatctgcgtcatcgactacaagtcgaaccacctcggcgcggacgcatccgcctacacgcaacaggcgatggacgaagccgtcacgcaccaccactattaccttcaggcgctgatttacgccgttgccgccgcacgctacttcaaactgcgcggacaaccgcccgccgccgtttccgtccgctacctgtttttgcgcggattggatggcaaaggcggcggcgtttggcgttgggacatagatgccgccgctttggaacagataaaataa

SEQ ID NO: 63563 - DNA, 435 bp, Neisseria meningitidis; identical to SEQ ID NO: 45056

SEQ ID NO: 63564 - DNA, 702 bp, Neisseria meningitidis; identical to SEQ ID NO: 41461

SEQ ID NO: 63565 - DNA, 774 bp, Neisseria meningitidis
atgtatcaccaaatcggaatgtgggatcaaaaatgggtcatcggcaactggaaaatgaacggccggctccagaacaacaattcgctcatgcaccgcttccgcatcctccccaccgccgaacgcgtcctcatcggactcgccgccccgaccgtttacctgctgcaactgcacaacgccatgcaaatcgtcttaaacaaccgcatcctcacctgcgcccaagacgtgagccgcttccccgacaacggcgcgtacaccggcgaagtgtccgccgaaatgctcgccgacaccggcacagacatcgtcctcatcggacactccgaacgcagcctttatttcggcgaaaaaaacgaaatccaacgccgcaaaatggaaaacgtcctcaacgtcggactcatcccgttattgtgcgtcggcgaaagcctcgaagagcgcgaagccggcaaagaacacgaagtcatcgcccatcagctttccatcctgcaagggctggataccaaaaacatcgccgtcgcctacgaacccgtctgggcgatcggcacaggcaaagtcgccaccgtcgaacagattgccgatatgcacgcattcatctacaaagaaatcttgtctttgtgcggaagcgatgttaaaatccgcgtcctttacggcggaagtgtgaaagcggacaacgcggccgacatcttcgcagtaccttatgtggacggcgcactcgtcggcggcgcgtcattgtcgtacgactcctttaccgccatcatcagtgccgcacaaaatgcgtag

SEQ ID NO: 63566 - DNA, 2691 bp, Neisseria meningitidis
atgtccgacaaccgcctcgacaccgcccgccgccattccctcttcctcgcccgccagctcgacaacggcaaactcaagcccgaaattttcctgcctatgctggacaaggtttggaccgaagcggatttccaagcctttgccgactgggacaaaatccgtgcggaagaaaacgaggaagaattggcgcggcagttgcgcgggttgcgccgttatgtggtgtcgcagattatcgtgcgcgatatcaaccgcatcagcgatttgaacgaagtaacccgcacgattacgctgtttgccgattttgccgtcaataccgcgctggattttgcctacgcctattatcgggacatgtacggcacgccgatcgggcgttataccaaatcgccgcagcatttgagcgtggtggcgatgggcaaggcgggcggctatgagttgaacgtgtcttccgacatcgatttgattttcacctatcccgaatcgggcgacaccgacggcaggcgcgaacggggcaatcaagagtttttcaccaaagtcgggcagaaactgattgcgctgctgaacgacatcaccgccgacggacaggtgttccgcgtcgatatgcggctgcggccggacggtgattcgggcgcgttggtattgagcgaaaccgcgctggagcaatatttgattacgcaggggcgcgaatgggaacgctacgcgtggtgcaaaggccgcgtggttacgccgtatccgaacggaatcaaatcgctggtgcgccctttcgtgttccgcaaatatttggattacagcgcgtatgaggcgatgcgtaagctgcaccgccaaatcagcagcgaagtcagcaaaaaaggcatggcggacaacatcaaactcggcgcgggcggcatccgcgaagtcgaatttatcgcccagattttccagatgatacgcggcggacaaatgcgcgcgctgcaactgaaaggcacgcaggaaacgctgaagaagcttgccgagctgggcatcatgctgtctgaacacgtcgaaaccctgcttgccgcctaccgattcctgcgcgatgtcgaacaccgcctgcaatactgggatgaccagcaaacccaaaccctgcccacttcgcctgaacagcggcaactgctcgctgaaagcatgggtttcgacagctacgccgctttttcagacgacctcaatgcccaccgcaccaaagtcaatcagttgtttaacgaaattttgagcgaacccgaagagcaaaccctagacaccagcgaatggcaatgggcatggcaggaaaagcccgacgaagaagagcggcaaggtcgtctgaaagaacacgggttcgatgccgaaaccatcgccgcaaggctcgaccaaatccgaaacggtcataaataccgccatctctccgcacatgcccagccgcgtttcgatgcggttgtgccgctgttcgtacaggcggcggcagagcaaagcaacccgaccgatacattgatgcggctgttggattttctcgaaaacatcagccgccgatccgcctatctcgccttcctcaacgaacatccgcaaaccttggcgcaattggcgcagattatgggccaaagttcttgggtggcggcgtatctgaacaaatatccgattttgttggacgaactcatcagcgcgcagcttttggataccgcgtttgattggcaggcgctcgccgccgccctttcagacgacctcaaagcctgcggcggcgatactgaagcgcaaatggacaccctgcgccgcttccagcacgcccaagtcttccgtctcgccgtccaagacctcgccggactgtggacggtagaatccctctccgaccaactctccgccctcgccgacaccatcctcgccgccgccctgctgtgcgcatgggcggacatgcccaaaaaacaccgcgacacaccgcaattcgccgtcgtcggctacggcaaactcggcggtaaagaactcggctacgcctccgacctcgacctcgtctacctctacgacgacccccaccccgacgcaggcgacgtgtacagccgcctcgcccgccgcctgaccaactggctttccgccgccactggcgcaggcagcctctacgaaaccgacctgcgcctgcgccctaatggcgacgccggtttcctcgcccacagcatcgccgcctttgaaaaataccagcgcgaaaacgcctggacgtgggaacaccaatcccttacccgcgcccgcttcatctgcggcacgcccgaaattcagacggccttcgaccgcatccgcaccgaaatcctcaccgccgaacgcgaccaaaccgccttgtcaggcgaaatcatcgaaatgcgcgaaaaaatgttccccacccacccgcctgccgacagcaacgtcaaatacgcacgcggcggcgtggtcgatgtcgaatttatcgtccaatatctgatacttgcccatgcccgccagtatccgcaactcttggacaactacggcaacatcgccctcttaaacatctccgccgactgcggtttgattgacaaaaccctcgccggacaaagccgcaccgcctatcgcttctaccgccggcagcagcacaacaccaaactgcgcgacgcggcaaaaaccgaagtaagcgacgaattactgtcccattacggcaatgtcaggaaattgtggcgggaagtgttcggcgaagaagcggcaaccgcctga

SEQ ID NO: 63567 - DNA, 3309 bp, Neisseria meningitidis
atgaatgagggtgaagttgttttaacaccagaacaaatccaaaccttgcgtggttatgctttccgtggcgatacctatggcggttggcgttatttggctaatttgggtgaccgttatgcggatgatgctgctgcaattgtcggtaaggatacaaacttaaatggtttgaatttatggatgaaaaaaggggtggaaaacctatgggatgatacggtcggtaaaaagacccgtttagagaaatttgatcgggttgcactgcaacatttcaggcaatatgcgcgtctaattaatgaaaataatggtagattacctaacactagtgaaattgagagaagttactataaagccgttaccgataatggcgtttcttccagtgcagctattgatttagttattaatcgttcacttccggatatggcggatggttattgggcattaggtttggggatagaagccgaacgtatccacaatgagcaagcagtaaataatccgaacggtagcgaatgggataatagaaagcagttaatatctgctttagataaaggatttgatggatcttttaaagagaagccttttacttttttacaatctgtgataatggatgtaacaaagttaagtgttgaatatacaatagatggttggcaaaaaattggaggttggggtaatgggataatcaatgatttatataaaagtgttgcaaaaagagagtggactggaatatttgagatcgttaataataacatcaagcaatttagagatctgttcccaaatccggaaggctggatcgatgatggtcaccaatgtttcgctccttgggttaaagaaactaaaaaacgcaatggcaaatatcatgtctacgaccccctcgccctagatttggacggagacggcatagaaaccgttgccaccaaaggctttgcaggtgcattgttcgaccaccgcaatcaaggcatccgcaccgccaccggttgggtttctgccgatgacggtttactcgtccgcgatttgaacggcaacggcatcatcgacaacggcgcggaactcttcggcgacaacaccaaactggcagacggttcttttgccaaacacggctatgcagctttggccgaattggattcaaacggcgacaacatcatcaacgcggcagacgccgcattccaatccctgcgtgtatggcaggatctcaaccaggacggcatttcccaagctaatgaattgcgtacccttgaagaattgggtatccaatctttggatctcgcctataaagatgtaaataaaaatctcggcaatggtaacactttggctcagcaaggcagctacaccaaaacaaacggtacaaccgcaaaaatgggggatttacttttagcagccgacaatctgcacagccgttttaaagataaagtggaactcactgccgaacaggcaaaagccgccaatcttgcgggcatcggccgtctgcgcgatttgcgcgaagctgccgcattgtccggcgatttggccaatatgctgaaagcttattctgccgccgaaactaaagaagcacagttggcattgttagataatttgattcacaaatgggcggaaaccgattcgaactggggcaaaaaatcgccaatgcgactttcaaccgattggacgcaaacggctaatgaaggtattgcactgacaccatcccaagtagcacaactaaaaaagaacgctttagtttccctttctgataaagctaaagcagctattgacgccgcccgcgaccgcattgccgtgcttgatgcctacacggggcaggattccagcacactctattacatgagcgaagaagacgcgcttaatatcgtcaaagtaaccaacgatacatacgaccatctcgccaaaaacatctaccaaaacctgttgttccaaacccgtttgcagccatatttgaatcaaatcagtttcaaaatggaaaatgatacgttcactttggattttagtggtcttgttcaagcatttaaccatgtcaaagaaactaatccgcaaaaagcttttgtggatttggccgagatgcttgcatatggcgaacttcgttcttggtatgaaggccgaagactaatggccgattatgtggaggaggcaaaaaaagcaggtaaatttgaagattaccagaaagtgttgggtcaggagaccgttgcattattagctaaaacatcgggtacgcaagcagatgatatcctgcaaaatgtaggctttggtcataataaaaatgtttctttatatggtaatgacggcaacgacactctgatcggcggtgcaggcaatgattacttggagggcagcagcggttcggatacttatgtcttcggcgaaggcttcggtcaggatacggtctataattacgactacgctaccggacgcaaagacatcatccgctttaccgacggtattacagccgatatgctgacttttacccgagagggcaaccatcttcttatcaaggcaaaagacggcagtggacaagtgactgttcagtcctatttccagaacgatggctcaggtgcttaccgtatcgatgagattcatttcgataacggcaaagtactggatgttgccactgtcaaaaaactggtacagcaatccaccgacggttcggacagattgtatgcctaccaatccggaagtaccttaaacggcggattgggcgatgactatctgtacggtgccgacggggatgacctgctgaatggtgatgcaggcaacgacagtatctacagtggcaatggcaatgatacgctcgatggaggagaaggcaacgacgccctgtacggctataatggtaacgatgtactgaatggtggcgaaggcaatgatcatttgaacggcgaagacggtaacgacactctgatcggcggtgccggtaatgattacttggagggcggcagcggttcggatacttatgtcttcggcaaaggcttcggtcaggatacggtctataattaccatgtggataaaaactctgacactatgcactttaaaggatttaaagcagcagatgttcattttatccgttccggaagtgatttggtgcttagcgcttctgaacaagacaacgtacgtatttccggattcttctatggtgaaaaccatcgtgtagatacatttgtctttgatgatgcagctatcagtaatccagattttgccaagtatattaatgctggcaataatttggtacagtctatgtctgtgttcggttctaatactgcggcgacaggaggaaatgtggatgccaatacacaatccgtacagcagccgttattggtaacgccatctgcataa

SEQ ID NO: 63568 - DNA, 567 bp, Neisseria meningitidis
atggctaagaaaatcagtattttggtgggcagcctgcgccgagcttcttttgcgcgcaaagtggcattgaatgcggcggagatgttccccgaaggctggcaggcggaaatcgtcgaaatcggacatctgccgctttacaatttcgattatgacgaccctgcggtggaagatgtgccgctgcccgaaagctacacggttttccgcgaaacgattaaggcttcggacggcattttgttcgttacgtccgaaaataaccgcaccattcccgcctgtttgaaaaatgcggtggacatcggctcgaaaccgaatgccgacgtggcgtggaaaaacaaaccggcaggcatcatcagccattccgtcggcaagatgggcggttacagttcgcaaaaaaacctgcgccttgcgctgtcttatttcgatatgcccgtaaccggacagccggaagtgtttttgggcaattcgccgacactgtttgatgaaaacggcaaattgattgactcggcaagggattttgttcagtcatatattaatcagtttgtcggtttgattgaaagaaatgccaaataa

SEQ ID NO: 63569 - DNA, 294 bp, Neisseria meningitidis; identical to SEQ ID NO: 52089

SEQ ID NO: 63570 - DNA, 996 bp, Neisseria meningitidis
atgaaaacatctatccgatacgcactgcttgccgcagccctgaccgccgcaacccccgcgctggcagacattaccgtgtacaacggacaacacaaagaagcagcacaagccgttgcagatgcctttacccgggctaccggcatcaaagtcaaactcaacagcgccaaaggcgaccagcttgccggtcaaatcaaagaagaaggcagccgaagccccgccgacgtattctattccgaacaaatcccggcactcgccaccctttccgcagccaacctcctagagcccctgcccgcctccaccatcaacgaaacacgcggcaagggcgtgccggttgccgccaaaaaagactgggtggcactgagcggacgttcgcgcgtcgtcgtttacgacacccgcaaactgtctgaaaaagatttagaaaaatccgtcctgaattacgccacgccgaaatggaaaaaccgcatcggttacgcccccacttccggcgcgttcttggaacaggttgtcgccatcgtcaaactgaaaggcgaagcggccgcattgaaatggctcaaaggtctgaaagaatacggcaagccttacgctaaaaactccgtcgcccttcaagcggttgaaaacggcgaaatcgatgccgccctcatcaacaactactactggcacgctttcgcgcgtgaaaaaggcgtacaaaacgtccacacccgcctgaatttcgtccgccacagagatcccggcgcactcattacctattccggtgcagccgtgttaaaatcctcccaaaacaaggatgaggcgaaaaaattcgtcgccttcctcgccggcaaggaaggacagcgtgccctgaccgccgtccgtgccgagtatcctttgaatccgcacgtggtatccaccttcaatttggaacccatcgccaagttggaagcaccccaagtgtccgccaccactgtttccgaaaaagaacacgccacccggctgcttgagcaagccggtatgaaataa

SEQ ID NO: 63571 - DNA, 1155 bp, Neisseria meningitidis
atgagcatccatctcgacttcggcattagtcctaaaacgttccgacagacttatctgtatcaaaagcccaagctctttaaaggagcggttcggaatctcgaatccgcatcttggaaagatatcaacgagatataccaacgagcagacccaaccgcaccgctgtttcatctgcgtaaaaaaggcgcaatcgttcctaaagaagaatacgtcgaaagtttcgacgatttgggcaaaactcgctaccgttttattaaatccgttatctacgaacatatgaagaatggtgcgtcgttagtctataaccatattaacaacgagccgttttcagaccatatcgcccgtcaagtcgcccgctttgccggcgcacatactattgttagtggatatcttgcttttggcagcgacgaatcttataaaaaccattgggacacccgcgatgtgtatgccatccagcttttcggcaagaaacgttggcaacttactgcccctgatttccctatgccattgtatatgcaacagactaaagatactgatatttccattcctgaacatatcgatatggatattatccttgaagcaggtgatgtcctctacatcccacgcggttggtggcacagacctatcccgctcggctgtgaaaccttccacttcgctgtcggtaccttcccgcccaacggctataattacctcgagtggctaatgaagaaattccccacgatagaaagtctgcgccacagtttctcagactgggagcaagataggacgcgtatcaacgatactgccgcacaaattgctgccatgattgccgaccccgtcaattacgaagccttcagtgaagacttcctcggcaaagaacgcaccgataccgcttttcatctcgaacagttcgcgaatcccaacgctactccgctttcagacgacgtcaggttgagactaaatgccaataatttggatacgttggaaaagggatatttgattgggaatgggatgaagataagcgtagatgaattggggaaaaaagtgttagaacacatcggtaagaatgaaccgttattgttgaaaaatctactggttaacttcaatcagggaaaacatgaagaagttaggaagttgatttatcagttgatagagttagattttctggaacttttgtga

SEQ ID NO: 63572 - DNA, 375 bp, Neisseria meningitidis
atgcagtatctgattgtcaaatacagccatcaaatcttcgttaccatcaccattttggtattcaacatccgttttttcctactttggaaaaatccagaaaagcccttggcgggcttttggaaggcactgccccaccttaacgacaccatgctgctgtttacgggattgtggctgatgaaaattacccatttctccccgttcaacgcgccttggctcggtacaaaaatcctgcttctgctcgcctatatcgcattgggtatgatgatgatgcgcgcccgtccgcgttcgaccaagttctacaccgtttacctgctcgccatgtgttgcgtcgcctgcatcgtttaccttgccaaaaccaaagtcctgcctttctga

SEQ ID NO: 63573 - DNA, 828 bp, Neisseria meningitidis
atgcctgaattgccggaagtggaaacgacgttgcgcggcatcgcgccgcatattgaagggaaaacggtggaagccgtggtattgcgccaattgaagctgcgctggcagattaatcccgatttgggggagattttgtccggccggcaggtgttgtcctgcggcaggagggcgaaatacctgcttatccgctttcaaacgggcgtgctgctgattcacttggggatgtcgggcagcttgcggatttttacgccgtcggacggacgtatcggcaggccggacagacacgatcacgtcgatattgtgttttcagacggcacggtcatgcgttaccgcgatccgagaaagttcggcgcgatactttggtatgagggaatcgaagaacatcatccgctgttggaaaaactggggccggagcctttgtcggaggcattttgcacggattatctgtatgtgaggctgaaggcgcagaagcgcgcggtcaaacttgccctgatggacaatgcggtcgtggtcggtgtgggcaatatttatgccaatgagagcctgttcagagcgggcatttcgccccaccgtcctgccaaccgtctgaaaaagaaagagtgtgcgcttttggttgaaaccgtcaaagcggtgttgcggcgcgccattgaaacgggcggcagtaccttgagggattttgtggacagcgacggcaaaagcggctacttccaacaggaatatacggtgtacgggcggcacaatcagccgtgcccccagtgcggcggtttggttgtgaaagaaactttggggcagcgcggcacgttttactgcccgaattgtcagaaatag

SEQ ID NO: 63574 - DNA, 1389 bp, Neisseria meningitidis
atgaatgcagtcgtagttgccgtaatcgttatgctggtgctgtcgctgtcgcgcgtgcacgtggtattgagcctgacggtcggcgcgtttgtcggcggcgcggtggcgggtatgccgctgcaaaacattgccgatgcggcgggacaggtcagccaggcggggattatccccgtgttcaacaaaggtttggaaggcggtgcgaagattgcgctttcttatgcgatgctcggcgcgtttgcaatggcgattacccattccggcctgccgcagcagcttgccggcgcggtcgtccgcaagctgaaccggggcggtatgcccgacagcgtgcgttcgggcgagggcgcggtcaaatggctgctgctttccatcatccttgtgatgggcatgatgagtcagaacatcatccccatccacatcgcctttatcccgatgattgttccgccgctgcttttggtgttcaaccgcctgaaaatcgaccgccgcctgattgcgtgcgtcatcactttcgggctggttacgacttatatgttcctgccttacggcttcggcgcgatttttttgaatgaaatcctgttgggcaacatccattccgccgcgccgcagcttgatgtgaaaaacatcaacgtaatggcggcaatggcgattcccgcgttgggaatgctggccggactcctgctggcgtttgtccattaccgcaaaccgcgcctgtaccaaagcaacaatgccgatacggcgggcaacgccgatgcggcaaaccgtccgcagccgtccgcctaccgcagcctggccgccgccgccgccattgccgtatgctttgccatccagttgatgtatgaagactcgctggtgttgggcgcgatgctcggtttcgccgtatttatgatgttgggggtcatcaaccgcgacaaggcaaacgacgtattcggcgaaggtatcaagatgatggcgatggtcggcttcattatgattgccgcgcagggttttgccgccgtgatgaatgcgaccgggcatattcagccgctggtggaaagcagtatggcgatattcggcaacagcaaaggtatggcggcattggcgatgctggtggtgggacttttggtaacgatgggcatcggttcgtccttttccactttgccgattattgccgcgatttatgtgcctttgtgtgtcggtttgggtttttcgccacttgccaccgtcgccattgtcggcacggcgggggcgttgggcgatgccggttcgcctgcgtccgattccacgctgggtccgacgatggggctgaacgccgacgggcagcacgaccacatccgcgattccgttatcccgaccttcatccactacaacatcccgctgctgattgccggctggattgccgcaatggtgctgtaa

SEQ ID NO: 63575 - DNA, 1512 bp, Neisseria meningitidis
ttgatttttatggatgacgacagtccaaaagttttgaagcaagcttcctcaacgagagatgaaacgatgagtacacagacaaattttgatttggtgttgttcggtgcgaccggcgatttggcaatgcgcaaacttttgccctgcctgtatcaggcgcacgtggccggtttgcttcatcccgaagggcgtattttgggggtcagccgcagcgagttggataccgaaggttttctggcgaaggtggaaaccagttccaaaatccatgtgaaagaaaatttttccgatgaggcttgggcatcgtttgtcgaacgtttcgcatatctcaaagtcgatgttacgcagccggacgattttgccgctttgggcgatttggtcaaagcgcgcaaagaaaccgacaatgtcgtcatctatctttccaccgcgccgaaattcttcgcgcaaacatgtgaaaaccttgccaaaatcggtttgaacgccgacaacgtgcgtgtggttttggaaaaaccgttgggtacggatttggcttcttcccagcaaatcaataccgatgttgcgcgttatttcaaagaagggcaaatttaccgcatcgaccactaccttggcaaagaaagcctgcaaaacctgcttgcgctgcgttttgccaatgtaatgttcgagccgctgtggaacaataaatacatcgaaagcgtgcagttgaccatcgccgaacagctcggtgtggaagagcgcggcgagttttacgacattaccggcgcgttgcgcgatatggtgcaaaaccatttgatgcagatgctgtgcatgactgcgatggaagcccccgccagcttggatgccgacgcggtgcgcgatgaaaaagtcaaagtcatcaagtcattgaagccgctgaccgtcgaatctgtcaatgaaaacgtcgtgcgcggacaatataccgccgccaaaggcatgaacggctatcttgaagaaatcaacgttccgcaagacagctttaccgaaacctacgtcgccattaaagccgaaatcgaaaacgaacgctggaagggcgttcccttctacctgcgtaccggcaaacgcatgacgggtaaagtggcggaaatcgttttgaacttcaaagatttgaacagccatatttttgaaagcagccgcaccgcgcccaatcggctcgttatcgagttgcaaccatatgaatccgtgcgcctctatacgcagatgaaaaccccgggtgcaggcaataaggtcgaaatcgtgccgctggcaaccgatttgggcaaagcattggaaggccgccgcgcggaagcttacgagcgcctgctgttggatgtgattaacggcaaactcgctttgtttaaccgccgagacgaactcgaagccgcatgggaatatgtgatgccgattttggaaaactggacaaataacaccacgccgccgcacggctacggcgcacactcgtgggggcctgaagccgcgcgcgaactattggcgcgcgacggacacaagtggcacgaagagcagtaa

SEQ ID NO: 63576 - DNA, 546 bp, Neisseria meningitidis
ttgatattggcggttgccttgggcagcctgtcggcatggttgggacgcatcagcgaagtcgagattgaagaagtcaggctcaatcccgacgaaccgcaatacacaatggacggattggatggcaggcggtttgacgaacagggatacttgaaagaacatttgagttcgaagggcgcgaaacagtttcccgaaagcagcgacattcatttcgactcaccgcatctcgtgttcttccaagaaggcaggttgttgtacgaagtcggcagcgatgaagccgtttaccataccgaaaacaaacaggttctttttaaaaacaacgttgtgctgaccaaaaccgccgacggcaaacggcaggcgggtaaagttgaagccgaaaagctgcacgtcgataccgaatctcaatatgcccaaaccgatacgcctgtcagtttccaatatggtgcatcgcacggtcaggcgggcggcatgacttacgaccacaaaacaggcatgttgaacttctcatctaaagtgaaagccacgatttatgatacaaaagatatgtaa

SEQ ID NO: 63577 - DNA, 564 bp, Neisseria meningitidis; identical to SEQ ID NO: 45112

SEQ ID NO: 63578 - DNA, 1635 bp, Neisseria meningitidis
atgataaaaccgaacctgaggccgaagctcggctcttccgcgctgattgccttcctttccctgtattcctcgctggtattgaattacgccttttttgccaaagttgtcgagcttcatccttttaacggcaccggggcggatatcttcctctatacgatgccggtggtgctgttttttttaagtaatttcgtttttcacgtcattgccctgcctttcgtgcataaggtattgattccgttgatattggttatcagtgcggcggtgtcttaccaagaaatatttttcaatatctatttcaacaagtcgatgttgaataatgtcttgcaaactacggctgccgaaagcgcgcgcctgattacgccgggctatgtgctgtggattgtatgtttgggcgtattgcccgcgctggcgtatatcgccgtcaaggttaaataccgcgtttggtataaggagcttttgacgcgccttgtgcttgccgccgtttcctttttgtgcgcgttgggtatcgcaatgttgcaatatcaggattacgcctcgtttttccgcaacaataaatcagtaacccatctgattgtgccgtctaatttcatcggcgcgggcgtgtcgaaatacaaagattggaagcgttccaatattccttatacgcaattggatatggcggtcgtgcaaaaccgcccggccggcagcctgcgccgtttcgtggtgctggtcgtgggcgagaccacgcgtgccgccaactggggtttgaacggttacagccgccaaactacgccgctgcttgccgcgcgcggcgatgaaattgtcaatttcccgcaggtcagaagctgcggcacatcgaccgcgcactccctgccgtgtatgttctcaaccttcgaccgcacggattatgacgaaatcaaagccgaacaccaagacaacctgctggacatcgtgcagcgcgccggcgtggaagttacctggttggaaaacgattccggctgcaagggcgtgtgcggcaaagtgccgaataccgacgttacctcgctcaacctgcccgaatactgccgcaacggcgagtgcctcgacaatatcctgctgaccaagttcgacgaagtcctcaacaaaaacgataaagacgcggttttaatcctgcataccatcggcagccacgggccgacgtattacgaacgctataccgaagccgaacgcaaattcacgccgacctgcgacaccaacgaaatcaacaaatgcacccgcgccacgctggtcaacacttacgacaatacggttttgtatgtggaccagtttatcgacaaggttatccgcaaacttgaaaaccgcgacgatttggaaagcgtggtgcattatgtttccgaccacggcgaaagtttgggcgaaaacgggatgtacctgcacgccgcgccttacgccatcgcgccttccgggcagacgcatatcccgatggttatgtggttttccaaagccttccgccaacacgggggcatagatttccaatgcctcaaacaaaaagcggcggaaaacgaatattcgcacgaccactatttcagcacggtattggggctgatggacatttccaatagccaaacctatcggaaggaaatggatatattggcagcctgccgccgtccgcgctga

SEQ ID NO: 63579 - DNA, 1155 bp, Neisseria meningitidis
atgaaatttaccaagcaccccgtctgggcaatggcgttccgcccattttattcgctggcggctctgtacggcgcattgtccgtattgctgtggggtttcggctacacgggaacgcacgagctgtccggtttctattggcacgcgcatgagatgatttggggttatgccggactggtcgtcgtcgccttcctgctgaccgccgtcgccacttggacggggcagccgcccacgcggggcggcgttctggtcggcttgactatcttttggctggctgcgcggattgccgcctttatcccgggttggggtgcgtcggcaagcggcatactcggtacgctgtttttctggtacggcgcggtgtgcatggctttgcccgttatccgttcacagaatcaacgcaactatgttgccgtgttcgcgctgttcgtcttgggcggcacgcatgcggcgttccacgtccagctgcacaacggcaacctaggcggactcttgagcggattacagtcgggcttggtgatggtgtcgggttttatcggtctgattggtacgcggattatttcgttttttacgtccaaacggttgaatgtgccgcagattcccagtccgaaatgggtggcgcaggcttcgctgtggctgcccatgctgaccgccatgctgatggcgcacggcgtgatgccttggctgtcggcggctttcgcgtttgcggcaggcgtgatctttaccgtgcaggtgtaccgctggtggtataaacccgtgttgaaagagccgatgctgtggattctgtttgccggctatctgtttaccggattggggctgattgcggtcggcgcgtcttatttcaaacccgctttcctcaatctgggtgtgcatctgatcggggtcggcggtatcggcgtgctgactttgggcatgatggcgcgtaccgcgcttggtcatacgggcaatccgatttatccgccgcccaaagccgttcctgtcgcattttggctgatgatggcggcaactgccgtccgcatggttgccgtattttcttccggtacagcctacacgcacagcatccgcacctcttcggttttgtttgcacttgcgcttttggtgtatgcgtggaaatacattccgtggctgattcgtccgcgttcggacggcaggcccggttga

SEQ ID NO: 63580 - DNA, 633 bp, Neisseria meningitidis
atgacggtatgggtcggactgaccggcggaatcggcagcggcaaatcggcagccgcgcaatgttttgccgatttgggcgtgccgcgcatcgatgcagacgcggcggcgcactcgctgacggcttcagacggcatcgccctgccggaaatcaggcggctgttcggcgacaccgttttcgacacacagggtttgttgcggcgcgacatattgcgtaaagaagtctttgcctccccatcgcgaaaagccttgctcgaatccgtgatgttgccgctgattttctcagaaatcaaaaaacagcaagaaacctttaccgatgcggtttacggcattgtcgaaattccgctgctgacggaaaagcgtcaatttatcagcctgatacggcgtgtcctgaccataagtgcccctgtggaaaaacgtatcggcagggtgatggcccgcagcgggctgacgcgcggcgaggtggctgccatcatcagccatcaggcatccgaatccgaacgcctgctgcttgcagacgatgtgctgctcaatgacggcagcctcaaaagcctgtgtgagaaaacaatgcgcctgcacgcgttttattcagggattttcgcctcaaaaccaacacaaggaaaacacaatgactga

SEQ ID NO: 63581 - DNA, 1149 bp, Neisseria meningitidis
atgcccctccccctcccctctcccgaagcacggcaattctcgctcaaactgcaaaccctcattgccgaaaaaatcggcaaacacggcaactggattccattttcacgttttatggaattggttttatacgctccgcaatacggctactacaccggcggcagccataaaatcggcaataccggggattttattactgcaccgaccctcacctctctgtttgcacagacactggcacgccaacttcaagaacttctatcccaaacggcgggcaatatctatgaattcggcgcgggaaccggacagcttgccgccgatttgttgggcagcatttcggacggcatcagccgttactatattattgaaatatcgccggagctggcagcacgtcagaaaaacctgattcaagcccgcgcaccggaagcatctcaaaaagttgtccacttgaccgcacttcccgaagcgtttgacggcatcatcatcggcaacgaagtactcgatgccatgcctgtcgaaatcgtccgtaaaaatgaaggcggctcattcgagcatgtcggcgtttgcctagataatgaccgttttacctattcggcacgaccgctgcacgacttacagctatctgccttggcttccctctattttcctcaaacagattatccctacaccagcgaactacatccgcaacaatatgcctttatccgcacccttgcctcaagacttgaacgcgggggtatgatattcatcgactacggttttgatgcagcgcagtattaccaccctcaacgcaatcaaggtactctgatcggacactaccgacatcacgttatccacaatccttttgacttcatcgggttggccgacctgaccgtgcatgtcaactttaccgacattgcccaagccggtacggatgccggattagatttgataggttaccttccccaatcccatttcttattgaacctgggcattaccgagctattggcacagacggggaaaacggattcggcagcctatatccgtgaagctgctgccgttcagaaactgattgaccagcatgaaatgggcgaactgtttaaagtcatcgcattcggaaaaaatatcggcgtcgactgggcaggattccgcttcggcgacatctgccacaaactctaa

SEQ ID NO: 63582 - DNA, 288 bp, Neisseria meningitidis; identical to SEQ ID NO: 43621

SEQ ID NO: 63583 - DNA, 435 bp, Neisseria meningitidis
atgcgccgggcgttgattgcgaaaattaagattgctcaaaaggagctgggcttggacgacggtacctatcgcgcggtgttggagcgcgtgacgggcaagcggtcgtgtgcggatatggatgtttccgaacttgagtctgttgtcgctgatatgcggtcgcacggatttaagcctaaagcaaaaggtaacccacacggtaaaccacatctgcgtcggacatcatcagcggcaatgttggacaaagtcgaagccctgctgaccgtcggcggcaaacattggaactatgcacacgcaatggcgcggcggatgtttggtaaggataaggtcgaatatttagacgatacgcagctacataaactggttgctgcgttgcagattgcggaaaacaggaaaacggaaaaagcgggtggggatgatggggttcgaaaaagttga

SEQ ID NO: 63584 - DNA, 1143 bp, Neisseria meningitidis
atgaatactttatatacacttttcgccacctgcccgcgcggcttggagaccgttttatctcaagaactcgaaagcctcggctgtaccgatgtacaagtgtttgacggcggcgtttcctgccggggcggattggaacaggtttacgccgccaacctgcattcgcgtactgccagccgtatcctgctgcgcctgaccaaagggacataccgcaatgagcgcaacatctacaaactcgccaaaaatatcaactggtttaattggtttactttacagcagacgttcaaagtcaaagtcgaggcaaagcgtgccaacgttaagagcatccaatttgtcggtttgaccgtcaaagatgccgtctgcgacgctttccgcgacatttacgatgcccgtccgagcgtggacaaagccgcgcccgatgtccgcatccacgcctttttggacgaacgcaatgttgaaatcttcatcgacacttcgggcgaagccctgttcaaacgcggctaccgcctggataccggcgaagccccgctgcgcgaaaaccttgccgccggactgctgctctcggcaggctacgacggcacgcagccgtttcaagacccgttttgcggcagcggcacgattgctatcgaagccgcttggattgccacaggccgcgcaccgggcatgatgcgccgcttcggttttgaaaaactgcaaaatttcgataaaacgctgtgggcggatttgcgccgccgcgccgaagcgcaaacccgccccgtccgcgccccgattgcaggcagcgacagcgaccgccgcatcgttcagacggcattggacaacgcacgcagtgccggggtggacgacatcgtttccttcagcgttgccgacgcgcagtccgtccgtccgaacggcgaaaacggcattatggtgtccaatccgccctacggtgtgcgccttgaggaagtccgcgctttgcaggcactgtatccgcagttggggacgtggttgaaaaaacactatgccggctggcaggtcggtatgtttaccggcgacagggaaatgcccaaattcatgcgcctgtcgcccaagcggaaaattccgctttataacggcaacctcgactgccgcctgttcctgattgatatggtgcagggatcgaaccgttga

SEQ ID NO: 63585 - DNA, 1587 bp, Neisseria meningitidis
atggcacttttcctcagcatattccccatcgtcctgctgatttggctgatggtgaaaaaaaacagtatgccctcctacgtcgcgctgccgattaccgcagtgctgatttacgccatcaaacttttctacttcgacgatgcgggaatgctgctcaacgccaccgccgcttccggcctcgtcaaaacgctcacgccgattaccgtgattttcggcgcgattatgttcaaccgtatgatggaaaccacgggctgcatcgatgtcatccgcaaatggctggcgaccatcagccccaaccccgtagcgcaactgatgattatcggctgggcttttgcctttatgattgaaggcgcatccggcttcggcacgcctgccgcgattgccgcgccgattctgatgagcttgggcttcaacccgttgaaagtggcgattttcactttggtgatgaactccgtccccgtctctttcggcgcggtcggtacgccgacctggttcggtttcgcaccgctgaacctgagtgccgaagacatcctcgccatcggcaggcagaccggcgtaatgcacttcttcgcaggtttcgtcatccccgtcatcggcttgggcttcatcgtaccttggtctgaaatccgcaaaaacttgggcttcgtcgccattgccgtcttctcctgcaccattccttatgtcgcattggcgatggtcaacgaagaattcccgtcgctcgtcgccggcgcgatcggcctgatggtgtccgtattcgccgccaaccaaggctggggcttgagcaaagaccacgccaaagacccgaatgccgaaaaagtgccgttcgcccaagtcgccaaagcactcgcccctttgggtatgctgatcggcatgctggtggttacgcgcatcaaacagctcggcatcaaaggcattttgaccagcaaagaagaatggttcagcttccaactgccgtttgatttgtccaaaatcaccgtcagcgactccctgacgattaccttcggcaatattttcggacaagatgtcagcgcgtcttaccaaacgctgtacgtcccggcttggattccgtttgtgctgaccgtttggatttgcatcctgctgtataaaaccaaattcaaagatgcctggacgatttattccgtaactttcaatcaaaccaaaaaaccgctgcttgccctgatgggcgcgctgattatggttcagctgatgctggtcggcggcgacaattcgatggtgaaaatcatcggtaaggaatttgccgcaatggcgggcgaacactgggtttatttctcgccgtatctgggcgcgatcggcgcgttcttctccggttccaacaccgtgtccaacctgaccttcggcccgattcagcagcaaatcgccttggataccggcctatccgttaccctgattctggcgttgcagtccgtcggcggcgcgatgggcaatatggtgtgcctcaacaacatcatcgccgtatgtaccgtattggatgtgaaaaattccgaaggtgcgattatcaagaaaaccgttatcccgatggcgatttacggcgtgattgccgtcgtcgcggcaatgattttcttcctctag

SEQ ID NO: 63586 - DNA, 906 bp, Neisseria meningitidis
atgggtttggacggacttgcggcatacttggacgcttatttggaaaatatcgtgcgcgagggtaaatcggagcatacggttgccgcataccggcgcgacttgcaggaactgcttgcccttctggaagaaatgccgtctgcaaacccttcaaattgcacgcgcggcgacttcgtacaggcattacgccggctgtccggccgcggtttgggggaacggacgctggctcgcaagctttcgtcttggcggcagtattgcgtttggctggtaaagcgcggcctaatgcacgccgacccgaccgccgacatcaaaccaccgaaacagccggaacgtatcccgaaagcactgcctcaggaatgtttgaaccagatgctcgacctgcctgtagatgacagcgacgcattggcattgcgcgaccacgcactgttcgaactgatgtacggcagcggtttgcgcctgagcgagatacacggcctggatacaggcgatgtgtggttggacgaaggctgggtgcgcgtaaccggcaaaggaaggaaacaacgtcaggtcccgctgaccgggaaaagcgtagaagctttaaaaaactatttgccgctgcgtcagacggcatcggacggcaaagccctgtttaccggcaggaacggtacgcgcctgagccaacgccaaatacaaaagcgcctcgaatcatgggcggcgcaaaacggcgacggcaggcacatttccccgcacatgatgaggcacagctacgccagccatctgttgcagtcctcgcgcgacatccgggcggtgcaggagctgctcgggcacagcagcctttcgaccacgcagatttataccaagctcgatttcgaccacatcgcccgcctgtatgacgaagctcatccgcgtgccaaacggcaggaaaaataa

SEQ ID NO: 63587 - DNA, 1350 bp, Neisseria meningitidis
atgaaattaccggtgatgtcgcccgaacattcggcgcaacttcaggcgtttgaggcaaaaatcctgtccaatcacgccaaaatcgaggcgtggttccgcacgcagtggagcgtacaccgcccgccgttttacggttcggtcgatatacgcaatgccggttacaaaatttcgtctatcgatatgaatttgttccccggcggcttcaataatctgaatcccaactttatcccgctggcggcggttgccgcgcaagatgcggtgcaacgcgcctgcgaaacggcgaaatccgtattgattattcccgaaaaccacacgcgcaatacgttttacctgcaaaacatttacgccctcggcgagattttgcgttcggcagggtatgaagtgcgcttgggcagcctgaatccggaagtaaccgaaccgaccgaatttgaaactgcattgggcgacaaaatcctgttggaacctttcttgcgtacccgcgaccgcgtccatcttgcagacggcttttcgccttgcgtggttttgttgaacaacgatttgtctgccggcattcccgacatcctcaaaggcatcagccaaaccgttttgccgccgttgcacggcggttggacgacgcgccgcaaaacaaatcatttcggcgcgtacaaccaagttaccgccgaatttgccaagttaatcggcatcgacgaatggcaaattaacccttattttgaaaaaatcggcggtttggacttccaagggcgtgaaggcgaagacgcgttggcggaagcggtagaacgtgtgctggcgaaaattcaagccaaatacgacgaatcgggcattaccgacaaacctttcgtcatcgtcaaagccgatgccggcacttacggcatgggcgtgatgagcgtcaaatccgccgacgaagtgcgcggattgaaccgtaaaaaccgcaataaaatggcgaaagtcaaagaaggcttggaagtcagcgaagtgattgtccaagaagggatttatacttatgaaaccttaaacggcgcggtgtgcgaacccgtcgtgtatatgatggaccgcttcgtcatcggcggctttttccgcgtacacgaagggcgcggtgcggacgaaaacctcaacgccggcggtatggtgtttgtgccgctgtccaatagcattcctaccggcaatggcgataattcccaagaagcacccgaagcctgcaagcgcgtatttgagcaatgggatgcgctgggtatgccgcgttctgaaaaagactgcgatgtcgataatgtccacaaccgcctctatgtgtacggcgtgatggcacgcctgtcgcttctggcggcttcaatcgagttggaagaaacggcgtaa

SEQ ID NO: 63588 - DNA, 723 bp, Neisseria meningitidis
atgaaacccgcctatttcatttccgacctgcatttgagcgaaaagcagcccgaactgaccgcgctgctgctgcgttttttacgttcttccgccgccgggcaggcgcgggcgatttatattttgggcgatttgtttgatttttgggtgggcgatgacgaagtttccgagttgaatacttcggttgcgcgggaaatcaggaaattgtccgacaaaggcgttgccgtgttcttcgtcaggggcaaccgcgacttcctgatcggtcaggatttttgccggcaggcgggtatgacgctgctgccggattactcggttttggacttgttcggctgcaaaaccctcatctgccacggagacacattatgcaccgacgacaaggcataccaacgtttccgcaaaatcgtgcatcggaagcggctgcaaaaactgttcctgatgctgcccctaaagtggcgcacgcgccttgccgccaaaatcaggcgtgtcagcaaaatggaaaaacaggtcaagcccgccgatattatggatgtcaatgccgcctttaccgagcggcaggttcgcgcctttaacgcggaaaggctgatacacgggcatacccaccgcgagcatatccatcacgaaaacggctttacccgcatcgttttgggcgactggcataacgactatgcttcaatcctccgcgtagacggggacggcgcggtattcgtgccgctggaaaaatgctga

SEQ ID NO: 63589 - DNA, 120 bp, Neisseria meningitidis
atgaacgaacaagaacttgacctcgacaacctgcttgaagattttgacggcgttaccgtggaaggcggcgtcgattcggaaaacgacgacggctgcgaaggcggggcgtgcaaaatctaa

SEQ ID NO: 63590 - DNA, 1605 bp, Neisseria meningitidis
gtgccttcagacaaacaaaatatgccgaacaaaaagaaaaaagccgcctttgcgcgtgctgcaacggagaacggtgtgccggacgtgtccaacatcaaaaattcatatgatgatttgatgtatgaatccaaagcattttcccaaaccgccatcaacgccttggaggctcgcgcccgcatgatgggcctgaagcctgcagcagcggcaaaagccaaggtcttggagctgggctgttcgatgggcggcaatatcatcacgcaggctctttattacccggatgcggaatttgtcggtatcgacttgtccggcaggcaggttgcgcagggcaacgccatcattgaaaaaatgggcttgaaaaatgtgcgtctggaagaaaaagatattttgaccatcgatgagtcattcgggaagtttgactatatcatcgtccacggcatttggtcgtgggtgcctgacgcagttaaagacaaaattttttcgatttgccggaacaacctgaccgaacacggcattgcctatatttcatacaatgtttacccgggctggaaacggcaggagcagttgcgcgaaattatgtactttgccggcagggatgtgcttgaagaacccttggaagcgcggacgcggaaaggcttggacgcgctcaaggcgctggcggaaattttggaaaacgacaagggcttggacggcggcggcaaacttccggcgattcaaaaaatattgaatcataatttttattacatcgcacacgaatatatggaaatattcaacgacccgatttacgttaacggcttcatcgaatgggcaaaccgccaccggctggcgtatatcggggataccgatttgcacgtgtcttttgtttcttggatggcggagcatacgcgggagcggattttggcattggcaggggatgattatattgccaaagaattttatagcgatattttatccgaccgccaattccgccgttcgcttttatgccgtgaggaagtcggggatactgtcaggcgtgacgagtcggttgccgtcgaagtgatagaaagtttgaatttccgcccggcaagaggggaaacaatcaactttgatgaaaacgataccctgctttcgggcatacgcgatgtgatgaaaaccggagagccgtttaaaacggaagatgttgcggaaaatctcgcccgccgatttcccggtctggaatttgaccgcatgaaaatcaattcccagcttttattgcaaaccattctcgggcgtttttctgtttcatcagacaatgcgggcaaacaattttttgaagaccataaaacctatgtgccggcgcgttttacagattatgtcgccgcctttgtggaacacggcgcggaagcatttgtccagcctgccaaccgttacaacgaaagcaccccctcattcgggtacgggcatttgtacattatgcggcaattgtcgcggccgacgagcaaacaggcattgattgaaacggttgccgaaaacttgaacatcgtcagcaccacgcccgacggtttgacattccatccgcctgccgaagtgtatgtggaagaaatattggcagacttggcagacaggcattttctcgtttcggcggattga

SEQ ID NO: 63591 - DNA, 786 bp, Neisseria meningitidis
gtgaaacacatcagttcgaccaataatgaacacatcagacacctgcaccgcctgttgtcgcaaggaaagttcagacggcagtatgcccaaaccgttttggagggcgtgcacctgcttcaggttttcctgcaatccggcggaaagccgctcggggtatatattcccgagggcaaaatgccgtctgaagaaatccgcaggctgagggcggttgtgccggaaggcaggattttttccgtttcagacggcatattgaaaaaaatcagcagcttgagttgtgcagacgatatacttgcactgattgatatcccattgggcggaaccttgccggacaaaggcgactgtgtggttttggacggcgtgcaagatccgggcaatgtcggcactgtcttacggagtgcggcggcggcaggggtaggtacggtcgttttggacaggggttgcgcggacgcgtggtcgcccaaggtattgcgcgcggggatgggcgcacatttcttgtcgggcatttatccgcaggcggatttggaaatatggttggcgcgctataaaggccgtgtgtttgccaccgccttgcgcgaggaaaagcaggcggttttgtacggcgaagatttgtgcgaaccgacagcctgggtgtttggcaacgaaggcgcgggggtcggtaaagcagttttagacagggcggacaagtgtgtcaggataccgatgcacgatgcaaccgagtctttaaatgtcgcgatggcggcgacaatctgcctgtttgaacaaatgcgccaacgggcggcgtattga

SEQ ID NO: 63592 - DNA, 1344 bp, Neisseria meningitidis; identical to SEQ ID NO: 54257

SEQ ID NO: 63593 - DNA, 651 bp, Neisseria meningitidis; identical to SEQ ID NO: 46222

SEQ ID NO: 63594 - DNA, 3033 bp, Neisseria meningitidis
ttggacggtgacggtatagaaaccgttgccaccaaaggctttgcaggtgcattgttcgaccaccgcaatcaaggcatccgcaccgccaccggttgggtttctgccgatgacggtctgcttgtgcgcgatttgaacggcaacggcatcatcgacaacggtgcggaactcttcggcgacaacaccaaactggcagacggttcttttgccaaacacggctacgcggctttggccgaattggattcaaacggcgacaacatcatcaacgcggcagacgccgcattccaatccctgcgtgtatggcaggatctcaatcaggacggcatttcccaagctaatgaattgcgtacccttgaagaattgggtatccaatctttggatctcgcctataaagatgtaaataaaaatctcggtaacggtaacactttggctcagcaaggcagctacaccaaaacagacggtacaaccgcaaaaatgggggatttacttttagcagccgacaatctgcacagccgttttaaagataaagtggaactcactgccgaacaggcaaaagccgccaatcttgcgggcatcggccgtctgcgcgatttgcgcgaagctgccgcattgtccggcgatttggccaatatgctgaaagcttattctgccgccgaaactaaagaagcacagttggcattgttagataatttgattcacaaatgggcggaaaccgattcgaactggggcaaaaaatcgccaatgcgactttcaaccgattggacgcaaacggctaatgaaggtattgcactgacaccatcccaagtagcacaactaaaaaagaacgctttagtttccctttctgataaagctaaagcagctattgacgccgcccgcgaccgcattgccgtgcttgatgcctacacggggcaggattccaacacactctattacatgagcgaggaagatgcgcttaatatcgtcaaagtaaccaacgatacatacgaccatctcgccaaaaacatctaccaaaacctgttattccaaacccgtttgcagccatatttgaatcaaatcagtttcaaaatggaaaatgatacgttcactttggattttagtggtcttgttcaagcatttaaccatgtcaaagaaactaatccgcaaaaagcttttgtggatttggccgagatgcttgcatatggcgaacttcgttcttggtatgaaggtcgaagactaatggccgattatgtggaggaggcaaaaaaagcaggtaaatttgaagattaccagaaagtgttgggtcaggagaccgttgcattattagctaaaacatcgggtacgcaagcagatgatatcctgcaaaatgtaggctttggtcataataaaaatgtttctttatatggtaatgacggcaacgacactctgatcggcggtgccggtaatgattacttggagggcggcagcggttcggatacttatgtcttcggcaaaggcttcggtcaggatacggtctataattacgactacgctaccggacgcaaagacatcatccgctttaccgacggtattacagccgatatgctgacttttacccgagagggcaaccatcttcttatcaaggcaaaagacggcagtggacaagtgactgttcagtcctatttccagaacgatggctcaggtgcttaccgtatcgatgagattcatttcgataacggcaaagtactggatgttgccactgtcaaaaaactggtacagcaatccaccgacggttcggacagattgtatgcctaccaatccggaagtaccttaaatggcggattgggcgatgactatctgtacggtgccgacgggaatgacctgctgaatggtgatgcaggcaacgacagtatctacagtggcaatggcaatgatacgctcgatggaggagaaggtaacgacgccctgtacggctataatggtaacgatgcactgaatggtggcgaaggcaatgatcatttgaacggcgaagacggtaacgacactctgatcggcggtgccggtaatgattacttggagggcggcagcggttcggatacttatgtcttcggcaaaggcttcggtcaggatacggtctataattacgactacgctaccggacgcaaagacatcatccgctttaccgacggtattacagccgatatgctgacttttacccgagagggcaaccatcttcttatcaaggcaaaagacgacagtggacaagtgactgttcagtcctatttccagaacgatggctcaggtgcttaccgtatcgatgagattcatttcgataacggcaaagtactggatgttgccactgtcaaagaactggtacagcaatccaccgacggttcggacagattgtatgcctaccaatccggaagtaccttaaatggcggattgggcgatgactatctgtacggtgccgacgggaatgacctgctgaatggtgatgcaggcaacgacagtatctacagtggcaatggcaatgatacgctcgatggaggagaaggtaacgacgccctgtacggctataatggtaacgatgtactgaatggtggcgaaggcaatgatcatttgaacggcgaagacggtaacgacactctgatcggcggtgccggtaatgattacttggagggcggcagcggttcggatacttatgtcttcggcaaaggcttcggtcaggatacggtctataattaccatgtggataaaaactctgacactatgcactttaaaggatttaaagcagcagatgttcattttatccgttccggaagtgatttggtgcttagcgcttctgaacaagacaacgtacgtatttccggattcttctatggtgaaaaccatcgtgtagatacatttgtctttgatgatgcagctatcagtaatccagattttgccaagtatattaatgctggcaataatttggtacagtctatgtctgtgttcggttctaatactgctgcgacaggaggaaatgtggatgccaatatacaatccgtacagcagccgttattggtaacgccatctgcataa

SEQ ID NO: 63595 - DNA, 885 bp, Neisseria meningitidis
atgagcagcggaaatatccacatccacagcatgaccggatttgccaacgcggcagaagaatgcggcagcaaacgcatcaacctcgacatccgcgccgtcaaccaccgctttttggacattcaaatcagaatgcccgacgatttgcgccatttggaaaacggcatccgcgagcagatttcatcccatctggcgcgcggcaaagtcgaatgcaaaatccaaattcaagatgcggaaaacggcaatcagtctttggaactgaatcgcgatctggtcggacagcttgccgaaatcaacaaagacctccgcaagcattatgatttggcaaaactgggcgttgccgatattttgcgctttccgggcgtattggcaagtcaaagggaaaatacggaagaattggcaaaaagcattaccgaactgaccgaaaaagcgttaaaagactttactgccgcacgcaagcgggaaggtaagaaattaggcgagcacctgctgcaacgccttgaggctatggaagaaatcatagatgcattaagcgaactctttcctaccctgttggaaacacataaagaaaaaatccgcgcccgcctcgtcgaagcggtcggcagcatcgacaacgaccgcctgcaacaggaatttgccctctttatccaaaaatccgacatcgacgaagagttcagccgcctacgcacccacattgccgaagtgcgccgcatcgttaccgaacacaaaggcagcagcggaaaacgcttggatttcctgatgcaggaattaaaccgtgaggccaacaccttgggcagcaaatccattgccgccgaatgcacccgagcctctgtcgaactgaaagtcttaatcgagcagatgcgggaacaagtgcaaaatatcgaataa

SEQ ID NO: 63596 - DNA, 1476 bp, Neisseria meningitidis
atgatcagcaaacaagaataccaagcccaagccgcccaaggctacaaccgcatcccgctcgtgcaagaactccttgccgatttggatacgccgctttccctctatctcaaactcgccaaccgcccctatacctacctgctcgaatccgttgtcggtggcgaacgtttcggccgctattcttttatcggcctgccttgcagccactatctcaaagccagcggcaaacacgtcgatgtttatcaaaacggcgaaattgtcgagcaacacgacggcaaccccctgccctttatcgaagccttccacaaccgcttcaaaacacccgaaatcccaagcctgccgcgctttaccggcggactggtcggctacttcggttacgaaaccatctacaattttgaacacttcgcccaccgcctgaaaaacaccaccaaagccgacccgctcggcacgcccgacatcttgctgatgctgtcgcaagaattggcggtgatcgacaatttgagcggcaaaatccatctcgtcgtttacgccgatccgtcgcagcccgacggctacgaacgcgcccgcgaacgcctcgaagacatccgcacccagttgcgccaaagctgcgccatcccgctctcgctcggcagcaaacacaccgaagccgtcagcgaattcggcgaagagccgttcaaagcctgcgttaacaaaatcaaagactacatcttcgcaggcgactgcatgcaggttgtccccagccagcgcatgagcatggaattcaccgacagcccgctcgccctctaccgcgccctgcgtacgctcaacccttcgccttatctcttttactacgatttcggcgatttccacatcgtcggctcctcgcccgaaatcctcgtccgccgcgaacgcgacgatgtcatcgtccgccccatcgccggcacgcgcctgcgcggcaaaacccccgccgaagaccttgccaacgaacaagatttgttaagcgatgccaaagaaatcgccgaacacgtcatgttgattgacttaggacgcaacgacgtcggccgcatcagtaaaaccggcgaagtcaaagttaccgacaaaatggtgattgaaaaatactcccatgtaatgcacatcgtttccaacgtcgaaggccgtctgaaagacggcatgaccaacatggacatcctcgccgctaccttccctgccggcacactctccggcgcacccaaagtccgcgccatggaaatcatcgaagaagtcgaaccgagcaaacgcggcatctacggcggtgccgtcggcgtatggggtttcaacaacgacatggatttggcaatcgccatccgcaccgccgtagtaaaaaacaacacgctatacgtccaaagcggcgcgggcgtggttgccgactccgatccggcctccgaatggcaggaaacacaaaacaaagcccgagccgttatacgcgccgcgcagatggtgcaggaagggttggataaatga

SEQ ID NO: 63597 - DNA, 369 bp, Neisseria meningitidis; identical to SEQ ID NO: 52291

SEQ ID NO: 63598 - DNA, 1092 bp, Neisseria meningitidis
atgtcccatatttcccccatccccgaaatcctagccgacatcaaagccggcaaaatggtcatcatcaccgatgccgaagaccgagaaaacgaaggcgacctgctgatggcggcgcaattcgtcacgcccgaagccatcaacttcatgatcaaacacgcgcgcggcttggtctgcctgccgatggacggcgaaatggtcgaaaaactcgggctgccgatgatgacccaaaaaaacggcgcgcaatacggcaccaactttaccgtctccatcgaagccgcacacggcattaccaccggcatttccgccgccgaccgcgccctgactattcaaaccgccgtttccccgaccgccaaacccgaagacatcgtccaacccggtcatatctttccgcttcgcgcccaaaaaggcggcgtactcgtccgcgccggacacaccgaagccggcgtcgacctggcgcaaatgaacgggctgattcctgccgccgttatttgcgaaatcatcaacgacgacggcacgatggcgcgtatgcccgaactgatgaaattcgccgaagaacacaagctcaaaatcggcaccattaccgacctcatcgaataccgcagccgtaccgaaagcctgctcgaagacatgggcaatgcgcctgtacaaaccccgtggggcgagttccaacaacacgtttacgtcgacaaactctccggcgaaacccacctcgccctcgtcaaaggtacgccctctgccgacaccgaaaccctcgtccgcgtccacgaacccttcagcgtgatggacttcatccaagccaacccgcgccattcgtggtcattgcccaaagcactcgagcgcgtccaacaggcagaaagcggcgtcgtcatccttctgcaccgcaccgaagacggcgcatccctgctcgaccgcaccctgcctaaaggcgcaaaccaagcctacaaatgggacagcaaaagctacggcataggcgcgcaaatcctcgccggcctcaacgtcaaaaaactgcgcgtcctcgggcagccctcatctttcaccggcctgaccggcttcggtttggaagtcgtcggctttgaagaagcggaaaaataa

SEQ ID NO: 63599 - DNA, 369 bp, Neisseria meningitidis
atgatagacggcgaactggtcgcgcttatccatcaaaccgtattggcggatgaagcgggtttgaaagggcgggcggatatggcgcggctcgacggcgcattgtcgcggattgccaactggcggcagtatgaaaaccttgaggacatctacgaaatcgccgccctttatgcacaagccatagccaaagcccacgcctttcccgacggcaacaagcgcaccgcgcttttaacgatgttgacctatctggatttgcagggcatcagcattgccgccgaccaagggcttgacgacttgattgtcagtttggcggcgggggaaaccgacttcaaacagctcgccgaaaccctgcgccgactggataaggaatag

SEQ ID NO: 63600 - DNA, 735 bp, Neisseria meningitidis
atgacgacacgccaaatcatcctcgataccgaaaccaccggtctgtatgccgacggcggcgaccgcttggtcgagtttgccggtttggaaatggtcaaccgccaaatgaccgacaaaaacctgcacctctatgtccaccccgagcgcgatatgcccgaagaggcggcacgcgtccacggcttgacgatacaggttttggaagggaaaaacgcgccgccgtttgcagaggtcggcaggcagattgccgatttcctgcgcggtgcggaactgattatccacaatgccaaattcgacgtgggcttcctcaatatggagttccgccggatggggttgccgaccgttgaggaactcggctgtaccgttaccgataccctggcgatggcgcgcgaaatgttccccgggcagaaagccagcctggatgccttgtgcaaccgtttttccgtcgaccgcagcaagcgcgtcctgcacggcgcattgatcgactgcgaacttttgggcgaagtctatcttgctatgacgcggcggcagttcgacctgatgggtgcggccgcagaggaaaaaatggaaaccaaacctgtggtgcataccgaaaccaaacgcagcggcaaactgaaagtcatcagggcggacgaaaacgagttggcggaacacgggcaatatttggacggcttgggcgaagcctgtatctggcgcaaggaagccgtgccgtctgaaaacggcgggacggacgcatga

SEQ ID NO: 63601 - DNA, 210 bp, Neisseria meningitidis
atgaaatcaaaatttgtgtataagttactggtgcttgcaaagtacctgtatattttaatttgtatatcaataccaatcgtttttatttatgaaagctaccaaggagatgatgttaattttatgatttatattcgtgcttttattattttttccatattgggtgtattgactcaatattctatgtctaatttttttgaaaaggaaaaataa

SEQ ID NO: 63602 - DNA, 822 bp, Neisseria meningitidis
atggctgttttaattaccggtgcttcggcaggattcggcgaagcgatgtgccgcgcgtttgtcggggcgggatacctcgttatcggtgcggcgcgccgcgcggacaggcttcaggctttggcggatgaattgggtgctttgttttaccctttggaaatggacgtgtcgcgccgcgagtcggtggaaaatgccttaaacggcatccccgatgaattttccgacatcgactgccttatcaacaatgccgggctggctttgggtttggacacggcggacaaggcggattttgaagattgggaaacaatgattcaaaccaatgttttgggtttgacgtttctaacgcgcaagattttgccgcaaatggtggaacgcggcggcggttatgtgatgaatttgggttcgattgcgggcaattatgcttacgccggcagcaacgtttacggggcaaccaaggcgtttgtgcggcagttcagcctgaatttgcgcgcggagttggcggataagaacatccgcgttaccaatatcgagccgggtttgtgcggcaatacggagttttccaacgtgcgcttcaaaggcgatgacgagagggcggcgggtgtgtatgagggtgtggaatttatccgccccgaagatattgcggaaaccgcattgtggctgtaccgccggccggcgcatatgaatgtgaacacgattgaaattatgcccgtggcgcagacttttgcaggaatgaaggtcataaaaacagccgtgcccgaagtacgggaagactttgaaaaacagagtatgtcgctgttttcccgcatcaggtcttggttcaaatga

SEQ ID NO: 63603 - DNA, 273 bp, Neisseria meningitidis
atgaagaaaaccggcaaatatcttatctatgctgcggcatttaccgcattctgctttgccttccaagaaaaccgttctgaagccaaacagcccgacatcactttatccgcatccctgtgcgaacaattcaacatactgaacgccaaagatatggatgcagaacaagtctccctttccaaagaatgcgacatcatcgagtcttcacacgactgggaaaaagagtacggcaacttgaacgaacaggaaatgctcgccggcatcgtctatgaataa

SEQ ID NO: 63604 - DNA, 324 bp, Neisseria meningitidis; identical to SEQ ID NO: 38645

SEQ ID NO: 63605 - DNA, 366 bp, Neisseria meningitidis; identical to SEQ ID NO: 38539

SEQ ID NO: 63606 - DNA, 381 bp, Neisseria meningitidis
atgccatccgttgaactgctgttggtgattgtcggactgccacgcggcaccttctattaccaattggttgtccaatcggcagaagacaaatatgtcgatttgaaacggcatatccatgatatttatcaaaagcagttgaaagacaacggtctggttcagagtatgtcccgcaagggaaactgcttggacaatgcggcaatggaaagtttcttcggaacgttgaaatcggaatgtttccatacgtgcaaatatgattccgttaccgaattggaagctgtactgcacgaatatatccgttactacaacaacgatagaatcaagttgaaattaaaaggactgagccctgttcagtacagaattcagtccctgaaagccgcttga

SEQ ID NO: 63607 - DNA, 474 bp, Neisseria meningitidis
atgaaaaaattattggcggtcgtgatgatggcaggtttggcaggcgcggtttccgccgccggagtccacgttgaggacggctgggcgcgcaccaccgtcgaaggtatgaaaataggcggcgcgttcatgaaaatccacaacgacgaagccaaacaagactttttgctcggcggaagcagccccgttgccgaccgcgtcgaagtgcatacccacatcaacgacaacggcgtgatgcggatgcgcgaagtcaaaggcggcgtgcctttggaggcgaaatccgttaccgaactcaagcccggcagctatcacgtgatgtttatgggtttgaaaaaacaattaaaagagggcgacaagattcccgttaccctgaaatttaaaaacgccaaagcgcaaaccgtccaactggaagtcaaaatcgcgccgatgtcggcaatggaccacggtcatcaccacggcgaagcgcatcagcactaa

SEQ ID NO: 63608 - DNA, 279 bp, Neisseria meningitidis; identical to SEQ ID NO: 38216

SEQ ID NO: 63609 - DNA, 723 bp, Neisseria meningitidis
gtgtttcccgacaaatacaagttgagtttgaaagaaaatatttttttggcaaagaaagtattggttgcccaaattcacaacctcagccgttttgagaattgtcagacgaccttattgcagactgagcaaattatccatggcaaaaatgtagcctccgcgtcactggaagacatccaaaccatcttgaacctgaaacgtgcctatcaatatgtgatttcgcatatttcaaacggcgaaccggtcgatatttcactccttaaaaaaatcaacaacattgttgccaaggacgattctttggcacccggtgatttccgtaccggttcggtcggcgtaacgctattggacggttcccgtcatgccccgaatccagtgaaggaaattgaagtggcccgcgtgttacaaaatatcggactgcaaagcggttcgacgacggaggcagccgtccgttttatgctttattgtatgcggcagcaggttttttgggacggcaacaaacgaacggcaaccttatttgccaacggtctgatgatggcggggggctgcggcatcttggaaatctccgaaatgcagatgccgcaattcaatgaaaaactgtccgcattctatcgctccggcgacgataccgatatttccaagtttgtgtatcaaaattgtatatcgggcatagactatttcggcacggacgaagatatagatttccccgactcaccgaacatagactaa

SEQ ID NO: 63610 - DNA, 447 bp, Neisseria meningitidis
atgaatttcagttttgttcccctgtttttggttacgctgattctgttgggggtggtcagcaacaacaattcgattaccatctcggcaaccatattgctgctgatgcagcagacggcattggtacagtttgtcccgttggtcgagaagcacgggttgaacctcggtatcattcttttgaccataggggttttgagtccgttggtttcaggaaaggcgcgggttcctcctgttgccgaatttttgaattttaaaatgatatccgccgtttttatcggtattttcgtggcttggctggcgggacgcggcgtgcctttgatgggacagcagcctgttttaattacagggctgttaatcgggacggttatcggggtggcatttatgggcggtatccctgtcgggccgctgattgcggccggcatcttgtcttttgtcgtcggaaagggttaa

SEQ ID NO: 63611 - DNA, 2751 bp, Neisseria meningitidis
atgaccgacgcaaccatccgccacgaccacaaattcgccctcgaaaccctgccggtaagccttgaagacgaaatgcgcaaaagctatctcgactacgccatgagcgtcattgtcgggcgcgcgctgccggacgttcgcgacggtctcaagccggtacaccgccgcgtactgtacgcgatgcacgaattgaaaaacaactggaatgccgcctacaaaaaatcggcgcgcatcgtcggcgacgtcatcggtaaataccacccccacggcgataccgccgtatacgacaccatcgtccgtatggcgcaaaatttcgctatgcgttatgtgctgatagacggacagggcaacttcggatcggtggacgggcttgccgccgcagccatgcgctacaccgaaatccgcatggcgaaaatttcccacgaaatgctggcagacattgaggaagaaaccgtcaatttcggcccgaactacgacggtagcgaacacgagccgcttgtactgccgacccgtttccccacactgctcgtcaacggctcgtccggcatcgccgtcggcatggcgaccaatatcccgccgcacaacctttccgataccgtcaatgcctgcctgcgcctgctcgatgcacccgacaccgaaatcgacgaactgatcgacattatccaagcccccgacttcccgaccggggcaaccatctacggcttgagcggcgtgcgcgaaggctataaaacaggccgcggccgcgtcattatgcgcggtaagacccatatcgaacccataggcaaaaacggcgaacgcgaagccatcgttatcgacgaaatcccctatcaggtcaacaaagccaagctggtcgagaaaatcggcgatttggttcgggaaaaaacactggaaggcatttccgagctccgcgacgaatccgacaaatccggtatgcgcgtcgttatcgagctgaaacgcaacgaaaatgccgaagtcgtcttaaaccaactctacaaactgactccgctgcaagacagtttcggcatcaatatggtggttttggtcgacggacaaccgcgcctattgaacctgaaacagattctctccgaattcctgcgccaccgccgcgaagtcgttacccgacgtacgcttttccggctgaagaaggcacgccatgaagggcatattgccgaaggcaaagccgtcgcactgtccaatatcgatgaaatcatcaagctcatcaaagaatcgcccaacgcagccgaggccaaagacaaactgcttgcgtacccttggcgcagcagcctcgttgaagaaatgctgacgcgttccggtctggatttggaaatgatgcgtccggaaggattggctgcaaacatcggcttgaaagaacaaggttattacctgagcgagattcaggcagatgctattttacgcatgagcctgcgaaacctgaccggcctcgatcaagaagaaattgtcgaaagctacaaaaacctgatgggtaaaatcatcgactttgtggatatcctctccaaacccgaacgcattacccaaatcatccgcgacgaactggaagaaatcaaaaccaactatggcgacgaacgccgcagcgaaatcaacccgttcggtggcgacattgccgatgaagacctgattccgcaacgcgaaatggtcgttaccctgacacatggcggctatatcaaaacccagccgaccaccgactatcaggcgcagcgtcgcggcgggcgcggcaaacaggcggctgccaccaaagacgaagactttatcgaaaccctgtttgttgccaacacgcatgattatttgatgtgctttaccaatttgggcaagtgtcattggattaaggtttacaaactgcccgaaggcggacgcaacagccgcggccgtccgattaacaacgtcatccagttggaagaaggcgaaaaagtcagcgcgattctggcagtacgcgagttccccgaagaccaatacgtcttcttcgccaccgcgcagggaatggtgaaaaaagtccaactttccgcctttaaaaacgtccgcgcccaaggcattaaagccatcgcgctcaaagaaggcgactacctcgtcggcgctgcgcaaacaggcggtgcggacgacatcatgctgttctccaacttaggtaaagccatccgcttcaacgaatactgggaaaaatccggcaacgacgaagcggaagatgccgacatcgaaaccgaaatttcagacggcatcgaagatgaaaccgccgacagcgaaaacgcactgccgagcggcaaacacggtgttcgcccgtccggtcgcggcagcggcggtttgcgcggtatgcgcctgcctgccgacggcaaaatcgtcagcctgattaccttcgcccctgaaaccgaagaaagcggtttgcaagttttaaccgccaccgccaacggatacggaaaacgcaccccgattgccgattacagccgcaaaaacaaaggcgggcaaggcaatattgccattaacaccggcgagcgaaacggcgatttggtcgccgcaaccttggtcggcgaaaccgacgatttgatgctgattaccagcggcggcgtacttatccgcaccaaagtcgaacaaatccgcgaaaccggccgcgccgcagcaggcgtgaaactgattaacttggacgaaggcgaaaccttggtatcgctggaacgtgttgccgaagacgaatccgaactctccgacgcttctgtaatttccaatgtaaccgaaccggaagtcgagaactga

SEQ ID NO: 63612 - DNA, 480 bp, Neisseria meningitidis; identical to SEQ ID NO: 39570

SEQ ID NO: 63613 - DNA, 1419 bp, Neisseria meningitidis
gtgaaaccgctgcgcagactgacaaacctccttgccgcctgcgccgtagcggccgccgccttcggacagcccgccctcgcggcggacttggcgcaagatccgttcattaccgataacgcccaacggcagcactacgaacccggaggcaaataccacctcttcggcgacccgcgcggcagcgtttccgaccgcaccggtcaaatcaacgtcatccaagactatacccaccagatgggcaacctgctcatccaacaggcaaacatcaacggcacaatcggctaccacacccgcttttccggacacggacacgaagaacacgcccccttcgacaaccacgccgccgacagcgcaagcaaagaacaaggcaacgttgacgaaggctttaccgtgtaccggctcaactgggaaggacacgaacatcatcccgccgacggctatgacggcccgaagggcggcaattaccccaaacctacgggtgcacgcgacgaatacacctatcacgtcaacggcacagcacgcagcatcaaactcaatccgaccgacacccgcagcatccggcaacgcatatccgacaactacaacaacctcggcagcaatttctccgaccgcgccgatgaagccaacagaaaaatgttcgagcacaatgccaagctcgaccgctggggcaacagcatggagtttatcaacggcgtcgccgccggcgcgctcaacccctttatcagcgcgggcgaagccttgggcataggcgacatactgtacggaacgcgctatgccatagacaaagccgcaatgcgcaacatcgcccccttgcccgccgagggcaaattcgccgtcatcggcggcttgggcagcgtggcgggctttgaaaaaaatacgcgcgaagccgttgaccggtggatacaggaaaaccccaatgccgccgaaacggtcgaagccgtcttcaacgttgccgctgccgccaaagtcgcgaagctggcaaaggcggcgaaaccggggaaagctgcggttagtggggatttctcagactcctacaagcataacactgcttcaagattatctcagtctgtagatggagaaatgtttcaaacccgcaatgttgattttaaagcaaaatctattgggactaaaattcatgatggagctcaagggaaacatatttcaggacatagaaactacattgaaggtaagagtactttaaatcaaaacattaatcctcaagaattgttgaacggaatacattcaggtgcttatccagttatttctaaaggagcaagaggaaatcctgttgttgattttgggtatcctataggcagcgatgggaaatcaggattaagtaccaattttggtacgattcattcaggtaaaaatggagttcacattgttccggctaaccctaaaaccattaaaaaggtgcaatag

SEQ ID NO: 63614 - DNA, 1047 bp, Neisseria meningitidis
atgtcagacgacaaaagcaaagcccttgccgccgcactggcgcaaatcgaaaaaagtttcggcaaaggcgccatcatgaaaatggacggcagccagcaggaagaaaacctcgaagtcatttccaccggatcgctcggattagacctcgcactcggagtcggcggtctgccgcgcgggcgcatcgtcgaaatcttcggccccgaatcctccggcaaaaccaccctctgcctcgaagccgttgcccaatgccagaaaaacggcggcgtgtgcgcctttgtcgatgccgaacacgccttcgatcccgtttacgcccgcaaactcggcgtaaaagtcgaagagctttacctgtcccagcccgataccggcgaacaggctttggaaatctgcgacacactcgtccgttcgggcggcatagatatggtagtcgtcgattccgtagccgcactcgtccccaaagccgaaatcgaaggcgatatgggggacagccatgtcggactgcaggcgcgcctgatgagccaggctttgcgcaaactgaccggacacatcaaaaaaaccaacacgctggttgtgttcatcaaccaaatccggatgaagatcggcgtaatgttcggcagccccgaaaccaccaccggcggcaacgcgctgaaattctattcttccgtccgcctcgacatccgccgcaccggatccatcaaaaaaggcgaagaggtattgggcaacgaaacccgcgtcaaagtcatcaaaaacaaagtcgcccccccgttccgtcaggcagagtttgacatcctctacggagaaggcatcagttgggaaggcgaattgatcgacatcggcgtgaaaaacgacatcatcaacaaatccggcgcgtggtacagctacaacggcgcgaaaatcggtcagggcaaagacaacgtccgcgtctggctgaaggaaaatcccgaaattgctgatgaaatcgacgcaaaaatccgcgccctcaacggcgtagaaatgcacatcaccgaagggacgcaggacgaaaccgacggcgaacgccccgaagaataa

SEQ ID NO: 63615 - DNA, 825 bp, Neisseria meningitidis
atgaaatggctcttcacccttttggcggtactcaatattgccgtattcggcggcacggtgggctataaattggccgttaaagcgacgggcggcgtgccggaaaaccgggccgtcgaaaacacgccccccgcaacgcccgccgccgacaatgcggcggcatccgtggaggatacggcggcactgctcaaaccgggcgacatcctgaccgaagagcaggccgagcagttgcgcttgaaaaaggaagcggaacagaaaaaactgagggagaaaaaacagcgcgaggaaaaagcccgccgcgaaaaactcgccgccgaaaaggcgcaggcggaacgcgaaaacggcgcggcggatgccttatgcgccgcgcaggcaagcctcacgatggacgaagatgactaccaccgcatcaaagggcttttgggcaaatggtcgcacgttgccagcaggagcgtcgaaaaacgcaccgccaaagccaaacctgccgacaaaacctaccgcgtcgtcctgcccgtttccgccgatgccgaaaatcaggcggcggagctgtctgccaaaggtttcaaccccataccgtttgacggcgcattgagtttgggtgtcggcaacagccgggaaaacgcccaagccctgcaaaaccggcttgccggcgccggattcggcggggcgcatattgtcgaacactttgccgaagccgacaggcaggacgattctttgagcgtgtcgcgtatgacggttttgtttaccggcgtgaatgccgccgatgcggacgaaattcgtaaaatcacgtccctatacggcaaactgaacctcaagtcttgcaaatag

SEQ ID NO: 63616 - DNA, 984 bp, Neisseria meningitidis
gtgctgctgacgctgcatggaacggataagttctgcatcgttaataatttccataccaaccgtaatacggcgtataaggctttgaaagatgcctgtaacaacctttttgaacgccaattcagttttatcgaaaaaacaccaaaaggggaaaaggtagtacggacaaggtgggtatctcaagtcgcctatattgaacaacaggcaacggtagagttagtttttgcaccaaatgttgcccctttgattacgatgctagaaaaaaacttcacaagctacgagcttgatcaggtctcatcgttgagcagtaaatacgcggtgcggctctacgaaattattatttcatggcgtgcagccggtaagacaccgatgttcagtacaatggagttgcgcgaacgtttgggtgtgatgcctgacgagtatcaaaaaatggagctattcaaacgtaaggttttggatttcgccgtcaagcagatcaatgataaaacggatatttccattacctacgagcagcataaagaaggacgaaaaattgtaggttttacattctcaatcctacataaaatagggtcgaaagacatccctcttgaaaatcaatcggaactttttgccggaatgactgatttggaagccggaacgatacgggtcagggaggaagcatatatcgcttcgctcattgcaaaaggtcagaacgtgactaaagcccataggctgaatattctgaaaaaagccgtagatgaacgttggggatttgaagatgcggctaaagataatgggaccaaaaatcctgaaaacaaaaatgcaaaagtcgttttaaacgaatgggaaaagattcctaatggcacacgttttaaggataaggatggaacaatttgggttaaagattcaggtctgcttaggacagaagagacaaacaggtggattgccgattctcagattgccagattatttcctatgttaactgtgatggttgaggaaggtatttaa

SEQ ID NO: 63617 - DNA, 681 bp, Neisseria meningitidis
atgattttccaaacagtctggttttcagatatggtactgtcggtttcgtggattgtccttatcctgatactggcagcttccgcgccgtccgcattccgctcgcttgcccgctaccgttctgcccttcccctgtgtaccgtaattttttccgcagcatggtgtctgaacgcctctgccagcggcggacagcttgcccagatgaactaccacctgctcgccgtcaatctggttgcactgatggtgggcacttccgccgccttttggcttgccgcgctgctgatgctgccctactgcctgctgtttgccggttctgccggcgcatatccgccgaacgctttagtgctgattctgcccgcgcttgccgtcaaccgcctgtcgcgtatgctggtcaaccgcctgccgcccaatattttcatctttattttcgtcaacggctttctcgcttccgccgccggcattctgttgaccgggctggtgctgaccggtattttggatgctgcaaacgcttttccgtccgaaatattgtggacgaccgccctgcccgtctttattctgctggcgtgggcggaagcttttctcagcggcatttcaactgccatatttgttgcactgaagccccattggatcaacactttcgacgacaaccgctatctgaagtccgaccgcggcatatggcggtag

SEQ ID NO: 63618 - DNA, 1902 bp, Neisseria meningitidis
atgactacgccaaaaaaaactgccaaaacttccggcaacgaagcgcgcgagcttgccgacttgagcgaagacatcggcatccgctttaaatatccgaactcggagcgcgtgtatctgcaaggcagccgcgacgacatccgcgtgcctttgcgcgaaatccgtcaggacgacacctacacggcgcaaggcacggaagccaacccgccgattcccgtctatgacaccagcggcgtgtacggcgatccggcggcgcacatcgacctgaaacaaggcctgccgcacatccgcactgcatggctgaacgaacgcggtgataccgaaatcctgcccaagctttccagcgaatacggcatcgaacgcgcacacgatccgaaaaccgcccatctgcgcttcaaccaaatcacccgcccgcgccgcgccaaagccggcggcaacgttacccagctccattacgcccgccaaggcattatcacgcccgaaatggagtttgtcgccatacgcgaacgtttaaaattagacgaattgtcccaaaaaccggaatacgccaaactcttgaaacagcacgcagggcaaagtttcggtgcgaacatcccgacccatcccgaccaaatcacgcccgaattcgtgcgccaagaaatcgccgccggacgcgcaattatccctgccaacatcaaccaccccgaactcgaaccgatgattatcggccgcaacttccgcgtcaaaatcaacggcaacttgggcaactccgccgtcacctccagcctgaccgaagaagtcgaaaaaatggtgtggtcgctgcgttggggcgcggacacaattatggacttatccacaggcgcgcacatccacgaaacgcgcgaatggattatccgcaacgcgcccgtccccatcggcactgtgccgatttaccaagcgttggaaaaaaccggcggcatcgccgaagatttgacttgggatttgttccgcgacaccttaatcgaacaggcggagcaaggcgtggactatttcaccatacacgcgggcgtgttgctgcgttatgtaccgatgaccgccaaccgcctcaccggcatcgtctcgcgcggcggttcgattatggcgaaatggtgtttggcacatcatcgggaaaatttcctctacacgcatttcgacgaaatctgcgaaattatgaaagcgtatgacgtatcgttcagcctcggcgacggcctgcgccccggctgcattgccgatgccaacgacgaatcccagttcgccgaactgcacaccttgggcgaattgaccgataaagcgtggaaacatgacgtacaagtcatgatcgaaggccccggccatgtgccgctgcaacgcgtcaaagaaaacatgaccgaagagctgcaacactgctttgaagcacctttttacacactcggcccgctcgttaccgacatcgcacccggctacgaccacatcacctcgggcataggcgcggccaatatcggctggtacggcacggcgatgctttgttacgttacccccaaagaacatttggggctgcccgacaaagaagacgtgcgcaccggcatcatcacctacaaactcgccgcccacgccgccgatctcgccaaaggctggccgggcgcacaattacgtgacaacgccctgagcaaggcgcgtttcgagttccgttggcgcgaccaatttcgcttaagcctcgaccctgaacgtgccgagagcttccacgacgaaaccctgcctgccgaaggcgcgaaaatcgcccacttctgctcaatgtgcggccccaaattctgctcgatgaaaatcacgcaggaagtgcgcgactacgccgacaagcaaaaagcccaacggcagggcatggaggaaaaagcggtcgagttcgtcaaaaaaggcgcgaagatttacagttga

SEQ ID NO: 63619 - DNA, 483 bp, Neisseria meningitidis; identical to SEQ ID NO: 38977

SEQ ID NO: 63620 - DNA, 1284 bp, Neisseria meningitidis
atgtccaaatcaatcaaactcaacgtaccgggtcaggcaggtttggagctgccggtattggaagccagcatcgggcacgatgtggttgacattcgggggctgacaaaaaatacaggtttgttttctttcgaccccggatttgtttcaaccgcaagctgtgagtctaaaattacttacatcgacggcgatcaaggcttgctttattatcgcggataccccatcgagcagctggccgaaaagtccgattatttggaagtctgctacctgttgatttacggcgaactgccgactcccgagcaaaaggcagaatttgacaataccgtccgccgccacacgatggtgcatgaacagctgacttggttcttccgggggttccgccgcgacgcgcatccgatggcgatgatggtcggcgtggtcggcgcactgtctgcgttctaccaagacagcttggacattagcaatcccgaacaccgcaaaatcgcgatttaccgcctgatttccaaaatcccgaccattgcggcaatgtgctaccgctattcaaacggtctgccgttcaattatccgaagaataatctttcttattccgaaaacttccttcatatgatgttcgccacgccgtgtgaagactacaaacccaatcccgttttggcacgcgcgctcgaccgcatctttattttgcatgccgaccacgagcaaaacgcctcaacttcaaccgtccgtctggcaggctcttcgggtgcgaatccgtttgcctgtattgctgccggtatcgcctgcctgtggggtgcttcgcacggcggtgcgaacgaagccgtgttgaaaatgttggacgaaatcggcgatgtgtctaatgttgccgcatacatggaaggtgtgaaacaacgcaaataccgtctgatgggcttcggtcaccgcgtgtaccgcaatatggatccgcgtgccagcattatgcgcgaaacctgctatgaagttttgaaggaattgggcttggaagacagtccgaaattcaaactggcgatggaattggaacagattgcgctgaaagacccgttctttatcgaacgcaaactgtatccaaacgtcgatttctattccggcatcgtcctgtccgcgctgggcatcccgaccgaaatgtttaccgtcatcttcgccctgtcgcgcagcgtgggctggatttcgcactggcacgagatgattagcgatccttcgctgaaaatcggccgcccgcgccagctttataccggttcggaacgccgcgattatgtgccgccaggcgagaggtaa

SEQ ID NO: 63621 - DNA, 1674 bp, Neisseria meningitidis
atgcttctaacactttctttgcgtgattttgtcattgtcgaaaatctgaatctggattttcaaagcggctttaccgtattgaccggagaaactggcgcgggcaagtccattactttggatgcgattggtctgctgttgggcgataaagccgattacagccaagtccgcagcggcgcaaaagaagcgcagttgtcggcgttgtttgatatttcccatttacctgttttaaaagcagaattgtatgaacaggggcttttaaacgacggagaagaagaactcagtatccgccgcattatcgatgccaaaggcaaaagccgcagctttatcaacaatcaggccgctaccttggcgcaactcaaagccgtcggcagccagcttatcgacatccacgggcaaaacgcccatcattcgcttaatcaggaagccgctcagcgcgaattgttggacgcatttgcgggcagcagggcgcaggcggaaaccgtcaggcagctttatcaaaactgggcaaactcaaaaaaagcattgcaggaagcgcaggaacaggcagaaaacattgcactcgaacaagagcgtctggaatggcagtttaacgaattgaatcagttggacattaaacaaggcgaatgggaagccctcagccaaagccacgacagccttgcccattctgccgagctgttgcaggctgccgaagaagtcggaagcaagattgacggcgacaacggcatccaacgccatatctatcaatgtcaaaaactattggccaatctgcaaaacatcgagccgcgctttgccgagagcctgaatatgttggcaagcatcgaggccgaattgggcgaaatcagtgccaatatgcgcgatgtggcaggtcgcagcgacatcaaccccaatgaattggcggcacaggaacagcgtatgggcgaactgatggggatggcgcggaaataccggatcgagcctgaagagttgcctgccaagttggcagaaatcgaagaacgcctgcaaagcctgcaagctgccgccgatttggacgcgctcgagcataatgttgcctacaattttgccgaatatcaggaagctgcccacatcctttctgccatgcgccatcaggcggcagagcgtttgagcggcgaaacgaccgagcatatgcaacaccttgccatgaaaggtgcacgtttcgacatcgtcctgttgccctcgtcgccgacggcacacggtttggagcaggttcaatttcaagttgccgccaacaaaggcaatccgccccgtccgctgaataaagttgcctccggcggcgaattggcgcgtatcagccttgccttacaggttgttgccagccaatatacccaagttcccaccctgatttttgatgaggtcgataccggtattggagggggagtggctgaaatggtcggcaaggcattacgtgcgttgggcagaaaacatcaggtgcttgccgttacccaccttccccaagtcgcatcctgcggagaaaaccactggcgggtgcgcaagcacagcgagggagagcaaaccgtcagcgaaatcagtatattggatgaaatccaacggatcgaagaggttgcccgtatgttgggcggagaagtcattaccgatacgacgcggcaacatgcggcagaattgctgcaacttgcgtcgaaaaatagtttattttaa

SEQ ID NO: 63622 - DNA, 246 bp, Neisseria meningitidis
atgctcaaatccatcgaactcaattcccacatccgcaaccgccttgcagcatatctgaaaggcaggggtatggattttcagacggcaatgcaggaagaaaaaggcaacaaagaaatcgccgccatcgtccacagcggtttgcccactctggtccgcaaactgtattccgaacaaaaaatgcagaagtttttttgggaaaagcgggatttgattgccgactacatcagccgccggatgcagggatag

SEQ ID NO: 63623 - DNA, 1410 bp, Neisseria meningitidis
atgaatttccccaaaacagcggcctccctgctgctgcttctcgcctccctcgccgcacacgcgctcgatacgggtcgcattccgcaaaacgaaatcgccgtatatgtccaagagcttgacagcggaaaagtcatcattgaccaccgctcggatgtccccgtcaaccccgcctccacaatgaaactcgttaccgcgtttgccgccttcaaaaccttcggcagcaattaccgctgggcgaccgagtttaaaagcaacggtacggtaaacgacggcacgcttgacggaaacctgtattgggcgggcagcggcgaccccgttttcaatcaggaaaacctgcttgccgtccaacgccagttgcgcgaacaaggcatacgcaatatcacgggacacctgatgctcgaccacagcctgtggggcgaagtcggcagccccgacgatttcgaagccgacagcggttcgccgtttatgacgccccccaatccaactatgctgtctgccggtatggttatggtgcgcgccgaacgcaatgccgccggcagtaccgacatcctcaccgatccgcctttgccgcatattttcgcccaaaacaacttgaaaattaccgcctcccaagctgcctgcccttcgatcaaaaaactgatgcgtgcatctttttcggacaatacgctgaaattgcgcggcaatattcccgagagctgtttgggcaagcctgtcggtgtccggatgttcgcgcttgacgaactgatccggcaaagttttaccaaccactggctgctcggcggcggacggatttcagacggtatcggcatagccgacacgccggaaggcgcgcagacgcttgccgttgcacacgccaaaccgatgaaggaaattttgacggacatgaacaagcgttcggacaatctaattgcgcgttccgtcttcctcaaactcggcggcgacggcaaactgcccgccgtttccgaacaggcggcgtctgccgtccggcgcgaacttgccgtgtcgggcatcgatattgcggatttggttttggaaaacggttcaggtctgtccagaaaagaaagggtaacggcgagaatgatggcgcaaatgttggaaacggcttatttcagcccgtttgcacaagatttcatcgatacgctgcccatcgccggcacagacgggactttacgcaaccgcttcaaacaaagcggcgggctgttgcgcttaaaaaccggcacgctcaacaatgtccgcgcccttgcaggttattggctgggcgacaaaccgatggcggtggtcgtcatcatcaacagcggccgcgccgtttccctgctgcccgacttggacaacttcgttgccaacaacatcatctccggcggcgatggctggctggatgcgaaactgatgtgcaaagaacgccgagcctga

SEQ ID NO: 63624 - DNA, 165 bp, Neisseria meningitidis
atgcgcaaagcctgccgcaaccgtccgctgacggaaaatcaaaccaagcgtaaccgatatttgtcgaagacccgttatgtggttgaacaaagcttcggtacgctgcaccgtaaattccgctacgctcgggcagcctatttcggactgattaaagtgagtgcgtaa

SEQ ID NO: 63625 - DNA, 132 bp, Neisseria meningitidis; identical to SEQ ID NO: 48760

SEQ ID NO: 63626 - DNA, 645 bp, Neisseria meningitidis
atgactttaggtctggttggacgcaaagttggtatgacccgcgtgttcgacgaacagggtgtttctgttccggtaaccgttttggatatgtctgccaaccgcgttacacaagtaaaatccaaagatactgacggctatactgccgttcaagttacctttggtcagaaaaaagccaatcgtgtcaataaagccgaagccgggcactttgcaaaagcaggtgttgaagccggtcgcggtttgattgagtttgctttgactgaagaaaaactggctgaattgaaagctggtgacgaaatcaccgtttctatgtttgaagtcggtcaactggtcgatgtaaccggtacctctaaaggtaaaggtttctccggcacgattaaacgtcataacttcggtgcccaacgtacttcccacggtaactctcgttctcaccgcgttccaggctctatcggtatggcgcaagacccgggtcgcgtgttccccggtaagcgcatggccggccaatacggcaacaccaaagcaactgttcaaaaattggaagttgtccgtgttgatgcagaacgccaactgctgttggttaagggtgctgttccgggtgcggtcaacagcgatgttgtagttcgtcccagcgtgaaagtaggtgcgtaa

SEQ ID NO: 63627 - DNA, 279 bp, Neisseria meningitidis; identical to SEQ ID NO: 36778

SEQ ID NO: 63628 - DNA, 573 bp, Neisseria meningitidis; identical to SEQ ID NO: 45622

SEQ ID NO: 63629 - DNA, 744 bp, Neisseria meningitidis
atgctcatcatccgcaacctgatttactggctgatactctgttccagcctgattttcctctttccctttatgctgctcgcctcgcctttccgggacggggcgcacaagatggcgcgggtctgggtcaaaatcctcaacctctcgctcaaacacatcgtcgggctcaaataccgcatcatcggcgcggaaaacatccccgaccgccccgccgtcatctgcgccaaacaccaaagcggctgggaaacgcttgcccttcaggacatttttccgccgcaggtttacgttgccaaacgcgagctgttcaaaatcccctttttcggctggggcttgaaactggtcaaaaccataggcatagaccgcaacaaccgccgcgaagccaacgagcagctcataaaacaggggttggcgcgcaaaaacgaaggctattggattaccattttccccgaaggcacgcgccttgcgcccggaaagcgcggcaaatacaaactcggcggcgcgcgcatggcgaaaatgtttgagatggacatcgtccccgtcgccctcaacagcggcgaattttggccgaaaaactcctttctgaaatatccgggggaaatcaccgtcgtcatctgtccgaccatcccgcacgcaagcggcagcgaagccgaattgatggaaaaatgcgaacatctcatcgaaacgcagcagccgctcatttccggcgcaggtccgtttgccgccaaaatgccgtctgaaaccgcatga

SEQ ID NO: 63630 - DNA, 645 bp, Neisseria meningitidis; identical to SEQ ID NO: 54864

SEQ ID NO: 63631 - DNA, 3228 bp, Neisseria meningitidis
atgaataaaactttaaaaaggcgggttttccgccataccgcgctttatgccgccatcttgatgttttcccataccggcggggggggggcgatggcgcaaacctataaatacgctattatcatgaacgagggaaaccagctcgaggtaaaggggaatgggcaatattcaacaataaaggacaaagacagggaacgcgaatatacttatcatcagggcagaggaggaggaggctctgtctcattcaacaatagcgatgagcttgtttctcgacaaagcggtactgccgtttttggcacagccacctacctgccgccctacggcaaggtttccggttttgatgaaagaaagctgaaagagcgcaccaatgcccttaattggattcatacgacccacccagggttgataggctacagctacgccggtgtcgtatgcagagacagcacaggctgtcccaaacttgtctataaaacccaatttaccttcggtaattccggtttggcaaaaaaggcaaacggcggcgggctggatatatacgtagacaaaagccgcgacaattcgcccatttacaaattgaaagatcatccatggttgggcgtatctttcaatttgggcagcgagaataccgtcaaaaatagcaaatcatccaacaaattgatatcttcttttagtgaagacaataataatcaaaccatcgtctctacgacagaaggctcccctatttcccttggcgaccagcagcgcgaacataccgccgtggtctattatctgaacgccaagctgcacctgctggataaaaaacagattcaaaatatcaccgacaaaacagtgcagttgggtgtcttgaagccgagcatcgatgtgcggcagcagaaaggtgccaactggctaagtttttgggctagttgggacattaaagataccgggcagattccagtcaagctcggcctgcagcaagtcaaagcaggccgctgcatcaataaaccgaaccccaatcccaacaaaaaagacctttcgccggccctgactgcccccgcgctgtggttcggacctgtgaaagatggtaaggcggagatgtattccgcttcggtttctacctaccccgacagttcgagcagccgcatcttccttcaaaatctggaaagaaaaaccgaccccggcagacccggccgccattccctcaaacccttgagtgatacgcagattaaaagtagagagccgaatttcacggggcggcaaacagtcatccgattggataaaggcgtacatcagatcaaacttaaaggcaatgaggtcgaaggttttaagggaaacaacggcaacgacactttcggcattgttagagaagggagcttcacgcctgatgccagcgaatggaaaaaagtgctgctgccttggacggttcgagattccaatgatgacggtcgatttaacgcagtcaacaaagaagaaaacaacggcaagccaaaatacagccaaagataccgcatccgcgacaacaacggcaatcgcaatttgggcgacatcgtcaacagccccatcgtggcggtcggcgagtatttggctacttccgccaacgacgggatggtgcatatcttcaaaaaaaacggcggcggggatgaccgcaactatagtctgaagctcagctacatccccggcacgatgccgcgcaaggatattgaaaacaaagaatccacccttgccaaagagctgcgcgcctttgccgaaaaaagctatgtgggcgaccgctacggcgtggacggcggctttgtcttgcgccgcattacagatgaccaagacaagcaaaaacatttctttatgtttggtgcgatgggcctgggcggcagaggcgcatacgccttggatttaagcaaaatcgacagcaataacccgaccgccgtttccctgtttgatgtcaaacatgacaatagtggcaataatagcaataatagcaataatagcaataatagcaataatagcaataatagcaataatagcaataatagcaataatagcaataatagcaataatagcaataatagcaataatagcaataatagcaataatagcaataatagcgtgcaattaggctacaccgtcggcacgccgcaaatcggcaaaacccacaacggcaaatacgccgccttcctcgcctccggttatgcgactaaaaccattgacagcacagacaataaaaccgcgctgtatgtgtatgatttggaaagcaacaacggtacgccgattgcaaaaatcgaagtaaccggcggcaaaggcgggctttcgtcccccacgctggtggataaagatttggacggcacaatcgatatcgcctatgccggcgatcgcggcggcagtatgtaccgctttgatttgagcagtcaagatcctaaacaatggtctgcacgcgccatttttaaaggcgacaaaccgattacttccgcgcctgctatttcccaactgaaagacaaacgcgtggttatcttcggcacgggcagtgatttgagtgaggatgatgtactcagtacggatgaacaacatatttacggtatttttgacaatgacacaaacacgggtacggcgcaagacgggcagggcaacgggctgctcgagcaagtgctgaaaaaagacggcaatacgctgttcttaagcgactacaaaaggtctaacggctcgggcgataagggctgggtagtgaaattggaagccggacagcgcgttaccgtcaaaccgaccgtggtattgcgtaccgcctttgtaaccatccataaatatacgggtaatgacaaatgcggcgcggaaaccgccattttgggcatcaataccgccgacggcggcaagctgaccaagaaaagcgcgcgcccgattgtgccggcagccaattcgaaggtcgcgcaatattccggcgataagaaaacttccagcggcaaatccatccctataggttgtatggaaaaagacaatggaatcgtctgcccgaacggatatgtttacgacaaaccggttaatgtgcgttatctggatgaaaagaaaacagacgatttccccgtcacggcagacggtgatgcaggcggcagcggaacattcaaagagggtaaaaaacccgcccgcaataaccggtgcttctccggaaaaggtgtgcgcaccctgctgatgaacgatttggacagcttggatattaccggcccgatgtgcggtatgaaacgaatcagctggcgtgaagtcttctactga

SEQ ID NO: 63632 - DNA, 651 bp, Neisseria meningitidis
atgatccgtttcgaacaagtttccaaaacctatcccggcggttttgaagccctgaaaaacgtcagcttccaaatcaacaaaggcgaaatgatatttatcgcgggacactccggttcgggcaaatccaccgtcctcaagctgatttcgggcatcaccaagccgagcaggggcaaaatcctgtttaacgggcaggatctcggcacattgtccgacaaccaaatcggctttatgcgccaacacatcggcatcgtgttccaagaccacaaaatcctctacgaccgcaacgtcctgcaaaacgtcatcctgccgcttcggattatcggctatccgccgcgcaaagccgaagagcgtgcccgcatcgccatcgaaaaagtcggcctgaaaggacgagaattggacgatcccgtaaccctctccggcggtgaacaacaacgcctgtgcatcgcccgcgccgtcgttcaccagcccagcctgctgattgccgacgaaccctccgccaacctcgaccgcgcctacgcgctcgatattatggaattgttcaaaaccttccacgaatcgggaacaaccgtcatcgtcgccgcacatgacgaaaccctgatggcggactacggacaccgcatcctgcgcctctcgaaaggacgactcgcatga

SEQ ID NO: 63633 - DNA, 774 bp, Neisseria meningitidis; identical to SEQ ID NO: 54222

SEQ ID NO: 63634 - DNA, 1098 bp, Neisseria meningitidis; identical to SEQ ID NO: 39446

SEQ ID NO: 63635 - DNA, 1542 bp, Neisseria meningitidis
atgaagtttttagaccgtgaggcaagcattgccaagccgggtttcaaccgttggctcgtaccgcccgcagcattggcggtacaccttgccatcgggcagatttacgcctattccgtattcaacgcgccgctgaccaaacttatcggcataaccgaatcggcggccggagattggaagctgacgaccgtaggttggattttcagtatcgcactcgcgatgctgggcgcgtcggccgccctgttcggcacatggatggaacgggtagggccgcgcaaagccatatttgccgccgcctgctgtttcagcctgggcttcttcgtatccgcattcggcgtgcgtacgcacaacctcttcctgctttatttgggcaacggcgtcatcggtggcgtaggcttaggcttaggctacatcgggccggtttccacactgatgaaatggtttcccgacaagccgggtatggcgaccggtttggcgattatgggtttcggcggcggcgcaatgctggcctctccgctttccgtatcactgatgaacgccttttcaaacgccgcttcagtcggggttgttgaaaccttcgccgtattgggcctgctttacctcgcactgatgatgttcggcgcgtttaccatccgcgtacctgccgacggctggaaacctgaaggctataccgcgccgaaaacgcaaaacaagctggtcagcagcaatcatgtcaacgtgtcacaagccatgaaaacgccgcaattttggctgttgttctgggtattgtgcctgaacgtaaccgccggcattggcgtattgggtcaggcatccgtgatgattcaggaactcttttccgaaacctccgtaggcaggcaggcgtcagtcggcgcaggtgcggcggcaggcttcgtcagcctcctgagcctgtttaacatgggcggacgctttttatggtcgagcgtttccgacaaaatcggacgcaaaaacacctacaccattttcttcgtactcggttcgctgctgtatttcgccgttccctccatcggcgagggcggcagcaaagccctgttcatcatcggcttttgcgtgattatttccatgtacggcggcggatttgccgccattcccgcctacctgaaagacctgttcggcacctatcaggtcggcgcgattcacgggcgcatcctgctggcctggtcaaccgccgccgtcatcggcccggtactggtcaattacatacgccaaagccaaatcgacagcggcataccggcggcacaggcatacagcgtaaccatgtacatcatggcgtgcctgctgattatcggtttgttgtgcaacctcgccgtcaaatccgtacacgaaaaacaccacgaaaaagacatcaaaaccgccgcacacagcggcaaccccgatgacgaaaccgccatatccgacgcttaccttgtgggcgaaaaagtttccggcggcggcatatcggtctggtggcgttgggcattggccgtcataccgctcgcctacggcgtggtgatggtctttgtcaaagcactcgaccttttctcctga

SEQ ID NO: 63636 - DNA, 1575 bp, Neisseria meningitidis
atggctcaaatccaaatgagcgcaaatgttaaaaccatcaacgccgtctttgccgccatgctggtaggtacagtcggctattttatttattggggcttgggttatacccattacaattacgccgccttattcattattgccacgatgttcggcgtgtttatggcgttcaacatcggcggcaacgatgttgccaattctttcggcaccagcgtcggtgcgggtacgctgaccatcccgcaggctttgctgattgcggcggtatttgaggtcagcggcgcggtcatcgcgggcggcgaggtaaccaataccatacgcaaaggcatcgtcgatttgaagggtgttgatttcgaacccatacagtttgtgtttattatgatgtccgcgcttttggcggcggcgttgtggctgttgtttgcctcgaaaaaagggcttccggtatctaccacccattccattatcggcggcattgtcggcagcgcggtatgtatggcggtaatgaacgatgccgcatcgggcgatttgatacgttggggcaagctgggcggtattggtgtttcttgggtattgtcgcccgtgttgggcggcgcggtgtcctatttcctgttttcgcgcgtcaagaaaaacgtcttagattacaacgcttgggcggaaggcacgctcaagggcatcaagcaggaaaaaaaggcctataaagaacggcaccgcctgtttttcgagggtttgtccgaagccgaaaaagtcgagtacgccaccaaaatggcgcacgacgcgcaaatttacgacgaacccgaattcgatccgcaagagctgcaatcggagtattaccgcggtctttatgcgttcgacaaccgtaaaaacaatgtcgattcctacaaagcgctgcattcttggattccctttatcgcttcgttcggcgcgatgatgatttccgctatgctgattttcaagggcttgaaaaacctgcatttggggatgagcaacgtcaacagcttcctgaccatctttatgataggcgcggcggtgtggatggggacgtttgtgtttgccaaaagcctcaagcgtaaagacttgggcaaatcgacctttcagatgttttcatggatgcaggtctttaccgcctgcggcttcgcattcagccacggtgcgaacgatatcgccaacgccatcggtccgtttgccgcgattatggatgttttgcgtaccaacagcgttgccgcgcaaaatgtcgtccccccgattgcgatgctgactttcggcatcgcgctgattgtcggtttgtggtttgtcggtaaagaggtgattaaaaccgtcggtacgagtttggccgaaatgcaccccgcctcgggttttaccgccgaattgtccgccgcatccgtcgtgatgggcgcgtcgctgatggggctgcccgtgtccagtacgcatatcttggtcggcgcggtactcggcatcggtctggtcaaccgcaatgccaactggaaactgatgaagcccatcggtttggcgtgggtcattaccctgcctgccgccgccgtattgtcggttgtctgctacttggttttacaggcagtattctga

SEQ ID NO: 63637 - DNA, 1620 bp, Neisseria meningitidis
atggacaatctcgtatgggacggcattcccgacatccgcacactcgaccaagccatccgcaaacacgcacccccgctcaacctgattatctgcctccccgataatcagattcccgattttcaaaccgcacaagatgcttcggacgcggaatgccgtctgaagcaccgtttggatcaggcaacgcagtgcctccagttcgacagcatcaacctcatcgaacacatcctgcacgatatccgcttctggctggttcccccttcacgcacctgccgcctgcacgaacacttccaccacatttcctggcagaccgaagccatctcgcaaaccgaaagcaagtccgacaaaccctggtttgcacttccacaaacatccgaacggcaaaaaccggaacacatcctcgtcatcggcgcaggcatatccggcgcggcaaccgcccacgccttagcatcacacggcatttctgttaccgtattggaagcccgaaaagccgcccaagccgccagcggcaaccgccaagggctgctctacgccaaaatctcgccgcacgacaccgaacaaaccgaactgctgcttgccggctacggctacaccaaacgcctgctcagacacatcctgcccgaatccgaaacctggggcggcaacggcatcatccacctcaattacagccgcatcgaacaacaacgcaatcacgaattgggtttgcaaaaacaccataaccacctctaccgcagcatcacgtctgcagaagccgaaaaaatcgccggtatcccgctgtccgtcccatacgaccacccttcatgcggactctactggcaacacggcgtatggctcaatccgcccgcattcgtccgcaccctcctccgccatccgctgatcggactgcacgaagacacaccgttaaccgacatttcctacgacggggaaaagtggattgcaagcacaccaaacggcatattttccgccacacacatcatctactgcaccggcgcgaacagcccctgcctgcccgaaaccaacctcgccgccctacccctcaggcaaatacgcggacaaaccggcctcacaccgtccaccccgttttccgaacaactgcgttgcgccgtttcaggcgaaagctacatcagcccgtcgtggcacggactgcactgctacggtgcaagttttattcccaacagcagccataccggatggaacgacgccgaagaaacctcaaaccgccaagcattggcacaccttaaccccgcccttgccgaatcattgtttgctgccaacccaatcccccaaaaataccaagggcacgccgccatacgctgcgacagccccgaccaccttcccctagtcggcgcactcggcgacattgccgccatgcggcaaacttacgccaaacttgcactggacaaaaactaccgcatcgatgccccatgcccatatctgcctaatgcctacgccaacaccgcccacggcacacgcgggcttgccaccgcccccatctgcgccgccgccgttgcagccgaaatcctaggcttgccccatcccttttcacaacgcctgcgccacgccctacaccccaaccgcaccatcatccgcgccatcgtcagaaggaaggatctaaccccttaa

SEQ ID NO: 63638 - DNA, 219 bp, Neisseria meningitidis
atgggaaactcgcaaggcgtgattctgcccaaatcattattgggtcaaataggggcagtggacagcttggctgttacagttgaaaagggcaatattattttaagctgtcctaccgttcgcaggggatgggcagaagctgccgcaatgcttgtcgaaaccgagcaggagcattttttttccgaaattgaaaacgaagcggataaagaatggatatggtag

SEQ ID NO: 63639 - DNA, 729 bp, Neisseria meningitidis
atgaccaaacagctgaaattaagcgcattattcgttgcattgctcgcttccggcactgctgttgcgggcgaggcgtccgttcagggttacaccgtaagcggccagtcgaacgaaatcgtacgcaacaactatggcgaatgctggaaaaacgcctactttgataaagcaagccaaggtcgcgtagaatgcggcgatgcggttgctgcccccgaacccgagccagaacccgaacccgcacccgcgcctgtcgtcgttgtggagcaggctccgcaatatgttgatgaaaccatttccctgtctgccaaaaccctgttcggtttcgataaggattcattgcgcgccgaagctcaagacaacctgaaagtattggcgcaacgcctgagtcgaaccaatgtccaatctgtccgcgtcgaaggccataccgactttatgggttctgacaaatacaatcaggccctgtccgaacgccgcgcatacgtagtggcaaacaacctggtcagcaacggcgtacctgtttctagaatttctgctgttggcttgggcgaatctcaagcgcaaatgactcaagtttgtgaagccgaagttgccaaactgggtgcgaaagtctctaaagccaaaaaacgtgaggctctgattgcatgtatcgaacctgaccgccgtgtggatgtgaaaatccgcagcatcgtaacccgtcaggttgtgccggcacacaatcatcaccaacactaa

SEQ ID NO: 63640 - DNA, 1146 bp, Neisseria meningitidis
atgcaaaataattcatacggctatgccgtgtcggtgcgcgtgggcggtaaagagcaccgccactgggagcgctacgacatcgacagcgactttttaatccctgccgacagcttcgattttgtcatcggcaggttggggccggaggcggccatacccgatttaagcggagagagctgcgaggtagtgatagacgggcaaatcgtgatgacgggcatcatcggcagccagcgccacggcaaaagcaagggcggccgcgagttgagcttgagcgggcgtgatttggccggttttttggtggattgctccgcgccgcagctcaatgtaaagggcatgacggtattggatgcagccaaaaagctggccgcgccgtggccgcagattaaagcggtggtgcttaaggtcgaaaacaaccccgctttggacaaaatcgacatcgagccgggcgaaactgtatggcaggcattaacccatattgccaactcggtcgggctgcatccgtggctggagccggacggcacgttggtggtgggcggtgcggattacagcagcccgccggtggcgacattgtgttggagccgcaccgacagccgctgcaatatcgagcgcatggacattgagtgggataccgacaaccgcttttccgaggttacttttttggcgcaatcgcacggccgcagcggcgacagcgccaaacacgatttaaagtgggtgtacaaagacccgacgatgacgctgcaccgccctaaaacggtggtggtgtccgatgccgacaatttggccgcattgcaaaagcaggctaaaaagcagctggccgactggcggctggagggatttacactcacgataaccgtgggcggccataaaacccgcgacggcgtattgtggcaacctggccagcgtgtgcatgtgatcgacgacgagcacggtatcgatgcggtgttttttctgatggggcggcggtttatgctatcccgcatggatggcacgcaaaccgagctgcggctcaaagaggacggtatttggacacccgacgcttaccccaaaaaggccgaggcggcgcgcaagcgcaaaggcaaacgcaaaggcgtgagccataagggcaaaaaaggcggcaaaaaacaagcagaaacggcggtgtttgaatga

SEQ ID NO: 63641 - DNA, 684 bp, Neisseria meningitidis
atgcaacacgacgtttacgactacaccgcgcatacggtttctaaaaacaccgtcctgcagaaaacctaccgcctgctcggattttcattcattccggcagccgcaggcgcggcacttgccgccaatgccggcttcaatttttacgcagccttcggttcgcgctggatagggtttgccgtcgtgctggcgtttttctacggcatgatccacttcatcgagaaaaaccgttacagcaataccggcgttaccctgctgatgatattcacattcggtatgggcgtattgatcggccccgtgctgcaatacgcactccatattgccgacggtacgaaaatcgtcggcattgccgccgcgatgaccgccgccgtctttttaacgatgtccgcattggcacgccgaacccggctcgatatgaacgcgctcggacgcttcctgaccgtaggtgcggtcattctgatggtcgccgtggttgccaatctgtttttgggtattcccgcacttgccttgaccatttccgccggttttgtcttgttcagttccttaatgattatgtggcaggtacgcaccgtcatcgacggcggcgaagacagccacatcagcgcggcactgacactgtttatctcgctttacaacatcttcagcagcctgctcaacatcctgttgtctttaaacggcgaggattga

SEQ ID NO: 63642 - DNA, 138 bp, Neisseria meningitidis
atgctaccgcgcaaattcaaaaatctcaaattccgacccaatcaacacacccgatgccccatgccaatagaaataccccacaccaataaaaaagtgccgaaaatcggcactaaaactgacaattttcaacactgctga

SEQ ID NO: 63643 - DNA, 1557 bp, Neisseria meningitidis
atgacattagcagagttttggccgctgtgcctccgccgtcttcacgatatgttgcctcaagggcagtttgcgcaatggattgcgccccttaccgtcggtgaggaggggggcgtatgggtggtgtacggcaagaaccagtttgcctgcaatatgctcaagagccagtttgccggaaaaatagaagcggtgagggaagagttggctgccggccgttccgccttcgtattcaaaccgggagaaggcgtgcgttatgagatggcggcggttgaaggtgctgtcgaacctgccgagccgtccttgcacgcggtgtcggagggaatgcccgtgcaggaggttctgttggacgagctgccgtctgaagagcctgtcaaacctgctgcgtcgaaaacggcggcggatattttggcggaacgtatgaaaaacctcccgcatgagccgcgccatactgccgggtctgcttcccgtccggaatcggaggtacttgcgaaagcgcggacggatgcgcagcgtgatgcggaagaggcgcgttacgaacaaaccaacctgtctccggattacacatttgatacgttggtagaaggcaagggcaaccgccttgcggcagctgccgcgcaggcgattgcggaaagtccgggacagagttataacccgttcttcctctatggcagtacgggtttgggtaaaacccaccttgtgcaggcggtcggcaacgaactgttgaaaaaccgtcccgatgccaaagtgcgctatatgcattcggacgactatatccgcagctttatgaaggcggttcgcaacaatacctacgacgtgttcaagcagcaatacaagcaatacgacctgctgattatcgacgacatccagttcatcaaaggcaaagaccgtacgatggaggaattcttctatctgtacaatcatttccataacgagaaaaaacagctcatcctcacttgcgatgttttacccgccaaaatcgaaggtatggacgaccgcctcaaatcccgtttttcatggggactgactttggaactcgagccgcccgaattggaaatgcgtatcgccattttgcagaaaaaggcggaagcggcgggcatcagtattgaagacgaagccgcgctgttcattgccaatctgatccgttccaacgtgcgtgagcttgaaggcgcgttcaaccgcgtcggagcgagcagccgctttatgaaccgtcccgtcatcgacatcgatttggcgcgtaccgctttgcaggacattattgccgagaagcacaaagtcatcaccgccgatattattattgatgccgttgcgaaatattaccgcatcaaaatcagcgatgtgctcggtaagaaacggacacgaaacattgcccgtccgcgccaggtggcgatgagcctgaccaaagaactgaccactttgagcctgccgtctatcggcgattcgttcggcggacgcgaccatacgaccgttatgcacggcatcagggcagtggcgaaactgcgcgaagaagatccggaattggctcaggattatgaaaagctgctgattctgattcaaaactga

SEQ ID NO: 63644 - DNA, 522 bp, Neisseria meningitidis
atgtcctgtttttcaatcaaacgtatgtccgcgtttcgggcgcggataacggcgttttttgccgcctttgtctttttgacggcggcactgcccgcttatgcggagcgtctgcctgattttctggcgaaaatacagccttcggaaatttttccgggtgcggaccgttacggcaagccggaaggtaagcctatggttgcccgcgtttacaaaggcgatgagcagttgggcttggtctatatcacgaccgatgcggtcaatacgcgcggttattcgagcaaaccgatcgatacgctgatggctttggcaaatgacggcacgatagccggagcgaaactggtcgatcatcacgaaccgattatgctgatcggtatcccgcatttgcccgcgcccgggcgggcgatacgcttaaactggcttccggcgtatatcaaaccaaactttatatcgacaaaccgattacgattgaagggcctgccgaccgttctgcaaccatcgaaggggacaggagcgggcgtaccatag

SEQ ID NO: 63645 - DNA, 306 bp, Neisseria meningitidis; identical to SEQ ID NO: 60444

SEQ ID NO: 63646 - DNA, 2286 bp, Neisseria meningitidis
atgaataccaaactgacaaaaatcatttccggtctctttgtcgcaaccgccgcctttcagacagcatcggcaggaaacattacagacatcaaagtttcctccctgcccaacaaacagaaaatcgtcaaagtcagctttgacaaagagattgtcaacccgaccggcttcgtaacctcctcaccggcccgcatcgccttggactttgaacaaaccggcatttccatggatcaacaggtactcgaatatgccgatcccctgttgagcaaaatcagtgccgcacaaaacagcagccgtgcgcgtctggttctgaatctgaacaaaccgggccaatacaataccgaagtacgcgggaacaaagtttggatattcattaacgaatcggacgataccgtgtccgcccccgcacgccccgccgtaaaagccgcgcctgccgcaccggcaaaacaacaggctgccgcaccgtctaccaagtccgcagtatccgtatccaaaccctttaccccggcaaaacaacaggctgccgcaccgtttaccgagtccgtagtatccgtatccgcaccgttcagcccggcaaaacaacaggcggcggcatcagcaaaacaacagacggcagcaccagcaaaacaacaggcggcggcaccggcaaaacaaaccaatatcgatttccgcaaagacggcaaaaatgccggcattatcgaattggcggcattgggctttgccgggcagcccgacatcagccaacagcacgaccacatcatcgttacgctgaaaaaccataccctgccgaccacgctccaacgcagtttggatgtggcagactttaaaacaccggttcaaaaggttacgctgaaacgcctcaataacgacacccagctgattatcacaacagccggcaactgggaactcgtcaacaaatccgccgcgcccggatactttaccttccaagtcctgccgaaaaaacaaaacctcgagtcaggcggcgtgaacaatgcgcccaaaaccttcacaggccggaaaatctcccttgacttccaagatgtcgaaatccgcaccatcctgcagattttggcaaaagaatccgggatgaacattgttgccagcgactccgtcaacggcaaaatgaccctctccctcaaagacgtaccttgggatcaggctttggatttggttatgcaggcacgcaacctcgatatgcgccaacaagggaacatcgtcaacatcgcgccccgcgacgagctgcttgccaaagacaaagccttcttacaggcggaaaaagacattgccgatctgggcgcgctgtattcacaaaacttccaattgaaatacaaaaatgtggaagaattccgcagcatcctgcgtttggacaatgccgacacaaccggaaaccgcaatacgcttgtcagcggcaggggcagcgtgctgatcgatcccgccaccaataccctgattgttaccgatacccgcagcgtcatcgaaaaattccgcaaactgattgacgaattggacgtacccgcgcaacaagtgatgattgaggcgcgtatcgtcgaagcggcagacggcttctcgcgcgatttgggcgttaaattcggcgcgacaggcaagaaaaagctgaaaaatgatacaagcgcattcggctggggggtaaactccggcttcggcggcggcgataaatggggggccgaaaccaaaatcaacctgccaattaccgctgccgcaaacagcatttcgctggtgcgcgcgatttcctccggtgccttgaatttggaattgtccgcatccgaatcgctttcaaaaaccaaaacgcttgccaatccgcgcgtgctgacccaaaaccgcaaagaggccaaaatcgaatctggttacgaaattcctttcaccgtaacctcaatcgcgaacggcggcagcagcacgaacacggaactcaaaaaagccgtcttggggctgaccgttacgccgaacatcacgcccgacggccaaatcattatgaccgtcaaaatcaacaaggactcgcctgcgcaatgtgcctccggtaatcagacgattctgtgtatttcgaccaaaaacctgaatacgcaggctatggttgaaaacggcggcacattgattgtcggcggtatttatgaagaagacaacggtaatacgctgaccaaagtccccctgttgggcgacatccccgttatcggcaacctctttaaaacacgcgggaaaaaaaccgaccgccgcgaactgctgattttcattaccccgaggattatgggtacggccggcaacagcctgcgctattga

SEQ ID NO: 63647 - DNA, 828 bp, Neisseria meningitidis; identical to SEQ ID NO: 38917

SEQ ID NO: 63648 - DNA, 204 bp, Neisseria meningitidis; identical to SEQ ID NO: 38753

SEQ ID NO: 63649 - DNA, 1812 bp, Neisseria meningitidis; identical to SEQ ID NO: 46737

SEQ ID NO: 63650 - DNA, 1782 bp, Neisseria meningitidis
atgccttatttcgccctgtttgacgatgccgtaagcggccgcgcaaaacgctatcaaaatcatgtggaaagccgttttttccgtcccgaagaactcgatgctttggacggcgcgctgcaatcgggctggcaaaaagggctgcatgccgtgttgtttgcagactacggattcggtttgccgctgacgggggtcgagtccgaacgcggcggcaaccttgccctgcactggtttgccgactgcgccgacaccgatgccgcaagctggcttgcccgacactcagacggcctccccgccggcatttccacgccgcaatcctccgtatccgaagccgattacctcgaccatatccgccaaatccacgaagccatccgacgcggcgacacctatcaaatcaactacactacccgcctgcacctgcaagcctacggcaatcccgtcaaactttaccaacgcctgcgccagcccgtcccctatgccgttttgtcccacctgcccgatgcacaagggcaatccgcgtggacgctgtgtttctcgcccgaactcttcctcaaaatcggttcggacggcaccatcagcaccgaaccgatgaaaggcaccgcgccgattttgggcgacggacaagacgaacgccgcgccgccgaattgcaagccgacccgaaaaaccgcgccgaaaacgtgatgattgtcgatttgctgcgcaacgacctcggcaaaatcgcccaaatcggcaaagtatgcgtacccgagccgtttaaagtgtcgcgtttcggcagcgtttggcagatgaccagcaccatccaagcccaagccctgccaaacacctcgttcgccgacatcctccgcgccgccttcccctgcggcagcatcaccggcgcgcccaaaaaaatgagtatgcagattatcgaatcgctcgaaaccgaagcgcgtgggctttatacgggcagcatcggctacctgaaaccttgcgcgggcggcttggggtttgaaggcgcgttcaacgtcgtcatccgcaccttatcgctcacgccgctttcagacggcatttatcaaggcgtgtacggtgtcggttccggcatcgtcatcgacagcgaccccgccgccgaatatcgcgaatgcggctggaaagcccgtttcctcaacgaattgcgccccgatttcggcatttttgaaaccctgcgcgtggaaaacaggcaatgcaccctgctcaaccgccacctatgccgtctgaaagccgccgcccaagcccttaacctgcccctgcccgacggttgcgaaaatcaaatcaaacaatacatcgcccgcttgcccgacggcgtgttccgcgtcaaagccctgctcgcttcagacggcatcagcctgtcccgcgccgttttaaaccgtctgaccgacaaacaacgcgtcatcatttcgcccgccgtcctgcccgcacaaaactacctgcgccgcttcaaaaccacccaccgcgccctcttcgaccaagcgtggcaaaccgccgaaacacaaggcgcgttcgacagcctgtttttcaattcagacggcatcctgctcgaaggcggcagaagcaacgtgttcgtcaaataccaagggcaatggctcacaccgtctttagatttagacattttaaacggcataatgcgccaagccgtattggacgaaccgcaaaaatatttgcaaacaaatcaagtaatcgaaacacacatcacacaaaaaacactgcaagaagccgaagaaatccgcctctccaacgccctgcgcggcgtatttgccgccgcccttgcctga

SEQ ID NO: 63651 - DNA, 1167 bp, Neisseria meningitidis
atgagaaaattcaatttgaccgcattgtccgtgatgcttgccttaggtttgaccgcgtgccagccgccggaggcggagaaagctgcgccggccgcgtccggtgagacccaatccgccaacgagggcggttcggtcagtatcgccgtcaacgacaatgcctgcgaaccgatggaactgaccgtgccgagcggacaggttgtgttcaatattaaaaacaacagcggccgcaagctcgaatgggaaatcctgaaaggcgtgatggtggtggacgagcgcgaaaacatcgcccccggactttccgataaaatgaccgtcaccctgttgccgggcgaatacgaaatgacttgcggtcttttgaccaatccgcgcggcaagctggtggtaaccgacagcggctttaaagacaccgccaacgaagcggatttggaaaaactgtcccaaccgctcgccgattataaagcctacgttcaaggcgaggttaaagagctggtggcgaaaaccaaaacctttaccgaagccgtcaaagcaggcgacattgaaaaggcgaaatccctgtttgccgacacccgcgtccattacgaacgcatcgaaccgattgccgagcttttcagcgaactcgaccccgtcatcgatgcgcgtgaagacgacttcaaagacggcgcgaaagatgccggatttaccggctttcaccgtatcgaatacgccctttgggtggaaaaagacgtgtccggcgtgaaggaaattgcagcgaaactgatgaccgatgtcgaagccctgcaaaaagaaatcgacgcattggcgtttcctccgggcaaggtggtcggcggcgcgtccgaactgattgaagaagtggcgggcagtaaaatcagcggcgaagaagaccggtacagccacaccgatttgagcgacttccaagccaatgtggacggatcgaaaaaaatcgtcgatttgttccgtccgctgatcgaggccaaaaacaaagccttgttggaaaaaaccgataccaacttcaaacaggtcaacgaaattctggcgaaataccggactaaagacggttttgaaacctacgacaagctgggcgaagccgaccgcaaagcgttacaggcctctattaacgcgcttgccgaagaccttgcccaacttcgcggcatactcggcttgaaataa

SEQ ID NO: 63652 - DNA, 387 bp, Neisseria meningitidis; identical to SEQ ID NO: 44892

SEQ ID NO: 63653 - DNA, 915 bp, Neisseria meningitidis; identical to SEQ ID NO: 44950

SEQ ID NO: 63654 - DNA, 822 bp, Neisseria meningitidis
atgagcagtccgcgccatgtgttttacatttccgaccgtaccggtctgactgccgagaatatcggcgaggcgttgctgaaccagtttggcaatctgtcgttcaaacgccatacgcatccgtttgtcgatacgccggaaaaggcgtgcgcagtggtggagaaggtcaatcggagccggcaggaaaacggtcagcgtccgattgcgtttgtcagtgtggttgatgacgaaatccgtcggattatcaaaggggcggatgcttttcagattaatttctttgagacttttttgggactgttggagaaagaactcaataccgaagccacggcatccgggcaggggcatcacagtatcggtaatacgaagcgttacgatgcgcgtatggaggcggtcaatttttctttgaaccacgacgacggggtcagcgataagaaccttcaggaagcggatgtaatcttgatgggtgtatcgcgttcgggcaaaacgccgacctgcctttacctcgccctgcaatacggcatccgtgcggcaaactatccgctgattcccgacgatttggaatcggccgatctgccgcgtatggtcaagccttatagggataagctgttcgggttgaccatccagccggaacgtttgcaggccatccgccaagagcgccgcccgaattcaacttatgccaaaatcgatacatgccgcagcgaggtggcggacgcgcagagtatgttcagacggcatggcattccgtttgcgaatacgacggataaatcggttgaggaactggcggtacacatccttcaggcgtgcaagctcaaacgcaggttttga

SEQ ID NO: 63655 - DNA, 1914 bp, Neisseria meningitidis
atgttgaacattaccttgccggacggctcagtccgccaatacgaatcccccgttaccgtggctcaaattgctgcgtctatcggtgtcggtttggcgagggcggcggtggcaggcagggtaaacggcaaattggtcgatgcgtgcgacccgattgttgaagattctgctgttcaaatcattactccgaaagatcaggaaggcatcgaaatcatccgccattcctgcgcccatcttgtcgggcatgctgtcaagcaactctatcctaatgcaaaaatggttatcggccccgtcattgaagagggcttttattacgacatcgccacggaaaaaccgtttacaccggaagatgttgccgctattgaggcgcgtatgaaagaattgattgcccaagattatgatgtggtcaaaatcatgactccgcgtgcggaggcgattaaaatttttcaagagcgcggcgaagaatacaaactacgcctgattgacgatatgcctgaagtggaagcgatggggatgtatcatcatcaggaatatgtcgatatgtgccgcggaccgcacgttccgaatactcgtttcctgaaaaacttcaaactgaccaagctggcgggcgcatactggcgcggcgacagcaacaatgaaatgctgcaacgcatctacggtacggcttgggcgacaaaagacgagttgaaagcctatattcaacgtatcgaagaagccgaaaagcgcgaccaccgcaaacttggcaagcaattggatctattccatttgcaagacgaagcaccgggcatggtgttttggcatcctaaaggctgggctttgtggcaagtgattgaacagcatatgcgtaaagagttgaatgctgccggttataaagaggtgaaaacgcctcagattatggataaaactttctgggaaaaatccggccactgggaaaactataaagacaatatgttcgtaaccagttcggaaaaacgcgaatatgcggttaaaccgatgaactgtccgggtcatgtgcaaatttttaataacggtttgcgctcatatcgcgatttgccgatgcgtttggcggaattcggttcttgccaccgcaatgaaccaagcggtgcattgcatggtctgatgcgtgttcgcggttttgtgcaagatgatgcgcatatcttctgtaccgaagatcaaatcgtcagcgaggcccgtgcgttcaatgaattgttggttcgcatctacaaacagttcggtttccatgatgtatccgtcaagctttctcttcgccctgaacaacgtgcaggttcagatgacgtgtgggataaggcagagcagggtttgcgcgaggcattgactgcctgcggcgtggaatggggcgaattgccgggcgagggtgcgttttacgggcctaaaatcgaatatcatgtcagagatgccttgggtcgttcttggcaatgcggtacattacaactggatttcgtcttgccggaacgcttggatgcagaatatgtaaccgaaaacaatgaccgtgcgcgacctgttatgttgcatcgcgccattttaggttctttggagcgatttatcggcattctgattgagaactatgcaggctctttcccgttatggctggctccggttcaattggtaattatgaatattaccgaaaatcaggcagattattgtcgggaagtggctgccaaattgcaggcggcaggattccgtgtcgaattggatttgcgtaacgaaaaaatcggttacaaaatccgcgacaacagccaataccgtttcccttatcaaatcgttgtcggcgataaggagaagcaggaaaacaaagtggcggtacgccgcaaagcagaagatttgggttctttggatttggatgatttcattgcgcaattgcagcaagaaatcactgatgccctcgtcaatcattaa

SEQ ID NO: 63656 - DNA, 1578 bp, Neisseria meningitidis
atgagtaaagccgtcaaacgcctgttcgacatcatcgcatccgcatcggggctgattgtcctctcacccgttttcctgattttggcgtacctcatccgcaagaatctgggttcgcccgtcttcttcattcaagaacgccccggaaaggacggaaaaccttttaaaatggtcaaattccgttccatgcgcgacgcgcttgattcagacggcattccgctgcccgacagcgagcggctcacacccttcggcaaaaaactgcgtgccgctagtttggacgaactgcctgaattatggaatgtcttaaaaggcgacatgagcctggtcggcccgcgcccgctgctgatgcaatatctgccgctgtacgacaacttccaaaaccgccgccacgaaatgaaacccggcattaccggctgggcgcaggtcaacgggcgcaacgcgctttcgtgggacgaaaagttcgcctgcgatgtttggtacaccgacaacttcagcttttggctggatatgaaaatcctgtttttgacagtcaaaaaagtcttgatcaaagaaggcatttcggcggaaggggaagccactatgccttatttcactggaaatcaaactaatgaaaaaaataatatactgattctgtcggcaggtcgccgtgtcgaattggtgcaggacttccaaaccgaagccgcacgtttttcagacggcatcagcgtttttgccactgacctcaacccccgcatgtcttctgcctgccatgtttcggacggttcatttgaagtgccgccgattagtgccgattcatatatcgacagcattttcaatctggcggtacgcgaaaatatcggtttaatcatcccaaccatagacaccgaactgcaaaagctggcagacgagcgcgaacgctttgaagcggcaagtgtccacatcgtcgtttccgattcggacttcatcgcacaatgccgcgacaaacggaaaaccgccaccttgtttgcccgctacggcatacgctcacccgaaatttacgaccgcaagaagttggttttcccttgcttcgccaagccttatgacggcagccgcgccatcggtgcaaaacggattgacacacctgccgacctgacaccggaagtcttggcagacaccaaattaatgttctgtcagtttatcgacatcgaaaataaattttccgagtttaccgtcgatatgtattacgaccgtcaatgccgtctgaaatgcgccatcccgcgaaaacgcttggaagtgcgctccggcgaaatcagcaaaggcgttacctgcaaaaacagcctctaccaaacgctgctggaaaaaatgtcggtattgcagggcgcgcgcggctgtatcacggcgcagttcttctacaacgaagaaaccggcgaattctacggcgtggaaatcaacccccgcttcggcggtggcttcccgctgacgtatgccgcaggcggcaattatccgagccggttgatgcgcgaatacctcggcgacgaagaaatcccgttttcagacgactgggaaaacaacctcattatgttgcgctacgatgccaaggtcttggttcatgaaaacgattaa

SEQ ID NO: 63657 - DNA, 426 bp, Neisseria meningitidis
atggcgattgaacgcaccatctccatcatcaaacccgatgccgtcggcaaaaacgttatcggcaaaatatacagccgctttgaggagaacggtctgaaaatcgttgccgccaaaatgaagcagcttactctcaaagaggcgcaagaattttatgcggttcataaagaccgccccttctacgccggattggttgaatttatgaccggcggtccggttatgattcaggtattagagggtgaaaacgccgtcctgaaaaaccgcgaactgatgggtgcaactaatccttccgaagccgccgaaggcacgatacgcgcggactttgccacttcggtcagcattaatgccgtacacggttccgacagcgtggaaaatgccgctttggaaattgcctactttttcagccaaaccgaaatctgcccccgttga

SEQ ID NO: 63658 - DNA, 435 bp, Neisseria meningitidis; identical to SEQ ID NO: 40706

SEQ ID NO: 63659 - DNA, 645 bp, Neisseria meningitidis
atgaagctcaaacatctgttgccgctgctgctgtcggcagtgttgtccgcgcaggcatatgccctgacggaaggggaagactatcttgtgttggataaacccattcctcaagaacagtcgggtaaaattgaggttttggaatttttcggctatttctgcgtacattgccatcatttcgatcctttgttattgaaattgggcaaggcattgccgtctgatgcctatttgaggacggagcacgtggtctggcagcctgaaatgctcggtctggccaggatggcggccgccgtcaatttgtcgggtttgaaatatcaggcaaaccctgctgtgtttaaagcagtttacgaacagaaggttcatttggaagacagggcggtggccggaaaatgggctttgtctcaaaaaggctttgacggtaaaaaactgatgcgcgtttatgactctcccgaggccgcagcagcagcatcaaaaatgcagaaactgacagaacaatacggtattgacaacacgccgaccgttattgtcggcggaaaataccgcgttatcttcaataatggctttgacggcggcgttcatacgattaaagaattggttgccaaagtcagggaagaacgcaagcgtcagccccctgctgtacagaaatag

SEQ ID NO: 63660 - DNA, 1056 bp, Neisseria meningitidis
atgactattttatcggacgttaaagcattaggacaacaaatctggctggacaacctttcccgctcgctcgtgcaaagcggcgaattggcgcaaatgctgaaacaaggcgtgtgcggcgtaacttccaatcccgccatctttcaaaaagccttcgccggcgatgcgctttacgccgacgaggttgccgccctcaagcagcaagacctgacccccaaacaacgctacgaaacgatggcggttgccgatgtgcgtgccgcctgcggcgtctgtcttgccgaacacgaatccaccggcggcaaaaccggcttcgtcagcctcgaagtttcgcccgaattgtccaaagacgcgcaaggcacggttgaagaagcgcgccgcctctacgccgccatcgggtgcaaaaacgcgatgattaaagtgcctgccaccgacgcaggcatcgatgcgctcgaaaccctcgtttcagacggcatcagcgtgaacctgaccctgctgttctcacgcgcccaaaccctcaaagcctacgcagcctacgcgcgcggcatcgccaaacgtttagcagcaggacaaagcattgcccatattcaagttgtcgccagcttcttcatctcccgcgtggacggcgcgctggacacaacactgcccgaccacctcaaaggcaaaatcgccatcgcccttgccaaagccgcctaccaagactgggcgcaatacttcggcagcccggaatttgccgcgctggaaaccaaaggcgcaaaccgcgtgcagcttttatgggcatccacaggcgtgaaaaacccagcctatcccgacacgctctacgttgacagcctgatcggcgcgcacaccgtcaacaccgttcccgatgccacgctcaaagcctttatcgaccacggcacagccaaagccacgctgaccgaaggcgtagaagaagcacaagcgcagctcgccgaaaccgccgcgctcggcatcgatgtcgaaaccttggcaacgcgtttgcaggaagacggtttgaaacagtttgaagaagcgtttgaaaaactgctcgcaccgttggtttaa

SEQ ID NO: 63661 - DNA, 1785 bp, Neisseria meningitidis; identical to SEQ ID NO: 45360

SEQ ID NO: 63662 - DNA, 324 bp, Neisseria meningitidis; identical to SEQ ID NO: 39252

SEQ ID NO: 63663 - DNA, 330 bp, Neisseria meningitidis; identical to SEQ ID NO: 37077

SEQ ID NO: 63664 - DNA, 513 bp, Neisseria meningitidis
atgttaccgaatacaccgcgccgcgccgtttatgccggcagtttcgatccgcccacattggggcatctgtggatgatacggcaggcgcaatctatgtttgacgaactcatcgtcgccatcggcattaaccccgacaaacgcagcacctataccgtcgctgaaaggcaggatatgttgtgcgatattactaaaatgtttcccaacgtcagaaccgatgtatttgaaaaccgatttctggtgcattacgcccgtgaggtagatgcaggattcatcgtgcgcggcatccgttctgcttcggattacgaatacgaacgttccatgcgccatatcaacagcgacctcgcccccgaaatatccaccgtattcctcatgccgccgcgcgaaatcgccgaagtgtcgtccactatggtcaaaggactggtcgggccggaaggctggatggaaacgatccaccgctacgtgccgcaagctgtgtacgaaaaaatccttgccgaacatcaacacgaaaattga

SEQ ID NO: 63665 - DNA, 2361 bp, Neisseria meningitidis
atgctccctatcgccgcgctggtcggcagtattttcggcaatccggtctttgcggcagatgaagctgcaactgaaaccacacccgttaaggcagaggtaaaagcagtgcgcgttaaaggccagcgcaatgcgcctgcggctgtggaacgcgtcaaccttaaccgtatcaaacaagaaatgatacgcgacaacaaagacttggtgcgctattccaccgatgtcggcttgagcgacagcggccgccatcaaaaaggctttgctgttcgcggcgtggaaggcaaccgtgtcggcgtgagcatagacggcgtaaacctgcctgattccgaagaaaactcgctgtacgcccgttatggcaacttcaacagctcgcgtttgtctatcgaccccgaactcgtgcgcaacatcgacatcgtaaaaggggcggactctttcaataccggcagcggcgccttgggcggcggtgtgaattaccaaaccctgcaaggacgtgacttactgttgcctgaacggcagttcggcgtgatgatgaaaaacggttacagcacgcgtaaccgtgaatggacaaataccctcggtttcggcgtgagcaacgaccgcgtggatgctgctttgctgtattcgcaacgtcgcggtcatgaaaccgaaagcgcgggaaaccgaggctatgctgtggaaggggaaggcagtggcgcgaatatccgtggttcggcacgcggtatccctgattcgtccaaacacaaataccacagctttttgggtaagattgcttaccaaattaacgataaccaccgcatcggcgcatcgcttaacggccagcagggacataattacacggttgaagagtcttataacctgaccgcttcttcctggcgcgaagccgatgacgtaaacagacggcgcaatgccaacctcttttacgaatggatgcctgattcaaattggttgtcgtctttgaaggcggacttcgattatcagaaaaccaaagtggcggcggttaacaacaaaggctcgttcccgatggattattccacctggacgcgcaactataatcagaaggatttggacgaaatatacaaccgcagcatggacacccgattcaaacgttttactttgcgtttggacagccatccgttgcaactcgggggggggcgacaccgcctgtcgtttaaaactttcgtcagccgccgtgattttgaaaacctaaaccgcgacgattattacttcagcggccgtgttgttcgaaccaccagcagtatccagcatccggtgaaaaccaccaactacggtttctcactgtctgaccaaattcaatggaacgacgtgttcagtagccgcgcaggtatccgttacgaccacaccaaaatgacgcctcaggaattgaatgccgagtgtcatgcttgtgacaaaacaccacctgcagccaacacttataaaggctggagcggttttgtcggcttggcggcgcaactgaatcaggcttggcatgtcggttacgacattacttccggctaccgcgtccccaatgcgtccgaagtgtatttcacctacaaccacggttcgggtaattggctgcctaatcccaacctgaaagccgagcgcagcaccacccacaccctgtctctgcaaggccgcagcgaaaaaggcatgctggatgccaacctgtatcaaagcaattaccgcaatttcctgtctgaagagcagaagctgaccaccagcggcactcccggctgtactgaggaaaatgcttactacggtatatgcagcgacccctacaaagaaaaactggattggcagatgaaaaatatcgacaaggccagaatccgcggtatcgagctgacaggccgtctgaatgtggacaaagtagcgtcttttgttcctgagggttggaaactgttcggctcgctgggttatgcgaaaagcaaactgtcgggcgacaacagcctgctgtccacacagccgctgaaagtgattgccggtatcgactatgaaagtccgagcgaaaaatggggcgtattctcccgcctgacctatctgggcgcgaaaaaggccaaagatgcgcagtacaccgtttatgaaaacaagggctggggtacgcctttgcagaaaaaggtaaaagattacccgtggctgaacaagtcggcttatgtgtttgatatgtacggcttctacaaaccggctaaaaacctgactttgcgtgcaggcgtatataatgtgttcaaccgcaaatacaccacttgggattccctgcgcggcctgtatagctacagcaccaccaactcggtcgaccgcgatggcaaaggcttagaccgctaccgcgccccaagccgtaattacgccgtatcgctggaatggaagttttaa

SEQ ID NO: 63666 - DNA, 285 bp, Neisseria meningitidis
atgaaaaaactgttattggccgccgttgtttccctgagtgccgcaaccgcatttgccggcgattctgccgagcgtcagatttacggcgatccccattttgaacaaaaccgcacaaaagccgtgaaaatgttggaacagcgtggttatcaggttcacgatgtcgatgccgacgaccattggggtaagcctgtgctggaagtggaagcctataaagacggccgcgaatacgacatcgtgttgtcttaccccgacctgaaaatcatcaaagagcagctcgatcgctga

SEQ ID NO: 63667 - DNA, 1035 bp, Neisseria meningitidis; identical to SEQ ID NO: 43693

SEQ ID NO: 63668 - DNA, 1008 bp, Neisseria meningitidis; identical to SEQ ID NO: 62927

SEQ ID NO: 63669 - DNA, 1053 bp, Neisseria meningitidis
atgaccgtatcccccgtcgccttgcgccgtaagaccgagtgcaagcctcatcccaccgcgcgctattggaaaaaatgcgatgtcgaagccctgttcggacttcccttcctcgacctcatttaccaagccgccgaagtccaccgccaaaatttcaacccgcgcgaaatccagctttccacgctgttgtccatcaaaaccggcggttgtcccgaagattgcgcctactgtccgcaatcggcgcaccacaataccaatctgggcaaagagcagatgatggatgtggatgaaatcgtcgaaaaagccaaaatcgccaaatcgcgcggcgcaagccggttttgtatgggcgcggcatggcgcggccccaaacccaaagacgtggagacggtttccgcaatcatcaaagccgtcaagggcttgggtatggaaacctgcggcacgttcggtatgctcgaagaaggtatggcggaagacttgaaagaggcgggcttggattattacaaccacaacctcgacaccgaccccgaccgctacaacgacatcatccatacacgccggcatgaagaccgtatggacaccttgggcaaagtccgcaacgccggtttgaaagtctgctgcggcggcatcgtcgggatgaacgaaacccgcgccgaacgcgcagggctgattgccagcctcgccaacctcgacccgcagcccgaaagcgtgccgattaaccggttggtcaaagtggaaggtacgccgcttgccgatgccgaggatttggactggacggaatttgtccgcaccatcgccgtggcgcggattacgatgccgcaaagttatgtccgactgtcggcagggcgcagcaatatgccggaagcgatgcaggcgatgtgctttatggcgggcgcgaactcgattttttacggcgacaagctgctgaccacgggcaatccggatgaagacggcgacagaatcctgatggaaaagctcaacctgtatcccttacagtttgagctggaaggcgaggtcgccgaagtggaaaaagcctctgggattaaagtggattattga

SEQ ID NO: 63670 - DNA, 768 bp, Neisseria meningitidis; identical to SEQ ID NO: 39411

SEQ ID NO: 63671 - DNA, 186 bp, Neisseria meningitidis
atgtatcactaccaatccgatgccacacaattcctcaaccgcctgattgaagaaaaacctgagttggaacagcagcgtttggaaaacagggggcttttgtgggatgtcgaactcaatcccgaagaacaggaaaacttcgaggcggcaaaagtagcgaaaaaaccttatacctattaccaagactga

SEQ ID NO: 63672 - DNA, 918 bp, Neisseria meningitidis
atgtctgtctataccagtgtttccgatgatgaaatgcgcggcttcctgagcggttacgatttgggggaatttgtttccctgcagggcatcgcgcaggggattaccaacagcaattattttctgacgacgacttcgggacgttatgtgctgaccgtgtttgaagtgttgaaacaggaagagctgccgttttttctggagcttaaccggcatttgagtatgaagggcgtggcggttgccgcgccggttgcgcgcaaagacggtcggcttgattccgttttggcgggcaagcccgcctgcctggttgcctgcctgaaaggttcggataccgcgctgccgacggcggagcagtgtttccataccggtgcgatgttggcgaaaatgcaccttgccgccgccgatttccctttggaaatggaaaacccgcgttacgatgcgtggtggacggaggcgtgcgcccgactgctgcccgtgttgtcgcgagacgatgccgcgctgctgtgttccgaaatcgacgcgctgaaggacaatctcggcaatcatctgccttcgggcatcatccacgccgatttgttcaaggacaatgtgttgcttgacggcggtcaggtatcgggtttcatcgatttctattatgcctgccggggcaattttatgtatgacttggcgattgcggtcaacgattgggcaaggacggcggacaataagctggatgaggtgttgaaaaaggcgtttatcggcggttatgagggcgtgcgccccttgagtgccgaagaaaaggcgtatttcccgaccgcccaacgtgccggctgcatccgtttttgggtgtcgcgcctgttggattttcattttccgcaggagggcgagatgacgtttatcaaagacccgaacgcgttccgcaacctgctgttgagtttgggttga

SEQ ID NO: 63673 - DNA, 840 bp, Neisseria meningitidis
gtgaaacgcatttttctgtttttggctaccaatatcgctgttttggtcgtaatcaacattgttttggcggttctgggcatcaacagccggggcggcgcgggcagcctgttggcgtattccgccgtcgtcggcttcactggttcgattatttcgctgctgatgtccaaattcatcgccaaacaatcggtcggcgcggaagttatcgacacgccgcgcaccgaagaagaagcctggcttttgaacactgtcgaagcccaagcgcggcaatggaacctgaaaacgcccgaagtcgccatctaccactcccccgaacccaatgcctttgccacgggcgcatcgagaaacagctccctgatcgccgtcagcaccggtttgctcgaccatatgacgcgcgacgaagtggaagccgtattggcgcacgaaatggcacacgtcggcaacggcgatatggttacgctgacgctgattcaaggcgtggtcaatactttcgtcgtgttcctgtcgcgcattattgccaacctgattgcccgaaacaacgacggcagccagtcccagggaacttatttcctagtcagcatggtattccaaatcctgttcggcttccttgccagcttaattgtcatgtggttcagccgacaacgcgaataccgcgccgacgcgggcgcggcaaaactggtcggcgcaccgaaaatgatttccgccctgcaaaggcttaaaggcaacccggtcgatttgcccgaagaaatgaacgcaatgggcatcgccggagatacgcgcgactccctgctcagcacccacccttcgctggacaaccgaatcgcccgcctcaaatcgctctga

SEQ ID NO: 63674 - DNA, 603 bp, Neisseria meningitidis
atgttcaacataccggctgttgccgtttcctatctgatcggctcactttctttcgccgtcatcgtgtccaaatattacggcatggacgacccgcgcacctacggatcgggcaatccgggcgcaaccaatgttttacgcagcggcaaaaaaaaggcggccgcgctgacgctcttgggcgatgccgccaaaggtttggttgccgttttgcttgcacgcgtgcttcaagaaccgctcggtttatccgacagcgcaatcgctgccgtcgcactcgccgcgctggtcgggcatatgtggccggtatttttcggatttaaaggcggcaaaggtgtggcaacggcattgggcgtgcttctggcactctctcccgcaactgccttgatctgcgcgttgatttggcttgttatggcattcggcttcaaggtgtcctcccttgccgcgctggtcgccacaaccgccgcaccggtcgccgcatccttctttatgccgcacgtctcgtgggtttgggcgaccgtcgccattgctttgctggtgctgttgcggcacaaaagcaatatcggcaacctgcttaaaggcaaagaaggcaaaatcggcgaaaaacgctga

SEQ ID NO: 63675 - DNA, 891 bp, Neisseria meningitidis
atgaatcctaaatcccctttatttttacgactgtccgaccgtttggatgtgtacctgcgcctgatgcgggcggacaagcccattgggacgctgcttttactgtggccgacctactgggcattgtggctggcttcagacggcattcccgatttggcggtattggcggcgtttacaatcggtacgtttttaatgcgcagtgccggctgcgtcatcaacgattttgccgaccgcgattttgacggggctgtcgagcgcactaaaaaccgtccgttcgcacagggcagggtcaagaaaaaagaagcgctgctgctgacggcatttttgtgcctgcttgccgcattgtgcctgattccgctgaatcatctgacttggctgatgagcctgcccgcgctgtttcttgcgctgacttacccgtttaccaaacgtttttttccgattccccaactctatctcgggcttgccttttccttcggtatcccgatggcgtttgccgccgttgccggaaacgtgccgcctcaagcgtggatactctttgccgccaatgtgttatggactctggcgtatgacacggtttacgccatggcggacaaagaggacgatttgaaaatcggcatcaaaacctccgccgtcacgttcgggcgttacgacatcgccgccgttatgctgtgtcacggaggctttaccctgctgatggcagtattgggtgcggttatcggtgcggcatgggcatattggacggcaatccccatcgtcctgctgctgcaataccgccaatatgccgccatcaaaagccgcgtccggcaaatctgttttgaaacgtttttggcaaacaacagaattggttgggtgtggtttgccgccatttttgcccatacgtttttcgcgaaataa

SEQ ID NO: 63676 - DNA, 1929 bp, Neisseria meningitidis; identical to SEQ ID NO: 57951

SEQ ID NO: 63677 - DNA, 1113 bp, Neisseria meningitidis
atgaccgcaaaggaagaactgttcgcatggctgcgccatatgaaccaaaacaaaggttccgacctgttcgtgacgacccatttcccgcccgcgatgaagttggacggcaaaatcacccgcatcacggacgagccgctgacggcggaaaaatgtatggaaatcgccttttcgattatgagtgcgaagcaggcggaagaattttcatcgaccaacgagtgcaacttcgccatcagtctgccggacaccagccgcttccgcgtcaatgcgatgatacagcgcggcgcgacggcgttggtattccgtgcgattaccagcaagattcccaagtttgaaagcctgaacctgccgccggtcttgaaggatgtcgcgctgaaaaaacgcgggctggttatttttgtcggcggcaccggctcgggcaaatcgacttcgcttgcctcgcttatcgattaccgcaatgaaaattcgttcggacacatcatcaccatcgaagacccgatcgagtttgtccacgaacacaaaaactgcatcatcacccagcgcgaggtcggcgtggatacggaaaactggatggcggcgttgaaaaacacgctgcgtcaggcgccggatgtcatccttatcggcgaaatccgcgaccgcgaaacgatggactacgccattgcctttgccgaaacggggcatttgtgtatggcgacgctgcacgccaacagcaccaatcaggcactcgaccgcatcatcaactttttccccgaggagcggcgcgaacaattgctgacggatttgtcgctcaaccttcaggcgtttatttcgcaacgcctcgttccgcgagacggcggcaagggcagggtggcggcagtcgaggtgctgctcaattcgcccctgatttcggagttgattcacaacggcaacatccatgaaatcaaagaagtgatgaaaaaatccactaccctgggtatgcagaccttcgatcaacacctttaccaattgtatgaaaaaggcgatatttccctgcaagaagcattgaaaaatgccgattccgcacacgatttgcgtttggcggtacagttgcgcagccgccgcgcgcaaagttccagccccgatttggaactgatctga

SEQ ID NO: 63678 - DNA, 1095 bp, Neisseria meningitidis
atgaaaaccaatctgctcaactacgaccttcaagggctgacccgacattttgccgatatgggcgaaaaacccttccgtgccaaacaggttatgcgttggatgcaccaatccggcgcgcaaaattttaacgaaatgaccgatttggcaaaatcgttgcgccataaactgaacgaacaggcaggaatcgaaattcccaagctgatgatgtctcaaaaatcttcagacggcactcgaaaatggcttttggatgtcggtacgggcaacggcgtggaaaccgtcttcatccccgaatcggatcgcggcacgctctgcatttcctcacaagtcggctgcgctttggaatgtacattttgttcgaccggccggcagggcttcaaccgcaacctgacctctgccgaaatcatcgggcaattgtggtgggcaaacaaagcgatgggcgttacaccgaaaaacgagcgcgttatttccaacgtcgtcatgatgggcatgggcgagccgatggcgaacttcgacaatgtcgttaccgccttaagcatcatgctggacgaccacggctacggtttgagccgccgccgcgtaaccgtttccacttcgggtatggttccccaaatggacaggttgcgcgatgtcatgccggtggctttggcggtttccctccacgcttccaatgacgaagtccgcaaccaaatcgtaccgttgaacaaaaaatatcccttgaaagaattgatggccgcatgccaacgctatctagtcaaagcacccagggatttcatcactttcgaatacgtcatgttggacggaataaacgataaggcgcaacatgcgcgcgaactgatcgaactggtcacagatgttccctgcaagttcaatctgattccgttcaatcccttcccaaactccggatacgaacgctccagcaatgagaacatccgtgtgttccgcgatattttgcagcaggcaggatttgtcgttaccgtacgaaaaacgcgcggcgacgacatcgatgccgcctgcggacagttggcggggcaggttcaggataaaacgcgccgccaacaaaaatggcagcagattttaatcggacaacaggggtaa

SEQ ID NO: 63679 - DNA, 936 bp, Neisseria meningitidis
atgagtgtattgattattgtcgaacacgacaacaaacagttgaatcctaccactttgcatgctgttaccgctgccgctaagctgggtaaaatcgatttattggttgccggaagcggtgcatctgctgtagtagagttcgcaaaacaagtggcgggtgtggaaaaagttttggttgcagatgctgcccattatgccgaaggtttggctgaagagttggctccgctggttgtcaaattggcagcggattactgctatgttgcagcaacggcaactacattcggtaaaaaccttttgcctcgcgtagcagccttattagacgtaccgcaaatttctgatttgaccgagattgtggataacatgacttttgtgcgtccgatttatgcagggaacgcatttgaaaccgtgcaagctgattcagaaaaattggtgctgaccttccgtgcgacggtttttgacgcagtggcggagcaaggtggtaatgctgaggtaattaatgttgaagcaacccctgcccaaaacctgagtcgttttgttaaccgtcagctttcccattccgatcgtcctgaactgactcaggcaaaagtgattgtttccggtggtcgtgcgttgggtagtgcggaaaaatttaatgaagtgctgacaccgttggcggatgttttaggtgcggcaatcggtgcatcccgtgcggcggttgatgccgaatatgcgccaaacgatgctcaagtcggacaaaccggtaaagtggttgcgccgcaactctattttgcaatcggtatttcaggtgcgattcaacacgttgctggtatgcaagacagtaaggtgattgttgcaatcaataaagatgctgatgcgccgattttcaatgtagccgattacggattggttggcgatttatttgaaatcgttccacaattaacagaagcattgaaaaattaa

SEQ ID NO: 63680 - DNA, 495 bp, Neisseria meningitidis
atgaacaacagacattttgccgtcatcgccctgggcagtaatcttgaaaaccctgcccaacaggtacgcgccgcattggacacgctgtcgtcccatcctgacatccgtcttaaacaggcttcctcactgtatatgaccgcgcccgtcggttacgacaatcagcccgatttcgtcaatgccgtctgcaccgtttccaccaccttggacggcattgccctgcttgccgaactcaaccgtatcgaagccgatttcggacgcgaacgcagcttccgcaacgcgccgcgcacattggatttggacattatcgactttgacggcatctccagcgacgacccccgcctcaccctgccgcatccgcgcgcacacgaacgcagtttcgtcatacgccctttggcagaaatcctccctgattttattttgggaaaacacggaaaggttgccgaattgtcaaaacaactgggcaatcaaggtatccgtcttttaccggacaggtaa

SEQ ID NO: 63681 - DNA, 486 bp, Neisseria meningitidis; identical to SEQ ID NO: 44610

SEQ ID NO: 63682 - DNA, 1194 bp, Neisseria meningitidis
atgtaccgacacatcgaatactatcccggcgacccgattttgagtttggtcgaaaccttcaaaaacgacccgcgccccgaaaaagtcaatttgagcataggcatttatttcgacgacgaaggcaaaatgcccgtgttggaatccgtgagccgagccgaaaccgcccgtgccgccgcgcctgcgccgtcgccctacctgccgatggaaggcttggacacttaccgcagcgcggtgcagcatttattgttcggcaaagacaatcccgcgcttgcgcaagggcgcatcgttaccgtacaaaccttgggcggctcgggcgcgctcaaagtcggggcggacttcctgcaccgctggtttcccgaagcgcgcgcctacgtcagcgacccgacttgggacaaccatcgcggcatttttgaaggcgcaggtttcgaggtcggcacttacccatattacgaccctgccactgtcggcgtgaaattcgacgaaatgaccgcgtttttcaacaccctgcccgaaaacagcgtcctgatcctccatccctgctgccacaacccgaccggcgtggatatgtcggaacggcaatgggacgaagtgttgcacatcatcaaaacgcgcaaactgattccgtttatggacattgcctaccaaggattcggcggcgatttggacagcgatgcctacgccgtccgcaaagcggtggaaatggaattgcccttgttcgtcagcaattccttctcaaaaaacctgtcgctctacggcgagcgcgtcggcggcttaagcgtggtttgcccgaataaggaagaagcggatttggtgttcggacagctcaaattcaccgtccgccgcatctactccagcccgcccgcgcacggcgcgtatatcgccgccgacgtgatgaacagccccgaactttacgccttgtggcaaaacgaggtttatatgatgcgcgaccgcatccgtgcgatgcggcagaaactttatgatgtcttaactgcgcaaatccccaatcgcgatttcacttatttcatcaaacagcgcggcatgttcggctacacaggattgagcgtggaacaagtccgcaggctgcgcgacgaatttgccgtttacctgctggattccggcaggatgtgcgtcgccggactgaatacgtcgaataccgactatgttgcccgcgcatttgcggaagtcttgaaataa

SEQ ID NO: 63683 - DNA, 1692 bp, Neisseria meningitidis
atgagcgcatcacaattactgtcaagactgacccaaaccgtaggcgaaaaatacatcattaccgaccccgcgaaaaccgaacaataccgccaaggttaccgcttcggcgagggtaaggcgttggcggtggttcgccccggaagcattctggaaatgtggaaaattctgcaggcgtgcgtcgaagcagacgtgattgtgattacgcaggcggcgaataccggactgaccggcggttcgacccccgacggcaacgattacgaccgcgacatcgtgattgtgaacaccatgcggatgaacatcatccaaaccatcaacaacaacgaacaagtcgtctgcctgcccggctcgaccctgaaccagcttgaattgctgctgaaacccttgggacgcgaaccgcattcggttatcggctcttcctgcatcggtgcgtccgtcttgggcggcgtgtgcaacaactccggcggcgcattggtacagcgcggcccggcctacaccgaaatggcactgttcgcccaaatcaacgaagaaagcaggttggaactggtcaaccacttgggcatagacttgggcgacacgcccgaagaaatcctgaccaacctgcaaggtcatcattatcaaaacaaagacatcaaacaagacgcgggcaaagggcacgaccacgcctattgcgaacacgtccgccaagtggacgaaccgaccgccgcgcgtttcaatgccgaccccgcccgccattacgaagcctcgggctgcgcgggcaaactgatggtttttgccgtccgtttggacaccttcccgcaagaaaaacaaaccgccgtgttctacatcggcacgaacgacatcaacgagctgaccgacatccgccgcgccgccttgggcgaatttgaaagcctgcctgtttccggcgaatacatccaccgccacgctttcgacattgccgacgtgtacggcaaagacacgttttacgtcatcaaaaaattcggtacgcaccaactgccgaaattatttgacttgaaggcgcgcgtggacaggttcggcaaaaaagccagcttcctgcccaaacatttttccgacaaggccatgcagttcgtcagcaaatacctgcccgaccacctgcccaaatccatgcgcgattaccgcgacaaatacgaacaccacctgattctgaaaatgggcgggaaaggcgtggatgaggcgcgcgcgttcttaaaagaatattttgcacaccacagcggcgcgtttttcgagtgcaacgccgaagaaacccaagccgcgatgctgcaccgtttcgccgtcgcctccgccgccatccgctaccgcgccgtgcatgatgacgaagtggaagacttggtcgcgctcgacatcgccctgcgccgcgacgaccgcgattggtttgaaaaactgccgtcggaaatcgacaataaaatcatccataaactctactatggacatttcatgtgccacgttttccatcaggattacatcatcaaaaaaggcaacgactgcatggcgttggaacacgaaatgctgcatcttttagaccaacgcggcgcgcaatatcccgccgaacacaacgtcggtcatttgtatgaagccaaacccgcgctcaaacagttttaccgcaaacttgacccgaccaacagcttcaacccgggcgtaggcaaaaccagcaaaaagaaaaactgggcggaataa

SEQ ID NO: 63684 - DNA, 822 bp, Neisseria meningitidis
atgtctttgcaaaacattatcgaaaccgcctttgaaaaccgcgcggacatcaccccgtccactgttgctcccgaagttaaagaagccgtgttggaaaccatccgccaactcgattcaggcaaactgcgcgttgccgaacgcttgggcgtgggcgagtggaaagtcaacgaatgggcgaaaaaagccgtgttgctgtccttccgcatccaagacaacgaagtcctcaacgacggcgtgaacaaatacttcgacaaagtgccgaccaagtttgccgactggtctgaagacgagttcaaaaacgcaggcttccgcgccgttccgggtgcggttgcccgacgcggcagctttgtggcgaaaaatgtcgtgctgatgccgtcttatgtcaacatcggcgcatacgtcgacgaaggcgcgatggtcgatacttgggcgaccgtcggctcttgcgcgcaaatcggtaaaaacgtccacttgagcggcggtgtcggcatcggtggcgtactcgaacccctgcaagccagcccgaccattattgaagacaactgcttcatcggtgcgcgttctgaaatcgttgagggcgtgattgtcgaagaaggcagcgtgatttcgatgggcgtgttcatcggtcaatccaccaaaatcttcgaccgcaccaccggcgaaatctaccaaggccgcgtaccggcaggttcggtcgtcgtgtccggcagtatgccttccaaagacggcagccacagcctttactgcgccgtcatcgtcaaacgcgtggacgcgcaaacccgtgcgaaaaccagcgtgaacgaattgttgcgcggcatctga

SEQ ID NO: 63685 - DNA, 1302 bp, Neisseria meningitidis
atgaccgaatccgtccgcctccccgtcgcccgtctcaaactttccaccgtcgccctgcccggctccaaaagcatcagcaaccgcaccctgctgcttgccgccttgtccgacaatgcttgcgaaatccattccctgctcaaatccgacgataccgaccgtatgctcgaagcactcgataaactcggcgttgaaatcgaatatcttgccgaagaccgtctgaaagtgcacggcacaggcggacgcttccccaaccgcactgccgatttgtttttgggcaacgcgggcacggcgttccgcccgctgaccgccgcgcttgccgttttgggcggcaattatcgtctgcacggcgttgcgcgtatgcacgaacgccccatcggcgatttgaccgatgcactgcggattgccggggccaatgtcgaatatctcggcaaggaacactatccgccgcttcatatcggcgaacgccaagacaacggcgagcgcgtgattccgattaaaggcaatgtgtccagccagtttctgaccgcccttttaatggcgttgccgctgaccgggcaggcgtttgaaatccgtatggtcggcgagttaatttccaagccctatatcgacattactttaaaactgatggcgcaattcggcgtacaggttatcaatgaaggctaccgcgtcttcaaaattcccgccgatgcgcgctaccacgcgcccgaacacttgcacgtcgaaggcgatgcctccagcgcgtcctacttcctcgcagccggtttgattgccgccacgcccgtccgcgttaccggtatcggcgcaaacagcatacagggcgatgtcgcctttgcccgcgagctggaaaaaatcggtgcggacgtggtttggggcgaaaacttcgtcgaagtctcgcgcccgaaagaacgtgccgtccaagcctttgatttggatgcaaaccatatccccgatgccgccatgaccctcgccatcgtcgcgcttgctacagggcaaacctgcacgcttcgcaacatcggttcgtggcgcgtcaaagagaccgaccgcattgccgcaatggcgaacgagttgcgcaaactcggtgcaaaagtcgccgaagaagccgaagcaattcacatcaccccgcccgaaacgccgacacccgacgccgtcatcgacacttacgacgaccaccgcatggcgatgtgtttctcgctggtttcgctgttgggcgtacccgtcgtcatcaacgatccgaaatgcacccacaaaaccttcccgacttatttcgacgtgttctcatcgctgaccgaaacagcggaataa

SEQ ID NO: 63686 - DNA, 207 bp, Neisseria meningitidis; identical to SEQ ID NO: 45170

SEQ ID NO: 63687 - DNA, 597 bp, Neisseria meningitidis
atgaagataacacactgcaaattaaagaaaaaagtacagaaagaactgctccgtttttttgtactcgaagttaccgcccgttctgccgccgatattttgggtatccatcccaattcggcagcactgttctaccgtaaaatccgcacggttatcaaccatcatttggtcttggctgccgatgaggtttttgagggccctgtcgagcaggacgaaagcgatttcggcggacggcgtaaaggcagacgtggtcgcggtgcggcaggaaaagtggttgttttcggcattctgaaacgcaacggacgggtctataccgttgtcgtaaacaatgccaagtctgaaacgttactccctgtcatcaaaaagaaaatcatgccggacagcattgtttataccgatagtctgagcaactgcgacaagttggacgtgagcggttttatccattaccgcatcaaccattccaaggagtttgcagaccgtcagaaccacattaacggcattgagaacttttggaatcaggcaaaacgcgtcttgcgaaaatatagtggattggcacgaacgtttccccgaattggaagcgcaactgggtgcgccgattga

SEQ ID NO: 63688 - DNA, 723 bp, Neisseria meningitidis; identical to SEQ ID NO: 45562

SEQ ID NO: 63689 - DNA, 1137 bp, Neisseria meningitidis
atgggcttgaaaaaggcttgtttgaccgtgttgtgcctgattgttttctgcgtcggggtattttatacatttgaccgggtaaatcagggggaaaggaacgcggtttccctgctgaaggacaaactcttcaatgaagagggggaaccggtcaatctgattttctgctataccatattgcagatgaaggtggcggaaaggattatggcgcaacatccgggggagcggttttatgtggtgctgatgtcggaaaacaggaacgaaaaatacgattattatttcaatcagataaaggataaggcggagcgggcgtattttttctacctgccctacggtttgaacaaatcgtttaatttcattccgacgatggcggagctaaaggtgaaggcgatgctgctgccgaaggtcaagcggatttatttggcgagtttggaaaaagtcagcattgccgcttttttgagcacttacccggatgcggaaatcaaaacctttgacgacgggacaggcaatttaattcaaagcagcagctatttgggcgatgagttttctgtaaacggggcgatcaagcggaattttgcccggatgatgatcggagattggagcatcgccaaaacccgcaatgcttccgacgagcattacacgatattcaagggtttgaaaaacattatggacgacggccgccgaaagatgacttacctgccgctgttcgatgcgtccgaactgaaggcgggggatgaaacgggcggcacggtgcggatacttttgggttcacccgacaaggagatgaaggaaatttcggaaaaggcggcaaaagatttcaacatacaatatgtcgcgccgcatccccgccaaacctacgggctttccggcgtaaccacattaaattcgccctatgtcatcgaagactatattttgcgcgaaattaagaaaaacccacatacgaggtatgaaatttatacctttttcagcggcgcggcgttgacgatgaaggattttcccaatgtgcacgtttacgcattgaaaccggcttcccttccggaagattattggctcaaaccggtgtatgccctgtttacccaatccggcattccgattttgacatttgacgataaaaatcaatcgtatggtaaatcaaaatag

SEQ ID NO: 63690 - DNA, 810 bp, Neisseria meningitidis
atgagaccatatgctactaccatttatcaactttttattttgtttattgggagtgtttttactatgacctcatgtgaacctgtgaatgaaaagacagatcaaaaagcagtaagtgcgcaacaggctaaagaacaaaccagtttcaacaatcccgagccaatgacaggatttgaacatacggttacatttgattttcagggcaccaaaatggttatcccttatggctatcttgcacggtatacgcaagacaatgccacaaaatggctttccgacacgcccgggcaggatgcttactccattaatttgatagagattagcgtctattacaaaaaaaccgaccaaggctgggttcttgagccatacaaccagcaaaacaaagcgcactttatccaatttctacgcgacggtttggatagcgtggacgatattgttatccgaaaagatgcgtgtagtttaagcacgactatgggagaaagattgcttacttacggggttaaaaaaatgccatctgcctatcctgaatatgaagcttatgaagataaaagacatattcctgaaaatccatattttcataaactttactatattaaaaaaggagaaaatccggcgattattactcatcagaactatcataggtatggagagaacgattacagcactagcgtaggttcctgtattaacggtttcacggtacggtattacccgtttattcgggaaaagcagcagctcacacagcaggagttggtaggttatcaccaacaagtagagcaattggtacagagttttgtaaacaatccaagtaaaaaataa

SEQ ID NO: 63691 - DNA, 1002 bp, Neisseria meningitidis
atgcagtttccttaccgcaatgttccggcttcgcgtatgcgccgtatgcgcagggacgatttttcacgccgcctgatgcgcgaacacacgctgaccgccgatgatttgatttatccggtgttcgtattggaggggtcggcgcgcgaggaggatgtgccttctatgccgggtgtgaagcgtcaaagtttggacaggctgctgtttacggcggaggaagcgtcaaatttgggaatacccatgctggcactattccctgtcgttacgacaaataagacagaatgtgcgcaggaggcgtataaccctgaaggactggtgccgacagccgtccgagccttgcgcgagaggtttcccgaactgggcattatgacggatgtcgcgctcgatccttatacggtgcacggtcaggacgggctgacggacgaaaacggttatgtgatgaacgatgaaaccgtagaggttttggtcaagcaggctttgtgccacgctgaagcgggcgcacaggtggttgccccttccgatatgatggacgggcgtatcggtgcgattcgcgaggcgttggaggatgccgggcatatccacgcgcggattatggcgtattccgccaaatatgcttcggcgttttacgggccgttccgcgatgcggtgggcagttcgggcaatttgggcaaggcggacaagaaaacctaccagatggatccggcaaataccgatgaggcgctgaatgaagtggcgctcgatattcgggaaggtgcggatatggtgatggtgaagcccggtttaccgtatttggacgttgtccgccgcgtgaaggacgagttcggcgtaccgacttatgcctatcaggtttcgggagaatacgcgatgttgcaggcagcgattgccaacggctggctggacggcggcaaagtggttttggaaagcctgctggcattcaaacgtgcgggtgcggacgggattttgacctattacgctattgaggcggcaaagatgttgaagcgttga

SEQ ID NO: 63692 - DNA, 171 bp, Neisseria meningitidis; identical to SEQ ID NO: 37387

SEQ ID NO: 63693 - DNA, 897 bp, Neisseria meningitidis
ttgaatccgacgaatgatttgaaagcgtggcaacagagggcgcaggcgcaaacagagctgctgctggaacgctttttgccgtctgaaaacgaaatcccgcacacgctgcacgaagcgatgcgttatgcggctttggacggcggcaagcgtctgcggccgatgctggttctggcagcttcggaattaggcgaagccgtgcatgaagcagtaggacaggcaatggcggcaatcgagatgattcacgcctattcgctggttcacgacgatatgccggcgatggacaacgacagcctgcgccggggcaaaccgacctgccacatcaaatatggcgaagcaaacgcactgctgaccggcgacgctttgcaaacccaagccttcgatgtattggcgcgtccgtccggcctgcctgcttcgcggcagctggcaatgttgtcagttttggcaaaagcgggcggaagcaggggtatggcgggcggtcaggcaatcgatttggcgaatgtcggcaaacaaatggttcaagccgatttggaacagatgcacagcctgaaaacgggtgcgctaatccgtgcggcggttttattgggggcgatgtcctgcccgaatctgtctgaagacagtctggcggtattggacgattatgcggcaaaactggggctggcgttccaagtcattgacgatgtgttggattgtgaagcggacacggcgactttgggcaaaacggcgggcaaagacgcagacaacgacaagccgacttatgtgaaactgatgggcttggaagcggcgcgctcatacgcacacaaactggttgccgaagcggtcgcgctgctcgaacccttcggcgacaaagccctgcgcctgcggcagttggcagaatttgcagtcgcccgcaaatattaa

SEQ ID NO: 63694 - DNA, 1566 bp, Neisseria meningitidis
atgacccaagacaaaatcctcatcctcgacttcggttcgcaagttacccagctcatcgcccgccgcgtgcgcgaagcccacgtttactgcgaactgcattccttcgatatgcctttggacgaaatcaaagccttcaaccccaaaggcatcatcctctccggcggccccaattccgtttacgaatccgactatcaagccgataccggtatttttgatttgggcattccggttttgggcatctgttacggcatgcagtttatggcgcaccacttgggcggcgaagtgcagcccggcaaccagcgcgaattcggttatgcgcaagttaaaaccatagacagcgagctgacacgcggcattcaagatggtgagccaaacacactcgacgtatggatgagccacggcgacaaagtgtccaaactgcccgacggtttcgccgtcatcggcaacaccccgtcctgcccgattgccatgatggaaaacgccgaaaaacaattctacggcatccagttccaccccgaagttacccacaccaaacaaggccgcgccctgttgaaccgctttgtcttggatatttgcggcgcacaaccgggctggacgatgccgaactacatcgaagaagccgttgccaaaatccgcgaacaggtcggcagcgacgaagtgattttaggtttgtcaggcggcgtagactcttccgtagccgccgcgctgattcaccgcgccatcggagaccaactgacctgcgtgtttgtcgatcacggtttgttgcgcctgaacgaaggcaaaatggtgatggatatgttcgcccgcaacttgggtgtgaaagtgattcacgtcgatgccgaagggcagtttatggcgaaactcgccggcgtaaccgaccccgagaaaaaacgcaaaatcgtcggcgcggaatttatcgaagtatttgatgccgaagagaaaaaactcaccaacgccaaatggctggcgcaaggtacgatttaccctgacgtaatcgaatccgcaggcgcgaaaaccaaaaaagcccacgccatcaaatcgcaccacaacgtcggcggtctgcccgaaaatatgaagctcaagctgcttgagccgttgcgcgacttgtttaaagacgaagtgcgcgaactgggcgttgctttgggtctgccgcgcgaaatggtgtaccgccatcccttccccggccccggtttgggcgtgcgcatcttgggcgaagtgaaaaaagaatacgccgacttattgcgtcaagcagacgatattttcatccaagaattacgcaacaccaccgacgaaaacggcacatcttggtacgacctgaccagccaagccttcgccgtgttcctgcctgtgaaatccgtcggcgtaatgggcgacggacgcacttacgactacgtcgtcgcactgcgcgcagtcatcaccagcgacttcatgaccgcacactgggcagaactgccttactcactgctcggacgcgtgtccaaccgcatcatcaacgaagtcaaaggcatcaaccgcgtggtgtacgatgtcagcggcaaaccgcctgccaccatcgagtgggaataa

SEQ ID NO: 63695 - DNA, 1272 bp, Neisseria meningitidis
atgaaactgctggttatcggtaatggcggtcgcgaacacgcgctggcttggaaattggcgcagtcgcctaaagtggaaacagtatttgttgcgcctggtaatgccggtacagcgattgaacccaagttgcaaaacatcgacttgactgcgcatcaggatttgattgaattctgtcgtaaagaaaatattgtttttaccgtcgtcggccctgaagcgcctttggcggcaggtgttgtggatgatttccgtgccgcaggactaaaaatattcggtccgacacaatatgcggcgcagttggaaagttccaaagatttcgccaaagcatttatggcgaaatacaatattccaaccgcgcaatatcaaacctttgaaaacgccgatgccgcacatgattacgtcaatcagaaaggtgcgcctatcgttatcaaagccgatggtttggcggcaggtaaaggcgtgattgtggcgatgactttggatgaagcgcatgctgcgattgatgatatgctgctggacaacaaaatgggcaatgccggcgcgcgtgttgtgattgaagatttcctgcaaggcgaagaagcgagttttatcgtcatggttgatggcaataatgtactgcctatggcaaccagccaagaccacaagcgtcttttagacggcgacaaaggtctgaatacgggcggtatgggtgcgtacagccctgcgcctgtggtaacgcctgttgtgtacgaacgcgcgatgaatgaaattattttgccgaccgtagcagggatgaaagcggaggggcatgagttcaccggtttcctgtacgcaggtttgatgattgatcaaagcggtgcaccccatacgattgagtttaactgccgtttcggcgatcctgaaacccagccgattatgagccgactgaacagcgacttatcggatttggttgaagcggcaatagacggcaaactcgatagcgtaaccgcggaatggagcccgcaaactgccgtgggcgtggtactggcggcgcaaaattaccccgaaacgcccaaaaaaggcgatattatttccggtctggatgctgccaaccaagtaggcaaagttttccatgcaggtacaacggcaaacgagaaaggtgacgtattgaccaacggcggacgcgtattgtgtgttgtgggattgggcgacaatgtggtgcaagcgaaagctaaggcatatggcgcgttggaaaaaatcagtttcgacgggatgcaataccgtaaagacattgccgataaagcgattaaccgttaa

SEQ ID NO: 63696 - DNA, 582 bp, Neisseria meningitidis
atgaaacacaccgtatccgcatcggtcatcctgcttttgaccgcttgcgcgcaattgcctcaaaataacgaaaacctgtggcagccgtccgaacacacccgcagtttcacggcagaagggcggttggcagtgaaagcggaagggaaaggttcgtatgcaaatttcgattggacataccaaccgctcgtggaaaccatcaatatcaacacccctttgggcagtacgctcgggcagttgtgtcaagacagggacggcgcattggcagtggacggcaaaggaaatgtctatcaggcggaaagtgcggaagaattgagcaggcagctggtcggtttcaaactgccaatccaatatctgcatatctgggcagatggcaggcgtgtggcgggcgcgccttaccgcatcctgccggacggcatattggaacaatacggttggactgtcggcagaaccgccgacagtggggggcaagtccgaacgttgcaactgaataacggaaatttgaacatcaggctggttttcaccgaaatcggtatgccgtctgaaaccgaaaccccggaacgctgtgcggcgcgcacgagataa

SEQ ID NO: 63697 - DNA, 699 bp, Neisseria meningitidis
ttggtcaaaacggcagacggctacaaagccattgcccgtatccgaaccggcgaccgcgtcttctccaaggacgaggcaagcggaaaaacgggatacaaacccgttaccgcccgatacggcaatccgtatcaagaaaccgtttacattaaagtttcagacggcatcggcaacaaccaaaccctgatttccaaccgcatccatccgttttattcgggcggcaaatggattaaggcggaagacttaaaggcgggaagcaggctgttatccgaaagcggcaaaacccaaaccgtccgcaacatcgttgtcaaaccaaaaccgctcaaagcctacaatctgaccgttgccgactggcatacttacttcgtcaagggcagtcaggcggaaacggaaggggtttgggttcataattcttgtccgccatataagagaccaaataacgcaacgacaaaagcgcaacgagaaagtgtacaaggaaaaccctgcgttgaatgcggtaaattagccgaaaaaatgattgccgaccataaaaaaccattagttgtcgagtattatgaaacagggacaattgacaaatctaagatgagagcaattgaatcagtacaaccgcaatgtccgacttgttctgcaaaacaaggagggagattaagccaatattcaaaagaacagaaaaggaaactgagtaatgggaataaaaaatga

SEQ ID NO: 63698 - DNA, 981 bp, Neisseria meningitidis
gtgcagccggggctttgggcttcagacggcatattttcggaatggcggcattcttgccgtcggcgcggcagccgtatggggaagggaggggatattgtggtcggtaacggcaaaaaatatgccgcaccattgctggtgctgggttgcgtggtgttcggtctgggcagtctgattgtcaggtccgtccccgtcggttcgtatgcaatcgcattttggcggttgctgatttcggtgttcgtattttggtttttggcacggtttttcgggcaaaaattcccaaaaaacaggaaaaccgtccgatataccctgacggcgggcgtgtttctcgctttcgatttggcgttgtggcacgaaagcatacacgcggtcgggccgggtatttccaccctgctcaacagcctgcaaatctttttcttgtcggcaatcggtgttttctttttcggcgagcgtttgagcgggctgaaaaaggcaggcttaatatcggcagttgccggcgtggcgatgattgccggtgcggaattcggctacaacggtaatgcggtttggggattcgccagcggtttggtatcgggactgatgctcgccctgtcgatggtgttcgtccgcaaaacccatgaaatcgagccggtggcgcttttcccttcaatgatgattttgagtttgggcggcgcggtatcgctggttgttccggcattgctgatggatggcggcgcgctttatccgacgacttggaaagatgcgggtttggtgcttgtgtacggcgtggtgatgcagtgcttcgcgtgggcgatggttgcctatgcgattccgctgctttcgctgtcgctgacggggctgctgcttttgtccgaaccggttgccgccctgttcatcgattatttcgggttgggcaaaccgattgaaggcgtgcagtgggcaggggtggcgctgacgctttcggcaatttacctcggttcgctgaaacagcagtccgagccttga

SEQ ID NO: 63699 - DNA, 423 bp, Neisseria meningitidis; identical to SEQ ID NO: 51488

SEQ ID NO: 63700 - DNA, 210 bp, Neisseria meningitidis
atgcccgaccgcatcaaaccaagccgaaacggcggcggtgcagacggcatagcccgacagcaaggcacggcgcagacgggcgcgaaacccgaaacatccccgaccgcgaggcacggggattttttgcgcccgttgcagggggttggatttaagcggcgcgggcttgaaggcaaaacgggcggggcgcagaactgtttaaatgccgtctga

SEQ ID NO: 63701 - DNA, 2016 bp, Neisseria meningitidis
atgatgaaactcaatccccaacagctcgaagccgtccgctacctcggcggcccactgctcgtccttgccggtgcaggcagcggcaaaaccggcgtgattactcaaaaaattaagcatttgattgtcaatgtcggctacctgccgcataccgttgccgcaattacctttaccaacaaagccgctgcggaaatgcaggagcgcgttgccaaaatgctgcccaaaccgcaaacgcgcgggctgacgatttgcacgttccactctttgggcatgaagattctgcgcgaagaggcgaaccatatcggttacaaaaaaaacttctccattctcgattctaccgacagcgcgaaaatcatcggcgaactcttaggcggtacgggcaaagaagccgtattcaaggcgcagcaccagatttccttgtggaaaaacgatttaaaaacgcctgaagatgtcgttcagacggcatcgaacatttgggaacaacaaaccgcacgcgtgtatgcgagctatcaggaaaccttacaaagctatcaggcagtggacttcgacgacttaatccgcctgcctgccgtgctgttgcagcaaaacagcgaagtgcgcaacaaatggcagcggcggctgcgttatctgctggttgacgaatgccaagatacgaatacctgccaatttacgttgatgaaacttctgaccggcgcggaaggtatgtttaccgccgtcggcgacgacgaccagtccatctacgcatggcgcggcgcgaacatggaaaacctgcgcaaaatgcaggaaaactatccgcagatgaaagtcatcaaactggagcaaaactaccgctccaccgcgcggattctcaaaatcgccaacaaagtcatcgagaacaaccccaagctgttcaccaaaaaactttggtcgaaattgggcgaaggcgagcccgtcaaagtcgttgcctgccaaaacgagcagcacgaagccgagtgggtcgtcagccaaatcatcaaacaaaaactcatcggcggcgacaaaacccaatacgccgatttcgccgtgttataccgcggaaaacatcaggcacggattttcgaggaagcattacgcggcgcgcgtatcccctaccgtctctccggcggacaaagctttttcgacaaagccgaaatcaaagacgtgttgtcttatgtgcggctgcttgccaaccccaacgacgatcccgcctttctgcgtgccgttaccacgcccaaacgcggcatcggcgatgtcacgctgggcaagctcaacacttacgcgcacgaacacgaatgcagcctgtatgaagccgcgcaaaacgaagaagccctcgccacgctgaacaataccaaccgccaacacctgcaagcctttatggatatgttcggcagttaccgtgccaaagccgaaaccggcgaagcgggcgagttcatcaacagcctgctcgaagaaatcgactatgaaaaccacctgcttgccagtgaagaaggcaaagctggcgaaatcaaatggcgcaacgtcggcgatttggtatcatggtttgcgcgaaaaggcggggaagacggcaaaaacatcatcgaactcgcccaaaccgtcgccttgatgacgcttttggaaggaaaagacgaagaagaaaccgatgccgtctcgctatccacgctacacgccgccaaaggtttggagtatccctatgttttccttgtcggttgcgaagaaggtgttttgccgcacaacgacagcatcgaagagggcaacgtcgaagaagaacgccgcctgatgtacgtcggcatcacccgcgccaaacgccaactcacactgacccactgcgtcaaacgcaaaaaacaaggcacatggcagttccccgaacccagccgattcatagacgaaatgccgcaggaagatttgaaaatcctgggtcgcaaaggcggcgagccgattgtcagcaaagaagaaggcagacgcaaccttgccgatataatcggaaggctcgacaacctaaaaaaaagcggcgcggcggattaa

SEQ ID NO: 63702 - DNA, 576 bp, Neisseria meningitidis; identical to SEQ ID NO: 44953

SEQ ID NO: 63703 - DNA, 480 bp, Neisseria meningitidis; identical to SEQ ID NO: 38443

SEQ ID NO: 63704 - DNA, 837 bp, Neisseria meningitidis
atgcaaatcatacataccattcgagaactgcgcgcgtggcgtaaaaatgcgggaaaggtggcatttgtgccgaccatgggcaacctgcacgaagggcatcttgccctcgttcgcgaagccaaaaaacgcgccgacaacgttgttgtcagcatattcgtcaaccgcctgcaattcggtcagggcgaggatttcgacaaatatccgcgtactttgcaacaggatgcggacaagctggaagccgagggtgttgccgttgttttcgcgcccgatgagaaagaactctatccgaacgtggagcaacggtataacgtcgaaccgcccaacctgcaaaatgagttgtgcggcaagtttcgtccgggacatttcctcggggtggcaacggtagtgtccaagctgttcaatattgtcgcgccggatgttgcctgtttcggcaaaaaagactatcagcagcttgccgtgattaaaggtttgaccgaggatttgaattttgatgttgaaatagtgcctgtcgatacggggcgcgcggaagacggtttggcactctccagccgcaaccagtatttgagtgcggcggaacgcgacgaagcaccgcgcctgtaccgcgaattaaaggctgttgccgaatccttggcgcagggcagtttggattatgcaggtttggaaaaacgtgccgtccaatccctgacagaatacggctgggtggtcgattatgtcgaaatccgccgcgtcgatacgctcgaagtggcgcgggcgggagataagaaactggtggtcttggccgccgcccgtctggggacgacgcgcctgattgacaatttggaaataaaactcccttaa

SEQ ID NO: 63705 - DNA, 1398 bp, Neisseria meningitidis
atgactgtccgtatcgaacacgatttattgggcgaccgcgagattcccgccgaagtatattggggcatccacaccctgcgcgccattgaaaactttaaaatttccacacaaaaaatttctgacgtgccgcagtttgtccgcagtatggtgatggtgaaaaaggcgacggcacaggcaaacggtaagttgggcgcggtcaagcccgaaatcgccgccgccattgaaaaggcttgcgacgaagttctgctgaacaaccgctgcctcgaccaattcccgtccgatgtgtatcagggcggtgcgggaacttcggttaatatgaacaccaacgaagtcatcgccaacctcgcattggaagccttgggatacgaaaaaggccgctacgacatcgtcaatccgatggatcacgtcaatgccagccaatcgaccaacgatgcctatcccacgggcttccgccttgccgtgtattacagcatcggcgaattgctcgacaaactggccgtcctgaaaaacgcctttgccgccaaagccgaagcgtttaaagacgttttgaaaatgggccgcacccagcttcaagatgccgtgccaatgactacaggacaagaattccaatctttccaagtgttgttggaagaggaaatcctcaacctcgaccgcacgcgccaactgcttttagaagtcaatttgggcgcaacggcaatcggcacgggcgtgaacacgcccaaaggctacgccgaactggtggtcaaaaaactctccgaagtcagcggcttgccttgcaaactgaccgaaaacctgattgaggcgacctccgactgcggcgcatatgtgatggtacacggcgcattgaagcgcacggcggtcaaactctccaaaatctgcaacgacttgcgcctgctctcttccggcccgcgtgccggcttgaaagaaatcaacctgcccgaattacaggccggttcttccattatgcctgccaaagtcaatcccgtgattcccgaagtggtcaaccaagtctgcttcaaagtcatcggcaatgacaccaccatcactttcgccgccgaagcaggtcagttgcaattaaacgtaatggagccggtcatcgcccaatgtatgtttgaaacgatttccctcttgggcaatgctgcggtcaacctcgccgaaaaatgcgtcaaaggcattacggtcaaccgcgaaatctgcgaacgttacgttttcaactccatcggtttggtcacttatctgaatccgtacatcggccaccacaacggcgacttggtcggcaaaatctgcgcccagaccggcaaaggcgtacgcgaggttgttttggaacgcggcctgttgagcgaagaagaactcaaccgcatcctctctcctgaaaacctgatgaacccccatctgtaa

SEQ ID NO: 63706 - DNA, 966 bp, Neisseria meningitidis
atgttgcgtttgaccgcattgaccctctgcaccgtcctcgccttgggcgcgtgttcgccgcaaaattccgactctgccccacaagccaaagaacaggcagtttccgccgcacaatccgaaagcgcgtccgttaccgtcaaaaccgcgcgcggcgatgttcaaataccgcaaaaccccgaacgtatcgccgtttacgatttgggtatgctcgacaccttgagcaaactgggcgtgaaaaccggtttgtccgtcgataaaaaccgcctgccgtatttagaggaatatttcaaaacgacaaaacctgccggaactttgttcgagccggattacgaaacgctcaatgcctacaagccgcagctcatcatcatcggcagccgcgccgccaaagcatttgacaaattgaacgaaatcgcgccgaccatcgaaatgaccgccgataccgccaacctcaaagaaagtgccaaagagcgcatcgacgcgctggcgcaaatcttcggcaaacaggcggaagccgacaagctgaaggcggaaatcgatgcttcgtttgaagcggcgaaaactgccgcacaaggcaaaggcaaaggtttggtgattttggtcaacggcggcaagatgtccgccttcggcccgtcttcacgactgggcggctggctgcacaaagacatcggtttgcccgctgtcgatgaatcaattaaagaaggcagccacggtcagcctatcagctttgaatacctgaaagagaaaaatcccgactggctgtttgtcctcgaccgaagcgcggccatcggtgaagagggtcaggcggcgaaagacgtgttgaataatccgctggttgccgaaacaaccgcctggaaaaaaggacaggtcgtttacctcgttcccgaaacttatttggcagccggcggcgcgcaagagctgctgaatgcaagcaaacaggttgccgacgcttttaacgcggcaaaataa

SEQ ID NO: 63707 - DNA, 2625 bp, Neisseria meningitidis
atgaaaacctccgaactgcgccaaaaattcctaaaattttttgaaaccaaaggccacaccgtcgtccgctcttccagcctcgtgccgcacgacgacccgaccctgctgtttaccaacgcgggcatgaaccagtttaaagacgtatttttaggtttcgacaaacgcccgtacagccgtgccaccaccgcgcaaaaatgcgtacgcgccggcggcaaacacaacgacttggaaaacgtcggctacaccgcccgccaccacaccttctttgaaatgatgggcaacttctccttcggcgactacttcaaacgcgacgccatccatttcgcttgggagtttctgacttcccccgaatggctcaacatccctaaagacaaactgttggcgaccgtttacgcagaagacgacgaagcctacaacatctggttgaacgaaatcggtatgccgtctgaacgcatcgtccgcatcggcgacaacaaaggcgcgaaatacgcgtccgacaacttctggcaaatgggcgacaccggtccttgcggcccttgttccgaaattttctacgaccacggtgaagaaatctggggcggcattcccggcagccccgaagaagacggcgaccgctggattgaaatttggaactgcgtatttatgcagttcaaccgcgacgaacaaggcaatatgaacccgctgcccaagccttccgttgataccggcatgggcttggagcgtatggccgccgtcatgcagcatgttcacagcaactacgaaatcgacttgttccaagacctgctcaaagccgttgcccgcgaaaccggcgcagctttcagcatggatgaacccagcctgaaagtcatcgccgaccacatccgctcctgctcattcctgattgcagacggcgtcttgccttccaacgaaggccgcggctacgtattgcgccgcattatccgccgcgccgtgcgccacggttacaaactgggtcaaagcaaaccgttcttccacaaactggtggccgatttggtcaaagagatgggcggtgcctaccctgagttgaaagagaaacaagcacaaatcgaagaagcgttgaaaaacgaagaaagccgttttgcccaaacgctggaaactggtatggctttgttggaaaacgcgctggccaaaggcggcaaaacactcgacggcgaaatcatcttcaaactctacgacacctacggcttcccatacgacttgactgccgacatctgccgcgaacgcaatatcgaaccggacgaagcaggcttcgagcgcgaaatggaagcccaacgcgcacgcgcacgcgccgcccaaagcttcaaagccaacgcccaactgccttatgacggtcaagacaccgagtttaaaggttataccgaacgccaaaccgaatccaaagtcctcgccctctacaaagacggcgagcaagtcgacgaattgaacgaaggcgacagcggcgcagtcgttatcgactttaccccgttctatgcagaatccggcggccaagtcggcgacgtcggctatatctttgcaggcgaaaaccgctttgaagtacgcgatacccaaaaaatcaaagcggccgtattcggacaattcggcgtacaaacttcaggccgtctgaaagtcggcgacagcgttaccgccaaagtggacgacgaaatccgcaatgccaatatgcgcaaccacagcgcaacccacttgatgcacaaagccctgcgcgatgtattgggcagacacgtcgaacaaaaaggctctttggttaccgccgaatccacccgtttcgacatttcccatccccaagcggtaactgccgaagaaatcaccgaagtcgaacgccgcgtcaacgaagccgttttggcgaacgttgccgtcaacgccgccattatgagcatggaagacgcgcaaaaaaccggcgccatgatgctcttcggcgaaaaatacggcgacgaagtacgcgtattgcaaatgggcggtttctctaccgaattgtgcggcggcacgcacgtttcacgcaccggcgacatcggcctcttcaaaatcatcagcgaaggcggtattgccgcaggcgtgcgccgtatcgaagccatcaccggcctgaacgcactcaaatgggcgcaagagcaagagcgtttggtgaaagacatcattgctgaaaccaaagcccaaaccgaaaaagacgtactggcgaaaatccaatcaggcgcggcacacgccaaagccttggaaaaagagttggcaaaagccaaagccgaactcgccgtccacgcaggcgcaaaactcttggacgacgcaaaagacttgggcgcagccaaactcgttgctacccaaatcgaagccgacgcagccgccctgcgcgaaatcgtaaccgacctgaccggcaaatccgacaacgccgtgattcttttggcggcagtcaacgacggcaaagtctccctgtgcgcaggcgtatccaaagccctgaccggcaaagtcaaagcaggcgatctggttaaatttgcagccgaacaagtcggcggcaaaggcggcggccgtcccgacttggcgcaggccggcggcacggatgccggcaaattgcccgccgtgttggatagcgtgaaagactgggtcggcgcgaagctggtttga

SEQ ID NO: 63708 - DNA, 1764 bp, Neisseria meningitidis
atgggttttcctgttcgcaagtttgatgccgtgattgtcggcggtggtggtgcaggtttacgcgcagccctccaattatccaaatccggtctgaattgtgccgttttgtctaaagtgttcccgacccgttcgcataccgtagcggcgcagggcggtatttccgcctctctgggtaatgtgcaggaagaccgttgggactggcacatgtacgataccgtgaaaggttccgactggttgggcgaccaagatgcgattgagtttatgtgccgcgccgcgcctgaagccgtaattgagttggaacacatgggtatgccttttgaccgtgtggaaagcggtaaaatttatcagcgtcctttcggcggccatactgccgaacacggtaaacgcgcggtagaacgcgcctgtgcggttgccgaccgtacaggtcatgcgatgctgcatactttgtaccaacaaaacgtccgtgccaatacgcaattctttgtggaatggacggcacaagatttgattcgtgatgaaaacggcgatgtcgtcggcgtaaccgccatggaaatggaaaccggcgaagtttatattttccacgctaaagctgtgatgtttgctaccggcggtggcggtcgtatttatgcttcttctaccaatgcctatatgaataccggcgatggtttgggcatttgcgcgcgtgcgggtattccgttggaagatatggaattctggcaattccacccgaccggcgtggcaggtgcgggcgtgttgattaccgaaggcgtacgcggcgagggcggtattctgttgaatgccgacggcgaacgctttatggaacgctatgcgccgaccgtaaaagacttggcttctcgcgacgttgtttcccgcgcgatggcgatggaaatctacgaaggtcgcggctgcggtaaaaacaaagaccatgtcttactgaaaatcgaccatatcggcgcagaaaaaattatggaaaaactgccgggcatccgcgagatttccattcagttcgctggtatcgatccgattaaagacccgattcccgttgtgccgactacccactatatgatgggcggtattccgaccaactaccatggcgaagttgtcgttcctcaaggcgacgaatacgaagtgcctgtaaaaggtctgtatgcggcaggtgagtgcgcctgtgcttccgtacacggtgcgaaccgcttgggtacgaactccctgctggacttagtggtattcggtaaagctgccggcgacagcatgattaaattcatcaaagagcaaagcgactggaaacctttgcctgctaatgccggcgaactgacccgccaacgtatcgagcgtttggacaatcaaactgatggtgaaaacgttgatgcattgcgccgcgaactgcaacgctccgtacaattgcacgccggcgtgttccgtactgatgagattctgagcaaaggcgttcgagaagtcatggcgattgccgagcgtgtgaaacgtaccgaaatcaaagacaagagcaaagtgtggaataccgcgcgtattgaggctttggaattggataacctgattgaagtggcgaaagcgactttggtgtctgccgaagcacgtaaagaatcacgcggtgcgcacgcttcagacgaccatcctgagcgagatgatgaaaactggatgaaacatacgctgtaccattcagataccaataccttgtcctacaaaccggtgcacaccaagcctttgagcgtggaatacatcaaaccggccaagcgcgtttattga

SEQ ID NO: 63709 - DNA, 597 bp, Neisseria meningitidis
atgaatatcaatacttccgaaaataaagatgctgttgccgaacacaccggacaatggttggaaaaagccgtcatcggtctgaacctgtgtccctttgccaaagccccccacgttaaaaaccttgtccgcatcgcgatcagcgaagccaaacaccttgacggttttttggaagacttggacgaagaactgcagcgactgggcaatacacccgccaccgaactggaaaccaccctgctggttcacccgaccctattccccgatttcgacgtattcaacgatatgctcgacattgccgatgccgccgttgtcgaaaacggcttagaaggcatcgtccaaatcgccccgtttcatcccgatttccaatttgaaggcacggattcagacgacattggcaactacaccaaccgttctccctatccgacgctgcacctcatccgcgaagacagcattgccaaagccgcacaagcctttcccgacgcttcggcaatattcgaacgcaatatcgccctgctggaaaaaatgggacatgaaggctgggcaaaactcggtatcacatcctgcccttatccgcacaataagaaaaatatttcaaaatga

SEQ ID NO: 63710 - DNA, 1104 bp, Neisseria meningitidis; identical to SEQ ID NO: 41088

SEQ ID NO: 63711 - DNA, 1455 bp, Neisseria meningitidis
atgactacgcaaaccatcaagttccacatgaagccggaaactttcaagcaaaacgccgcaatttcccttcaagacaagcctttgcgcaaaagcctgcgtaccgcgatggatatgctgatgaccaaacgcaaagccgttttgaccgacgaagaagagctgcaaagcttgcgcgatttgtgcgaacacatccgccagcgttccctgtccaaattgcccgcgctgttggagcagttggaagaaaacctaactaagctgggcgtgaaagtgcactgggcagaaaccccgaccgaagcctgccaaattatccacgacatcatcacagccaaaaacggcaagctgatggtcaaaggtaaatccatggtcagcgaggaaatcgagctgaaccattatcttgaagcaaaaggcattaaagcggtagaaagcgacttgggcgagttcatcgtccaaatggcaggtgaaaaaccgacccatatcgtgatgcctgctatccacaaaaccaaagaacaggttagcgaactgttccaccaaaacctcggtacgccgctgacagacgatgtagaccaactgaccggcttcgcccgtaaagcactgcgcgatatttacagcactgccgatgtcggtttgagtggcgtaaactttgccgttgctgaaacaggtacgctgtgtctagtggaaaacgagggcaacggtcgcttgagtaccaccgtaccgcccgtgcatatcgctattaccggcattgaaaaagtggtggcgaaattgtccgacatcccacccttgtacagtctgctgccgcgctccgccatcggtcaaaacatcacaacctatttcaatatgattaccggcccgcgccgcagtgaagaattagacggtccgcaagaaatgcacttggttctgctcgacaacggccgcagccaggcttatgccgaagaccaaatgcgccgcaccctgcaatgtatccgttgcggcgcgtgtatgaaccattgcccggtttatacccgcatcggcggcgcggcatacggcacaacctatcccggcccgattggcgagattatttcccctcacctgttgggtcttgatgccacccgcgatctgccgaccgcctgtaccatgtgcggtgcgtgtgtggaagtctgtccggtacgcatcccgattaccgaacaaatgcagcgtttgcgcgttgaagcgcaacgttcgccgaccgaaaccgtgccgcaccccatccgagggcaaggcgcatcgcataccttcggcgaacaaatggcgtggcgcacattcaacggtattttcagcggcagcaaaacctaccgcgccttcggttgggcagccaccaagttccgcaacctgaccccgcgcaaacagttgggttggacgcaaaaccgcgtgccgatgaaaccggcgaagaaaaccctgcacgaactgatggcagaaaaaatgcgccaaaaagaacaggcataa

SEQ ID NO: 63712 - DNA, 1257 bp, Neisseria meningitidis
gtggccaataaattaagaaactacaccatcaacttcggcccgcaacaccctgcggcgcacggcgtattgcgcatgatcttggagctggacggcgaacaaatcgtccgtgccgacccgcatatcggcctcctgcaccgaggtactgaaaaactggctgaaaccaaaacctatctgcaagccctgccttatatggaccgtttggactacgtttccatgatggtcaacgagcaggcgtattgtttggcggtagaaaagctcgccggaattgacgtgcctatccgcgcccagtatatccgtgtgatgtttgccgaagtaacgcgcatcctcaatcacttgatgggcatcggttcgcatgccttcgacatcggcgcgatgaccgccatcctctacgccttccgcgaccgcgaagagctgatggacttgtacgaagccgtgtccggcgcacgtatgcatgcagcctacttccgtcccggcggcgtttaccgcgacctgcccgacttcatgcctaaatacgagagcagcaaattccgcaatgccaaagtattgaagcagctcaacgaatcccgcgaaggcaccatgctcgactttatcgatgccttctgcgaacgcttccccaaaaatatcgacacactcgaaaccctcctgaccgacaaccgcatctggaaacagcgtaccgtcggcatcggcgttgtctctcccgagcgtgccatgcaaaaaggctttaccggcgtgatgttgcgcggttcgggcgtggaatgggacgtgcgtaagacacagccttacgaagtgtacgacaaaatggatttcgacatccctgtcggcgtgaacggcgactgctacgaccgctacctctgccgtatggaagaaatgcgtcaatccgtacgcatcatcaaacaatgttccgagtggttgcgtgtcaatccgggtccggtcattaccacaaaccacaaattcgctccgcccaaacgtaccgaaatgaaaacaggtatggaagacctgattcaccatttcaaactctttaccgagggtatgcacgttcccgagggtgagacctacaccgctgtcgaacatccgaaaggcgagttcggcgtttacatcatttcagacggcgcaaataaaccctaccgcctgaaaatccgcgcacccggcttcgcccacctgcaaggcatggacgaaatggcaaaaggccacatgctggccgacgtcgttgccatcattggtacgcaggacatcgtattcggggaggttgaccgataa

SEQ ID NO: 63713 - DNA, 912 bp, Neisseria meningitidis
atggttcatattatgtttaatcaggcagcacaagaattgacgactatccgcgatattttacgttttgcagtcagccgttttaatgaggcagggctcttttttggtcatggaacagataatgcgcatgatgaagcagcttatttgattctgcatactttgaatttgcctttggatatgcttgccccatatcttgatgcaaaactcttggaagctgaaaaagaggaagtgctggcggttattgagcgtcgtgctgtcgaacacattccggccgcttatttgacacaccaggcatggcagggagagtttgatttctatgtggatgagcgcgtaatcatacctcgttcttttatttatgaattgttgggtgacggacttcgtccttggatagaatacgatgagttggtgcataatgctttggatctttgcaccggaagcggttgccttgccattcagatggcgcatcattatcctgatgcccaaattgatgcggttgatgtgagcttggatgctttggaagtggcagggattaatgtcgaagattatggtttggaagaacgcatccggcttattcatacggatttgtttgaaggattggaaggcacttatgatttgattgtttccaatcctccttatgtggatgcggaatcggttgagttattgcctgaagagtatttgcacgaaccggaattggcattgggcagcggggcggacgggttggatgccaccaggcagattcttctgaatgcggcaaagtttctgaatcccaaaggtgtattgctggtggaaatcgggcataacagggatgtattggaagcagcgtatccggagttgccttttacttggttggaaaccagcgggggcgacggttttgttttcctcttgacgcgcgagcagttattgggtgaagagtga

SEQ ID NO: 63714 - DNA, 2835 bp, Neisseria meningitidis; identical to SEQ ID NO: 44939

SEQ ID NO: 63715 - DNA, 423 bp, Neisseria meningitidis
atgaataaaaaccgtaaattactgcttgccgcactgctgctgattgcctttgccgccgtcaagctcgttttgttgcaatggtggcaggcgcagcagccgcaagccgtggcggcgcaatgcgatttgaccgagggttgcacgctgccggacggaagccgcgtccgcgccgccgccgtttcaaccaaaaaaccgtttgatatttatatcgaacacgcgcccgtcggcacggaacaggtcagcatcagcttcagtatgaaaaatatggatatgggtttcaaccgctatatgttcgagcggcaaccgtcggggacttggcaggcagtacgcatccgcctgcccatctgtgtcgaaggcaggcgcgattttacggcggacattacaatcggcagtcggacatttcagacggcatttaccgccgaataa

SEQ ID NO: 63716 - DNA, 1299 bp, Neisseria meningitidis
atggctaaaaatgttgtagtaatcggcgcacagtggggcgacgagggtaaaggtaaaattgttgactggctggcggaagaaaccggcggcgtggtgcgctttcaaggcggtcacaatgcgggccataccttggttgtcggcggcaaaaaaaccattttgcgcctgattccgagcggcatcctgcacgaaggattggattgcttcatcggttcgggcgttgtcgtctcccccgaagccctgttgggcgaaatcgacgagttgaacgctgcaggcgtgaaaaacgtcgaaggccgtctgaaaatcgcgccgacctgcccgctgatcctgccttatcacatcgcgctcgaccaagcccgagaagcatcgcgcggcaaaggcaaaatcggcacgaccggccgcggcatcggccctgcctacgaagacaaagtggcacgccgcgccattcgcgccgtcgatttgctgcatcctgaaaaactgcgtgaaaaactggatgccgtccttgcctattacaatgtccaactgcaacatctgcacaatgccgagccggttaaagcggaagacgtgatggcggttatcgaaaaagtcgcgccgcgcattgcgccgatgattaccgacgtgtcccgcgtgttgaacgagaaaaacaaaaacggcgaaaaactgctgtttgaaggcgcgcaaggtgcgttgttggacatcgactacggcacttatcccttcgttacctcgtccaactgtctggcgggagccgcttccgcaggcgcgggcgtaggtcctcaaatgctggattatgttttgggcatcgtcaaagcctataccacgcgcgtcggttcgggcccgttcccgaccgaattgttcgacgaagtaggcgtaggtttggcagaacgcggacacgaattcggttcggtaaccggtcgcgcacgccgctgcggctggtttgatgccgccgccctgaaacgctccatccaaatcaacggcatttccggtatgtgtattactaaactcgatgtaatggacggcgttgaaaccatcaatatctgcgtcggctatgaattgcccgacggcggcaaaaccgacatcctgccttgcggttccgatgcggtggaaacctgcaagccgatttacgaaaccatgcccggctggcgtgaatccactttcggcgtgaaggactacggcgcattgcccgaaaacgccaaagcatatttgaaacggattgaagaagtctgcggtgcgccggtcgccatcgtctccaccggccccgaccgagaagaaacgattgtgctgcatcatccgttcgcataa

SEQ ID NO: 63717 - DNA, 678 bp, Neisseria meningitidis
ttggtcaaaacggcagacggctacaaagccattgcccgtatccgaaccggcgaccgcgtcttctccaaggacgaggcaagcggaaaaacgggatacaaacccgttaccgcccgatacggcaatccgtatcaagaaaccgtttacattaaagtttcagacggcatcggcaacaaccaaaccctgatttccaaccgcatccatccgttttattcgggcggcaaatggattaaggcggaagacttaaaggcgggaagcaggctgttatccgaaagcggcaaaacccaaaccgtccgcaacatcgttgtcaaaccaaaaccgctcaaagcctacaatctgaccgttgccgattggcatacttacttcgtcaagggcagtcaggcggaaacggaaggagtttgggttcataatgcgtgtccgccaagaaaaacaccatctacccccgtatatgggaatgattcagaagcatatgcagcagcaaagaaattgggatatagaaaaataaaagaaagaacgagaaatgatgctgctatttttaaaaaaggaaagagttatatatcacgcgatgtagattcacataatggaggggcttggaaagaagcatcttcacccaaaaatctgaacagaaaagaaacaagaaacggtacatttgataaaaacctaaatcgtattggagattaa

SEQ ID NO: 63718 - DNA, 279 bp, Neisseria meningitidis
atgccggccgtcgatttgatccgcgaacgcctgcagacgctcgatccgctggtgttggaaatcggcgatgagagccatctgcacaaaggacacgcgggcaataccggcggcggacattatgccgttttggtcgttagcggccgttttgaaggcgtaagccgcctgaaccgccagaaaacggtcaaatcgctgctcaaagatttgttttcaggcggcatgattcacgcgctcggcatccgggcggctacccctgacgagtatttccatacggcgggctga

SEQ ID NO: 63719 - DNA, 372 bp, Neisseria meningitidis; identical to SEQ ID NO: 42883

SEQ ID NO: 63720 - DNA, 780 bp, Neisseria meningitidis
atggcagcctcgcccgaagcaaaattcactgaagaaaagattttgtgggtcaaacaccacacgccgaaactcatcactttcgccatcagccgtcccgaatcctaccgttttaaagccggacagttctcccgactcggtttctacgaaggggaaggctttatttggcgtgcctactccatcgtttccgcagaatatgcagacacgctcgaatattttgccgtactcatccaagacggccccatgtcggcccgtttcgccaaaatgcaacagggcgacaccatcctgctcgataaaaatgccaccggcttcctcctgcccgaacgcttccccgacggcaaggatttggtgatactctgcaccggctccggcatcgcccccttcctttccattctcgaacaacctgaaatccgacagcgtttcgataccgtcaacctgatacattccgtatcttttcccgaagaattgattttcaacgaccggctcgccgcattgtccgaacatcccctggtaggcgaatacagacactcgttccatttcgtccctgttaccacccgtgccgccaacccctcgggcttaagcggaaaacgcattccggaactcttaaaaaacaacagcatcgaacaggcgctgcataccaagttcaccccggaatccacacggtttatgatttgcggtaacccggacatggtcaaagacactttccaaacgctactcgacatgggttacgccatgcaccgcaaccgcattcccggtcaaatcatgatggaaaacggcttctaa

SEQ ID NO: 63721 - DNA, 1035 bp, Neisseria meningitidis
atgccgaattgtttcaaatttcataccgttatcgaacggcattggcaaaaaccttatccggttttgtcttttctgcttaagccgctctccgggctgtttgccaaaattgcggcaaaacggcgggcggattttttatcgggaaaacggcaaagcgaaaagctgtccgtgcctgtggtcgtggtcggcaatattcacgcgggtgggacggggaaaacgccgattgttgccgcgctggtgtcgggtttgcaggaaaagggcgtcaaggtcggcatcatcagccggggctacgggcgcaagagcaaggcggttcatgtattgaatgctgagagccgagcggaagatgcgggcgatgagcctttgctgctgttccgcaaaaccggtgcgccgacggcggtgggcagcagccgtgcagaggcaggcagggcgttgctggcggcgcatcccgacatcggactgattgtggcggacgacggtttgcagcattacgccctgcggcgagatgtggaaatcgcggtgtttccggcggcggatacggggcgcacggatttggatttactgcccaacggcagtttgcgcgaacctttgttgcggctggattcggtggatgcggtcgtcgtcagcggcggcaaggcggatgcgctgtttaggccgtctgaaaatatgtttcacagccgtatcgaagcgggacggatttaccgtttgaacaatccgtccgaaatactggacacaggccgtctgaaaaatcaaaccgtcgtcgccgtggcaggtattgccaagccggcgcgttttttcgattcgttgcggaatatgggcattaccgtgaagcgaaccgtcgcgctgcccgaccacgccgacatttcggcggcagatttgcccgatgcggacgcggtcattattacggagaaagatgcggtcaaattttcagacggcatttgcaccgataatgtttgggtgttgcccgtttgtgcgataatcgaacctgatttggcggcgtttgtgttggagcggttggaagatgtaccgaaggccgtctga

SEQ ID NO: 63722 - DNA, 252 bp, Neisseria meningitidis
atgatttctgataaacaacgtaccgaattggcgaaaaagcaagtcatgcttaaaattttgtatcaggcatggctggcagaaaaacggaaatacgccgtaatcacggtagtcgataacgaaggcaatctgatcgaatatcatccttccggtaatcaaagaacagtaggccatgtcaaacaactggcctatttcagtcgaagtaaaaacgtcaggcaacctttggatagggttaaaggtcatctaaaaatttag

SEQ ID NO: 63723 - DNA, 483 bp, Neisseria meningitidis; identical to SEQ ID NO: 48849

SEQ ID NO: 63724 - DNA, 1839 bp, Neisseria meningitidis
atgttacccgcccgtttcaccattttatctgtgctcgcggcagccctgcttgccgggcaggcgtatgccgccggcgcggcggatgcgaagccgccgaaggaagtcgtaaaggttttcagaaagcagcagcgttacagcgaggaagaaatcaaaaacgaacgcgcacggcttgcggcagtgggcgagcgggttaatcagatatttacgttgctgggaggggaaaccgccttgcaaaaggggcaggcgggaacggctttggcaacctatatgctgatgttggaacgcacaaaatcccccgaagtcgccgaacgcgccttggaaatggccgtgtcgctgaacgcgtttgaacaggcggaaatgatttatcagaaatggcggcagattgagcctataccgggtaaggcgcaaaaacgggcggggtggctgcggaacgtgctgagggaaagaggaaatcagcatctggacggactggaagaagtgctggctcaggcggacgaaggacagaaccgcagggtgtttttattgttggcacaagccgccgtgcaacaggacgggttggcgcaaaaagcatcgaaagcggttcgccgcgcggcgttgaaatatgaacatctgcccgaagcggcggttgccgatgtggtgttcagcgtacagggacgcgaaaaggaaaaggcaatcggagctttgcagcgtttggcgaagctcgatacggaaatattgccccccactttaatgacgttgcgtctgactgcacgcaaatatcccgaaatactcgacggctttttcgagcagacagacacccaaaacctttcggccgtctggcaggaaatggaaattatgaatctggtttccctgcacaggctggatgatgcctatgcgcgtttgaacgtgctgttggaacgcaatccgaatgcagacctgtatattcaggcagcgatattggcggcaaaccggaaagaagatatttccgttatcgatggctatgtcgaaaaggcatacggcagggggacggaggaacagcggagcagggcggcactaacggcggcgatgatgtatgccgaccgcagggattacgccaaagtcaggcagtggctgaaaaaagtatccgcgccggaatacctgttcgacaaaggtgtgctggcggctgcggcggctgtcgagttggacggcggcagggcggctttgcggcagatcggcagggtgcggaaacttcccgaacagcaggggcggtattttacggcagacaatttgtccaaaatacagatgctcgccctgtcgaagctgcccgataaacgggaggctttgagggggttggacaagattatcgaaaaaccgcctgccggcagtaatacagagttacaggcagaggcattggtacagcggtcagttgtttacgatcggcttggcaagcggaaaaaaatgatttcagatcttgaaagggcgttcaggcttgcacccgataacgctcagattatgaataatctgggctacagcctgctgaccgattccaaacgtttggacgaaggcttcgccctgcttcagacggcataccaaatcaacccggacgataccgctgtcaacgacagcataggctgggcgtattacctgaaaggcgacgcggaaagcgcgctgccgtatctgcggtattcgtttgaaaacgaccccgagcccgaagttgccgcccatttgggcgaagtgttgtgggcattgggcgaacgcgatcaggcggttgacgtatggacgcaggcggcacaccttacgggagacaagaaaatatggcgggaaacgctcaaacgtcacggcatcgcattgccccaaccttcccgcaaaccccggaaataa

SEQ ID NO: 63725 - DNA, 669 bp, Neisseria meningitidis
atgttaccctcgaaatatgaagataacgcactgcaaattaaagaaaaaagtacagaaagaactgctccgttttttgtactggaagttaccgcccgttctgccgccgatattttgggtatccatcccaattcggcagcactgttctaccgtaaaatccgcacggttatcaaccatcatttggccttggctgccgatgaggtttttgagggctctgtcgagccggacgaaagcgatttcggcggacggcataaaggtagacgtggtcgcggtgcagcaggaaaagtggttgttttcggcattctgaaacgcaacggacgggtctataccgttgtggtggataatgccaagtctgaaacgttactccctgtcatcaaaaagaaaatcatgccggacagcattgtttataccgatagtctgagcagctgcgacaagttggacgtgagcggttttatccattaccgcatcaaccattccaaggagtgtgcagaccgtcagaaccacattaacggcattgagaacttttggaatcaggcaaaacgcgtcttgcgaaaatacaacggaatcgattgcaaatctttcccgctgttcttgaaagaatgcgaatttcgatttaacttcggcacaccgtctcaacagcttaaaatcctgcgggattggtgtggaatttag

SEQ ID NO: 63726 - DNA, 534 bp, Neisseria meningitidis
atgtttccccccgacaaaacccttttcctctgtctcagcgcactgctcctcgcctcatgcggcacgacctccggcaaacaccgccaaccgaaacccaaacagacagtccggcaaatccaagccgtccgcatcagccacatcgaccgcacacaaggctcgcaggaactcatgctccacagcctcggactcatcggcacgccctacaaatggggcggcagcagcaccgcaaccggcttcgattgcagcggcatgattcaattcgtttacaaaaacgccctcaacgtcaagctgccgcgcaccgcccgcgacatggcggcggcaagccgcaaaatccccggcagccgccttaaggccggcgacctcgtattcttcaacaccggcggcgcacaccgctactcacacgtcggactctatatcggcaacggcgaattcatccatgcccccagcagcggcaaaaccatcaaaaccgaaaaactctccacaccgttttacgccaaaaactacctcggcgcacatactttctttacagaatga

SEQ ID NO: 63727 - DNA, 444 bp, Neisseria meningitidis; identical to SEQ ID NO: 38644

SEQ ID NO: 63728 - DNA, 705 bp, Neisseria meningitidis; identical to SEQ ID NO: 37373

SEQ ID NO: 63729 - DNA, 309 bp, Neisseria meningitidis
atgaccctgaaaaccgatttattgcctaaaatcaacaacgaagattatcaacgcctcatcctcaaacacagtgcggaatttagcggtggcgaaatcagcctgttgaacgaaatcctcgaaaaattcaatttcgacgttgttcaggcgcaggcattggcgcaagccgtcatgcagcaaatccgcttcgaccccaacgcctaccacatcgacagcgacgacgaagacaccaccggcatctgcccccactgcatcaacccgcctatgccgcccctgcgcgactatctcgtttggcgcgaaacgcgcggataa

SEQ ID NO: 63730 - DNA, 2439 bp, Neisseria meningitidis
atgacagaaaaatcccataaaaaaacagcaaaaggcagggcgggaagcccgtccccaacgtccgcacgcaacaagaaagccgacaacggcgcacggggcaataaagtttccgagcggctcaaggcggtcaaagagttgcagaaaaccgaaaccaaaaaggcgcgtcccgaacatgtcgtcaaccttatcggcgacgcactgtggctgatgggtttggcggcaaccttgtatttggcgatttccctgattagtttcgatatgggcgatccgtcttggtcgcacagttcgccggttgtggaagatgtcgccaattggggcggactgttcggcgcgtatgttgccgatgtcggctattatcttttcggctggtcgttctggtggtggatagcggctgcctgcgtcatgctgtataaaaattttcgtctgcacgcaaaacagacggaaaacgaggcatacaaccacaaaatcgctgccgccgcgctgtttgtcctgacggtcttcagccccgtcttggagtattttgtgctgggcggaaaatatgccgactccctgcctgtcggagcaggcggtatggtcggcatacgcgtcggcgcagtgtttgcgtggctgctggggaaatcgggcagcctgctgattatcttggttgttctgctgttgtcgttgtccctgctggtgcagatttcatggctggaatttttgaacggtgcgggcagggcggttcaaaaccgcctgagtgccttatccggcaaggtcatggctttgggaaaacgccggccgaataccaaaacagacggtgtcgatacccaaaatacacggcgcatggtaaaagaagccaagaatattacggccaaacccgttgccttgcccgaaggcagcagcagcaaccgcaaatccgtcgcggtttccgtcgcgccgccgcccaaaattcaggtttctctgtttgaagatgacgaacctcggcaggcgggcgaataccacaagcctacattgaacctattgcggattcctgacagcgaacccgtcagcatcaatcccgccgaattggagcgcactgccgaactgatcgaatccaaactggcagaattcggcatcggcgtacaagtcgtatccgccacatccggccccgtcatcacgcgctacgaaatcgaacccgcgcaaggtgttaaaggcagccaaattgttgccttgtcgaaagatttggcacgctctatgtcgctgcagtccgtgcgtatcgtcgaaaccatcgcaggtaaaaacacgatgggcatcgagttgcccaacgacaaacgccaagacgtgatgttgagcgaaatcttgtcctcgcccgtgtttgccggagccaaatccaagctgaccgtcgcgctgggcaaagacattgccggtacccccgttgtcggcgacttggcgaaaatgccgcaccttttggtcgccggtatgactggttcgggcaagtccgtcggcgtgaacggcatgattatgtctatgcttttcaaagctacgcccgacgaagtccgctttatcatgatagacccgaaaatgcttgagttgagcatttacgacggcattccgcacctgctctgtcccgtcgtgaccgatatgcgcgaagcggggcaggcgttgaactggtgcgtcgccgaaatggaaaaacgctaccgcctgctttcccacgccagtgtacgcaatctggaaggcttcaaccaaaaagtcgaagccgcaaaagcggcaggcaagcctttgcttaatccgttcagcctgaaccccgacgagcccgagccgctggaaaaactgccgttgattgtggtcgttatcgacgaacttgccgacctgatgatgaccgaacgcaaagccgtcgaacagcaaatcgcccgtctcgcccaaaaagcgcgcgccgccggtatccatatgattgtcgcgacccaacgtcccagtgtcgatgtcgttactggcctgattaaagccaacatcccgacgcgtatggcgtttaccgtgcaaagcaaaatcgacagccgtaccatcctcgaccaaatgggcgcggacgaactgctcaaatatggcgattcgctgttccttcagcccggcagtgccgaaccgacccgcctgcaaggcgcgtttgtttcagacgacgaagtacatcaagtcgtcaactacgtcaaatcgcaagccccagccgactatattgaaggtctgctcagcggcgaggccgcgctggaaactgccaatatcgttaatccgaatgcagacagcgacgaattgttcgatcaggcagtcgcctatgttttggaaagcaaaaaaacctccatttcgtctttgcagcggcagttgcgtatcggctataaccgcgcggcaaacctgatggaggcactggaaaatgcgggtgtcgtttctcccaccgacctcaacggcagccgtaaaattttggcgcacaaggaccatttgtag

SEQ ID NO: 63731 - DNA, 1020 bp, Neisseria meningitidis
atgaaaaaaattctcgttaccggcggcaccggttttatcggctcgcataccgttgtttctttgctgaaaagcggccatcaagtcgtgattttggataacctatgcaattccagcatcaatatcctgccacgcttgaaaacgattaccggccaagagattccgttttatcaaggcgatatccgcgatcgtgagattttgcgccgtatttttgcggaaaaccgcattgattcggtgattcattttgccggcttgaaagcggtgggtgaaagtgtggccgagccgatgaaatattatgataataatgtttccggcagcttggtgttggcggaagaaatggcgcgtgcgggcgtgtttagcattgtgttcagttcttcggcgacggtttatggcgatccgggcaaagtgccttataccgaggatatgccactgggcgataccaccagcccttacggcgcatcgaaatcgatggttgagcgcattctcactgacattcaaaaagccgatccgcgctggagcatgattttgttgcgttatttcaatccaattggcgcgcatgaaagcggcttgattggcgagcagccaaacggtatcccaaataatttgttgccttatatctgccaagtggcggcaggcaaactgccgcaattggcggtatttggcgatgactaccctacccccgacggcacggggatgcgtgactatattcatgtgatggatttggcagaaggccatgtcgcggctatgcaggcgaaaagcaatgtagcaggcacgcatttgttgaacttaggttccggccgcgcttcttcggtattggaaatcatccgcgcatttgaagcggcttcgggtttaaccattccatttgaaatcaaaccgcgccgcgccggtgatttggcgtgcttctatgccgacccttcttatacgaaggcgcaaatcggctggcaaacgcagcgtgatttaacccaaatgatggaagattcatggcgctgggtaagtaataatccgaatggctacgacgattaa

SEQ ID NO: 63732 - DNA, 1422 bp, Neisseria meningitidis
atggacacaaaagaaatcctcggctacgcggcaggctcgatcggcagcgcggttttagccgtcatcatcctgccgctgctgtcgtggtatttccccgccgacgacatcgggcgcatcgtgctgatgcagacggcggcgggactgacggtgtcggtattgtgcctcgggctggatcaggcatacgtccgcgaatactatgccgccgccgacaaagacaccttgttcaaaaccctgttcctgccgccgctgctgtctgccgccgcgatagccgccctgctgctttcccgcccatccctgccgtctgaaatcctgttttcgctcgacgatgccgccgccggcatcgggctggtgctgtttgaactgagcttcctgcccatccgctttctcttactggttttgcgtatggaagggcgcgcccttgccttttcgtccgcgcaactcgtgtccaagctcgccatcctgctgctgctgccgctgacggtcgggctgctgcactttccggcgaacaccgccgtcctgaccgccgtttacgcgctggcaaaccttgccgccgccgcctttttgctgtttcaaaaccgatgccgtctgaaggccgtccggcgcgcaccgttttcatccgccgtcctgcatcgcggcctgcgctacggcataccgatcgcactaagcagcatcgcctattgggggctggcatccgccgaccgtttgttcctgaaaaaatatgccggcctagaacagctcggcgtttattcgatgggtatttcgttcggcggagcggcattattgttccaaagcatcttttcaacggtctggacaccgtatattttccgcgcaatcgaagcaaacgccccgcccgcccgcctctcggcaacggcagaatccgccgccgccctgcttgcctccgccctctgcctgaccggcattttctcgcccctcgcctccctcctgctgccggaaaactacgccgccgtccggtttatcgtcgtatcgtgtatgctgccgccgctgttttgcacgctggtagaaatcagcggcatcggtttgaacgtcgtccgaaaaacacgcccgatcgcgctcgccaccttgggcgcgctggcggcaaacctgctgctgctggggcttgccgtaccgtccggcggcgcgcgcggcgcggcggttgcctgtgccgcctcattttggctgttttttgttttcaagaccgaaagctcctgccgcctgtggcagccgctcaaacgcctgccgctttatacgcacacattgctctgcctgacctcctcggcggcctacacctgcttcggcacaccggcaaactaccccctgtttgccggcgtatgggcggcatatctggcaggctgcatcctgcgccaccggaaagatttgcacaaactgtttcattatttgaaaaaacaaggtttcccattatga

SEQ ID NO: 63733 - DNA, 558 bp, Neisseria meningitidis
atgatcaacgatattcaaaaaacagccgaaggcaaaatgcagcgttcggtcgaagtactgaaagaaaatctggcgaaagtgcgtaccggccgcgcgcataccggcctgctcgaccaagtggaagtcgaatactggggcagcatggtccccgtcagccaggttgccaacgtaacgcttctggacgcgcgcaccatcggcgtgaaaccgtttgagggcaatatggcggccaaagtcgagaaagccatccgcgattcaaacttggggctgaacccggcagctgtcggcgacctgatccgcgtaccgatgcccatgctgaccgaggaacgccgcaaagacctgattaaagtcgtacgcggcgaagcggaagaaggccgcgtctccatccgcaacgtgcgccgcgatgccaacgaccacatcaaaaaactcctcaaagacaaagaaatttccgaagacgaggcacgtcgcggcgaagaagcggttcaaaaactgaccgacaaatacattaccgaagccgacaaactcctgactgccaaagaagaagatttgatggcaatttaa

SEQ ID NO: 63734 - DNA, 378 bp, Neisseria meningitidis; identical to SEQ ID NO: 36713

SEQ ID NO: 63735 - DNA, 936 bp, Neisseria meningitidis; identical to SEQ ID NO: 40224

SEQ ID NO: 63736 - DNA, 582 bp, Neisseria meningitidis
atgaacctgcgcgatgatttgcaactgatttacgaccggatacccgaaggcagccgcgtcttggacttgggctgcggcgacggcgaactgcttgccgccttggtcgaacacaaaaaatgcagcggctacggcatcgaaatcgacaccgacagcgtgattgccgcgatgtcgcgcggcgtgaatgttatccaagccgatttggaagaaggtttaaccgcattcaacgatcaaagttttgatgtgattgtgttgagccagaccatccaagcgatgcagaataccgaaaaaatcctgcgctgcctgatgcgcgtggcaaaacaggcaatcgtcagcttcccgaatttcggctactggcgcaaccgcgtccaaatcgcactcggcggacatatgccggtttccgaacgtatgccctaccattggtacgacacgcccaatatccattggtgcacgctcaaagactttgatttgttgtgcgccaaaaacaacatccgcgtgcttgagcgcgccgtgatgacgggcaacagacaggtcaaacatttccccaaccttttgggcagccttgcattttaccgcgtcgggtaa

SEQ ID NO: 63737 - DNA, 432 bp, Neisseria meningitidis; identical to SEQ ID NO: 43184

SEQ ID NO: 63738 - DNA, 456 bp, Neisseria meningitidis
atgaaaaaaccgaaaatcctttttgtctgcctcggcaacatctgccgttcgccgatggcggaatacattttgcgccgccgcgccgccgaagcgggcattccccttgaagcggacagcgcggggacatcgggctggcatgacggcgaggatatgcaccgcgagacggcaaagatattgaaaaaacacggtatcgatgcttcaggctttaccagccgcaaaatccgccaaagcgatgcggcggcgtttgactacatcatcgcgatggacggcaataatttgtccgaattggaaagaaccttcggcaggcggtcggaaaaaatattcaagctgaccgacctgatacccgaaagcggttacgaccatgtccccgatccgtggtacacgggcgattttgaagaaaccttcaggcttgcggatgcgggctgtcgggcattgttggaaaagatttccaaataa

SEQ ID NO: 63739 - DNA, 876 bp, Neisseria meningitidis
atggcttacctgttaatcagcatcgtgttcagcgtgtcggtttccattttgctgaaaatggcaaggaagaaaaaaatcgacatcgcgcaggcggtcgccgtcaattatgtggtcgcggtcatactgaccctgctggtattgaagccggatgtcggcaatatcggcgcatttttgccgacgtggccgctgtttgccgcattaggcgtgctgctgccgtccgtattcgtgataatgggcaaatccgtagaatccgccggtatcgtcaaatccgacgcggcgcagcgtttgtcgctgtttttgccgattgttgccgctttaacgctgtttggcgaaaaactcagcgaaggcaaactaatcgggctgtgcctcgcctttgccgcgctgttctgcctgctttggaaacacagcggtggcaaaaaatcaggaagcgcgtggcggcaggcggcattgctgctgggcgtgtgggcaggttacggcattatcgatatcctgttcaaacagcttgccaaaagcggaacggcatttgcgggcaacctgctggttgcatttgtgctggcgggtgtgctgatgtttgcctgcctgtttgccaaatcggtcagatggcgcgcagagagtgtggtcggcggcatactcttgggcggtttgaattttatgaatatcgtaacctacatcaccgcgcaccaaatgatgaaggacaatccgaccttggtttttgccggtatgaatatcggtgtgattgttttgggtacgctttcgggcgcactgttttttaaggaaaaaatcaacacaatcaatacggcgggaatcgtattggcactgtgttccatcgcctgcctgttttattgggcggaggtcaaggcactgttcggcatataa

SEQ ID NO: 63740 - DNA, 1308 bp, Neisseria meningitidis
atgaagccagtaaacatcggtcttttaggtttgggtacggtcggcggcggtacggctgccgtgttgcgggacaacgcggaggaaatttcccgtcgcttggggcgcgaaatccgtatttctgccgtgtgcgatttgagtgaagaaaaagcccgacaaacctgcccgtccgcagcctttgtcaaagatccgttcgaactggtcgcacgtgaagacgtcgatgtcgtcgtcgaattgttcggcggtaccggcattgccaaagatgcggtgttgaaagccattgaaaacggcaaacacatcgttaccgccaacaaaaaactgctcgccgaatacggcaacgaaatcttcccgctggcggaagaaaaaaacgtcatcgtccaatttgaagcggcagtagcgggcggcatcccaatcatcaaagccctgcgcgaaggtttggcggcaaacaggattaaatccatcgccggcattattaacggcaccagcaacttcatcctctccgaaatgcgcgaaaaaggcagcgcgtttgccgatgtactgaaagaagcgcaggcattgggttatgccgaagccgatccgaccttcgacatcgaaggcaacgatgcgggccataaaatcaccatcatgagcgcactggcattcggcacgccgatgaacttttccgcctgctacctcgaaggcatcagcaaactcgacagccgcgacatcaaatacgccgaagaacttggctatcgcatcaaactgttgggcattacccgcaaaaccggcaaaggcatcgagctgcgcgtccaccctaccctgattcccgaaagccgcctcttggcaaacgtcaacggcgtgatgaacgccgtgcgcgtcaacgccgatatggttggcgaaaccttatattacggcgcgggcgcgggcgcattgccgaccgcttccgccgtggttgccgatatcatcgacatcgcccgcctggttgaagccgataccgcccaccgcgtaccgcatctggcgttccaacccgcgcaagtccaagcgcaaaccatcctgcctatggacgaaattaccagcagctactacctgcgcgtccaagccaaagacgaaccgggcacgctggggcaaatcgccgcgctgttggcacaagaaaacgtgtccatcgaagcactgattcaaaaaggcgtgattgatcagaccactgccgaaatcgtgattctgacccacagcacggtcgaaaaacacatcaagtcggcaatcgcagccatcgaagcactggattgcgtggaaaaaccgattaccatgatccgcatggaaagcctgcatgactga

SEQ ID NO: 63741 - DNA, 990 bp, Neisseria meningitidis
atgaaacagaaaatttttgtcctttataccggcggcaccatcggcatgacgcaaagcagcgaaggcctgcgccccgataccgcgctggtcgggcaggcactcgcgccgttttcaaacggcatggatttcgattggcacgtttgtgggacgctgattgattcttccgccgtccaactgcaaaactggtgcgcttggctggacatcattgccgccgcgctgccgcagtacgacggcgttttggtgctgcacggcacggacacgctcgcctataccgccaatctgttcgccctcgcgctgcagggtttggacaagccaatcgtcctgaccggctcccaatggccgtacaacgccgtgggcagcgacgcgccgcgcaatctggcgactgccgttgccgcattcccactcggattgaagcagacgcttattgcctttgacggcaaactttatcccgccgtcggcagcagcaaagtcagcaccgaaaccgccgccggtttcgacaatccgcatttcggcgcactggcggagtgggacgaaacccagggctggcacaatgtccgcatcccgaatcaggacacggcagatgtttcagacggcctcaaaatccgttatcccgacccgcaggcaaaaatcgccgtccgcacgcttatccccggctttgccgtccaagaacttgccgacggactcggacagcttcccgcccacgcccttatcctgcaaagttacggacacggcaacacgcccgcagacgaaggctttatccgcgctgtccgagacttcacgcggcaaggaaaattgttgctcaacatcagccaagtccgacaaggcagaactgccgccgtttacgcgcaaggcaatgcgttccgcaactcgggcatcatcaacggcggcaaatgcaacctcgaaaccgccaccgcgctgatgaccctcgccgtatcgcaaggctggggcgcggaagatgtagaaaaagagttggcaagactgaagttatag

SEQ ID NO: 63742 - DNA, 594 bp, Neisseria meningitidis
atggaacactatttgagcctcttcatcaaatccgtcttcattgaaaatatggcgctatccttctttttgggtatgtgcacgtttttggcggtatccaaaaaagtatccaccgcattcggtttgggtgtggcggtcattttcgtactcgggctgtccgtccctgccaaccaactcgtttactcgctgctcaaagacggcgcgattgtcgaaggcgtggatttgacctttttgaaattcattaccttcatcggcgtgattgccgctttggtgcagattttggaaatgttcttggacaaattcgtccccgccctctataacgcgctgggcatctacctgccgctgattaccgtgaactgcgcgattttcggtgccgtatcgtttatggcgcagcgcgaatacggcttcggcgaatccgtcgtgtacggcttcggcgcgggcttgggctggatgttggcgattgtcgctttggcaggcattaccgaaaaaatgaaatattcggacgctcccaaaggcctcaaaggcttgggcattacctttatcgccgccggcctaatggcgatggcgtttatgtcgttctccggcatccagttataa

SEQ ID NO: 63743 - DNA, 159 bp, Neisseria meningitidis
atggaattacacgacaggcaggaaatgctgtttgaaaggattttccggtcagtcttgcgattggtcggggtttcatcggaaacggtgaaacaaaagtttgccggcgtagagttgagctacgcgggtaaagccgcaggcgaaagcctgtattgtttgtga

SEQ ID NO: 63744 - DNA, 696 bp, Neisseria meningitidis; identical to SEQ ID NO: 50512

SEQ ID NO: 63745 - DNA, 1059 bp, Neisseria meningitidis
atgtcttcacgcaaaatcatccacatcgacatggacgcattctacgcatcggtagagctgcgcgaacagccgcatttgaaagggcggccggtggtcgtcgcgtgggagggcgcgcgttcggtgatttgcgccgcatcgtatgaggcacggcagttcgagctgcattccgcgatgtcggtggcaacggcgaaaaggctgtgtccgcaagcggtgtatgtgccgccgcatttcgatttgtaccgtcaggtttccgcgcagattcacgccgtattcaggcgttataccgatttaatcgaacccttgtcgctggacgaagcctatcttgacgttacccgtaatttcaaaaacatcccttacgccagtgaagttgccaaagaaatccgtgccgccatttttgcggaaacaggtttgactgcatccgcaggcatcgcgccgaacaaatttctggcgaaaatcgcgtcggactggcgcaagccgaacgggcagtttgtgttgccgccgtacaaagtcatggcatttttggaaaccctgcctttgggcaaaatccccggcgtgggcaaggtaacgctgaaaaaaatgcagtcgctgggtatgcagacggcgggcgacttgcgccgtttcgatcgcggcgagctcttaaaccattttggacgctacggctaccgcctctatgatttggcgcgcggtacggatgaacgccccgtcaaagccgaacgcgaacgcctccaaatctccacagaaatcaccctgcctgaagacctgccgctcgagcaggctgccggacacctgccccatcttgctgaagacctgtggcggcaaatcacgcgcaaaaacgtcgaagcccaaagcgtaacgctcaagctgaagacctacgatttccgcatcatcacgcgcacactgacttattcctccgtattgcccgactgcgcagctctgctgcaggctgcgcaaatgttgatggcgcgcgtcccgccgcagacggaagacgcgttccgccttatcggtatcggcgtggggcatcttgtgccgaaaaaccagcagcaggatttgtgggcgtaa

SEQ ID NO: 63746 - DNA, 567 bp, Neisseria meningitidis
atgttattgcaaaacatccttccattcgcccattgccttttgcggaaggcacttcccgaaggcggcaatgctttggacggcaccgccggcaacggacacgacacccttttcctcgcacaaaccgcaggcatccgggggaaagtgtgggcattcgacatccagccgcaagccctgaacaacacccgatgccgtctgcaggaagcaggttacagcaatgtacggctcatcttggacggacacgaaaacctgaaacaatatgtttcagaaccactaaatgccgccattttcaactttggctggctgcccggcggagataaaagccttaccacccatacggaaaccagcattccctccctttgcgcaaccctctccctgctgaaagaaggcggtatgcttattgccgtcctctatccgggacacgaaaacggcaaacaggaggcagaagcaatcgaacaatgggcaaaaaacctgcctcaagaacagtttgccgttttgcgttacggctttaccaaccggaaaaacagcccgccctatcttttggcatttgaaaaactgcgtcaaaaataa

SEQ ID NO: 63747 - DNA, 546 bp, Neisseria meningitidis
atgagcaaaattatttgtctgactgccggacacagcaacaccgacccgggtgcggtcaacggcagcgaccgtgaggcggacttggcgcaggatatgcgcaatatcgtggctgctattttgcgcgatgactacggtttgactgttaaaaccgacggcacgggcaaaggcaatatgccgctgcgcgaagcggtcaagctgattcgcggctcggatgtggcgattgagtttcacaccaacgctgccgtcagcaaagcggcgacaggcatcgaagccttgagtaccgttaaaaacaaacgctggtgtcaggtgttgagcaaagccgttgccaagaaaaccggctggaaactgcgcggcgaagacggctttaaacccgacaatgcgggccagcattcgcgcctggcttatgcacaagccggcggcattgtgtttgagccttttttcatcagcaacgacactgatttggccttgtttaagacgactaaatggggcatctgccgcgcgattgcggacgcgattgcgatggaattgggggcggcaagagtatga

SEQ ID NO: 63748 - DNA, 1254 bp, Neisseria meningitidis; identical to SEQ ID NO: 50688

SEQ ID NO: 63749 - DNA, 921 bp, Neisseria meningitidis; identical to SEQ ID NO: 41083

SEQ ID NO: 63750 - DNA, 1113 bp, Neisseria meningitidis
atgcaaaccgccgcccgccgctcgttcgattacgatatgcccctcatccaaaccccgacttccgcctgccaaatccgtcaggcgtgggcgaaggttgccgacacgcccgaccgcgagacggcaggccgtctgaaagacgaaatcaaggctttgctgaaggagaaaaacgcggtcttggtggcgcattattacgtcgatccgctgattcaggatttggctttagaaacgggcggatgcgtgggcgattcgctggaaatggcgcgcttcggcgcggaacacgaagctagtacattggtggtggcgggtgtgcgcttcatgggcgagagcgcgaaaatcctctgccctgaaaaaacagtgctgatgcctgatttggaggcggaatgttctttggatttgggctgtccggaagaagcgttttcagcgttttgcgaccaacaccccgaccgcacggtcgtagtgtacgccaacacttccgccgccgtgaaagcgcgtgccgattgggtggtaacgtcttcggtggcgttggaaatcgtatcgtatttgaaatcgcgcggcgagaagctgatttggggacctgaccgccacctcggcgactacatccgccgcgaaacgggcgcggatatgctgctgtggcagggttcgtgcatcgtccacaacgaattcaaagggcaggagctggcggcgttgaaggcggaacaccccgaagcggtggtgctggttcatcccgaatcgccacaaagcgtcatcgaactgggcgacgtggtcggctcgaccagcaaactgctcaaagccgccgtatcgcaccctgaaaaaaaattcatcgtagcgaccgacttgggcatcctgcacgaaatgcaaaagcaggcacccgacaaagaatttatcgccgcaccgacggcgggcaacggtggaagctgtaaaagctgcgcgttctgcccttggatggcgatgaattcgctgggcggcatcaaatacgccctgacaagcggacacaacgaaatcctgttggacaggaagctgggcgaagccgccaaactgcctttgcagcgtatgctcgacttcgcggcaggactcaagcgcggggatgtgttcaacggcatgggacccgcctga

SEQ ID NO: 63751 - DNA, 1911 bp, Neisseria meningitidis
atgaatatattatctgtagaaaacgcttcttttgccatcggccacgttgccttgctcgacaaaacttcttttcaactcgacagcggcgaaaaagtcggcttgatcggacgcaacggcgcaggcaagtcttcgtttttaaaaatcctcgccggtgtgcaaaagctcgacgacgggcagattattgttcaaaacaacctcaaaatcgtttatgtaccgcaggaatccttttttgataaggaagcaaccgtatttgatactgttgccgaaggtttgggcgaaattcgcgatttattgcgccgttatcatcatgtcagccatgagttggaaaatggttcgagtgaggctttgttgaaagaactcaacgaattgcaacttgcaatcgaagcgaaggacggctggaaactggatgcggcagtcaagcagactttgggggaactcggtttgccggaaaatgaaaaaatcggcaacctttccggcggtcagaaaaagcgcgtcgccttggcgcaggcttgggtgcaaaagcccgacgtattgctgctggacgagccgaccaaccatttggatatcgacgcgattatttggctggaaaatctgctcaaagcgtttgaaggcagcttggttgtgattacccacgaccgccgttttttggacaatatcgccacgcggattgtcgaactcgatcgcggtattttgcgttcctatcccggctcgttctccaaatatagcgagaaaaaagcgcaagagttggcagtcgaagcggaacacaaccgcctcttcgacaaattccacgcgcaggaagaagcgtggatacgcaaaggcatcgaagcgcgccgtacccgcaacgaaggccgcgtgcgccgtttggaagaactgcgccgccagcgtgccgaacgcctcaacgtacaagggcaggtcaatttcaagctcgacagcggcgagaaaagcggcaaaatcatcgccgagctggaacacgcctcgtttgcttatggcgacaaagtcattatggacaaattctccgccatcttgcagcgcggcgacaaaatcggcttaatcggtccaaacggcatcggcaaaaccacatttttaaaactgattttgggcgaattgcagccgacctacggcagaatccgtatcggcagcaagcaggaagtcgcctatttcgaccagttccgcagcgcgttgaatgaaaacgacaccgtgttttacacgctcggacagggcaatgattacgttgaagtcggcggtaagaaaaagcatgtgatgagctatttggaagatttcctgttcccccctgcccgcgcgcaaagtcctgtttcttcactctccggcggcgaacgcaaccgccttttgctggcaaaactctttacccgtcccgccaatattttggtcttggacgaaccgaccaatgacttggacatcgacacccaagagctgctcgaagacctgttgcgcgattatcaaggcacggtattccttgtctcgcacgaccgtatgttcctcgataacgtgattacccaaagcattgtttttgaaggaaatggaaggttaaaagaatatatcggcggctatcaggactacatcgacgcaaaatcacgcgaagcgaagattcagacggaatccgcacccaaaacagccgatgccgaaccggtgaaagaaaaacccaaagccaaccgcacggtcaaactgtcctacaaagaacagcgcgaactcgacgccctgcccgacgaaatcgccgccttggaagccgaacaggcagaaatcaacgcgcagctttccgatcccgaaatcttcaaagattacgaaaaagccggcgcactgcaaagccgcgccgaagaaatcgaaatgctgcttttggaaaagctggaacgctgggagctgctggaaaccaaacagaacggcaatgccgtctga

SEQ ID NO: 63752 - DNA, 1245 bp, Neisseria meningitidis; identical to SEQ ID NO: 45677

SEQ ID NO: 63753 - DNA, 1086 bp, Neisseria meningitidis
atgatggaaaacgccctccgacttgccgctttggggcgtttttccacttcgcccaatccgcgcgtcggctgcgttatcgcacacggcagccaaattgtcgggcagggcttccacgtcaaagcgggcgaaccccatgccgaagtccacgccctgcgtcaggcgggcgaaatggcacaaggcgcgaccgcctttgttaccctcgaaccgtgcagccattacggacgcacaccgccctgcgccgaagctctgctccgttccggcgtaacacgcgtcgtcgccgccatgcgcgaccccaacccgctggttgcaggcaaagggcttgccctgctcgaagcagcaggcatcaagacggaatgcggtttactcgaacatcaggcaagggaactcaaccgaggcttcctgtcgcgcatcgaacgccgccgcccctttgtccgcctcaaatgcgccgtttcgctggacggcaaaaccaccctttcagacggcagcagcttttggattaccggcgaagacgcgcgtgccgacgtacaggttttgcgtgccgaaagctgcgcggtgctgaccggcatcggcacggtgttggcggacaatccccggctcaacgtccgcgcttttccaactttgcgccaacccgcacgcatcgttttagacagccgcctgcgcctgcccttggacagccaccttctgaccgacggacaatctccaacctacatcgccacactcgaacgcaacgaagacagactgcacccctatcgggaacacgcacacatccgcatcctgatgccgtctgaaacggcaggcggcaaaatcgacctgaaccacctgatgcgcctccttgccgacgaaggtttcggagaaatcatggtcgaagcaggctccgaactcacatccgcatttctggcagaagatctggcggacgaaatcgtgctgtaccgttcgcccaaaatcctcggcagcggcaaagacctgctttccctgcccgaaaaccgcgccgccctttccgcaccgcccttgtggacacccgtttcaagcgaaatcctcggacacgacatcaaaaccgtgttccggaaaaacgataacgccttttaa

SEQ ID NO: 63754 - DNA, 663 bp, Neisseria meningitidis; identical to SEQ ID NO: 45178

SEQ ID NO: 63755 - DNA, 342 bp, Neisseria meningitidis; identical to SEQ ID NO: 43005

SEQ ID NO: 63756 - DNA, 909 bp, Neisseria meningitidis
atgaatcaaaccgccatcaaccgcgccgatgtgcgtacccgctttatcttcgacgatatgcccgtgcgcgggctgcacgtccgtctggaaaacgtgtggcagcacattgtaaaacagaaaaactatcccgccgccatccgccgcgccttgggcgagctgttggctgccggtgttctgctgtcgggcaacctcaaaaacgaaggcacgctgattgtgcaggttcaggggcaggggcggctgaaaatgctggttgcggaagcgacttccgatcgtaccgtccgtgcaaccgcgcggtgggacgaggcggcagaaatagccgatgacgaaagcctcggcgaccttttgggcggcaacggcgtgttcgtattgacgctgcagcccaaagacggcgaaccctggcagggcgtagtgcctttggaaggcgacggtatcgcgcaaatgttgatgaactatatgaaacgttccgaacagcttgatacgcacatcgtcctgtctgcaagcgacgaagcggcgggcggtctgctggtgcagcgtctgcctgaagaggtgttggatgaagaggcatgggaacacgtcagtacgctggcgcgcacgctgacggcggaggagctggcagaattggacgcgcaacacgttttataccgcctgttccacgaaacgccgccgcgcgtgttcgagccggaaacgtttgaattttcatgcacctgttcgcgcggcaaagtcagcgatatgctgttgatgctgggcggggaagaagtcggcggcgtggtggcggaacaaggcagcatcgaagtcgattgcgatttctgccacagcaaatatgtgtttgacgaaaccgatgtcaacgcgctgttcggggaggatgtggtcggcgttgccaaagggctgccccggcataccgtccaataa

SEQ ID NO: 63757 - DNA, 780 bp, Neisseria meningitidis
atgaaagaacacaaagcccgcaagcgtttcgggcagaattttttgcaggacacgcggatcatcagcgatattgtcaacgccgtgcgcccgcaggcggatgatgtcgtgattgaaatcggcccgggtttggcggcgattaccgaacctttggcgaaaaagctgaaccgcctgcacgttgtcgaaatcgaccgcgacatcgtatgccgtctgaaaacgctgccgtttgcggataaactggtgattcacgaaggcgatgtattgcagtttgatttcaacggcatcgcaggcaaaaagaaaatcgtcggcaacctcccgtacaacatttccacaccgcttttgttcaagctggcggaggtggcggacgatgtcgtcgatatgcactttatgctgcaaaaagaagtggtcgatcgtatggttgccgcgccgaaaagcaacgactacggccgcttgggcgtgatgctgcaatattttttcgatatggagctgctgattgacgtaccgcccgaatcgttcgatcctgcaccgaaagtggattccgccgtcgtccgtatgattccggtgaaacaccgcatcggcaaggcggacgatttcgagcatttcgccaaactcgtgaaactcgccttccaccaacgccgcaaaaccatacgcaacaacctgaaagaactggcaacagacgaagatttgcaggcagccggcatcaatccgcaagaccgtgccgaacatatcgcgccggagaaatatgtggcgttgagcaattatctggcgggcaaggccgtctga

SEQ ID NO: 63758 - DNA, 786 bp, Neisseria meningitidis
atggaaaacggaaaaacagtcccgagatggcgttttgccttgaaaagtgcgggctggcatctcttaatcagcctgtcggttgcagggctggcggcattgctggtttttaaggtttggtatccttatccttatgccgagctgacgggagggctgtcgctttatcagctggtggtggctgtcgatattgtatgtggtccgctgctgactttaattttggcaagcccgaagaaaaagacaaaggcacgcatggtcgatttttccatggtcggcatcatccagctggcggctttggtgtacggtctgcacagcgtttctttggcgcgccctgtgatagaggcgtttgaaaaagacaggattaatgttgtgaccgccgccgaagtggcggttgaagatttgcacaaagcgccggaagggctgcaaagcctgtcgtggttcggcatccgccgcattgcattgaaagaacctgaggatgcggatgagaagaacaagacgctggatttgtccctgaaaggtatcgagccgagtatgcgtcccgaccagtggctgccgtattccgacaaggaagcagaagaaatccgcaaacatctgaaaccgctgaaagtcttggcggatgcgagaaaaacgacggttgcggacattctgaaacaggcaggtctcgccgaaggggaggagctgtattacctgccgtttaccagcagcaggcagaaagagtggatagtcattaccgataaagagggcaacaccaaaggctacgcgccgatagacggcttcatcatcaccccttaa

SEQ ID NO: 63759 - DNA, 3177 bp, Neisseria meningitidis
atgaataaaacttggaaacggcaggttttccgccataccgcgctttataccgccatattgatgttttcccataccggcggggggggggcgcaggcgcaaacgcataaatacgctattgtaatgaacgcgcaaaatctgcctgaggtaaagtgggggcaggactatagaaaattggcgcaaaaaagcaatgaacgccaatttacccatacgactaatttttacatcaaaaaaaacgtaactttatcattcaataatatcgatgaagttgttgctgaaaaaaaagatgttgtcgttttcggcacagccacctacctgccgccctacggcaaggtttctggttttgatgccgataagctgaaaaagcgcggcgatgcccttggttggattaagacgatcaaaccggggttggtaggctacagctacgaaggtgtcacatgccaaaacaactacaacaacgccagccgcggctgtcctgaacttatctataaaacccaattttctttcggtcagcaagggttgaaaaaaaagacaaacggcaggctggatatagacgaagacaaaagccgcgacaattcgcccatttacaaattgcaggattatcctgggttgggcgtgtctttcaatttgagcagcgagagcctcgtcaaatcagtaaaatacaataaaattatatcttcttttagcgaggacgtgacgcagcaaaatggtacgcaaagccaccacaaagacaaaaacctcgtttatacgacaggcgattaccagtataagaatagatattcttcccgttatgtcgggcaggacgaacactccgccgtcgctttttatctgaacgccaaactgcacctgctggataaaaaaaacatcaaaaatatcgcgcaaggcaaaacagttaatttgggtaccttgaaaccgtacgtcgagccgacggaagaatggaaaaacaagagggggaaccattttcaaggtaattggacgtttgaagataaaggagaagtcagcgtcaaactcaaattgccggaagtcaaagcaggccgctgcatcaacgcaaataaccccaatcccaacgccaaagccccctcccccgcactgaccgcccccgcgctgtggttcggacctgtgaaagatggtaaggcggagatgtattccgcttcggtttctacctaccccgacagttcgagcagccgcatctaccttcaaaatctgaaaagaaaaaccgaccccaacaaacccggtcgctattctctcgcagacttgactaagtcggatattgaaagtcgacagccgggtttcacagggcggcaaaccgtcatccgattggatagcggcgtacagcagatcaaacttcaaggcaatgaggtcgccaattttaatggaaatgacggcaaaaacgacactttcggcattgttagtgaagggagcttcatgcctgataccagcgagtggaaaaaagtattgctgccttggacggttcgtgctttcaatgatgacggtcgatttaacacagtcaacaaagaagaaaacaacagcaagccaaaatacagccaaaaataccgcatccgcgaaaacggcaacaatagcaagcgcgatttgggcgacatcgtcaacagccccatcgtggcggtcggcgggtatttggctacttccgccaacgacgggatggtgcatatcttcaaaaaaaacggcggcagtgatgaacgcagctacaatctgaagctcagttatatccccggcacgatgccgcgcaaggatattcaaagccaagactccacccttgccaaagagctgcgcgcctttgccgaaaaaggctatgtgggcgaccgctacggcgtggacggcggctttgtcttgcgcaaagtcgaacggaacgggaaagaccatgtgtttatgttcggcgcgatgggctttggcggcagaggcgcgtatgccttggatttgaccaaaatcgacagcaataacctgaccggcgtttccatgtttgatgtcccaaacgacaaaaataacaataagaatgacaataatcgcgtggaattaggctacaccgtcggcacaccgcaaatcggcaaaacccacgacggcaaatacgccgctttcctcgcctccggttatgcgactaaaaccattgacgaccaacaaaataaaaccgcgctgtatgtgtatgatttggaaagcagcggtacgctgattaaaaaaatcgatgtacccggcggcaagggcgggctttcgtcccccacgctggtggataaagatttggacggcacggtcgatatcgcctatgccggcgatcgcggcgggaatatgtaccgctttgatttgagcagtcaaagtcctgatcaatggactgtacgccctatttttgaaggcacaaaaccgattacttccgcgcccgctatttcccaactgaaagacaaacgcgtggtcatcttcggcacgggcagcgatttgagtgaagaggatgttgataatacggacgaacaatatatttacggtatcttcgacgacgatacggcgacgacgggttctgtaaacttcagcggttcgggaggcgggctgctcgagcaggtgcttgagcagaaggataaaaccttattcctgaccgattacaagcgatccgacggatcgggcaataagggctgggtagtgaaattgaaggacggacagcgcgttaccgtcaaaccgaccgtggtattgcgtaccgcctttgtaaccatccataaatatacgggtacggacaaatgcggcgcggaaaccgccattttgggcatcaataccgccgacggcggcaagctgaccaagaaaagcgcgcgcccgattgtgccggaagccaatacggctgtcgcgcaatattccggccataagaaaggcaccaacggcaaatccatccctataggttgtatgcaaaaaggcaatgaaatcgtctgcccgaacggatatgtttacgacaaaccggttaatgtgcgttatctggatgaaaagaaaacagacggattttcaacaacggcagacggcgatgcgggcggcagcggtatagaccccgccggcaagcgttccggcaaaaacaaccgctgcttctcccaaaaaggggtgcgcaccctgctgatgaacgatttggacagcttggacattaccggcccgacgtgcggtatgaaacgaatcagctggcgtgaagtcttcttctga

SEQ ID NO: 63760 - DNA, 756 bp, Neisseria meningitidis
atgaagtttgcccggttactctttctctgtgcggtactcgccggcacccaagcggcggctgccgaaatggttcaaatcgaaagcggcagctaccgcccgctttatctgaaaaaagataccggcctgattaaagtcaaaccgttcaaactggataaatatcccgttaccaatgccgagtttgccgaatttgtcaacagccacccccaatggcaaaaaggcaggatcggttccaaacaggcagaacccgcttacctgaagcattggatgaaaaacggcagccgcagctatgcgccgaaggcgggcgaattaaaacaaccggtaaccaatgtttcctggtttgccgccaacgcctattgcgccgcacaaggcaaacgcctgccgaccattgacgaatgggaatttgccggacttgcttccgccacgcagaaaaacggctcaaacgaacccggctacaaccgcactattctcgactggtatgcggatggcggccggaaaggcctgcacgatgtcggcaaaggccgcccgaactacaggggcgtttatgatatgcacggtctgatttgggaatggacggaagatttcaacagcagcctgctttcttcctgcaatgccaacgcccaaatgttttgcagcggcgcatctgtcgggtcgagcgactcgtccaactatgccgccttcctccgctacggcatccgcaccagcctgcaatccaaatacgtcttgcacaacttgggcttccgttgcacaagccgataa

SEQ ID NO: 63761 - DNA, 2229 bp, Neisseria meningitidis
atgcgttctgctgttttatttatatatttctttctacttaatatattccttttccagccagccgttatccacatccaatctaactatattttatttatgtctatcgtatccgcaccgctccccgccctttccgccctcatcatcttcgcccattaccacggcattgccgccaatcctgccgatatacagcatgaattttgtacttccgcacagagcgatttaaatgaaacgcaatggctgttagccgccaaatctttgggattgaaggcaaaggtagtccgccagcctattaaacgtttggctatggcgactttacccgcattggtatggtgtgatgacggcaaccatttcattttggccaaaacagacggtgagggtgagcatgcccaatttttgatacaggatttggttacgaataagtctgcggtattgtcttttgccgaattttctaacagatattcgggcaaactgatattggttgcttcccgcgcttcggtattgggcagtttggaaaagtttgactttacctggtttattccggcggtaatcaaataccgccggttgttttttgaagtattggtggtgtcggtggtgttgcagctgtttgcgctgattacgcctctgtttttccaagtggtgatggacaaggtgctggtacatcggggattctctactttggatgtggtgtcggtggctttgttggtggtgtcgctgtttgagattgtgttgggcggtttgcggacgtatctgtttgcacatacgacttcacgtattgatgtggaattgggcgcgcgtttgttccggcatctgctttccctgcctttatcctatttcgagcacagacgagtgggtgatacggtggctcgggtgcgggaattggagcagattcgcaatttcctgaccggtcaggcgctgacttcggtgttggatttggcgttttcgtttatctttctggcggtgatgtggtattacagctccactctgacttgggtggtattggcttcgttgcctgcctatgcgttttggtcggcatttatcagtccgatactgcggacgcgtctgaacgataagttcgcgcgcaatgcagacaaccagtcgtttttagtagaaagcatcactgcggtgggtacggtaaaggcgatggcggtggagccgcagatgacgcagcgttgggacaatcagttggcggcttatgtggcttcgggatttcgggtaacgaagttggcggtggtcggccagcagggggtgcagctgattcagaagctggtgacggtggcgacgttgtggattggcgcacggctggtaattgagggcaagctgacggtggggcagctgattgcgtttaatatgctctcgggacaggtggcggcgcctgttatccgtttggcgcagttgtggcaggatttccagcaggtggggatttcggtggcgcgtttgggggatattctgaatgcgccgaccgagaatgcgtcttcgcatttggctttgcccgatatccggggggagattacgttcgaacatgtcgatttccgctataaggcggacggcaggctgattttgcaggatttgaacctgcggattcgggcgggggaagtgctggggattgtgggacgttcggggtcgggcaaatccacactcaccaaattggtgcagcgtctgtatgtaccggagcagggacgggtgttggtggacggcaacgatttggctttggccgctcctgcctggctgcggcggcaggtcggcgtggtcttgcaggagaatgtgctgctcaaccgcagcatacgcgacaatatcgcgctgacggatacgggtatgccgctggaacgcattatcgaagcagccaaactggcgggcgcacacgagtttattatggagctgccggaaggctacggcaccgtggtgggcgaacaaggggccggcttgtcgggcggacagcggcagcgtattgcgattgcccgcgcgttaatcaccaatccgcgcattctgatttttgacgaagccaccagcgcgctggattatgaaagtgaacgagcgattatgcagaacatgcaggccatttgcgccaaccggacggtgctgattatcgcccaccgtctgtccaccgttaaaacggcacaccggatcattgccatggataaaggcaggattgtggaagcgggaacacagcaggaattgctggcgaagccgaacggatattaccgctatctgtatgatttacagaacgggtag

SEQ ID NO: 63762 - DNA, 1134 bp, Neisseria meningitidis
atgtcatacagcacctttcccaaaaccaaaaacgacgcgctgaatgagccgatgtttttcggtcagccggttaatgtcgcccgttatgaccagcagaaatacgaggtatttgaaaaactgattgaaaaacaattgtcgtttttttggcggccggaagaaatcgacgtgtcgcgcgaccgtatcgactacgccaacctgccagaacacgaaaaacatattttcatcagcaatctgaaataccaaacactgctcgattccatccaagggcgcagtccgaatgttgctttgctgcctttggtttcgattcccgagttggaaacgtggattgaaacgtggagcttcagcgaaaccatccactcgcgcagctatacccacatcatccgcaatattgtgaatgatccgtcggtcgtgtttgatgatattgtcgaaaacgaatacattaccgcccgcgccgaagacattgcctgctattacgatgacttaatcgaatacacccagtattacaacctgttgggcgaaggggtgcacaatgtcggcggcaaacccgttaccgtgtctttgcgcgggttgaagaaaaaactctatctctgcctgatgtgcgtcaatgtgttggaagccatccgtttctacgtttcattcgcctgctcgtttgcttttgccgagcgcgagttgatggaaggcaacgccaaaatcatcaaactgattgcccgcgacgaagccctgcacctgaccggcacgcagcatatgcttaatctgatgcgttcgggtgtcgatgattctgaaatggcagaaattgccgccgagttgcaggacgaatgtttccaactcttcaaaaaagcggcggaacaggaaaaagagtgggcggcatatttgtttaaggacggttcgatgatcggtttgaacaaagaaatcttatcccaatacgtcgaatatattaccaatctgcgtatgcaggcggtggggctgccggccggatttgaaggcgcaaatcaaaacccgattccgtggattaatgcgtggctgtcgtccgacaacgtacaggtcgcgccgcaggaagtggaaatatcctcttatttgatcggtcagatagattctgaagtgaatacggatgatttgggcgattttgagttgtaa

SEQ ID NO: 63763 - DNA, 669 bp, Neisseria meningitidis
gtgcaggcggatttagcctacgccgccgaacgcattacccacgattatccgaaaccaaccggtgcaaacaacacaagcacagtaagcgattatttcagaaacatccgtgcgcattccatccaccctcgggtgtcggtcggctatgatttcggcggctggaggatagcggcagattatgccagttacagaaaatggaacaacaataaatattccgtcaacataaaaaaggggagagaaacccagcacaacagggaagaactgaagacggaaaatcaggaaaacggtacattccacgccgcttcttctctcggcttatccgccatttacgatttcaaactcaacgataaattcgataaattcaaaccctatatcggtgcgcgcgtcgcctacgggcacgttaaacatcaggttcattcggtggaaaccaaaaccacgattgttacctctaaaccaaatggaggccctgtcccaagttcggttaccaaacctccctatcaccaaagccacagtatcagcagcttgggtcttggtgtcatcgccggtgtcggtttcgacatcacgcccaagctgactttagacaccggataccgctaccacaactggggacgcttggaaaacacccgcttcaaaacccacgaagtctcattgggcgtgcgctaccacttctga

SEQ ID NO: 63764 - DNA, 633 bp, Neisseria meningitidis; identical to SEQ ID NO: 54940

SEQ ID NO: 63765 - DNA, 1773 bp, Neisseria meningitidis
atgattccatccgacttcattgacgagcttttagccaaaaccgatattgtcgatattatcgacgagcaggttccgctgaaaaaaggcggggcgaactatatggcgtgttgcccgttccacaaggaaaaaacgccgtcgttttcggtcagtccaaccaagcagttttaccattgtttcagttgcggggcgcatggttcggcgattggttttgtgatggagcatcaggggctgtcgtttccggaggctgtgcagtttcttgccgaccgtgtgggcatggttgtgcctaaagtgcgtgggcagaacgataatcccgaagtccgtgccgaacgtaagaaaaaaaagcagacgctggaagaaacgacggcggcggcggctgatttttacgcgcaacagctaaaattcaatccggcggcaaaagcttatttggacaagcgcggcttgagtgcagaagttatcgcgcattatggtttgggctacgcgcccgacggctggcagcctttggcgcaagtgttccaaccgtatccgaataccgcgttggtggatacggggatggtgattgacaatgaggggcggtattacgaccgcttccgccatcggattatgttccctatccgcaatccgcgcgggcaggtcatcggtttcggcggcagggtgctggacgactccaaacccaaatatctaaactctcccgatacacctttgtttgacaaagggaaaaacctttacggcttgtatgaggggcgtgccgctgtcaaggaagcggagcggattctggtggtcgaaggctatatggacgtggtcgcgctggcacagttcggcgtgggctacggtgtggcggccttgggcacggcaacaacagctgaacacgtcaaaatcctaatgcgtcaggcagacagtatttatttctgtttcgacggcgacagcgcggggcgaaaagcggcttggcgcgcgctggaaaacgcgttgccgcagttgaaagacgacaaatcgctgcattttttgttcctgcccgaggaacacgaccccgacagttacatccgtgcctacggcaaagcgcaatttgaagacgcgcttctgaatcaaagcaagcctttgtcggagtatttctgggaacacctttcagacggcattcatctcaatacgcaggaaggcaaggcggaattggtgaaaaccagttcgccgcttttggcgcagattaccgcgccggcattggcttatttgttaaaacaacggcttagcgaactggtcggcatcgaccccgacaacctcgcgcaactgctaggacaggaagcgccgaagcggcacgtcaaacaaaaaaactacaaactgcctccgatttccgtcaaacagcccgtcatgctgacgctggtacagcggcaaatccgcagcctcttgataaatccggattgggctgcatatatagacctgcccgattatctggcgttggacggtgatttcgcctgccttgccaatcttgccgaatcgattaaaaaccatgccgccgtacccgaaaccgctcaggttttagagtatatgcgcggctcgccttacgaagaaacgataacccgaatcttccattcaacgcaccaatcggaagaaatgaacagcagcagtgaagaagattgcgagaatttccaaatcggcatgaaaaaactgctcaatgagttaaaatacagccaaatcgaaacattaaaacaaaaaagcctgcaatccggcttaaatgaaagcgagaaaaaacttttgctgtcgttgctgaccgcaaaacaaaattga

SEQ ID NO: 63766 - DNA, 1197 bp, Neisseria meningitidis
atggcgaaaatcattacgccgctgtcggcaaatcaggttaaaaatgcgaagccgcgcgataagctgtataagttgtcggacggcggcgggttggctttgtggatctacccgacgggcgggcggagttggaagctgtcgtttgtgcaggatggaaggcagcagacaatttcgctggggcggtatcctgatttttcgctggccgatgcgcgggaatggcgggaggaggtgcgccgaaaacgggcgcacggggaaaatgtcgtcaataagaaggtgcgggcggattttgcttttgagaaggtggcgcgtgattggtttgtgcgttggtcgaagggtcggtctgaaaagtatgccggacaggttatgcggaattttgaacggtgggtttttccggctatcggcaatcttgatattcgtcaagtcaggacggcggatgtggtcggctgtctgcgtgtgatggaggcgcgcggtatcgttgatacgttgcgcaaaacgaaaaacagtctgaagatggtgtttgcgtttgcggtcggttcgggaatgatggaaatcaaccctgtcgcgcaaatcggttcgggtgtgtttgaacgggcgaaaacggggaatatggcggcgttgagtccgtctgaattgccgcgtctgattgattttttggagcagcgcaatgaatttgcggtttatgcgggcagggtgcgtatccatcctgtaacgcggctttgtatctattggctgctgttgacaatgacgcggattcaggaggcggcgttgatggagtggtcggagttggacggggaggtttggcgtatccccgccgaacggaaaaaggagcggcgggggcatgatgtgccgctgtcgcgggcgatgcagtgggtgttggatcaggcgcgggcgttgaatgtgaacgggcggtttgtgtttgaaagtgtgaattttcaagggcatatcaataaggaaagtccgcgcgtggcgatgcagcgggcggggctggatacgacggcgcacggtttgcgctcgcttgcgcgtacttatttgcgcgaggttctgaaggtggataatgatgtggcggaaaagctgcttgcccattcgttggggacgagaacgcaaacggcttacaaccgctcggagctttgggaggagcgtaaggatgcgctggaacggtgggggaatgatgttttgaggcttgccaaaaacggaaaatga

SEQ ID NO: 63767 - DNA, 915 bp, Neisseria meningitidis
atgacttggcgcagcctacttattcaaaacggcggcaaactatccttgcaacgccggcaactgctgattcaacaaaacggcgagtcccataccgtaccattagaagacatcgccgttatcatcatcgaaaatcgcgaaaccctgattaccgccccgctcctatcagccttagctgaacatggcgcaaccctgctgacctgcgacgagcagttcctgccctgcggacaatggctgccttatgcccaatatcaccgccaacttaaaatcctcaaactgcaactgaacataagcgaacccttaaaaaagcaactctggcaacatatcgtccgccaaaaaatcctgaaccaagcatttgtcgcagacgaaacaggcaatgatcttgcagccaaacggctgcgcactttggcatctgaagtccgttcaggcgatacaggaaaccgtgaagcccaagctgccgccctctactttcaagccctctttggagaaaaatttacccgtaatgacaacaacgccgtcaatgccgcattgaactacacctacgccgtactccgtgccgcagttgcacgcgccctgaccttatacggttggttacctgcattaggcttgtttcatagaagtgaactcaatccatttaatctcgccgatgactttatcgaacccttacgcccattggccgacctgaccgtgatacatttgtacgaacaaggctgtctgaaaactgaactgacgctcgacatcaaacaacacctcatcaaaatcctctactatcaaaccagcatcgaacggcaacatttcagcaccttggctgccatcgacaaaatgatttcgtcatttcaagccggcgtaaccgataaaaacgccaaacaactgaaactgcctgaaatcctaccattgaaagaataccaatatgagtga

SEQ ID NO: 63768 - DNA, 372 bp, Neisseria meningitidis; identical to SEQ ID NO: 36794

SEQ ID NO: 63769 - DNA, 780 bp, Neisseria meningitidis
atgaaaaccatcacagaaaccctaaatcttgccccgaaaggcaaaaacttcctgaccgccgattggcccgcgcccgccaatgtgaaaaccctgattaccacgcgcaacggcggcgtgagccaaggtgcgtatcagagtttgaacctcggtacgcacgtcggcgacaatcccgaagccgtgcgccgcaaccgcgaaatcgtgcaacagcaggtcggattgcccgttgcctacctcaatcaaatccacagcaccattgtcgtcaatgctgccgaagcattggacggcacgcccgatgcggacgcttccgtggacgacacgggcaaggccgcctgtgccgtgatgaccgcagactgtctgcccgttctattttgcgacagggcgggtacggcggttgccgccgcacacgcgggctggcgcggtttggcgggcggcgtattgcaaaacaccattgctgcgatgaaggttccgcctgtcgaaatgatggcgtatctcggccccgccatcagtgcggatgcgtttgaagtcggacaggatgtgtttgatgcgttctgcacgcccatgcccgaagccgccgccgcatttgaaggcataggcggcggcaaattccttgccgacctttacgcgctcgcccgcctgattctgaagcgtgaaggcgtgggcggcgtatatggcggcacgcattgtacggttttggaacgggacactttcttttcctaccgccgcgacggagcgacagggcgtatggcgagcctgatttggctggacggcaatgccgtctga

SEQ ID NO: 63770 - DNA, 777 bp, Neisseria meningitidis
atgcgcgcagtccccccgccccatatctccatcacaggcctaggttacctcggcctgccgctggcacaaaagttttaccaacacggcagccgcgtcgccgccataaaacgcagcctgacttcggacgacatcaacctgcccatacatctcgacaccttcgacctcggcagcaccgatgcctttcagacggcattgtggcggcaccacgccgacaaacccgtctggttcttcctgctaccgccctcctcgctgacgcattacgccgacaccgtcaaacaatgggcagaacttgcccgggcgtgcaacgtgcaacacctgattttcacaagcagcaccagcgtttacggcgatacagcgcgcgaatgcgacgaaaccgccacacccgatccgcaaaccgagtccgcccgccaaatcctcgccgccgaacaacacctgctcgacagcggcgttccgaacatcgacatcctgcggctgggcgggctttattgcgccgaacgccatcccgtcagccgccttgttcaaaagcaaaacatcccgggcggcaaccgccccatcaacatcgtccaccgtaatatcgccgtcgaaagcctgtttcagacggcatttaaccccggcggcaggcggctgaaaaacattatcgaaccgcgccacccgacacgacgcgaattctatacggaagaagccgccaaactcggcttgccggctcctgatttcgcacccgacgacagcatgggcaaaatcatccgtaccgtttgcgataacagcttaagcctgtaa

SEQ ID NO: 63771 - DNA, 1101 bp, Neisseria meningitidis
atggcaggcaacactttcggacaactcttcaccgttaccaccttcggcgaaagccacggcgcgggtttgggctgtatcatcgacggctgcccgcccggcttggaattaagcgaagcggatatccaatttgacctcgaccgacgcaaacccggcaccagccgccacgttacccaacgccgcgaagccgaccaagtcgaaatcctctccggcgtattcgaaggcaaaaccaccggcacgcccatcgccctcttaatccgcaataccgaccagcgcagcaaagactacggcaacatcgccaccagcttccgccccggccacgccgactatacctattggcacaaatacggcacgcgcgactaccggggcggcggcaggagttccgcccgcgaaaccgccgcccgcgttgccgccggagccgttgccaaaaaatggttgaaagaaaaattcggcacggaaatcaccgcctacgttacccaagtcggcgaaaaagaaatccggtttgaaggctgcgaacacatttcccaaaatcctttttttgccgccaaccatagccaaattgccgagctggaaaactatatggacagcgtgcgcaaatccttggattccgtcggcgcgaagctgcatattgaagccgccaacgtccccgtcggcttgggcgaacccgtattcgaccgcctcgatgccgaaatcgcctacgccatgatgggcatcaacgccgtcaaaggcgtggaaatcggcgcaggttttgacagcgtaacgcaacgcggcagcgaacacggcgacgaactgaccccgcaaggcttcctgtccaaccattcgggcggcatcctcggcggcatcagcaccgggcaagacatctgcgtcaatatcgccatcaaacccaccagctccatcgccaccccgcgccgcagtatcgacatcaacggcaaccccatcgaactcgccacgcacggcaggcacgacccctgcgtcggcttgcgcgccgcgccgattgccgaagctatgctcgccttggttttaatcgaccacgccctgcgccatcgtgcgcaaaatgcggatgttgccgtggatacgcccgatatcgcccgctcggacaagtaa

SEQ ID NO: 63772 - DNA, 2838 bp, Neisseria meningitidis
atgttagacaaatactcccccgccgaaatcgaatccaagcactatcaaaactgggaaagccaaggctatttccaacctgatatggatttgaccaaaccgtctttttccatccaactgccgccgcccaatgtaaccggcacgctgcacatgggccatgccttcaaccaaaccattatggacggtctgacccgctactaccgcatgaaaggctgcaacaccgcctggattccgggcaccgaccacgcgggcatcgccacgcaaatcgtggtcgagcgtcagcttgccgcgcaaaacgtgtcccgtcatgacttgggccgcgaaaaattcttggaaaaagtgtgggaatggaaagaagtgtccggcggcacgattacccaacaaatgcgccgcgtgggctgctctgccgactggacgcgcgagtatttcacgatggacgacgtgcgcgccgaaaccgtaaccgaagtgttcgtgcgcctgtttgagcaaggtttgatttaccgtggcaaacgcttggtgaactgggatccggttttgggtacggcagtatcggatttggaagtggaaagcgtggaagaacaaggctctatgtggcacatccgctatccgctggcggacaatcctgccgaagccgtgatcgtggcgaccacccgtcctgagacgctgctaggcgacgtggccgttgccgtcaatcccgaagacgaacgttacacccatttgatcggcaaagaattaatcctgccgctgaccggccgcaccattcccgtgattgccgacgaatacgttgaaaaagacttcggcacaggctgcgtgaaaatcacgcctgcgcacgacttcaacgactacgaagtcggcaaacgccacgacacgcgcctgattaatgtgttcgacttggaagccaaagtgctggcaaacgccgaagtgttcaacttcaaaggcgaagcgcaaccgggctttgccctgcctgaaaaatacgcaggtttggaccgctttgccgcgcgcaaacaaatggttgccgatttgcaggaacaaggcctgttggtcgaaatcaaaccgcacacactgatgacgccgaaaggcgaccgcacaggttcggtgattgagccgatgctgaccagccaatggtttgtcgctatgtccgccacgccgaacggcggcgagcctgacagcgaattcaaaggcttgagcctcgccgacaaagccaaaaaagccgtcgacagcggcgcggtacgctttatccccgaaaactgggtcaacacctacaaccaatggatgaacaatatccaagactggtgcatctcgcgccaactgtggtgggggcatcaaatccccgcgtggtacgacgaagcaggcaatgtgtacgtcgcccgcaatcaggcggaagccgaaaaacaagccggcaaaaccggtttgacccgcgaagaagacgtattggacacttggttctcctccgcgctcgtgccgttttccacgctcggctggccgtctgaaaccgaagaactcaaagccttcctgccgtccaacgtcttggttaccggctacgaaatcatcttcttctgggtggcgcgcatgattatgatgaccacccactttaccggcaaagtaccgtttaaagacgtgtacatccacggcatcgtgcgcgaccacgaaggcaaaaaaatgtccaaatccgaaggcaatgtcatcgatcccgtagatttgatcgacggcatcgacttggaaaaactgctggtaaaacgtaccaccggcctgcgcaaacccgaaaccgcgccgaaagtggaagaagccaccaaaaaactctttcctgaaggcatccccggtatgggcgcggacgcattgcgcttcactatggcgagctacgccagcctcggacgcagcgtcaacttcgacttcaaacgcgccgaaggctaccgcaacttctgcaacaaaatctggaacgccaccaacttcgtcttgatgaacaccgaaaaccaagactgcggctacggcgcaaccgccgccgaaccgcgcggctattccttccccgatatgtggattgtaggccgtctgaatcagaccatcgagcaggttacgcaagcctacgaaacctaccgctttgatttggcggcggaaaccctgtacagcttcgtatggaacgactattgcgactggtatttggaactcgccaaagtgcagcttcaaaccggctgcgccagccgccagcgcgccacacgccataccttgttgcgcgtactcgaagccgccctgcgcctgctgcatccgattatccccttcatcaccgaagaactgtggcaaaccgtcgcccctatgtgcgacgcgaaaaccgccgacagcattatgctcgcccacttccccgaagccgacggcggcgagattgttcagacggcattcgggcaaatgaccgtgttgcaggatttgattggcgccgtccgcaacctgcgcggcgaaatgggcatccagcctaatgtcaaagccccgctgtttgtcgaaagcgcggacgacttggcggactacctcaaatacctgccgatgatgacccgcctgaccgaagcacggcaagtcgccgccctgcccgaaagcggagacgcgcccgtcgccgtctgcaacggcgcgcgcctgatgttgaaagtcgaaatcgacaaagccgccgaaaccgcccgtttgagcaaagaagccgagaagctgcaaaaagccttggacaaactcaacgccaaactctccaaacccggctacaccgaaaaagcccctgcgcatctggtggaaaaagacaaagccgatttggcggaattggaagacaaaatggcaaaagttcaaaatcagttggcgaagttgaaagactga

SEQ ID NO: 63773 - DNA, 312 bp, Neisseria meningitidis
atgaacctagaaaattatgaaaacattttaataaaattactttttcatcataacaacttagtaaatgaatattcttattttattgaaaataaaaatttatttaaaatagtatctcgaactaaaacgagtaagggcttttttttcactatagaaaaaccattaaattttctaagcaaacaaacttattttgagtttaattttaaatatttacactcaaggaaagaacgctttggttcgtttatgtgctggataaatactaatttaatggaatttgagggtttttttttaacgacctgctccctgataatatga

SEQ ID NO: 63774 - DNA, 2121 bp, Neisseria meningitidis
atgcgccgttttctaccgatcgcagccatatgcgccgtcgtcctgttgtacggactgacggcggcaaccggcagcaccagttcgctggcggattatttctggtggattgttgcgttcagcgcaatgctgctgctggtgttgtccgccgttttggcacgttatgtcatattgctgttgaaagacaggcgcgacggcgtattcggttcgcagattgccaaacgcctttctgggatgtttacgctggttgccgtactgcccagcgtgtttctgttcggcgtttccgcacagtttatcaacggcacgattaattcgtggttcggcaacgatacccacgaggcgcttgaacgcagcctcaatttgagcaagtccgcattgaatttggcggcagacaacgccctcggcaacgccgtccccgtgcagatagacctcatcggcgcggcttccctgcccggggatatgggcagggtgctggaacattacgccggcagcggttttgcccagcttgccctgtacaatgccgcaagcggcaaaatcgaaaaaagcatcaacccgcacaagctcgatcagccgtttccaggtaaggcgcgttgggaaaaaatccaacaggcgggttcggtcagggatttggaaagcataggcggcgtattgtacgcgcagggctggctgtcggcgggtacgcacaacgggcgcgattacgccttgtttttccgtcagccggttcccaaaggcgtggcagaggatgccgtcttaatcgaaaaggcaagggcgaaatatgctgagttgagttacagcaaaaaaggtttgcagacctttttcctggcaaccctgctgattgcctcgctgctgtcgatttttcttgcactggtcatggcactgtatttcgcccgccgtttcgtcgaacccgtcctatcgcttgccgagggggcgaaggcggtggcgcaaggcgatttcagccagacgcgccccgtgttgcgcaacgacgagttcggacgcttgaccaagttgttcaaccacatgaccgagcagctttccatcgccaaagaagcagacgagcgcaacaggaagcgcgaagaagccgccaggcattatcttgaatgcgtgctggaggggctgaccacgggcgtggtggtgtttgacgaacaaggctgtctgaaaaccttcaacaaagcggcggaacagattttggggatgccgcttacccccctgtggggcagcagccggcacggttggcacggcgtttcggcgcagcagtccctgcttgccgaagtgtttgccgccatcggggcggcggcaggtacggacaaaccggtccatgtgaaatatgccgcgccggacgatgccaaaatcctgctgggcaaggcaaccgtcctgcccgaagacaacggcaacggcgtggtaatggtgattgacgacatcaccgttttgatacacgcgcaaaaagaagccgcgtggggcgaagtggcgaagcggctggcacacgaaatccgcaatccgctcacgcccatccagctttccgccgaacggctggcgtggaaattgggcgggaagctggatgagcaggatgcgcaaatcctgacgcgttcgaccgacaccatcgtcaaacaggtggcggcattgaaggaaatggtcgaagcattccgcaattatgcgcgttccccttcgctcaaattggaaaatcaggatttgaacgccttaatcggcgatgtgttggcattgtatgaagccggtccgtgccggtttgcggcggagcttgccggcgaaccgctgatggtggcggcggatacgaccgccatgcggcaggtgctgcacaatattttcaaaaatgccgccgaagcggcggaagaagccgatgtacccgaagtcagggtaaaatcggaagcggggcaggacggtcggattgtcctgacggtttgcgacaacggcaaagggttcggcagggaaatgctgcacaacgccttcgagccgtatgtaacggacaaaccggcgggaacgggattgggtctgcctgtggtgaaaaaaatcattgaagaacacggcggccgcatcagcctgagcaatcaggatgcgggtggcgcgtgtgtcagaatcatcttgccaaaaacggtaaaaacttatgcgtag

SEQ ID NO: 63775 - DNA, 1338 bp, Neisseria meningitidis
atgagtaaccatacttcttggtcgtccaaaatcggtttcgtgcttgctgcggcgggttcggccatcggtttgggcgcgatttggaaattcccttatacggcgggcaccaacggcggcgcggtgtttttcctgctgtttttgatatttactatcttggtcgccctgcccgttcagcttgccgaattttatatcgggcgcacgggcggtaaaaatgccgtcgattccttcagggctctgcgtccgggtacgcaatggctttgggtcgggcgcatgggcgttgccgcctgctttattttgctgtcgttttacagcgtggtcggcggatgggtattgaattatgtcgtccacagttttacaggggcaatccatgcgggagcggactttgaagccctgttcggcacaacgatttccaatccggcaggttcgctgtcctatcaggcactgtttatgctgattacggtttgggtggtcaaaggcgggatttcagacggcatcgaaaaggcaaaccgttatctgatgccggggctgtttatcctctttattgcgctggcaatccgttcgctgacgctgccgggtgcaatggagggcgtgtctttcctgctcaaaccgaattggtcgtactttaaagccgatacgatgattacggctttaggccaggcgttttttgccctgagcatcggcgtttccgccatgattacctacgcttcatatttgggaaaagatcaggatatgttccgctcggggcatacgattatgtggatgaacctcttggtttcgctgttggcaggtttggtgatttttccggcggtgttcgccttcggttttgaaccgagccaggggccgggattgatttttatcgtattgccggcggtgtttatgaaaatgccgttcggtacggttttgtttgcggtatttatgctgctggtcgttttcgccacgctgacttcggcattttcgatgttggaaacggtcatcgccgcaaccatccgccaagacgagcgcaaacgcaaaaaacacacttggcttatcggcacggccattttcattgtcggcatcccatccgcgctgtctttcggcgtatggggtgagtttaaggttttcggcaaaaccatttttgatttgtgggactatgttatttccgccgtcattatgcctgtcggcgcgttgggcgttgccgtatttaccgcctggattcaggacaagcagtctgtgttaaaagatgccggcgcgggcagcaccgtaccacgggcagtgctgctgctgtggctgaataccttgcgctaccttgccccgattgccattattattgttttcgtcaattctttggacatcctttaa

SEQ ID NO: 63776 - DNA, 318 bp, Neisseria meningitidis; identical to SEQ ID NO: 39936

SEQ ID NO: 63777 - DNA, 681 bp, Neisseria meningitidis; identical to SEQ ID NO: 43758

SEQ ID NO: 63778 - DNA, 384 bp, Neisseria meningitidis; identical to SEQ ID NO: 38324

SEQ ID NO: 63779 - DNA, 2064 bp, Neisseria meningitidis
atgatgacccaaacccttttaatcgaactccttaccgaagaactcccgcccaaagccctgaataatctgggcaaccattttgccgccgccgttgccgaaggcttggaaaaagcgcaactggttgacggtgcagccgaatttacggcttatgcctcgccgcgccgtttggcggttcaagtcaaaaacgtcaaagccgttcaggccgaccaaaaaatcgtgaaaaaaggccctgccgtggcgaatgccgtaaaagacggtgcgccgaccaaggctttggaaggtttcgcacgcggtgcaggggcgaaaatcgaagacctgaccatcatcaatgacggcaagcaagacgtgtacgcctacgaatacgtccaaaccggcaaaccattgggtgagcttttggaagacatcatcaatgccgcagtgaaaaaattgccgattcctaaagtcatgcgttggggcagcagcacatttaccttcgtgcgccccgtccacgggctgatcgtgctgcacggcggcgacatcgtaaacgtcagcgttttgggtctgcaaagcggcaatcaaacattgggtcaccgcttcctgtccggcggcgaaattgccattgaaaacgccgacagctacgccgcacaaatgcgcgggcaaggcaaagtcgtcgcttcgtttgccgaacgcaaagccgccattcagacggccttgaacgagcaggcaggccgtctgaacgcgaccgttgccgccgatgaagcattgttggacgaagtgaccgcattggtcgaatggcctgtggtattggaagccggttttgaagaacacttcctcgccgtaccgcaagaatgcttgattctgaccatgcagcaaaaccaaaaatacttcccgctgctcgaccgaaacggcaagctgatgaaccgcttcctgctggtttccaacctgcaaaccgaagacccatcacacatcatccaaggcaacgaacgcgttttgcgcgcgcgcctgtctgatgccgagttcttctacaaacaagaccaaaaagcgactttggaaagccgcctgcccaaactggcaaacgtggtgtatcacaacaaaatcggttcgcaagccgagcgtatcgaacgcctgcaaagcatcgccgcccacatcgccaaagctttgggcgcggatgccgccgcagccgaacgcgccgcgcgtttggcgaaagccgacttggttaccgaaatggtcggcgagttccccgaactgcaaggcacgatgggcaaatactatgcccgtttggatggcgaaaccgaagaaattgccgaagccgtcgagcaacattaccaaccgcgttttgccggcgacaacttgccgaacggcaaagtcgccactgccgttgcacttgccgacaagctggaaaccctggtcggcatttggggcatcggtttgattccgaccggcgacaaagacccatacgccctgcgccgcgccgcattgggtattttgcggatgctgatgcagtacggtttggacgtgaacgagctgattcagacggcattcgacagcttccccaaaggcttgctcaacgagcaaacgccgtctgaaaccgccgactttatgcaggcgcgccttgccgtgttgctgcaaaacgattatccgcaagacatcgttgccgccgtattggcgaaacagccgcgccgtttggacgacgtagtggcgaaactgcaagccgttgccgcgttcaaacaactgcccgaagccgccgcgctcgccgccgccaacaaacgcgtgcaaaatctgctgaaaaaagccgatgccgagttgggcgcggttaacgaaagcctgctgcaacaggacgaagaaaaagccctctttgccgccgcgcaaggtttgcagccgaaaatcgccgccgccgttgccgaaggcaatttccaaaccgccttgtccgaactggcttccgtcaagccgcaagtcgatgccttctttgacggcgtgatggtgatggcggacgatgccgccgtgaagcaaaaccgtttgaatctgctgaaccgtttggcagagcagatgaacgcggtagccgacattgcgcttttgggcgagtaa

SEQ ID NO: 63780 - DNA, 438 bp, Neisseria meningitidis
atgaaccaaaccgtttacctttacaccgacggcgcgtgcaaaggcaatcccggcgcgggcggctggggcgtgttgatgcgctacggcagccacgaaaaagaacttttcggcggcgaagcgcaaaccaccaacaaccgcatggagctgaccgccgtcatcgaaggactgaaatcgctcaaacgccgctgcaccgtcatcatctgcaccgactcgcaatacgtcaaaaacggcatggaaaactggatacacggttggaagcgcaacggctggaaaaccgccgccaaacagcccgtcaaaaacgacgacttatggaaagaactcgacgctctggtcggacggcatcaagtcagctggacttgggtgaaaggacacgcgggacacgccgaaaacgaacacgccgacgatttggcaaaccgtggcgcagcgcagttttcctga

SEQ ID NO: 63781 - DNA, 198 bp, Neisseria meningitidis; identical to SEQ ID NO: 61508

SEQ ID NO: 63782 - DNA, 756 bp, Neisseria meningitidis; identical to SEQ ID NO: 45394

SEQ ID NO: 63783 - DNA, 1041 bp, Neisseria meningitidis
atgaacacacccatccccttctccgaacggctcatccgctggcaaaaacaacacggtcgccaccacctcccttggcaggtcaaaaacccttattgcgtctggctttccgaaatcatgctccagcaaacgcaggtcgccaccgtgttggactactatccgcgtttcttagaaaaattcccgactgttcaaatacttgccgccgcgccgcaagacgaggttttatccttgtgggcaggcttgggctattacagccgcgcgcgcaatctgcacaaagccgcgcaacaagtcgtcggacaattcggcggcacgtttccgtcggagcgtaaagacttggaaaccctctgcggcgtaggcagaagcaccgccgccgccatttgcgcctttgccttcaaccgccgcgagaccattttggacggcaacgtcaaacgcgtactctgccgtgtctttgcccaagacggcaatccgcaagacaaaaaatttgaaaacgcgctctggacacttgccgaaagcctgctgccgtctgaaaacgccgatatgcctgcctatacacaaggtttgatggatttgggcgcgaccgtgtgcaaacggacgaaacccttgtgccaccaatgcccgatggcggacatctgcgaagcgaaaaagcaaaaccgcaccgccgagctgccgcgcaaaaaaaccgccgccgaagtaccgaccctgccgctttactggctgattgtccgcaaccgggacggcgcgattttgctggaaaaacgccccgccaaaggcatttggggcgggctgtattgcgtgccgtgttttgaaagtttgaacgggctttccgactttgccgccaaattctccctgaccatggcagatatggacgaacaaaccgccctgacccaccgtctgacgcaccggctgctgatgattacgccgtttgaaggacaaatgccgtctgaaagcccttcagacggcatttggataaagccggcgcatttgaaagattacggcctgcccaagcctttggaaatttatttaaacggtaataggttagaataa

SEQ ID NO: 63784 - DNA, 195 bp, Neisseria meningitidis; identical to SEQ ID NO: 39733

SEQ ID NO: 63785 - DNA, 849 bp, Neisseria meningitidis; identical to SEQ ID NO: 37505

SEQ ID NO: 63786 - DNA, 171 bp, Neisseria meningitidis; identical to SEQ ID NO: 39149

SEQ ID NO: 63787 - DNA, 1389 bp, Neisseria meningitidis
atgtctattaaatttgccgatttgaacctcgataaaaacattttgtccgccgtcagcagcgagggttacgaaagcccgacgccgattcaggcgcaggcgattccgtttgctttggaaggccgcgacatcatggcttcggcgcaaaccggctccggcaaaaccgccgcctttctgttaccgactttgcagcgactgaccaaacgcagcgaaaaaccgggcaaaggcccgcgtgctttggtgttgaccccgacccgcgaattggcggctcaagtcgagaaaaacgcgctggcgtatgccaaaaatatgcgttggttccgtaccgtcagcatcgtcggcggcgcatcgttcggctaccaaacccgcgccctgagcaaaccggtcgatctgattgtcgccacgccgggccgcctgatggacttgatgcaaagcggcaaagtcgattttgaacgtttggaagtgctgattctggacgaagccgaccgtatgttggatatgggctttatcgacgacatcgaaaccatcgtggaagcaacgccgagcgaccgtcagactttattgttctccgccacttgggacggcgcggtcggcaaactggcacgcaaactgaccaaagaccctgaaatcatcgaagtcgaacgcgtggacgaccaaggcaaaatcgaagaacaactgctgtactgcgacgatatgcgccacaaaaaccgcctgctcgaccacatcctgcgtgatgccaacatcgaccaatgcgtgattttcacgtccaccaaagccatgaccgaagtcatcgcggatgaattgtacgaaaaaggtttcgccgccaactgcctgcacggcgatatgccgcaaggctggcgcaaccgcacgctgatggacttgcgcaaaggccgctgcaaaattttggttgccaccgatgtagccgcacgcggtatcgacgtaccgaccattacccacgttatcaactacgacctgccgaaacaggcggaagactacgtccaccgcatcgggcgcaccggccgcgcaggccgcacgggtattgcgattacgtttgccgaagtgaacgaatacgtcaaagtccacaaaatcgaaaaatacattaaccgaaaactgcccgaactgaccatcgagggcatggaaccgacccgcaaacgcaaatccgcaggcggcaagccgaaaggcaaaggcggctggggcgatcgtaaatccggcggttggcgcggcgatcataaaccgggcaaagaaggcttcggcggcaaaacgcgcggcgaaggtttcaagaaagaaggctttaagaaagacggtttcaaaaaaaccggcgaaggcttcaaaggcaaacgtaaagccggcgattcttttgcaggcaaaggcgaacgccgttacaaagaccgctaa

SEQ ID NO: 63788 - DNA, 2262 bp, Neisseria meningitidis
atgttacaaatcgaaatcgacggcaaacaagtatctgtggagcagggcgcgacggtaattgaagccgcgcacaagctcggtacttatattccgcatttctgttaccacaaaaaactttccatcgccgccaactgccgtatgtgtctggtgaacgtagaaaaagccccaaaacccctgcctgcctgtgccacgccggttacagacggcatgattgtgcgtacgcattcggcaaaagcccgagaggcgcaggaaggcgtgatggagttcctgctcatcaaccatccgcttgattgtccgacctgcgaccaaggcggcgaatgccagttgcaggatttggcggtgggctacggaaaaaccaccagccgctacaccgaagaaaaacgttccgtcgtcggcaaagacatggggcctttggtttccgccgaggaaatgagccgctgtatccactgcacccgctgcgttcgtttcactgaagaaatcgccggtttgcaggaaattgcgatggtgaatcgcggcgaacactccgaaatcatgccctttatcggcaaaacggtggaaaccgagctgtcgggcaacgtcatcgatttgtgtcctgtcggcgcattgaccagcaaaccgttccgcttcaacgcgcgtacttgggaattgaaccgccgtaaatccgtttccgctcatgacgctttgggcagcaacctgattgtacaaaccaaagaccataccgtccgccgcgtgttgccgctggaaaacgaagccatcaacgaatgctggctgtccgaccgcgaccgttttgcctatgaaggcctgtatcacgaaagccgtttgaaaaacccgaaaatcaaacagggcggcgagtggatggacgtggattggaaaaccgcgttggaatatgtccacagcgcaattaaatgtatcgccaaagacggcaaccaaaatcaagtcggcgtttgggccaatccgatgaatacggttgaagagctgtatttggccaaaaagcttgccgacggcttgggtgttaaaaactttgccacccgtctgcgccaacaagacaaacgtctttcagacggccttaaaggtgcgcaatggttgggacaaagcattgaatcgctggcggacaacgatgccgtattggtagtcggtgcgaacctgcgcaaagaacagccgcttctgaccgcccgcctgcgccgcgccgctaaagaccgcatggctttgagcgtattggcaagcagtaaagaagaattgtttatgccgcttctgtctcaagaagccgtacatcccgacgagtgggcaggtcgtctgaaaaacctgtctgccgatgcggaacacgccgttaccgccagcctgaaaaacgctgaaaaagcagcggtgattttgggcgcggaagtgcaaaaccatcctgattacgccgccatttatgccgccgcgcaagagctggcggacgcgaccggcgcagtgctgggtattttgccgcaagccgccaacagtgttggtgcggatgtcttgaatgtaaactccggcgagagcgttgccgaaatggcaaacgcgccgaaacaggcagtcttgttgctcaacgtcgagccggaaattgatacggttgacggtgcaaaagccgtagccgcgttgaaacaggcaaaaagcgtgatggcgtttacgccgtttgtcagcgaaacgctgctggacgtgtgcgacgtgttgttgccgattgcaccgtttaccgaaacctcaggcagcttcatcaatatggaaggccgtctgcaatctttccacggcgtggtacaaggcttcggcgattcgcgtccgatgtggaaagtattgcgcgtattgggcaatctgtttgacctgaaaggttttgaatatcacgataccgctgcgattctgaaagacgcgctggatgcagaaagcctgccgtccaaactggacaaccgtagcacatggacaggggagggcgttcagacggcctcagaccgccttgtccgtgtcggcggcgtcggtatttatcacactgattctatcgtgcgccgttccgcaccgttgcaagaaaccagccatgccgccgtgcctgccgcgcgtgtaaatccgaacactttggcacgcttgggcctgcaagacggacaaattgctgtcgccaaacaaaacggcgcaagcgtatcggttgccgtcaaagccgatgccggtttgcctgaaaacgtggtgcatctgccgctgcataccgaaaatgccgcgctgggtgcgttgatggacactattgaactggcgggagcttga

SEQ ID NO: 63789 - DNA, 468 bp, Neisseria meningitidis; identical to SEQ ID NO: 42615

SEQ ID NO: 63790 - DNA, 819 bp, Neisseria meningitidis
atgaaaaaagaccatttaaacacaaccggtttcgacctctggcacaccatccgcgaagaaaccgcggccgcggtctccgccgaaccgatgctggcaagttttttgcaccaaaccgtgttgcgccacgagtccctcggctccgtccttgcctaccacctttccagcaaactcggcagcccgattatggacgtgcgcgcgctgtttgaaatctaccagcaggcgttgggcagcgacacccaaatcggcaaatgcgtcgaagcagacttaaaagccatctacgaacgcgatcccgcctgcgacgaatattcgctgccgcttttatatttcaaaggcttccacgcgattcaggcacaccgcatcaaccaccggctgtatctcgacgggcgcaaaacgctggcgtatttcctgcaaaaccgtatgtccgaagtattcggcgtggacatccatcccgccgcccgtttcggatacgggctgatgctcgaccacgccaccggctttgttgccggcgaaaccgccgtgttgggcaacaatatttcgattttgcacggcgtaacgctcggcggttcgggcaaagaaggcggcgaccgccaccctaaaatcggcgacggcgtgatgatcggcgcaaacgcctcgatattgggcaatatccgcatcggcagcaatgccaaaatcggggcgggcagcgtcgtggtttcagacgtgccgccgtccatcacggttgtcggcgtacccgccaaacccgtggcgcgatcgctcaaaacaccgtcggcggatatggatcaaaatatccagtttgccgaaatcgactttatgatttga

SEQ ID NO: 63791 - DNA, 927 bp, Neisseria meningitidis
atgtcagaaatgaaaaaaaccaaagtccacctaatttcaggttttctgggaacaggcaaaaccactgcgctcaaaagcctgatggcgcaaaaagacccgaacgaaaaatgggtcatcatcgtcaacgagttcggcgaaatcggcattgacggcgcggtattgagcgacaacggtatccctgtggcagaaatcgccggcggctgtttgtgttgcacctccggcccgcaaatgggcgtaaccgtgcagaaaatgctgcgcgatgccaagcccgaccgcctgatgattgaggcaagcggactggcgcacgccgccagtgttattgatgaactgaaaaccaaaccgctggacagccttctggaaatcggcgcagtctttaccgtcgtcgatccgcgccagttcatcaaccccgattacgtgcaacaggcgttgtataaagaccaaatcggcatctgcgacgtattggtcgccagcaaaaccgatttatgcacccccgaacagcttgccgaatttcacgacaaagccgcaaaactgttcccgcccaaggctaaagtggtcgaagttcaaaacgcacaactcgatatccaatggctcgatattcccgtcatcgaaaaatcacgctaccgcctcaaagccctgccggacaacacgatgggcttccagtcgcaaggtttcacattccccgccggacgcgatttcgacggcgaaaaattgaccaacttcttcaatgatttgcccaagatgaccgaaggactcgtccgcgccaaaggcgtgttccaagtattgggaacgtgggtgtggctcaactgggtagacgggcaatggggcgcgaaccaagtgtcttggcggcgcgattcgcgttttgaattgattgctaaatcgtttgatgcggatttaatcgaacaaaaacttaaagatgcattggaatag

SEQ ID NO: 63792 - DNA, 825 bp, Neisseria meningitidis
atgaactgcaatacgccgaccgatattatgttttcctttgaaggcttccgccgcaggggcggcattaccgaccaccatgccgacggtttcggcatcggctttttcgaaggcaaaggcgtgcgcctgttccatgacgacaaacccagtgccaattcgcccgtcgccgacctcgtgcgcgcctaccagattaaatcggaaaacgtcgtcgcccatatccgcaaagcatcacaaggacaaacctcgctggcgaacacccatccctttatgcgcgaaatgtggggcggctactggctgtttgcccacaacggacatttgattgatttttttcccgaacagggcgaatttttccaccccgtcggcacaaccgattccgaacgcgcgttctgccacatcctcaaccgcctgcgcacccgctttgccgcccgtcccgacgacgacacgctgtttgacgcgattgcggggctgacgcacgaaatccgcaagttcgggctgtttaactttatgctttcagacggcattgccctgtttgcccacgccagcacactgctgcactacatcgtccgccaagccccgttcggcaaggcgcgcctgctcgacgacgacgtgatggtcgattttgccgaagtaaccacgccctccgaccgcgtcgccgttatcgccaccctgccgctgacccgcgacgaatcatggtcccaacttgccgtggacgaactggtcatgttccgcgaaggcaacatcgtccgacacgaccgtcccgaaaaccccgtctatatgagtgccgaagaaggtctggaaatcgcccgcgccgccggcgtatcggtttga

SEQ ID NO: 63793 - DNA, 414 bp, Neisseria meningitidis
atgcaagttgaggtggtcagtagcgagcaaaacatctattcgggcgaagccagctttgtagtggttccgaccgttcaaggtgagcttggtatttacccgcgacacgagccgattatgagtttggtgcggccgggggctttgcgtttgaccgttccgggcgaggataaagaggttttggttgctgtttccggcggtgttttggaagtacagcctgataaagtaactgtcttggcggatgttgccgtccgcagtgcggagatggatcaggcacgtgcggaagaggcgaaaaaagccgcagaagcgggcatttcccaagctaaagacgataaggctttggcggaggcgcataaagcattggctgctgcgattgcacagctcaaaactttggactatatccgttcgcacaagaaataa

SEQ ID NO: 63794 - DNA, 333 bp, Neisseria meningitidis
atgtcccgatgttgtctgaagcggcttcagacggcatcggctgtttcggcgttctccggcggcgttttgggatgcggggtaaaactgtgctgccggcggctatccgtccttttcaatccgggcgtgatgctgtttgtgccggactgtcccgtcggcggcgcggccgggtttttccaatatgaaatgctttgcccgtttttctggcaggggcggttgcagaccggttcgaatcttgcttacgatgtttttatgtctgccggacgtttgaatggcgggcggaaccccccgcacagccgccgttttcttgccctgctttgctccgttgccttataa

SEQ ID NO: 63795 - DNA, 531 bp, Neisseria meningitidis; identical to SEQ ID NO: 39309

SEQ ID NO: 63796 - DNA, 1287 bp, Neisseria meningitidis
atgacggcacaacaccaggccccgctccgcttcattaccgccggcagcgtcgatgacggcaaaagcaccctgatcggacgactgctctacgacagcaaagccctgctgtccgaccaaatcaaaaccttggaatccggcaaaagcaaaggtttgaaagaagccatagacttctccatcctgaccgacggactggaagccgaacgcgaacagggcattacgatcgatgtggcataccgctatttttccacggcgaaacggaaattcatcatcgccgacacgccggggcacgaacaatacacgcgcaatatggttacgggcgcaagcaccgcttcggcggcagtcgtgctggttgacgcatcccaactggatttcggcgcgcagcccttgcagcttctgccgcagaccaaacgccattccgccatcctccgccaactcaactgcccgcatattgtggtggcggtcaacaaaatggacctgctggattacagcgaagacaaattcaacgccattgtggaggcataccgccggctcgccggacggctcggtttgaaagacgtgcatttcgtaccggtgtccgcactcttgggcgacaacctcgtttaccccggcggcaatatgccgtggtatcggggcgaaccgctgctggccatcttggaaaacctgccgggggcggacgaagtcagccgcaccgccgacgatttttatttccccgtccaactggtcgtccgccaagatgccgacaaggccgatgatttccgaggctatcaggggcgcatcgaacgcggttcggtcgccgtcgggcaaaccgtccgcatcgaaccgaacgggctgaccgccgaagtgtccgaaatcatcacgccgaaaggggaagtggcgcaggcttttgccggcgaggcggcaaccctccggctggaccgcgacatcgatgtttcgcgcggcgacctttttgtcgataaaaattccccgctcgccccgcaaaaacatctggaagccacgctttgctggtttgacgaacgtccgctcaacaccgcgcgcagatacctgctcaagcacggcacgcaaaccgtgccggcaaaagtcggggaaattgaaagcgttttggatgtccgcacgctggaacaagaggccggcgcggaatccttgaagatgaacgacatcgccaaagtccgcatcaaccttcaaaaacccgttacggcaacgccttatgcggaaaacaccgccgccggttcgtttatcctgatagacgaagcgacatacggcactgttgcggcaggtatgattttatga

SEQ ID NO: 63797 - DNA, 168 bp, Neisseria meningitidis; identical to SEQ ID NO: 37435

SEQ ID NO: 63798 - DNA, 729 bp, Neisseria meningitidis
atgcctgattacatccgcatctcgcgcgccgccgacagcctgcgcgatatcaaaatcacccctcatttcctgccgcacgccgacggttcgtgccttattgaatgcggcaataccaaagtgatttgtaccgcttccatagatgaaaacgtcccgccgtttctgcgcggtaaaaaccaaggctgggtaacggcggaatacgggatgctgcctgcctcaactgcttcccggatgcgccgcgaagcttcggcgggcaaacagtccgggcgcacacaagaaatccaacgccttatcgggcgttcgctgcgcgcggtcgtggatatggaaaaactcggcgaacgacaaatcttgattgactgcgatgtgattcaggcagacggcggtacgcgcacggcttcgattaccggtgcgtttgtcgcgctgcaaatcgccgtcggcaaactggtttcagacggcattttgagtgaaaaccccatccgcgaagccgttgccgctgtgtcagtaggcgtagtgaacggcgtgccgcttttggatttggattatcccgaagactccggttgcgacagtgatgtgaatatcgtcatgaccgcatcgggaaaaatcatcgaaatacaggggacggcggaagacgcgccgttcagtttggacgaattgggcaaactggttgcactggcgcaaaaaggcataggcgaactgctgcaacaccagcaaaatgcgttgtccgccgcctga

SEQ ID NO: 63799 - DNA, 276 bp, Neisseria meningitidis
atgaatgagggtgaagttgttttaacaccagaacaaatccaaaccttgcgtggttatgctttccgtggcgatacctatggcggttggcgttatttggctaatttgggtgaccgttatgcggatgatgctgctgcaattgtcggtaaggatgcaaacttaaatggtttgaatttatggatgaaaaaaggtgtggaaaacctatgggatgatacggtcggtaaaaagacccgtttaatgtgtatttctgttttttggattgtggttttcaatttatag

SEQ ID NO: 63800 - DNA, 1404 bp, Neisseria meningitidis; identical to SEQ ID NO: 44608

SEQ ID NO: 63801 - DNA, 417 bp, Neisseria meningitidis; identical to SEQ ID NO: 36952

SEQ ID NO: 63802 - DNA, 1311 bp, Neisseria meningitidis
atggacacttcaaaacaaacactgttggacgggatttttaagctgaaggcaaacggtacgacggtgcgtaccgagttgatggcgggtttgacaacttttttgacgatgtgctacatcgttatcgtcaaccctctgattttgggcgagaccggcatggatatgggggcggtattcgtcgctacctgtatcgcgtctgccatcggctgttttgttatgggttttgtcggcaactatccgattgcactcgcaccggggatggggctgaatgcctatttcacctttgccgtcgttaagggtatgggcgtgccttggcaggttgcgttgggtgcggtgttcatctccggtctgattttcatcctgttcagcttttttaaagtcagggaaatgctggtcaacgcactgcctatgggtttgaaaatgtcgattgctgccggtatcggtttgtttttggcactgatttccctgaaaggcgcaggcattatcgttgccaatccggcaaccttggtcggtttgggcgatattcatcagccgtccgcgttgttggcactgttcggttttgctatggtggtcgtattgggacatttccgcgttcaaggcgcaatcatcatcaccatcttgaccattaccgtcattgccagcctgatgggtttgaatgaatttcacggcatcatcggcgaagtaccgagcattgcgccgacttttatgcagatggattttgaaggcctgtttaccgtcagcatggtcagtgtgattttcgtcttcttcttggtcgatctatttgacagtaccggaacgctggtcggcatatcccaccgtgccgggctgctggtggacggtaagctgccccgcctgaaacgcgcactgcttgcagactctaccgccattgtggcaggtgcggctttgggtacttcttccaccacgccttatgtggaaagcgcggcgggcgtatcggcaggcggacggaccggcctgacggcggttaccgtcggcgtattgatgctcgcctgcctgatgttttcacctttggcgaaaagtgttcccgcttttgccaccgcgcccgccctgctttatgtcggcacgcagatgctccgcagtgcgagggatattgattgggacgatatgacggaagccgcacccgcattcctgaccattgtcttcatgccgtttacctattcgattgcagacggcatcgccttcggcttcatcagctatgccgtggttaaacttttatgccgccgcaccaaagacgttccgcctatggtatggattgttgccgtattgtgggcactgaaattctggtatttgggctga

SEQ ID NO: 63803 - DNA, 1719 bp, Neisseria meningitidis
atgaacctacatcaaaccgtcgaacacgaagccgccgccgcctttgccgccgcaggcatcgccgacagtcccgttgttttgcagccgaccaaaaatgccgaacacggcgatttccaaatcaacggcgtgatgggtgcggcgaaaaaagccaaacaaaacccgcgcgaactggcgcaaaaggtcgccgacgcattggcaggcaacgccgtcatcgaaagcgcggaagtcgccggcccgggcttcatcaacctgcgcctgcgccccgaatttctcgcgcaaaacattcagacggccttgaacgacgcgcgtttcggcgtggcaaaaaccgacaaaccgcaaaccgtcgttatcgactattcttcgcccaatctggcaaaagaaatgcacgtcggccacctgcgttccagcattatcggcgacagcatttcgcgcgtgttggcatttatgggcaacaccgtcatccgtcaaaaccacgtcggcgactggggtacccagtttggcatgttggtcgcttatttggtcgagcagcaaaaagacaatgccgcgtttgaactggcggatttggagcagttttaccgcgccgccaaagtgcgctttgacgaagatgccgcctttgccgacaccgcgcgtgaatacgttgtgaagctgcaaggcggcgatgaaaccgtgttagcgttgtggaaacagtttgttgatatttcgctctcgcacgcccaagccgtttatgacacgctgggcttgaaactgcgccccgaagatgtggcgggcgaatcgaaatacaacgacgatttgcagcctgtggtcgatgatttggttcaaaaaggtctggcggtcgaagacgacagcgcgaaagtcgtgttcttggacgagtttaaaaacaaagaaggcgaacccgccgcatttatcgtacaaaaacaaggcggcggcttcctttacgcctccaccgatttggcgtgtctgcgctaccgcgtcggcacgcttcatgccgaccgcctgctgtacgtcgtcgaccaccgtcaagccctgcactttgagcaactctttaccacttcccgcaaagcaggctatctgccggaaaacgtcggcgcagcatttgtcggcttcggcacgatgatgggcaaagacggcaaaccgttcaaaacacgcagcggcgacactgtaaaactggtcgatttgctgaccgaagccgtcgaacgcgccaccgctttggtgaaagagaaaaatcccgaattgggcgcggacgaagccgccaaaatcggcaaaaccgtcggcatcggcgcggtcaaatacgccgacttgagcaaaaaccgcaccagcgattatgtgttcgactgggacgccatgctctcgtttgaaggcaacaccgccccctatctgcaatacgcctacacccgcgtgcaaagcgtgttccgcaaagcaggcgaatgggatgcaaatgcgccaaccgttttgaccgaaccgctggaaaaacagcttgccgccgagctgctgaaatttgaagacgtactgcaaagcgtggcggacacggcgtatccgcactacctcgccgcctacctctatcaaattgcgaccctgttcagccgcttctacgaagcctgtccgatactcaaagccgaaggcgcaagccgcaacagccgcctgcaactggcaaaactcaccggcgacacgctgaaacaaggcttggatttgctgggcatcgatgtgttggacgtaatgtaa

SEQ ID NO: 63804 - DNA, 747 bp, Neisseria meningitidis
atgaaaagcagcacgcaggccgttttggaacacaccgccattcccaagcatatcgccgtgattatggacggcaacggccgttgggcgaaaaaacgtttcctcccgcgcataatgggacacaaacgcggtttggacgcgttggaaaatatggtgaagcattgcgccaaactgggtgtgcaatatctgaccgtgtttgccttttcaaccgaaaactggcgccgccccgaagacgaagtttcgttcctgatggggctgtttttacaggctttgcaaaaacaggtacgccgtctgcacgaaaacaatatgcgcctaaaaatactgggcagccgcgaacgcttcagccgtcaaatcctgaagggcatcgaagaagcggaggcgttgacggcaaacaataccggtctgaccctgagcattgccgccgactacggcggccgctgggatattttgcaggcggcaaacaaactgattgccgaaggcgtatccgagattacggaagacacgctggcgaaacacttgatgctgggcaatgcgccggaaccggatttgttcatccgcactggcggcgaaacgcgcatcagcaatttcctgctctggcagatggcatatgcagaactgtatttcaccgacatcctgtggcctgatttcgacgaaaccgccttagatgccgccgtcgcttcgttccaaaaacgcgaacggcggttcggacgcacctccgagcaactgcctatcgaacagcaaaggaactga

SEQ ID NO: 63805 - DNA, 945 bp, Neisseria meningitidis
gtgggcatcaatgccaatcctaactgtgctgatgaagcaggaaaactgatatgggaaaacgaccccaataaaaattggtgggctaaccgtatggatgatgttcgcggcatcgtccaaggtgcggttaatccttttttaatgggttttcaaggagtagggattggggcaattacagacagtgcagtaagcccggtcacagatacagccgcgcagcagactctacaaggtattaatcatttaggaaatttaagtcccgaagcacaacttgcggctgcaaccgcattacaagacagtgcttttgcggtaaaagacggtatccactctgccaaacaatgggctgatgcccatccgaatataactgcaacagcccaaactgcccttgccgcagcagaggccgcaggtacggtttggagaggtaaaaaagtaaaacttaacccgaccaaatgggattgggttaaaaataccggctatgaaacacctactgcccgccatatgcagactaaggcgttaggtacggtagatgaaattggcgatacagtacagcaggttgtgaaacagactagcggacaaaaaaccagcggtggtaatcctgcgattgatagcgacccttatagcccgagtagtgtggcagctcgcatagaagccggtaaggtgcgcagtgatttacaaatcaaagacattttgagcaatactactcaaaggagtaaaacaaaaggtcccgctgttcagtatgataaagtgggagattacaatgacgcactaaatgattttaatagtctaaatattcgaaatgtacaaacacgtcctaatggaacgataacgggcaatttgcctgatgggcgtgcggttaatgttcgtaatgatagtagtggtggagaaccaacacttgaaataacaattagtaataaccgaaaaataaaaatcggatatggaaatacacgataa

SEQ ID NO: 63806 - DNA, 459 bp, Neisseria meningitidis
atgagcaccttcttccggcaaaccgcccaagccatgattgccaaacacatcgaccgtttcccactattgaagttggaccaggtgattgattggcaaccgatcgaacaatacctgaaccgtcaaaaaacccgttacctccgagaccaccgcggtcgtcccgcctacccgctgttgtccatgttcaaagccgttctgctcggacaatggcacagcctctccaatcccgaactcgaacgtggtgttttggtttccagaaatttaatcagtgtggctagcggctctattttcgattcagaaaaggctgtttctatatcctcgtctgccatgttctggtttaattgcggtataattttgatgtccacattttcactgttgttgatatgctctattgccggtttaattattttggccttcaacgctctaaattcttcgtattctttgtcattcaatcccaaatag

SEQ ID NO: 63807 - DNA, 756 bp, Neisseria meningitidis
atgattaaaatccgcaatatccataagaccttcggcgaaaataccattttgcacggcatcgatttggatgtgtgcaaagggcaggtggtcgtcatcctcgggccttccggctcaggcaaaacgacgtttctgcgctgcctaaacgcgttggaaatgcccgaagacggacaaatcgagttcgacaacgagcgaccgctgaaaatcgatttttctaaaaaaccaagcaaacacgatattttggcactgcgccgcaaatcaggcatggtgtttcaacaatacaacctctttccgcacaaaaccgccttggaaaacgtgatggaaggaccggttgccgtacagggcaagcctgccgcccaagcgcgcgaagaggctctgaaactgctggaaaaagtcggcttgggcgacaaagtggatttgtatccctaccagctttccggcggtcagcagcagcgcgtcggcattgcccgagcattggcgattcagcccgagctgatgttgtttgacgaacccacttccgcgcttgaccccgagttggtgcaagacgtgttgaacgccatgaaagaattggcgcgggaaggttggacgatggtcgtcgttacccacgaaatcaagttcgcgctggaagttgccacgaccgttgtcgtgatggacggcggcgttatcgtagagcagggcagcccgaaagagttgttcgaccaccccaaacacgaacggacgcggagatttttaagccaaatccaatctaccaagatttga

SEQ ID NO: 63808 - DNA, 909 bp, Neisseria meningitidis
atgaacacgccccaatccgccatcattcccgaccacgcccaagccggcatctttatcgaagccgacttcgccgccaaccgcctcaacgatattaaagccgcctgccgcgcttcgctcgacgcgttatccgccttgaaaacccgctttccggacgatattttgggtctgaccatcgccttcggcagcaaagcctgggcaacattcggacatacggacgaaggcagtgaaatcaaacccttctccgaaatgggcaacgggcttgcgccgtccacgcagcacgatatgtccatccacatccaatctttccgccaaaacgccgcctacgcgcttgcccaatccgttttgggcgcgttcggcgacagcatatgcgtcgcgtccgaagaacacggtttgcgcctgtatcaggatcgcgggctggacggtttcgtcgacggcacggaaaacccgcagggcgatgaaaatgtccgcgaagtcgccatcatccccgaaggaaaacccgatgcgggcggcagctatgtcctgctgcaaaaatacctgcacgatttgaaaaaatgggatgccgtccccgtcgccgaacaggaggcctcggtcggacgcggcaaggaaaccgacgacgaattcggccgcgatgtccgcctgcccgattcgcacctcggccgcgtcaacctgaaagaaaacggagtcggcctgaaaatcgtccgccgcagcctgcccttcggcaaaatcagcggcgaacacggtttgatgtttaccgcatactgccgcacgctgcacaatatcgaagcgcaattattgagtatgttcggcgatacggacggcaaaaccgacctgctgctccgacatctctccgccgccgtttcgggcggatactactacgcgccgtctgtcgaacgcctgcaaaacctctaa

SEQ ID NO: 63809 - DNA, 279 bp, Neisseria meningitidis
atgtcccgaaacctgcttgtccgctggcttgtcgtctgcctgatacccttggcgacgcttgccgttttcgtcgccaatccgcccgaagacaaaccccagcatctgattaacggcatcatccttgcctgcgaagcgacgtttttgtttaaattcgtccttttcgacaccatcaagcatcatttgaaacaagagtttgatttgaaacgtcaaactatgttgctgtttattccgattattttgctgattgtgtatttgttccactattttggcgcgttttag

SEQ ID NO: 63810 - DNA, 300 bp, Neisseria meningitidis
atgcgacaaatttttgaaagcgtttgcaccgattttgaggcacaactagtggaatttgacggtgaaaatgaccatgttcttttgcttgtaaactatccacccaaagtatctatttcaaaactcgtgaacagcttgaaaggtgtatctagtcgtatgattaggcaaaaaaattatcccggtattcgtgagaaactttggggtggtgcgttgtggtcgccgtcttattttgcaggtagttgtgatggtgcatctatttccattattcgacaatatattgagcagcaaaatacgcctgactga

SEQ ID NO: 63811 - DNA, 1380 bp, Neisseria meningitidis
atgtttgctttcaaatccttactcgatatgccgcgcggtgaggcacttgccgtcgtcgtcgctctgattgccgcgatgggctataccatcatttcattggagtggctgccgcatatgtccattattgccgccatcgtcgtgctgattttgtacggcttggtgcgcggtttgaaatacaacgatatgcagcagggcatgataggcgcgttgaatcagggtatgggcgcgatttacctgtttttcttcatcgggctgatggtcagcgcgctgatgatgagcggcgcgattccgacgctgatgtattacggtttcgggctgatttccccgacttatttttatttttccgctttcgcgctgtgttccgtcatcggcgtgtccatcggcagcagcctgaccacctgcgccaccgtcggcgttgcctttatggggatggcggcggcgtttcatgccgatatggcgatgacggcgggcgcgattgtttcgggcgcattttttggcgacaaaatgtccccgctttccgacaccacgggcatttccgcgtccatcgtcggcatcgacttgtttgagcacatcaaaaatatgatgtacaccaccatccccgcgtggctcattagtgcggcactgatgctttggcttttgccgaatgtcgccgcgcaggatttgaacagcgtcgaatccttccgcagccagcttgaagccacgggattggtgcacggctattcgctgattccgtttgcactgttggtcgttttggcattgatgcgcgtcaatgccgtggtcgccatgctctttaccgtcattgccgccgttgccgtaacgtatctgcacagcacgcccgatctgcgtcagctcggcgcgtggttttacggcggttacaaactcgaaggcgaagcgtttaaagatgttgccaaactgatttcgcgcggcggtttggaaagtatgtttttcacgcaaaccatcgtgattctcgggatgagtttgggtggactgctgtttgcgctgggcgcgattccttccctgctggatgccgtccgcagctttttgacgaatgccggacgcgcgacgttcagtgttgccatgacttcggtcggggtcaatttcctgattggcgaacaatatttgagcatcctgctttcgggagaaacgttcaaacccgtttacgacaggctcggactacattcccgcaacctctcgcgtacgctcgaagacgcgggtacggtcatcaacccgcttgttccgtggagcgtgtgcggcgtatttatcagccacgcgctgggtgtgccggtgtgggaatatctgccgtatgcctttttctgctatttgagtttggcactgacgcttctgttcggctggacggggctgactttgagcaaaaaataa

SEQ ID NO: 63812 - DNA, 561 bp, Neisseria meningitidis
atgaaaacagcacaagaactgcgcgccggcaatgtatttatggtcggcaacgatcctatggtcgttcaaaaaaccgaatacatcaaaggcggccgctcttccgccaaagtcagcatgaaactgaaaaacctgctgaccggcgcggcttccgaaaccatttacaaagccgacgacaaattcgacgtggtcatcctgtcccgcaaaaactgtacgtacagctactttgccgacccgatgtacgtctttatggatgaagaattcaaccaatacgaaatcgaagccgacaacatcggcgacgcgttgaaattcatcgttgacggtatggaagaccaatgcgaagttaccttctacgaaggcaaccccatttctgtcgaactgcccaccatcatcgtgcgcgaagtcgagtacaccgagcctgccgtcaaaggcgacacttccggcaaagtgatgaaaaccgcgcgcctggtcggcggcaccgaaatccaagtgatgtcttacatcgaaaacggcgacaaagtcgaaatcgatacccgcaccggcgaattccgcaaacgcgcttga

SEQ ID NO: 63813 - DNA, 1125 bp, Neisseria meningitidis
atgcagaatacttcctttgataatgaatccgattatagcgacgattcagactttgcgtcagcttccgaaactgaaaaccgtatcggtctgaccgttccgctcgagcttgccggcgggcggttggatgcggtgttggcgaaacttctgcccgactactcgcgcagccgcctgacatcatggattaaagaaggcgcggttattgtaaacgataaaccttcgcaacccaaagacaaaatgataggcggcgagcaaatttgtgtaaccgtccgtccgagtgaggaaaatctggcgtttgttccagagcctatggctttggatatcgtttacgaagacgataccgtcatcgtcgtcaacaaaccggccggactggtggtgcatccggcggcgggcaactggacggggacgctgctcaacggcctgttggcgcattgccccgagctgtcccaaattccgcgcgcgggcatcgtacaccgtttggacaaagaaaccagcgggctgatggtggttgccaaaaccctgtcggcgcaaaattccctcgtgaggcagcttcaagagcgcacggtcaaacgcatttaccgcgccgtcgccaacggcatcgttccctttgacggtaaaatcgaaacccaaatcggacgcgatccgcacaaccgcctgaaaatggcagtcgtcaaattcggcggcaaaccagccgttacccacgtcaaagtgttggaacgctatcttgcccacagctatatcgaatgctcgctcgaaacaggcaggacgcaccaaatccgcgtccatatgcgtgaggccaaccatccgcttgccggcgacccggtttacggcaacccgcgccatccgtgcggcgacacggtgaaagaagccgttaaaagtttgggtgcgcgtcaggcattgcacgcctaccgcttaagtttcactcatccgaaaaccggagaaaccgtttcgtttgaagcaccgattccaaacgacatatatcatttattgtctgtcctccgtcttgaagccggtttggattcgtctttgagcaatgaagaggaatggcaggacaaattcggcgcggacgacgatgacgattggaacgaagacgactacgatgtcgaagtggtttatgtaagggagtga

SEQ ID NO: 63814 - DNA, 696 bp, Neisseria meningitidis
atgagtgagttgattttgaaatgcgaaggcgtgggcaaacgctatcgggacggcggtttggatgttccggtgctgcacggcttggatttggaaatccgcgcgggggaaagcaccggcatcatcggctcttcgggcagcggcaaatcgaccctgctgcatattttaggcgggctggatatgccgtctgaaggcagggtgctgctgatgggcgaggatttgcgtgccttaaaccagcggcgtttgggcgatttgcgcaaccgccatctcggtttcgtgtaccagttccaccatcttctgcctgaattctcggcactggaaaacgtgatgatgcctttgctgatcggcaaaaaaagccgggaagaggctgcggaggcggcaatggcgatgctcgagaaggtcggactgaaacaccgttcgagacaccgcgcgggcgaactgtccggcggcgaacgccagcgtgccgccattgcgcgcgccttggttacgcaaccaaaatgcctgcttgccgacgaaccgaccggcaacctcgaccgtgcgaacgccaggaatgttttggatatgatgctggaactgaaaacggaattgggaacggggctggtggtcgtaacgcacgacgacgaactcgccagccgcttcgagcgcgtgatggtcatgaaagacggcagcctgcatccgaaacagggagcagacgcctga

SEQ ID NO: 63815 - DNA, 2424 bp, Neisseria meningitidis
ttggcaacccttcctttgcgggatgtcgtcgtttacccgcatatggttctgccgctgtttgtcggcagaccgaaatccatcgccgcactggaaaacgccattacccgcgaggagccggttttcctgttggcgcaaaccgatgcggcggtagaagaaccggttgccgccgacctgtatcagaccggtacggtcgcacaagtcctgcaagtgttgaaactacccgacggcacggtaaaagtattggtcgaagggctgtatcgcggacgtgttctgaccattgaagacacgggcggtctgttcgtttcccatatagagacggtcgtggaagaagacacgggcggcaataccgacctcgaagccgtgcgccgcaccctgttggcgcagtttgaacaatacgccaaactcaataaaaaaatccccgccgaaattatcggcagcattaacggcattgccgaaaacagccggctaaccgatacggtcgcagcgcatttgcagttgaaactggcgcaacgccaacagattttggaaattcccgaaatcggcaaacggatggaattcctgctggcacagctggaatccgaactcgacattatgcaggccgaaaaacgcatacgcggacgcgtcaaacgccaaatggaaaaatcccagcgcgaatattatctgaacgaacagattaaagcgatacacaaagaattgggcgaagaagacgaaaacggcgaactggatgccttggaagcaggcatcaaaaaggcgggtatgagtaaagaagcggaagaaaaatgcctgtccgaactgaaaaaactcaaaatgatgccgccgatgtctgccgaatccaccgtcgtacgcaactacatcgacaccctgctcgaactgccgtggaagaaaaaatcccgcgtcagcaaagacatcgccaaagccggactggtgctggatgccgaccactacggcctggaaaaagtcaaagaacggattttggaatacctcgccgtccaaaaacgtatggacaaactcaaaggcccgattctgtgcctggtcggccctccaggcgtgggcaaaacctctttgggcgaatccatcgccaaagcaacggggcggaaatatgtccgcatggctttgggcggcgtgcgcgacgaaagcgaaatccggggacaccgccgcacctatatcggctccatgcctggtaagattctgcagaatatggcaaaagccggcgtaaaaaacccattgttcctgctcgacgaaatcgacaaattgggtagcgacttccggggcgatcccgccagcgcgttgctcgaagtgcttgatcccgagcaaaacaacaagttcgccgatcattatgccgaagtggattacgatttgagcgatgtgatgtttattgcgacttcaaacagcctgaatatcccgaccccgctgctcgaccgtatggaaatcatccgtctgtccggctacaccgaagacgaaaaaatcaatatcgcgatgcagtacctcgtgccgaagcaaatgaagcgcaacggcgtgaaagaaggcgaattgctcgtcgaagaaagcgcggtgcgcgatattatccgttactacacccgcgaggcgggcgtgcgttcgctcgaccgcgagattgccaaaatctgccgcaaggtggtgatgcagattaccttggacgaagataagaagaggttgtctgaaaccaagaaaaccagcaaagccaaacctaaagcggttaaagtaaatgagaaaaatctgcacgactatttgggtgtgcgccgcttcgattacggcgttgccgaaagcgaaaaccgtatcgggcaggttaccggtttggcgtggacggaagtcggcggcgaattgctgaccgtcgaagccgcagcattgccgggtaagggcgtgattcagtgcaccggccagttgggcgatgtgatgaaggaatccgtgtccgcagcgtggtcggttgtccgctcccgtgcggaatcagtgggtttggctcctgatttttacgagaaaaaagacatccacatccacgttcccgaaggcgcgacgccgaaagacggccctagtgcgggtattgcgatgaccttggcggcggtatctgcctttaccaaaatcccggtacgcgccgatgtggcgatgacgggcgaaattaccctgcgcggcgaagttttgcccatcggcggtttgaaggaaaaactgttggccgccttgcgcggcggcatcaaacacgtcctgattccgaaagacaacgtcaaagacttggaagaaatccctgaaaacgtgaaaaccggcctgaccatccatccggtcaaatggatagacgaggtattggctctgggtttggaaagccagcctgagccttgggcagaaccttctggtgcggaagcggcggcggaatccgcttcaaaaccaaaaccccgcagcagggcaaccaaacattga

SEQ ID NO: 63816 - DNA, 771 bp, Neisseria meningitidis
atggaacccgaacgcctgcaaaaagtgcttgccgcgtccggcgtcggctcgcgccgcgaaatggaagaatggatcaacaacggctgggtaacggtcaacggcaaaaccgcgcaactgggcgacaaagtcacccccgacgaccacgttaccgtcaaaggcagcatcatcaaactcaaatgggccgaccgcctgccgcgcatcatcctatattacaaacaagaaggcgaaatcgtttcccgcgacgacccgcaaggccgcgtcagcatattcgaccgcctgccgcaggccgccagcagccgctgggtcgccatcggacgcttggacatcaacaccagcggacttctgattctcaccacctccggcgaactcgtccaacgtttcgcccaccccagcttcgaagtcgaacgcgaatacgccgtgcgcgtactgggcgggctgaccggcgaacaaatgcgcgtcctcaccgaagaaggcgtgatgctcgaagacggcttggcaaaagtcgaacgcatccgcgaacaaggcggcgaaggcgcgaacaaatggtacaacgtcgtgattaaagaaggccgcaaccgcgaagtgcgccgcatttttgaaagccaaggactcaccgtcagccgcctcgtgcgcgtcggcttcggccccatcggactgcccaaccgcctcaaacgcggacagttctacgaactcaaccccgccgaagtcgccaacatcctcaaatgggcggaaatgctgctgccgggcgaacgccgccgcaaaaaagcctaa

SEQ ID NO: 63817 - DNA, 465 bp, Neisseria meningitidis; identical to SEQ ID NO: 51230

SEQ ID NO: 63818 - DNA, 1341 bp, Neisseria meningitidis
atgttgaatccatcccgaaaactggttgagctggtccgtattttggacgaaggcggttttattttcagcggcgatcccgtacaggcgacggaggctttgcgccgcgtggacggcagtacggaggaaaaaatcatccgtcgggcggagatgatcgacaggaaccgtatgctgcgggacacattggaacgtgtgcgtgcggggtcgttctggttgtgggtggcggcggcgacgtttgcgttttttaccggtttttcaggtacttatcttctaatggacaatcagggtctgaatttctttttggttttggcgggcgtgttgggcatgaatacgctgatgctggcagtatggttggcaatgttgttcctgcgcgtgaaagtggggcgttttttcagcagtccggcgacgtggtttcggggcaaagaccctgtaaatcaggcggtgttgcggctgtatgcggacgagtggcggcaaccttcggtacgttggaaaataggcgcaacgtcgcacagcctgtggctctgcacgctgctcggaatgctggtgtcggtattgttgctgcttttggtgcgccaatatacgttcaactgggaaagcacgctgttgagcaatgccgcttcggtacggctggtggaaatgttggcatggctgccgtcgaaactcggtttccctgtccccgatgcgcgggcggtagttgaaggtcgtctgaacggcaatattgccgatgcgcaggcttggtcggggctgctggtcggcagtatcgcctgctacggcatcctgccgcgcttcttggcttgggtggtgtgtaaaatccttttgaaaacaagcaaaaacggcttggatttggaaaaaccctattatcaggcggtcatccgccgctggcagaacaaaattaccgatgcggatacgcgtcgggaaaccgtgtccgccgtttcgccgaaaatcgtcttgaacgatgcgccgaaatgggcggtcatgctggagaccgagtggcaggacggcgaatggttcgagggcaggctggcgcaggaatggctggataagggcgttgccaccaatcgggaacaggttgccgcgctggagacagagctgaagcagaaaccggcgcaactgcttatcggcgtgcgcgcccaaactgtgcccgaccgcggcgtgttgcggcagatcgtccgactttcggaagcggcgcagggcggcgcggtggtgcagcttttggcggaacaggggctttcagacgacctttcggaaaagctggaacattggcgtaacgcgctggccgaatgcggcgcggcgtggcttgagcctgacagggcggcgcaggaagggcgtttgaaagaccaataa

SEQ ID NO: 63819 - DNA, 2526 bp, Neisseria meningitidis
ttgaaaaacaacagacaaatcaaactgattgccgcctccgtcgcagttgccgcatcctttcaggcacatgctggactgggcggactgaatatccagtccaaccttgacgaacccttttccggcagcattaccgtaaccggcgaagaagccaaagccctgctaggcggcggcagcgttaccgtttccgaaaaaggcctgaccgccaaagtccacaagttgggcgacaaagccgtcattgccgtttcttccgaacaggcagtccgcgatcccgtcctggtattccgcatcggcgcaggcgcacaggtacgcgaatacaccgccatcctcgatcctgtcggctactcgcccaaaaccaaatctgcactttcagacggcaagacacaccgcaaaaccgctccgacagcagagtcccaagaaaatcaaaacgccaaagccctccgcaaaaccgataaaaaagacagcgcgaacgcagccgtcaaaccggcgtacaacggcaaaacccataccgtccgcaaaggcgaaacggtcaaacagattgccgccgccatccgtccgaaacacctgacgctcgaacaggttgccgatgcgctgctgaaggcaaacccaaatgtttccgcacacggcagactgcgtgcgggcagcgtgcttcacattccgaatctgaacaggatcaaagcggaacaacccaaaccgcaaacggcgaaacccaaagccgaaaccgcatccatgccgtccgaaccgtccaaacaggcaacggtagagaaaccggttgaaaaacctgaagcaaaagttgccgcgcccgaagcaaaagcggaaaaaccggccgttcgacccgaacctgtacccgctgcaaatactgccgcatcggaaaccgctgccgaatccgccccccaagaagccgccgcttctgccatcgacacgccgaccgacgaaaccggtaacgccgtttccgaacctgtcgaacaggtttctgccgaagaagaaaccgaaagcggactgtttgacggtctgttcggcggttcgtacaccttgctgcttgccggcggaggcgcggcattgatcgccctgctgctgcttttgcgccttgcccaatccaaacgcgcgcgccgtaccgaagaatccgtccctgaggaagagcctgaccttgacgacgcggcagacgacggcatagaaatcacctttgccgaagtcgaaactccggcaacgcccgaacccgctccgaaaaacgatgtaaacgacacacttgccttagatggggaatctgaagaagagttatcggcaaaacaaacgttcgatgtcgaaaccgatacgccttccaaccgcatcgacttggatttcgacagcctggcagccgcgcaaaacggcattttatccggcgcacttacgcaggatgaagaaacccaaaaacgcgcggatgccgattggaacgccatcgaatccacagacagcgtgtacgagcccgagaccttcaacccgtacaaccctgtcgaaatcgtcatcgacacgcccgaaccggaatctgtcgcccaaactgccgaaaacaaaccggaaaccgtcgataccgatttctccgacaacctgccctcaaacaaccatatcggcacagaagaaacagcttccgcaaaacctgcctcaccctccggactggcaggcttcctgaaggattcctcgcccgaaaccatcttggaaaaaacagttgccgaagtccaaacaccggaagagttgcacgatttcctgaaagtgtacgaaaccgatgccgtcgcggaaactgcgcctgaaacgcccgatttcaacgccgccgcagacgatttgtccgcattgcttcaacctgccgaagcaccgtccgttgaggaaaatgtaacggaaaccgttgccgaaacacccgatttcaacgccaccgcagacgatttgtccgcattacttcaaccttctgaagtacctgccgttgaggaaaatgcagcggaaatcgttgccgatgatttgtccgcactgttgcaacctgctgaagcaccggccgttgaggaaaatgtaacgaaaaccgttgccgaaatacctgatttcaacgccaccgcagacgatttgtccgcattacttcaaccttctgaagtacctgccgttgaggaaaatgcagcggaaatcgttgccgatgatttgtccgcactgttgcaacctgctgaagcaccggccgttgaggaaaatgcagcggaaatcactttggaaacgcctgattccaacacctctgaagcagacgctttgcccgacttcctgaaagacggcgaggaggaaacggtagattggagcatctacctctcggaagaaaatatcccaaataatgcagataccagtttcccttcggaatctgtaggttctgacgcgccttccgaagcgaaatacgaccttgccgaaatgtatctcgaaatcggcgaccgcgatgccgctgccgagacagtgcagaaattgctggaagaagcggaaggcgacgtactcaaacgtgcccaagcattggcgcaggaattgggtatttga

SEQ ID NO: 63820 - DNA, 738 bp, Neisseria meningitidis
atgctgctgatacccgccatcgatttgaaagaaggacgctgcgtccgcctgaaacaagggctgatggaagaggcgaccgtcttttccgattcgcccgccgaaaccgcactgcactggttcaaacaaggcgcgcgccgcctgcatctggtggatttgaacggcgcgtttgccggcgttccgcaaaacctgcccgccatcaaagacatcctcgccgccgtcgccaaagacatccccgtacagctcggcggcggcatacgcgatttgaaaaccatcggacaatatttggatttgggcttaaacgacgtgattatcggcacggcggcagtcaaaaaccccgacttcgtgcgcgaggcgtgcaaagccttccccggcaggattattgtcgggctggatgccaaagacggtatggccgccatcgacggctgggcaaccgtaaccgggcatcatgtaattgatttggcaaaacgctttgaagacgacggcgtcaacagcatcatctacaccgacatcgggcgcgacggtatgatgagcggcgtgaacatcgacgcgacggtcaaactcgcccaagccgtccgcattcccgtcatcgcctccggcggactgaccggcttggacgacatccgcgccctgtgtgccgccgaaaaacatggcgtagcaggcgcgattaccggccgcgcgatttacgagggcagcatcgattttgcccaagcgcagcaactggcagattccctcgactaa

SEQ ID NO: 63821 - DNA, 870 bp, Neisseria meningitidis; identical to SEQ ID NO: 38859

SEQ ID NO: 63822 - DNA, 2307 bp, Neisseria meningitidis
atggcgaaaaacctcttaatcgtcgaatccccgtccaaagccaaaaccctgaaaaaatatttgggcggcgattttgaaatccttgcatcctacggacacgtccgcgacctcgtccccaaaagcggcgcggtcgatcccgacaacggctttgcgatgaaataccaactcatcagccgcaacggcaaacacgtcgatgccatcgtcgccggtgccaaagaagctgaaaacatctacctcgccaccgacccggatagggaaggcgaagccatttcctggcatcttttggaaatcctcaaatccaaacgcggcttgaaaaacatcaagccgcagcgtgtcgtgttccacgaaatcaccaaaaacgccgtgctcgatgccgttgcccatccgcgcgaaatcgaaatggacttggtcgatgcgcaacaagcccgtcgcgctttggactatttggtcggtttcaacctttcgccattgttgtggaaaaaaatccgtcgcggtttgagcgcgggccgtgtacaaagccctgctttgcgcctgatttgtgagcgcgaaaacgaaatccgcgcgtttgaagcgcaggaatattggacggtgcatctcgacagccacaaaggccgcagcaagttcaccgccaaactcgcccaatacaacggcgcgaaactcgaacaattcgacctgtcgaacgaagccgcgcaagccgacgtattgaaagaactcgaaggcaaagaggccgtcgttaccgccattgaaaagaaaaagcgcagccgcaatcccgccgcgccgttcaccacttctaccatgcagcaggatgctgtgcgcaaactcggcttcaccaccgaccgcactatgcgtaccgcccagcagctttacgaggggatagacgtagggcagggcgccatcggtctgattacctatatgcgtaccgacagcgtgaatttggcagatgaagcgttaaccgaaatccgccattacatcgaaaacaaaatcggcaaagaatatctgccgagtgccgccaaacaatacaaaaccaaatccaaaaacgcccaagaagcgcacgaagccatccgtccgacttccgtgtaccgcacgcccgaaagcgtcaaacccttcctgagcgcagatcagttcaaactctatcagatgatttggcaacgcaccgttgcctgtcaaatgacgcctgccaaattcgaccaaaccaccgtcgatattaccgtcggcaaaggcgtattccgcgtaaccggacaagtgcaaaccttcgcaggcttcttgagcgtttatgaagaaagcagcgacgacgaagaaggtgaagacagcaaaaaactgcccgaaatgagcgaaggcgacaaattgcccgtggacaaactctacggcgaacaacactttaccactccgccgccacgctacaacgaagccacgctggttaaagccctcgaagaatacggcatcggccgcccctcgacctacgccagcatcatctccacgctcaaagaccgcgaatacgttacccttgagcaaaaacgctttatgcccaccgacacaggcgacatcgtcaacaaattcctgaccgaacacttcgcccaatacgtcgattaccactttaccgccaaactcgaagaccagcttgacgaaatcgccggcggcaaacgccaatggattcctgtgatggacaaattctggaagccgttcatcaagcaagtggaagaaaaagagggcatcgaacgcgccaaatttaccacgcaggaacttgacgaaacctgtccgaaatgcggcgaacacaaactgcaaatcaagttcggcaaaatgggccgtttcgtcgcgtgtgccggttatcccgagtgtagctacacgcgcaacgtcaacgaaaccgccgaagaagccgccgagcgcatcgccaaagccgaagccgagcaagcagaactcgacggacgcgagtgccccaaatgcggcggacggctggtgtacaaatacagccgtaccggcagtaaattcatcggttgcgccaactaccccaaatgcaaacacgtcgagccgctggaaaaaccgaaagataccggcgtccagtgtccgcaatgtaaaaaaggcaacctcgtcgagcgtaaatcccgctacggcaaactgttttacagttgcagcacctatcccgactgtaactacgccacctggaacccgcccgttgccgaagaatgcccgaactgccattggccggtcttgaccatcaaaaccaccaaacgctggggtgtggaaaaagtctgcccacaaaaagaatgcggctggaaagaacagattgaaccgcccgcgccgaaggagtaa

SEQ ID NO: 63823 - DNA, 942 bp, Neisseria meningitidis
atgaaaatcctgctcctcctcatccccctcgtcctaaccgcctgcggcacactgaccggcatacccgcccacggcggcggcaaacgctttgccgtcgaacaagaactcgtcgccgcatcgtcccgcgccgccgtcaaagaaatggatttgtccgccctgaaaggacgcaaagccgccctttacgtctccgttatgggcgaccaaggttcgggcaacataagcggcggacgctactctatcgacgcactgatacgcggtggctaccacaacaaccccgaaagtgccacccgatacagctaccccgcctacgacactaccgccaccaccaaagccgacgcgctctccagcgtaaccacttccacatcgcttttgaacgcccccgccgccgccctgacgaaaaacagcggacgcaaaggcgaacgctccgccggactgtccgtcaacggcacgggcgactaccgcaacgaaaccctgctcgccaacccccgcgacgtttccttcctgaccaacctcatccaaaccgtcttctacctgcgcggcatcgaagtcgtaccgcccgaatacgccgacaccgacgtattcgtaaccgtcgacgtattcggcaccgtccgcagccgtaccgaactgcacctctacaacgccgaaacccttaaagcccaaaccaagctcgaatatttcgccgtcgaccgcgacagccggaaactgctgattgcccctaaaaccgccgcctacgaatcccaataccaagaacaatacgccctctggatgggaccttacagcgtcggcaaaaccgtcaaagcctcagaccgcctgatggtcgatttctccgacatcaccccctacggtgacacaaccgcccaaaaccgtcccgacttcaaacaaaacaacggtaaaaaccccgatgtcggcaacgaagtcatccgccgccgcaaaggaggataa

SEQ ID NO: 63824 - DNA, 615 bp, Neisseria meningitidis
atgaactttacccgactgctcaaccaagtcttaagcacggttcaaaaaaaaggcggcacattctccgacagcccgctcaattcattcggcggaggcgcgctggttgccggtatcgcctccatgctgctgaacggtaaaaaccgcaaaaccattaccaaaatcggttcgaccgccgctttgggctacctcgcctaccggggctatcagatgtggcagcaaaacaaagggcgggcaactgtaacacaaagcgatttccaacctgccggagaaactgaagaaacatacagccgcaccgtattgcgcaccatgatagccgccgccgcttcagacggcatgatagacgaagccgaacgccggactatcgaacaggaaagcggcacagaccccgaaactgccgcatggctcgccgccgaataccgcctgcccgcaagcatcgaagacatcgccgccgccgtcggcaacgatgaggcgttggcggcggaggcctatctggcggcaaggttggtctgtgccgatttgtcgcggaaagaaaccgtcttcctcgcccgcctgtcgcaggctttgaaactggatgacaatctggtggagagtttggaaaggcaattggggttttga

SEQ ID NO: 63825 - DNA, 1170 bp, Neisseria meningitidis
atggacaatgaattgtggattatcctgctgccgattatccttttgcccgttttcttcgcgatgggctggtttgccgcccgtgtggatatgaagactgtattaaagcaggcaaaaagcataccgtcgggattttataaaagtctggatgccttggttgaccgcaacagcggacgtgccgccagggaattggcagaggtcattgatcagcagcctcagtcatacgacctaaacctcaccctaggcaagctttaccgtcagcgtggcgaaaacgacaaagccatcaacatacaccggacaatgctcgattctcccgatacggtcggcgaaaagcgcgcgcgcgtcctgtttgaattggcgcaaaactaccaaagtgcggggttggtcgatcgtgccgaacagatttttttggggctgcaagacggtaaaatggcgcgtgaagccagacagcacctgctcaatatctaccaacaggacagggattgggaaaaagcggttgaaaccgcccggctgctcagccatgacgatcagacctatcagtttgaaatcgcccagttttattgcgaacttgcccaagccgcgctgttcaagtccaatttcgatgtcgcgcgtttcaatgtcggcaaggcactcgaagccaacaaaaaatgcacccgtgccaacatgattttgggcgacatcgaacaccgacaaggcaatttccctgccgccgtcgaagcctatgccgccatcgagcagcaaaaccatgcatacttgagcatggtcggcgagaagctttacgaagcctatgccgcgcagggaaaacctgaagaaggcttgaaccgtctgacaggatatatgcagacgtttcccgaacttgacctgatcaatgtcgtgtacgagaaatccctgctgcttaagtgcgagaaagaagccgcgcaaaccgccgtcgagcttgtccgccgcaagcccgacctcaacggcgtgtaccgcctgcttggtttgaaactcagcgatttggatccggcttggaaagccgatgccgatatgatgcgttcggttatcgcacggcagctacagcgcagcgtgatgtaccggtgccgaaactgccacttcaaatcacaagtctttttctggcattgtcctgcctgcaacaaatggcagacgtttacgccaaacaaaatcgaagtttaa

SEQ ID NO: 63826 - DNA, 900 bp, Neisseria meningitidis
atgtttaagaaaagccgtgtgccggtgcgggtgttccgctcttcggacaagggtgcgccgcaaaatgtggtaggtgcgtccgataatgcgtttaagattttgaatgcctgcctggtggaaggttacggcgataccgcgtctttgggctgggaattgaagttcaaggtcgggagtacgggcatctttatgccgacggataagaagcagacgggatggggtttgcgtatcagccagtcggaaaagtacggcgcgagggtgtcggcggtacgcaatccgtcttcggatgacacgtttgaacttgaatcggcttatgaaaacaatgaggcgtatttcttgcacgataacacaaacggggatactaaaaccagggattggacgctggtcgggcattctttgggcttcatcttgatttttcacgtaacggaacactcgagtgacggcccgtttaacacgacgctgtatttcgggcgcgtgccgacgcttgccgccgccgacgaccataattatcttttgtgctattcgacggatggcagttaccgatatctctcttatcgtacccgaaacagttatcttcttatggcgcgggattatttgggtctcaacctcgggagatacggcacgaaaagcaagaccgaagggataagccaccgctttccggcgcgtatctgcaacgggttttggtgcgacgatgtgtatattaccgaacaggtggaaagcgaatgggaggtgcgcggctacctgccggggattatgaacgttgtcggggatgcgtacccttatgaccgcaaggtgcttgaggatttcgacggctcgggcgacagctttctgtatttgcggttttacgggcacagtagttcgccaaaaggccagatggtcaacctgacggcttgggaggtgtga

SEQ ID NO: 63827 - DNA, 786 bp, Neisseria meningitidis
atgggttttctgcaaggcaaaaaaattctgattaccggcatgatttccgagcgttccatcgcttacggcatcgccaaagcctgccgcgaacaaggcgcggaactggcgtttacctacgttgtggacaaactggaagagcgcgtccgcaaaatggcggcggaattggattccgaactcgtattccgctgcgatgttgccagcgacgacgaaatcaaccaagtgttcgccgatttgggcaaacattgggacggcttggacggtttggtgcattccatcggcttcgcaccgaaagaagccttgagcggcgacttcctcgacagcatcagccgcgaagcgttcaacaccgcacacgaaatttccgcatacagcctgcccgcattggcaaaagccgcccgtccgatgatgcgcggcagaaactccgccatcgttgccctgagctacttgggcgcggtgcgcgcgattccgaattacaacgtgatgggtatggcaaaagccagccttgaggcaggcatccgctttaccgccgcctgtctgggcaaagaaggcatccgctgcaacggcatttccgccggtccgatcaaaacgctcgccgcctccggcattgccgatttcggcaaactcttgggacacgtcgccgcccacaatccgctgcgccgcaacgttaccatcgaagaagtcggcaataccgccgccttcctgctgtccgacctgtcgtccggcattaccggcgaaatcacttacgttgacggcggttacagcatcaatgccttgagcaccgagggataa

SEQ ID NO: 63828 - DNA, 2586 bp, Neisseria meningitidis; identical to SEQ ID NO: 61110

SEQ ID NO: 63829 - DNA, 306 bp, Neisseria meningitidis; identical to SEQ ID NO: 43025

SEQ ID NO: 63830 - DNA, 447 bp, Neisseria meningitidis
gtgcgcgttttgcgtgaaaacggcatcgaatttgaaccttttacctatgcctatgaggaacacggcggcacggcgcagtttgcccgactattcggcaaagacgaacacttggtcattaaaaccattgttttgcaagatgaaaacggtaaggggctgattgtcttgatgcacggcgacaaacagatttccacgcgcaatctggctcggcatttgggtgcgaaacacatcgaacccgctacgcccgcacaggcaaacaagtggacgggctatctggtcggcggcacaacgccgttcggcatccggacaaagttggatatttacgtcgaacagtcggtgatggatttggaaaccatctatatcaacggcggaaaacgcgggttcattatcggcatccgtcccggagatttaaatattttgaacccgaaaacaatacaggcggcggtttga

SEQ ID NO: 63831 - DNA, 540 bp, Neisseria meningitidis
atgaagataacgcactgcaaattaaagaaaaaagtacagaaagaactgctccgtttttttgtgctggaagttaccgcccgttctgccgccgatattttgggtatccatcccaattcggcagtactgttctaccgtaaaatccgcacggttatcaaccatcatttggccttggctgccgatgaggtttttgagggccctgtcgagcaggacgaaagcgatttcggcggacggcgtaaaggcagacgtggtcgcggtgcggcaggaaaagtggttgtcttcggcattctgaaacgtaacggacgggtctataccgttgtcgtagataatgccaagtccgatactttaatgcctgttatcaaacagaaaatcatgccggacagcattgtttataccgacagcctgagcagttacgacaagttggacgtaagcggttttatccattaccgcatcaaccattccaaggaatttgctgaccgtcagaaccacataaacggcattgagaacttttggaatcaggcaaaacgcgtcttgcgcaaatag

SEQ ID NO: 63832 - DNA, 288 bp, Neisseria meningitidis
atggatgatttgattgcagcttttttaggctatttatcaggtaaatatagcgaagggaaaataagcagattagaaatatctctaacggcaggaagcattttctttgcagtattctttattcatgaactgataatttttattgttgatggaaataaggaaaatctttggaattttattactgagatgatgaaagatttatttttattttcatgttctgtttgtttattattctacttcttattatttattgcggaaactattgggaaaacaatcaataaaattaaataa

SEQ ID NO: 63833 - DNA, 360 bp, Neisseria meningitidis
atgccacgcgtaaaacgcggtgttaccgcccgtgcccgtcaccaaaaaatcttcgcgttagccaaaggctaccgcggccgtcgtaaaaacgtttaccgcgttgccaagcaggcggtaatgaaagctggccaatacgcataccgcgaccgccgccaacgcaaacgccaattccgtcaattgtggattgtccgtatcaatgcaggtgcgcgtgaaaacgggttgtcttacagcaaatttatgaatggtctgaaacgtgcctctatcgaaatcgaccgcaaagtattggctgatttggccgtgttcgataaagccgcttttgcacaattggttgaaaaagccaaagctgctttggctgcttaa

SEQ ID NO: 63834 - DNA, 666 bp, Neisseria meningitidis
atgacgtttaccgctgtgctcttcgatctcgacggtgtcatcaccgataccgccgaataccattaccgcgcgtggaaaaaactcgccgaagaactgggcatcggcatcgaccgcaagtttaacgagcagctcaaaggcgtgtcgcgcgacgattcgctcaaacgcatcctcgcgcacggcggcaaaaccgtcggcgaagccgagttcgccgaactgacccgccgcaaaaacgacaactacgtcgagatgattcaggcggtcaaaccagaagacgtgtatcccggcattttgccgctgttggaagcattgagggcaaacggcaaaaaaatcgccctcgcgtccgccagcaaaaacggcccgttcctgctggaacgcatgggactgacccacttcttcgacaccgtcgccgaccctgccgccgtcgcgcattccaaacccgcccccgacatcttcctcgccgccgccgagggcgtgggcgcggacatccgccactgcatcggcattgaagacgccgccgccggcgttgccgccatcaaagccgccggcgcactgcccatcggcgtaggcaaagccgaagacttgggcagcgacatcgcgctggtgtccgagaccgccgggctgacctacgcctacctgcaaaacgtgtgggcgcagtcgggcaggtaa

SEQ ID NO: 63835 - DNA, 417 bp, Neisseria meningitidis; identical to SEQ ID NO: 51640

SEQ ID NO: 63836 - DNA, 1911 bp, Neisseria meningitidis
atgactctggaaaccctgatcgccctgccgcgcaacatcaagaaaatctgtttcctcatacacgattttctgatgattttcattgccttttggttcacccaaagcctaaaggccgactactcggacgaatggttcgaccccgccaactggcagtctttcctattgaccgcgtttttgaccgcctgcctgttcttcagaatggggctttaccgcgccgtcacacgcttcatcagcttccgcatcctctccaccgcgctggcaggcagcctcgcctccgccgtattgtttttcctcaatacgctgatatttgaagaacggctgcggctcgccctgccgattgtctatttcttactgctgtttgtttccgtgaccggctcgcgtatggttttgcgcggactgttgtccgaacaccccaaaaaacagatggcccccgtcattatttacggcgcgggacggtcgggcagacaactgcttaaggccgtcaaacaaatgcgcgaatattccgccgccgcctttgtggacgacgaccccaaactgtggcacaccgtcatctacgaccttgccgtttaccagcccgatgccatcgccttcctcatcgaacgctacggcgtggaaaaaatcctgctcgccatccccggcgcgactcaggaacaacgcctccgaatcatcaacaaactggaagcctatccgtgcgaagtgttgaccattcccggaatgaaagacctgatggacgggaaaatcagcatcggcacgctcaaaaaaatctctgtgtccgacctgctcgggcgtgattccgtcgcgcccgacaaccgcctgatgagtgccgacatcgaaggcaaaaccgtcatggtaaccggcgcgggcggctccatcggttcggaactctgccgccagattatccgccgccgccccgaaaagctgctgctgttcgagttatccgaattcgccctgtacgccgtcgaaaaagaattgcgcgaaacctgcatccaaaaacgcctcgacaccgaaatcctgccctttctcggttcggtgcaaaaccgcacgctgctcgaacacgtcatgaccgccttttccgttgcgaccgtctatcacgccgccgcctacaaacacgtccccatggtcgagttcaacaccgtcgaaggcatacgcaacaacatcttcggcacactcgagtgcgcgcttgccgccacgacatcgggcgtggaaactttcgtcctcatctccaccgacaaagccgtccgccccaccaacaccatgggtgccagcaaacgcatggcggaactctgccttcaggcactcgccgccgaacccggacaaaaaacccgcttcagcatggtacgtttcggcaatgttttaggttcgtccggctccgttgtcccgctgtttgaaaaacagattgcagaaggcggcccgcttaccctgacccaccccgaaatcacacgttatttcatgaccatacccgaagccgcccaactcgtcatacaggcaggcgcgatgggtacgggcggcgacgtattcgtcctcgacatgggtgaatccgtcaaaatcatcgaccttgcccgccaaatgattaccctaagcggcctcaaacccaacacacccgaacaacccgacggcgacatcgaaatcctcattaccggactgcgtcccggagaaaaactctacgaagagctgctcatcggcgacaacgtccgcaaaaccggccatccgcgcatcatgaccgccaacgagaccatgctgccgtggcacgagctctccgccctgctcgaccgcatccgtgcggcctgcgaccgttacgaccagcaggcaatccgcaccctgctcatcaacgccccgaccggctttgccccgagcgacggcatctgcgacctgctttgggtacgagaaacacacagaaaaaatgccgtctga

SEQ ID NO: 63837 - DNA, 2559 bp, Neisseria meningitidis
atgcctgcaaacctgtcttcagcactggaaaccttcaaacagcagcgcgatgccgccgaagcgcattatttgaaagccaaccgcgtgtcggtatttttcagggaatatacggcggcactcgaaaccttactggcggcattgtgggcagagtattttcaaaacagcgcgttatgcctgatggcggtaggcggcttcggacgcggcgaactgtatccctgttcggatgtggatttggcggttgtctcccctgccccgctttcagacggcattcaggaacagattgcccggtttgtccaaaccctgtgggactgcaaactgatgccgtctgtaaaaagcggcagcgttgatgaactatgtgaaagcgtgcgcaatgatattacgggggacacagcgtttttagaggctaggtttttgtttggcaaccgccaaacggcggataaactagcggaaaaaatgaacgcgcagcgcaatgtggcggcgtttgtcgaggcaaaactggtggagatggaacaccgccacgccaaatcgcaaggttcgggggcagtattggagccgaatatcaaaagctgtccgggcggtctgcgcgatatccacaccctgctttggatagcgaaggcgcaaggcttggcgaccgacctgcccgacctgctcaaacagcggattttgacgcgtgccgaagccggtatgctttcgcacggctaccgccgcctcgcccacatccgcatccatctgcatttaaacgccaagcgcgccgaagaccgcctgctgttcgatttgcagccgcaagtcgccgaaagcatgggttatgaaggcttgaacctccgccgccaaagcgaagaactgatgcgcgtgttttaccgcgcgattaaaaccgtcaaacaactgggcggcatcctcacgcctatgctgcaaagccgcgtttcctccaccccgttgcgcgttaccctgcggattgacgacgactacatccaagtcaacaaccaaatcgccgcgcggcacaccgatatttttttcagacggcccgaacacattttcaaaatcgtcgaaatcatgcagcagcgcaacgatattaccgcgctcgaaccgcaaaccctgcgcgcatggtggggcgcgacgcgcaaaatcaaccgcagcttctaccaaaattctgaaaaccgccaccgcttcgccggctttttccgcaacggcaacggactgacccaaaccctgcgcttcctcaacctctacggcgtattgggacgctacctgcccgcgtgggaaaaaatcgtcggcctgctccagcacgacctgttccacatctatcccgtggacgaccacatcctcaccgtcgtccgcaacgtccgccgccttgccttggatatgcacagccacgagctgccctacgcctctgcactgatgcagtcctttgaaaaacaagacatcctctaccttgccgcctttttccatgacatcgccaaaggacgcggcggcgaccatgccatacaaggcatcgcagacgcgcgccaatttgccgccgaccacttcctgaccgaagaagaaagcgacctgctcgcctggctggttgaaaaccatcttcttatgtccaccgtcgcccaaaaagaagacatccaagaccccagcgtactcgatgccttctgcaaacgcgtccaaacccacgaacgcctcagcgcgctctaccttctgaccatttccgacatacgcggcaccaatcccaagctgtggaacgcatggcgcgccagcctgctggaaagcctcttccatgccgccggacgctaccttacaggcaacggcggcaacccgcacaccctcttcggccgccgccggcaggaagccgccgacttactcacccgcgccgccgtccccgaaaaacagcagaaaaagctttggaacgcgctcggttccgcctacttcgcccgccaccagtcccgcgaaatcctgtggcacgccgccaaccttgtacacgactttgaaacccccatcgtccgcagccgcatcctgcccaaaagcgacagctttcaagtcatggttttcatgcccaacggcccgcgcctgtttgcccgtctctgccgcattttcagccgccacggcttcgatatcctcgccgcccgcgcctttatcaccgaacacgactacatcctcgacaccttcatcgtgcaaattccctcacaacacgcccccgaagactaccccgacattcaaagcgcgcttgaagccgaactcaacagctttatccacggacacaccgttgccgaaacctcaaaccacagccgccgcatcagccgccgcagccgctatatgcctattgcaccgggcatcaccatcacccccgaagaagactatccagactggtactccgtcgaaatcaccgccgtcaaccgccccttcctgctcgccgatatggcggaagtctttttcgcccacaacgtcagcctgcgctatgccaaaatctccacactggatgaacgcgccgaagacagttttaccgtttttagcctagacctgaaaaacccaaaaatccagtcctcattgaagcagacgctgctggaacaattatcataa

SEQ ID NO: 63838 - DNA, 1278 bp, Neisseria meningitidis
atgtttgaacgcagtgtgattgcaatggcttgtatttttgccctttcagcctgtgggggcggcggtggcggatcgcccgatgttaaatcggcggacacgctgtcaaaaccggccgctcctgttgttgctgaaaaagagacagaggtaaaagaagatgcgccacaggcaggttctcaaggacagggcgcgccatccacacaaggcagccaagatatggcggcagtttcggcagaaaatacaggcaatggcggtgcggcaacaacggacaaacccaaaaatgaagacgagggaccgcaaaatgatatgccgcaaaattccgccgaatccgcaaatcaaacagggaacaaccaacccgccgattcttcagattccgcccccgcgtcaaaccctgcacctgcgaatggcggtagcaattttggaagggttgatttggctaatggcgttttgattgatgggccgtcgcaaaatataacgttgacccactgtaaaggcgattcttgtaatggtgataatttattggatgaagaagcaccgtcaaaatcagaatttgaaaatttaaatgagtctgaacgaattgagaaatataagaaagatgggaaaagcgataaatttactaatttggttgcgacagcagttcaagctaatggaactaacaaatatgtcatcatttataaagacaagtccacttcatctgcgcgagttaggcgttctgcacggtcgaggaggtcgcttcctgccgagatgccgctgattcccgtcaatcaggcggatacgctgattgtcgatggggaagcggtcagcctgacggggcattccggcaatatcttcgcgcccgaagggaattaccggtatctgacttacggggcagaaaaattgtccggcggatcgtatgccctcagtgtgcaaggcgaaccggcaaaaggcgaaatgcttgctggcacggccgtgtacaacggcgaagtgctgcatttccatacggaaaacggacgttcgtacccgaccaaaggcaggtttgccgcaaaagtcgatttcggcagcaaatctgtggacggcattatcgacagcggcgatgatttgcatatgggtaagcaaaaattcaaagccgccatcgatggaaacggctttaaggggacttggacggaaaatggcggcggggatgtttccggaaggttttacggcccggccggcgaggaagtggcgggaaaatacagctatcgcccgacagatgcggaaaagggcggattcggcgtgtttgccggcaaaaaagagcaggattga

SEQ ID NO: 63839 - DNA, 1836 bp, Neisseria meningitidis
atgaaccccactcctattcaccctaaactcgccgagattaccgagcgcatcatcgagcgcagccgcccgacgcgtgaaaaatatctggcgaaaatccgtagtgccaaacagatgggacgcttagagcgcaaccagctcggctgcagcaatttggcgcacggctacgccgccatgcccaaaagcatcaaaatcgaaatgcttcaggaaaccgttcccaacttaggcatcatcaccgcctacaacgatatggtttccgcacaccagccgtttaaagacttccccgaccaaatcaaagacgaagcgcagaaaaacggcgcgaccgcacaagtcgccggcggcacgcccgctatgtgcgacggcatcacgcaaggctacgccggtatggaattgtcgctgttttcccgcgacgtgattgcgatgagtaccgccgtcgggctgtcccaccaaatgtttgacggcggcctgtttatgggtgtgtgcgacaaaatcgtgccgggtttgatgatcggtgcgttgtctttcggccatattccgggcatcttcgttccggcaggcccaatgtccagcggcatcggcaacaaagaaaaagcccgcacccgccagcttttcgccgaaggcaaggtcggacgcgacgaacttttaaaaagcgaaatgggttcttaccacagcccgggtacttgtaccttctacggcacggcaaactccaaccaaatgatgatggaaatgatgggcgtacacctgcctgccgccgcattcgtccatccttacaccgacctgcgcgaagccctgacccgctacgcagccggacacctcgcgcgcggcattaaaaacaacaccatcaaacctttgggcgaaatgttgaccgaaaaatcctttatcaacgccctgatcggtctgatggcgaccggcggctcgaccaaccacaccatgcacctcgtcgctatggcgcgtgccgcaggcgtgattttgaactgggacgacttcgacgaaatttcttccatcatcccattgctgatccgtgtgtaccccaacggcaaagccgacgtaaaccactttaccgctgccggcggcctacctttcgttatccgcgaattgctggacgcaggcctgttgcacgacgatgtcgataccgtcgtcggacgcggtatgcgccactacaccaaagagcctttcctcatcgacggcaaactcgaatggcgcgaagcccccgaaaccagcggcaacgacgacatcctacgcaaagccgacaacccgttctccccagacggcggtctgcgcctgatgaaaggcaacatcggtcgcggcgtgattaaagtgtccgccgtgcgcgaaggctgccgcattatcgaagcgcctgccatcgtgttcaacgaccaacgcgaagtgttggctgcgtttgagcgcggcgaattggaacgcgatttcgtctgcgtcgtccgctaccaaggcccgcgcgccaacggtatgcccgaattgcacaaactgaccccgcctctaggcatcctgcaagaccgcggcttcaaagtggcgctgttgaccgacggccgtatgtccggcgcgtccggcaaagttcccgcatccatccacatgacccccgaagccctgatgggcggcaacatcgccaaaatccgtaccggcgacccgatccgcttcgactccgtgaccggcgaactcaacgtcctgattgacgaagccgaatggaatgcccgcgaagtcgaacacatcgacttgggcgcgaaccaacaaggctgcggccgcgaactcttcgccaacttccgcagcatgaccagcagcgcggaaaccggtgccatgagtttcggcggcgaatttgcctga

SEQ ID NO: 63840 - DNA, 417 bp, Neisseria meningitidis
atgtatctgttggataccaacgttatcagcgaaacacgccgggcaaatcgggcagacggcaacgttagagcatggctaaacaccattgacccggccgaaatgtacaccagcgcaattgtcatgatggaacttgaacggggcgttttgggtatggagcgcaaagacggacagcagggcggaatattgcgccgctggctggaagaagttgtaaagcccacattcaaagaccgcatattgcccataaacgaaaccaccgccgaaatatgcgcccgtttgcacatacccgacaaaagccccgaaaacgacgcctggatagcggcaacagccaagcagcacggtttaactttggcaacgcgaaatatcaaagactttgagcatagcggcgtgaaattgataaacccgtttgagaccgtctaa

SEQ ID NO: 63841 - DNA, 738 bp, Neisseria meningitidis; identical to SEQ ID NO: 42917

SEQ ID NO: 63842 - DNA, 1008 bp, Neisseria meningitidis
atgagcaccttcttccagcaaaccgcccaagccatgattgccaaacacatcgaccgtttcccactattgaagttggaccaggtgattgattggcaaccgatcgaacagtacctgaaccgtcaaaaaacccgttaccttagagaccaccgcggccgtcccgcctgtcccctgttgtccatgttcaaagccgtcctgctcggacaatggcacagcctctccgatcccgaactcgaacacagcctcatcacccgcatcgatttcaacctgttttgccgtttcgacgaactgatcatccccgattacagtaccttatgccgctaccgcaactggctggcgcaagacgacaccctgtccgaattgctggaactgattaaccgccaactgaccgaaaaaggtttaaaaatagagaaagcatccgccgccgtcgttgatgtcaccattattcagaccgccgacagcaaacagcgtcaggccatagaagtcgatgaagaaggacaaatcaacggccaaaccacaccgagtaaggacaaagatgcccgttggatcaagaaaaacggtctctacaaactcggttacaaacaacatacccgtaccgatgcagaaggctatatcgggaaactgcacattacccccgccaatgctcatgagtgcaaacacctgtcgccgttgttggaagggatagctgaaggtacgaccgtctatgccgacaaaggctacgacagtgcggaaaaccggcaacatctggaagaacatcagttgttggacggcattatgcgcaaagcctgccgcaaccgcccgctgtcggaagtgcaaaccaaacgcaaccgatatttgtcgaagacccgttatgtggttgaacagagcttcggtacgctgcaccgtaaattccgctacgctcgggcagcctatttcggactgattaaagtgagtgcgcaaagccacctgaaagcgatgtgtttgaacctgttgaaagcggccaacaggttaagtgcgcccgctgccgcctaa

SEQ ID NO: 63843 - DNA, 1404 bp, Neisseria meningitidis
atggatactacattgaaaaccaccttgacttctgttgcagcagccttcgcattatccgcctgcaccatgattccccaatacgagcagcccaaagtcgaagttgccgaaacgttcaaaaacgataccgccgacagcggcatccgtgcggtcgatttaggttggcatgactattttgccgacccgcgcctgcaaaagctgatcgacatcgcactcgagcgcaataccagtttgcgtaccgccgtattgaacagcgaaatctaccgcaaacaatacatgattgagcgcaacaacctcctgcccacgcttgccgccaatgcgaacgactcgcgccaaggcagcttgagcggcggcaatgtaagcagcagctacaaagtcggactgggtgcggcatcttacgaactcgatttgttcgggcgtgtacgcagcagcagcgaggcggcactgcaaggctatttcgccagcaccgccaaccgcgatgcggcacatttgagcctgattgccaccgttgccaaagcctatttcaacgaacgttacgccgaagaagcgatgtctttggcgcaacgtgttttgaaaacgcgcgaggaaacctacaagctgtccgaattacgttacaaggcaggcgtgatttccgccgtcgccctacgtcagcaggaagccctaatcgaatctgccaaagccgattatgcccatgccgcgcgcagccgcgaacaggcgcgcaatgccttggcaaccttgattaaccaaccgatacccgacgacctgcccgccggtttgccgttggacaagcagttttttgttgagaagctgccggccggtttgagttccgaagtattgctcgaccgtcccgatatccgtgctgccgaacacgcgctcaaacaggcaaacgccaatatcggtgcggcacgcgccgcctttttcccatccatccgcctgaccggaagcgtcgatacgcattctgccgaattgggcgggttgttcaaaagcggcacgggcgtttggtcgttcgcgccgtctattaccctgccgatttttacctggggtacgaacaaggcgaaccttgatgtagccaagctgcgccaacaggcacaaatcgttgcctatgaatccgccgtccaatccgcatttcaagacgtggcaaacgcattggcggcgcgcgagcagttggataaagcctatgacgctttaagcaaacaaagccgcgcctctaaagaagcgttgcgtttggtcggtctgcgttacaaacacggcgtatccggcgcgctcgacttgctcgatgcggaacgcagcagctattcggcggaaggtgcggctttgtcggcacaactgacccgcgccgaaaaccttgccgatttgtacaaggcactcggcggcggattgaaacgggatacccaaaccgacaaataa

SEQ ID NO: 63844 - DNA, 1746 bp, Neisseria meningitidis
atgttgattaagagcgaatataagccccggatgctgcccaaagaagagcaggtcaaaaagccgatgaccagtaacggacggatcagcttcgtcctgatggcaatagcggtcttgtttgccggtctgattgcccgcggactgtatctgcagacggtaacgtataactttttgaaagaacagggcgacaaccggattgtgcggactcaaacattgccggctacacgcggtacggtttcggaccggaacggtgcggttttggcgttgagtgcgccgacggagtccctgtttgccgtgcctaaagagatgaaggaaatgccgtctgccgcacaattggaacgcctgtccgagcttgtcgatgtgccggttgatgttttgaggaacaagctcgaacagaaaggcaagtcgtttatctggattaagcggcagctcgatcccaaggttgccgaagaggtcaaagccttgggtttggaaaactttgtatttgaaaaagaattaaaacgccattacccgatgggtaacctgtttgcacacgtcatcggatttaccgatattgacggcaaaggtcaggaaggtttggaactttcgcttgaagacagcctgcatggcgaagacggcgcggaagtcgttttgcgggaccggcagggcaatattgtggacagcttggactccccgcgcaataaagccccgaaaaacggcaaagacatcatcctttccctcgatcagaggattcagaccttggcctatgaagagttgaacaaggcggtcgaataccatcaggcaaaagccggaacggtggtggttttggatgcccgcacgggggaaatcctcgccttggccaatacgcccgcctacgatcccaacaggcccggccgggcagacagcgaacagcggcgcaaccgtgccgtaaccgatatgatcgaacccggttcggcaatcaaaccgtttgtgattgcgaaagcattggatgcgggcaaaaccgatttgaacgaacggctgaatacgcagccttataaaatcggaccgtctcccgtgcgcgatacccatgtttacccctctttggatgtgcgcggcatcatgcagaaatcgtccaacgtcggcacaagcaaactgtctgcgcgtttcggtgccgaagaaatgtatgacttctatcatgagttgggcatcggtgtgcgtatgcactcgggctttccgggcgaaactgcaggtttgttgagaaattggcgcaggtggcggcctatcgaacaggcgacgatgtctttcggttacggcctgcaattgagcctgctgcaattggcgcgcgcctataccgcactgacgcacgacggcgttttgctgccggtcagctttgaaaaacaggcggttgcgccgcaaggcaaacgcatattcaaagaatcgaccgcgcgcgaggtacgcaatctgatggtttccgtaaccgagccgggcggcaccggtacggcgggtgcggtggacggtttcgatgtcggcgcgaaaaccggcacggcgcgcaagttcgtcaacgggcgttatgccgacaacaaacacatcgctacctttatcggttttgcccccgccaaaaacccccgtgtgattgtggcggtaaccattgacgaaccgactgcccacggttattacggcggcgtagtggcaggaccgcccttcaaaaaaattatgggcggcagcctgaacatcttgggcatttctccgaccaagcccctgaccgccgcagccgtcaaaacaccgtcttaa

SEQ ID NO: 63845 - DNA, 1356 bp, Neisseria meningitidis
atgtcggaatatacgcctcaaacagcaaaacaaggtttgcccgcgctggcaaaaagcacgatttggatgctcagtttcggctttctcggcgttcagacggcctttaccctgcaaagctcgcaaatgagccgcatttttcaaacgctaggcgcagacccgcacaatttgggctggtttttcatcctgccgccgctggcggggatgctggtgcagccgattgtcggccattactccgaccgcacttggaagccgcgtttgggcggccgccgtctgccgtatctgctttatggcacgctgattgcggttattgtgatgattttgatgccgaactcgggcagcttcggtttcggctatgcgtcgctggcggctttgtcgttcggcgcgctgatgattgcgctgttggacgtgtcgtcaaatatggcgatgcagccgtttaagatgatggtcggcgacatggtcaacgaggagcagaaaggctacgcctacgggattcaaagtttcttagcgaatacgggcgcggtcttggcggcgattctgccgtttgtgtttgcgtatatcggtttggcgaacaccgccgagaaaggcgttgtgccgcagaccgtggtcgtggcgttttatgtgggtgcggcgttgctggtgattaccagcgcgttcacgattttcaaagtgaaggaatacgatccggaaacctacgcccgttaccacggcatcgatgtcgccgcgaatcaggaaaaagccaactggatcgaactcttgaaaaccgcgcctaaggcgttttggacggttactttggtgcaattcttctgctggttcgccttccaatatatgtggacttactcggcaggcgcgattgcggaaaacgtctggcacaccaccgatgcgtcttccgtaggttaccaagaagcgggcaactggtacggcgttttggcggcggtgcagtcggttgcggcggtgatttgttcgtttgtattggcgaaagtgccgaataaataccataaggcgggttatttcggctgtttggctttgggcgcgctcggctttttctccgttttcttcatcggcaaccaatacgcgctggtgttgtcttataccttaatcggcatcgcttgggcgggcattatcacttatccgctgacgattgtgaccaacgccttgtcgggcaagcatatgggcacttacttgggcctgtttaacggctctatctgtatgcctcaaatcgtcgcttcgctgttgagtttcgtgcttttccctatgctgggcggcttgcaggccactatgttcttggtagggggcgtcgtcctgctgctgggcgcgttttctgtgttcctgattaaagaaacacacggcggggtttga

SEQ ID NO: 63846 - DNA, 252 bp, Neisseria meningitidis
ttgcacatcggcggcgacatcaccgtcaaaaccctgaccgccgccgcttttacccgcttcagacagcaatgtcgtctgaaagacacctgcgcggttgatttgagcggcgtcggacgcgccgattccgcctgcgtgtcgctgctgctcgaagtgctgcgcggttgcaaaggcagcgtcaggctgaccggcattcccgaatccgtgcgcgcgctgtccgaactgtacgaaatcaaagactggctgaaatcatga

SEQ ID NO: 63847 - DNA, 366 bp, Neisseria meningitidis
ttggactaccgcttcggaaggcagtaccgcttgttgaaaacggatgatttttcatccgtttttgcattcagaaaccgccgcagccgcgacctgctgcaagtttcgcgttcaaacggcaacgggctggatcatccccgcatcggtctggtggtcggcaaaaaaaccgccaaacgcgccaacgaacgaaattatatgaagcgcgtcatccgcgactggttcagattgaacaaaaaccggctgccgccgcaggatttcgtcgtgcgcgtccgccgtaaattcgacagggctaccgcaaaacaggcaagggcggaactggcacaactcatgttcggcaaccccgcaaccggatgcgggaaacaggcatga

SEQ ID NO: 63848 - DNA, 465 bp, Neisseria meningitidis
atgcaaggcaatcaagctgttgttgattatatgaacgaattgctgtctggcgagctggcggcacgcgaccaatactttatccactcccgcctctactccgaatggggctacaccaaactttttgaacgtctcaatcacgagatggaagaagaaaccacacacgccgaagacttcatccgacgcatcctgatgctgggcggtacgccgaaaatggcgcgcgccgagctgaatatcggcacggacgtggtttcctgcctcaaagccgacctgcaaaccgaatacgaagtgcgcgacgctttgaaaaaaggcatcaaactgtgcgaagaggctcaagactatgttacgcgcgacctgatggttgcccaactgaaagataccgaagaagaccacgcccactggctggaacagcagcttcgcctgatcgagttaattggcgaaggcaactactaccaaagccaactgtaa

SEQ ID NO: 63849 - DNA, 1662 bp, Neisseria meningitidis
atgactgacaacagccctcctccaaacggacacgcccaagcacgcgtccgcaaaaacaacaccttcctctctgccgtctggctggttccgctgatcgcgctgattgccggcggctggctttgggttaaggaaatccgcaacagggggcctgtggttacgctcttgatggacagcgcggaaggcattgaggtcaacaatacggtcattaaggtattgagcatcgatgtcggacgcgttacccgaatcaaactgcgcgacgaccagaaaggcgtggaagtaaccgcccaactcaatgcggacgtatccggcctcatccgcagcgacacacagttttgggtggtcaagccgcgtatcgaccaaagcggcgtaaccggtttgggtacgctgctttcgggttcgtacatcgcctttacacccggcaaaagcgacgaggcaaaagacgtgttccaagtgcaggacattccgcccgttaccgccatcgggcaaagcggtctgcgcttgaatttgattggtaaaaacgaccgtatcctcaacgtcaacagccctgttttgtatgaaaactttatggtcgggcaaatcgaaagcgcgcatttcgacccgtccgaccaaagcgtgcattacaccatcttcatccaaagccccaacgacaaactgattcattccgccagccgtttttggctggaaagcggcatcaatatcgaaaccacaggcagcggcatcaaactcaattccgcccctctgcctgccctgctgtcgggcgcgatttcatttgattcgccgaaaaccaaaaacagtaaaaacgtcaaaagcgaagacagcttcacgctttacgacagccgcagcgaagtcgccaacctgcctgacgaccgctcgctgtactacaccgcgtttttcaaacaatccgtgcgcggcctgaccgtcggttcgcccgtcgagtacaaagggctgaatgtcggcgtggtttccgatgttccttatttcgaccgcaacgacagcctgcacctgtttgaaaacggctggattcccgtacgcatccgtattgagccttcccgtttggaaatcaatgccgacgaacaaagcaaagaacattggaaacaacaatttcagacggccttaaacaaaggcctgaccgccaccatctccagcaacaacctgctgaccggcagcaaaatgattgagttgaacgatcagccttccgcctcgcccaagctgcgaccgcataccgtttatgcaggcgataccgtcatcgccacacggggcggcggtttggacgacttgcaggtcaaactggcggatttgctggacaagttcgacaaactgcctttggataagacggttgccgaattgaacggttcgcttaccgagctcaagtccacactcaaatctgccaatgccgccctaagctctatcgacaaactggtcggcaaaccgcaaacgcaaaacattccgaacgaactgaaccaaaccctgaaagaattgcgtcaaaccctgcaaggcgtatcgccgcaatcgcctatctacggcgacgtacaaaatacgctgcaaagtttggacaaaaccttaaaagacgttcaacccgtcattaacactttgaaagaaaaacccaacgcgctgattttcaacagcagcagcaaagaccctatcccgaaaggaagccgataa

SEQ ID NO: 63850 - DNA, 816 bp, Neisseria meningitidis
atgactactctcaaacccgccctgcccgcttatctggacaacatccgcatcatcctcacgcgcaccagccatcccgccaacatcggctctgccgcgcgcgcgatgaaaacaatgggcctgcacaaactgaccatcgtcgcccccaatctgatggctacgccgatgacggaaaacccgcccgttttccatcccgatgacgtgcaaagttttgtactgcccgaagaaagtttcatcctcgcttcgggcgcggcggacgttttggaaaatgccaccattgccgcttctttggacgaagcccttgccgacacgaccatcgcctgcgccctgaccagccgccgccgcgaaattaccgcgccgctgcaaacgccgcgcgatttggtgcccgaattactacaggccgccaaccgcggcgagaaagtggcgctggttttcggcaacgagactttcggcttgagcatcgaagaagcccaagcctgcaaccgactgatgaccatcaacggcaatcccgactatttctcgctcaacctcgcccaagccgtgcaggtcgtgtgctacgaaatcttcagccagaccgatatgcccatgacccatcttcaacaggaagaccacgccgcgacccacgagcaaatcaaaggcatggtcgcccacatggaaagcgtgatgaacgacatcggctttttcaaccgccgcaacggcgagcgtctgatgcgccgtatgcagagcctgttcggacgcgccaacacgcaaaccgaagacatcgatatcctgcgcggttttttcaataccgtcagccatcgtatccataaaaaagactga

SEQ ID NO: 63851 - DNA, 822 bp, Neisseria meningitidis
atgatgcggatattttcgacaggaggaaaaatggatacgcaggcagttatcacacatattgtccgatggttggacaaatacgccgctcaggcaaatgcaaaagggttcgtcgtgggcgtttccggcggcatcgattccgccgtcgtctccgcactcgccgcccgcaccggccgcaccacgctgcttctggatatgccgatacgccaacaccccgaccagcttgagcgggcaaggctgcacatccgcaatctgcaagggcaatatgccaatgtaagcgcgcaaacggtcgatctgaccgacaccttccagacctttgaacaaaccgtcggcgttcatcagacggcatttgacaatcagccgctttccctcgccaacgccagaagccgcctgcgtatgctgaccctgtactactacgggcagatacacggactgctggttacggggacaggtaataaaatcgaagatttcggcgtgggcttttttactaaatacggcgacggcggcgtggacatcagcccgattgccgacctgaccaaaacgcaggtttaccggcttgccgaagcattgggcgtggacgaggcgattcaaaaagccccgccgaccgacggcctgtgggatacggaacgcaccgacgaggaacagatgggcgcaagctatcccgaactggagtgggcaatgggtgtgtacggcacgcgcaaacccgaagattttgaagggcggcggcgcgaagttctggaaatctatacgcggcttcaccgcgccatgcagcacaaaatcaacccgattcccgtgtgccgcattccgcccgaattgcttggctga

SEQ ID NO: 63852 - DNA, 993 bp, Neisseria meningitidis
atggaaaatgtaaaccgcatcgttgcagaaggcattgccgcagtagaagctgcgcaagacttcaacgctctagaacaaatcaaagcccgttatcttggcaaaaccggcgagttgaccggacttctgaaaactttggggcaaatgtcgcctgaagagcgcaaaaccataggtgcgcatatcaatgaatgcaaaaaccggtttcagacggcttttaatgccaaacgcgatgccctcaacgaagccaagctgcaagcccgacttgccgccgaagccctcgacattaccctgcccggacgcgctcaggaaggcggcagcctgcatcccgtaaccctgaccttgcaacgtgtggtcgaactctttcacggaatgggtttcgaagtggcggacgggcctgaaatcgaagacgattttcacaatttccaagccctgaacatccctgcaaaccatcctgcccgtgcgatgcaggatacgttttacgttgaaaacggtgatgttttgcgtacgcacacttccccgattcaaatccgctatatgctcgataaaaaagagccgcccatccgcattatcgcccccggccgcgtttaccgtgtggacagcgatgccacgcactcgcctatgttccatcaggcggaaggtttgtgggtagaagagggcgtaacttttgccgacttaaaagcagtgttcacggattttatccgtcgcttctttgaacgcgatgatttgcaagtacgtttccgcccgtctttcttcccgttcaccgaaccgtctgccgaaatcgacattatgggcgaaaacggcaaatggctggaagtcggcggctgcggtatggtgcatcccaacgtgttgagaaatgtgaatatcgatcccgaaaaatacaccggtttcgctttcggtatcggtctcgaccgtttcgcgatgctgcgttacaacgtgaacgatttgcgcttgttttttgataacgatttgaattttttgaagcagtttgtaaaatga

SEQ ID NO: 63853 - DNA, 963 bp, Neisseria meningitidis; identical to SEQ ID NO: 59038

SEQ ID NO: 63854 - DNA, 384 bp, Neisseria meningitidis
atgactttcgcctattggtgcattctgattgcctacctattgccgcttttttgtgcggcgtatgccaaaaaagcgggcggattccggtttaaagacaaccacaatccgcgcgattttctggcgcacacgcaaggcgcagccgcccgtgcccacgctgcgcagcaaaacggttttgaagcttttgcaccgtttgccgccgccgttttgacggcacacgcaaccggcaatgccggacaagcaaccgtcaacacgcttgccggcctgttcatcctgttccgcctcgcctttatctggtgctacatcgcagacaaagcagcattgcgctcgctgatgtgggcgggcggatttgcctgcaccgtcgggctgtttgtcgcggctgcttga

SEQ ID NO: 63855 - DNA, 900 bp, Neisseria meningitidis
atgtggttcaagcagattagtttttatccgctcaacaaagaaaagctgcctgaggcagacgtacttgccgacaaacttgctgaagctgaatttacccattgccaaggcttagactggttcagcgaaggctttaccgcaccggtttcattctccccggaactcgttttccctgccgactttaccttgcgcgtcgccctgaaaaaagaggaaaaagtcctgcctgccggcgtcatccgcgatattttggaagagaaggtagcggaaatccaaaacaatgaagcccgcaatgtcggtcgcaaagaaaaacaagagcttaaagagcaaattacagacgacctgctgccccgagcgtttacccgcagcagccgtacagaagcggtgtttaacacccgccacggctacctgctcgtcaataacgcggcttccgccaaagcagaaaacatcctgaccaagctgcgcgaagctttgggcggtttggaagcctcgctgccgaataccaaacaatcgccctcttccctgatgaccggctggctgttgcaagggcattgcgaaggcggttttgaattggacagcgattgcgaactcaaaggcacgggcgatattgttcccgtcgtcaaagtatccaaacaagatttaaccgccgacgaagtggttcaacacgtcaaaaacggtaaaaccgttacccaactgggcttggtgtggcgcgaacaaattgcctttatcctcacgcaagacttcacactcaagcgcatccaatacctcgacgtattgcaggaagaagccgaaagcaacggcgacgatgccgccggtctcgccttcgcctcgcaaatcctgatggcggaatccgtcagcatcatgttggaagagctggtttcctatttgggcggctggcaagattga

SEQ ID NO: 63856 - DNA, 699 bp, Neisseria meningitidis
atgaaatccagacacctcgccctcggcgttgccgccctgttcgcccttgccgcgtgcgacagcaaagtccaaaccagcgtccccgccgacagcgcgcctgccgcttcggcagccgccgccccggcagggctggtcgaagggcaaaactataccgtccttgccaacccgattccccaacagcaggcaggcaaagtcgaagtccttgagtttttcggctatttctgtccgcactgcgcccacctcgaacctgttttaagcaaacacgccaagtcttttaaagacgatatgtacctgcgtaccgaacacgtcgtctggcagaaagaaatgctgacgctggcccgccttgccgccgccgtcgatatggctgccgccgaaagcaaagatgtggcgaacagccatattttcgatgcgatggtcaaccaaaaaatcaagctgcaaaatccggaagtcctcaaaaaatggctgggcgaacaaaccgcctttgacggcaaaaaagtccttgccgcctacgagtcccccgaaagccaggcgcgcgccgacaaaatgcaggagctgaccgaaaccttccaaatcgacggtacgcccacggttatcgtcggcggcaaatataaagtcgaatttgccgactgggagtccggtatgcacaccatcgaccttttggcggacaaagtacgcgaagaacaaaaagccgcgcagtaa

SEQ ID NO: 63857 - DNA, 270 bp, Neisseria meningitidis; identical to SEQ ID NO: 48223

SEQ ID NO: 63858 - DNA, 1227 bp, Neisseria meningitidis; identical to SEQ ID NO: 46568

SEQ ID NO: 63859 - DNA, 1011 bp, Neisseria meningitidis
atgcttccattctttccagaaccctccctttcctatacgcaacaaaaccgtaccgccgttttgctgttgaacctcggcacgcccgacgcgccgaccgcgcaggcggtacgaccttatctgaagtcctttctgaccgaccggcgcgtcgtcgaactgcccaaatggctgtggtatcccattctgcatggtctggtactgacgttgcgccccaaaaaaagcgcgcacgcctatgaaaaaatctggtttaaggaaggttcgcccctagaagtttacacagcacgccaagctgccgcgcttgccgaacgtatgcccgacctcatcgtccgccacgccatgacctacggcaatccttcggtggcagacgtattgtcggaactgaaggcgcaaggcgcgggcagactgctggtcatcccgatgtacccgcaatatgccgcttccagcagcggcgcggcagtagataaggtgtgcgaacaattactgctgcaacggaaccaaatgagcgtccgcaccgtttcgcgcttttatgacgataccggctacattgatgcgatgaaaaaccacatcctccgatattgggcggaacacgggcgcgggaaaaaactgatgttgagttttcacggcgtaccgcagaagcaccacgacctcggcgacccctatcccgacgagtgccgccacaccgccaaactgcttgccgaagcactggaactgaccgaagaccaatatgtcgtatcgttccaaagccaattcggcagggcaaaatgggttacaccgagcacgcaggatttgttcggcaaactgcccaaacagggggtaaccgagctggacgtattctgcccgggctttttggcagactgtttggaaacactggaagaaatcgccctgatggggcgggaacagttttatgaagcaggcggcaaaagctaccgctacatcccctgcctcaacgacaaccccgactggatagacgcactcgtcgcacttgccgaagaaaaccttggcggctggcgttga

SEQ ID NO: 63860 - DNA, 1437 bp, Neisseria meningitidis
atgccgctgctgtctgtcgagttcgcactgttctttctcgccttcctgccgatttactggggcttggcgaaatacccgtccgtccaaaacctgctgcttttggctgccggtatgggctggctctaccatatcggccccgtatttgcggcaatcgtcgtcctttattcctcctgcgtgtaccttttgggcgaactgctccgttccgatcgcgaaaatacgcgccgcttttggctggggtgcggcattgccgtctcgctgaccgtcttgggctttttcaaatatttcgactttttccgcccgctgattgcacaatatgccggacaaggcggcgcaatcgacatcctgatgccgctggggctttcgtattacaccttccagtcaatcgcctacctggtttactgcttccgtgcgccgcacgccgcgcgtttcgagtggcacgaactgctgctgcacctgagttttttccccaccgttacctccggcccgattatccgcgccgccgcattcaaaagcgcggacggcgaacaggcgggcgcattggcgcaaatccgtacccgccaaccgcgttcgcccgtccgtcccgcactcgccgtttccctgattctgctgggtattgccaaaaaatggtggctggcggggatgctggcggaaaactgggtatcgcccgtatttgaaaaccccgcccaattcgacggctggggcgtattgggcggcgtgtacggctataccttccaactcttcctggacttttccggatattccgatttggttatcggcatgtcaatgctgctgggcttccgactgcccaaaaacttctcagcaccgcttcgtgccgcgaatatccgtgcattttgggacaaatggcacatcagcctttccacctggatacgcgactacatctacatccccttgggcggcagcaaaaaaggctttttacggacacagctcaacctgatggcggcaatggtactctcaggcatctggcacggctacggctggaacttcctcatttggggcgcgctgcacggcacggcactggtgctgctcaacacgggcgaccgctatttcggacgcaacgcactatgccgtctgaaataccttgcgccgctctcgtggtttgttaccttccatttcgtctgcctgaccttcgtcgtcttcaataccgcaaaccccgacgatgcaggcgcagttttcaatgccctctttgccaatgccaacggctggaatgcgccgcaacgggcggatatgctgctgcttgcctcgtttgcatccgtgatgctgctctacccttacctgcaacgcgctttcgacggcgcggtcaaaggtttggaaaaaatcccgatgtggctgtggtttatccccgtttccgccgtcctgctgctgattatcgtattcgccccctcggggattcccggctttatttatgccaatttttaa

SEQ ID NO: 63861 - DNA, 486 bp, Neisseria meningitidis
atgtttgtgaacgagaaagatccttatgcggctctgtttgcgggactggtgtttttgacgctgccgtttgcgttggcggtgcatgatgccttggcatttgtgttcggacggacggggctgctggtgtcggtgtcggacggcggattcggctggcgaggaggctgggacggcgtggtgtggtttgtgtatggcgtgtttgcgtttttgaacctggtcgtgtcggcgggcctgacgaaactggcgtacaaaaagatgatgcggcggcattcccgttacgcgctgtttctgtcgggcgtggcggcttgcgcggctgctgcggtcgcgtggattttcgagctgttgttgggcagtgccgccttgggcgggctgcgcggggaggcggtgtcggaatatgcgtttgccgtgtggctggtgtctatgctgacgctgcccaaacgcctgacgcgtgcgccggtgcagccggtggtgtttcacaggaaaaaatag

SEQ ID NO: 63862 - DNA, 345 bp, Neisseria meningitidis
atgctgccgaataaagttttgggtaaatatgattggaatgtggacggaaaaacaggaataggcgcggcatgggttgtcgctgcgtttatcctgcccatattggtgtgggcgatatttatgttgtcgcggatgcaaggctggcttgcgccgaccaaggcaaacccgatatgggcgttggtgtggctgctgatctgcctgccctgcctgctgattgcgtccaaatgtttgggttggcaaggctggcggctgttggcaaacgttcttgcctgcctcgccgtgcgcaccctgttgagtgtgcctgccgcgctgctgattgcgttcacgctgcaagacctgctcaaatag

SEQ ID NO: 63863 - DNA, 1248 bp, Neisseria meningitidis
atgttgaaacaaacgacacttttggcggcttgcgcctcctttgccgcactgttgggcggttgtgctacccagcagcctgcccccgtcattgcaggcaattcaggtatgcaggacacgccgtcttcggcagtttacaacaacccctatggagcaacgccgtacagcccggctcctgccagcgatgcgccttatgtgccgccggtgcaaagcgcgccggtttatacgcctcctgcttatgttccgccgtctgcacctgccgtttcgggtacatacattccttcttacgcacccgtcgacatcaacgcggcgacgcatactattgtgcgcggcgacacggtgtacaacatttccaaacgctaccatatctctcaagacgatttccgtgcgtggaacggcatgaccgacaatacgttgagcatcggtcagattgttaaagtcaaaccggcaggatatgccgcaccgaaagccgcagccgtaaaaagcaggcccgccgtaccggctgccgcgcaaccgcccgtacagtccgcacccgtcgacatcaacgcggcgacgcatactattgtgcgcggcgacacggtgtacaacatttccaaacgctaccatatctctcaagacgatttccgtgcgtggaacggcatgaccgacaatatgttgagcatcggtcagattgttaaagtcaaaccggcaggatatgccgcaccgaaaacctcagccgtagaaagcaggcccgccgtaccggctgccgtgcaaacccctgtgaaacccgccgcgcaaccgcctgtgcagtccgcgccgcaacctgccgcacccgctgcggaaaataaagcggttcccgcgcccgccccgcaatctcctgccgcttcgccttccggcacgcgttcggtcggcggcattgtttggcagcgtccgacgcaaggtaaagtggttgccgatttcggcggcaacaacaagggtgtcgatattgccggtaatgcgggacagcccgttttggcggcggctgacggcaaagtggtttatgcaggttccggtttgaggggatacggcaatctggtcatcatccagcataattcttccttcctgaccgcatacgggcacaaccaaaaattgctggtcggcgaaggccagcaggtcaaacgcgggcagcaggtcgctttgatgggcaataccgacgcttccagaacgcagcttcatttcgaggtgcggcaaaacggcaaaccggttaacccgaacagctatatcgcgttctga

SEQ ID NO: 63864 - DNA, 618 bp, Neisseria meningitidis
atgtttacaggcattgttcaaggattgggaaaactgacggcaatccaccgcccgtcggaggcatttcacacttatgtcgtcgagcttccgcaagaggcggcggacaatctgcaacgcggcgcatcggtcgccaataacggctgctgcctgacgattaccgaaatcgaaggaaaccgcgtcagtttcgatttaatggcggaaactttggcaaaaaccaatttggggctgctgaaggaaggcgattgcgtcaacatcgaacgggcggcgcgtttcggagacgaaatcggcggacacgtcatgagcggacacattatggcaaccgtgcctattgtcgaaatcgaacgggacgggttcaaccgcacggtttggttttcgctcccgcatgaactcaaaccctatatcctgaccaaagggttcgtcggcttggacggttgcagcctgaccataggcaaagtcgaagacggccgtttcaatgtccatctgattcccgaaactttggaacggacgctgttcggcagcagaaaggtcggcgacaggatcaacatcgaaatcgatccgaatacgcaggcaatcgtcgacaccgtcgaacggctgatggcgcaaagatatgcaaagtga

SEQ ID NO: 63865 - DNA, 771 bp, Neisseria meningitidis
atgaacttcaccgacacccactgccaccttgccgatgccgccctgcgcgaaaacctgccgcacatcctgaccgccgcgcggaaagttggggtgaagcggtttatcgttcccgccacctgtccgcaggattggcaaagcgtggcggaactgtcggaaatgccgtccgaacacggtcaaatccgtattgcgctcggcatccatccttggttttcagacggcattgccgagcgtgattgcgtccgcctggaagcgatgttggcacgttatccgcaggcatgggtcggcgaaatcggcttggatttttacgacaaaacccaaacgccgcagcagcgcgaacggcaaatccaagtcttcagccgccagcttgaaatcgcgcaaaccctgcgtcggcgcgtgattatccataatctcaaagccgccgccgacatcgccgccgccgtcaaacggacgggctttacctggggcggcattgtccacgccttttccggcagtattgaagaagcgcacgtgttggcgaaactgggtttcaaaatcggcatcggttcgctgctgctcaacccgaacgcgcgtaaagtgcgcgatacgcttaaagccttgaacgacggggatttcgtattggaaacggatagcccgtttatgttgaaaaacaccgtcaatacgcctgccaacattcttcggattgccgaaattgccgcgcagatacgcggtaccggcgcggcggaaatcgccgcgataacggaacgcaatgccgacagcctgctccgtccctag

SEQ ID NO: 63866 - DNA, 423 bp, Neisseria meningitidis
ttgtccgccgtttttattgcaccttacctgacggcatttcacgaacaagaaaaaacatttgaatatgcggaattgaccgttaccgcccccaaccgcagcggacgggcaatcaaactggatgcagacgggcagcattaccggctttcctgctatgggttcgacagtttgtgcacaggcggcaatatcggcagaaccatcagggtggagcaggttagagccgttttaagcgaaaccgtcggcaaaggttttttaaacggcgttctgttggaataccgcaacagtggcagtgtctatagcaataaagattttgcccgcacggaagaccgccttgtcgaagtgttggcacaacctgccgttttctgcctgaaactgggtattttgcttttattgcccgccattttcctgcgtttgaaaagaatgtga

SEQ ID NO: 63867 - DNA, 114 bp, Neisseria meningitidis; identical to SEQ ID NO: 39856

SEQ ID NO: 63868 - DNA, 801 bp, Neisseria meningitidis; identical to SEQ ID NO: 44476

SEQ ID NO: 63869 - DNA, 798 bp, Neisseria meningitidis
atggataccgcacaaaaacaacgctgggcaataaccctatcctatgacggcagccgcttttacggctggcagaaacaggctgacggcgtaccgaccgttcaagcggcattggaaaacgcacttgcccaaatagcaggagaatctgtcgccaccaccgttgccggcagaaccgataccggcgtgcacgccaccgcccaagtcgttcattttgatactgttgccgtccgtccccaacaggcatgggtgcgcggcgtaaatgcccacctgcccgaaggcattgccgttttgcacgcccaacaggtcgcccccgaatttcatgcacgatttgacgcatacggacggcactaccgctacctgctcgaatccgcccccgtccgttccccactgctcaaaaacagggcaggctggacacacctcaaactcgacatcgggccgatgcgccgggctgccgcctatttgattggcgaacaagacttctccagcttccgcgccgccgagtgccaagcaaaatcccccgtcaaaaccatctaccgcgccgatcttacccaaagcgcaggactcgtccgcctcgatttgcacggcaacgcctttttgcaccatatggtacgcaacattatgggcgcgctcgtctatgtcggcagcggcaggctcagcgtcgaaggcttcgccgccctcattcaagaacgcagccgcctcaaagccccaccgacctttatgcccgacgggctttacctgaccggcgtcgactatcccgaggcatacggcatcatccgcccccaaatccccgaatggctttaa

SEQ ID NO: 63870 - DNA, 1209 bp, Neisseria meningitidis
atgaccggcatcatacattcgctgcttgacaccgacctctacaaattcactatgctgcaagtggttctgcaccagtttccgcagacgcacagcctttacgaattccgctgccgcaacgcctcgaccgtctatccgcttgccgacatcaaggaagacttggaagccgaactcgacgcgctctgccggctgcgcttcacccacgacgaactcggctatctgcgctccctgcgtttcatcaaaagcgactttgtcgattatctcgaactcttccagctccaacgccgctttgtcgaagtcggcacagacgataaaggccgtctgaacatccgtatcgaaggcccgatgatacaggcgatgttctttgaaatcttcatcctcgccattgtcaacgaactttacttccgccggctggaaacccctgccgttatcgaagaaggtgaacgccggcttcaagccaaagccgcgcgcctcaaagaaatcgccgccgcacaaaaccccgacgatccgcccttcctgatttccgacttcggcacgcgccgccgctacaagctcgcgtggcaggaacacgtcatccgcaccctgctcgaagccgccccaagcatcgtgcgcggcaccagcaatgtctttctcgccaaaaaactcggcattacccccatcggcaccatggcgcacgaattcctccaagccttccaggccctcgacgtacgcctgcggaatttccaaaaggccgcgctcgaaagctgggtgcacgaataccggggcgatttgggcgttgccctgaccgacgttgtcggtatggatgccttcctgcgcgatttcgacctctatttcgccaaacttttcgacgggctgcgccacgacagcggcgacccttacgtttggggcgacaaagcctacgcccactatcaaaagctcaaaatcgacagccgcaccaaaatgctgaccttctccgacgggctggacatcgaacgctcttgggcattgcaccaatatttcaaagaccgcttcaaaaccggcttcggcatcggcaccaacctcaccaacgatatggggcatacgcccttgaatatcgtcttgaaactggtcgaatgcaacgggcagtccgtcgccaagctgtccgactctccgggcaaaaccatgaccaacaacagcaccttcctcgcctacctgcgccaagtgttcgacgtacccgaacccgaaacgccgtaa

SEQ ID NO: 63871 - DNA, 4476 bp, Neisseria meningitidis
atgcgcttcacacacaccaccccattttgttccgtattgtccaccctcggtctttttgccgtttcccctgcttactcatccattgtccgcaacgatgtcgattaccaatattttcgcgactttgccgaaaataaaggcgcgttcgccgtaggtgcaagcaatatttccatccaagacaagcaaggcaaaatattaggcagggttctcaacggcatccccatgcccgacttccgcgtcagcaaccggcaaaccgccatcgccaccctgattcacccccaatacgtcaacagtgtcaaacacaacgtcggctacggttccatacaattcggcaacgacacccaaaatccagaagaacaagcctatacctaccgcctcgtatcacgcaacccgcacccggactacgactaccaccttccccgcctcaacaaactggttaccgaaatctcacctgccgcactcagcagcgtacccttgcttggaaacggccagccaaaggccaatgcctacctcgataccgaccgcttcccctactttgtacgactcggctcaggcacgcaacaagtccgcaaagcagacggcacgcgcacacaaaccgccccggcataccaatacctgaccggcggcacgccgctgaaagtattgggtttccaaaaccacggcttactcgtcggcggcagcctgaccgaccaaccccttaacacctacgcaatcgccggagacagcggttcccccctgtttgccttcgacaagcatgaaaaccgctgggtgcttgcgggcgtactcagcacctacgccggcttcgacagcttcttcaacaaatacatcgtcacgcaacccgaattcatccgttccaccatccgccaatacgaaacccggctggatgtcgggctgaccaccaacgaactcatatggcgcgacaacggtaatggcgacagcaccctgcaagggctcaacgaacgcatcaccctgcccattgcaaacccttcgcttgccccacaaaacgacagcaggcacatgccgtctgaagatgccggcaaaacgctcatcctatccagcaggttcgacaacaaaacactgatgctggcagacaatatcaaccaaggcgcaggcgcattgcagttcgacagcaacttcaccgtcgtcggtaaaaaccacacatggcaaggtgcaggcgttatcgtagccgacggcaaacgcgtcttctggcaagtcagcaaccccaaaggcgaccggctctccaaactgggcgcaggcacgcttatcgccaacggacaaggcatcaaccagggcgacatcagcatcggggaaggcactgtcgtactcgcccaaaaagctgcttcagacggcagcaaacaagcattcaaccaagtcggcatcaccagcggcaggggcacggccgtcctcgccgacagccagcaaatcaaacccgaaaacctctatttcggcttcaggggcggacggctcgacctcaacggcaacaaccttgcctttacccatatccgccatgcggacggcggcgcgcaaatcgtcaatcacaaccctgaccaagccgcgacactgacgctgaccggcaaccccgtcctcagtcccgagcatgtcgagtgggtgcaatggggcaaccgtccgcaaggcaacgcggcggtttacgaatacatcaacccgcaccgcaaccgtcggaccgactacttcatactcaaacccggcggcaacccgcgcgaatttttcccgttaaatatggaaaactcaacaagctggcaatttatcggcaacaacaggcaacaggccgccaaacaagtcgcccaagccgaaaatgcccgccccgacctaattaccttcggcggatacttgggtgagaacgcgcaaacgggcaaagccgcaccgagttacagcaaaaccaatatcgaatgggtgaatggtccaaacaccccacacaagccctcgccctatacgaatacgccaacccgcacaggggcaggcgtaccgacgattaccgcctcaaagaaggcggcaaccccggcgcctacttcccatggaatgcctacagcacccaagactgggaatttctcggacatgaccggcgaagcagccatagaaaaaacccgccatatcgcaaatgccgccgtatacggccggcccgaataccgttacaacggcgcactcaacctgcactatcgtcccaaacgcaccgacagcacgctgttgctcaacggcggcatgaaccttaacggggaagtcttgattgagggcggcaatatgattgtgtcaggcaggcccgtaccccatgcctacgaccaccaggccaaacgcgaacccgttcttgaaaacgaatggaccgacggcagcttcaaggctgcacggttcaccctgcgaaaccatgcccgactgacggcagggcgcaataccgcgcatctggacggcgacataaccgcatacgatctgtccggcatcgacctcggctttatccaaggcaaaacaccggaatgctaccgctcctaccatagcggcagcacccactgcacacccaacgccgttttaaaagccgaaaactatcgtgcactacctgcaacgcaagtacgcggcgacattacccttaacgaccgttcagagctccgcctgggcaaagcacacctgtacggcagcatccgtgccggcaaagacaccgcagtccgcatggaagcagacagcaactggacactttcccagtccagccacaccggcgcactgacgcttgacggcgcacaaattaccctgaaccccgatttcgccaataatacacacaacaaccgcttcaacacactgaccgtcaacggcacacttgacgggttcggcacattccgattcctgaccggcatcgtccgaaaacaaaatgccccccccctcaaactggaaggggacagccgcggcgcattccaaatccacgtcaaaaacaccggacaagaacctcaaacaaccgaatcgcttgcacttgtgagcctcaatccgaaacacagccaccaagcccgattcaccctccaaaacggctatgccgatttgggtgcctaccgctacatcctccgcaaaaacaacaacggatacagcctgtacaacccgctcaaagaggccgaacttcaaattgaagccacgcgtgcggaacatgagcgcaaccaacaggcatacaaccaattacaggcaaccgacatcagcagacaggttcaacatgactctgacgcgaccaggcaggcactacaggcctggcagaacagtcaaaccgaacttgcccgcatcgacagccaagtccaatatctgtccgcccaattgaaacagacagacccgctgaccggcattctgacgcgtgcccaaaacctgtgtgccgcacaaggatacagtgtcgatatctgccgtcaggttgccaaagccgccgacacgaacgacctgacactcttcgaaaccgaactggatacgtatatagaacgtgtagaaatggccgaatccgaacttgacaaagcacggcaaggcggcgatgcgcaagccgtcgaaacagcccggcacgcctacctgaacgcactcaaccgtctgtcccgacaaatccacagtttgaaaaccggcgttgccggcatccgtatgccgaacctggccgaactgatcagccggtcggccaacaccgccgtttccgaacaggccgcctacaataccggccggcaacaggcgggacgccgcatcgaccgccaccttaccgatccgcagcagcaaaacatctggctggaaaccggtacgcaacaaaccgactaccatagcggcacacaccgtccctaccaacaaactaccaactatgcacatatcggcatccaaaccggcatcaccgaccgtctcagtgtcggtacgattttaaccgatgagcgcacaaacaaccgttttgatgaaggcgtatccgcccgaaaccgcagcaacggcgcacatctgttcgtcaaaggggaaaacggcgcactctttgccgcggcagatttaggctacagcaacagccgtacccgatttaccgattatgacggggctgccgtccgccgccacgcatgggatgcaggcatcaacaccggcatcaaaatcgataccggcatcaacctcagaccctatgccggcatccgtataaaccgcagcaacggcaaccggtacgtactcgacggcgcagagataaacagcccggcgcaaatccaaaccacatggcatgccggcatccgtctcgataaaaccgtcgaactgggtcaagccaagctgacccccgctttcagcagcgattactaccatacccgccaaaacagcggttccgccctcagcgtcaacgaccgtaccttactgcagcaagccgcccacggcacactgcataccctgcaaatcgacgccggatacaaaggctggaacgccaaacttcatgccgcttacggcaaagacagcaacaccgcccgccacaaacaggcaggaatcaaaataggctacaactggtaa

SEQ ID NO: 63872 - DNA, 375 bp, Neisseria meningitidis; identical to SEQ ID NO: 38650

SEQ ID NO: 63873 - DNA, 1422 bp, Neisseria meningitidis; identical to SEQ ID NO: 55200

SEQ ID NO: 63874 - DNA, 2121 bp, Neisseria meningitidis
atggcctatcaagttctcgcccgaaaatggcggcccaaaaccttttccgacctagtcggtcaggaacacgtcgtcaaagccctgcaaaatgccttggacgaaggcaggctgcaccacgcctacctgctgaccggtacgcgcggcgtaggcaaaaccaccattgcccgcatccttgccaaaagcctcaactgcgaaaacgcgcaacacggcgaaccttgcggcgtgtgcgaaagctgcacccaaatcgatgccggacgctatgtagatttattggaaatcgatgccgcttccaacacaggcatcgacaacatccgcgaagtattggaaaacgcccaatacgcgccgaccgccggcaaatacaaagtctatatcatcgacgaagtgcatatgctttccaaaagcgcgttcaacgctatgctcaaaacgctggaagagccacccgaacacgtcaaattcatccttgctacgaccgatccgcacaaagtccccgttaccgtcttgagccgctgcctgcaatttgtcttacgcaatatgactgcgcagcaggttgccgaccacctcgcccacgtcctcgacagcgaaaaaatcgcctacgaacccgtcgccctgcaacttttgggacgcgccgccgccggatcgatgcgcgatgccttgagcctgctcgaccaagccatcgccctaggttcgggcaaagttgccgaaaacgatgtccgccaaatgatcggcgcggttgacaaacaatacctttacgaactcttgacaggcatcatcaaccaagacggcgcagccctgctctccaaagcgcaggaaatggcggcgtgtgccgtcggctttgacaacgccttgggcgaacttgccatactgctgcaacacctcgccctgatacaggcggtgccctccgccttggcgcactacgaccccgattccgatattttgcaccgcctcgcccaaaccataagcggcgaacaaatccagctttactaccaaatcgccgtccacggcaaacgcgacctgagcctcgcccccgacgaatacgccggctttatgatgaccctgctgcgtatgctggcgtttgcgcccttggcggcagcttcgtgtgatgcaaacgccgtgattgaaaataccgaactaaaatccccatcggcacaaaccgccgaaaaggaaaccgctgcaaaaaagccccaaccgcgccctgaagcagaaaccacccaaacgcccgttcagacggcatccgcagcggcaatgccgtctgaaggcaaagctgccgaacccgtttccaatcaagaaaacaacgatgttccgccttgggaagacgcaccggacgaagcccaagccgcagccggcacggcgcaaacgtcggcaaaaagcattcagacggcatccgaagccgaaacatcgcctgacaatcaagtttccaagaacaaggcagccgacaacgaaaccgagacttccttgtccgaagtgccgtctgaaaaccccattcaggcaacaccgaatgatgaagccgttgaaacggaagcatttgcgcacgaagcccctgcagaacctttctacggttacggctttccggataatgactgccccccggaagacggcgcagaaatcccgccgccggattgggaacacgccgcccctgccgatgcggaagaagaaaacaacgccgacgaaggcagcaacgacgaaaacaacacgccgtccgccccgccgcccgagttttccaccgaaaactgggcagccatcgtccggcatttcgcccgcaaactcggcgcggcgcaaatgccggcgcaacactccgcgtggacggaataccatcccgacaccggcctgatggttttggcaatgaccgccgaagcacgcgccaccgccgacaaaaaacgcctcgacaaaatccgcgacacccttgcccaagcctacgggctgcaactcaccctgcaaacccaagactggcacgacgaatccggcagagaaacccccgcaatgcaggacaagcgcgtccaagccgaagacaggcaaaaagcacaagcattgctcgaagccgaccccgccgcacaaaaaatcctccaagcattcggcgcgcaatggcagcccgaatcactggaattggcggcaaaccggccataa

SEQ ID NO: 63875 - DNA, 354 bp, Neisseria meningitidis
atgggaataaaaaatgaacaaataataatttgtaaaaaatataatacagaaatatatcctgtttccgatgtttcaaaaatcggtgttgctgaaaatgtcaaacagacaggcctgtatccgattaacgggttaaggcaccgtcccaaaggtgatactaacggttggtatatctgggccggtgaaaacttctcctatgataaaaattttttcctgcccttgcatacgttccatttgcaaatatggcgacccgaaatcatcccctttttaacacttccgcccggttaccgttttttaattggggaaaacggttatgaagacgtatggtttgatgagttgctattaaatgataattga

SEQ ID NO: 63876 - DNA, 1539 bp, Neisseria meningitidis
atggtttccaaactggacaaatactggcagcaccccgccctctactggcctttgctcatcctttttgccgccgccaccccctttaccttcgcaccctactaccacttttggctgatgcccttgattttcggtgccttcgtccgcctcatcgaactgcgtccgcgttttgctgtctcttccgcctacctgttcggcctgaccgcatacacgacacagttctactggatacacaccgccctgcacgacgtttccggcctgcccgacctctatgccgtaccgctgaccttcctactccccgcctaccttgccctttatccggcactgtgtttctggctgtggaaaaaatttaccctgcctcggggcataaaaatcggtttggtactgcccatcctgtggacgctgaccgagtttgcccgcgagcgtttcctgaccggattcggctggggcgcaatcggctactcccaaatcaccccggacagcccgctcgccggctttgccccattgggcggcatccacatggttacactggcaaccgcctttctcggtgtctggctggttttggcgagtgataacaccacacgttcgggcaaacgcctgcttccaattatcctgattgccgccctgcttgccgcaggctacaccgcccgacaaaccgacttcacccgccccgacggcagccgcagcaccgtcgccctgcttcaaggcaacatcgaccaaaccctcaaatggcgtgaagaccaagtcatcccgaccatacagaaatattacgaacaggtcggcaaaaccactgccgacatcgtcatcctgcccgaaaccgccatccccgttatgcgccaaaacctgccggaaaacatactggcaaaatttgccgaacaggcgcaaaacaacggcagcgcgctcgccgtcggcatcagccaatacacttcggacggcaacggttacgaaaacgccgtcatcaacctgaccggttatcaggaaaacaatcaggacggcatcccctactacgccaaaaaccacctcgtccccttcggcgaatacaaaccgctgcccttcctgaccacgccgctttacaaaatgatgaatatgcccctttccgacttccgcaaaggcggcagtaagcaatccgccctgctgatgaaaaaccaaaaaatcgccttcaacatctgttacgaagacggattcggcgacgaactgattgccgccgccaaagatgccaccctgcttgccaatgccagcaatatggcgtggtacggaaaatccaacgccatgtaccagcacctccaacaatcgcaggcacgggctatggaactcggacgctatatggtccgcgccaccaacaccggcgcaaccgccatcatctcccccaaaggcaacatcatcgcccaagcccaacccgatacggaaaccgtattggaaggacacatcaaaggctatgtcggcgaaacgccctatatgaaaaccggcagttcatggtggttgatgggcatattgaccctagccgcactgattcttttcatcttccgaaacaaagaacactga

SEQ ID NO: 63877 - DNA, 1068 bp, Neisseria meningitidis
atgggcggtaaaacctttatgctgatggcgggcggaacgggcggacatattttccccgcgctggcggtggcggattcattgcgcgcgcgcggccatcatgtgatttggctgggcagcaaggattcgatggaagagcgtatcgtgccgcaatacggcatacgcttggaaacgctggcgattaaaggcgtgcgcggcaacggcatcaaacgcaagctgatgctgccgtttactttgtatcaaaccgtccgcgaagcgcagcggattatccgcaaacaccgtgtcgagtgcgtcatcggcttcggcggcttcgttaccttccccggcggtttggcggcgaagttattaggcgtgccgattgtgattcacgagcaaaacgccgtggcaggtttgtccaaccgccacctgtcgcgctgggcgaagcgggtgttgtacgcttttccgaaagcgttcagccacgaaggcggcttggtcggcaaccccgtccgcgccgatattagcaacctgcccgtgcctgccgaacgcttccaagggcgtgaaggccgtctgaaaattttggtggtcggcggcagtttgggcgcggacgttttgaacaaaaccgtaccgcaggcattggctttgctgcccgacaatgcgcgtccgcagatgtaccaccaatcgggacggggcaagctgggcagcttgcaggcggattacgacgcgctgggcgtgcaagcggaatgcgtggaatttattaccgatatggtgtccgcctaccgcgatgccgatttggtgatttgccgtgccggcgcgctgacgattgccgagttgacggcggcgggattgggtgcgttgttagtgccgtatcctcacgccgttgatgaccatcaaaccgccaacgcgcgttttatggtgcaggcggaggcgggattgctgttgccgcaaacccagttgacggcggaaaaactcgccgaaatcctcggcagcctgaaccgcgaaaaatgtctcaaatgggcggaaaacgcccgtacgttggcactgccgcacagtgcggacgacgttgccgaagccgcgattgcgtgtgcggcgtaa

SEQ ID NO: 63878 - DNA, 1116 bp, Neisseria meningitidis
atgaagattgtaattgcaccggattcgtttaaggaaagcttgacagctcaacaggtagctgaagcaataaaaagaggcttccaacaatcgatagcagatgtggaatgtctcctctgtcctgtcggtgatgggggagaaggcactgtagatgctatccgacattctcttgacctagaagaaaaatgtctccaagtgacaggaccttttggacaaaaagaagtcatgcgctattttcaaaaagaacaactagccctattcgaagttgctgatttggttggtcttggaaaaatcccgctagagaaacgaaatccattacaaatccaaactcgtggtattggagaattgattcgccacctcattagtcaagaaattaaagaaatctatattggcgttggcggtacggccagtaatgatggaggtattgggattgctgctggtttaggttatcaattttatgatgaggatggaaataccttgcccgcttgcggtcaagccttactaaacctagcttctgtttcaacagaaaatcgctatgaaattcctgaagatgttcacattcgtattttagcagatgttgtgagtcccttatgtggacaccaaggtgcgacctatacgtttggcaagcaaaaagggttggattctactatgtttgaggccgtagatcaggcaatacaagatttttatgaaaaagtctcccctgcaacattaaaacttaaaggagcaggagctggtggaggcatcgctggtggtttgtgtgcctttgctcaggcaagtatcgtatctggaattgacacctgcctggacttgattgactttgataagaaagtgtcagatgttgacttggttatcgttggtgaaggaagactagatcgtcaaagtttagcagggaaagcgcctattggtgtagcaaaaagaacccctgtcggagttcctgttgtcgctatttgtggcagtctcgttgaagatttgccttccctgccatttgaaaatatccaagctgccttttctattttggagaaaagtgaacctttagaagatagtttgaaaaatgccagtctctatttggagcatacggcttctaatattggacacttattaaatatgcctaagatttag

SEQ ID NO: 63879 - DNA, 501 bp, Neisseria meningitidis; identical to SEQ ID NO: 39468

SEQ ID NO: 63880 - DNA, 225 bp, Neisseria meningitidis
atggacgcggttcaagagttggaacgccgtattgtcgaattggaaatccaatccgcgcttcaggaggacgtaatcgcccgcctgaacgcgatggtggcggaattgcggcagacgctggatttgcagcaggctcagttgaggctgctgtatcaaaaaatgcaggacaggaatcccgacgcgcaagagccgtattccctgcgcgacgagattccgccgcattattga

SEQ ID NO: 63881 - DNA, 510 bp, Neisseria meningitidis
atgaaaaagaaactgctttcgggcatcaaatttgccgttcagacggcattggtgtttttattggtgtcgctgtttttggattggatacgcaagcccgacgaacctgccggtgcggcagggcggcctttgaccctgctgtcggggcagcggctgactttgggacagtttagccgagataaggcggttttggtgtatttttgggggagctggtgcggcgtgtgccgttatcagtcgccgataatcgatgatttggcggcggacggcgttccggtcgtcggcgtggcggtacgttccggcagcgcgtccgaagtggcggcgtatatggcaaagcggggcttgggctttccgacggtcaacgatgaggacgggggtttggcaaggtcttggcggattgtcgcaacgcctgccgtcgttttggtcaaaaatgggaaaatggttcactatacgacgggaatcagcagttattggggcttgcgcgcacgaatttttcaggcggatgttttcggttaa

SEQ ID NO: 63882 - DNA, 993 bp, Neisseria meningitidis
atgcaatccgccggtattcaggttttagccgggatagattacgaacccagctgcaaagaaacatatgaagccaatataaatgccaaatttatacaggctgatgtttttgaattgcagcctgaaaccttggaaaaagaactcgggttaaaaaagaatgatgatgatttgattcttataggttgtagtccttgtcaatattggagtgttattcaaacagacaaaagaaaatcggaaaaatccaagagtttacttttggagtttcagcggtttgtagaatattttaatcccggatatgttgttgtagagaacgtaccgggaattctgagcaggatgaaagaaagcgggcttgataatttcataaaattattagaagaaaaaggatttaccgtccatttcggtattcacaatacggctgattacggaattccccaaagtcgtaagaggtttactttgattgcaaacagaataaccgaagagaagctggaaccagccaagtattcgggcaaacggcttacggtacgcgatgttttaggaatggaaaatggctttcccaaaattattgcaggacaccaagacgaaacggattttatgcatagctgtgcgggattatctgatatcaacttgaaacgattggctttgatacctaaaaacggaggaaaccgtttggcttttgcgcatattcccgaattacagctggaatgttttatcggaaaagacaatagttttaaagacacgtttggtaggctatggtgggataagcccgcacctaccataacgaccaaattctttagtatttccaacgggaggtttgcccatcctgaagaagatagggcgttatcactgcgcgaaggtgcaacattgcaatcgttccctcgtaactatgtctttaaagcgggcagcagggacaagatagcccgtttgattggtaatgccgttcctccgatgtatgcggaaaaaataggcagggcaattgttgataatatcgaatgttag

SEQ ID NO: 63883 - DNA, 615 bp, Neisseria meningitidis
atgtcttttgataactatcttgtccctaccgttatcgagcagagcggtcgcggtgagcgtgcattcgatatctattcccggcttttgaaagagcgcatcgtattcttggtcggcccggtaaccgacgagtccgccaatctggtggttgcccaactgttgtttttggaaagtgagaatccggataaggatattttcttctatattaactcgccgggcggttcggtaacggccggtatgtcgatttacgacaccatgaattttatcaagcccgatgtatcgactttgtgcttggggcaggcagcaagtatgggcgcgttcttattgtcggcaggcgaaaaaggcaaacgtttcgccctgcccaacagccggattatgattcaccagcctttaatcagcggcggcttgggcggtcaggcatccgatattgaaattcacgcacgcgaactgttgaaaatcaaagaaaaactcaaccgcctgatggcgaaacattgcggccgcgatttggcagatttggagcgcgacaccgaccgtgataatttcatgtccgccgaagaggctaaagaatatggtctgattgatcaaatcttggagaaccgtgcttctttacagttttaa

SEQ ID NO: 63884 - DNA, 945 bp, Neisseria meningitidis
atgcacctatgtggaaagtattatggagtaaatatgaagctgcgtgatttactgatgggaatattcttggcagtttctgcggcccttctgaatgcaaccatcggcatattcagcaagatattgatggagcagggcttgtctgttcagcatattgcatttttgaaaactttgacaggtttcgtgtttatcagcattttgctttgccgtaccggttttaccagacagattgcggatatttcaagaaagaaagaggcaattttgccgttgctgttaaaagtagcaatttgtgcttttttcggaatttatacgttgtttttctttgaaaccacagcttatcaatatggcaatgctgcgaatgtagtagttgtattaatggcatcggctgccgtatctgccttgatattggacagcatactgttagatgaacgtatttgcatttcttcagtcgtcggtgtgggtttggcagtattggggatcgcaatgatttcttggactggagaaggaagtttagggttgattctgaatgccgcactggcgggctcgggctacggttgtttttccgttttgattaagaaattcggcctaaacggcggtatttatttgacacggatattgatgttttttggaagtatttttttgtttatcccttcattggaaggtattgaggatatacattggcaatggtcttttattccgccactcttggcattgtctttattgccgacgattttaggattttattgtacaactaaagcattggattatttgagtgctgcgaaggtacaggtaactgaattggccgagccattgtttgctgccgtactggcttggttgtttttgaatgaaataccggaaggacgcttctttgtcggcgccattctgattattgccggtattgtgtctatcaatgggctgtatcgaccattgttgaagcgaattgaataa

SEQ ID NO: 63885 - DNA, 531 bp, Neisseria meningitidis
atgaaattcgtcagcgaccttttgtctgtcatcttgttttttgctacttataccgttaccaaaaatatgattgccgctacggcggttgccttggttgccggtgtggttcaggcggcttttctgtattggaaatataaaaagctggatacgatgcagtgggtcggattggtgctgattgtcgtattcggcggcgcaaccattgttttgggcgacagccgcttcattatgtggaagccgagcgttttgttttggctgggcgcgctgttcctgtggggcagccacctcgccggtaaaaacggcttgaaggcgagtatcggcagggagattcagcttccggatgccgtatgggcgaaattgacgtatatgtgggtcggtttcctgatttttatgggtatcgccaactggtttgtgtttacccggttcgagtcgcaatgggtcaactataaaatgttcggctcgactgcactgatgcttgttttctttattattcagggtatttatctgagtacctgtctgaaaaaggaggattga

SEQ ID NO: 63886 - DNA, 348 bp, Neisseria meningitidis; identical to SEQ ID NO: 39706

SEQ ID NO: 63887 - DNA, 474 bp, Neisseria meningitidis
atgcaagttaccaaaaatttcagtctgcgcgagttgacacgcagtgaaaccgcgcgtcgcgcaggtgtaccgaacgaaccgtcgcccgccgaaatggacaacatttattacaccgcacagcagcttgaaaaaatccgcgaatacgtcggtcgcccgattatcgtaacaagctgcttgcgcagcgagcgggtaaacaaattggtcggtggcagtcccacatcggcgcaccgacacggacttgccgccgattgcgacgcatcgggcatgacctcgctggcatttgccaaactgttaatcaaaatgcgtgatgaaggcgcgctgaaattcgaccagttgatactcgaatttcctgagcgcggggacggcgcatgggtacacatcggtttccgacgcaacagcccgcaacgcaaccagatactgaccgcaaccaagaaaaacggcaaaaccgtgtatctgcccgggctgcatccttga

SEQ ID NO: 63888 - DNA, 600 bp, Neisseria meningitidis; identical to SEQ ID NO: 51107

SEQ ID NO: 63889 - DNA, 1155 bp, Neisseria meningitidis
atgaaattcatcgacgaagcaaaaatcgaagtcgccgcaggcaaaggcggtaatggcgcaaccagtttccgccgcgaaaaattcgtaccgcgcggcggcccggacggcggcgacggcggcaaaggcggtagcgtctgggcggaagccgacgaaaacaccaacaccctcgtcgaataccgcttcgtcaaacgctaccaagccaaaaacggcgaaaaaggccacggttccgaccgttacggcgcaggtgcggacgacatcgtcctcaaaatgcccgtcggcaccctcatccgcgacctcgacaccgacgaaatcgttgccgacctcacttaccacggacagcgcgtctgcctagccaaaggcggcaaaggcggcttgggcaacatccacttcaaatcctccgtcaaccgcgccccaaaacaatccacgcccggcgaagaaggcgaagcccgttccctgcaactcgaactcaaagtcctcgccgatgtcggcttattgggtatgcccaacgccggcaaatccaccctgattaccgccgtatccgccgcacgccccaaaatcgccaactaccccttcaccaccctgcatccaaacttaggcgtggtacgcatcgacgaaaaccacagcttcgtgatggccgacatccccggcctgattgaaggcgcggcagaaggcgcaggcctcggccatcgtttcctcaaacacttatcacgtaccggcctgctgctgcacgtcgtcgatttggccccgtttgacgaaaccgtcaaccccgccgaagaagccctcgccatcatcaacgaattgcgcaaatacgacgaagaactctacggcaaaccacgctggctggtgctgaacaaactcgacatgctcgatgaagaagaagcccgggcgcgaacagccgccttcctcgaagccgtcggctgggactacccgaaaccagacgaccgcttccaattcgacatggaaaccccgcgcctcttccaaatcagtgctctgacccaccaaggcacgcgggaattggtacaccaaatcaaccaatatctgactgagaaaaaacgcattgaagctgaaaaagccgaagcggagcaggcagcggcaaaagccgaaattgccgagcagcaacctaaaacggatactggcgtgtttaaaccggagtaa

SEQ ID NO: 63890 - DNA, 2208 bp, Neisseria meningitidis
atgtttcccgaccaatccgcccccaacctgctgcaaggcttgaaccctgaacaactttccgccgtaacctggccgccgcaatccgcccttgtgctggcaggcgcgggcagcggcaaaacgcgcgtgctgaccacgcgtatcgcatggcttttgcaaaccggtcaggcaagcgtgcacagcattatggcggtaacgtttaccaacaaagccgccaaagaaatgcaaacccgactcggcgcgatgattcccgtcgacgtccgcgctatgtggctcggcacgttccacggcctctgccaccgctttctacggctgcaccaccgcgatgccggtttgccgtcatcctttcaaatcctcgacagcggcgaccaactttccctgatcaaacgtctgctcaaaagcctcaatatcgccgaagaaatcatcgcgccgcgttcgctgcaaggctttatcaacgcgcaaaaagaatccggtttgcgcgcttccgtgttgagcgcgcccgacccgcacacgcgccgcatgattgagtgctacgccgaatacgacaaaatctgccaacgcgaaggcgtggtcgatttcgccgagcttatgctccgcagctacgaaatgctgcaaagcaacgaaatcctgcgccaacactaccaaaaccgcttcaatcacattctggtcgacgaattccaagacaccaacaaactgcaatacgcctggctcaaactcatggcgggcggcaacgcggcggtatttgccgtcggcgacgacgaccaaagcatctaccgtttccgtggcgcaaacgttggcaatatgaccgcgctgatggaagaattccacatcgacgcgcccgtcaaactcgaacaaaactaccgctccgtcggcaacatcctcgccgccgccaacgccgttatcgaaaacaacgacgaacgcctcggcaaaaacctgcgcaccgacgccgaagcaggcgacaaaatccgctactactccgcctttaccgacctcgaagaagcccggttcatcgtggacgaaaccaaagccctcgaacgcgaaggctgggatttggacgaaatcgccgtcctctaccgcagcaacgcccaatcgcgcgtcatcgaacaaagcctgttccgcagcggcatcccctacaaaatctacggcggcttgcgcttttacgaacgccaagaaatcaaacacgcgctcgcctacctacgcctcgccgtcaatcccgacgacgacaacgcccttttgcgcgtcatcaacttcccaccgcgcggcatcggtgcacgtaccgtcgaaaatcttcagacggcctcaaacgaacaaggcatcaccctctggcaagccgcctgcaacgccggcgcgaaagccgccaaagtcgtcgccttcgtccgcctgattgaagccctgcgcaaccaagtcggacaactgtccctgtccgaaatcatcgtcggcatcctcaaagacagtggcttgaccgaacactaccgcacccaaaaaggcgacaaccaagaccgtctcgacaaccttgacgaactcgtcaacgccgccatcgagttcaaacccgaagacagcaacttcgaaatcctgcctgaaaacatttcagacgatcccgccttccccatcctcgctttcttgagcaacgccaccctcgaatccggcgaaaatcaagcaggtgcaggcgaaaaagccgtccaactcatgaccgtccacgccgccaaaggcttggaatttaacgccgtcttcctcaccggcatggaagaaggccgcttccccagcgaaatgagccttgccgaacgcggcggcctcgaagaagaacgccgcctcatgtacgtcgccatcacccgcgcccgcaaacgcctctacatcaccatggcgcaacaacgcatgctgcacggacaaacccaattcggcatcgtctcccgcttcgtcgaagagatcccacccgaagtattgcactacctgtccgtcaaaaagcctgcctacgacagttacggcaacacgcgccaaaccgccgcatccaaagacaaaatcatcgacgactacaaacagccccaaacctacgcaggtttccgtatcggacaaaacgtccgccacgccaaatttggcaccggcgtgattatcgatgccgcagataaaggcgaatccgcccgactgaccatcaatttcggcaaacagggcgtgaaagagttggacaccaagtttgcgaaattggaagagatgtaa

SEQ ID NO: 63891 - DNA, 852 bp, Neisseria meningitidis
atgattatccatccccaattcgatcccgtcctcatcagtatcggcccgcttgccgtccgctggtatgccctaagctacatcctcggatttattctttttacctttctcggcagaaggcgcatcgcgcaaggcttgtccgtttttaccaaagaatcgctcgacgacttcctgacatggggcattttgggcgtaattttgggcgggcgtttgggttacgtcctgttttacaagttttccgactacctcgcccatccgcttgatattttcaaggtatgggaaggcggaatgtcgttccacggcggctttttgggtgtagttattgccatatggttgttcggccgcaaacacggcatcggcttcctcaaactgatggacacggtcgcaccgctcgttccgctgggtctcgcttcgggacgtatcggcaacttcatcaacggcgaactttggggacgcgttaccgacatcaacgcattttgggcaatgggcttcccgcaggcgcgttacgaagatgccgaagccgccgcgcacaatccgctttgggcagaatggctgcaacaatacggtatgctgccgcgtcatccctcgcagctttatcagtttgcacttgaaggcatctgcctgttcgccgtcgtttggctgttctctaaaaaacagcggccgaccggacaagtcgcctcgctcttcctcggtggctacggcatattccgcttcattgccgaattcgcacgccaacccgacgactatctcgggctgctgaccttggggctgtcgatggggcaatggttgagcgtcccgatgattgttttgggtatcgtcggctttgtccggttcggcatgaaaaaacagcactga

SEQ ID NO: 63892 - DNA, 1926 bp, Neisseria meningitidis
atgcaactgctggcagccgaaggcattcaccaacaccaattgaatgttcagaaaagtacccgtttcatcggcatcaaagtgggtaaaagcaattacagcaaaaacgagctgaacgaaaccaaactgcccgtacgcgttatcgcccaaacagccaaaacccgttccggctgggataccgtactcgaaggcaccgaattcaaaaccaccctttccggagccgacatacaggcaggggtgggtgaaaaagcccgagccgatgcgaaaattatcctaaaaggcatcgttaaccgcatccaaaccgaagaaaagctggaatccaactcgaccgtatggcaaaagcaggccggaagcggcagcacggttgaaacgctgaagctaccgagctttgaagggccggcactgcctaagctgaccgctcccggcggctatatcgccgacatccccaaaggcaacctcaaaaccgaaatcgaaaagctggccaaacagcccgaatatgcctatctgaaacagcttcagacggtcaaggacgtgaactggaaccaagtacagctcgcttacgacaaatgggactataaacaggaaggcctaaccggagccggagccgcaattatcgcactggcagtagcggcggtaaccggaggagtaggcgcaggccttatcggagcggcacagggtaccgcatcggcagccgtggccgatgctgcctttaccgcattggtgagccaggcttccatttccctgatcaacaacaaaggcaatatcggtaacaccctgaaagagctgggcagaagccgcacggtgaaaaatttggtggttgccgccgctaccgcaggcgtagccgacaaaatcggcgcttcggcactgaacaatgtcagcgataagcagtggatcaacaacctgaccgtcaacctggccaatgcgggcagtgccgcactgattaataccgctgtcaacggcggcagcctgaaagacaatctggaagcgaatatccttgcggctttggtgaatactgcgcatggagaggcagcaagtaaaatcaaacagttggatcagcactacattgcccataagattgcccatgccatagcgggctgtgcggcagcggcggcgaataagggcaagtgtcaagatggtgcgatcggtgcggcggtcggtgaaatccttggcgaaaccctactggacggcagagaccctggcagcctgaatgtgaagggcagggcaaaaatcattgctaaggcgaagctggcagcaggggcggttgcggcgttgagtaagggggatgtgagtacggcggcgaatgcggctgctgtggcggtagagaataattctttaaatgatatacaggatcgtttgttgagtggaaattatgctttatgtatgagtgcaggaggagcagaaagcttttgtgagtcttatcgaccactgggcttgccacactttgtaagtgtttcaggagaaatgaaattacctaataaattcgggaatcgtatggttaatggaaaattaattattaacactagaaatggcaatgtatatttctctgtaggtaaaatatggagtactgtaaaatcaacaaaatcaaatataagtggggtatctgtcggttgggttttaaatgtttcccctaatgattatttaaaagaagcatctatgaatgatttcagaaatagtaatcaaaataaagcctatgcagaaatgatttcccagactttggtaggtgagagtgttggtggtagtctttgtctgacaagagcctgcttttcggtaagttcaacaatatctaaatctaaatctccttttaaagattcaaaaattattggggaaatcggtttgggaagtggtgttgctgcaggagtagaaaaaacaatatacataggtaacataaaagatattgataaatttattagtgcaaacataaaaaaatag

SEQ ID NO: 63893 - DNA, 789 bp, Neisseria meningitidis
atgctcaccctatacggagaaactttcccttcacggctgctgctcggcacggctgcctacccgacccctgaaatcctcaaacaatccgtccgtatcgcccaacccgcgatgattaccgtctcgctgcgccgcacgggaagcggcggcgaggcgcacggtcaggggttttggtcgctgcttcaagaaaccggcgttcccgtcctgccgaacacggcaggctgccaaagcgtgcaggaagcggtaacgacggcgcaaatggcgcgcgaagtgtttgaaaccgattggattaaactcgaactcatcggcgacgacgacaccttgcagccggatgtgttccaacttgtcgaagcggcggaaatcctgattaaagacggcttcaaagtgctgccttattgcaccgaagacctgattgcctgccgccgcctgctcgatgtgggctgtcaggcgttaatgccgtgggcggctccgatcggcacgggtttgggcgcggttcacgcctacgcgttgaacgtcctgcgcgaacgcctgcccgacacgccgctgattatcgacgcgggcttgggtttgccctcacaggcggcacaagtgatggaatggggctttgacggcgtgcttttgaacaccgccgtttcccgcagcggcgatccggtcaatatggcgcgcgccttcgcactcgccgtcgaatccggacggctggcatttgaagccggaccggtcgaagcacgcgacaaagcgcaagccagcacgccgacagtcggacagccgttttggcattcggcggaatattga

SEQ ID NO: 63894 - DNA, 123 bp, Neisseria meningitidis; identical to SEQ ID NO: 50914

SEQ ID NO: 63895 - DNA, 1377 bp, Neisseria meningitidis
atgaaacacatccacattatcggtatcggcggcacgtttatgggtgggattgccgccattgccaaagaagcagggtttgaagtcagcggttgcgacgcgaagatgtatccgccgatgagcacccagctcgaagccttgggcatagacgtgtatgaaggcttcgatgccgctcagttggacgaatttaaagccgacgtttacgttatcggcaatgtcgccaagcgcgggatggatgtggttgaagcgattttgaacctcggcctgccttatatttccggcccgcaatggctggctgaaaacgtgctgcaccatcattgggtactcggtgtggcggggacgcacggcaaaacgaccatcgcctccatgctcgcatgggtcttggaatatgccggcctcgcgccgggcttccttatcggcggcgtaccggaaaatttcggcgtttccgcccgcctgccgcaaacgccgcgtcaagacccgaacagccaatcgccgtttttcgttatcgaagccgacgaatacgacaccgcgttttttgacaaacgctccaaattcgtgcattaccgtccgcgtaccgccgtgttgaacaatctagaattcgaccacgccgacatctttgccgatttgggcgcgatacagacccagttccaccacctcgtgcgcaccgtgccgtctgaaggcctcatcgtctgcaacggacaacaacaaagcctgcaagacactttggacaaaggctgctggacgccggtggaaaaattcggcacggaacacggctggcaggccggcgaagccaatgccgatggctcgttcgacgtgttgcttgacggcaaaaaagccggacacgtcgcttggagtttgatgggcggacacaaccgcatgaacgcgctcgccgtcatcgccgccgcgcgtcatgccggagtcgacattcagacggcctgcgaagccttgagcacgtttaaaaacgtcaaacgccgcatggaaatcaaaggcacggtaaacggcatcactgtttacgacgacttcgcccaccatccgaccgccatcgaaaccaccatagaaggtctgcgtcagcgcgtcggaaacgcccgcatcctcgccgtcctcgagccgcgttccaacacgatgaagctgggcacgatgaagtccgccctgcccgaaagcctcaaagaagccgaccaagtgttctgctacgccggcggtgtggactggaacgtcgccgaagccctcgcacctttgggcggcaggctgcacgtcggcaaggatttcgatgccttcgttgccgaaattgtgaaaaacgcccgaaccggcgaccatattttggtgatgagcaacggcggtttcggcggaatacacaccaaactgctggacgctttgagatag

SEQ ID NO: 63896 - DNA, 459 bp, Neisseria meningitidis
gtgagaaacaatggcggcaaccgtttcggcggtgtgccttacggcaatatggcggtggagcattaccgtatcgttgcgaaggaggacggtaccatcttgggggcggatgcctacgggccgcctaaggcggacgatgtgttggtgttgggtgtcttggaacagggtttccgtttggatgacgcgcaaattattgtgaagacgggaatggcttccggtgtcactgccgatgtcggctttgtgtatgcggatggtgcggatgatgcgaacgtgcctcaggatgcggcttattttgcttcggccgcggactttgcgtctgccgcgcgtatccgctgccagtctgccaaactggttacgctgcccaagcaggctttgctgacggttacgcttaaaggggcggacagtaaggcggctgccgatatcgatattctgatttacggtgagaagttcggtcagttgtaa

SEQ ID NO: 63897 - DNA, 1248 bp, Neisseria meningitidis
atgttttctctagaggcttggataggcttgaggtatctcagggcgaaaaagcgcaacggctttatgtcgtttatcacgatggtttcgattgccggaatcgccttgggcgtaaccgcgctgattgtcgtcttgtcggttatgaacggctttcagaaagaaatacgcgggcagctcctgaatgtcgcgccgcacgccgaaatcggctatatcgacaatacggatacggattggcgcaacctgcttcggtttaccgaaaaccgcaaaggtattttggctgccgcgccctatgtttccaatcaggcattgctggccaatgcgggcgaaatcaggggcgtgcagatgcgcggcattttgccgtctgaagagcgcaaagtggtggaatacggcgacaaaatgccggcaggcaaatttgaagacctgattccgggcgagtttgacattatcctcggtgtcggcttggcggaggctttgggggcggaagtcggcaataaagttaccgtcatcacgccggagggcaatgttacgcccgccggagtcgtaccgaggttgaaacagtttaccgtggtcggtctagttaaaacgggtgtttacgaggttgacaactcattggcgatgacgcatatccaagacgcgcgcgtactgtaccgcttggataaggaagttgcggggctgcggctgaaactcgccgacccgcaaaacgcccccgccttgacggcaaagctgattccggaggcgcaaagggacgcggtttgggtgcgcgattggacgtacaacaaccgcagctattttgaggcggtcgagttggaaaaacggatgatgttcatcatcctgacgctgattatcgccgtggcggcgttcaaccttgtctcttccttggtgatggcggttacggaaaagcaggcggacattgcgattttacggactttgggtctttcccctggcggcgtgatgaagatttttatggtgcagggcgcgttttcaggctttttcggcacgctggcgggtgtggtctgcggcgtgcttttgggttggaacgtcggcagggtcgtggcgttttttgaaaacctgctcggtgtccacctcatcaattcgcaggtttattttatcgactacctgcccagcgatgtcgatatgggcgacgttgccctgattgcctgcatttctttgggactgtctttcgttgccacgctctacccgagccggcgcgcgtcaaaaacccaaccggcggaggctttgcgttatgagtga

SEQ ID NO: 63898 - DNA, 474 bp, Neisseria meningitidis
atgttatccgcagaatctttaaaacaaatcgacatcgagttggcaaaatatcctgccgaccaacgccgctccgcgattatgggcgcattgcgtatcgcccaaaccgaaaaaggctggctcgctcccgagaccatcgcctttgtcgcagactatatcggcatctcgcctgcacaagcctacgaagtcgctaccttctacaatatgtacgaccttgagcctgtcggcaaatacaaactgaccgtttgtaccaacctgccctgcgccctgcgcggcggcgtgaatgcagccgattatttgaaacaaaaactcggtatcggcttcggcgaaaccacccctgacggcaagtttacccttgtcgaaggcgaatgcatgggcgcatgcggcgacgctcccgttatgctggtcaacaaccacagcatgtgcagctttatgaccgaagaagtgattgagaagaaactggcggagttggagtag

SEQ ID NO: 63899 - DNA, 843 bp, Neisseria meningitidis
atgattcaacacgcaggcttgggctaccgccgcgacttggcggaagactttctctcgctttccgaaaacagcccgatatgctttatcgaagccgcaccggaaaactggctgaaaatgggcggctgggcacgcaaacagtttgaccgtgtggcggaacggctgccgctggcgttgcacggattgtctatgtcgctgggcgggcaagcaccgctggatactgatttgatagacggcatcaaagaaatgatgcgccgttacgattgcacgtttttctccgaccatttgagctactgccacgacggcggtcatctttacgatttgttgccgctgccctttaccgaggaaatggtgcatcatacggcgcggcgtatccgcgaagtgcaagaccgtttgggctgccgcatcgccgtggaaaacacgtcctactatctgcattccccgcttgccgagatgaacgaggtcgagttcctcaacgccgtcgcacgtgaggccgattgcggcattcatctggatgtgaacaatatctacgtcaacgccgtcaatcacggtctgctgtcgccggaggcttttttggaaaatgtggatgcagagcgcgtgtgctatatccatattgccggacatgacgtggaaacgccggaattgttgattgatacacatggcgcggcagttttgccgactgtttgggacttgctcgaacttgcctatgccaagctgccgacgattccgcccaccctgttggaacgcgattttaatttcccgccttttgccgaactcgaagccgaagtcgccaaaatcgccgattatcaaacgcgtgccggaaaggaatgccgccgtgcagcctga

SEQ ID NO: 63900 - DNA, 1248 bp, Neisseria meningitidis
atgcaacttaccgctgtcggactcaatcatcaaaccgcacctttaagcatacgggaaaagctggcgtttgccgcggcctgcctgcccgaagccgtccgcaatcttgcccgaagcaatgcggcaacggaggcggtaatcctttctacctgcaaccgtaccgagctttactgtgtaggtgattcggaagaaatcatccgttggctcgcagactatcacagccttcccatagaagaaatcagcccctacctttatactttggggatgcaggagactgtgcgccatgctttccgcgtcgcctgcggcttggattcgatggtgttgggcgagccgcagattttaggacagattaaggatgcggtcagggttgctcaagagcaggaaagtatgggtaagaaactcaatgccctgttccaaaaaaccttttctgttgctaaagaggtccgtaccgatactgccgtcggcgaaaactcggtttccatggcttccgcttccgtcaagttggcagagcagattttccccgacatcggcgatttgaatgtcttgtttatcggtgcgggtgagatgattgagctggttgccacttattttgccgccaaaagtccccggctgatgacggttgccaaccggacgctggcgcgtgcacaggagttgtgcgacaagctcggtgtcaacgccgaaccgtgcctgctgtccgatctgcctgccattttgcatgagtacgacgtggtggtttcttcaacggcaagccagttgcccattgtcggcaaaggtatggtggagcgcgcattgaaacaaaggcagagtatgccgttgtttatgcttgacttggccgtgccgcgagacattgaggcggaagtcggcgatttgaacgatgcctatctttatacggtggacgatatggtcaacatcgtccaaagcggcaaggaggcaaggcagaaggccgccgccgccgccgaaacgctggtatccgagaaggttgccgaatttgtcaggcagcagcagggcaggcagagcgtccccttgattaaagccttgcgggacgagggcgagaaagcgcgcaagcaggtgttggaaaatgcgatgaaacagcttgccaaaggcgcaacggcagaagaggttttggaacggctgtccgtccaactgaccaacaagctgctgcattcgccgacccaaactttgaataaagcgggggaagaagataaagatttggttcatgccgtcgcgcagatttatcatttggacaaataa

SEQ ID NO: 63901 - DNA, 702 bp, Neisseria meningitidis
ttgcggcggcaatttgcagcatcggatgcctgccgcacgggtttgaaggagggggaaataatgggattgggcatggaaatcggcaagctgattgtggcttttttggtgctgattaatccgtttagcgcgttgtcgctttaccttgacctgaccaacgggcacagcaggaaggtcgcgcggacggccgccgttgccgtgtttgccgtgattgcggtatttgcgctgatcggcggtacgctgctgaaggttttgggcatcagcgtcggttcgtttcaggtcggcggcggaattttggtgttgctgattgccatttcgatgatgaacggcaacgacaatcccgccaagcagaatctcggcgcgcagccggaaacggggcaggtgcgccccgcccgcaatgccggagcgattgccgtcgtgcccatcgccataccgatcaccatcggcccgggcggtatttcgaccgtgattatttacgcttcggcagccaaaacgtacagcgacatcgcgctgattatcgtggccggtttggtggtcagtgcgatttgttatgccattttaatcgttgccgggaaggtcagccgcctgctgggcgcgacggggctgacgattttaaaccgtatcatgggtatgatgctggcggcggtatcggtggagattattgtgtcgggactgaaaacgatattcccgcaactggcaggttga

SEQ ID NO: 63902 - DNA, 2607 bp, Neisseria meningitidis
atggctgccaaccaacgttaccgcaaaccgctgcccggtacggatttggaatactacgacgcgcgtgcggcgtgtgaggacatcaagcccggctcttacgacaagctgccttacacgagccgcattttggcggagaatttggtcaaccgcgcggacaaagtcgatttgccgacgctgcaaagctggctgggtcagctgattgagggaaaacaggaaatcgactttccttggtatccggcgcgggtggtgtgccacgatattctggggcagaccgcgttggtggatttggcaggtctgcgcgatgcgattgccgaaaaaggcggcgatcctgccaaagtgaatccggtggtgcaaacccagctcatcgtcgaccactctctggccgttgaatgcggcggctacgaccccgatgccttccgcaaaaaccgccaaatcgaagacagacgtaacgaagaccgtttccacttcatcaactggacaaaaaccgcatttgaaaatgtggacgtgattccggcgggcaacggcatcatgcaccaaatcaatctagaaaaaatgtcgcccgtcgtccaagtcaaaaacggcgtggcgttccccgatacctgcgtcggcacggattcgcacacgccgcacgtcgatgcgctgggcgtgatttccgtgggcgtgggcggattggaagcggaaaccgtgatgctgggtcgcgcgtccatgatgcgcctgcccgatattgtcggcgttgagctgaacggcaaacggcaggcgggcattacggcgacggatattgtgttggcactgaccgagtttctgcgcaaagaacgcgtggtcggggcgtttgtcgaattcttcggcgagggcgcgagaagcctgtctatcggcgaccgcgcgaccatttccaacatgacgccggagttcggcgcgactgccgcgatgttcgctattgatgagcaaaccattgattatttgaaactgaccggacgcgacgacgcgcaggtgaaattggtggaaacctacgccaaaaccgcaggcttatgggcagatgccttgaaaaccgccgtttatccgcgcgttttgaaatttgatttgagcagcgtaacgcgcaatatggcaggcccgagcaacccgcacgcgcgttttgcgaccgccgatttggccagcaaaggcttggctaaaccttacgaagagccttcagacggccaaatgcccgacggcgcggtcatcatcgccgcgattaccagttgcaccaacacttccaacccgcgcaacgttgttgccgccgcgctcttggcgcgcaacgccaactgcttcgggctgaaacgcaaaccgtgggtcaaaacctcgtttgcccccggttcgaaagtggcggaaatttatttgaaagaagcaggcctgctgcccgaaatggaaaaactcggcttcggtatcgtcgccttcgcctgcaccacctgcaacggcatgagtggcgcgctggatccgaaaatccagaaagaaatcatcgaccgcgatttgtacgccaccgccgtattatcaggcaaccgcaacttcgacggccgtgtccatccgtatgcgaaacaggctttcctcgcttcgcctccgttggtcgttgcctacgcgctggcaggcagtatccgtttcgatattgaaaacgacgtactcggcgttgcagacggcaaggaaatccgcctgaaagacatttggcctgccgatgaagaaatcgatgccgtcgttgccgaatatgtgaaaccgcagcagttccgcgatgtgtatgtaccgatgttcgacaccggcacagcgcaaaaagcacctagtccgctgtacgattggcgtccgatgtccacctacatccgccgtccgccttactgggaaggcgcgctggcaggggaacgcacattaagaggtatgcgtccgctggcgattttgcccgacaacatcaccaccgaccacctctcgccgtccaatgcgattttggccgtcagtgccgcaggcgagtatttggcgaaaatgggtttgcctgaagaagacttcaactcttacgcaacccaccgcggcgaccacttgaccgcccaacgcgctaccttcgccaatccgaaactgtttaacgaaatggtgaaaaacgaagacggcagcgtgcgccaaggctcgttcgcccgcgtcgaacccgaaggcgaaaccatgcgcatgtgggaagccatcgaaacctatatgaaccgcaaacagccgctcatcatcattgccggtgcggactatggtcaaggctcaagccgcgactgggctgcaaaaggcgtacgcctcgccggcgtagaagcgattgttgccgaaggcttcgagcgtatccaccgcaccaaccttatcggcatgggcgtgttgccgctgcagttcaaacccgacaccaaccgccataccctgcaactggacggtacggaaacctacgacgtggtcggcgaacgcacaccgcgctgcgacctgaccctcgtgattcaccgtaaaaacggcgaaaccgtcgaagttcccgttacctgccgcctcgatactgcagaagaagtattggtatatgaagccggcggcgtgttgcaacggtttgcacaggattttttggaagggaacgcggcttag

SEQ ID NO: 63903 - DNA, 273 bp, Neisseria meningitidis
atgaaacagacagtcaaatggcttgccgccgccctgattgccttgggcttgaaccaagcggtgtgggcggatgacgtatcggattttcgggaaaacttgcaggcggcagcacagggaaatgcagcagcccaatacaatttgggcgcaatgtattacaaaggacgcggcgtgcgccaagaccttgtgctcgctcaagaatggcttggcaaggcttgtcaaaacggagaccaagacggctgcgacaatgaccaacgcctgaaggcgggttattga

SEQ ID NO: 63904 - DNA, 1269 bp, Neisseria meningitidis
gtgaaaccgctgcgcagactgacaaacctccttgccgcctgcgccgtagcggtcgccgccttcggacagcccgccctcgcggcggacttggcgcaagacccgttcattaccgataacgcccaacggcagcactacgaacccggcggcaaataccacctcttcggcgacccgcgcggcagcgtttccgaccgcaccggcaaaatcaacgtcatccaagactatacccaccagatgggcaacctgctcatccaacaggcaaacatcaacggcacaatcggctaccacacccgcttttccggacacggacacgaagaacacgcccccttcgacaaccacgccgccgacagcgcaagcaaagaacaaggcaacgttgacgaaggctttaccgtgtaccggctcaactgggaaggacacgagcaccatcccgccgatgcctacgacggcccgaagggcggcaattaccccaaacctacgggcgcacgcgacgaatacacctatcacgtcaacggcacagcacgcagcatcaaactcaatccgaccgacacccgcagcatccggcaacgcatatccgacaactacaacaacctcggcagcaatttctccgaccgcgccgatgaagccaacagaaaaatgttcgagcacaatgccaagctcgaccgctggggcaacagcatggagtttatcaacggcgtcgccgccggcgcgcttaacccctttatcagcgcgggcgaagccgttgaccagtggatgcaggaaaaccccaatgccgccgaaaccgtcgaaaccctggtcaacgtcctgccgtttgccaaagtcaaaaacctgacaaaggcggcaaaaccggggaaggctgcggttagtggggatttctcagactcctacaagcataacactgcttcaagattatctcagtctgtagatggagaaatgtttcaaacccgcaatgttgattttaaagcaaaatctattgggactaaaattcatgatggagctcaagggaaacatatttcaggacatagaaactacattgaaggtaagagtactttaaatcaaaacattaatcctcaagaattgttgaacggaatacattcaggtgcttatccagttatttctaaaggagcaagaggaaatcctgttgttgattttgggtatcctataggcagcgatgggaaatcaggattaagtaccaattttggtacgattcattcaggtaaaaatggagttcacattgttccggctaaccctaaaaccattaaaaaggtgcaatag

SEQ ID NO: 63905 - DNA, 1578 bp, Neisseria meningitidis
atgcgcgccaaccccaaaacacaggcaatgccgtctgaaaccatatccctgatgaaaacacgcagcctaatttcccttttatgcctccttctctgttcatgttcttcatggttgcccccactggaagaacggacggaaagccgtcatttcaatacttccaaacccgtccgcctggacaacatcctgcaaatccggcacacccctcataccaacgggctatccgatatctatctgctgaacgacccccacgaagcctttgccgcccgcgccgcccttatcgaatctgccgaacacagcctcgatttgcaatactacatctggcgcaacgacatttccggccgactgctgttcaacctcgtgtaccttgccgcagaacgcggtgtgcgcgtacgcctgctgttggacgacaacaacacgcgcggattggacgacctcctgctcgccctcgacagccatcccaatatcgaagtgcgcctgttcaaccccttcgtcttccgcaaatggcgcgcactcggctacctgactgacttcccccgcctcaaccgccgcatgcacaacaaatcctttaccgccgacaaccgcgccaccatactcggcggacgcaatatcggcgacgaatacttcaaagtcggtgaggacaccgttttcgccgacctggatatcctcgctaccggcagcgtcgtcggcgaagtatcgcacgacttcgaccgctactgggcaagccattccgcccacaacgccacgcgcatcatccgcagcggcaacatcggcaagggtcttcaagcactcggatacaacgacgaaacgtccagacacgcgctcctgcgctaccgcgaaaccgtcgaacagtcgcccctctaccaaaaaatacaggcaggacgcatcgactggcagagcgtccaaacccgcctcatcagcgacgaccctgcaaaaggactcgaccgcgaccgccgcaaaccgccgattgccgggcggctgcaagacgcgctcaaacagcccgaaaaaagcgtctatctggtttcaccctatttcgtccccacaaaatccggcacagacgcactggcaaaactggtgcaggacggcatagacgttaccgtcctgaccaactcgctacaggcgaccgacgttgccgccgtccattccggctatgtcaaataccgaaaaccgctgctcaaagccggcatcaaactctacgagctgcaacccaaccatgccgtccctgccacaaaagacaaaggcctgaccggcagctccgtaaccagcctgcatgccaaaaccttcattgtggacggcaaacgcatcttcatcggctcattcaacctcgacccccgttccgcacggctcaatactgaaatgggcgttgttatcgaaagccccaaaatcgcagaacagatggagcgcacccttgccgataccacacccgaatacgcctaccgcgttaccctcgacaggcacaaccgcctgcaatggcacgatcccgccacccgaaaaacctacccgaacgaacccgaagccaaactttggaaacgcatcgccgcaaaaatcctatccctgctgcccatagaaagtttattatag

SEQ ID NO: 63906 - DNA, 771 bp, Neisseria meningitidis
atgaccacgaccgaacacgacaacgacgatgcattcctgctgcggtacagccggcacatcctcttggacgaaatcggcatcgaaaggcagcagaaactttccgacgcgcatattttggtcgtcggatgcggcggtttgggtgccgccgcactgccctaccttgccgcttcgggtgtcggcacgctgaccatagccgatttcgacacggtcgaactgcacaacctgcaacgtcaggttgcatttgacgagggcgacgttggcaaactcaaaaccgaagccttggcagaccgtctgcaccatatcaaccataccgtcgatgtccgcaccgtcaacgaaaaactcgacagcggccgcctgaccggtttggttcaaaccgccgatatcgttttagactgctgcgacaactatgccacgcgccaagccgtcaaccgtgcctgcgtacaaacgaaaacaccgctggtttcaggagcagcggtgcgctttgaagggcaacttgccgtgtaccgacccgacttgcccgactcgccatgttacgcctgcctgttcgacggcggatcggcttcagacggcatctgttcccttttcggcgtattctcgccgctggtcggcatcatcggctgcacgcaggcagcggaggcactgaaaatcctgctggatgcaggcgaaccgtcgcacggcaggctggcggtttaccgtgctttggaagggggctggcgatatttcgacctgccgcgcaaccctgaatgcccggtttgtggcgcggcacgataa

SEQ ID NO: 63907 - DNA, 7512 bp, Neisseria meningitidis
gtggtagccgttgctgaaactaccaagcgcgaaggtaaaagctgtgccgatagtgattcaggcagcgctcatgtgaaatctgttccttttggtactactcatgcacctgtttgtcgttcaaatatcttttctttttctttattgggtttttctttatgtttggctgtaggtacggccaatattgcttttgctgatggcattattgctgataaagctgctcctaaaacccaacaagccacgattctgcaaacaggtaacggcataccgcaagtcaatattcaaacccctacttcggcaggggtttctgttaatcaatacgcccagtttgatgtgggtaatcgcggggcgattttaaacaacagccgcagcaacacccaaacacagctaggcggttggattcaaggtaatccttggttggcaaggggcgaagcacgtgtggttgtaaaccaaatcaacagcagccattcttcacaaatgaatggctatattgaagtgggcggacgacgtgcagaagtcgttattgccaatccggcagggattgcagtcaatggtggtggttttatcaatgcttcccgtgccactttgacgacaggccaaccgcaatatcaagcaggagaccttagcggctttaagataaggcaaggcaatgttgtaatcgccggacacggtttggatgcccgtgataccgatttcacgcaaatattgagccatgcggttaagattgatgggcctgtgtggggtaaagatgtgcgtgtcgtcgcgggacaaaacgatgtggtcgcaacaggtaatgcacattcgcctattctcaataatgctgctgccaatacgtcaaacaatacagccaacaacggcacacatatccctttatttgcgattgatacaggcaaattaggaggtatgtatgccaacaaaatcaccttgatcagtactgccgagcaagcaggcattcgtaatcaagggcagttgtttgcttcttccggcaatgtggcgattgatgcaaatggccgtttagtcaatagtggcacgatggctgccgccaatgcgaaagatacggataatacagcggaacacaaagtcaatatccgcagtcagggcgttgaaaacagcggtacggcggtatcgcaacaaggcactcaaattcacagtcagtcgattcaaaacactggcacattattgtcctcaggcgaaatattgattcacaattcgggcagcctgaaaaatgaaacatcaggcaccattgaagccgctcgtttggctattgataccgacacacttaataatcaaggcaaactctctcaaacaggttcacaaaaactccatattgatgcacaaggcaaaatggataaccgtggccgcatgggtttacaagataccgcaccaaccgcgtcaaatggttcaagcaatcaaaccggcaatagttacaatgcatctttccattcatccactaccacaccaacaacggcaacaggtacgggtactgcaaccgtttctatatcaaacataactgcgcctacctttgctgatgggacaattcgcactcatggtgcactggataattcaggcagtattattgccaatggtcaaacagatgttagtgcgcaacaaggtttaaataatgcaggacaaatagacattcatcagttaaatgcaaaaggttcggcgtttgacaatcacaatggaacaattatcagtgatgcggtccacattcaagccggcagcctgaataatcaaaatggcaacatcacaacacgccaacagttagagattgaaaccgatcaactggataacgctcatggcaagttattatcagcagaaatagcggatttagccgtttcaggcagcctgaacaatcaaaatggcgaaatagcgaccaatcaacaactgattattcacgatggtcagcaatctaccgctgtcattgataatacgaatggcacgatacaatcaggccgtgatgttgctattcaggcaaaatcgttatccaacaacggcacacttgccgctgataataaactggatattgcgttacaagatgatttttatgtagaacgcaatatcgtggcgggcaatgaattgtcgctcagtacacgaggcagcctgaaaaattcacatactttgcaagcaggaaaacgcattcggattaaagcaaataaccttgataatgcagcacaaggcaacattcaatccggcggtgcaacagacattggcacgcagcacaatttaaccaatagaggcttgattgacggacaacaaaccaaaatccaagccgggcaaatgaataatatcggtacaggtcggatttatggcgacaatatcgctattgcggctacccgcttagacaatcaagatgaaaacggtacaggtgccgccattgcggcacgtgaaaacctgaatttaggcatcggacaattaaacaaccgtgaaaacagtctgatttacagcggtaacgatatggcggttggcggcgcattagataccaatggccaagccacaggcaaagcccaaaggatacacaatgccggcgcaaccattgaagccgccggcaaaatgcgtttaggcgtagaaaagctgcacaataccaatgagcatttgaaaacgcagttggtagaaacagggcgcgagcatattgttgattacgaagcatttggacgacacgaattattgcgggaaggcacacaacatgaattaggctggtctgtctataacgatgaatcagaccacttacgcacccctgatggagcggcgcatgaaaattggcataaatacgattatgaaaaagtcacccaaaaaacccaagttacccaaactgcgccagccaaaatcatttcaggtaatgatttaaccattgatggtaaagaagtatttaataccgatagccaaatcatcgccggcggcaatttgcttgtgcaaacagaaaaagacggtttgcataacgagcaaacctttggcgaaaagaaagtattcagtgaaaatggcaaattacacagctattggcgtgagaaacataaaggacgagactcaacgggacatagcgaacaaaattacactttgccggaggaaatcacacgcaacatttcactgggttcatttgcctatgaatcgcatcgcaaagcattaagccatcatgcgcccagccaaggcactgagttgccgcaaagcaacggtatttcgctaccctatacgtccaattcttttaccccattacccagcagcagcttatatattatcaatcctgtcaataaaggctatcttgttgaaaccgatccacgctttgccaactaccgtcaatggttgggtagtgactatatgctggacagcctcaaactagacccaaacaatttacataaacgtttgggtgatggttattacgagcaacgtttaatcaatgaacagatcgcagagctgacagggcatcgtcgtttagacggttatcaaaacgacgaagaacaatttaaagccttaatggataatggcgcgactgcggcacgctccatgaatctcagcgttggcattgcattaagtgccgagcaagtagcgcaactgaccagcgatattgtttggttggtacaaaaagaagttaaacttcctgatggcggcacacaaaccgtattggtgccacaggtttatgtacgcgttaagaatggcgacatagacggtaaaggtgcattgttgtcaggcagcaatacacaaatcaatgtttcaggcagcctgaaaaactcaggcacgattgcagggcgcaatgcgcttattatcaataccgatacgctagacaatatcggtgggcgtattcatgcgcaaaaatcagcggttacggccacacaagacatcaataatattggcggcattctttctgtcgaacagacattattgctcaacgcaggcaacaacatcaacagccaaagcaccgccgccagcagtcaaaatacacaaggcagcagcacctacctagaccgaatggcaggtatttatatcacaggcaaagaaaaaggtgttttagcagcgcaggcaggaaaagacatcaacatcattgccggtcaaatcagcaatcaatcagagcaagggcaaacccggctgcaagcagggcgcgacattaacctagatacggtacaaaccagcaaacatcaagcaacccattttgatgccgataaccatgttattcgcggttcaacgaacgaagtcggcagcagcattcaaacaaaaggcgatgttaccctattgtcagggaataacctcaatgccaaagctgccgaagtcagcagcgcaaacggtacactcgctgtgtctgccaaaaatgacatcaacatcagtgcaggcatcaacacgacccatgttgatgatgcgtccaaacacacaggcagaagcggtggtggcaataaattgattattaccgacaaagcccagagccataacgaaactgctcaaagcagcacctttgaaggcaagcaagttgtattgcaggcaggaaacgatgccaatatccttggcagcaatgttatttccgataatggcacccggattcaagcaggcaatcatgttcgcattggtacaacccaaactcaaagccaaagcgaaacctatcatcaaacccagaaatcaggattgatgagtgcaggtatcggcttcactattggcagcaagacaaacacacaagaaaaccaatcccaaagcaacgaacatacaggcagtaccgtaggcagcttgaaaggcgataccaccattgttgcaggcaaacactacgaacaaatcggcagtaccgtttccagcccagaaggcaacaatatcatccatgcccaaagcatagacattcaagcggcacacaacaaattaaacagtaataccacccaaacctatgaacaaaaaggcttaacggtggcattcagttcgcccgttaccgatttggcacaacaagcgattgccgtcgcacaaagcagcaaacaagtcggacaaagcaaaaatggtcgtgtcaatgccatggcagctgccaatgcaggctggcaagcctatcaaacaggtaagagtgcacaaaacttagccaatggtacaaccaatgccaaacaagtcagcatctccataacctacggcgaacagcaaaaccgacaaaccacccaagttcaagcaagccaagcccaagcgagtcaaattcaagcaggcggtaaaaccacattaatcgccacaggcgcagcagaacaatccaatatcaacatcgcaggctcagatattgccggcaaagcaggcacaatcctgattgccgataacgacatcacactccaatcagccgagcaaagcaataccgaacgcagccaaaacaaatcgacaggttggaacgcaggtgctgccgtatcattcggacaaggaggctggtcattaggcgttaccgcaggcggcaatgtcggcaaaggctacggcaatggcgatagcgtaacccaccgccatagccatattggcgacaaaggcagccaaacccttatccaaagcggtggcgacactaccatcaaaggcgcgcaagtacgcggcaaaggcgtacaagtcaatgccaaaaacctaagtattcaaagcgtacaagatagcgaaacctatcaaagcaaacaacaaaacgccagtgcacaagtgaccgtcggttatggcttcagtgccagtggcgattacagccaaagcaaaatccgagccaatcatgcttcggtaaccgagcaaagcggtatttatgccggagaagacggctatcaaatcaaggtcggaaaccatacagacctcaaaggcggcatcatcaccagtacccaaagcgccggagataagggcaaaaaccgctttcagacggccaccctcacccatagcgacatcaaaaaccacagccaatacaaaggcgaaagttttggattgggcgcaagtgcgtccataagcggcaaaacactgggacagggcgcacaaaataagcctcaaaacaaacacctgacaagcgtggccgataaaaacggcgcaagttcatcagtaggctacggcagcgacagcgacagccaaagcagcatcacaaaaagcggcatcaatacccaaaacattcaaatcaccgacgaagccgcacaaatcaggctgacaggcaaaacagcggcacaaaccaaagccgatattggtacaaacgtaaccacagacaccgccgaacgacattcgggcagcttgaagaacaccttcaacagagaagcggtgcaaaacgagctggatttgcaaagggaagtaacccaagagtttgataaaactagacaaggagtgaaacaagaactttatgcagtagtagatagcaaacgagcgcaagccacacaagagagactcaaaaatggtggatatgacaatgataaatctagagcattaaataaggaagctaatgaattagatgaaaaaattcgttggcttgatgcaggattaggactcgtttggggcgcagggagttctgatatggcttggagtatgtttgccacaacccaagccgatagagcggtaaggtctgcaactgcacctaaagaaatgtggttccataagaagataatagatgaaaaaacaggtaaagtatcctttgataccagacaaatttggtcattgaatgatttaagcaaggaagaactggcaagcattcaagacacaaatggcaaagttattactgtgtctaatcctggtattttcaataatcgagaagattcattaagcaacgcagcaaaacaaaatcgtaatagtacaaacggtagtggtgttattgcagttatgaatcctccaacagggaaatataaatctgattctaataacaaaataaaagattttttatggctcagttcaagtcttgtttctgaactgatgtatgtcggttacgaccaattaaataataaagtgttccaaggctatttacccaaaaccaattcagaaaaactgaatcaagatatttatcgagaggttcaaaaaatgggtaatggctggtcggttgataccagtaaccacagtcgtgggggaattacagcaagcgtttccttaaaagattgggtaaacaatcaaaaacaaaatggcattgccccaatcagaaaagcacgtttctatggtacagccacaaatgtgcagaatgattacgccgatgttttacagaaaaacggctatacctatacgggtgcagacggtaaaacttataacagcggagcctactcaatcgtgcatgataaagattttgtggggaacaaatggatacctttcttgctaggaaataatgagacaacaaaaggagcttgtaagggattttgctattcgcatagcagttattttgcggaagtgcctgaacagtataagcgagacaaaaatggaaattttgttactgataatgaagggaataaaattgaaacgaaagactgggacagttacacaaaaatatggggaattcctaaaaaaggtactgatggaaaagacataaatcacgctattcccaaattagtcaatccaaacaagccaaatggagaaaagtatgaagaaaatcctttctaa

SEQ ID NO: 63908 - DNA, 867 bp, Neisseria meningitidis; identical to SEQ ID NO: 62499

SEQ ID NO: 63909 - DNA, 558 bp, Neisseria meningitidis
atggaaaataacaaagccaaatctgatgataattcagtttctattgaatttatacaagattttataactgcaagtacggatgtaattaatctgagttacgaaaattttcgtaaaaatttttatacacaaatgtcaactgattctaccaattatgcagccaaacatgaaagtttaggaaaatcggtacaacgtgaattacaaaaaacacaaagtcagttgagacaagttgtaagaaaaatgcagagtaaatataatataaataataaagcacgagtagcagaaatatctttgttaaggcaaatgcaaagccaattttctcgaaaagatgtaaacaaaaatcttggtaacggcaacactttggctaaacaaggcagctacaccaaaaaagacggcacaaccgcgcaagcaggcgattcgctgttggctgctgacaacctgcacagcctcctcacggacaaaatgctatccattagccatgttcgggaaaacacgatttccccgtttgttttaggctgtctaaaacaaataaccataaatgtatctcattatttaaaataa

SEQ ID NO: 63910 - DNA, 1224 bp, Neisseria meningitidis
atgtctgcgcaatcacaaaacaatcatacgtccccattggtcgtcttgaccacgctgttcttcatgatgggttttattacctgcatgaacgacatccttatccctcatttgaaagaaattttcgacctgtcttacgttcaggcgatgctgatccaattctgtttctttaccgcctatgcggtgatgtccatcccgatgggggcttttgtcggcaaagtcggctacaaaaacggcgttatcggcggctttctgctgacggcggtcggatgcctgctgttttatcctgctgcgggcagccattcttacgcggtatttttgggcgcgttgtttattttggcttccggcgtaacgctgcttcaggtcgccggtaatccttatgttaccctgctggcgaaacccggcaaggaatcggcaacactgacgctggttcaggcgtttaacgctttgggtacgaccattgcgccgcaaatcggcgcgttcctgattctggcggacgcaacccaaaccgtcagcaaggcggaacagatttcttccgtacagattccctatttgggactggcggggctgctgattatccttgccgttttcgtgaaaatgatccggctgcccgacgcgcgcaaaattgccgccgaggaaagcgcgcacaaccacgacggcaaaaccagcgtatggcaatacaaacatctcgtgttcggtacggcaggcattttctgctatgtcggcgcggaggtgtctatcggttcgttgatggtcaacgtattgggttatctgaaagggctggatcatgcttctgccgcgcattacctgtcgttctattggggcggcgcgatggtcggacgtttcctcggttcggcggtgatggcgaaattcgcgcccaaccgttatttggcgtttaacgcatcggctgcggtcgtactgcttgccgtcgcgatggcgacgggcagcggcaatgcggatgtggcgatgtggtcgctgcttgccatcggttttttcaactcgattatgttcccgacgattttctctttggcaaccaaaggattgggaaaatttaccaacgcggcttccggtgtactgtgtaccgcgattgtcggcggtgcggtcgttcctgtcgtgcagggctgggtggcagatacttacaccctgatgtcttcgtttgtcgtttccgtcatctgttatctgtatatcgtgttttttgcggtgtacggatatagggcggacaaataa

SEQ ID NO: 63911 - DNA, 216 bp, Neisseria meningitidis
gtgtttaagctcggcgtttatgcctgtctcggactgtttgccggctgggtgctgctgctgattgtgcaactttggttttcttttctcgaagcggaattgttcttcaaaatcacactgactatggcggggctgtttgtcatcatcctcgccgccctgctggtattcggccagtatttttccgaaaagaaaatgaaagacgacgggtttatcaactga

SEQ ID NO: 63912 - DNA, 1455 bp, Neisseria meningitidis
atgagcatcgaaccaacccctccgaaccttgaaaacgacggtatcgaaaacgatgtagaacgcgtttccgccgatttcgaccgtgtccactccctctgcgaaattctcgaacctgcttttgaacaaatcgaaaacggcacaccgctcgaagacgcgccgctgcgcgacaagctgaccgagctgaccgttctcttgagcgagctgcaccctgccgacgtggcggcggtattggaatcgctaccgccgcgcgaacgcaatatcgtctggattctggtcaaaccggaagacgacggcgaagtattgctggaagtatccgacgcggtgcgcgaaacactgatcgagtcgatggacaaagacgaattgttggcagcggtcgatgatttggacgcggacgaattggcggaactggcagacgatttgccgcaccaagtggtttacgaagcgctacaaacccgcgatgaggaagaacgcgcccaagtcaaagcggcaatgtcctacgaagacaaccaagtcggtgcgattatggacttcgagttggtcagcatccgcgccgatgtcgcctgtgaagtggtgctgcgctatctgcgccgcttcgacagcctgcccgaccataccgacaagatttttgtggtcgatgaaaacgacgtactgcaaggcgtgctgcccatccgcaaacttttggtcgccgatcccgaagatttggtggaaaacgtgatggcgaaagatgtcgtgcgtttccgcgccgaagacgacgtggaagaagcggcgcaggcgtttgaacgctacgacttggtaactgcgccggttgtcgatgaaaacaaaaagctcatcggtaggattaccgttgacgagatggtggacgtaatccgtgaagaatccgaagcggatatgttgaacatggcaggtttgcaggaagaggaagacctgttcgcccccgtcttggattccgtcaaaaaccgctggatgtggctcgccgtcaacctctgcaccgccttcctcgccagccgcgtcatcggcgcgtttgaaggcagtatcgaaaaaatcgttgcactcgccgcgctgatgcccatcgtcgccggtatcggcggcaactcgggcaaccagacgattaccatgattgtccgcgccatggcgatggggcaactgacaggcatgcaggcaggcaggctgttgaaaaaagaagtcggcgttgccctagtcaacggcattatctggggaaccgtcatgggcgcggtttcatggctgctctacggcagcctcggcatcgggctggttatgattgccgcgatgacgctcaacctgctgctggcggcaaccgtcggcgtattgattcccgtggtaatggaaaagttcggacgcgaccccgcgctgggcagctcggtgctgattacggcggtaacggattccggcggcttcctgattttcttgggtctcgccaccctattcctgctttaa

SEQ ID NO: 63913 - DNA, 1071 bp, Neisseria meningitidis
atgaccaaacatatcgctatcttgcgcggcgacggcatcggcccagaaatcgtcgccgaaaccgtccgcgtactcgacaaacttatcgcccaaggcttggatgccggctacgaatacgccccattgggcggcgaagcctacgacgaatacggccatccctatcccgaattcacgcaaaacctctgccgcaaagccgatgccgtcctgcttggtgcagtcggttctcctcaatacgacaacctcgaccgtccgttgcgccctgagcgcggcttgttggctatccgtaaggacttgaatctgtttgccaacctgcgccctgccatcctttatcccgagctggccaacgcctccacactcaaacccgaaatcgttgccggtttggatattttgattgtgcgcgaactcaccggcgatatttatttcggcgaaccgcgcggtatccgcgttttggaaaacggcgaacgcgaaggctacaacaccatgaaatacagcgaaagcgaaatccgccgcatcgcccacgttgccttccaatccgcccaaaaacgcagcaaaaaagtctgctccgtcggtaaagccaacgttttggaaaccaccgaactgtggcgcgaaatctttgaagaaatcggcaaacaataccccgatgtcgaactctcccacatgtatgtagacaacgccgccatgcagctcgttcgcgcgcccaaacaattcgacgtcatcgccaccggcaacatcttcggcgatattttatcggacgaagcctctatgctgaccggctccatcggtatgctgccttccgcttctttggacgaaaacggcaaaggcctgtacgaaccgtctcacggctccgcccccgacatcgccggacaaaacaaagccaacccgctggccaccatcctctcgctcgccatgctgctgcgttacagcctgaacgacgaagcccgcgcgcaacaagttgaaaacgccgtacaaaaagtactgcaacaaggcttgcgtaccggcgatatttacgaagaaggcacgaaactcgtttcctgctccgaaatgggcgatgcggtactcgccgccttgtaa

SEQ ID NO: 63914 - DNA, 1809 bp, Neisseria meningitidis; identical to SEQ ID NO: 45671

SEQ ID NO: 63915 - DNA, 351 bp, Neisseria meningitidis
atggaagccttcaaaaccctaatttggattgttaatataatttccgctttggccgtcatcgtgttagtattgctccaacacggcaaaggcgcggatgccggcgcgaccttcggatcgggaagcggcagcgcgcaaggcgtattcggctctgccggcaacgctaacttcctcagccgctcgaccgccgttgcagcaacatttttctttgcaacctgcatggctatggtgtatattcacacccacacgacaaaacacggtttggacttcagcaacgtacaacagactcagcaagcacccaaacccgtaagcaataccgaaccttctgcccctgttcctcagcagcagaaataa

SEQ ID NO: 63916 - DNA, 417 bp, Neisseria meningitidis; identical to SEQ ID NO: 41147

SEQ ID NO: 63917 - DNA, 639 bp, Neisseria meningitidis
atgaaaaaaatcaatgttgcccccgaaaatccccaataccgcatcgtcgaaatctttgaaagcctgcaaggcgaaggctggaacacgggcatgcccgccgttttcgtccgcttgggcaaatgcaacctcgcctgcggctggtgtgataccgattatttgacattcggcatgatgagcctgtccgacatcttaggctgtctgaaaacctatgccgcccgcaacatcatcatcaccggcggcgaaccgaccatacagccgcatctcgatatgctgctggacatgctcaaggcggaaggttatttcctctgtatcgaaaccaacggactcaatcccgcgccgccgcaaatcgactatgtcgccaccagccccaaagcctgctatgccgccaaatacgaaaaaagctgtatcgaaacagccgacgaagtgcggattgttgccgatggtgatgtccttgcgttctgtgaaaatatggaacgcaaaatccgcgcgcatcattactacctttcgccctgcgaacaagacggtgcgatgaacatctacgacaccatccgccaaatcggtattttaaacagtcgccccgacgcgccggtgcattggcagttgagcgtgcagacgcacaaatgggcgggaatagagtag

SEQ ID NO: 63918 - DNA, 1032 bp, Neisseria meningitidis
atgggcatcaaagtcgccatcaacggctacggacgcatcggccgccaggttttgcgcgccatctacgattatcagattcaagaccaactccaaatcgtcgccgtcaacgccagcggcagccttgaaaccaacgcccacctcaccaaattcgacaccgtgcacggacgctttgaagccgacgtatcccacgacggcggcaacctcatcgtcaacggcgacaaaatccccttcttctcgacccgcaaccctgccgaactgccgtggaaagaactcggtgtcgatttggtcatggaatgcaccggcgcgttcaccagcaaagaaaaagccaaagttcatctggaaagcggcgcgaaaaaagtcctcatttccgcaccgggcggcgacgatgtcgatgcaaccgtcgtgtacggcgtgaacgacagcgtcctgaccgccgacatgaccgtcgtttccaacgcttcctgcaccaccaactgcctctcgccggttgccaaagtgttgagcgaaagcgtcggcatcgtcaaaggcgcgatgaccaccatccacgcgctgaccaacgaccaaaccgttaccgacgtgcgccacaaagacctgcgccgcgcccgcagcggcgtggaaaacatgattccgaccaaaactggcgcggcaaaagccgtcggtttggtactgcccgaattgaaagacaaactcgacgggcttgccatccgcgtgccgaccgtcaacgtatcattggtagatttgaacttccaagccgcgcgcgacacgacaatcgaagaaatcaacgcactgatgaaagccgcctcggaagcaggcgcgctcaaaggcgttttaggctacaacaccctgcccttggtttccatggacttcaaccacactaccgaagccagccacttcgacgcaacactgaccaaagtcgttgacggcaacatgattaaagtcttcgcatggtatgacaacgaatggggcttcagctgccaaatgctgaacaccgcacgccgtatgttcggacttgaagtgcgcccgctcaaataa

SEQ ID NO: 63919 - DNA, 630 bp, Neisseria meningitidis
atggcagcccatctcgaagaacaacaagagttagacaactttaaatatttttggaaaaccacgggcaaatggctgtttgccgtgctgattttggcggcgctcggctacttgggatacacggtttaccaaaaccgtgcggcttcccaaaatcaggaagcggcggcggtgctggcaaacatcgtggaaaaggcgcaaaacaaagccccgcaaaacgaaatcaatgccgaattgaccaaactccaacaaagctacccgcattccatttccgccgcccaagccacgctgatggcggcggcaaccgaatttgacgcgcagcgttacgatgttgccgaaggccatttgaaatgggtgttgtccaaccaaaaagacagcctgattcaggcattggcggcacagcgcctcggcgtggtactgctccagcagaagaaatacgatgccgcccttgccgcactcgacacgccggttgaagcggacttcgcccccctgctgatggaaaccaaaggcgatgtctatgccgcacagggaaaaagccaggaagccttaaaaaactacggacaggctttagaaaaaatgcctcaagattctgtcggtcgcgaattggttcaaatgaaacttgattcgctgaaataa

SEQ ID NO: 63920 - DNA, 1224 bp, Neisseria meningitidis
atgtcgggcaatgcctcctctctttcatcttcctccgccatcgggctgatttggttcggcgcggcggtatcgattgccgaaatcagcacgggtacgctgcttgcgcctttgggctggcagcgcggtctggcggctctacttttgggtcatgccgtcggcggcgcgctgttttttgcggcggcgtatatcggcgcactgaccggacgcagctcgatggaaagcgtgcgcctgtcgttcggcaaacgcggttcagtgctgttttccgtggcgaatatgctgcaactggccggctggacggcggtgatgatttacgccggcgcaacggtcagctccgctttgggcaaagtgttgtgggacggcgaatcttttgtctggtgggcattggcaaacggcgcgctgattgtgctgtggctggttttcggcgcacgcaaaacaggcgggctgaaaaccgtttcgatgctgctgatgctgttggcggttctgtggctgagtgccgaagtcttttccacggcaggcagcaccgccgcacaggtttcagacggcatgagcttcggaacggcagtcgaattgtccgccgtcatgccgctttcctggctgccgctggccgccgactacacacgccaagcacgccgcccgtttgcggcaaccctgacggcaacgctcgcctatacgctgacgggctgctggatgtatgccttgggtttggcagcggcgttgttcaccggagaaaccgacgtggcaaaaatcctgctgggcgcaggtttgggtgcggcaggcattttggcggtcgtcctctccaccgttaccaccacttttctcgatgcctactccgccggcgtaagtgcgaacaacatttccgcgcgttttgcggaaacacccgtcgctgtcggcgttaccctgatcggcacggtgcttgccgtcatgctgcccgttaccgaatatgaaaacttcctactgcttatcggctcggtatttgcgccgatggcggcggttttgattgccgactttttcgtcttgaaacggcgtgaggagattgaaggctttgactttgccggactggttctgtggcttgcgggcttcatcctctaccgcttcctgctctcgtccggctgggaaagcagcatcggtctgaccgcccccgtaatgtctgccgttgccattgccaccgtatcggtacgccttttctttaaaaaaacccaatctttacaaaggaacccgtcatga

SEQ ID NO: 63921 - DNA, 642 bp, Neisseria meningitidis; identical to SEQ ID NO: 41835

SEQ ID NO: 63922 - DNA, 1047 bp, Neisseria meningitidis; identical to SEQ ID NO: 46617

SEQ ID NO: 63923 - DNA, 1005 bp, Neisseria meningitidis
atgaccatcatcgtaacaggcgcggccggctttatcggcagcaacatcgtcaaagcacttaatcaacgcggtattactgacattgttgccgtcgataatttgagcaaaggcgaaaaattcaaaaaccttgccgagtgcgaaatcgcccattatctcgacaaacacgaattcatccgccaagtgagggaacacattttaccttatcaaaacatcgaagccgttttccatcaaggcgcgtgttccgatacgatgaaccacgacggtttgtatatgatggacaacaactaccagtacacgctggatttgctggactggtgtcaggacgaacgcatccccttcctttatgcctccagtgcggcggtttacggcaaaggagaaatcttccgcgaagagcgcgaactcgaaaaaccgctcaacgtgtacggctactccaaattcctgttcgaccaagtattgcgtcgccgcatgaaagaaggtctcaccgcccaagtcgtcggcttccgctacttcaatgtttacggacaacacgaacaacacaaaggccgcatggcatctgtcgccttccaccatttccaccaataccgcgaacacggttacgtcaacctgttcggcagcaacgacggctacggcaacggcgaacaaacccgcgacttcgtcagcgtcgaagacgttgccaaagtcaacctctacttcttcgaccatcccgaactttccggcatctacaatctcggcaccggccgcagccaacagttcaacgaactagccgccgccaccgtcaacgcctgccgcgccgccgaaggcaaacccgaaatgagcttgaaagagctggtagaagaagaacttatccgctacatccccttccccgacgcactcaaaggcaaataccaaagcttcacccaagccgacatcaccaaattgcgcgaagccggatataaggaagaatttttcgatgtcaaatcaggcgtcgaccgctacgtcaaatggatgctggaaaatttggcttaa

SEQ ID NO: 63924 - DNA, 573 bp, Neisseria meningitidis; identical to SEQ ID NO: 53316

SEQ ID NO: 63925 - DNA, 606 bp, Neisseria meningitidis; identical to SEQ ID NO: 37272

SEQ ID NO: 63926 - DNA, 690 bp, Neisseria meningitidis
gtgcaggcggatttagcctacgccgccgaacgcattacccacgattatccgcaagcaaccggtgcaaacaacacaagcacagtaagcgattatttcagaaacatccgtgcgcattccatccacccccgggtgtcggtcggctatgatttcggcggctggaggatagcggcagattatgccagttacagaaaatggaacaacaataaatattccgtcaacacaaaagaggtggaaagaaacaataccagtggcaactggaaagaactgaagacggaaaatcaggaaaacggtacattccacgcctcttcttctctcggcttatccgccatttacgatttcaaactcaacgataaattcgataaattcaaaccctatatcggtgtgcgcgtcgcctacggacacgttaaacatcaggttcattcagtgagaaaagaaaccacgactgctttccttaaaccatcgaaaggtgctacagagccaggcaagatcccaagtttggttaccaaacctgcctatcacgaaagccacagcaccagcagcttgggtcttggtgtcatcgccggtgtcggtttcgacatcacgcccaagctgaccttggacaccggataccgttaccacaactggggacgcttggaaaacacccgcttcaaaacccacgaagtctcattgggcatgcgctaccacttctga

SEQ ID NO: 63927 - DNA, 354 bp, Neisseria meningitidis
atgtctgaaatcaaaattttccacaatccgcgttgcagcaaatcgcgtgccgccttgtccctattggaagaacgcggcattgctgccgaagtggtcaaatatttggatacgccgcccgacttgtccgaattgaaggatattttcaacaaattgggtttggcatcggcgcgcgggatgatgcgcgtgaaagatgatttgtacaaggaattgggtttggacaaccccgatttggacaatgacgcgctgctgcgtgccatcgccgatcatcccgccctgttggagcgtccgattgttttggcgaacggtaaggcggctgtaggcaggccgctggaaaatatcgaagcggtattgtga

SEQ ID NO: 63928 - DNA, 210 bp, Neisseria meningitidis; identical to SEQ ID NO: 39306

SEQ ID NO: 63929 - DNA, 1311 bp, Neisseria meningitidis
atgagcgcgcccgacctctttgtcgcccacttccgcgaagccgtcccctacatccgccaaatgcgcggcaaaacgctggtcgccggcatagacgaccgcctgctcgaaggtgataccttaaacaagctcgccgccgacatcgggcttttgtcgcaactgggcatcaggctcgtcctcatccacggcgcgcgccacttcctcgaccgccacgccgccgctcaaggccgcacgccgcattattgccggggcttgcgcgttaccgacgaaacctcgctcgaacaggcgcagcagtttgccggcaccgtccgcagccgttttgaagccgcattgtgcggcagcgtttttgggttcgcgcgcgcgccttccgtcccgctcgtatcgggcaacttcctgaccgcccgtccgataggtgtgattgacggaaccgatatggaatacgcgggcgttatccgcaaaaccgacaccgccgccctccgtttccaactcgacgcgggcaatatcgtctggctgccgccgctcggacattcctacggcggcaagaccttctatctcgatatgcttcaaaccgccgcctccgtcgccgtctcgcttcaggccgaaaaactcgtttacctgaccctttcagacggcatttcccgccccgacggcacgctcgccgaaaccctctcggcacaggaagcgcaatcgctggcggaacacgccggcggcgaaacgcgacggctgatttcgtccgccgttgccgcgctcgaaggcggcgtgcatcgcgtccaaatcctcaacggagccgccgacggcagcctgctgcaagaactcttcacccgcaacggcatcggcacgtccattgccaaagaagccttcgtctccatccggcaggcgcacagcggcgacatcccgcacattgccgccctcatccgcccgctggaagaacagggcatcctgctgcaccgcagccgcgaatacctcgaaaaccacatttccgaattttccatcctcgaacacgacggcaacctgtacggttgcgccgccctgaaaacctttgccgaagccgattgcggcgaaatcgcctgccttgccgtctcgccgcaggcacaggacggcggctacggcgaacgcctgcttgcccacattatcgataaggcgcgcggcataggcataagcaggctgttcgccctctccacaaataccggcgaatggtttgccgaacgcggctttcagacggcatcggaagccgagttgcccgaagcgcggcgcaaagcctaccgcaacaacggacggaactcgcatattctggtgcgtcgcctgcaccgctga

SEQ ID NO: 63930 - DNA, 579 bp, Neisseria meningitidis; identical to SEQ ID NO: 37315

SEQ ID NO: 63931 - DNA, 2163 bp, Neisseria meningitidis; identical to SEQ ID NO: 45078

SEQ ID NO: 63932 - DNA, 936 bp, Neisseria meningitidis
atgaacccgaaaaaactcgttatcgccagtcgcgaaagcctgcttgccatgtggcaggcaaagcatatccaaggccgtctgaaagccctgtatcccgattgcgaagtcgagattttgggcatgaccacgcgcggcgaccagattttggacaaaactttgtcaaaagtcggcggtaagggcttgtttgtcaaagagttggaacaggctttatatgacgggcgcgctgacttggccgtgcattcgattaaagatgtgccgatggatttgcctgaaggtttcgcgcttgcagccatcggcgaacgcgccaatccgtttgacgcgtttgtgtccaaccaatacgcgcgtttggaagaaatgcccaaaggcgccgtcgtaggcacatccagcctgcgccgcgaagcccagttgcgtgcgcgctatccgcatttggttatcaaacctttgcgcggcaatgtgcaaacccgtttgtctaaactcgataacggcgaatacgacgcaattatcttggctgccgccggtttgcagcgtctggaattggacggacgcatccgcatgattttgtcggaatccgacagcctgcctgccgccggacaaggcgcattgggtatcgaaattgccgcgcaccgcgaagatttgtatgaggttttaaaaccgctaaaccacgataccacacacgcctgcgttacggccgaacgcgctttggcgcgcgctttgggcggaagctgccaagtgcctttggccgcatattgcacggaagaaaacggcttgctgaccttgcgcggactggtcggacaccccgacggttcggtcattttgcaggcggacgcgcaagcccctgccgaatatgccgacgcgctcggacgcgctgtcgctaagaaattggcggacgacggtgcgcgggaattgattggagcagtattgaatacggaaaattga

SEQ ID NO: 63933 - DNA, 183 bp, Neisseria meningitidis; identical to SEQ ID NO: 38667

SEQ ID NO: 63934 - DNA, 804 bp, Neisseria meningitidis
atgaaaaaaattcttttaacggtttcattaggtttggcactgagtgcctgtgccactcaaggtacggtcgataaagatgctcagattacccaagattggagtgtggagaagctctatgccgaagcccaggacgagctgaacagcagcaattatacgcgggctgtcaagttatacgaaatcttggaatcgcgcttccccaccagccgccatgcccggcagtcgcaactggataccgcatacgcctattataaagacgatgaaaaagacaaagctctggcggcaatcgaacgcttccgccgccttcacccgcaacacccgaatatggattacgcgctgtatctgcgcggcttggtgctgttcaacgaagaccagtccttcttgaacaaactggcctcgcaagactggtccgaccgcgacccgaaagccaaccgcgaagcgtaccaggcgtttgcggaactcgtccaacgcttcccgaacagcaaatacgccgccgatgcaaccgcacgcatggtcaaactggtcgatgcactgggcggcaatgaaatatcggtggcgcgctactacatgaaacgcggtgcatacatcgccgccgccaaccgcgcccaaaaaatcatcggcagctaccagaatacgcgttatgtcgaagaatcgctcgccatattggaacttgcctaccaaaaactcggcaaaccacagcttgccgccgatacgcgccgcgtgttggaaaccaacttcccgaaaagcccgtttttgacgcacgcttggcagcccgacgatatgccctggtggcgttactggcattaa

SEQ ID NO: 63935 - DNA, 726 bp, Neisseria meningitidis
atgagtgagggaatggtgtctcctgttttgtatttgattcctacgcctttgggtacgcccgatacgccgtgcctgttgccgcatgaacaacgggcggttgtcgggctgacggattttgtcgtggaagcggaaaaaacggcgcgcgcgcatttgaaacatttgggcgtgactacgcctatccgcgagctgaatctgcaaacattgaatgaacacacggatttgaagactttgccggaattgctgaaacctttgcaagaagggcgcagtataggcattgtcagtgaggcgggttgcccggctgtggctgatccgggtgcgaatttggtggcattggcgcataaacacggttttgaagtacggcctttggtcggtccgtccagcttgttgctggcgctgatggcttcgggtgcgaatgggcagagttttgcgtttaagggttatttgccgtctgaaaaaaatgagcggattcagagtttgaaggctttggaacaacgttcgcgccagcagaatgaaacgcagctgtttatcgaaacgccatatcgcaacgatgcgttgttggcggatgcggtggaaaacctgcatcctgaaacgcgcttatgtgtggctacggacttgaccttaccgactcaggaaatcatcagccagacgattgctcagtggcgaaaaagaaaagaaatgccgaatttgaaaaaacgcccgacgatttttgtgatgtatgcgggttga

SEQ ID NO: 63936 - DNA, 2580 bp, Neisseria meningitidis
atgcgatacgacaaattaaccgccaaattccaacaggcccttgcagaagctcagagtttggcgttggctgcggacggcagctatctggaagcgggctttgtgctgaaagccctgcttgacgaccaaaacagcggtgctgccgcgctcttggctcatgcgggcgtgaacgtgccgcaggtgaaacagcgtttgcagcagcatttgaacagcctgccgaaagtgtccggccagggcggcgacattctgcccagccgcgaattgcaggcggtgttgaacctgatggacaaagccgcaaccaaacgcggcgatgcctatatcgccagtgaacttttcctgcttgccttggtgcagcagaacgatgcggccggcaaaattttgaaagaagccggcgcgaccgaacaaaacatcaatgccgcgattgacgcggtacgaggaggacaaaacgtgaacgatgccaatgccgaagaccaacgcgatgctttgaaaaaatatacgctcgatctgacccaacgcgcccgagacggtaagctcgaccccgttatcggccgtgacgacgaaatccgccgtgcgattcaggtattgcaacgccgaaccaaaaacaaccctgtactgattggtgagccgggtgtgggtaaaaccgctattgttgaaggcttggcgcaacgtatcgtcaatggcgaagtacctgaatccctgcgtaacaaacgccttttggttctggacttggcggctttgattgccggtgcgaaataccgtggcgaatttgaagaacgcttgaaaggcgtgttgaacgatttggcgaaagacgacggcaacaccctgattttcattgatgaaatccatactttggtcggcgcgggcaaaaccgacggcgcgatggatgcgggcaatatgctgaaaccggctttggcacgtggcgaattgcactgtatcggcgcgaccaccttggacgaataccgtcaatacatcgaaaaagacgcggcactcgaacgccgcttccaaaaagtattggtcggcgagccaagcgtggaagacaccatcgccatcttgcgcggtttgcaggaacgctacgaaatccaccacggcatcgacatcaccgaccccgccatcgttgccgcagcggagttgagcgaccgctacattaccgaccgcttcctgcctgataaagcgattgatttgattgacgaagccgccagccgtgtcaagatggaaaaagaaaccaagccggaagcaatggacaaaatcgaccgccgtctaattcagcttcggatggaaaaggcgcacgttgaaaaagaaaaagacgatgccagcaaaaaacgtttggaactgatagacgaggaaatcaacggtctgcaaaaagaatacgccgatttagacgaaatctggaaagccgaaaaagcaatttcagacggtgctgctaatattaagaaacaaattgacgaagtcaaaattaaaatcgaacaggcaaaacggcaaggcgatttggcactggcttcaaaattgatgtatgaagatttggagcatttggaaaaacagcgtgcagccgccgaacgggcagatacggacagcacaaaaccggcaaacaaactcttgcgtaataatgtcggcgcagaggaaatcgcagaggtggtttcccgtatgaccggcattcccgtatccaaaatgatggaaggcgaacgcgacaaactgctgaaaatggaagaagtattgcaccgccgcgtagtcggtcaagacgaagccgtgcgtgccgtgtccgacgctatccgccgcagccgttccggtcttgccgacccgaataaaccctacggcagcttcctgttcctaggcccgaccggcgtgggtaaaaccgagttgtgtaaggcattggcaggcttcctgtttgacagtgaagatcatctgattcgtatcgatatgtccgaatatatggaaaaacacgccgttgcccgcctcatcggcgcgcctccgggctatgtcggctacgaagaaggcggctacctgactgagcaagtccgccgcaaaccatacagcgtgattcttttggatgaagtggaaaaagcccatccggacgtgttcaacatcctgctgcaagtattggatgacggtcgtttgaccgacgggcaaggtcgcaccgtggacttcaaaaacactgttatcgtcatgacttccaacatcggcagccagcacatccaacaaatgggcacgcaggactacgaagcggtgaaagaagttgtgatggaggatgtgaaagaacatttccgtcctgaaatgatcaaccgtattgacgaagtggtcgtgttccacggtttggatcaggcaaacatccgtagcattgcgaaaatccagcttaaaggtttggaaaaacgtttggaaaaacaaaacctgcgcctgactgtttccgatgccgcactggacatcatcgccaaagccggtttcgacccgatttacggcgcacgtccgctcaaacgcgccatccagtcggaaatcgaaaacccgctggcaaaagccctgcttgccggaaactatgcgcccgaaagcgaaatcagggtggaagccgacggcgacagactgaaatttgcctga

SEQ ID NO: 63937 - DNA, 954 bp, Neisseria meningitidis
atgaatcataaaaagatcgttgttttggatgcggatactttgcccggccgggtttttcattttgattttccgcacgagcttgcggtttacggtacgacaggtgcggatgaaacggcagaacgggtgcgcgatgcacatattgtcattactaacaaagtgatgatttccgccgatattattgcggctaatccgcagttggagctgattgccgtcagtgcgaccggtgtgaacaatgtcgatattggggcggcggaggcggcgggcgttgcggtatgcaatgtccgcgcatacggaaacgaatcggttgcggaacacgcctttatgctgatgattgcgttaatgcggaatttgcctgcctatcagcgtgatgttgcggcaggattatgggaaaagtcgccgtttttctgccattacggcgcgccgattcgggatttgaacggcaaaacgctggcggttttcggacgcggcaatataggacggacgcttgcccgatatgcacaggcgttcggtatgagggtggtgtttgccgaacacaaacacgcgcccgacgtgcgcgaaggctatgtttcctttgaagatgcggtacaggctgccgatgtgttgtcgctgcactgtccgctgaacgcccaaactgaaaatatgataggcgaaaacgaattgcggcagatgaagcccggtgcggttttgattaattgcgggcgcggcgggctggtggatgaaaatgcgctgcttgccgcactcaaatacgggcagatcggcggggcaggtgtcgatgttttgacgaatgagccgcccaaaaacggcaatcccttgctgaatgcacgacttcccaatctgattgttacgccgcataccgcgtgggcaagccgtgaggctttggacaggctgtttgatatattgttggcgaacattcacgcctttgtgaaaggcaaggcgcaaaaccgggtagtttga

SEQ ID NO: 63938 - DNA, 1023 bp, Neisseria meningitidis; identical to SEQ ID NO: 48576

SEQ ID NO: 63939 - DNA, 1056 bp, Neisseria meningitidis; identical to SEQ ID NO: 60358

SEQ ID NO: 63940 - DNA, 1008 bp, Neisseria meningitidis
atgagcaccttcttccagcaaaccgcccaagccatgattgccaaacacatcgaccgtttcccactattgaagttggaccaggtgattgattggcaaccgatcgaacagtacctgaaccgtcaaaaaacccgttaccttagagaccaccgcggccgtcccgcctgtcccctgttgtccatgttcaaagccgtcctgctcggacaatggcacagcctctccgatcccgaactcgaacacagcctcatcacccgcatcgatttcaacctgttttgccgtttcgacgaactgatcatccccgattacagtaccttatgccgctaccgcaactggctggcgcaagacgacaccctgtccgaattactcaaactgattaactgccaactgaccgaaaaaggcctaaaaatagagaaagcatccgccgccgtcgttgatgccaccattatccagaccgccggcagcaaacagcgtcaggccatagaagttgacgaagaaggacaaatcagcggtcaaaccacaccgagtaaggacagcgatgcccgttggataaagaaaaacggcctctacaaactcggttacaaacaacatacccgtaccgatgcagaaggctatatcgagaaactgcacattactcccgccaatgcccatgagtgcaaacacctgtcgccgttgttggaagggttacccgaaggtacgaccgtctatgccgacaaaggctacgacagtgcggaaaaccggcaacatctggaagaacatcagttgctggacggcattatgcgcaaagcctgccgcaaccgcccgctgtcggaagtgcaaaccaaacgcaaccgatatttgtcgaagacccgttatgtggttgaacagagcttcggtacgctgcaccgtaaattccgctacgctcgggcagcctatttcggactgattaaagtgagtgcgcaaagccacctgaaagcgatgtgtttgaacctgttgaaagcggccaacaggttaagtgcgcccgctgccgcctaa

SEQ ID NO: 63941 - DNA, 690 bp, Neisseria meningitidis
atgaccgcctttgtccacaccctttcagacggcatggaactgaccgtcgaaatcaaacaccgtgccaagaaaaacctgattatccgccctatcggcacacataccgtcagcatcagcgtcccaccgcacctgtccgccgccgccctcaaccgctggctgcgcgacaacgaagccgtcctgcggcgaacactggcaaaaacaccgccgcacaatactgcaaaccggctgcccgaacatatctggttccacggcagacaacttgccctcaccacccatcaagacacgcaaatcctgctgatgccgtctgaaatccgcgttcccgaagacacacacgacaaacaggcggcattgttggcaacctttctgaaacggcaggcgcacagttacctgattccccgcctcgaacgccacgcccgcaccacacaactgttccccgcctcctcctcgctgacctctgccaaaaccttctggggcgtgtgccgcaaaaccacaggcatacgcttcaactggcggctggtcggcgcaccggaatacgttgccgactatgtctgcatacacgaactctgccacctcgcccatccagaccacagccccgccttttgggaactgacccgccgcttcgccccctacacgcccgaagcgaaacagtggctcaaaatccacggcagggaacttttcgccttgggctga

SEQ ID NO: 63942 - DNA, 702 bp, Neisseria meningitidis; identical to SEQ ID NO: 39279

SEQ ID NO: 63943 - DNA, 849 bp, Neisseria meningitidis
atgcttcaggcggcattgcgttttcctcatgttttcaaagcccgtgcggaagattcgcacaaagggactttcggcacgctcgccgtagtcggcggatcggcagggatgagcggcgcgcccgtattggcggcatcggcggcgatgtatctcggctgcggcaaggtgtgggcgggtttcaatcaggatgcgcttccgtttgccgtcattgccggttttcccgaaattatgttggacacggcagacggtttgaccaagcgtcaaggcataaacgcttggacggcgggttgcggcttgggtacggataaggcggcggtcggaacgcttgccggaattttgacggaacacacggacaagcccgtccttttggatgcggacgcgctgaacatattatcaaccgatgccgaaacccgaaatctggcacgcgggtgtaaaaacctgattttaacgccacaccccgccgaagccgcgcgcctgcttggaacgacggttgcacaggttcaggcggatcggacggcggcagtgaggaagataggggcaattttcggcgcaaccgtggttttaaaggggcacaaaacattggttgccgcgtccgatacggaaatctatgtcaacgaaagcggcaacgcgggattggcaacggcgggcagtggcgacgtattgggcggcatcatcggcagtctgctcgcacagggcgtgccggtttttgaagccgcctgcgcgggcgtgtggctgcacggcgcggcggcggatgtcataaaagaatcggcaggcattgcggcggggctgttggctggcgaaatcgccccggcggcaaggtggctgcgcaaccggataactgaaagtatgtaa

SEQ ID NO: 63944 - DNA, 948 bp, Neisseria meningitidis
atggaatttttcattatcttgttggcagccgttgccgttttcggcttcaaatcctttgtcgtcatcccacagcaggaagtccacgttgtcgaaaggctggggcgtttccatcgcgccctgacggccggtttgaatattttgattccctttatcgaccgcgtcgcctaccgccattcgctgaaagaaatccctttagacgtacccagccaggtctgcatcacgcgcgacaatacgcagctgacggttgacggcatcatctatttccaagtaaccgaccccaaactcgcctcatacggttcgagcaactacattatggcgattacccagcttgcccaaacgacgctgcgttccgttatcgggcgtatggagttggacaaaacgtttgaagaacgcgacgaaatcaacagtatcgtcgtctccgccctcgatgaagccgccggagcttggggtgtgaaggttttgcgttatgaaattaaagacttggtgccgcctcaagaaatccttcgctcaatgcaggcgcaaattaccgccgaacgcgaaaaacgcgcccgtatcgccgaatccgaaggccgtaaaatcgaacaaatcaaccttgccagcggtcagcgcgaagccgaaatccaacaatccgaaggcgaggctcaggctgcggtcaatgcgtcaaatgccgagaaaatcgcccgcatcaaccgcgccaaaggtgaagcggaatccttgcgccttgttgccgaagccaatgccgaagccatccgtcaaattgccgccgcccttcaaacccaaggcggtgcggatgcggtcaatctgaagattgcggaacaatacgtcgctgcgttcaacaatcttgccaaagaaagcaatacgctgattatgcccgccaatgttgccgacatcggcagcctgatttctgccggtatgaaaattatcgacagcagcaaaaccgccaaataa

SEQ ID NO: 63945 - DNA, 1515 bp, Neisseria meningitidis
atgttgtatttcagatacggttttttggttgtttggtgtgcggcaggtgtttctgccgcctatggggcggatgcgcccgcgattttggatgacaaggcattgttgcaggtgcagcggtcggtgtcggataagtgggcggaatcggattggaaagttgaaaatgatgccccgcgcgtggttgacggggattttttgttggcgcatccgaaaatgttggaacatagtttgcgcgacgcgctcaacggcaatcaggcggatttaatcgcttcgttggcggatttgtatgccaagctgccggattatgacgcggttttgtacggcagggcgcgggctttgctggcgaaattggcgggaaggccggcggaggcggtggcgcggtatcgggaactgcacggggaaaatgcggcagacgagcggattttgctggatttggcggcggagtttgacgatttccggctgaagtcggcagaaaggcattttgccgaggcggaaaaattggatttgccggcgccggttttggaaaatgtggggcgttttcggaaaaaagcggaggggctgacgggctggcgtttttcgggcggtatcagcccggcggtcaatcaaaacgccaataatgccgcgccgcaatattgccggcaagacggaggcagtcagatatgcagtgtcagccgggcggagcgggcgacaggcttgaattatgaaatcgaggcggaaaagctgacggcgttggcggacaatcattatttgttgttccgttccaatatcggcggcacaagctattatttcagtaaaaaatcagcttatgatgacgggttcggcagggcgtatttgggttggcagtataaaaatgcacggcagacggcggggattttgccgttttatcaggtgcagttgtcgggcagcgacggctttgatgcgaaaacaaaacgggtaaacaaccgccgcctgccgccgtatatgctggcgcacggagtcggcgtgcagctgtcccatacttaccgcccaaacccgggatggcaattttcggtcgcgctggaacattaccgccaacgctaccgcgaacaggatagggcggaatacaataacggcaggcaggatgggttttatgtttcgtcggcaaaacgtttgggcgaatcggcaactgtgttcggcggctggcagtttgtgcggtttgtgccgaaacgcgaaacggtgggcggcgcggtcaataatgccgcctaccggcgcaacggtgtttatgccggctgggcacaggagtggcggcagttgggcggtttgaacagtcgggtctccgcgtcttatgcccgccgcaactataagggcgttgcggctttctcgacagaggcgcaacgcaaccgcgaatggaatgtctcgctggctttgagccacgacaagttgtcgtacaaaggtatcgtgcctgcgttgaattatcgtttcggcaggacggaaagtaatgtgccgtatgcgaaacgccgcaacagcgaggtgtttgtgtcggcggattggcggttttga

SEQ ID NO: 63946 - DNA, 291 bp, Neisseria meningitidis
ttgaaggttcccgcaaaacgctatttcacgctggacgagttgtgcggactgttgcaaatcagcccctatggttttgcgcaatggcagcataatcacggtgtggttgtcggttacggcggcgaacgctacacccgtttggatgtggtgaaactgttgaaattgcagagcacgtttgcaccgtatgcagaaggtgcggaatcgggttcggacggcaaccgtccggttacgcttcaggaaatcggagacggtctgaaagacctgttggcggatttggataaggaattgtgctga

SEQ ID NO: 63947 - DNA, 2115 bp, Neisseria meningitidis
atgttcctcttttcagacggcctacaatctattaataacaataatcgacgaaaacgcattgtgaaaaacgcctacatcccctctcgcggcatccgcaaaatcccccatctctccaccctattgcccgagtttcatatctacaaagacggaaaaggagcagaggctgttgtcggctggggtttgcgcccgacgacacacaaagcgcgtgcttttgccaccgaacaccagcttccctttattgctttggaagacggctttttacgctcgctcggactgggcgtctccggttatcccccctactccatcgtctatgacgacatcggcatctactacgacactacccgcccttctcgtttggaacaactgattcttgccgccgataccatgccgtctgaaaccttggctcaggcgcaacagacgatggatttcatcctgcaacaccacctgtccaaatacaaccacgcgcccgaactttcagacgatcatcctttacgctccccatccaagcctgaaactgtcctcattatcgaccaaaccttcggcgatatggccatccaatatggcggcgcagacgcctctacgtttgaactgatgtttcagacggccttgaatgaaaacccgcaagccgatatctgggtaaaaacccatcccgatgttttgtgcggcaaaaaacaaggctatctgacccaactggcgcagcaacaccgcgtccatcttctggcagaagacatcaacccgatttctttgttgcaaaacgtcgataaagtttattgcgttacctcgcaaatgggttttgaggcacttttgtgcggcaagccgctgaccaccttcggcctgccgtggtatgccggatggggtgtaagcgacgaccgccatcctgaaatcaaccgccttgttcaaacccaacgccgcgccacccgcaacttgctgcagctcttcgccgcagcctatctgcaatacagccgctacctcaaccccaataccggcgaagcaggcagcctctttgatgtcatcgactatctggcgacggtcaaacgtaaaaacgacaaattgcgtggcgagttatattgcgtcggtatgtctttgtggaaacgcgcggttgccaaaccgttctttaacgtaccctcttgccgtctgaaatttatctcttccacccaaaaactggcaagggtcaaactgtccgacgatgcacgcatcctggcttggggcaacggcaaagaggccatcgtccgctttgccgaacaacaccacatccccctgctgcgcatggaagacggctttatccgctcggtcggactcggctccaacttagtgccgccgctgtcgctcgttaccgacgatatgagcatttatttcaatgccgaaaccccgtcccgtcttgaatacatcctacaaaaccaaaacttcgacgatcaagactttcagacggccttgaagctgcaaaaaatgctgaccgaaaaccacatcagtaaatacaacgtcggcagctcagacttcaccgccccgtcaaccgacaaaaccgtgatcctcgttcccggccaggttgaagatgatgcgtctatccgctacggttcgcccaaaatctatcgcaatctggatttgctccgtaccgtacgcgaacgaaaccccaatgcctatatcatctacaaaccgcatcccgatgtagtcagcggtaaccgcatcggccatatttcccctgaagatgctgcacgatatgccgaccaaaccgccgaacaagccgacatcctgacctgtctccaatacgcagacgaaatacataccatgacttcgctgaccggttttgaagccttgttgcgcggcaaaaaagtcagctgctacggcctgcctttttacgcaggctgggggcttacccaagatctgctccccatcccgcgccgtagccgcagacttgagctttggcagctgattgccggcacgctcatccactatcccgactacatccaccccgaaacccatcaggccataaatgcagaaaccgcagcccaaatcctgatacgacaaaaaaatatgcaaaaaaacaacaacggattacatcgcgggtgctttgccaaaaaattaggtaaaatcaaacaactatatcgatctttcaaataa

SEQ ID NO: 63948 - DNA, 525 bp, Neisseria meningitidis
atgcaaacccgcatcctctccgccgtactgctggctttttcaaccgctgcctttgccgggggcgcattcacgctgcaattcgacaacccgtccgaagacggcggcttcacgcaaaaccagcttttgagcgcgccttacggctttggctgttcgggcggcaatgcttcgcccgcgctgtcgtggaaaaatccgccggccgggacaaaaagtttcgtcctgaccgtttacgataaagacgcgccgaccggactgggctggatgcactgggtggtcgccgacattcccgccgatgtccgccgccgcaacgcggcctcgctgcaattaagccgctgcgccaacatcgccgacgaccagtccgcagccatatcggcggtaatcagtttgcggatttgccgcatcaggttgacgccttcgtacacggcaaaaccgatgccgtcatgctgcaaccacgccaacacgccgcaaagcgcggcctccgccgcattgtgcggcacttcttcatccgccagtaccgcagccgcataa

SEQ ID NO: 63949 - DNA, 312 bp, Neisseria meningitidis
atggcaaaccaaaaaatccgtatccgcctgaaagcttatgattacgccctgattgaccgttctgcacaagaaatcgttgaaactgcaaaacgtaccggtgccgttgtaaaaggtccgattccgttgccgaccaaaatcgaacgtttcaacattctgcgttctccgcacgtgaacaaaacttcccgtgaacaattggaaatccgcacccacttgcgcctgatggacatcgtggattggaccgataaaactaccgatgcgctgatgaagctggatttgccggccggtgttgatgtagaaatcaaagtccaataa

SEQ ID NO: 63950 - DNA, 321 bp, Neisseria meningitidis; identical to SEQ ID NO: 41793

SEQ ID NO: 63951 - DNA, 1407 bp, Neisseria meningitidis
atgaaactgttccaacgcatcttcgccacattttgcgcggttatcgtctgtgcaatctttgtggcgagtttttctttctggctggtgcagaacacccttgccgaaaaccagttcaaccaacgccgcaccatcgaaaccactttgatgggcagcatcatttccgcattccgggcacgcggggacgcgggcgcgcgcgaaatcctgacggaatggaaagacagccccgtctcatcgggcgtgtacgttatacagggcgacgagaaaaaagatatcctgaaccggtatatcgacagctataccatcgaacgcgcccggcttttcgccgccggacacccgcattccaacctcgtccatatcgaatacgaccgcttcggcgaagaatacctgttcttcaccaaagactgggacaaactccaagcccgccgcctgcccagccccctgttgatccccggcctgccgctcgccccgatttggcacgaactcatcatattgtccttcatcatcgtcgtcggactgctgatggcgtacatcctcgccggcaatatcgccaaacccatcagaatcttaggcaacggcatggacagggtggcaaacggagaacttgaaacccgtatctcccaacaggtcgacgaccgcgacgacgaattgtcccatcttgccatccaattcgacaaaatggtggaaaaactcgaaaaactcgttgccaaagaacgccacctgctccaccacgtttcccacgaaatgcgctccccgcttgcccgtatgcaggcgattgtcggactgattcaggcgcagccccaaaaacaggaacaatatctcaaacggctggaaggcgaactgacccgcatggatacgctggccggggaactgttaaccctgtcccgtctcgaaacttccaatatggctttggaaaaagaaagcctgaaactcctgcccttcctgggcaacctggtagaagacaatcaaagcattgcccagaaaaacggacaaacggttaccctgtctgccgacggaaaaatccccgaaaacacaaccatccttgccaacgaaagctacctgtaccgcgccttcgacaacgtcatccgcaacgccatcaactacagtcccgaaggcagcaccatcctaatcaacatcggacaagaccacaaacactggataatcgacgttaccgacaacggccccggcgtggacgaaatgcagctcccgcacatcttcaccgctttctaccgtgcagactccagtgccaacaaacccggaacaggactggggcttgcattgacccaacatattattgaacagcactgcggaaaaatcatcgccgaaaacatcaaaccgaacggtctgcggatgcgcttcatcctacccaagaaaaaaaccggttccaaaacagaaaaaagtgcgaactga

SEQ ID NO: 63952 - DNA, 654 bp, Neisseria meningitidis
atgttggaaattttgttccgccatcaagacttcgtcgccatcaacaaaccgggcggcatatccgtccaccaagacagcggcgagaccggactggcccgaacactcgccatacagttgggcgtagagcgtgtgtggctgctgcaccgattggacaaacagaccagcggcattttactgtttgccctcaacaaagaaagcgcgtccgcccttagcggacagtttgccggcaaaagcatcaaaaaaacctatttggcactatccgaccgcaaaccgtccaaaaagcagggttggattaaaggcggaatggaaaaatccagacgcggaatgtggaagttgacgcgcaatacagaaaatatcgccgttacccgattccacagcatcagtatcgccgaaaaactgcggctgttcatcctggaaccgcatacgggcaaaacgcaccaattgagagtggcgatgaaaagtttgggcagtccgattctgggcgacagcttatacggcggaacagaatccgaaaccatgtttctgtatgcatggaaaatacaatttgcctaccaaaaccgacaaatcgaaattgttgcacccttaaaaaacgaatggcagactgaaaatatctctcatgcgctggaagaattttatatggcaaaagcaggttaa

SEQ ID NO: 63953 - DNA, 870 bp, Neisseria meningitidis
atgaaaccgataaaaaaagccgtcttccccgtcgcagggatgggaacacgcttcctgcccgccacgaaggccagcccgaaagaaatgctgcccatcgtcgacaagccgctgatccaatacgccgtagaagaagccgtggaagccggctgcacggaaatggtgtttgttaccggacgcaacaaacgcagcatcgaagaccatttcgacaaggcatacgaactcgaaaccgagttggaaatgcgccataaagacaaattgttggaacacgtccgcaacatcctgccgccgaacattacctgcctctacatccgtcaggcggaagcactgggcttgggacacgccgtcttgtgcgcccgcgccgccatcggcgacgaaccctttgccgtgattttggctgacgatttaatcgatgccccaaaaggcgcgctcaaacaaatgattgaagtgtacgaacgcagcggcaacagcattttgggcgtagaaaccgtcgaaccgtcgcaaaccggctcatacggcatcgtcgaaaccgaacagctcaaacagttccaacgcattaccggcattgtcgaaaaacccaagcccgaagacgcgccctccaaccttgccgtcgtcggacgctacattctcacgccgcgcattttcgacctcttaaccaatcttccgcgcggcgcgggcaacgaaatccagcttacagacggcatcgccaagctgctcgatcacgaatttgtcctggcgcacccctttgaaggcacgcgctacgactgcggcagcaaactgggctacctcgaagccaccgtcgcctacggcctgaaacaccccgaaaccggcgaacccttccgccgccttttggaaaaataccgcaccgaataa

SEQ ID NO: 63954 - DNA, 840 bp, Neisseria meningitidis
atgaccgccacagccgccgccatagaccgcctgcttccccaaacccaatgccgcgaatgcggctacgacggctgcctgccctacgcacaggcagtcgcaacaggcgaagcgtacaacctctgcgccccgggcggagaagccgtcattcgggacatttccgccctgctcggcaaaccccttgtcgcacctgccaaaacccaagccaaagcactcgcccagatagacgaaaccgcctgtatcggctgcaccgcctgcatccgcgcctgccctgccgatgccattatgggcgcgggcaaacttatgcacaccgtcatcgccgacgaatgcaccggctgcggactctgcgtcgccccctgccccgtcgactgcatccatatgcagcccgttgccgacaccgtcctgccccgcgcgcgtcgcttcagcctgtccgccgacagccgttttgccgccgccgaacacgcgcgcgcgcgctacctcaaacgcaacgaacgcaaacagcgcgaagccgacgaacgcaaggccatgcttgccgaacgcgaagccgccgtccgcaacgcgcgtccgcaaacacccgacacaccgaaaaaaccggcgtttaaccctgccgacctcatcgccaaagccatggcaaaagcgcaaacccaacaagaccgcctcgccgccgccgacaaccgcaaagactatcaggcgaaacagatagccgaagcccgcgaacgcgccgagttgcgccgcgcccaacgcgatatgaaatacggcagcgacagcgaaaaagccgccgccctcgaatacctcaaacaatacaaagccaagcaggatgccgcacaaaacaccgcctcctga

SEQ ID NO: 63955 - DNA, 642 bp, Neisseria meningitidis; identical to SEQ ID NO: 44331

SEQ ID NO: 63956 - DNA, 675 bp, Neisseria meningitidis
atgaatttgaaggctttgattgcgcgtttccgcgtgcttgccaatgataaggccgagccgtatttttggcgcgacgaggaggtgtcgggatggctgaacgatgcggttcatgaggcgtgcctgcgcggccggctgctgcattcggacgatgcgtttgtaacggatgtggaaaaagggcggccgctttatgcttatgcgacaggggagtttgcggcgggttatgtgtatgaaatcgacagtatccgttttgtgtttgacggcaagtcggtgtgcctgaagttggtttcgccggagacggcggatgtttgcgccccgggttggcgcgacggggcggcaacggggctgccggtttatgcggtgcagggtgatgagaagctgacgcttgcacctgcgccggaccgtaacggcaggttgtttgtcggggggtattgcctgccgcgggatatggaggaggacggggacgcgccggaaatcaattctatacatcatcggaatttggtttattgggctttggcggaggctttcagtatcccggatacggagactttcgacccgcagcgttcggaatcggcaaggaggcgtttcgagctgtatttcggcctgccgaccgacagtgatttgcgccgtatcacgcgtgaggatacgctgcacttgaacaggcatttttggatttga

SEQ ID NO: 63957 - DNA, 630 bp, Neisseria meningitidis
atgaacagacacatccgccaagaaatcttcgaacgcttccgcgccgccaacccccatccgaccacagaactcaacttcaactcccctttcgagcttttaatcgccgttttactgtcggcacaggcaaccgacgtcggcgtaaacaaagcgacggcgaagctgtttccggttgccgatacgccgcaggcgatgctggatttgggtttggacggcgtgatggaatatacgaaaaccatcgggttgtataaaaccaagtccaagcacatcatgcagacctgccgcatcctgctggaaaaatacaatggcgaagtgccggaagaccgcgaggctttggaatcgttgccgggcgtggggcgcaaaacggcaaacgtggtattgaacacagcgttcggacaccccgttatggcggtcgatacgcatattttccgcgtgtccaaccgaaccaaaatcgcccccgggaaagatgtgcgcgaagtcgaagacaaactgatgcgcttcattcctaaagaatttctgatggacgcgcaccactggctgattttgcacggacgctacacctgcaaggcactcaaaccgcaatgccaaacctgcatcatcaacgatttgtgcgaatatcccgccaaagcctga

SEQ ID NO: 63958 - DNA, 1497 bp, Neisseria meningitidis
atgaccacggaaaaccaagccggcaatccggaatccggaatcggcacgtccgaacaaacaaaagccgcgccgaaagcgaaaaaaacattcgatccgcgagccagcgtgattcaaatccatcccgaaggcgaacgcatccatcccaaaaaggcggaaggacggttcgccaaactgcgtatcgccgccgtattggcgacgcagtttgtgttttacgtcattccgtggttcaactggagcggcaggcaggccgtcgttttcaatatccccgaacggcatttcttcattttcggattgtcgttgggggtgggcgatttgatttaccttgccttgctgctgatgatttgcgccttcgggctgttttggtggacgacgattgccgggcgactgtggtgcggctattcctgcccgcaaacggtttacaccgaaattatgctgtggatcgacaacctggtcgaaggcgatagaaacaaacgcctgaagctggaaaaatcgccgtggaatttcactaaaatccgcatcaaagccaccaaatacctgttgattttccttgtctgcgcgtggacgggcatcacgtttgcaggctggtttgtccctatccgccagttcgttcccgatttattcactggagcagcaggcggcggcgcgatgtttgccacagcgttttacggctttatgaccttcttcttcgcacatattatgcgcgaaaaagtatgcctgcatatgtgtccgtatgcacgtttccaaagcgcgatgttcgacaaggacacgctgattgtttcttatgacgcggaacgcggcgaaccgcgcggagcccgcaagaaaacggtcaacaaggaagaggcgggtttgggcgactgcatcaactgtgcgatgtgcgtccaagtctgccctgtcggcatcgacatccgcaacggtctgcagtaccaatgtatcggctgcgccgcctgtatcgacgcgtgtgatgagattatggacaaaatgggctatccgcgcggattaatccgttatacgaccgaaagcgcgctggaacacgaatattctgaaaaagacattaaaaaacggctgctcagaccgcgtgtggcaggttacggcgcggtgttggcgttagttatcattgccttcctggccggtttgtccacgcgcaaaatggtcgaggtcgatattttgaaagaccgtggcgtactggtgcgcgaaaacgccaaaggctggctggaaaacgcatacagcctgcgtatcatcaacaaaagtgaaaaagaacagctcattaccgcaagtgtcaaaggctttgacgaaatcgccctgaccgggctgcccgaaggcggtatcaaggttgccccgcgcgaaacggtaacccttcccgtccaagtgtccaccattccggaatacgcggacaaaggcagccaccctatcgaatttaccttccaataccgcgaaagcggcgcgcccgacggcaagccggtcgtcttggaagaagatgcaacctttatcggagaataa

SEQ ID NO: 63959 - DNA, 507 bp, Neisseria meningitidis
atgacagcccttttttacctgccttttccgtggttcgcggaggaaacgattaatctcaccgccgccgtcatttttgccgttgccgccttaaccgactggtttgacggatttttggcaagactgtggaaacagacttccgatttcggcgccttcctcgatcccgtcgccgacaagctgatggttgccgtatcgctacttttactggtcaaactcgaccggacctatgttttgtttgccatgatcattatcggcagggaaattaccatttccgcattgcgcgaatggatggcgcaaatgggcaaaaggaacagcgttgccgtcgccaccgtcggtaagtttaaaaccgccgcgcaaatgctggcaatcttcctgctgctgctgaatattcccgatttttacggatttaatcttgttgttatcggcaatgtattgatgtttatcgcatctttgctgacagtctggtcgatgctgtattatctgaaaatggcgtggaaagaaatcgcctga

SEQ ID NO: 63960 - DNA, 1293 bp, Neisseria meningitidis
atgcagttctcagcattcggcgaaaaattcacgcaacacagcggcatcctccaactgatggacgacctcggcgacgcgctcaaaagcgacaagcccgtcaatatgctcggcggcggcaatccggcgcgaatcgccgaagtcaatgccgtgttcgccgacgtattttccaaactggcagcagaacatgccgtcgaaaacatcggcaactactccaatcctcaaggagatgccgcgctgattgacgcgctgaccgccttcctcaaccgcgaatacggctggaacctgaccgccgacaatatcgcgctgaccaacggttcgcaaaacgcgtttttctatttattcaacctcttcggcggcaaattcaacctttcagacggcacatccgcagaaaaagccattttgttgccgctcgcgcccgaatacatcggctatgccgacgtgcatgtcgaagggcagcacttcgtttccgtcaagcccaaaatcgaaaacgtcgaacacgaaggcgaagcaggcttcttcaaataccgcgtggactttgacgcactggaaaacctgcccgaactcaaagcgggcaaaatcggcgcgatttgctgttcgcgcccgaccaacccgaccggcaacgtgctgaccgacagcgaaatggcgcggctggacgctttggcgcaagaacacgggattccgctgattatcgacaacgcctacggaatgccgttccccaacatcatttacagcgacgtaacgctgaattggcatgaaaacatcatcctctgcttcagcctttccaaagtcggcctgccgggcgttcgcaccggcatcatcgtcgccgcgccggaagtggtcaaagccgtcagcagcctgaacgcgattgtgaaccttgcccccacgcgcttcggcgcggccatcgccgccccgctactggaaagcggcgagatgaaacggcttgccgaccaagtcatccggccgttttaccgcaatcaggcgcaaaccgccgtctcgctgctcaagcgcgagctgggcgcgtacccgatgaaaatccacaaacccgaaggcgcgattttcctgtggctctggtttgaaaacctgcccgtttcttcgcaaaccctgtacgaaatgctcaaagccgaaggtacgctgattattccgggcgaacatttcttcgtcggcatcgacacgcaggattacccgcacgcgggcgagtgcatccgcatgagcatcgcgcaggacgctcaaacgctggaaaaaggcattgccgccatcggcaaaaccgtccgaaaactgtacgacaacgtttaa

SEQ ID NO: 63961 - DNA, 942 bp, Neisseria meningitidis
atggcaatccaatggtttcccggccatatgaacaaggcgaaaaaagccatcgccgagcgtgcaaaaagcgttgatatggtgattgaaatgctggacgcgcgtatgcccgcctccagcgaaaaccccctgcttgcacagctttccaaaggcaaacccaaactcaaaattttaaacaaacaagaccttgccgaccccgaacgcacaaaggtctggcttgaccactacaacagccgccccgacacgcgcgccatcgccctcgattcctccgaaaccggcgcacacggcaaaatcacccaagcctgccgcgcgatgattccccaccggcaaggcatagacaaacccctgcgcgttttgatttgcggcattcccaacgtcggcaaatccaccctcatcaacggcatgataggcaaaaaatccgccaaaaccggcaacgaacccggcatcaccaaagccgaacaacgccttttccttgccgacgacttctggctgtacgacacccccggaatgctgtggccgaaaatcattgtcgaagaaagcggctacaacctcgccgccggcggttcagtcggacgcaacgcattggacgaagaagaagtcgccctcgaacttttagactacctccgccgccactacctccctatgttgcaagaacgctaccaagccgacaaagaccccagcagccactgggacgaaaacgtttggctcgaatggatagccaaaaaacgcggcgcagtcctcagcggcggacggatcaactaccaaaaagccgccgaaaacatcctcaccgacttccgtgaaggcaaaatcggcagaatcaccctcgaaacgccgaaccaatgggaaacttggctcaaaaaagcccgtcagaaagaagccgaactcaaagccatacgcgaagccagaaaagcagagcgtaaagggcagaagccttcggaagcataa

SEQ ID NO: 63962 - DNA, 639 bp, Neisseria meningitidis
atgtccaaactgaccccccgcgaaattttgaccgccggcgcagttgtgccggtaatggcgattgacgacttaagcaccgccgtcgatttgtcccacgcccttgtcgaaggcggcatccccaccctcgaaatcaccctgcgcacccctgtcggcctcgatgccatccgcctgattgccaaagaagtgcccaacgccatcgtcggcgcaggtacggtaaccaaccctgaacagctcaaagccgtcgaagacgcaggcgcggttttcgccatcagcccggggctgcatgaatccctcgccaaagccggccgcaacagcagcatccccctgattcccggtgttgccaccccgggcgaaatccaactggctttggaacacggcatcgacaccctcaaactcttccccgccgaagtcgtcggcggcaaagccatgctcaaagccctttacggcccttacgccgatgttcgcttctgcccaaccggcggcatcagcctggcaactgcccccgaatacctggcactgcccaacgtcctgtgcgtcggcggctcttggctgacaccgaaagaagccgtgaaaaacaaagactgggacaccatcacccgcctcgccaaagaagcggcggcattgaaacccaaagcctga

SEQ ID NO: 63963 - DNA, 297 bp, Neisseria meningitidis
atgcgcaaagcctgccgcaaccgtccgctgtcggaagtgcaaaccaaacgtaaccgatatttgtcgaagacccgttatgtggtcgaacagagcttcggtacgctgcaccgtaagttccgctatgcgcgggcagcctatttcggactgattaaagtgagtgcgcaaagccacctgaaggcgatgtgtttgaaccttttgaaagcggccaacaggctaagtgcgcccgctgccgcccaaaaggcgaccggatgcctgattatcgggtatccggggaggattaagggggtatttgggtaa

SEQ ID NO: 63964 - DNA, 261 bp, Neisseria meningitidis; identical to SEQ ID NO: 43315

SEQ ID NO: 63965 - DNA, 627 bp, Neisseria meningitidis
atgacgcaagaacgtttacccgaatttttcgaccgcgccccgacgctgaccgtacaagacccgcttgccgcatttctcggcgcggcgcaagacggcatcctcacttaccgctacgccgatgccgtgcgcctgtgcggacattcctgcccgaccgtcgcgggcgcgtacctgatggttatcaaaggtctgaaagccctttacggcgaagagctgcccgaacgcggcggcatcgaagccgccatgcagggaacgcgcgacgaaggcacggtcggcgtaaccgcgtccgtcgtccaactcctcaccggcgcagcccccgaaaccggctttggcggcatcggaatacagggacgcttcgcccgccgcaacctcttatcctttggtgcaggcgaaatcaacggcacactcgcgctccgccgccgcgataccggcaaaaccgtcgccgtcagcctcaacgccgccctgaaacccttcgcaccgcaaatgcgcgacatcatgcccaaagccgtcagcggcagcgcaagtaccgacgaactcaaacacttcggacaactctggcaggcacgcgttaaagcatttttgaccgaatcggcggacgacccgcagttcgtcatcgtccgcgaagtgtga

SEQ ID NO: 63966 - DNA, 603 bp, Neisseria meningitidis
atgaccgacaaaatttctcccgacgcactaattgaagccgcactgctgacccaaaccgaaccgctgaccgaaaaatctatgcgcgaattgtgtgtgccgccactgtcgcaggacaaactgattgatgtgttggcgcagttgaaaacgcgttggcaggatagggcgttgcaactggtgcatacgcaagagggctggcgttttcagattgttcagacggcattcgagcggctgggcagcctgcaagaacagcgtgcgccgcgctactcccgcgccgtgatggaaacactggcgattatcgcctaccagcagcccgtaacgcgcggcgacatcgaaggtatacgcggcgtggcggtgtcgcagaacgtgatgcagaccttgcaggatcgggggtggattgaagtcatcggacatcgggacacattgggaaaacccgcgttgtgggcgacaacggcaacttttctcagcgatttgcgcttggacggtctggaagaacttccgccgctgaccgaactgggcgaactggttttacccgatttgatagaaatgccgcctacggatgaagaagagccggaagccgtaccgtccgataccctgcccaactga

SEQ ID NO: 63967 - DNA, 657 bp, Neisseria meningitidis
gtgaaaaaacggctgttttgcagccgcaacggcttgcgctattacctgttgggcggtttctgtttgagtgtttttccgcttttgctggtgtttgcctcatccgtttgggcggtttatcggacgggcggtcaggttttgccgccgtatgtccgggcggatgccgcgctggtgttgggcgccgccgcgtgggacaaacacccttctccggtttttcgggaacgcatcaaccacgccatcgcgctttatcagagccgcagggtaggcaaaatcgtgtttacgggagggcgaaccaaaaaaggctatatgaccgaagccgaggtcgggcggcggtacgcgctcaaacagggggttccggcgcgcaacatcctgtttgaaaacacttcgcgcaacacttatgaaaacctgaacaacatccgtccggttttgcgtgccaacggtattgccagcgtggtgattgtcagcgatccctaccatttggcgcgggcggcggaaatggcggaggatttgggtgtccgcgtttatatgtctgccaccccgaccacgcggtttgatgcgggaaataagaaaaaaatctttatgctgcaagagggatatgcgttatccctctaccgtttggaaaaatgggggtgggattttttcaattggctgtttcattga

SEQ ID NO: 63968 - DNA, 1059 bp, Neisseria meningitidis
atgaccgccgccctgcacatcggacacctgtccaaaagttttcaaaacaccccggttttaaacgacatttcgctcagcctcgacccgggcgaaatcctctttatcgtcggcgcgtccggctgcggcaaaaccacccttttacgctgccttgccggttttgaacaacccgattccggcgaaatttcgctttccggcagaaccatcttctcgaaaaataccaacctccccgtccgcgaacgccgtttgggttatgtcgtacaggaaggtgtgctgttcccccacctgaccgtttaccgcaacaccgcctacgggctgggcaacggcaaaggcaagacggcgcaagagcggcagcgcatcgaagctatgttggaattgaccggcatttccgaacttgccggacgctgtccgcacgaactttcgggcggacagcaacagcgtgtcgccctcgcccgcgccctcgcacccgatcccgaactgattttgttggacgaacccttcagcgcgctggacgaacagttgcgccgccagattcgcgaagacatgattgccgccctgcgcgccaacggcaaatctgccgttttcgtcagccacgaccgcgaagaagccctgcaatacgccgaccggattgccgtgatgaaacaggggcgcatcctccaaactgcaagccctcacgaattgtaccgacaacctgccgaccttgatgccgccctgtttatcggcgaaggcatcgtgttccccgccgcgctcaacgccgacggcaccgccgattgcggattgggccgcctgcccgttcaaagcggcgcacccgcaggcacacgcggcacactgctcatccgtccggaacagttcagccttcacccccattccgcacccaccgcctccattcacgccgtggttctcaaaaccacgcccaaagcgcggcataccgaaatcagtctccgggtcggacaaaccgtcctcacgctcaacctcccttccgcccccaccctgtcagacggcatttccgccgtcctccatttggacggtcccgccctgttcttccccggaaataccctctga

SEQ ID NO: 63969 - DNA, 714 bp, Neisseria meningitidis
atgttgttccgtaaaacgaccgccgccgttttggcggcaaccttgatgctgaatggctgtacggcaatgatgtggggcatgaacgacccgttcagccaaacgaccgcctataaacacgttgacaaagaccaaatccgcgccttcggtgtggttgccaaagacaatgcccaattggaaaagggcagcctggtgatgatgggcgggaaatactggttcgtcgtcaatcctgaagattcggcgaagctgacgggcattttgaaggccgggttggacaagcagtttcaaatggttgagcccaacccgcgctttgcctaccaagccctgccggtcaaactcgaatcgcccgccagccagaatttcagtaccgacgacctttgcctgcgctacgataccgacagacctgccgacatcgccaagctgaaacagcttgagtttgaagcggtcgaactcgacaatcggaccatttacacgcgctgcgtctccgccaaaggcaaatactacgccacaccgcaaaaactgaacgccgattatcattttgagcaaagtgtgcctgccgatatttattacacggttacgaaaaaacataccgacaaatccaagttgtttgaaaatattgcatatacgcccaccacgttgatactggatgcggcgggtgcggtactggtcttgcctatggcggcgttgattgcagccgcgaattcctcagacaaatga

SEQ ID NO: 63970 - DNA, 369 bp, Neisseria meningitidis; identical to SEQ ID NO: 38555

SEQ ID NO: 63971 - DNA, 891 bp, Neisseria meningitidis; identical to SEQ ID NO: 44409

SEQ ID NO: 63972 - DNA, 456 bp, Neisseria meningitidis; identical to SEQ ID NO: 41140

SEQ ID NO: 63973 - DNA, 393 bp, Neisseria meningitidis
atgcccacctcaaccaaaccctacgtcctccgcgctctctgcgaatggtgcagcgacaacagcctcacaccgcacatccttgtttgggtcaacgaacacacgcgcgtccccatgcagtatgtccgcgacaatgaaattatgctcaacatcggtgcgaccgccacgcaaaaccttcaaatcgacaacgattggatcagcttttccgcccgtttcggcggacaggcgcacgacatatggatacctgtcggacacgtcctcagccttttcgcacgggagaccggcgaaggtatggggtttgaattggaggagtaccgccccgacacgccgcctgaaaacacctctgccgaaaccgcgccccgacccgccaaaaaaggcttgaaattggtcaaataa

SEQ ID NO: 63974 - DNA, 501 bp, Neisseria meningitidis; identical to SEQ ID NO: 49735

SEQ ID NO: 63975 - DNA, 2394 bp, Neisseria meningitidis
atgaaactgaaacagattgcttccgcactgatggtcttgggcatatcgcctttggcacttgccgacttcaccatccaagacatccgcgtcgaaggcttgcagcgtaccgagccgagtaccgtattcaactacctgcccgtcaaagtcggcgacacctacaacgacacacacggcagtgccatcatcaaaagcctgtacgccaccggtttctttgacgacgtacgcgtcgaaactgcggacgggcagctcctgctgaccgttatcgaacgccccaccatcggctcgctcaacatcaccggcgcaaaaatgctgcaaaacgacgccattaagaaaaacctcgaatcgttcgggctggcgcagtcgcaatactttaatcaggcgacactcaatcaggcagtcgccggcctgaaagaagaatacctcgggcgcggcaaactcaatatccaaatcacgcccaaagtaaccaaactcgcccgcaaccgcgtcgacatcgacatcacgattgacgagggcaaatccgccaaaatcaccgacatcgaatttgaaggcaaccaagtctattccgaccgcaaactgatgcggcagatgtcgctgaccgaaggcggcatttggacatggctgacacgaagcaaccaattcaacgagcagaaatttgcccaagacatggaaaaagtaaccgacttctaccagaacaacggctacttcgatttccgcatcctcgataccgacatccaaaccaacgaagacaaaaccaagcagaccatcaaaatcaccgtccacgaaggcggacgtttccgttggggcaaagtctccatcgaaggcgacaccaacgaagtccccaaagccgaactggaaaaactgctgaccatgaagcccggcaaatggtacgaacgccagcagatgaccgccgttttgggtgagattcagaaccgcatgggctcggcaggctacgcatacagcgaaatcagcgtacagccgctgccaaacgccgaaaccaaaaccgtcgatttcgtcctgcacatcgaaccgggccggaaaatctacgtcaacgaaatccacatcaccggcaacaacaaaacccgcgacgaagtcgtgcgccgcgaattgcgccaaatggaatccgcgccttacgacacctccaagctgcaacgctccaaagagcgcgtcgagcttttgggctacttcgacaacgtacagtttgatgccgtcccgcttgccggcacacccgacaaagtcgatttgaacatgagcctgaccgaacgttccaccggctcgctcgacttgagcgcgggctgggtacaggataccggcctggtcatgtccgcaggcgtttcccaagacaacctgttcggtacgggcaagtcggccgccctgcgcgcctcacgaagcaaaaccacgctcaacggctcgctgtcgtttaccgacccgtacttcacggcagacggggtcagcctgggctacgatgtttacggaaaagccttcgacccgcgcaaagcatcgaccagcatcaaacaatataaaaccaccacggcaggcgcaggcatccgcatgagcgtgcctgttaccgaatacgaccgcgtgaatttcggtttggtggcagaacacctgaccgtcaacacctacaacaaagcgcccaaacactatgccgactttatcaagaaatacggcaaaaccgacggcacagacggcagcttcaaaggctggctgtacaaaggtaccgtcggctgggggcgcaacaaaaccgacagcgcgttatggccgacgcgcggctacctgacgggcgtgaacgccgaaatcgccctgcccggcagcaaactgcaatactactccgccacccacaaccaaacctggttcttccccctgagcaaaaccttcacactgatgcttggcggcgaaatcggctatgccaacggctacggcaaaaccaaagaaatccccttctttgaaaacttctacggcggcggcctgggttcggtacgaggttacgaaagcggcacactcggtccgaaagtctatgacgaatacggcgaaaaaatcagctacggcggcaacaaaaaagccaacgtctccgccgagctgctcttcccgatgcccggcgcgaaagacgcgcgcaccgtccgcctgagcctgtttgccgacgcaggcagcgtgtgggacggcaaaacctacgacgacaacagcagttccgcgaccggcggcagggttcaaaacatttacggcgccggcaatacccataaatccacctttaccaacgaattgcgctattccgccggcggcgcggttacctggctctcgcctttaggcccgatgaaattcagctacgcctacccgctgaagaaaaaaccggaagacgaaatccaacgcttccaattccaactcggcacgacgttctaa

SEQ ID NO: 63976 - DNA, 2466 bp, Neisseria meningitidis
atgaaaaaaacctgtttccactgcggtctggatgttcccgaacacctccacctgactgtccgttacgaaaatgaagaccgcgaaacctgctgcgccggttgtcaggcagtcgcacaaagcattattgacgcgggcttgggcagttattacaaacaacgcaccgccgacgcgcgaaaaaccgaactgccgccccaagaaattctcgaccaaatccgtctgtacgacctgcccgaagtccagtccgactttgtggaaacccacggcggcacgcacgaagcggttttaatgctcggcggcattacctgcgccgcctgcgtctggctgatcgaacagcagcttttgcgtacagacggcatcgtccgcatcgacctcaattacagcacgcaccgctgccgcgtcgtctgggacgacggcaaaatccgcctttccgacattctgttgaaaatcaggcagataggctacaccgccgcaccctatgacgcgcaaaaaatcgaagccgccaaccaaaaagaacgcaaacaatacatcgtccgcctcgccgttgccgggctggggatgatgcagacgatgatgttcgcgctgccgacctacctttacggcggcgacatcgaacccgatttcctgcaaatcctccattggggtggctttttaatggtgctgcccgtcgtattctattgcgccgtcccgttttatcaaggcgcgttgcgcgacctgaaaaaccgccgcgccggcatggatacgccgattgccgtcgccatcatcatgacctttatcgccggcgtttacagccttgcgaccaatgcggggcaggggatgtatttcgaatccatagccatgctgctgtttttcctgctgggcggacgctttatggaacacattgcccgacgcaaggcaggcgatgccgccgaaaggctggtgaagctgattcctgcgttttgccatcatatgcccgattaccccgatacgcaggaaacctgcgaggcagctgtcgtcaaattgaaggcgggcgatatcgtgctggtcaaaccgggcgaaaccatccccgttgacggcacggtgctggaaggcgcaagcacggttgacgaatctatgctgaccggcgagagcctgcccgtcgccaaaatgccgtctgaaaaagtaaccgcaggtacactcaacacgcaaagccccctgattatacgcaccgaccgcaccggcggcggcacgcgactgtcgcacatcgtccgcctgctcgaccgcgccttggcgcaaaaaccgcgcaccgccgagttggcggaacaatatgcctcgtctttcatattcggcgaactcctgcttgccgtcccagtcttcatcggctggacgctgtacgccgacgcgcacaccgcattgtggattaccgtcgccctgctggtcattacctgcccctgcgccttatcgcttgccacgccgaccgcgctggcagcttctaccggtacgctggcgcgcgaaggtattttaatcggcggaaagcaggcaatcgaaaccctcgcccaaaccaccgacatcattttcgacaaaacaggcacgctgacccaaggcaatcccgccgtccgccggattgaactgctcggcagcatgaccgaagcccaagtgctggcagtggcgcaaagtttggaacagcagtccgaacacccgctcgcgcgcgccatcctcaactgccgcatttcaggcggcagcgtccccgacattgctattaaacaacgcctcaaccgcatcggcgaaggcgtgggcgcgcaactgaccgtcaacggcgaaacacaagtttgggcgttgggcagggcggattatgtcgccgaaatcgccggcaaacctccgcaagacggacaggcttcggaaagcggcagcgcggttttcctcggcagccaaagcggttttgccgccgtgttctacctgaccgaccccttgaaagacagcgcggcggaggcggtgcggcagttggcaggcaaaaacctgaccctgcacatcctcagcggcgaccgcgaaaccgccgttgccgaaaccgcacgcgccctgggtgtcgcgcactaccgcgcccaagccatgcccgaggacaaactggaatacgtcaaagccttgcaaaaagaagggaaaaaagtgctgatgataggcgacggcatcaacgacgcgcccgttttggcgcaggcagacgtatccgccgccgcagcgggcgggacggatattgcgagggacggcgcggacattgtgttattgaacgaagatttgcgtaccgtcgcccacctgctcgatcaggcgcggcgcacccgccatattatccggcaaaacctgatatgggcgggcgcgtacaatatcattgccgtaccgcttgccgttttgggctatgtccaaccgtggatagccgcactgggtatgagcttcagttcgctggcggttttgggcaacaccctgcgccttcacaaacgggaggaaatgccgtccgaacaatga

SEQ ID NO: 63977 - DNA, 2790 bp, Neisseria meningitidis
atgaccgattacagcaaaaccgtcaacctgctcgaaagcccgtttccgatgcgcggcaatcttgccaagcgcgagcctgcatggctgaaaagctggtacgagcaaaaacgctaccaaaaactgcgcgaaatcgccaaaggccgtccgaaattcatcctgcacgacggcccgccgtatgccaacggcgacatccacatcggtcacgccgtcaacaaaattctcaaagacatcattatccgcagcaaaacccaagccggttttgacgcgccttatgtgccgggttgggactgtcacggtttgcctatcgaagtgatggtagaaaagctgcacggcaaagacatgcccaaagcgcgtttccgcgaattgtgccgcgaatatgccgccgaacaagttgcccgccagaaaaaagactttatccgtctgggcgtgttgggcgattgggaccatccttacctgaccatggatttcaaaacagaagccgataccgtgcgtatgctcggcgaaatctacaaatcgggctatctctaccggggcgcgaaaccggttcaattctgcttggactgcggttcttcattggccgaagcggaagtggaatacaaagacaaagtatcgcctgcgattgacgttgcctatccgtttaaagacaccgccgcgcttgccgccgcattcggtttggcaggtatcgaaggcaaagcgtttgccgttatttggacaaccacgccttggacgctgccggcgagccaagccgtgtctgccggtgcggacgtggtgtatcaattaatcgatacgcctacaggcaaattggtgctggcgaaagatttggcggaagatgcgctcaaacgttacggcttttcagacggcatcgccatccttgccgaaaccaccggcgacaagctggaaaacctgcacatgaaccatccgttcctcgaacgcgatattcccatgcttaacggcgaacacgttaccaccgatgccggtaccggcttggtgcatactgcgcccgcgcacggtttggaagactacgccgtctgcaacaaatacggcatcgagctttacaatcctgtcaacgccgaaggcaaatacatcggcgaaacgccgcgtgtcgccggtatgcgcgtttgggaggcgaaccccgtcatcctgcaatggttggaagaaaccagcaaccttttggcaagcagtaaaatcgaacacagctacgcccactgctggcggcacaaaacgccgctgatttaccgcgcgacaggtcaatggtttgtcggtatggacaaagccggtgccgacggcaaaaccctgcgcgacaaagccatcaaggccgtggacgacaccgaattcttcccgtcttggggtcgcgcgcgtttggaagccatgattgaaggtcgtcctgactgggtggtttcacgccaacgctattggggcacgccgatgactttctttgttcacaaagaaacgggcgagctgcatccgaactctgccgaacttttggaaaaagttgccctgaaaatcgaagaaaaaggcatcgaagcgtggttctccctcgataagagcgaactcttgagcgcggaagattgcgaaaattacgataaactttctgacacaatggacgtatggttcgactccggctcgacccattattccgttgtgaaacaacgcgaagaattggaatggccggctgatttgtatctcgaaggcagcgaccaacaccgcggctggtttcaatcgtccatgctgaccggctgcgcctcatcaatgggtcgcgcgccgtataaacagctgctgacccatggtttcgttgtcgacggcgaaggcaaaaaaatgtcgaaatccatcggcaacgtcgttgcaccgcaagaggtttataacgaattcggcgcagacatcctgcgcctgtgggcggcatctaccgattacagcggcgaattggcgatttccaaagaaatcctcaaacgcgtaaccgaaagctaccgccgtatccgcaataccttgagctttttgtttgccaacttgagcgactttaatccgattgaagatgccgtgcaacaggcggatatggtggaaatcgaccgctacgccgtggtattggcacgtcagctgcaagagcgtctggcaggcgattactatccgcgttatgccttccactttgccgtaaaagacattgtttctttctgctcggaagacttgggtgcgttctacctcgacatcctgaaagaccgcctctacaccaccaaagccgacagccatgcacgccgcagcgcacaaactgccctgtatcacatcacacgcagtttggttctcttgattgcaccgattttgtgcttcaccggcgaagaagcgtgggacatcatcggcggcggcgaagaagacagcgtcctcttccatacttggcacgagttcccgaccatcaacgaaaaaaccgaagccgaactggtgaaaaaatggacggcaatccgcgaagcccgcgaagcggtaaccgccgccatcgagcctttgcgcgccgacaaaaccgtcggttcgtccttgcaagccgaagccgaaattaccgcgccggaagaaatggccggctatctgaatgctttgggcgaagaattgcgctttgctttgctggtgtctaaagcagaagtgaaagtaggcagcgaacttgccgttgccgctaaagccagtgatggtgaaaaatgcgaacgctgctggcactacacccgcgatgtgggcgcggttgcaggctatgaaaccgtctgcaaacgctgtgcagagaatgtcggcggagaaggcgaaacgcgccattacgcctga

SEQ ID NO: 63978 - DNA, 1215 bp, Neisseria meningitidis
atggaatgggaattcaacagttattacacactgattgccgccacgctcgtgttgctggttggtaaatttctggttcaaaaaatcaaattcttacgagacttcaatattcccgagccggtcgctggcggtttggttgccgcgattatcctgtttgcgctgcacgaggcgtacggcgtgagcttcaaatttgagaaaccgctgcaaaatgcgtttatgctgatttttttcacgtccatcggcttgagcgcggatttttcccgtttgaaggcgggcggtttgccgctggtggtttttaccgcgattgtgggcggatttatcttggtgcaaaactttgtcggggtcggactggctacggctttgggtttggacccgctcatcggtctgattaccggttcggtgtcgctgacgggcggacacggtacgtcaggtgcgtggggacctaattttgaaacgcaatacggcttggtcggcgcaaccggtttgggtattgcatcggctactttcgggctggtgttcggcggcctgatcggcgggccggttgcgcgccgcctgatcaacaaaatgggccgcaaaccggttgaaaacaaaaaacaggatcaggacgacaacgcggacgacgtgttcgagcaggcaaaacgcacccgcctgattacggcggaatctgccgttgaaacgcttgccatgtttgccgcgtgtttggcgtttgccgagattatggacggcttcgacaaagaatacctgttcgacctgcccaaattcgtgtggtgtctgtttggcggcgtggtcatccgcaacatcctcactgccgcattcaaggtcaatatgttcgaccgcgccatcgatgtgttcggcaatgcttcgctttcgcttttcttggcaatggcgttgctgaatttgaaactgtgggagctgaccggtttggcggggcctgtaaccgtgattcttgccgtacaaaccgtggtgatggttttgtacgcgacttttgttacctatgtctttatggggcgcgactatgatgcggcagtattggctgccggccattgcggtttcggcttgggtgcaacgccgacggcggtggcaaatatgcagtccgtcacgcatactttcggcgcgtcgcataaggcgtttttgattgtgcctatggtcggcgcgttcttcgtcgatttgattaatgccgcgattctcaccggttttgtgaatttctttaaaggctga

SEQ ID NO: 63979 - DNA, 294 bp, Neisseria meningitidis
atgaaaaccaacgacaagctcaataggcagattgacgtgttgcagaaacagtcggcagccatccacaacgaagcctatatcgaaatgaacacgctgctttaccgccaccgcgaagtggtttccgtccacaaccgcaaggcggattatgcggaaaagggcaaagagcggattgcgctgttcccgcgcggcttgaacggcatcaccaagctgcctgccgccgtcctgttgcccgagcgtcccgattgttttgatatgaaggcagtttggcaaatgtttaatagaataccgaggtag

SEQ ID NO: 63980 - DNA, 531 bp, Neisseria meningitidis
atggaaagtttcgagcttgaggatttgacgctgtggctggtacgcgatgcggatgaagcggaaatgtggatagaccgctgggcgattagttatcccgtcgtgcagatgtccgaagcgtcggccggtcaaagcataggggaatggcaggcagggcttcagacggcatttgaacgcatacgcggcaaatacgtcgccgttgtcgcacacggtgcgggcgcggccgcatttttggcgtggctgtatcaggcagacatcctgacacggaagaaaattgccaacatcatccttgtaccgcagcgtcccgatatttttcccgacgatgcggaacacactttccaacgcgtccgctgtccctgccgtgccgcattggttgtacccgaacacggcggcgtgccgcacggttgggcgcaaaaacaggcggatttgtggaacgcccgcctgttggtttccccgcattcgggcagtttgaacggcatgctcggcggctggcagtggggtatgaagctgatgcaggaaatgttgctggcgtga

SEQ ID NO: 63981 - DNA, 264 bp, Neisseria meningitidis; identical to SEQ ID NO: 37542

SEQ ID NO: 63982 - DNA, 993 bp, Neisseria meningitidis
atgaaaacgcacgaaataagcaaagattcggtcagcttgataggggttgccgaacatgaggcgggtcaacgccttgataactatctgataaaaatcctcaagggggttcccaagagccatatccaccgcattatccgcgccggcgaggtgcggctgaacaaaaaacgctgcaaacccgacagccgtattgcggagggggatacggtgcggattccgcctgtgcgcgtggcggagaaggaaatgccgtctgaaaggcgtgccgccgtaccggcgcgtgcgtttgacgttgtttacgaagacgatgcgcttttggtgatcgataagccttctggcgtggccgtccacggcggcagcggcgtgagtttcggcgttatcgaacagttgcgccgcgcccgtccggaggcgcgttatctcgaactcgtccaccgtttggacaaggatacgagcggcttgttgatggtggcgaagaaacgcagcgcgctcgtcaaacttcacgaagccatccgtaacgaccaccccaaaaaaatctaccttgcgctgggggtgggcaaactgccggacgacaatttccatgtcaaactgcccctgttcaaatataccggcgcacaaggcgaaaagatggtgcgcgtcagtgcggacgggcagtcggcgcatacggtgttccgtgcgctaaatcggttttcagacggcattttgcacggtgtcgggctgtcgcacctgactttggtgcgggcgacgttgaaaacggggcgcacgcaccaaatccgcgtccacctgcaatctcaaggctgtccgattgcgggcgacgaacgctacggcgattatcaggcgaaccgtcgtttgcagaagttgggtttgaagcggatgtttttgcacgcgtccgagctgcacttgaaccatccgctcacgggcgagccgctggtgttgaaggcggagctgccgccggacttggcacagtttgcggtgatgttggaaaacgggacgaaaatgtga

SEQ ID NO: 63983 - DNA, 465 bp, Neisseria meningitidis
atgtacaaacatctggttgttgccgttgacggcagtgaaacgtccatcaatgccctgaaacatgccgccgagcttgccggggtcaacggtgcgcgtctgactttggtacacgttgccaatcctgccgaatatatggcgctcgcccccgaatttttgcaacacgagagttacgaggcagccgccattgcacaaggtaacgaggttttggatgccgccgagcgcaccgcccgggaactgggtgtggaaaataccgtcaaacacctgctggttgccaataagggtgcgcgcgaaatggcgcaggatttggttgattatgccgatgaaaacggtgccgacctgctggtgttgggcacgcacggacgtaccgggctgatgcaccttttaatgggcagttttgccgaaacggtaatgcgccaaagccacctgccgcttttgattatccgcagcaaagccgaagaggcgtag

SEQ ID NO: 63984 - DNA, 480 bp, Neisseria meningitidis
atgaaacacatactccccctgattgccgcatccgcactctgcatttcaaccgcttcggcacatcctgccagcgaaccgcaaacccaaaacgaaaccgctatgaccacgcataccctcacctcaaaatacagctttgacgaaaccgtcagccgccttgaaaccgccataaaaagcaaagggatgaacatttttgccgtcatcgaccatcaggaagccgcccgccgaaacggcttaacgatgcagccggcaaaagtcatcgtcttcggcacgcccaaagccggcacgccgctgatggtcaaagaccccgccttcgccctgcaactgcccctgcgcgtcctcgttaccgaaacagacggcaaagtacgcgccgcctataccgatacgcgcgccctcatcgccggcagccgcatcggttttgacgaagtggcaaacactttggcaaacgccgaaaaactgatacaaaaaaccgtaggcgaataa

SEQ ID NO: 63985 - DNA, 300 bp, Neisseria meningitidis
atgaagaaaatgttcgtgctgttctgtatgctgttctcctgcgccttctcccttgcggcggtaaacatcaatgcggcttcgctgcaggagttggaggcgctgccgggcataggccctgcgaaggcgaaggccattgcggaataccgtgcgcaaaacggtgcgttcaagtctgtggacgatttgaccaaggtaaagggcatcggccctgcggtgctggcgaagctgaaggatcaggcttccgtcggcgcgcccgcaccaaaaggcccagccaaaccagtgctgcccgcggataaaaaataa

SEQ ID NO: 63986 - DNA, 1428 bp, Neisseria meningitidis
atgatacacaccgaaccgagcgcgcagccgtcaactatggacacggctgcttttttaaagcacatcgaatccgcattccgccgcattttttcagacggtatcgacctgatgcgatacctgcccgaagacaaatggcttgccttgaagcaggcgggtttgctgttgcccttcctcgacaaaaaacacggcgggcgcaagggcagccagtttgaaattcaggaagtcttgcggattgcggggcattacggcgtgcccgttacgctgcgtaccggcatcgaaggcgcgctggtgttgcagccactgcaagagttcggcgatgaagcgcaagtcgcgcaaggtttggagatgattttcaaaggcgagggcggcggtttgggcgttaccgaacccgaaacctccggcgcggcgattgcacgcgaaatgcagtcttactacgaatataccgacggacaaaccatttacgtcaacgccgcgaaatactggcagggcaactcgcaaagcgacttcctcctcgttgccgccaaagagcgcaaaaacggcaaactcgccaaagtcatcgacctgctgctcgtccccaaaacatacatccgctgcgaaaccctcgcatccgaaggcttgcgcgccgtccgttacgccgtcaaccgcatcgatgccgaaatgcctgcaaccgccgtgatgaaactctcccagagcgacgctgccggtttgcgcgcgttccaaaacatctttatccgcagccgcctgcaactgatcggcatgacgcacggcattatggaatacatccttgaaaacctgggacgatacgtccgcaacgacatcagattcgtcgattacgaacgccgcgaaatccggcgccgccatcaggtttccgagattctttaccgctacgtctgccattccgtttcgcctgttgcccccgtcgcccatcagctgatggaggcgaacatcgtcaaaaccctcgccacggaatacacttatgccgccgcgcaaatgttgcaaaaactcttgggcgcgaagggttttgaacgcggacacaccgccggcaatatcgccatcgacatccgtcccttcacgatttttgaaggcccgaacgatatgctttatgccgaaatttacgaccagtttgtccgcgccaccgccgaagaaaaagaagcaggcatgaagttggacaaaaaccaaaccctgctcgaccgcctgcaaaccgatgcccgctttgccgccgtcgcccgcgactacactttgcctgaagacatccgcagcttcctgcaggaacacaccctgaccgatgcctgcgccctgcaaaaagtctttatcggcaaaatcatcgcccgactctttgtcttcgtacaggcgaaacacgaagacgcggcagcctgcctgctgaacgacatccgcaaagacatattggactgccgatattgcggatag

SEQ ID NO: 63987 - DNA, 966 bp, Neisseria meningitidis
atgagctacacgcaactgacccaaggcgaacgataccacatccaatacctgtcccgccactgcaccgtcaccgaaatcgccaaacagctgaaccgccacaaaagcaccatcagccgcgaaatcagacggcaccgcacccaagggcagcaatacagcgccgaaaaagcccagcggcaaagccagactatcaaacagcgtaagcgacaaccctataagctcgattcgcagctgattcagcacatcgacacccttatccgccgcaaactcagtcccgaacaagtatgcgcctacctgtgcaaacaccaccagatcacgctccaccacagcaccatttaccgctaccttcgccaagacaaaagcaacggcagcacgttgtggcaacatctcagaatatgcagcaaaccctaccgcaaacgctacggcagcacatggaccagaggcaaagtccccaaccgtgtcggcatagaaaaccgacccgctatcgtcgaccagaaatcccgtatcggcgattgggaagccgacaccattgtcggcaaaggacagaaaagcgcattattgaccttggtcgaacgcgttacccgctacaccatcatctgcaaattggatagcctcaaagccgaagacactgcccgggcagctgttaggacattaaaggcacataaagacagggtgcacaccatcaccatggataacggcaaagagttctaccaacacaccaaaataaccaaagcattgaaagcggagacttatttttgtcgcccttaccattcttgggagaaagggctgaatgagaacaccaacggactcatccggcaatacttccccaaacaaaccgatttccgtaacatcagtgatcgggagatacgcagggttcaagatgagttgaaccaccgaccaagaaaaacacttggctacgaaacgccaagtgttttattcttgaatctgttccaaccattaatacactag

SEQ ID NO: 63988 - DNA, 1068 bp, Neisseria meningitidis; identical to SEQ ID NO: 62654

SEQ ID NO: 63989 - DNA, 1446 bp, Neisseria meningitidis; identical to SEQ ID NO: 54468

SEQ ID NO: 63990 - DNA, 867 bp, Neisseria meningitidis
atgtggaaaatgttgaaacacatagccaaaacccaccgcaagcgattgattggcacattttttctggtcggactggaaaaccttttgatgctggtgtatccggtgtttggcggctgggcaattaatgccgtaattgcggggaaggtgtggcaggcgttgctgtacgctttggttgtgcttttaatgtggctggtcggtgcggcgcggcggattgccgatacgcgcacgtttacgcggatttataccgaaatcgccgtgccggtcgtgttggaacagcggcagcgacaagtcccgcattcggcggtaactgcgcgggttgccctgtcgcgtgagtttgtcagcttttttgaagaacacctgccgattgccgcgacatccgtcgtatccatattcggcgcgtgcatcatgctgctggtgctggaattttgggtcggcgtgtcggcggtgggcatacttgcgttgtttttatggcttttgccacgttttgccgccattagcgaaaacctgtatttccgcctgaacaacagcttggaatgcgacaaccactttatccgaaaaggagaccggcggcagctgtaccgccattacggactggttgcgcgcctgcgtgtgctgatttccaaccgcgaagccttcggctatctctgcgtcggcgcggcgatgggtattttgttcggctttgcttttgtgatgatgacgctcaaaggctacagcagcgcggggcatgtctattcggtcggcacttatctgtggatgtttgccatgagtttggacgacgtgccgcgattggtcgaacaatattccaatttgaaagacatcggacaacggatagagtggtcggaacggaacatcaaagccggaacttga

SEQ ID NO: 63991 - DNA, 192 bp, Neisseria meningitidis; identical to SEQ ID NO: 37158

SEQ ID NO: 63992 - DNA, 720 bp, Neisseria meningitidis; identical to SEQ ID NO: 50595

SEQ ID NO: 63993 - DNA, 2019 bp, Neisseria meningitidis
atggaagtcattcgataccccgattcccccttcaaactccaccaacccttcccgcccgccggcgaccagcccaccgccattgccggcctgctcgaagggctttcagacggccttgcctatcaaaccctgctcggcgtaaccggttcgggcaaaacctacaccatggcgaacgtcatcgcccaaagcggccgacccgccatcatcatggcgcacaacaaaacccttgccgcccagctctatgccgaaatgcgcgagtttttccccgaaaacgcggtggaatatttcgtctcctactacgactattaccagcccgaagcctatgtgcccagccgcgacttgttcatcgaaaaagacagcgcgatcaatgaacacatcgaacaaatgcgcctttccgccaccaaaaacctgatgacgcgcgacgacgtgattatcgtcgccaccgtgtccgccatttacggtatcggcgacccgactgagtatcaacaaatggtgttgtccgtcaaagaaggcgacaccatcgagcagcgcgacatcatcgccacgctcgtttccatgcagtacgaacgcggcgatttggacttcaaacgcggcagcttccgcgtgcgcggcgacgtgattgacgtgtaccccgccgaaagctccgaaaacgccttgcgtatcagcctgttcgacgacgaaatcgaccgcctcgatatgttcgacccgctttcaggcagccttatccaacgcgtcggccgctacaccgtcttcccgtccagccactacgttaccccgcgcgacaccgtattgcgcgcctgtgactccatcaaagaagaattgcgcgaacgcattgatttctttaccaaagaaaaccgtcccgtcgaacaacaacgcatcgaacagcgcacccgtttcgacctcgaaatgctctacgaaatgggcttctgtaaaggaatcgaaaactactcccgccacttctccggcaaaaaagaaggcgaaccgccgcccacgctgatggactacctgcccgacaacgccatcatgttcatcgacgaaagccacgttaccgtcacacaaatcggcggcatgtacaaaggcgacgcatcgcgcaagcaaaacctcgtcgattacggcttccgcctaccttccgcccgcgacaaccgcccgctcaaattccacgaatttgaaaaagtcatgccgcaaaccgtcttcgtttccgccactcccgccaaatacgaagaagaacacgccggacaagtggtcgaacaagtcgtccgccccacagggttggtcgatccccaaatcatcatccgccccgtcgccacccaagtcgacgacttaatgagcgaaatcaacgaccgaattcaaaaaggcgaacgcgtactcgttaccaccctcaccaaacgcatggcggaacaactcaccgactattacagcgaactcggcatcaaagtgcgctacctgcacagcgacatcgacaccgtcgagcgcgttgaaatcattagagatttacggctcggactgtttgacgtactcgtcggtatcaacctcttgcgtgaaggcctcgacatccccgaagtctccctcgttgccatcctcgacgccgacaaagaaggcttcctgcgctcccaccgcagcctgattcaaaccataggccgcgccgcgcgcaacgtgaacggcgtcgccatcctgtacgccgacaaaatcaccgactccatgaaagccgccatcgacgaaaccgaacgccgccgcgaaaaacagatgaaattcaacgaagaacacggcatcgtgccgcagcagattaaaaaacaggtcaaagacattatcgacggcgtgtaccacgaagaagacagcggcaaaagccgtctgaaaggtaaaaacaaggttaaagtaggcgaaatccacaacgaagaagatgcgattaaagaaatcgccaaactagaaaaagccatgcaacaggcggctagggatttgcagtttgaagaagcggcggtgttgagggataggattcgggggattaaggagaatttattattttag

SEQ ID NO: 63994 - DNA, 762 bp, Neisseria meningitidis; identical to SEQ ID NO: 58748

SEQ ID NO: 63995 - DNA, 363 bp, Neisseria meningitidis
atgcaatgcgatttttctcaagcagtaccatcaaaccaaacccaaaacattcaaaaccaagcccaaacggtaaccatcccccacaagctggcaaacgacgcagcagacgcttgcttttacgcagaccgcgcgtctgaaaaccttgccgccatccttgaagcggtggaagcactgatagatatttccactaccacgcaaacagggcaggcgcaacggcacaatttgccgctgattgcccgcaacctcatcaaaaccgccaagaacgaagtagagacactggcagagtttcaccctttcagcctgtttgaaaccgcaacggatttgaataacgaaatcttcagccaagttcacagcgcgaaataa

SEQ ID NO: 63996 - DNA, 1350 bp, Neisseria meningitidis; identical to SEQ ID NO: 44843

SEQ ID NO: 63997 - DNA, 705 bp, Neisseria meningitidis
ttgtggcaaaaccccaaatccatcgtcgaactctacatccaagaaggcaaatcagacgcacgcacgcgcgaagtgttggaaaaggcggcaaacgaaaacatccgcgtatattttgccgatgccgaccgcctcaacgccatcagcaaaggcgcgcgccatcagggtgtggccggatttatcgatgcctccaaaaaccacgtccatctcgaagacgtattggaaaacttaagcgaaccgccgctgctgctgatactcgacggcatcaccgatccgcacaacctcggcgcgtgcctgcgtaccgccgacgcaatgggcgtacacgccgtcatcgcaccgaaagacaaaagcgcggggctgaacgccaccgtcagcaaagtcgcctgcggtgcggcggaaaccgtcccctacatcaccgtaaccaacctcgcccgcaccctacgcgaattgaaagaatacggcatttggatcatcggcaccgatatgggcggcaacgccgacctttaccattgcgatctgcccgacagcgcggcatgggtgatgggcaacgaaggcgacggtatgcgccgcctgacacgcgaacattgcgacatgctggtgtccatacccatgttcggcacggtcgaaagcatgaacgtctccgtgtctgccggaatggtattaagtgaaacacgccgacaacgcgtattaaaaaacgaaaaagcgtaa

SEQ ID NO: 63998 - DNA, 1071 bp, Neisseria meningitidis; identical to SEQ ID NO: 42097

SEQ ID NO: 63999 - DNA, 1191 bp, Neisseria meningitidis
atgaaccccaaacacctcatcgcattttccgccctgttcgccgccacgcaggcagaagccctgcccgtcgcctccgtcagcctcgacaccgttaccgtttccccgtccgccccctacaccgatacaaacgggctcttgaccgactacggcaatgccgccgcctcgccttggatgaaaaaactccaatccgtcgcacaaggcagcggcgagaccttccgcatcctgcaaatcggcgactcgcataccgccggcgacttctttaccgacagcctgcgcaaacgcctgcaaaaaacttggggcgacggcggcataggctgggtttaccccgccaacgtcaaagggcagcgcatggcggccgtccggcacaacggtaactggcaaagcctcaccagcaggaacaatagcggagacttcccgctcggcggcatcctcgcccacaccggcagcggcggcagcatgaccctgaccgcatcggacggcaagaccggcaaacagcgtgtttccctgtttgccaaacccctgctcgccgaacaaaccctgaccgtcaacggcaacaccgtctccgccaacggcggcggctggcaggtactggatacgggcgcggcactgcccctgaccatacacaccgaaatgccgtgggacatcggatttatcaatatcgaaaatcccgccggcggcattaccgtttccgcgatgggcatcaacggcgcacaattaacccagtggtcgaaatggcgtgccgaccgtatgaacgaccttgcccaaaccggcgccgatctagtcatccttgcctacggtaccaacgaagccttcggcgacaacatcgacattgccgataccgaacagaaatggctggataccgtccgccaaatccgcgacagcctgcctgccgccggcatcctcatcatcggcgcacccgaatccctgaaaaacacgctcggcgtatgcggcacacgccccgtccgcctgaccgaagtccaacagatgcagcggcgcgtcgcacggcaggggcagacgatgttctggtcttggcaaaacgcgatgggcggcgtttgcagtatgaaaaactggctcaaccacggatgggccgccaaagacggcgtacacttctcctccaaaggctaccaacggccggcggaaatgctcgccgacagcctcgaagaactcgtccgcgccgccccgaaacggtaa

SEQ ID NO: 64000 - DNA, 1239 bp, Neisseria meningitidis
gtgattgcatcgctgacgggcgcggccgtgggcggcacgccggtagatgcgcaaaccggaggtgcggtcggacagaatgcggtggaaaacaacctctatctgacatcggaagccttaaagaaggacaagcagacagctcgtaaaatttattccgtcataaaagagcaagtcaagcatgaatgcagttccacaggaagaattaccgaatgtcgtcaaaatataggacgcattatcgaatttacccaagacaaacgctttgacagtaggtttaaggacttaaaaaaagaatccttatattacctaaatcaacatcctgatttagtagcctcttatttgaaggctgaatacgaaaagctggatagggaagacaaaagtatcctgcaccgctacatctcacctggggctgaaatcgtttcgggcagtttgggggttgttctttcaggagtagccggaggcggatcttgtgccgagactttcggcttaggctgtgccgccgctttggttggtgtaacgtcttcctacgatcatgtcattactgggacaaaaaacttcggaaaaaaagccagcgagcaacgaccgacgattgcggttcaggccttgaagcagttggggctgtcggagcaggctgcggaatatgttcagttctctatagatttgttcagtgtgggtaaatcggggggcggtatacctaaggctaagcctgtgtttgatgcgaaaccgagatgggaggttgataggaagcttaataaattgacaactcgtgagcaggtggagaaaaatgttcaggaaacgagaagaaggagtcagagtagtcagtttaaagcccatgcgcaacgagaatgggaaaataaaacagggttagattttaatcattttataggtggtgatatcaataagaaaggcacagtaacaggagggcatagtctaacccgtggtgatgtacgggtgatacaacaaacctcggcacctgataaacatggggtttatcaagcgacagtggaaattaaaaagcctgatggaagttgggaggtgaaaacgaaaaaaggtgggaaagtgatgaccaagcacaccatgttcccaaaagattgggatgaggctagaattagggctgaagttacttcggcttgggaaagtagaataatgcttaaggataataaatggcagggtacaagtaaatcgggtattaaaatagaaggatttaccgaacctaatagaacagcatatcccatttatgaatag

SEQ ID NO: 64001 - DNA, 831 bp, Neisseria meningitidis
atggcacattacgcaatcggcgacatacaaggctgtttcgacgaactgaccgcgctgctcggcaaaatcggtttcaaccacggcacggacaccctttggctgacgggcgacatcgtcaaccgcggctcgaaatccctcgaaacgctgcaattctgcatccggcacgaaaacagcgtgcaaatcgtcctcggcaaccacgacctgcacctgctcgccgtcggctgcggcgaaggcgcgcccaaacgcagcgacacaatcgaacccatactcaaacaccccgacggaaaaaaaatgctcgactggctgcgcgcgcaaccgctgttgatacgcgagggcagccgcgtgatggtacacgccggcatcctgccgcaatggcgcatcgccaaagccgaatcgctcgctagagaagccgaagccgaactgcgcggcaaaaaatacgtcaaattcttctccaaaatgtacggcaacaaaccggccgcgtgggacgaaggtttggaaggctatgcccgcctgcgcttcatcgtcaacgccttcacgcggatgcgcgccctgacctttaaaaacgaactggatttcgactacaaatccacagtgaaaaaaatgccgccttacctgcgcccgtggttcaaagcccccgaccggcaaaacctcgaccgcaccatcatcttcggacactggtcctcgctgggctacacgaatgccgacaacgtcatctcgctggacaccggcgcgctgtggggcggacagctgaccgccgtcaacctcgaaacggaagaaattacccaagtccaagccgccggcggcatagactggaaaagcttcgcaaaataa

SEQ ID NO: 64002 - DNA, 558 bp, Neisseria meningitidis
atgaaaaacctcatcgccttcaacaaaccctatggcgttatctgccaattttcaccgcacgaaaaacacaaaagcctcaaagactttatcaattttcccggcttctaccccgccggacggctcgacaccgacagcgaggggctgctgctgaccgacgacggcaggcttcaggcacaaattaccgaccccaaattcaaacaccctaaaacctactgggcgcaactggagggcgtacccgacgaaagccgattggaaagcctaagaaaagggatagacttaggcggtttcgttacccgtccggcaagcatccgcatcttgaaacacggagaagcagattcgttatgggagcgcatcccgccgatacgcgtccgcaaaaccgttcccgatttttggattgaaattaccatttctgagggcaaaaaccgccaagtcaggcgaatgaccgccaaggcgggctatccctgcctgcgtctgatcagagtggcaagcggcagactgaaactgtttgatttggatttaaaacccggggaatgggcatacgccccgtttaaaccataa

SEQ ID NO: 64003 - DNA, 492 bp, Neisseria meningitidis
ttggctaaacagcaagagaaagccaaaattgaaaaagcggaacgtgagcggaaaaaagccgaagaacaggcagaacaagctagaaaagaaaaagaaaagcaaaagcttgaagaacaaagaaaatttttgattgagcagtttgaagtattgtctcccaaacagcaagaaaatgtcatcaatgagatatttgagcaagtgggaaaaggcacattcaagcaaattttccaaacggcacggcagcaaggtacggttcatattgatgcgcgatttgtaaaaaatttttataattattttcaacaagaagaacgcgcaaaaagggctagaaaacgtgtagatttacccattcagtacacagaagaagatattgagcaggaagtaccaaaagaaaaaggcacaatttttttcggtaacgactggaacgaatatgtttataaacaactgattatgtatatagattttaaaagcatgatgaatgatgatgccattaaataa

SEQ ID NO: 64004 - DNA, 747 bp, Neisseria meningitidis; identical to SEQ ID NO: 47877

SEQ ID NO: 64005 - DNA, 1131 bp, Neisseria meningitidis
atggccaaacatctgccactcgccgtcctgactgctttgctgcttgcagcgtgcggcggttcggacaaaccatctgccgaaaatccggcaccggcggaaaaccaaaacgtattgaaaatttacaactggtcggaatatgtcgatccggaaaccgttgccgattttgaaaagaaaaacggcatcaaggttacttatgatgtgtacgacagcgatgaaacgctggaaagcaaggtgctgacaggcaagtccggttacgacattgtcgcgccgtccaatgcgtttgtgggcaggcagattaaggcaggtgcgtatcagaaaatcgataagtcgctgattcccaattataaacacctcaatcccgaaatgatgaggctgatggacggggtcgatcccggccacgaatacgccgtgccgttttattgggggacaaataccttcgccatcaataccgaacgcgtgaaaaaggctttgggtacggacaagctgccggacaaccagtgggatttggtgttcgaccccgaatacacgtccaaactcaagcaatgcggcatcagctatttggacagcgcggcggaaatctatcctatggtgttgaactatttgggtaaaaacccgaacagcagcaatacggaagacatcagggaggcaaccgccctactcaagaaaaaccgccccaatatcaaacgctttacttcgtccggctttatcgatgatttggcgcgcggcgatacctgcgtaacaatcggtttcggcggcgatttgaacatcgccaaacgccgtgccgaagaagcgggcggcaaggaaaaaatccgcgtgatgatgcccaaagagggcgtggggatttgggtggattctttcgtgattccgaaagatgcgaaaaacgtcgccaacgcgcacaaatacatcaacgacttcctcgatccggaagtgtcggcgaaaaacggcaatttcgttacttatgcgccttcgagcaagccggcgcgtgagctgatggaagacgaatttaaaaacgacaatacgattttcccaaccgaggaggatttgaaaaacagctttatcatggtgcctatccagccggcggcattgaagtttatggtgcgccagtggcaggatgtgaaggcggggaaataa

SEQ ID NO: 64006 - DNA, 435 bp, Neisseria meningitidis
atgcccgcctgtttctgcccccactgcaaaacccgtctctgggtcaaagaaacccaactcaatgtcgcccaaggcttcgtcgtctgccaaaaatgcgaaggactgtttaaagccaaagaccatctggcaagcacgaaagaacccatattcaacgatttgcccgaggctgtttcggatgtcaaactcgttcaccgtatcggcacgcgcgccattggcaagaaacagatttcccgtgacgaaatcgccggcatcctcaacggcggtacaacccagcccgatattccgcccgcaaccgccgccacccctgctgccgcaccgcaggttaccgtaccgcccgccgcgcccgcccgtcaggatgggttcaactggacgattgcaaccctgtttgcccttatcgtcctcattatgcagctttcctacctcgtcatcctatga

SEQ ID NO: 64007 - DNA, 960 bp, Neisseria meningitidis
atgaaacctgtttttttggattttgaacaacccatagccgaactgaccaacaaaatcgatgagctgcgtttcgtccaagacgagtctgccgtcgatatttcggacgaaatacaccgtttgcagaaaaaaagcaacgacctgaccaaatcgattttcagcaaacttacgcccgcccaggtttcacaggtttcccggcatccgcagcgtccctatactttggattacattgatgcgctgtttactgattttgaagagctgcacggcgaccgccactttgccgacgatcatgcgattgtcggcggattggcgcgtttcaacggacaaagcgtgatggtcgtcgggcatcagaaagggcgcgacaccaaagaaaaaatccgccgcaacttcggtatgccgcgccccgagggctaccgcaaagccctgcgcctgatgaaaacggcagaaaaattcggcttgcccgtcatgacctttatcgatacaccgggcgcgtatcccggcatcggcgcggaagaacgcgggcagtcggaagccatcggcaaaaacctgtacgaactgacacgcctgcgcgttcctgttttgtgtaccgtcatcggcgaaggcggttcgggcggtgcgttggcggtcgccgtgggcgattacgtcaatatgctgcaatactcgacctattccgttatttcccccgaaggctgcgcttcgattttgtggaaaaccgccgaaaaggcggcggatgcggctcaggctttgggcattactgctgaccgcctgcaaaagctggacttggtcgataccgtcatcaaagaaccattgggcggcgcgcatcgggattttgggcaaaccatgaaaaacgtgaaagccgttttggaaaaacaactgcacgaagcgcaaagcatcccgcttgccgatttgctttcgcgccgtttcgaccgcattatggcttacggcaaattttcggaacaataa

SEQ ID NO: 64008 - DNA, 1281 bp, Neisseria meningitidis
atggaaaactcattgaaagaagccgccctcaagttccacgaattacccgttccgggcaaaatttccgttaccccgaccaaatctctggcgaccgacaaagacctggcgttggcgtactctccgggcgtagccgctccttgtatggaaatccatgccgatccgcaaaatgcctacaaatacactgccaaaggcaacttggtcgccgtcatttccaacggtaccgccgttttgggcttgggcgacatcggcgcgctggcgggcaaacccgtgatggaaggcaaaggcgtattgttcaaaaaattcgccggtgtggacgtgttcgacatcgaaatcgatgaaaaagacccacaaaaactggtggacatcatcgccgctttagagccgactttcggcggcatcaacctcgaagacatcaaagcacccgagtgtttctacatcgaacgcgaattacgcaaacgctgcaaaatccccgtattccacgacgaccagcacggtaccgccatcattaccgccgccgccgtattgaacgccctgcgttttaccggccgtaaaatcgaagaagcgaccttggtttgctccggcgcgggtgcggcggcgattgcctgcttgaaccaattgctggatttgggcttgaaacgcgaaaacgtgaccgtttgcgactccaaaggcgtgatttaccaaacccgcgaagacaaagaccgcatggatgagtctaaacagttctacgccattgaagacaacggccaacgcgtgcttgccgatgccgtcaaaggcaaagacatcttcttgggcctctccggcgcgaacctgctgacgcctgaaatgctgaacaccatgaacgaaaaacccatcgtgttcgccatggccaacccgaatccggaaatcctgccgccgctggcgaaagaaacccgtccggacgtggttatcggtaccggacgttcagacttcccgaaccaagtgaacaacgtattgtgcttcccgttcatcttccgcggtgcgttggatgtcggcgcgaccaccatcaacgaagaaatgaaacgcgcctgcgtgtatgctttggcggatttggcgatggaagaagtaaccgaagaagtggttgccgcttacggtaagaaatttgaattcggcgcggaatacctgattccgactccgttcgattcccgcctgctgccgcgcgttgctacggctgccgccaaagcagcgatggaaagcggcgttgcaacccgtccgattgccgactttgaagcctacgccgccaagctgggcgaatggaagctgtaa

SEQ ID NO: 64009 - DNA, 1254 bp, Neisseria meningitidis
gtggacaaactgaaaatctccgcaaacggcccgctcaacggggaaataacggtctcgggcgcgaaaaacgcggcattgccgctgatgtgcgcgggtttgctgacatcgggtacgttgcgcctgaaaaacgtccctatgctggcagatgtgaaaaccacgcaaaagctgcttcaggggatgggcgcgcgcgtcctgactgacaatatcagcgaatttgaaatcaacggcggtacggtaaacaatacctgcgccccttacgaattggtacggacgatgcgggcctcgattttggtgctggggcctactttggcacgtttcggcgaggcgcaagtcagcctgccgggcggctgcgccatcggttcgcgccccgtcgatcagcatttgaaaggcttggaagcgatgggtgctgagattgttatcgaacacggttacgtcaaagccaaaggcaaactcaaaggtacgcgcgtggcgatggatgtcgttaccgtcggcggcacggaaaacctgctgatggcggcgacgctggcggaaggtacgacggttttggaaaactgcgccattgagcctgaagtggtcgatttggcggaatgcctggtcaaaatgggcgcgaaaatcagcggcatcggtacgtccacaatgattgtggaaggtgtggacgagctgcacggctgcgaacacagcgtcgtccccgaccggattgaagcggggacgttcctgtgtgcggtggcgataaccggcggcagggtggttttgcggaatgctgcgccgaaaacgatggaagtggtgttggacaaactggttgaggcaggtgcggtgattgaggcgggcgatgattggatcgccatcgatatgcggcagcgtccgaaggcggtggacatccgcacggtcgtccaccccggcttccccacggatatgcaggcgcagtttatggcattgaatgccgtggcggagggaagctgccgcgtggtggaaacgatttttgaaaaccgctttatgcacgtccccgagttgaaccggatgggggcgaacatcacaaccgagggcaatacggcatttgtgcagggtgtggaacagctttccggcgcggtcgtcaaggcgacggatttgcgtgcgtccgcaagcctcgttatcgccggtttggcggcgcgcggcgaaaccgtggtcgaacagatttaccacttggatcgcggttatgaaaatattgaaaaaaaactcggcagcgtcggcgcgaaaatcgagcgcgtatccggctga

SEQ ID NO: 64010 - DNA, 1116 bp, Neisseria meningitidis
atgaaagtaggtttcgtcggctggcgcggcatggtcggttcggttttgatgcagcgtatgcaagaagaaaacgacttcgcccacattcccgaagcgtttttctttaccacttccaacgtcggcggcgcagcccctgatttcggtcaggcagccaaaacattgttggatgccaacgatgttgccgaattggcaaaaatggacatcatcgttacctgtcagggcggcgattacaccaaatccgtgttccaagccctgcgcgacagcggctggaacggctactgggttgacgcggcatcttctctgcgcatgaaagacgacgcgattatcgtcctcgaccctgtcaaccgcaacgttatcgacaacggcctcaaaaacggcgtgaaaaactacatcggcggcaactgcaccgtctccctgatgctgatggctttgggcggcctgttccaaaacgatttggtcgaatgggcaaccagcatgacctaccaagccgcttccggcgcaggtgcgaaaaacatgcgcgaactcatcagcggtatgggcgcggttcacgcccaagtggcggacgaacttgccgatcctgccggctcgattctcgacatcgaccgcaaagtatccgatttcctgcgcagcgaagactatccgaaagccaacttcggcgtaccgctcgccggcagcctgattccgtggattgacgtggatttgggcaacggccagtccaaagaagaatggaaaggcggcgtggaaaccaacaaaatcctcggccgcagcgacaatccaaccgtgattgacggcctgtgcgtccgcgtcggcgcgatgcgctgccacagccaagccatcactctgaagttgaaaaaagacctgcctgtttccgaaatcgaaacgattttggcaggcgcgaatgactgggtgaaagtcatccccaatgaaaaagaagccagcatccacgagctgactcctgccaaagttaccggcacgctgtccgtccctgtcggacgcatccgcaaactgggcatgggcggcgaatacatcagcgcgttcaccgtcggcgaccagctcttgtggggcgcggccgaaccgctgcgccgcgtattgcgtatcgtgttgggcagcctgtga

SEQ ID NO: 64011 - DNA, 1185 bp, Neisseria meningitidis
atggctaaggaaaaattcgaacgtagcaaaccgcacgtaaacgttggcaccatcggtcacgttgaccatggtaaaaccaccctgactgccgctttgactactattttggctaaaaaattcggtggtgctgcaaaagcttacgaccaaatcgacaacgcacccgaagaaaaagcacgcggtattaccattaacacctcgcacgtggaatacgaaaccgaaacccgccactacgcacacgtagactgcccggggcacgccgactacgttaaaaacatgattaccggcgccgcacaaatggacggtgcaatcctggtatgttccgcagccgacggccctatgccgcaaacccgcgaacacatcctgctggcccgtcaagtaggcgtaccttacatcatcgtgttcatgaacaaatgcgacatggtcgacgatgccgagctgttggaactggttgaaatggaaatccgcgacctgctgtccagctacgacttccccggcgacgactgcccgattgtacaaggttctgcactgaaagccttggaaggcgatgccgcttatgaagagaaaatcttcgaactggctgccgcattggacagctacatcccgactcccgagcgtgccgtggacaaaccgttcctgctgcctatcgaagacgtgttctccatttccggccgaggtacagtagtaaccggccgtgtagagcgcggtatcatccacgttggtgacgagatcgaaatcgtcggtctgaaagaaacccaaaaaaccacctgtaccggtgttgaaatgttccgcaaactgctggacgaaggtcaggcgggcgacaacgtaggcgtattgctgcgcggtaccaaacgtgaagacgtggaacgcggtcaggtattggccaaaccgggtactatcactcctcacaccaaattcaaagcagaagtgtacgtactgagcaaagaagagggcggccgccatactccgttcttcgccaactaccgtccgcaattctacttccgtaccaccgacgtaaccggcgcggttactttggaagaaggtgtggaaatggtaatgccgggtgagaacgtaaccatcaccgtagaactgattgcgcctatcgctatggaagaaggtttgcgctttgcgattcgcgaaggcggccgtaccgtgggtgccggcgtggtttcttctgttatcgcttaa

SEQ ID NO: 64012 - DNA, 2259 bp, Neisseria meningitidis
atgtacacaagaattatggaaatcagcccttggacgctgcgttcggcaaagctggaaaaagaacacaaacggctgcaagagagcctgaccagtttgggcaacggctatatgggtatgcgcggcagctttgaggaaacctattccgccgacagccacttgggtacctacatcgccggtgtgtggtttcccgacaaaacccgcgtcggctggtggaaaaacggctaccccaaatatttcggtaaagccatcaacgcgctcaatttcagcaaagtcaaaatctttgtcgacggacaagaggtggacttggcgaaaaacgatgttgccggcttctccgtcgaactcgatatgcagcacggcgtgttgcgccgctcgttcaccgtattcggtgtgcgtttcaatgtgtgcaaattcctgtccgtcgcgcaaaaagagctggcggttatccgctgggaagccgtatccgttgacggcaaaacccaccaagtccgcatcgattccatcatcgatgccgacgtgaaaaacgaagactccaactacgaagaaaaattctggcaggtattggacaaaggcgtttcagacagtctctcctacattgccgcccaaaccgttgccaaccctttcggcgtggaacaatttatcgtcaacgccgagcaaactttcgccggcagcttcaaagccctcagcggcagccaaaccgactggcaagtctccaattctttcgaggtcgaagtcggcggcacgcccaaaacctttgaaaaacgggttattgttaccaccagccgcgattatcagggcttggaagcagtgaaagccgcaggccgcgccttgtcggaaaaagtcgcaggcgttgcgtttgaaaccttgctggacgcgcacaaagcaggctggctgcaccgttgggaaatcgccgacgtggtcatcgaaggcaacgacgaagcgcagcaaggcatccgtttcaatctgttccaactgttctccacctactacggcgaagacgcgcgtctgaacatcggcccgaaaggctttaccggagaaaaatacggcggcgcgacctattgggacaccgaagcctacgccgtgccgctctacctcgcactggcggaacccgaagttacccgcaacctgctgcaataccgccgcaaccaactgccacaggcgcaacacaacgcgcgcgaacagggcttggcgggcgcactctatccgatggtaacgtttacgggcatcgagtgccacaacgaatgggaaatcaccttcgaggaaatccaccgcaacggcgcgattccttacgccatctacaactacaccaactacaccggcgacgagggctatcttgccaaagaaggcttggaagtcttggtcgaagtgtcccgcttctgggcggaccgcgtccacttctccaaacgcagcggcaaatacatgattcacggcgtaaccggcccgaacgaatacgaaaacaacatcaacaacaactggtacaccaacaccctcgccgcatgggtattggactacacccgcgaagccctggcgaaatacccgcgtccggatttgaacgtgagcgccgccgagttggaaaaatgggcggacatcagcgcgaatatgtaccgtccgtatgacgaagaactcggcgtattcgtacaacacgacggattcctcgacaaagacatccgccccgtgtccgcgctttcgcccgacgatttgccgctcaaccagaaatggtcgtgggacaaaatcctgcgttcgcccttcatcaaacaggcggacgtcttgcaaggcatctacttcttcggcgaccgtttcaatatcgacgaaaaacgccgcaacttcgacttctacgaaccgatgaccgtgcacgaaagctcgttgtcaccttgtatccactctatccttgccgccgaactgggcaaagaagaaaaagccgtggaaatgtaccggcgcaccgcccgcctggacttggacaactacaacaacgacaccgaagacggcctgcacattacctccatgaccggttcgtggctcgccatcgtccaaggtttcgcccaaatgaaaacctggggcggcaaactcagcttcgctccgtttctgccgagcgcgtggacaggctacgccttccacatcaactaccgaggccgtctgattaaagtcgccgtcggcaaagaaaacgtcgtcttcaccctgctcaaaggcgagccgctcgagttgcaggtgtacggcaaagacattacgctcaacggcagccacactgtcgcgttggaaaaataa

SEQ ID NO: 64013 - DNA, 213 bp, Neisseria meningitidis
atgcctgcaatccgcgtaaaagaaaacgaaccctttgaagtcgctatgcgccgtttcaaacgcgccgtagaaaaaaccggcctgctgaccgagctgcgcgcccgcgaagcctacgaaaaaccgactaccgaacgcaaacgcaaaaaagcggcagccgtaaaacgcctgcaaaaacgcctgcgcagccaacaactgccgcccaaaatgtactaa

SEQ ID NO: 64014 - DNA, 528 bp, Neisseria meningitidis
atgaaaaaagcacttgccgcactgattgccctcgccctcccggccgccgcactggcggaaggcgcatccggcttttacgtccaagccgatgccgcacacgccaaagcctcaagctctttaggttctgccaaaggcttcagcccgcgcatctccgcaggctaccgcatcaacgacctccgcttcgccgtcgattacacgcgctacaaaaactataaacaagtcccatccaccgatttcaaactttacagcatcggcgcgtccgccatttacgacttcgacacccaatcgcccgtcaaaccgtatctcggcgcgcgcttgagcctcaaccgcgcctccgccaacttgggcggcagcgacagcttcagccaaatctccaccggtctcggcgtattggcgggcgtaagctatgccgttactcccaatgtcgatttggatgccggctaccgctacaactacatcggcaaagtcaacaacgtcaaaaacgtccgtaccggcgaactgtccgccggcgtacgcgtcaaattctga

SEQ ID NO: 64015 - DNA, 963 bp, Neisseria meningitidis
atgcccagtatctctgtccgccggctgtttgacgacaaccaatacaaactgcaacttgcctgggccgccggcaattcgggtgcggacaaccgtatcggcgtagaggcggacaagcccgtcctcgccttggtcggacacctgaattttatccaccccaaccaaatccaagtggtcggtttggcggagtcggaatatctgaaccgtctcgaatcgggggaaacgggttatcagttcggcgacctgttcgacatttctatgtctttggtcattgtggcaaacggcttgccggtttccccgggactgcgcgactactgccataaaaacgatattccactgctgacttccaaactcgaaagcccctatctgatggatgtgttgcggatttacctgcaacgcaccctggcggcatcgtccgtcaaacacggcgtatttctcgatgtgtttgaaatcggcgtgctgattaccggacattcgggtttgggtaagagcgaattggcattggaactgatttcgcgcggccacagcctgattgccgacgatgcggtcgagctgttccgcatcggcccggaaacgctggaagggcggtgttcgcctatgctgcgcgattttttggaagtacgcggcttggggatactcaatatccgccatattttcggcgaaacttccatccgccccaaaaaaatcctgcaactcattatcaatttggtcgaggcggacgacgagtatatgaagcagctcgaccgtttgagcatccgcaccgaaaccgaatccatcctcaacgtcaacgtccgttcggttacgctgcccgtcgccgtcggacgcaacctcgccgttttggttgaggcggcggtacgcaattatattcttcagttgcgcggtaaggatagtacgcgcgaatttttggaacgtcatcagacgcagcttaaagaaaacgagcaacacaatgaaaatcgttctgattag

SEQ ID NO: 64016 - DNA, 426 bp, Neisseria meningitidis
atgccgtctgaacacgcggcttatgccgacttgatggcgagttccgccaagcgtttgctttgtgcgaaggcgatattgttttcttcggcggtcaggacgggagccgctgtcgggaatatcttttttgacggcttcgcagacggcggagactttggggacggtgcgcaatacggcttcgcaaccttcaacgctgtcgatgccgcgagcgattcggcgggcgggattgcgggtgctgccgttttggaaatagtagaggacgaggattttgagggggatttgggttcatgggcggattccgttaaaatggttcggtcttcagacggcataacagttgttccgatgccgtctgaaacagccgcagttcaggcatttgttcctgacggcaaaattggctataacatcgggcatcaatgcccaacttactga

SEQ ID NO: 64017 - DNA, 807 bp, Neisseria meningitidis
atgtggcattgggacattatcttaatcctgcttgccgtaggcagtgcggcaggttttattgccggcctgttcggcgtaggcggcggcacgctgattgtccctgtcgttttatgggtgcttgatttgcagggtttggcacaacatccttacgcgcaacacctcgccgtcggcacatccttcgccgtcatggtcttcaccgccttttccagtatgttggggcagcacaaaaaacgggcggtcgactggaaaaccgtatttgcgatgatgccgggtatgatattcggcgtattcacgggcgcactctccgcaaaatatatccccgcgttcgggcttcaaattttcttcatcctgtttttaaccgccgtcgcattcaaaacactgcataccggtcgtcagacggcatcccgcccgctgcccggactgcccggactgactgcggtttccacactgttcggcgcaatgtcgagctgggtcggcataggcggcggttcactttccgtccctttcttaatccactgcggcttccccgcccataaagccatcggcacatcatccggccttgcctggccgattgcactctctggcgcaatatcgtatctgatcaacggtctgaatattgcaggattacccgaagggtcgctgggcttcctttacctgcccgccgtcgccgtcctcagcgcggcaaccattgcctttgccccgctcggtgtcaaaaccgcccacaaactttcttctgccaaactcaaaaaatccttcggcattatgttgcttttgattgccggaaaaatgctgtacaacctgctttaa

SEQ ID NO: 64018 - DNA, 1044 bp, Neisseria meningitidis; identical to SEQ ID NO: 55162

SEQ ID NO: 64019 - DNA, 330 bp, Neisseria meningitidis
atgtcattacccccttgcccgcaatgcgcctccgagtacacctacgaagacggcggacaatacatctgccccgaatgcgcccacgaatggaatgaaaccgaatccgcctccgaccttgcggctcaagtgcgcgatgccaacggcgcggcgctgcaaaacggcgacaccgtcatcctcatcaaagacctcaaggtaaaaggcagctcgatggtgatcaaacaaggtacaaaggtcaaaggcatacgcctgcaggaaggcgaccacaacatcgcctgcaaaatcgacggcagcgcgatgaatttaaaatccgaattcgtcaaaaaagcctga

SEQ ID NO: 64020 - DNA, 930 bp, Neisseria meningitidis; identical to SEQ ID NO: 47363

SEQ ID NO: 64021 - DNA, 1236 bp, Neisseria meningitidis; identical to SEQ ID NO: 59663

SEQ ID NO: 64022 - DNA, 1149 bp, Neisseria meningitidis
atgaatactcctccttttgtctgctggattttttgcaaggtcatcgacaatttcggcgacatcggcgtttcgtggcggcttgcccgtgttttgcaccgcgaactcggttggcaggtgcatttgtggacggacgatgtgtccgccttgcgtgcgctttgccctgatttgcccgatgttccctgcgttcatcaggatattcatgtccgcacttggcattccgatgcggcagatattgataccgcgcctgttcccgatgccgtcatcgaaacttttgcctgcgacctgcccgaaaatgtgctgcacattatccgccgacacaagccgctttggctgaattgggaatatttgagcgcggaggaaagcaatgaaaggctgcacctgatgccttcgccgcaggagggtgttcaaaaatatttttggtttatgggtttcagcgaaaaaagcggcgggttgatacgcgaacgtgattaccgagatgccgtccgtttcgatactgaagccctgcgagagcggctgatgctgcccgaaaaaaacgcctccgaatggctgcttttcggctatcggagcgatgtttgggcaaagtggctggaaatgtggcaacaggcaggcagtccgttgacactgttgctggcgggggcgcaaattatcgacagcctcaaacaaagcggcatcattccgcaaaacgccctgcaaaacgacggcgatgtttttcagacggcatccgtctgccttgtcaaaatccctttcgtgccgcaacaggacttcgacaaactgctgcacctcgccgattgcgccgtcatccgcggcgaagacagtttcgtgcgcgcccagcttgcgggcaaacccttcttttggcacatctacccgcaagatgagaatgtccatctcgacaaactccacgccttttgggataaggcacacggtttctacacgcccgaaaccgcatcggcacaccgccgcctttcagacgacctcaacggcggaggggctttatccgccacgcaacgcctcgaatgttggcaaaccctgcaacaacatcaaaacggctggcggcaaggcgcggaagattggagccgttatcttttcgggcagccttccgcatccgaaaaactcgccgcctttgtttcaaagcatcaaaaaatacgctag

SEQ ID NO: 64023 - DNA, 969 bp, Neisseria meningitidis
atgactgccaaacctttttccctcaacctgaccaacctcctgctgctggcggtattgtttgccgtcagcctgtcggtgggcgttgccgatttccgctggtcggatgtgttttcgctatccgacagccagcaagtgatgttcatcagccgcctgccgcgcacgtttgcgattgtgttgacgggcgcgtcgatggcggtggcggggatgattatgcagattttgatgcgtaaccgttttgtcgagccttctatggcgggcgcgggtcaaagcgcggctttgggtttgcttctgatgtccctgctgctgcctgccgcgcctctgccggtcaaaatgtcggttgccgccgttgccgcgctaatcgggatgctggtgtttatgatgcttatccgccgtctgccgccgacggcgcaactgatggtgcctttggtcgggattattttcggcagcgtggttgaggcagtggcgacgtttatcgcgtatgaaaacgaaatgctgcaaatgctcggcgtgtggcagcagggcgatttttcgagcgtgctgctggggcggtacgagctgctttggattacgggcggtttggcggtgtttgcctatctgattgccgaccggctgacgattttgggactgggcgagacggtcagcgtgaatttgggtttgaaccggacggcggtgttgtggtcgggtttgattattgtggctttgattacgtcgctggttatcgttacggtcggcaatattccgtttgtcgggctggtcgtgccgaacatcatcagccgcctgataggcgacaggctgcgccaaagcctgcctgcggtggccttgttgggcgcgtctttggttttattgtgcgacattatcggacgcgtgattgtgtttccgtttgaaattccggtctctacggtttttggtgtgttgggtacggctttgtttttgtggcttttgttaaggaaacctgctcatgccgtctga

SEQ ID NO: 64024 - DNA, 1134 bp, Neisseria meningitidis
atgaaaagaattctttgcattacaggtaccagagccgacttcggcaagctaaaacctttattagcctatattgaaaatcacccagaccttgaattgcatttgattgtaactggtatgcatatgatgaaaacatatggcagaacctacaaggaagtaactcgagaaaactatcaacatacatatctgttttcaaatcaaatccaaggtgaaccaatgggtgccgttttaggcaataccattacgttaatctctcgtctatctgatgaaattgaacctgatatggtcatgattcacggcgaccgtttagaagcactagcaggcgcaactgtaggtgcattaagcagccgtttagtttgccatatcgaaggtggtgaactatctggtacagtagatgactccattcgtcattctattagtaaactttctcatatccacttggtagcaaatgaacaagctgtcactcgcctagtgcaaatgggagaaaaaagaaagcatattcacatcatcggctcccccgatttagatgttatggcctcttccaccctcccatccttagaagaagtcaaagaatattacggtttaccatacgaaaattatggtatttctatgtttcaccccgtgactacagaagcacatttaatgccacaatatgcggcccaatatttcaaagcattagaattaagtggccaaaatatcattagcatctaccctaataatgacactggcactgaaagtattctgcaagaattattaaaatatcaatctgataaatttattgcatttccttccattcgatttgaatattttttagtcttattgaaacatgctaaatttatggtcggcaactcaagtgcaggtattagagaagctcctctctacggtgtcccttcaattaatgttggtacacgccaaagtaaccgccatatgggaaaatctattattcatacagattatgaaactaaaaatatctttgatgcgattcaacaagcatgcagtttaggcaaatttgaagcagatgatacctttaatggcggagatactcgcaccagcacagaaagatttgctgaagtaatcaacaatcctgaaacgtggaatgtttctgctcaaaaacgttttatcgatttgaatctttaa

SEQ ID NO: 64025 - DNA, 672 bp, Neisseria meningitidis; identical to SEQ ID NO: 51881

SEQ ID NO: 64026 - DNA, 348 bp, Neisseria meningitidis; identical to SEQ ID NO: 55469

SEQ ID NO: 64027 - DNA, 1383 bp, Neisseria meningitidis
atggcaaatattgcccgcgacatcttcaaagcctacgacatccgaggcattgtcggcaaaaccctgactgacgatgccgcctatctcatcggcagggccatcgccgccaaagccgccgaaaaaggcatgacccgcatcgcgctcggacgcgacggacgcttgagcggtcccgaactgatggagcacatccaacgcggctttaccgacagcggcatcggcgtactcaacgtcggcatggtcgccactcctatgctctattttgccgccatcaacgaatgcggcggcagcggcgtgatgattaccggcagccacaatccgcctgattacaacggtttcaaaatgatgctcggcggcgacacgctcgcaggcgaagccattcaagaacttttagctattgttgagaaagatggttttgttgccgccgacaaacaaggcaacgtaaccgaaaaagacatctccggcgaataccacaaccacatcgtcggccacatcaaactcaaacgccccatgaaaattgccatcgacgcgggcaacggcgtgggcggcgcgtttgccggcaaactctataaaggcttgggcaacgaagtaaccgagcttttctgcgacgtggacggcaatttccctaatcaccaccccgacccttccaaaccgaaaaacctgcaagatttgattgccgcgctgaaaaacggtgatgccgaaatcggcctggcgtttgacggcgatgccgaccgcttgggcgtggttaccaaagacggcaacatcatctatccggaccgccaactgatgttgttcgcgcaagacgtgttaagccgcaatcctaaagccaaagtgattttcgacgtgaagtccacccgcctgcttgcgccttggattaaagaacacggcggcgaacctgtgatggaaaaaaccggccacagctttatcaaatccgccatgaaaaaaaccggcgcgccggttgccggcgaaatgagcggacacatcttcttcaaagaacgctggttcggcttcgacgacggtctgtacgccggcgcacgcctcttggaaatcctgtctgcctccgataatccgtccgaagtgttaaacaacctgccgcaaagcatttccacgcccgaactcaacatcgccctgcccgaaggcagcaacggccatcaggttatcgacgaactcgccgccaaagccgaatttgaaggcgcaaccgaaatcatcaccatcgacggtctgcgcgttgaatttcccgacggcttcggtctgatgcgtgcttccaataccacgccgattctggtgttgcgttttgaggcggatacgcaagaagccatcgagcggattcaaaaccaattcaaagccgtcatcgaaagcaatccgaatctaatctggcctctgtaa

SEQ ID NO: 64028 - DNA, 3486 bp, Neisseria meningitidis
atgcgcctgacccacatcaaactctccggcttcaaatcttttaccgacccgaccacgattcatgttccggggcagcttgttgcggttatcgggccgaacggctgcggcaagtcgaatgtgattgacgcggtgcgctgggtgttgggcgaggcttcggcgaagcagcttcgtggcgagagtatgcaggacgtgatttttaacggtgcggcaacgcgccgtcctgcgccgagggcttcggtggagctggtgtttgacaacagcgaccacagtttgcagggcgcgtgggggcagtatgccgaggtgagcatcaagcggcagctgacgcggcagggcgaatcgacttatttcatcaacaatcagaccgtgcgccgccgcgacattaccgatttgtttttgggtacgggcgtgggcgcgcgcggttatgccgttatcgagcaggggatgatttcgcgcatcatcgaagcgaggccggaggagttgcgcgcctatatcgaggaggcggcgggcgtgtccaaatataaggaacgccgcaaggagacggaaggccgtctgaaagacacgcgcgagcatttgcagcgtttgggcgatttgcagaacgaattggcgcgtcaggtggaaaagctggagaaacaagccgaaaccgccgaacgctacaaattcctgaccgcgcagttgaaccgccagcaggatttgctcgattacgcccaatggcagcaatcgcttgctgccgccgacaaggcgaccgcgcagcatcagtctttgcaggcgcagcaggacgaaaccgccgcgcaggttcaggcgttaaacgatgaagtacacgccttgcagaccgccgaacagtcgcagcagcaggcggtgcatgaattgagcaacaaacgcggcgtgttgcgcgagcagattgcccgtttggaagaacaaatccgccaccggcaaaacctgcatcaacgcatcgaacgcgacaagcaggcagcgcaggcgcagttgcaacgcattcatcaagagcagcagcaaatccgcgtgcagcttgaagaaaacgagttgcaagcggaagaaaagcaaaccgaattggcggaatgggcgatgcaggttgccgaacacgaagagcgtctgcccgaattggaagaggcccaaaccgcgctcaacgccgccttccaaacccggcaggacgaggcaaaccgcatccgccgcgagttggcgttgaagcagcagcagcttgcccatgccgaacaaaccgttgccaagcacgaagagcgcaaaggccgtctgaaacaggaaaaccaagccctgaacctgcccgacgaagccgaaaccgccgccgcgcaggaagccgccgccctgttgcaaaaccggcaagagcattacgaagaacaaatcatcgccgccgaagaagccttacacgccgcccgcgaggcgtttcagacggcctcaaaccgcttccaaagcctgaagcagcaacacatcaccttgcaggcgcagcagcaggcgttgtcgcaaatcctgtcgcaacagcaggaagccgccgacttctggcaggcaaccgaccacgccgccgcgccgcagctgtggcaacacatcaccgcgcctgccgagtggcagcacgccttgtccgtcatccttgcagaacgcctgcacgcccgcgccgtgccgcaaggtttcgtaccgcccgaacctttgccgcaggggcaggcggcgtggctttcagacggtctctccggcggcatcaaaaaatccctgcccgtacaggcattgctgaaccaaatccaagcgcagccgccgtttcagacggcattgcaccactggctcgacggcgtattgtgcgcgcccgatttgagctatgccctcgcgcatcaaaacgatttgggtgcacatcaaatctggctcacgcccgaaggtcatcaggtcgataaggtcagcgtcctgctctatgccaagcccgcgcaggaaagcctgattgcccaaaaagcgcgcctcgacggcatcgcatccgaactggacaacctagcccccgaactctccgccgacgaagccgcgttcaaacaggcggaagccgccgtgcgctcgtccgaagtgcaacataaaaacctgatgcagcagcaacagcagcacacgcgccaatacagccaagcgcagcaacgcgccgccgaacttctggcgcgtaccaaccaagggcaaatccgccgcgaacacatcgagcgcgaactggcgcagttggcggaagagcagaccgtgttgcaacacacgtccgacgggctttcagacgacatcgttaccttgcaggaagccgccgccgaactcgaacaccagcagcaaaccaccgcgcacagccgccaagagcagcaaggccgtctgaaacaggcgcagcttgccctgttggaagccaaccgtcaatacgggctggccgaagtcgccgtccacaagctcaaccagcaaaaacaaaactaccaacagcaaatcgcccgactcgaacagcaaacctttgattggcaggaacgccaacaagagcttgccctcgcctatgaaaccgagttccaaaacgacgagcagcacatcaagcttgaagaattaagcgaagccgtacagaccttggacgaagaatatattgttgtgcaagagaaactcgcgcagattcaggaacagggcagggaacaatacgctaaagtacaacccctgcaaacccagttgccacagcttcaggcagccacccaaaccgccctgttgcagcagcaggaagccctgattaacgccaaacgctaccatcaaaacctgaccgaacgtgccgccgatttggacgcgctcgaagcgttgacgcaagaatcgccgaaagtattgaacagcagcataggcagcctcacccagcaaatcgaagccctcggcgccgtcaacctcgccgccctgcaagaactcgaagaagcgcgcgaacgcgacggctactaccgcagccagagcgaagacgtgcaggccgccattacccttttggaagaagccatcgcccaaattgatgacaaaaccaaagcgcgtttcaaagaaaccttcgatgctgtcaacggcaaagtccaaaccttcttcccgacactgttcggcggcggcgaagccaccctcaaaatgataggcgacgaccttttgaccgccggcgtgtccatcatggcgcggccgcccggcaagaaaaacagcaccatccacctcctctccggcggcgaaaaagccctcaccgccatgagcctcgtgttcgccctgttcagcctcaaccccgcccccttctgccttttggacgaagtcgatgccccgctggatgacgccaacacctcgcgtttctgcaggctggtcaaagaaatgtcggcgcaaacccagttcctctacatctcccacaaccgcctgacgatggaaatggcggagcagctggtcggcgtaaccatgcaggaaaaaggcgtatcgcgcgtcgtcgccgtggacatcaaacaggcgttggaaatggcggaagccgtttga

SEQ ID NO: 64029 - DNA, 945 bp, Neisseria meningitidis
atgtaccataagaaatttgataaagaaattcttttaaaaattaaagaattatatagatacgataattggcatgctgtacttgctatattatatgattatttaataataattttttctatatttttatctgagcagtcatattggtttctccctttaacgattttattaataggaagcaggcaaagggcgttggcaacaattttacatgaagcctctcattctgccttaactaaaaataagaagtttggacaaattttaggtacatatttttctggatatttaatttttcaaagttggaatagttattgtgtttctcatgtgaagaatcatcatccaaagttagggactgattcggatcctgattataagtattataaagactcaggtatttttcagacatattcaagaattgaatttttctggagattttgtgtctctcaaattttatgtttgaaattatttaggaattttaaatatttaattaaaaatagattattttcggatattacaagaacagagttgtttaagctacttctttctcaattaattctatttgttatcggtacatattttgtagggtataaattttatgtaatttattggttattaccatatttaactgcattccagatgataacttggtttattgagttgtccgagcattatccaatgatacaaactgccaaaaataatttagaagcgtcaagaaataggtttagtcatgcaatagagcattttttcacggggatacatggagaaaattatcatctaatacatcatttatttccagccattccattttggaatttggaaaaagcacataagatattaatgaaagattttgattatcaagaggtaaataaagattttggagggattttcttttcgaaaaacaataatgcacctatgtggaaagtattatggagtaaatatgaagctgcgtga

SEQ ID NO: 64030 - DNA, 1080 bp, Neisseria meningitidis
atgaacatacaaaacatccgcaccctcctcgacaccgtcgccgttccgaatacggcacgcacgctcggcggcgaaaaggccgtccgttcggtcgaacagcgttcagacggcatccatatcgccctgcatttcggcttccccgtcgcgcacattgcctcagaaacagccgaccgcatacaggaaatcctgatgccgctgacaggcgacacacacatccatctgtccatggacacggaaatcggcacacacaaagtccagcccggcgttaccactatcaaaggtgtgaaaaacatcatcgccgtcgcctccggcaaaggcggcgtgggcaaatcgacgacgaccgccaaccttgccgccgcaatggcgcggatgggcgcgcgcgtcggcgtactcgatgccgacctttacggcccgagccagcccacgatgctgggcgtacacgaccgcaaacccgatcagaaaaaccaaaaactcattcccgtcgaatcttcagacggcatacaggtcatgtctatcggctttctcgtcgataccgaccaagccgtcgtctggcgcgggccgatggtcagccaagccttgcagcaactgatgtttcaaagcgagtgggacgaagtggattatcttttcatcgacctgccccccggcacgggcgacatccaactcacactgtcccaacgcatccccgttaccgggtccgtcatcgtaaccacgccgcaggatatcgccctgatagacgcgcgcaaagccgtggatatgttccgcaaggtcaacattcccattttgggcgtattggaaaatatgtccgtccacatctgctccaactgcggacacagcgaagcactgttcggcacagacggcggcaaagatttcgctgcacgcctcaacgtccccctgctcggacagcttcccttaagcctgcccgtgcgcgaagcaatggacggaggggcggcggcacaactgttcgacgaacaccccgccatcgcccgaatctacaccgatgccgcattccaaatcgccctgagcattgccgacaaaggcaaagacttcagcagccgcttccccaaaatcgtcgtcgaataa

SEQ ID NO: 64031 - DNA, 339 bp, Neisseria meningitidis; identical to SEQ ID NO: 39659

SEQ ID NO: 64032 - DNA, 2028 bp, Neisseria meningitidis
ttgtccctgtctgaatttatagaacgccgaacgtcatttaatctgatggttattttgacgactttgttttttgtgtgtgttttggtggtattggttttaaccgtgccggatcaggtgcagatgtggctcgatcgggcaaaagaagtcatttttaccgagttcagctggttttatgttttaacgttttccatttttctgggtttcctgctgatactctcggtcagtagtttgggaaacatcaggctcggacgggatgaagatgtgccggaattcggcttcctgtcgtggctggcgatgctgtttgcggccgggatgggcgtgggtctgatgtttttcggcgtggcagagccgttgatgcattatttttcggacattacggccggcacgccggaacacaggcagcagcaggcattgctgcacacggtgttccattggggcgttcacgcttggtcggtgtacggtacgattgcattggctttggcttatttcggtttccgctacaagctgccgcttgccctgcgttcttgtttttaccccctgttgaaagaaaaaatttccggaaggttcggcgatgccattgatattatggcgttgcttgctacttttttcggcatcatcactacattggggttcggggcttcgcaactgggcgccggattgcaggaaatgggctggattgccgaaaacagcttcagcgtgcaggttttgattatcgccgccgtcatgtccctcgccgtcgtttcggcaatatccggcgtggggaagggcgtgaaggtgttgagcgagttgaacctgagccttgcgtttttgctgctgttttttgttttggcggcgggtcccactgtttacctgttgtcggcattcggcgacaacatagggaactacctcggaaatctggtgcgcctcagttttaaaacttatgcgtacgaacgggaacacaagccgtggtttgaatcttggacggtgctttattgggcgtggtggtgttcttgggcgccgtttgtgggtttgtttatcgcgcgcatttcaaaggggcgcaccatccgcgagtttgtcttcggggttttgctcatccccggcctgttcggcgttttgtggtttaccgtcttcggcaatacggcgatttggctgaatgacggggttgcggggggaatgctcgaaaagatgacctcctctccggaaacgctgctttttaaattctttaattacctccccctgcccgaattgacgagcatcgtcagcctgctggtcatttctctgttttttgtaacttctgccgattccgggatttatgtcctgaacaatattacctctcgggacaagggcttgagcgcaccacggtggcaggcggttatgtggggcgtgctgatgtctgccgttgccgttttgctgatgcgctcgggcgggctaggcaacctgcagtctatgaccctgattgtttccctgccgtttgccctgctgatgctgataatgtgtttcagcctgtggaaaggattgagtgcggataagaaatattttgagacccgggttaaccctaccagtgtattttggacgggcggcaagtggaaagaacggctggtgcagataatgagccagacgcaggagcaggatattttaaaattcctcaaacataccgcatcgcccgctatgcacgagttgcaacgggagctttcggaagaatacggcttgagcgtccgggtcgataagatgtttcatcaggacgagcccgcaatcgagttcgtcattcggaaagagacgatgcgcgattttatgtacgggattaagtctgtcgggcaggatgtatccgaccagttgattaacgacggcaagctgccgcatatccggcatcagacaacttacaaaccctacgcttattttttcgacgggcgcgtcgggtacgatgtgcagtatatgaacaaggacgagctgattgccgacattttgaaaaactacgaacgttatttgatgttgttggatgatgtcggtcaggaactgatggcgcacgagcaggtggaattggcagagtaa

SEQ ID NO: 64033 - DNA, 180 bp, Neisseria meningitidis
ttggcagaaggatatacttatttcttcaatgaaaatacggatgattgctatgttttgaaagaggattttattaataatgagcgatatgaaaaaacagaattatatccccaaaaagataaggtaattctatttccaaagtttggtgaatatgatttggtgttaaatccggacattatttaa

SEQ ID NO: 64034 - DNA, 651 bp, Neisseria meningitidis
atgccgtctgaaaacacaaaaggaacaaccatgaccacacatcatgtcgaattgaggaaggtaaccaaacgcttcggcgcgcaaaaagccgtcaaccaagtcgatttggttttgaaggcaggagaaagcgtcgggcttgccggacacaacggtgcgggcaagtccaccatcatgaagctgatactcgggctgattaccccgaccgaaggcgaagtgatgcttttgggcgaacgtaccggcagcaaagcgggggcgcggcttcgcagccaaatcggctacctgcccgaaaccgttgcgctgcacccttcgctgaccggcatcgaaacgctggatttttatgccaaacttaaaaaacagccgctcacgcagaatcgggggctgctcgagcgcgtcggcatttcacaggcggcacaccgccgcgtcggcacttattctaaagggatgcgccaacgccttgccttggcacaagccctgctgggcgagcccaaagtcctgctgtttgacgaaccgacaaccggtcttgaccctgcatcaaggcaaatgttttacgaagtcgtgcgcgaactcaacgggcgcggcgcgaccgtattgctcagcacccacgcccttgccgagttggacggacacgccgaccgcattatcgtggattaa

SEQ ID NO: 64035 - DNA, 762 bp, Neisseria meningitidis; identical to SEQ ID NO: 41676

SEQ ID NO: 64036 - DNA, 1251 bp, Neisseria meningitidis
atgaccaaactgacacgaagacaaatcatccgccgcaccgccggcacactgttcgccctaagccccatcgcatctgccgttgccaaaacggtacgcgcaccacaattcactgccgcacggatatggccatcgcacacctacacccgcctgacgctggaaagcaccgccgcgctcaaataccaacacttcacgctcgacaacccgggcaggctggtcgtcgacatacaaaacgcgaacatcaataccgtattgcacggactgtctcagaaagtcatggcagacgacccctttatccgcagcatacgcgcgggtcagaacacgccgaccaccgtccgcctcgtcatcgacctgaaacagcccacccacgcacaagtcttcgcgcttccgcccgtcggcggctttaagaaccgcctcgtcgtcgacctctatccgcacgggatggatgccgacgatccgatgatggcactgctcaacggtagcctgaataaaaccctgcgcggctcccctgaagccgacctcgctcaaaacactcccgcacaaaccgaacgcggcaaaaacgggcgcagacccgtcatcatgctcgatccaggacacggcggcgaagaccccggcgccgtcagcccgggcggtttgcaggaaaaacacgtcgtcctctccatcgcccgcgaaaccaaaaaacaattggaagccttgggttacaacgtctttatgacgcgcaacgaagacgtgttcatcccattgggcgtgcgtgtcgccaaagggcgcgcacggcgggcggacgtatttgtctccatccacgccgatgccttcaccagcccctccgcgcgcggaacgggggtctatatgttgaacaccaaaggcgcgaccagctccgccgccaaattcttggaacaaacccaaaacaatgccgacgcggtcggcggcgtaccgaccagcggcaaccgcaacgtcgataccgccctgctcgacatgacccaaaccgccacgctgcgtgacagccgcaaactcggcaaactggtgcttgaagaattgggcaggctcaaccacttgcacaaaggcagggtggacgaagccaatttcgccgttttgcgcgcacccgatatgccgtctatcctggtcgaaaccgccttcctgtccaaccctgccgaagagaagctgctgggcagcgaatccttccgccgacagtgcgcccaatccattgcctcgggtgtccaacgctacatcaatacatccgtattgaagcggggttga

SEQ ID NO: 64037 - DNA, 1509 bp, Neisseria meningitidis
atgcaaaccgattgcgacgtattgattgccggaaacgggctggcggcactgacgctcgccctgtcgctgcctgaatcgttccgcatcgtcattttgtgcaaaaaccggctggacgacactgccagccgtcatgcgcaaggcgggattgcggcggcgtggtcgggagaggacgacatcgaaaaacacgttgccgataccttggaagcgggcgcgggtttgtgcgacgaagccgccgtccgcaccatcctgtcgcagggcaaactggcaatcgaatggctgctggcgcagggcgtggcgttcgaccaaaataataacggcctgcacctgacgcgcgaaggcgggcacacctgccgccgaatcgcccacgtcgccgactacacgggcgaagccgtcatgcagagcctgactgtccaaatacgctgccgcccgaacatccgcgtttgcgagcagcagatggcgttggacatccaaaccgaatcaggtgcggcgtgcggactgaccgtcctcgactgccgaacgcaagcaacctacagcatccgcgcccgccataccgtactcgcaggcggcggcttgggacagatttacgccgccaccaccacgccgcccgaatgcacgggcgacgccatcgccatggcgatacgcgcaggctgcgcagtcgaaaacctcgaatttatccaattccaccccacaggcttggcaagatcgtctgaaaacggccgcaccttcctgatttccgaagccgtgcgcggcgaaggcggcatcctgaccaaccaagcgggcgaacggtttatgccgtattacgaccgccgcgccgaactcgcgccgcgcgacatcgttgcccgcgccatcgccgccgaaatcgccaaacaaacgcaagacttcgtctcactcgatatcagccatcaacccgcagcgttcgtccgccggcatttcccgtccatccatcggcactgtttatcccaatgcggcctggatatcacgcgccaagccatccccgtccgccccgtgcaacactacacctgcggcggcatccaaaccgacccctgcggcagaacttccctgccgcagctctactccttaggcgaaaccgcctgcaccggcttgcacggagccaaccgcctcgccagcaactccctgctcgaatgtgtcgttaccgccagacttaccgcccaaaccatcgcagacggacaagcattccaaaccgcaacgtcccaaaggtcgtctgaaaacacctccgccgaagcagacatcttttcagacgacctccaaaacgcattcagccgccccaccctgcaagcgttcaaccaacgccatctgggcatcatacgcaacgataccggcctacgctgcgccatcgcccagctgcggctttggaagcaaaaccaaaccgaaccgcacaccgcgtccgaatacgaaaaccgtaacctgctcgaatgcagcctcgccgtcgcccaagccgcatacaggcggagacagaacatcggcgcgcattttaatagtgattgttaa

SEQ ID NO: 64038 - DNA, 156 bp, Neisseria meningitidis; identical to SEQ ID NO: 39708

SEQ ID NO: 64039 - DNA, 618 bp, Neisseria meningitidis
ttgagtacggatatttcggcattttgggaagtcatagaccctgagatgcccgactgtgaagtcgtattgactgccaagggttataagttggacggtgcaaagggtttgaaggtcgttctacggataaccgataatgcgggaaatacgccgaaaagtgtggattatctgcaactgtttgacaaaattcccttatttgtcgagttttcggacttgcagacacagcatatcagatgcagcgcaacactggaatccttggacttgggcggtctgtctaagtccgaacgcaagcgtgtttcatctaaaatcagttcagacacggatattttgaacgaactgcgcggcaaaatcgtcgatacggactttattttcagggaagtttcggataaagccctgctggacggactgcctgaactgcacggcgggcatatccttgttgtttggcatccgcgtagcagcttgagcaaggttgatacggcaaaacttttggacggattgaggggtaggttattggcggagttgagccggtataaccttaagtttctaaatgtccccttgcactttctgactgtggaagcgtacgcttgcaggtacggatgtccaacggcttccgacacctga

SEQ ID NO: 64040 - DNA, 1062 bp, Neisseria meningitidis
atgtccaaaaatgcacaaaaaaccctacttgccgtgtgcagtttcgaggtgcagccaaaagacgggcgaatccaactgctgccatatggcgaatttcgcgcagtagacggtcgtccgactgatgtccctgcgtggtatctgaccgaagaaaacggtcatgatgtcgcgttgttggccaacagctcgcgcaatcagttggttgtcgattatgaacaccagacgctctacaaagagaaaaacggacaacctgcacctgccgccggttggatgcgttggctggagttcacgcctaaaggcatgtttgccgaagtggagtggacggacaaggcggctgcggcaattgccgcaaaagagtatcgctacatctctgctgtgttttcctatgacacaaagggatatgtaagcaaaatttttcacgccgcgctgacaaatttccccgcgttggacggtatggacgaggtgctggcggcagcgtcggcgcaaattttaaaaccggaaacggagcaaaaccctatgaaagagttgttacagcaactgttcgacctgcctgatgcgggcgaagaagaactgaaggcggcattgtccgcgctcgtggaagccaagccgaaagacgtggcattgtctgccgacgtgttcgcgcagctggcggaaaaagacagccgcatcgcggcattgacggcgcaaaccgccaagcctgatttgactaaatacgcgcctatctcagtggttcaagagctgcaaagcaaagtcgccgcgctgactgccaagcaggaagcagacaaaggcaacgaattgattaccgccgcgctgacttcaggcaaattgctgcctgctcagaaggagtgggcaaaaggcgtattgaaacagccgggcggcttggcatttttgaccggctttattgaaaacgcccagccggtcgctgcactggcaggctcgcaaacgggcggcaaagcacccgacgaacgcgtcgccgcactgactgcggaagaggcagccgcagcaaaaatgctgggcatgtccggcgaagaatttgtaaaaatcaaagaaagcgaaggtaagtaa

SEQ ID NO: 64041 - DNA, 819 bp, Neisseria meningitidis; identical to SEQ ID NO: 55934

SEQ ID NO: 64042 - DNA, 510 bp, Neisseria meningitidis; identical to SEQ ID NO: 43513

SEQ ID NO: 64043 - DNA, 1155 bp, Neisseria meningitidis
atggatacgcacgcggacgaaacaaaacttcaaaacacgcaagccaaacgcaaacgccgcctgacggcattgacgctgctgttcgcgcttgccgccgcagccgccgggtcggcgttttttttatggtggcagcacgaagaagaaacggaagacgcttatgttgctgggcgcgtggttcaggttacgccgcaaaagggcggtacggtgcggaaggttttgcacgacgatacggatgccgtgaaaaaaggcgacgtgctggcggtattggacgacgataatgatgtgctggcttacgagcgggcaaaaaacgagctgattcaggcggtgcggcaaaaccgccggcaaaatgccgccacttcgcaggcgggggcgcaggttgccttgcgccgtgcggatttggcacgcgcgcaggatgatttgcgccgccggtctgctttggcggaatcgggcgcggtgtccgccgaagagctggcacacgcccgtgcggcagtgtctcaggcgcaggcggcggtcaaagcggctttggcggaagaatcttcggcacgcgcggctttgggcggtcaggtttctttgcgcgaacagccggcggttcagacggcaatcggcaggttgaaagatgcgtggttgaaccttcagcggacgcaaatccgcgcgccggcggacggtcaggtggcgaagcgttcggtgcaggtcgggcagcaggtggcggcaggcgcgccgctgatggcggtggtgccgctgtcggatgtgtgggtggatgccaattttaaagagacgcagttgcggcatatgaaaatcggacagcctgccgagctggtgtccgatttgtacggcaaacaaattgtttatcgcggcagggtggcagggttttcggcaggtacgggcagcgcgttttcgctgattccggcgcaaaacgcaacgggcaactggattaaagtggtgcagcgcgtccccgtccgtatcgtgctgaaccgcgaagatgtggacaggcatccgttgcgtatcggtttgtcgatgacggttaaagtggatacttccgccgcaggcgcgcctgtttcaaaaacgccgggtgcggcattgccggaaatggaaagtaccgattggtcggaagtcgatcggacggtcgatgaaatcctcgggcaatccgcgccctga

SEQ ID NO: 64044 - DNA, 1008 bp, Neisseria meningitidis
atgagcaccttcttccagcaaaccgcccaagccatgattgccaaacacatcgaccgtttcccgctattgaagttggatcaggtaattgattggcagccgatcgaacagtacctgaatcgtcaaaaaacccgttacctcagagaccaccgcggccgtcctgcctatcccctgttgtccatgttcaaagccgtcctgctcggacaatggcacagcctctccgatcccgaactcgaacacagcctcatcacccgcatcgatttcaacctgttttgccgttttgacgaactaagcatccccgattacagcaccttatgccgttaccgcaaccggctggcgcaagacgacaccctgtccgaattgctggaactgattaaccgccaactgaccgaaaaaggtttaaaaatagagaaagcatccgccgccgtcgttgatgtcaccattattcagaccgccgacagcaaacagcgtcaggccatagaagtcgatgaagaaggacaaatcaacggccaaaccacaccgagtaaggacaaagatgcccgttggatcaagaaaaacggtctctacaaactcggttacaaacaacatacccgtaccgatgcagaaggctatatcgggaaactgcacattacccccgccaatgctcatgagtgcaaacacctgtcgccgttgttggaagggatagctgaaggtacgaccgtctatgccgacaaaggctacgacagtgcggaaaaccggcaacatctggaagaacatcagttgctggacggcattatgcgcaaagcctgccgcaaccgtccgctgacggaaacgcaaaccaaacgcaaccggtatttgtcgaagacccgttatgtggtcgaacaaagcttcggtacgctgcaccgtaaattccgctatgcgcgggcagcctatttcgggctgattaaagtgagtgcgcaaagccacctgaaggcgatgtgtttgaacctgttgaaagccgccaacaggctaagtgcgcctgttgccgcctaa

SEQ ID NO: 64045 - DNA, 390 bp, Neisseria meningitidis
atgtccaaaaccatcatccacaccgacaaagcccccgccgccatcggcgcgtacagccaagccgtgcgcgcgggcgacaccgtttacatgagcggtcagattccccttgatcccgccacgatgaccgtcgtcggcaacggcgatttccgcgccgaagcccgccgggtctttcaaaacctgcaagccgtcgccgaagcggcagacggctcgctggacgacatcgtcaaactcaacgcctacctgaccgacttgggcaacttcgccgtcttcaacgaagtgatggcggaatttatcgccgagccgtttcccgcccgcgccgccgtcggcgttgcctcgctgcccaaaggcgtgcaggtcgaagccgaagccgtcctcgttttgaacgcataa

SEQ ID NO: 64046 - DNA, 843 bp, Neisseria meningitidis
atgttagtctgcaacccctacgaagtcgtcatccacggcacaacgagttccggcaagattttccgtcccagcgactgggcggaacgcctgtgcggcattctgtcctcgttcaccaaagaccacaggctttcctactcgaaatgggtgcgccccatactggtggacaacatccgctgcgtcgccgtcgataaaaaactggaaaccgacaatccccaaatgttccgcttcctgatggactttgccgccgacaacgacctgcgcgtcatcgactgcaaagccctgctcgaagaacgcgaacagggcggacaaaacaaccctgccgacgaacacgtcatgctggcacaggcaatcgaagaaaaacacgccgccgagaaagcacaggaacagaccgcctcgggcgcatcctacgttttgcgcgaaatcggcgcggacgacaccgccaccgcctttgcagccttgagcgttttgcgttccgccctgaccgacatcaaccgctttaccgaacagatcaacaaagtccaacgcccccaaggctaccgcctgctgggtatttttgaagaaggcaaacacaacgccgtcgccgtctgcggcttccgcgaagcctgcaccctcgccggcggccgacatatccatatcgacgacatcgttaccctgccgcaaagccgccgcaaaggctacgcctcgcgccttttggaagaagtccgcaaaatcggcgcggaaacaagggtaaccaaaatccacctcaacgtccacgtcaaccacgaccgtgccgacgcgcaccgcctgtatttcaaaaacggttttgaaatctgcgcataccacttccgttgcgaccccaaatga

SEQ ID NO: 64047 - DNA, 585 bp, Neisseria meningitidis
atgatcagcagactgaccggcaaactggttgaaaaaaaccctccgcaaatcgtcatcgatgtcaacggtgtcggctatgaggccgacgtatcgatgcagaccttctacaacctgccgcccgtgggtgaaagcgtacaactgtttacccagcttatcattcgggaagacgcacatcttttatttggttttgccactgcggaagaacgcaagaccttccgccaactgattaaggtcggcggcatcggcgcgaaaacggctttgggcattttgtcagcgatgacggcagacgagctggcgcgggcggttgcagaagaagatgtcaaacgcctgtcttccgcgccgggaatcggcaaaaaaaccgccgaacgtatggtcttggaactgcgcggcaagctggtcgcgcatacggtaacggacgggctgtttgccgccgcacccgccgccgacgaaacggaagacatcgtcagcacactgcttgcactgggttacagcgaacgcgaagcaaaagcggcggtcaaaggcgttccgaaagggacggacgtgggcgaaggcgtgcgccttgctttgaaaaacctgctgaaataa

SEQ ID NO: 64048 - DNA, 447 bp, Neisseria meningitidis
atgcagcacgaagaaggcaaccgccaacgccctcaaggcgaactgctcctgcgtaccgtcgctatgccgcgcgataccaatcccaaccaagacattttcggcggctggattatgtcgcaaatggatttgggcggcggcatattggcggcggaaattgcgcggggacgcatcgttaccgtcgccgttcaggaaatgaacttcatccgcccggtcaaggtcggcaacgtcgtctgctgctacgggcattgcgtccgcgtgggcaatacttccctccagcttaaagtcgaagtctgggtcaaaactttgatgaacgattgcgttaccgaagaccgccacctcgtaaccgaagccgtgttcacttatgtcgccatcgatgcggaaggcaatccgcgcccgattccgaaagaaggcaaccccaaattggcgggcttattgcctactccgtaa

SEQ ID NO: 64049 - DNA, 1008 bp, Neisseria meningitidis; identical to SEQ ID NO: 62927

SEQ ID NO: 64050 - DNA, 1413 bp, Neisseria meningitidis
ttgttgtttgaatttaaagagaataaaatgattgttgcttcccgctggcccttgctggaaaaggtatttttacggtttggaatgcctgttgccgtggtcgatttggaatcgacgggcggcaatctgtatgaagacagggtaaccgaagtggctttggtcaagtttgagcagggaagggtggtgaggcatgagtggttggttaatcctcaaaaaccgattccgcagtttgtggcggggctgacggggatttcagacggcatggttgccgatgcgcctgtttttgcagagattgccggcgagttgttttcggtattgaagggttgtgtgctggttgcacataacagccgtttcgactatacgtttttaaagcatgagtttcatcgtgcgggtatcggattttcatcgcctgctttgtgcagtgtgcagctgtcccggtgtctgtatccgcaattttacaagcacagcctggacagtatcatcgaaaggttggggattgttgtggaagacaggcatcgtgcgatggcggatgtgtcggcgttgtgtgattatttggaatacagcctgtcggaacacggggtcgaggagtggatcaggcagtgtttccgtttgatgaatccgaaaccgttgcctgccgcgctgcccgaacggttgagggaacagttgtacggtttgcctgacggtatgggggtgctggcctgtttcgacggcggagggaaagtaaattacatcggtacgtttgaacgggtatatagcgaggtttcggctttattggactccggaaaagccccgtttgattggtgcaatacggaggaagtccgtttttttcccgcattgggcaggctgcatgcccataaggttaaagcggaattggtcaggcattatggggtggattgttacgtatctgccaaaaatctgcttaaaacatttacgaccgtcaggtttgaaaaaggttcagacggcatgttgaatgcgaaaacagcggctttgaaaaacggtgtgacggataatccgcctaccggattatttgctaataaaaaggcggcgagacgggctttgtcgtcgtgggcggaaacatacggattgtgtcctgcctcagccggtatccttccggatggttatgcagaggatgagccctgttccgtatatgtttcaggccgatgcgataaggcgtgcgaccgctctgacgaacaggttttggcgtttgcacacaagttgcctgttttggattggggcaaaatgcacgaagtggaaattaccgaaaccgatccgctgacggggaaaacagtcgttctgcacggaatgggcggcgcattggaaatggatgacgggctttggtatttcgataaagatttaccggatgtgtttaaggcgaagtttaaaacggacaggaaaaatattaaggaaatcggttaa

SEQ ID NO: 64051 - DNA, 483 bp, Neisseria meningitidis
atggctatcgtgaagaattccgtggtttcgctgcattatgagatgtatgatgccaacaatcagcttttggacaaaaccgaagaaccgattgcgtatctgcacggcggttacgacggcattttccctttggtggaagaggcgttgcacggtaaggatgccggcgatacggtcgatgtggcgctttcgcccgacgatgcgttcggcgagcaggatccggagttggtccgtattgaagatgcgggcgtgttccctgttgaagtcgaagtcggcatgatgtttgaagccgacgatcctgaaaccggcgatgttgtcgtctatcgtgtaaccgatgttgccgacggcaaggcggtggtggacggcaaccatcctttggcaggcatgaaaatccgctttaaggctacggttgaaagcgtgcgcgatgcatccgatgaggaaatcgcacacggtcatgtccacggcccgcacggtcatcaccaccactga

SEQ ID NO: 64052 - DNA, 1170 bp, Neisseria meningitidis; identical to SEQ ID NO: 39478

SEQ ID NO: 64053 - DNA, 1968 bp, Neisseria meningitidis
gtggggaacacctttaaatcaatccttgtctgggtcgccttgggtatcggcctgatggctgcgttcaacgctttagacggtaaaaaagaagacaacgggcaaatcgaatattctcagttcatccaacaggtcaacaacggcgaagtatccggcgtcaacatcgaaggatccgtcgtcagcggctacctgattaagggcgagcgcaccgacaaaagcaccttcttcaccaacgcgcctttggacgacaacctgattaaaacactgctcgacaaaaacgtccgtgtaaaagtaacgccggaagaaaaaccgagcgcgctggctgccctgttttacagcctgctgcccgtcctgctgctgattggcgcgtggttctactttatgcgtatgcagacgggcggcggcggcaaaggcggcgcattctcattcggcaaaagccgcgcccgcctactggacaaagatgccaacaaagtgacctttgccgatgtcgccggctgcgacgaagccaaagaagaagtgcaggaaatcgtcgattacctcaaagcgccgaaccgctatcaaagcctcggcggtcgcgtgccgcgcggcatcctgctggcgggcagcccgggtacgggtaagacgcttttggcaaaagccattgcaggcgaagccggcgtgccgttcttcagcatttccggttccgactttgtcgaaatgttcgtcggtgtcggtgcgagccgcgtccgcgatatgttcgagcaggcgaagaaaaacgctccctgcatcatctttattgatgaaatcgacgcagtcggccgccaacgcggcgcaggtttgggcggcggcaatgatgagcgcgagcaaacattaaaccaattgttggttgaaatggacggttttgagagcaatcagactgtaattgtgattgcggcaaccaaccgccccgacgtactcgatcctgcgctgcaacgccccggccgtttcgaccgccaagtggttgtccccctgccggacatccgggggcgcgaacagattttgaacgtccattctaaaaaagtgcctttggacaaatctgtggatttattgtccctcgcgcgcggcacgccgggtttttccggcgcggatttggcgaacttggtcaacgaagccgccctgtttgccggccgccgcaataaagtcaaagtcgatcagagcgattttgaagacgccaaagacaaaatctatatgggtccggaacgccgcagtatggtgatgcacgaagacgaaaaacgtgcgacggcgtatcacgaatccggacacgcgattgttgccgaaagcctgccctttaccgaccccgtccacaaagtaaccattatgccgcgcggacgtgcgctgggtctgacttggcagcttccggagcgcgaccgcatcagtatgtataaagatcagatgttgagccagctctccatcctgttcggcggacggattgccgaagacatcttcgtcggacgcatctccaccggcgcatcaaacgactttgaacgcgcaacccaaatggcgcgcgaaatggtaacgcgctacggcatgagcgacaaaatgggcgtgatggtttatgcggaaaacgaaggcgaagtcttcttgggacgcagcgtaacccgttcgcaaaacatttccgagaaaacccagcaggacatcgatgcggaaatccgccggattttggacgagcagtatcaggttgcctacaaaatcctcgatgaaaaccgcgacaagatggaaacgatgtgcaaagccctgatggaatgggaaaccatcgaccgcgatcaggtactggaaatcatggcgggcaaacaacccagcccgcccaaagattacagccacaacctgcgcgagaatgcggacgcggcggaagataacgcgccgcacgctccgactcgggaagaaaccgaagcacctgccccggcagacaccgcttcgacagagtccgagcagcagcctgaaaacaaggcttaa

SEQ ID NO: 64054 - DNA, 303 bp, Neisseria meningitidis
atgaaaacatctaaaattattgcggggctgatgctggctgtggcggttcagacggcatctgcggcagtgtatgaatgccgtcaaaacggtaaggtcagttacagccaaactccgggaaaacattgtaccaacgcgggtttggggcgggatcgggtgtacagttcggttagaccggcagtaaaagacagggcggaagacgcaggggtcggcgattattcggacacggtgagggacgaacacgtccaaaatccgagagagaatacgcataaggatgcttcgaataccggtgcaaagacgcattga

SEQ ID NO: 64055 - DNA, 276 bp, Neisseria meningitidis; identical to SEQ ID NO: 42734

SEQ ID NO: 64056 - DNA, 1929 bp, Neisseria meningitidis
ttgacactctatgccgtagaagagctcaactacgacaaactagacagccaaaaaaggcgcagatttctcggcatcagctacagcaaagcacacgacaccaccacccaagtcatgaaaaccgcgctgccctcaagggtagttgcagaatcagccaacctccaatcgggctgggataccaaactgcaaggcacacagtttgaaaccacactgggtggcgcaaccatacgcgcaggcgtaggtgagcaggcacgggcagatgccaagattatcctcgaaggcatcaaaaccacgatccacaacgaaaccgtgagcagcagcaaatctgctctatggcaaaaacaggcaggacggggcagtaacatcgaaaccttgcaattgccgagtttcaccggtcccgttgcgcccgtactgaccgctcccggcggctatatcgccgacatccccaaaggcaacctcaaaaccgaaatcgaaaccctcaccaagcagcccgagtatgcttatttgaaacaacttcaagttgcgaaaaacatcaactggaatcaggtgcagcttgcttacgacagatgggactacaaacaggagggcttaaccgaagcaggtgcggcgattatcgcactggccgttaccgtggtcacctcaggcgcaggaaccggagccgtattgggattaaacggtgcggccgccgccgcaaccgatgcagcatttgcctctttggccagccaggcttccgtatcgttcatcaacaacaaaggcgatgtcggcaaaaccctgaaagagctgggcagaagcagcacggtgaaaaatctggtggttgccgccgctaccgcaggcgtagccgacaaaatcggcgcttcggcactgaacaatgtcagcgataagcagtggatcaacaacctgaccgtcaacctggccaatgcgggcagtgccgcactgattaataccgctgtcaacggcggcagcctgaaagacaatctggaagcgaatatccttgcggctttggtcaataccgcgcatggagaagcagccagtaaaatcaaacagttggatcagcactacatagtccacaagattgcccatgccatagcgggctgtgcggctgcggcggcgaataagggcaagtgtcaggatggcgcgataggcgctgcagtcggtgagattgttggtgaggctttggttaagaatactgatttcagtcgtatgagtgcgaccgaaatcgaaaaagctaaagcgaatattactgcgtatgcaaaattggtagccggagcgactgtaggtgttacaggaggcaatgttgatgtggcggcaaatgcttccgaaacagctgttaaaaataatgcattagatattatttgggatatcggcaacctcgtatgggacggcggtaaatggatttacgccaaatctattggcgataagcagatggctcgagaagcggcgattgattttggtgtggatgccgccgcagctgccgttccctttgttccggcaggtgcgactaaaatcagccgaggcggggcttatgttctgaaggcgggagacgaagcagttgatacggctaaagccatacaggaaattcagaagcagaccggaatcaagcttacttatgataaggttaataaggtttggacaacaccggcggggttagattatgggttagatgctaagcatggtaataggattaaacatgttttagcccatacaattccaaatccaaacaaacctgttcattctgtttttaatgtgtcccgtaaagaagttttgcctttggttgatgaagcttggagaatgaaaggaaatcctttgccaaatgattcatccgtatatcttgtagatatgaagaaacctattggaacaaaaggagaaacaaaagtgcggattgttgtgcaaaaaggaacaaataaaatcatttctgcatatcctcagaaataa

SEQ ID NO: 64057 - DNA, 921 bp, Neisseria meningitidis
atgagaatcaggctggggcggcacaacgcgcccgactttccgcacggggccgccgtaaccataggcaatttcgacggcgtacaccttggacacaaacacatcctccaaaaactccgcctcgaagccgacgcgcgcggactgcccgtcgttgccgtcatcttcgagccgcaacccaaagaattttttgccgccctcgcaggcaaaaccccgccctgccgcatcagccccctgcgtaccaaactggaattgctggaagggacgggctgcgtcgatgccgtctgggttttgcgtttcgatcaaaatttttccgaaatatccgcacaagcatttatcgaccgcctgctgcgtcaaaccttgaatacgcgttatttgctcgtcggcgacgatttccgtttcggtgcggggcgggaaggctgttttgaacttttggcacaacagcccgatatgcagaccgagcgcacgccttccgtcatcgtcgaagacatccgcaccagcagtaccgccgtgcgacaagccctttcagacggcaaccttgcctatgcgaaaaaacttttgggacacgactacgtcttgagcggcagggtggtgcacggcagaaaactcggacgcaccttaaacgccccgactgccaacatccgcctgcccggccaccgttatgcactcggcggcgtgttcgtcgtcgaagcggacggcacattcggcacgcggcgcggcgtggcgagcttcggcttcaatcccaccgttgatagcggctgttctcaaaagcttgaagtccacctgttcgactttcaaggcgacctgtacggacaacggctgaacgtccgcttcctgcacaaactgcgcgatgaggaaaagtttgacggtatggaagaactgaaaaggcagatagcagccgatatggaagccgcaaagtgttggtag

SEQ ID NO: 64058 - DNA, 432 bp, Neisseria meningitidis; identical to SEQ ID NO: 36206

SEQ ID NO: 64059 - DNA, 213 bp, Neisseria meningitidis; identical to SEQ ID NO: 55644

SEQ ID NO: 64060 - DNA, 1779 bp, Neisseria meningitidis
atgacggttttgaagctttcgcactggcgggtgttggcggagcttgccgacggtttgccgcaacacgtctcgcaactggcgcgtatggcggatatgaagccgcagcagctcaacggtttttggcagcagatgccggcgcacatacgcgggctgttgcgccaacacgacggctattggcggctggtgcgcccattggcggttttcgatgccgaaggtttgcgcgagctgggggaaaggtcgggttttcagacggcattgaagcacgagtgcgcgtccagcaacgacgagatactggaattggcgcggattgcgccggacaaggcgcacaaaaccatatgtgtgacccacctgcaaagtaagggcagggggcggcaggggcggaagtggtcgcaccgtttgggcgagtgtctgatgttcagttttggctgggtgtttgaccggccgcagtatgagttgggttcgctgtcgcctgttgcggcagtggcgtgtcggcgcgccttgtcgcgtttaggtttggatgtgcagattaagtggcccaatgatttggttgtcggacgcgacaaattgggcggcatcctgattgaaacggtcaggacgggcggcaagacggttgccgtggtcggtatcggcatcaatttcgtgctgcccaaggaagtggaaaacgctgcttccgtgcaatcgctgtttcagacggcatcgcggcggggcaatgccgatgccgccgtgctgctggaaacactgttggcggaacttgatgcggtgttgttgcaatatgcgcgggacggatttgcgcctcttgtggcggaatatcaggctgccaaccgcgaccacggcaaggcggtattgctgttgcgcgacggcgaaaccgtgttcgaaggcacggttaaaggcgtggacggacaaggcgttctgcacttggaaacggcagagggcaaacagacggtcgtcagcggcgaaatcagcctgcggcccgacgacaggccggtttccgtgccgaagcggcgggattcggaacgttttctgctgttggacggcggcaacagccggctcaagtgggcgtgggtggaaaacggcacgttcgcaaccgtcggtagcgcgccgtaccgcgatttgtcgcctttgggcgcggagtgggcggaaaaggcggatggaaatgtccgcatcgtcggttgcgccgtgtgcggagaattcaaaaaggcacaagtgcaggaacagctcgcccgaaaaatcgagtggctgccgtcttccgcacaggctttgggcatacgcaaccactaccgccaccccgaagaacacggttccgaccgctggttcaacgccttgggcagccgccgcttcagccgcaacgcctgcgtcgtcgtcagttgcggcacggcggtaacggttgacgcgctcaccgatgacggacattatctcggcggaaccatcatgcccggcttccacctgatgaaagaatcgctcgccgtccgaaccgccaacctcaaccggcccgccggtaagcgttatcctttcccgaccacaacgggcaatgccgtcgccagcggtatgatggatgcggtttgcggctcggttatgatgatgcacgggcgtttgaaagaaaaaaccggggcgggtaagcctgtcgatgtcatcattaccggcggcggcgcggcgaaagttgccgaagccctgccgcctgcatttttggcggaaaataccgtgcgcgtggcggacaacctcgtcattcacgggctgctgaacctgattgccgccgaaggcggggaatcggaacatacttaa

SEQ ID NO: 64061 - DNA, 1413 bp, Neisseria meningitidis
atgctgctgctgcctttattggcaagcgcggcatatgccgaagaaacaccgcgcgaaccggatttgagaagccgtcccgagttcaggcttcatgaagcggaggccaaaccgatcgacagggagaaggtaccggggcaggtgcgggaaaaaggaaaagttttgcagattgacggagaaaccctgctgaaaaatcccgaattactgtcccgcgcgatgtattccgcagtggtttcaaacaatattgccggtatccgcgttattttgccaatttacctacaacaggcgcagcaggataagatgttggcactttatgcacaagggattttggcgcaggcagacggtagggtgaaggaggcgatttcccattaccgggaattgattgccgcccaacccgacgcgcccgccgtccgtatgcgtttggcggcggcattgtttgaaaacaggcagaacgaggcggcggcagaccagttcgaccgcctgaaggcggaaaacttgccgccgcagctgatggagcaggtcgagctgtaccgcaaggcattgcgcgaacgcgatgcgtggaaggtaaatggcggcttcagcgtcacccgcgaacacaatatcaaccaagccccgaaacggcagcagtacggcaaatggactttcccgaaacaggtggacggcacggcggtcaattaccggctcggcgcggagaaaaaatggtcgctgaaaaacggctggtacacgacggcgggcggcgacgtgtccggcagggtttatccggggaataagaaattcaacgatatgacggcaggcgtttccggcggcatcggttttgccgaccggcgcaaagatgccgggctggcagtgttccacgaacgccgcacctacggcaacgacgcttattcttacaccaacggcgcacgcctttatttcaaccgttggcaaaccccgaaatggcaaacgttgtcttcggcggagtgggggcgtttgaagaatacgcgccgggcgcgttccgacaatacccatttgcaaatttccaattcgctggtgttttaccggaatgcgcgccaatattggatgggcggtttggatttttaccgcgagcgcaaccccgccgaccggggcgacaatttcaaccgttacggcctgcgctttgcctgggggcaggaatggggcggcagcggcctgtcttcgctgttgcgcctcggcgcggcgaaacggcattatgaaaaacccggctttttcagcggttttaaaggggaaaggcgcagggataaagaattgaacacatccttgagcctttggcaccgggcattgcatttcaaaggcatcacgccgcgcctgacgttgtcgcaccgcgaaacgcggagtaacgatgtgttcaacgaatacgagaaaaatcgggcgtttgtcgagtttaataaaacgttctga

SEQ ID NO: 64062 - DNA, 1563 bp, Neisseria meningitidis
ttgtttgaagtgatgaaaaaacctttgatttcggttgcggcagcattgctcggcgttgctttgggcacgccttattatttgggtgtcaaagccgaagaaagcttgacgcagcagcaaaaaatattgcaggaagcgggcttcttgaccgtcgaatcgcaccaatatgagcgcggctggtttacctctacggaaacgacggtcatccgcttgaaaccggagttgctgaataatgcccggaaatacctgccggacaacctgaaaacagtgttggaacagccggttacgctggtaaaccatatcacgcacggccctttcgccggcggattcggcacgcaggcgtacattgaaaccgagttcaaatacgcgcctgaaacggaaaaagttctggaacgcttttttggaaaacaagtcccggtttcccttgccaataccgtttattttaacggcagcggtaaaatggaagtcagtgttcccgccttcgattatgaagagctgtcgggcatcaggctgcactgggaaggattgacgggaaaaacggtttatcaaaaaggtttcaaaagctaccgcaacagctatgatgcgcccttgttcaaaatcaagctggcagacaaaggcgatgccgcgtttgaaaaagcgcatttcgattcggaaacttcagacggtatcaatccgcttgctttgggcagcagcaatctgaccttggaaaaattctccctagaatggaaagagggtgtcgattacaacgtcaagttaaacgaactggtcaatcttgttaccgatttgcagattggcgcgtttatcaatcccaacggcagcatcgcaccttccaaaatcgaagtcggcaaactggctttttcaaccaagaccggggaatcaggcgcgtttatcgacagtgaagggcagttccgttttggcacactggtttacggcgatgaaaaatacggcccgctggatattcatatcgctgccgaacacctcgatgcttctgccttaaccgtattgaaacgcaagtttgcacaaatttctgccaaaaaaatgactgaggaacaaatccgcaatgatttgattgccgccgtcaaaggcgaggcttctggactgttcaccaacaatcccgtattggacattaaaacttttcgtttcacgctgccgtcaggaaaaatcgatgtgggcggaaaaatcatgtttaaagatttgaagaaggaagatttgaaccaattgggtttgatgctgaagaaaaccgaggcagacatcagaatgagtattcctcaaaaaatgttggaagacttggcggtcagtcaggcaggcaatattttcagcgtcaatgccgaagatgaggcggaaggcagggcaagtcttgacgacatcaacgagaccttgcgcctgatggtggacagtacggttcagagtatggcaagggaaaaatatctgactttgaacggcgaccagattgatactgccatttctctgaaaaacaatcagttgaaattgaacggtaaaacgttgcaaaacgaaccggagccggattttgatgaaggcggtatggtttcagagccgcagcagtaa

SEQ ID NO: 64063 - DNA, 288 bp, Neisseria meningitidis; identical to SEQ ID NO: 36618

SEQ ID NO: 64064 - DNA, 645 bp, Neisseria meningitidis
gtgacccgccccgccaaaatcaatacttacacacgcatcatcgacgccagccttgcgcttttcaacgaggaaggcgagcgcaacatcagcaccaaccatattgccgcccacttgggcatcagtccgggcaatctctattaccacttccgcaacaaagacgaaatcatcgtccaactgttcaaacgttacagcgaagccctgctggaatacctcaacgaagccgtgttgccgtctgatgtggaagactccatcaactatatggcgggcatttacgacgtgatgtgggaataccgcttcctattcagcgacgtgaacaccctgcttgcgcgcagtgctgaattattgggcgaacacaataccttcacccaagccaaagtctccccgctcttggtcaacctgcttacccagctcaacggcttgaacatcatccaagccgaccaaaccgctatgaacgacctcgccgtcaatatgtggatggtcacgaaatactggttcgacttcgacagctccctgcgcggccgcaccaagctgaccgaagactccaaagcacgcggcgtccgtcgtaccttaagcctccttcgtccttatcttttgcccgaacaccgcgagaaatacgaccggaaaatcggcaacggcaacccgtaa

SEQ ID NO: 64065 - DNA, 255 bp, Neisseria meningitidis; identical to SEQ ID NO: 39349

SEQ ID NO: 64066 - DNA, 183 bp, Neisseria meningitidis
atgccgacaccgcctgccgcattgatggttgcgccggtacgcccgaatccgccgaaagacggcaagacagtaacgctgttggaacacgccgccgagtttggcggctatgtggcggagttggaaaatcaaaatcaggcttggcgcgactgggcgggcaatcactcccgcaaagtcggaaactga

SEQ ID NO: 64067 - DNA, 516 bp, Neisseria meningitidis; identical to SEQ ID NO: 60750

SEQ ID NO: 64068 - DNA, 2289 bp, Neisseria meningitidis
atgcttgcacccgaattggaacagattttgcagcagctttaccgcgaggcgcgtaaggctcattatgaatttatcagcctcgagcatctgcttttggtactcatcgaagaagatgcctccgtccacaacgtcctcaagctctgcggcgcggatttgaaagtggtgtccgaacagctcgccgccagcgttgccgaaaacacccccctgattcccgaacaccttttagacacggtcgaaacccggcccacgctcggcttccaacgcgtgatgcaacgggcgatggtgcatacccagtctgccggaaaagccgcagtcgaaccgttggacgttttggtcgcgctgatgagcgaaaccgacagccacaccgtctatttcctcaagctgcaatcggttacgcgttttgaagttttgcgctgtattgcccacggctctcccgatgaagatgaagatgaagatgaagacgatggcaactattcttcagacggcatggacgacgataatggaaaccgcaccaaaccgggcaaaaaccctttatcggcgtacaccgtcaacctcaacgccgaagtcaaagccggccgtatcgaccctttgattggtcgcaaacacgaaatggaacggctggtgcaaatcctatgccgccgccgcaaaaacaatccgcttttggtcggcgaagcgggcgtgggcaaaaccgcgctggcggaaggtttggcacatcaaatcgtcaacggcggcattccagacgcgctcaaagatgccgaagtgtacgcgctggatatgggctcgctgttggcgggcacgaaataccgcggcgactttgaagcgcgggtcaaatccgtcttgaaacagctcgaaaaaatcccgcacgccattttgtttatcgacgaaatccacaccatcatcggcgcaggcagcaccagcggcggcaccatggacgcgtccaacctgctcaaacccgcgctggcaaaaggttcgctgcgctgcatcggcgcgaccacttacgacgaataccgcaccattttcgacaaagaccacgccttaagccgccgcttccaaaaaatcgacgtggtcgaacccaccgtttccgaaaccgtacaaatcctgcgcggcttgaagccgatgtttgaagccttccaccaagtccgctatacgcaaggcgcactcgaagccgccgccgaactctccgcacgctacatcaacgagcgtttcctgcccgacaaagccatcgacgtgatggacgaagcaggcgcggcgcaacggattctgcccaaatccaaacagaaaaaagtcatcggcaaagcacaaattgaaaccgtcatcgccaaagttgcgcggattcccgaaaaaaccgtgtcgcacgacgacaaacaagtgctgcaattcctcggtcgcgatttgaaaaacatggtttacggtcaagaaaacgccatcgacacgctggttgccgccgtcaaaatgtcgcgttccggccttgccctgcccgacaaaccgataggcagtttcctcttctccggtccgaccggcgtgggcaaaaccgaagccgccaaacagcttgcctactcgatgggcgtaccgctgcaacgctttgatatgtccgaatacatggaacgccatgccgtatcacgactcatcggcgcgcctccgggctacgtcggctttgaacaaggcggccttttgaccgaagccgtcaacaaacagccgcattgcgtattgctcttggacgaaatcgaaaaagcccaccccgacattttcaacgtcctcctgcaagtcatggacgcaggcaaactgaccgacaacaacggcaagagtgccgatttccgcaacgtcatcctgattatgaccaccaatgcaggtgcggagagtctcagccgccccagcctcggctttaccgccaagcgcgaacgcggcgacgaaatgcaggcaatcaacaagctcttcacgcccgagttccgcaaccgcttggacgcgattatcccgtttgcacccttgtccgaacccatcatcgtcaaagtcgtggacaaattcctgctccagctcgaacaccagctcctcgacaaaaaagtcgaagccgaattcacgccggcattgcacaaatatctggcggaaaaaggttttgacccgcaaatgggcgcgcgcccgatgcaccgcctgattcaggaaaaaatccgcaaaccgctcgccgacgaactgctgttcggcaaactatccgacggcggcttcgtgcggatagactgggatgcggcaaaagaagaagccgtgttgaaatttaagaaaagtaaggtcaaaatatag

SEQ ID NO: 64069 - DNA, 231 bp, Neisseria meningitidis; identical to SEQ ID NO: 55669

SEQ ID NO: 64070 - DNA, 291 bp, Neisseria meningitidis
atggcgaaatactttaccgagacgggtatcggcgtccgtgagcattttgatttcttcggcgagtttgtcgtttcgccggcagcacgttcgggtgatttggcacttgcttacggtttgaggctggaagcgggcgaagagggtttgagccttgccgagcttttcgataagcgttccgacagtcaggagccggtcgagtgcggtcgtattgacatcggcggctttatgctgaccgcgaaggaggttgacggggacggcaatatcgggtctatgggtctgaaagtgctgcgttag

SEQ ID NO: 64071 - DNA, 789 bp, Neisseria meningitidis
atgaatcctaaaatcgtgtttttcgatattgacgatacgctgtaccgcaaatatacggataccttgcgtccttccgtgaaaacggcggtggcggctttgcgcggcaaaggcatattgacggcgttggcaacggggcggtctttggcgacgattcccgaaaaggtcagggacatgatggcggaaacgggcatggatgccgtggtaacgataaacggacagtttgcgctgctgcacggaaaaactgtgcgcgaagtaccgatggatgccggtttgatgggcagggtttgcgcgcatttggatggcttgggtatggattatgcgtttgtcggcggagaggggatcgccgtgtccgcgctgtcggaatgcgtgtgccgcgccttgcagcatatcgccagcgatttttttgccgataaggattatttttcaagcaaaccggtgtatcagatgctggtgtttgcggaggaaaacgaaatgccgccctggtcggatattgtggaacgggaaggcttgaaaacggtgcgctggcacgaggaagcggtcgatctgctgcctgcgggaatgtcgaaaacagacggcatcagaagcgtggttgaagcattgggtttggaaatggcggacgtgatggcgttcggcgacggtttgaacgatgtggaaatgctgtctgaagtcgggttcggtgtggcaatgggtaacggggaacaggcagtgaaagaggcggcgaaatatgtttgccccggcgttgatgaagacggcgtgttgaggggcttgcaagatttgggcgtgatttga

SEQ ID NO: 64072 - DNA, 324 bp, Neisseria meningitidis; identical to SEQ ID NO: 45848

SEQ ID NO: 64073 - DNA, 1032 bp, Neisseria meningitidis
atgctgcaaaccgacaacctgaccgccgcgcaaccgcaacgcatcgttgccgcccaaaccgcctccgcacaggaagaactgctcgaacgcgccctccgccccaaaacgctggacgactacatcgggcagcataaagccaaagaacagcttgccattttcatccaagccgccaaaaaacgcggcgaagcactcgaccacgttttgctcttcggcccgcccggactgggcaaaaccacactggcgcacatcatcgccaaagaattgggcgtaaatttgcgccaaaccagcggccccgtcctcgaacgcgcaggcgacctcgccgcccttttgaccaaccttgatccgcacgatgtattgttcatcgacgaaatccaccgcctcagccctgttgtcgaagaaatcctctatcccgcgctcgaagactaccggctcgacattatgataggcgaaggacccgccgcccgttccgtcaaaatcgacctgccgcccttcaccctcgtcggtgcgaccactcgcgcaggtatgctgaccaatccgttgcgcgaccgcttcggcatcgtctcccgccttgagttttacgaaaaccgagaccttaccaccatcgtcagccgttcggcacaactgttgcagctcgatatgtccgaagaaggcgcggaagaaatcgccaaacgcagccgcggtacgccgcgcatcgccaaccgcctgttgcgacgcgtgcgcgatttcgccgacgtgaaaaacaacggcacaatcgacggcggcatcgccgatgccgctttaagtatgctggacgtggacgcgcaggggctggacgtgatggacaggaaatttctcgaagccgttttgcacaaattcggcggcggccccgtcggtttggacaacgttgccgccgccatcggcgaatctacagacaccatcgaagacgttatcgaaccctaccttatccaacaaggcttcctgcaacgcaccccgcgcggcaggatggcgaccgaacgcgcctacctgcatttcgggctgcccgtcgaaaaataa

SEQ ID NO: 64074 - DNA, 1080 bp, Neisseria meningitidis
atgtatgaccccttatatttcccccgttcagagttggcggaaatcatcgccaaaagcctgtatggaggcataacacacgcctttacgctgtttgcgccgcgaagaatgggcaaaacacagtttcttttgaaagacatcaagcccacggcagaggcggcgggcttcaatgtcttttatttctcattcatggacagcaccgcgcccactgttgactttcaggcggcattattgcgctttgccgaaagtatcaagacgggcggaaaggtgcaaaacctgattgggcaaatcagcaaaatagaaatcatgggcagcagcatagagagacggacggagcggcagcaggcggaattgcggctgtccgacatcatcgccgacattgcagggggcagccgccccagcctgttgctgttggacgaaatacaggaactggcacggcaacctgatacgggcggcttgatacgcagcttgcgtacaggcttggacatacaccagcagcaggtaaaaaccatattcacgggcagcagcacaaacggtttacgcgccatgttcaacgacatcaaagccccgtttttccatttcgcccacgccttagactttcccacgcttggacgggaatttaccgattttcttgctggtgtgtatcaggagaggacgggcagggggttagacggcggcgaactgtaccgcgcatttgaacggttgaacaaaacgcccctttatatgcgcgccatgctgcaggacatgataatcaaccccgatttaagcatagagcaggctgaaagcataaggctggaggaaatgcacaaacacgcagacacagccgcgcaatggcggcatttgagcctgatagaacagttgattttatcggagttggcaaacgggcagaccgcgatatattccgtgcaaacgcgccaagccctagcccgtgtaatcggtgtggacgatataggcacaagcacggtgcaaaacaatatccgcaaattagagcgtaaagacctgataaccagagacggcgcgaacaggttgcagataaacagcccgattttaaagacttggattttagagaatgtggagcggtag

SEQ ID NO: 64075 - DNA, 1410 bp, Neisseria meningitidis
atgacctccacattcccccgccgcctcgcccgcaaaatccgccaaacccgccgcctgtcgcgcaaaagcatcgcctttctgttccttttggcaggttcggcactcgtcgccctgaccgcgctgttttttgcccatcttgccgattttgcgctggaactgaacgccaaactggttcaacaatacccgtggttcgcgtgggtcgcgcttcctttgggtttgccgcttattgcgtggctcacacgcaaattcgcccccttcaccgccggcagcggcatcccgcaggtcatcgcctcactgtcgctgccctacggcgcacagaaaacgcggctgatccgcctcgggcagacgctgctgaagattccgctgacctttttgggtatgctgttcggcgcgtccatcggacgcgaaggtccgtccgtgcaggtcggcgcggcagtgatgggcgcgtggggcgcgtggtgcaagaaacacggcttggcattcaaagggatgcaggaaaacgatttgatggcggcgggcgcggcgggcggtttggcagccgcgttcaacgcgccgctggcgggcgtgattttcgccattgaggaactcgggcgcggcatcatgttgcgctgggagaggcaaattcttttgggcgtgctcgcctccggtttcatacaggtcgccattcagggcaacaacccgtatttttccggcttcaacggcggcgtattggaacatatctttctgtgggtcgcactgtccggcctggtttgcggcgcggcgggcgggctgttcggacgtttgctctatcgcggtgcggcggcgtttgcaccgcgcaagatacgcggcttcatccgcaaccgtccgctgctgctggcggcactgatggggctgctgctcgccctgctcggcacgttctaccaaggcaaaacctacggcaccggctaccacgaagccgcccaagccctgcacggcatctacgaagcccccttcggactcgccgccgccaaatggctcgccaccgtattcagctattgggcaggcattccgggcggcattttcactccctcgctgaccataggcgcggttttgggcgagcatatcgccgccatcgccgacatatcgcagggtgcaaacatcatcgtcctcatctgcatggcggcatttctggcgggcgcgacacaatccccgattacttccgccgtcgtcgtcatggaaatgacgggcggacaaagcctgctgttttggatgctaattgcctgcattttcgcctcgcaggtttcgcgccagttttcgccgcgtccgttctaccacgcatcgggaatgcgcttccgccagcgcgtgcttcaagaaaccgccgcccaaaccggcaatgcgcccgcaagaccgcaaacagcaaacagcaaaacgggaatgccgtctgaaaattaa

SEQ ID NO: 64076 - DNA, 678 bp, Neisseria meningitidis
atgcaagccgatttcaaccgccccgtcctcgccgtcgataccggaacttcctatttgtcgctcgcgctgcgcgccgacggcgaaacccgcctgttccatcaagaggccggcagccgccaatccgaactgattctgccggaaatccgcactctattccgaaatgcgggcattaccgccgccgatttgggggcgattgtttatgcgaaaggccccggcgcgtttacgggactgcgtatcggcatcggcgtggcgcaaggtttggcaacgccgtttgatacgcctttaatcggcatccccacgctcgatgccgccgcctcgctgccgccgccgcaaagctgcatactcgccgctgcggacgcgcgtatgggcgaagtgttttatgcgtggttcgacacgctgaaccgccgccgtttgagcgattatcaggtcgggcgggcggcagacatccggctgccggagggatgtgccttttcagacggcataggcagcgcgttcgcgttggaagaaacgccgccgttttcaggcaaacccgatatgccgaccgccgccgacttcctcaatctggcggcggaaggcggttttcccgccgtcgctgctgcacacgccgaactgctctacgtccgcaacaaaatcgccctaaccgccaaagaacaggcggaacggaaagcccgaacatga

SEQ ID NO: 64077 - DNA, 318 bp, Neisseria meningitidis; identical to SEQ ID NO: 54948

SEQ ID NO: 64078 - DNA, 474 bp, Neisseria meningitidis
atgtcccgcaataccgaagagctgcaaggcatctcgcttttgggtaatcagaaaacccaatacccggccgaatacgcgcccgaaattttggaagcgttcgacaacaaacatcccgacaacgactatttcgtcaaattcgtctgcccagagttcaccagcctctgccccatgaccgggcagcccgacttcgccaccatctacatccgctacattccgcacatcaaaatggtggaaagcaaatccctgaaactctacctcttcagcttccgcaaccacggcgattttcatgaagactgcgtcaacatcatcatgaaagacctcattgccctgatggatccgaaatacatcgaagtattcggcgagttcacaccgcgcggcggcatcgccattcatccgtttgccaactacggcaaagcaggcaccgagtttgaagcattggcgcgtaaacgcttgttcgaacacgacagccaataa

SEQ ID NO: 64079 - DNA, 1296 bp, Neisseria meningitidis
atgattcgccctgattttcaagaatatctgccttcttattatttcagttcggttaatcctcatactgtttatccgaaacttcaatgccgtctgaaaaccgatacctgtatcatcggcggcggattgagtggtttgtgcactgcattgcccttggcggagcagggacatgaaacggttgtgttggaagccgcgcgtatcggcttcggcgcgtccggcaggagcggcggtcaggttatcagcgactacgcctgcggtatggaggaaattgaaaaacaggtcggtttggagcaggcgcaatggttttggcaacagtctttgcaggcggtcgaactggtggacgaacgcgtccgcaaacatgccattgattgcgattggcagcgcggttatgccacggttgccatccgttcgcagcattgggaagaattacaacaatggcatgagcacgcccaaaaatattacggtgcaactcattatcaactttgggataacactgaactgaaacagcagcttgacagcgatatgtaccaaggggcgcaattcgaccccttatccggacacctgcatccgctcaattacacgttgggtgttgccggtgccgctgccgaagctggtgcgcagattttcgagcaatccccgatgacgcgcatcgaaccgcatcaaaacggttggctggtttacacgcccgaaggcagcgtcgagtgcaaaaatgtggtctatgccgtcaatacctatgccggtttgaagccgatattcaagcctttggagcgcaaggcgattgccgtcagcacctttattattgccaccgaacctttgggtgagcgtgggcaggggcttatccgcaacaatatggctgtgtgcgacaaccgccatattttggattattaccgcctcagcgcggacggcagactgcttttcggcggtaaggataacgagtttatcgacaatcctgagcgtatgaccgagcttgtccgccaagatatgcttaaagtttttccgcagcttgccgatgtcaaaatcgaatattcgtggggcggggagtgcgacattaccgccaaccttgtcccgcatttcggacgtttagccccgaatgttttttatacgcaaggttattccggccatggtatggcaataacgggtattgcaggtttggcggttgccgaagcaattttaggggacgaatgccgtctgaagccgtttgagcggttgcgccagccgaatattatcctgcaaccgtttttgcgcaaactcggttctttcctcggctcgaaatattatcagtggaaagacagccgttaa

SEQ ID NO: 64080 - DNA, 150 bp, Neisseria meningitidis
gtgaatatattttatggagaatataaaaaagatttttattcttatgttcctttcatggaatcccaaggtataacgggtgaatgtatctgggaaggagatttgtttgatcatccatattatgaagatgaaaactcaaatggtatggattga

SEQ ID NO: 64081 - DNA, 567 bp, Neisseria meningitidis
ttgaacatcaaatattcgggcatcgaaaacaggtttgaaaccgccatcctgaagaaaaacggcgtaagatccggcttcgtctccttcgcccccaaccttgccgccgtcaaactgaacgattatgccaaagttagaaaacggattaccaaaaccaaacagaaagccgacatcgtcattgtaatgttccacggcggcgcggaagggaaacaggcggaacacctgccgttcgataccgaaatcttctatggggaaaacaggggcaacgtcgtcgagtttgcacggcttgccgtcgattccggcgcggatgtcgtattcgggcaggggccgcacgttacacgcgccgtcgaactttaccgcgaccgcttcatctcttacagcggcggcaactttgccacctacggcgcaatcaacacctccggcatcagcggcattgcgccgattttcaaaattatcaccgacaaacagggtaaatttatttccggaactatcatccctattacccaagccgacgataaaatccccaaaatcgaccctgaaaaaccgttatcgggcggattatttatctga

SEQ ID NO: 64082 - DNA, 639 bp, Neisseria meningitidis; identical to SEQ ID NO: 47228

SEQ ID NO: 64083 - DNA, 1110 bp, Neisseria meningitidis
atgaaatacaaaagaatcgtatttaaagtcggcacatcttcgattacccattcggacggcagtctctcgcgcggcaaaatccaaaccatcacccgccagcttgccgcattgcatcatgcgggacacgagctggtcttggtgtcttccggcgcggttgcggcagggttcggtgcgctgggtttcaaaaaacgtccggtcaaaatcgccgacaaacaggcttccgccgccgtcgggcaggggctgctgatggaagaatatacggcaaacctgtcttcagacggcatcgtgtccgcacaaatcctgctcagccgcgccgactttgccgacaaacgccgctaccaaaatgccggcggcgcactttccgtgctgctgcaacgccgcgccgtccccatcatcaatgaaaacgatacggtttcggttgaggaattgaaaatcggcgacaacgacacattgagtgcgcaagtggcggcgatgatacaggcagacctcttggtgctgctgaccgacatagacggtctttacaccggcaacccgaacagcaatcccgatgccgtacggctggacaaaatcgaacacatcaaccatgaaatcatcgaaatggcgggcggctcgggttcggcaaacggcacaggcggtatgctgactaaaatcaaagcggcgacgattgcgaccgagtccggcgtaccggtctatatctgttcctcgctcaaacccgatgcacttgccgaagcggcagataatcaggcggacggctcgtttttcgtcccccgtgccaaaggtttgcggacgcagaagcaatggctggcgttctattccgaaagcaggggcggcgtttatgtggacgaaggtgcggaacacgctttgtccgaacagggaaaaagcctgctgatgtcgggcattgccggaatcgaagggcatttttcccgtatggacaccgtaaccgtgtacagcaaggcaaccaaacagcctttgggcaaagggcgcgtcctgttcggctctgccgccgccgaagacctgctcaaattgcgtaaggcgaaaggcgtgttcatccatcgggacgactggatttccatcacgcccgaaatacgcctgcttctgaccgaattttag

SEQ ID NO: 64084 - DNA, 492 bp, Neisseria meningitidis
atgaaataccgtcgtttttaccgcaatggcggcacttacttttttacggttgcaaccaataaacggcagaggattttgaccgatgatgcggtgcgtttggctttgcgacaggcggtaatggctgtgcgcgaacggtatccgtttgaaattttggcatgggtgttgatgcccgaccatctgcataccatatggcggctgccggacaatgattctgcttattcggaacgctggcggcagatcaagcggcacagcaaatatttaatcggcggcaatctcaggctttggcaaaaacgcttttgggaacatactatccgcgatgaggccgattttgcctgccattttgattatctgcatttcaatccggtcaaacatggctatgtaggacaaatttccgattgggggttttctacgtttcaccgttatgtcaaacagggtatttatccgcataattggggtggcggcaatgcggacttttctattggatacgattga

SEQ ID NO: 64085 - DNA, 1245 bp, Neisseria meningitidis
atgtccaacgaaaaccgtacctgttccttttgcggaaaatccaaatcacacgtcaaacatttaattgagggcgaaaacgcctttatctgtgacgaatgcgtctcaaactgtattgaaatattgcatgaagacggaaatgacggcacgcctccggaaagtgccggaggggagccggaggaatccggcaagctgcccacgcccgccgaaatcgtcgccaatctcaacgaccacgttatcggtcaggaacaagccaagaaagccttggcggtgtcggtgtacaaccattacaaacgcctgcgccacccgaaagcggagggcaaagtcgagttgtccaaatccaatatcctgcttatcggcccgaccggatcgggtaaaaccctgctggcgcaatctttggcgcgcaaactggatgtgccgttcgtgatggcagatgcaaccacgctgaccgaagcaggttatgtcggcgaagatgtcgaacagattattaccaaactgttgggcaaatgtgattttgacgttgaaaaagcccagcgcggcatcgtttatatcgatgaaatcgataaaatttcacgcaaaagcgacaatccgtccatcacgcgcgacgtatccggcgaaggcgtgcaacaagccttgctaaaactgattgaaggcacggtagccagcgttccccctcaaggcggacgcaaacatccgaaccaagaattcatcaacgttgataccaccaacatcctctttatctgcggcggcgcatttgccggcttggaaaaagtcatccgccaacgtactgaaaaaggcggtatcggctttggtgcgtccgttcacagcaaggacgaaaatgccgacattaccaagctgttcggcatcgtcgaaccggaagacttgattaaattcggtctgattccagaattaatcggacgtttgcctgtgattgcaactttagaagaattggacgaagacgcgctgattaatattttgaccgagccgaaaaatgctttggtcaagcagtatcaggcgttgttcggtatggaaaatgtcgaactggagtttgaagaaggcgcattgcgttccatcgcgcgtcaggcaatggaacgcaaaaccggcgcgcgcggcctgaggtccatcgtcgaacgctgcctgctcgatacgatgtaccgcctgcctgatttgaaaggcttgaaaaaagtggtggtcggtaaggcagtcatcgaagagggcagggaaccggaattggtgttcgagtcctga

SEQ ID NO: 64086 - DNA, 618 bp, Neisseria meningitidis; identical to SEQ ID NO: 44520

SEQ ID NO: 64087 - DNA, 780 bp, Neisseria meningitidis
atgaacggcatcatcatcaaaacccccgaagaaattgagaaaatgcgcgaactgggcaaactcgtcgccgaagccctcgactatatcggacaattcgtcaaacccggcattaccaccgatgaaatcgacaaactcgtttacgactaccacgtcaacgtccaaggcggctaccccgcccccctccactacggcaacccgccctaccccaaatcctgctgtacctccgtcaaccacgtcatctgccacggcattcccgacaataagccgctcaaagaaggcgacattatcaacatcgacctcaccatcaagaaagacggcttccacggcgactccagccgtatgtttaccgtcggcaaagtctcccccatcgcccaacgtctgatcgacgtaacccacgcctctatgatggcgggcatagaagccgtcaaacccggcgcgacactgggcgacgtaggttacgcctgccaacaggttgccgaaaacgccggctattccgtcgtacaggaattctgcggacacggcatcgggcgcggtttccacgaagccccgcaagtgttgcactacggaaaaaaaggacagggccccgttctaaaaccgggtatgatttttaccgtcgaaccgatgatcaaccaaggcaaacgccacctgcgtatcctcaacgacggctggacggtggttaccaaagaccgctccctctccgcccaatgggaacacgaagtcttggtgaccgaaaccggctacgaaatcctcaccgtcagccccgcctccggcaaaccctga

SEQ ID NO: 64088 - DNA, 165 bp, Neisseria meningitidis; identical to SEQ ID NO: 38385

SEQ ID NO: 64089 - DNA, 588 bp, Neisseria meningitidis
ttgaatattaaactgaaaaccttgttattgcccttcgccacgctggcattgtgcaccaacgcttttgccgccccgcccagcgacgcgtcgttggcgcgttggctggatacgcagaattttgaccgggatatagaaaaaaatatgattgagggctttaatgccggatttaaaccgtatgcggacaaagcccttgccgaaatgccggaagcgaaaaaagatcaggcggcagaagcctttaaccgttatcgtgagaatgttttgaaagatttgattacgcccgaagtgaaacaggctgtccgtaatactttattgaagaatgcccgtgagatatacacgcaagaagaaattgacggcatgattgccttttacggttcgcctgtcggtcagtccgtcgttgccaaaaatccgcgcttaatcaagaaatcgatgagtgaaatagcagtatcttggactgcattgtcagggaaaatcgcgcgacatcatctgcccgcgtttacggaagagttgcggcgcatcatctgcggcggtaaaaatcccgatgcgggctgtaaacaagccggacaggttgggaaaaggcatcagaaataa

SEQ ID NO: 64090 - DNA, 303 bp, Neisseria meningitidis; identical to SEQ ID NO: 37654

SEQ ID NO: 64091 - DNA, 564 bp, Neisseria meningitidis; identical to SEQ ID NO: 39229

SEQ ID NO: 64092 - DNA, 501 bp, Neisseria meningitidis
atgaatgcaatgccccaaaccgccgcacaaaacgaaaccctgcacatttgcagcattattgtcgatgatgcacaggatttttcccccatgcttctcgatgcagggcgggacgacacacttatcagcgaatcgatgattccgcaaatccgcactgttgccgccctgatagccgccgaacggcacgacttcagccgcagcagccccgccgagtttaccgatgccgccgatttttttgccgcacggattctcgtattgggcgtgcgacgcttccatctggacgtatcgctgcttcagattttgaaaaccgccaacagccgcgcccgccgctttgccgaaaaacaccgcctgtttttcacacccgcacaagccgaattgagcctgaacaaacacaaaaaccgccgcctgctgaccgtagaaaccgaacacgaagtcgaaaacaaaggcaacccagtcgccaacagcctcgcatttgtccgcaaactgcacaccctgcccctgtaa

SEQ ID NO: 64093 - DNA, 510 bp, Neisseria meningitidis; identical to SEQ ID NO: 36289

SEQ ID NO: 64094 - DNA, 456 bp, Neisseria meningitidis
atggatttgcgcaaattaaaaaaactgattgatttggttgaagaatcgggtatcgccgaaatcgaagtaaccgaaggcgaggaaaaagtccgcatcatccgaaccatcgccgccgcacccgtttacgccgcgcccgtacctgccgccgcgccggccgtaacgcctgccgccgcacccgttgcggcatccgcgcccgccgccgcacctgccgcccgcgatttgtccgacgcgcaaaaatcgcctatggtcggcacgttctaccgcgcacccggcccgaatgccgcgccttttgtcgaagtcggccaacaggttaaagccggcgacacgctgtgcatcatcgaagcgatgaagctgatgaacgaaatcgaagccgaaaaatccggcacggtcaaagaaattttggtcgaaaacggtacgcccgtcgaattcggcgaaccgctcttcattatcggataa

SEQ ID NO: 64095 - DNA, 627 bp, Neisseria meningitidis
atgtatacaggcgaacgcttcaatacttacagccatttgagcggtttgattctggcggcggcaggtttggcgctgatgctgctgaaaaccataggacacggggacggctaccgtatcttcagcgtatcggtttacggcatcagccttcttctgctctatttgagttcctcgctgtaccacggaattgcagccggaaaactgaaaagcattttgaaaaaaaccgaccactgcatgatttatgtgctgattgccggaagctacacaccgtttgcactgatttctttgagaaacgggccgggctggacggtattttcactgtcctggctgctggcggctgcaggaatcgcacaagaactcaccatcggacggaaaagcgaaaaacgtctgctgtctattgtgatttatgtcgtcatgggttggatggtcttggcggtaatgaaatccctgacagcctcactcccgtcggcaggactggcttggctggcggcaggcggtatgctgtacagcgtcggcatttactggtttgtaaacgatgaaaaaatccgacacgggcacggaatctggcatctgttcgtattgggcggcagcatcacccaatttgtcagcgtgtacggttacgtaatctga

SEQ ID NO: 64096 - DNA, 1293 bp, Neisseria meningitidis
atggctgtcttcccactttcggcaaaacatcggaaatacgcgctgcgcgcgcttgccgtttcgattattttggtgtcggcggcatacattgcttcgacagagaggacggagcgcgtcagaccgcagcgcgtggaacaaaaactgccgccgctgtcttggggcggcagcggtgttcagacggcatattgggtgcaggaggcggtgcagccaggcgactcgctggcggacgtgctggcgcgttcgggtatggcgcgggacgaaattgcccgaataacggaaaaatatggcggcgaagccgatttgcggcatttgcgtgccgaccagtcggttcatgttttggtcggcggcgacggcggcgcgcgcgaagtgcagttttttaccgacgaagacggcgagcgcaatctggtcgctttggaaaagaaaggcggcatatggcggcggtcggcttctgaggcggatatgaaggttttgccgacgctgcgttcggtcgtggtcaaaacgtcggcgcgcggttcgctggcgcgggcggaagtgcccgtcgaaatccgcgaatccttaagcgggattttcgccggccgcttcagccttgacggtttgaaggaaggcgatgccgtgcgcctgatgtacgacagcctgtatttccacgggcagcaggtggcggcgggcgatattttggcggctgaagtcgttaagggcggcacaaggcatcaggcgttctattaccgttcggacaaggaaggcggagggggcggcaattattatgatgaagacggcagggtgttgcaggaaaaaggcggcttcaacatcgagccgctggtctatacgcgcatttcttcgccgttcggctaccgtatgcaccccatcctgcacacttggcggctgcacacgggcatcgattatgccgcaccgcagggaacgccggtcagggcttccgccgacggcgtgattacctttaaaggccggaagggcggatacggcaacgcggtgatgatacgccacgccaacggtgtggaaacgctgtacgcgcacttgagcgcgttttcgcaggcacaaggcaatgtgcgcggcggcgaggtcatcggttttgtcggttcgaccgggcgttcgaccgggccgcacctgcattacgaggcacgcatcaacgggcagcccgtcaatcctgtttcagtcgcattgccgacaccggaattgacgcaggcggacaaggcggcgtttgccgcgcagaaacagaaggcggacgcgctgcttgcgcgcttgcgcggcataccggttaccgtgtcgcaatcggattga

SEQ ID NO: 64097 - DNA, 1107 bp, Neisseria meningitidis
atgtctctttatccgatttacaatttttccgccggccctgccgtattgcccgaagccgtgttggaaacggcgcggcaggaaatgttggactacaacggtacgggttttcctgtgatggcgatgagccaccgttcggaaatgtttttgagcatcctgcatcatgcggaacaggatttgaggcagcttttgaaagtgcctgacaactataagatattgtttctgcagggtggagcaacaacccaatttaatatggcagccatgaatctggcacacggtttccgcactgccgacgcggtggtaacgggtaactggagccgtatcgcttatgaacagatgagccgtttgaccgatacggaaatccgtttggcggcgcatggcggcgagcagttcgactatctcgacctgccgcctgtggaaacgtgggatgttgcacccgattcggcgtttgtccattttgccgtcaatgaaacggtcaacgggctgcaataccgtgaagtgccgcgcctttcagaaggcatgccgccgctggtgtgcgatatgtccagcgagattttgtcgcgcgagtttgatgttgccgactacggactgatttacgcaggcgcacagaaaaacatcgggccggcaggggttacggtggtgattgtgcgtgaggatttgctcgagcgttgtccgaacgatattcccgatgtgttcaactaccgttcgcatttgaaccgcgaaggtatgtacaacacgccgtcaacttacgcgatttatatgtcggggctggtgttccgctggctacaggcgcagggcggtgtgaaaaaaattgaagcggtcaatcggctgaaggcgcaaaccttgtatgagacgatagatggcagcggcggtttctatatcaaccgtatccgtccgaatgcgcgttctaaaatgaatgtcgtgttccaaacgggggatgaggagcttgaccgccgttttgtgctggaagccgaattgcagggcttgtgcctgttgaagggctataagtctgtcggtgggatgcgtgccagcatttataatgcgatgccgcttgaaggcgtgcgggctttggcagattttatgcgcgatttccaacggcgttacggttga

SEQ ID NO: 64098 - DNA, 1782 bp, Neisseria meningitidis
atgaacaaaatataccgcatcatttggaatagtgccctcaatgcctgggtcgtcgtatccgagctcacacgcaaccacaccaaacgcgcctccgcaaccgtggagaccgccgtattggcgacactgttgtttgcaacggttcaggcaagtgctaacaatgaagagcaagaagaagatttagaccccgtacaacgcactgttgccgtgttgatagtcaattccgataaagaaggcacgggagaaaaagtagaagaaaattcagattgggcagtatatttcaacgagaaaggagtactaaaagccggaacaatcaccctcaaagccggcgacaacctgaaaatcaaacaaaacaccgatgaaaacaccgatgaaaacaccaatgccagtagcttcacctactcgctgaaaaaagacctcacagatctgaccagtgttggaactgaagaattatcgtttggcgcaaacggcaataataaagtcaacatcacaagcgacaccaaaggcttgaattttgcgaaaaaaacggctgggacgaacggcgacaccacggttcatctgaacggtattggttcgactttgaccgatacgctgctgaataccggagcgaccacaaacgttaccgatgacgagaaaaaacgtgcggcaagcgttaaagacgtattaaacgcaggctggaacattaaaggcgttaaacccggtacagcttccgataacgttgatttcgtccacacttacgacacagtcgagttcttgagcgcagatacgaaaacaacgactgttaatgtggaaagcaaagacaacggcaagagaaccgaagttaaaatcggtgcgaagacttctgttatcaaagaaaaagacggtaagttggttactggtaaaggcaaaggcgagaatggttcttctacagacgaaggcgaaggcttagtgactgcaaaagaagtgattgatgcagtaaacaaggctggttggagaatgaaaacaacaaccgctaatggtcaaacaggtcaagctgacaagtttgaaaccgttacatcaggcacaaatgtaacctttgctagtggtaaaggtacaactgcgactgtaagtaaagatgatcaaggcaacatcactgttaagtatgatgtaaatgtcggcgatgccctaaacgtcaatcagctgcaaaacagcggttggaatttggattccaaagcggttgcaggttcttcgggcaaagtcatcagcggcaatgtttcgccgagcaagggaaagatggatgaaaccgtcaacattaatgccggcaacaacatcgagattacccgcaacggcaaaaatatcgacatcgccacttcgatgaccccgcaattttccagcgtttcgctcggcgcgggggcggatgcgcccactttaagcgtggatgacgagggcgcgttgaatgtcggcagcaaggatgccaacaaacccgtccgcattaccaatgtcgccccgggcgttaaagagggggatgttacaaacgtcgcacaacttaaaggtgtggcgcaaaacttgaacaaccgcatcgacaatgtggacggcaacgcgcgcgcgggtatcgcccaagcgattgcaaccgcaggtctggttcaggcgtatttgcccggcaagagtatgatggcgatcggcggcggcacttatcgcggcgaagccggttacgccatcggctactccagtatttccgacggcggaaattggattatcaaaggcacggcttccggcaattcgcgcggccatttcggtgcttccgcatctgtcggttatcagtggtaa

SEQ ID NO: 64099 - DNA, 2082 bp, Neisseria meningitidis
atgaaatcactcaaaaccttcctcatttggggcatagtggtactggtcggcttagcatcctttaccactctggctctcagccgaggcgaacaggtcagcgcggtatggatggttaccgccgccatatccgtttactgcatcgcctaccgtttttacagcctctacatcgccaaccgcgtaatgcggctcgatcctaaccgcctgactccggcagaacgccacaacgacggcttggactacgttccgacgcacaaaggcgtattgttcggacaccactttgccgcgattgcgggcgcgggccctttggtcggcccggttttggcggcgcaaatgggttacctgcccggtactttgtggattatcttcggcgtggtgtttgccggcgcggtacaggatatgatggtcttgttcgtctctatgcgccgcgacggtaagtctttgggcgatattgtgaaacaggaactcggcactgtccccggcgtgattgcctccatcggtattttgatgattatggtcatcattatggcggtgttggcgttgattgtcgtaaaagcactggttcacagcccttggggtacgtttaccatcgccgcaacgatgccgattgccctgtttatgggtatttacacgcgctatatccgtccgggcaaaatcggcgagatttccatcgtcggctttattttgctgatgctggcggtaatttacggcgaagatgtggcgaaaagttccatcggacattggttcgaccttgacggcatccagctcacttgggcgattatgatttacggctttgtcgcctccgtattgcccgtatggctgctgctcactccgcgcgactatctctccaccttcctgaaaatcggtacgattgcggccttggctttgggcatcgtcatcgtcaatcccactttgcaaatgcctgccgtaacccactttatcgacggttccggcccggtattctcaggcgcattgttcccgttcctcttcatcaccatcgcctgcggtgcggtttcgggcttccacgcgctgatttcctccggcaccacgccgaaaatgctggaaaacgaaacccacgtccgtatgattggttacggcggtatgttgatggaaagtttcgtagccattatggcacttgccgccgccgcatcgcttgatcccggcgtgtacttcgccatgaacagccctgccgccctgatcggtacggatgccaataccgccgccgaagtgattaccaccaagctgcaattccctgtcgatgctgcaaccctgttgcacaccgctaaggaagtgggcgaaaacaccatcctttcccgtgcaggcggtgcgcccaccctcgcagtcggtatggcgcacattatgagccgcctgattccgggcgaggcgatgatggcgttctggtatcacttcgccctattgtttgaagccttgttcatcctgaccgccgtcgatgccggtacgcgcgtcgcacgttttatgattcaagacttgggcagcatcttctacaaacctttcggcaacaccgactccatccccgccaacctgattgcgaccttcttcgccgtggcattgtggggctacttcctctacacgggcgtgaccgacccgttgggcggcatcaactcgctctggcctttgttcggcatcgccaaccaaatgctggcaggcgtagccttgattatgtgcgccgtggtgctgattaagatgaaacgcgaccgttatgtctgggtggtactcgttcccgccgtcggcgtactgttcgtaacctgctacgccggcctgcaaaaactgttccacagcgacccgcgcatcagcttccttgcccacgccggcaaatacagcgacgcattggctaaaaacgaaatccttgcgcctgccaaagacatcggcgaaatggcgcaaatcatcttcaacgacaagattaatgccggtctgaccatcctcttcttgtcggttgtcgtgattgtcgccgcgtacggtttgcgtaccgccctcaaagcacgcaaagtcggctggccgaccgccaaagaaatcccggcggtgtaccgcgacggcaaacagccggaggcacaaagtgaagcataa

SEQ ID NO: 64100 - DNA, 660 bp, Neisseria meningitidis
ttgtgtgcgtcctgtttgaatgttaacaaaatcgttataatcgcaacattctaccgcaatcctgaaaggccgtctgaaatgaggaacgaggaaaaacacgccctgcgccgcgaattacgcgggcggcgttcgcaaatggggtgggacgtgcgggcggcggcaacggtaaaaattaaccgcctgctcaaacgttatatcaagcacggtcggaaaatcggcgtgtattggccgatgggcaaggaattgcgtttggacggctttgtccgcgcggcgcaaaaacgcggcgcaaaactttatctgccttatatcgaaccgcgttcgcggcggatgtggtttacgccgtatcctgaaagcggaatggaacgggagcgcatacggggcagggcgaggttgaacgtgccgcagtttgcagggcgcaaaatccgcgtgcacggtttgtcggtattgctcgttccgcttgtcggcatagaccgcgaaggctaccgtttggggcaggcaggcggctattacgatgcgacgcttgcagcgatgaaataccgtttgcaggcaaaaaccgtgggcgtgggctttgcctgccaactggtcggcacgctgccgcgcgaggcgcacgacctgccgctggacggttttgtgtcggaggcggggatattgtgtttttag

SEQ ID NO: 64101 - DNA, 330 bp, Neisseria meningitidis; identical to SEQ ID NO: 63133

SEQ ID NO: 64102 - DNA, 2151 bp, Neisseria meningitidis
atgaaaaccccactcctcaagcctctgctcattacctcgcttcccgttttcgccagtgtttttaccgccgcctccatcgtctggcagctaggcgaacccaagctcgccatgcccttcgtactcggcatcatcgccggcggccttgtcgatttggacaaccgcctgaccggacggctgaaaaacatcatcgccaccgtcgccctgtttaccctctcctcgctcacggcacaaagtaccctcggcacagggctgcccttcatcctcgccatgaccctgatgaccttcggctttaccattttaggcgcggtcgggctgaaataccgcaccttcgccttcggcgcactcgccgtcgccacctacaccacacttacctacacccccgaaacctactggctgaccaaccccttcatgattttgtgcggcaccgtactgtacagcaccgccatcatcctgttccaaatcatcctgccccaccgccccgtccaagaaagcgtcgccaacgcctacgacgcactcggtggctacctcgaagccaaagccgacttcttcgaccccgatgaggcagcctggataggcaaccgccacatcgacctcgccatgagcaacaccggcgtcatcaccgccttcaaccaatgccgttccgccctgttttaccgtttgcgcggcaaacaccgccacccgcgcaccgccaaaatgctgcgctactacttcgccgcccaagacatacacgaacgtatcagctccgcccacgtcgactaccaagagatgtccgaaaaattcaaaaacaccgacatcatcttccgcatccaccgcctgctcgaaatgcagggacaagcctgccgcaacaccgcccaagccctgcgcgcaagcaaagactacgtttacagcaaacgcctcggccgcgccatcgaaggctgccgccagtcgctgcgcctcctttcagacagcaacgacaatcccgacatccgccacctgcgccgccttctcgacaacctcggcagcgtcgaccagcagttccgccaactccgacacagcgactcccccgccgaaaacgaccgcatgggcgacacccgcatcgccgccctcgaaaccggcagcctcaaaaacacctggcaggcaatccgtccgcagctaaacctcgaatcaggcgtattccgccatgccgtccgcctgtcccttgtcgttgccgccgcctgcaccatcgtcgaagccctcaacctcaacctcggctactggatactgctgaccgcccttttcgtctgccagcctaactacaccgccaccaaaagccgcgtccgccagcgcattgccggtaccgtactcggcgtaatcgtcggctcgctcgtcccctactttaccccctccgtcgaaaccaaactctggattgtcatcgccagtaccaccctctttttcatgacccgcacctacaaatacagtttctccaccttcttcattaccattcaagccctgaccagcctctccctcgcaggtttggacgtatacgccgccatgcccgtgcgcatcatcgacaccattatcggcgcatcccttgcctgggcggcggtcagctacctatggcccgactggaaatacctcacgctcgaacgcaccgccgcccttgccgtatgcagcaacggcgcctatctcgaaaaaatcaccgaacgcctcaaaagcggcgaaaccggcgacgacgtcgaataccgcgccacccgccgccgcgcccacgaacacaccgccgccctcagcagcaccctctccgacatgagcagcgaacccacaaaattcgccgacagcctgcaacccggctttaccctgctcaaaaccggctacgccctgaccggctacatctccgccctcggcgcataccgcagcgaaatgcacgaagaatgcagccccgactttaccgcacagttccacctcgccgccgaacacaccgcccacatcttccaacacctgcccgaaaccgaacccgacgactttcagacagcactgaatacactgcgcggcgaactcgacaccctccgcacccacagcagcggaacacaaagccacatcctcctccaacagctccaactcatcgcccggcagctcgaaccctactaccgcgcctaccgacaaattccgcacaggcagccccaaaacgcagcctga

SEQ ID NO: 64103 - DNA, 3834 bp, Neisseria meningitidis
atgaccacgactactgcccctcagcgtattcgagaaattccctataactatacttcttataccgaccgcgaaatcgtcatccgcctactgggcgatgaggcgtggcaaatcctgcaagacttgcgcggacagcgcaaaaccggacgttcggcacggatgctgtttgaagtgttgggcgatatttgggtggtcgtgcgcaatccgtatctggtcgatgatttgctggagcacccaaaacgccgcgccgcgctggtgcgggaaatgcgccaccgcttaaatgaaatccgcaaacgccgcgacgataatcggcaagtcgatgtgttggttgccgcagcagaaaaagcagtggagcgttttgatagcagttttgatgaaaccatccaaaaacgccatcaaattttggaacgcttaagcaaaattaccaagccgcacaacatcatgtttgacggattggcgcgcgtaacgcacgttaccgatgcgaccgactggcgcgtcgaatatccttttgtcgtcgtcaatcccgacacggaggcggaaatcgcgcctttggtgcgcgccttaatcgaattggacttggttattatcccgcgcggcggcggcacgggttataccggcggcgcggtacctttggacgcgaacagcgcggtcatcaataccgaaaaactcgacaagcatcgtggtgttgaatacgttgagctggcgggcttggacggcaagcatccgattatccggtgcggagcgggcgtagtaacccgacgagtggaagaaaccgcgcatcaggcaggtttggtgttcgccgtcgatccgacttccgccgacgcgtcctgcgtgggcggcaatgtggcgatgaacgcgggcggcaaaaaagccgtactgtgggggacggcgttagacaaccttgcctgctggcagatggtcaacccgcagggtgaatggctgcgcatcgagcgcgtgcgccacaatttcggcaaaatccacgacgaagaaaccgccgtattcgacgttcacacgctggattcagacggcctcaatatcgttaaaaccgaacgcttggaaattcccggccacaaattccgcaaagtcggtttgggcaaagacgttaccgacaaattcttgagcggcctacccggcgtgcagaaagaaggcacggacggcatcatcaccagcgtcgccttcgtgttgcacaaaatgccgaaacacacgcgcaccgtgtgtatggagtttttcggtacggtcgccaccgctacgccttctatcgtcgaaatccgcgatttcctgcttgcccacgacagcgtgcggctggcgggtttggaacatttggactggcgttacgtccgcgccgtcggctacgcaaccaaagcggcgggcaagggacggccgaaaatggtcttgctggcggacgtggtttccgacgacgaagccgccgtagaggcagccgccgaacacatttgcgaacttgcccgcgcccgcgatggcgaaggctttatcgccgtgtctcccgaagcgcgcaaaaccttttggctcgaccgcagccgcaccgccgccatcgccaagcacaccaacgcctttaaaattaacgaagacgtggtcatcccactcgaaaggctcggcgagtattcagacggcatcgaacgcatcaacatcgagctttccatccaaaacaaactcaaactctgtgccgcattggagcaatatctttcgggcaaactccccatcgacaaaatgggaacagacctgccgaccgccgaactgttgggcgaacgcggcaaacacgcccttgcccacgtttccgccgtcaaagcgcgttgggaatggctgcttgccaacttggacgcgccgcttgccgactataaagcacgctatggctcagccgtccacgccgcgcccgaagccaaagacaatgaaagctgctttaccgcattccgcgatttccgcctgcgcgtgtctgtcaaagcggacgtaatgaagccgctttctgaaatcttcagcggcaaaaccgacaccaaaattatccaaggcttgggaaaaatccacgcaaaaaccgtacgcagccgcgtcttcgtcgccctgcatatgcacgccggcgacggcaacgtccacaccaacatccccgtcaattcggacgatgccgaaatgcttcagacagcctaccgttcggtcgaacgcattatgaaaatcgcccgttcgctcggaggcgtgatttcgggcgaacacggcatcggcatcaccaagctcgaatttttgaccgatgaagatttgcaaccgttttggaactacaaacaccaagtcgatcccaaacacaccttcaaccgtcacaaactgatgaaaggctcggacttaagcaacgcctatacgccatccttcgagcttttaggtgcggaatcgttgattatggaaaaatcagacctcggtaccatcgccgattccgtcaaagactgcctgcgctgcggcaaatgcaaacccgtctgctctactcacgttccgcgtgccaacctgctgtacagtccgcgcaacaaaatcctcggcgtaggcttattgaccgaagccttcttatacgaagaacaaacccgccgcggcgtttccatcaaacactttgaagaactcatggacatcggcgaccactgcaccgtgtgccaccgctgcgtcaaaccctgccctgtcaacatcgacttcggcgacgttaccgtagccgtccgcaactaccttgccaattccggccacaaacgctttgcgccggcggcttcaatgggtatggcattcctaaacgcgaccggtcctaaaaccatcaaagccctgcgcgccgcgatgatacagaccggcttccccgcgcagaactttgcctacaaaatcggcaagcttcttccgatcggcactaaaaagcaaaaagccgaacccaaagccactgtcggcaaagccccgattaaagaacaggttatccatttcatcaaccgcccactgcccaaaaacgtacccgccaaaacaccgcgctccttattgggcatcgaagacggcaaaagcatccccatcatccgcaaccccgccgcgcccgaagatgccgaagccgtgttctacttcccgggttgcggctctgagcgtctgttcagccaaatcggacttgccgttcaagccatgctctggcacgtcggcgtacaaaccgtcctgccgcccggctatatgtgttgcggctatccgcaagacgcgggcggcaacaaggctaaagccgaagaaatgagcaccaacaaccgcgtggctttccaccgtatggcgaacaccctcaactacctcgacattaagaccgtcgtcgtcagttgcggcacttgttacgaccagctcgaaaaataccgctttgaagaaatcttccccggctgccgcatcatcgacatccacgaatacctgctcgaaaaaggcgtgaaactcgacggcgtgaaaggtcagcaatacctctaccacgacccctgccacacccccatcaaaaccatgaacgccacccaaatggccagcagcctgatggggcagaaagtcgttttaagcgaccgctgctgcggcgaatccggtatgtttgcagtcaaacgaccagacatcgccactcaggtcaagttccgcaaacaagaggaaatcgagaaaaacctcaaagagctgccgcagggcgaacccgtcaaaatgctgacctcctgccccgcctgcctgcaaggcttgagccgctacgccgacgacaacaatatgcctgccgactacatcgtcatcgaaatggcgaaatacatcctcggcgaaaactggctggatgagtttgtaaaaaaagccaacaacggcggtgtagagaaagtgttgctgtaa

SEQ ID NO: 64104 - DNA, 801 bp, Neisseria meningitidis
atgaacgcgttcaacctcatcatcatcggcgacgaaatcttacacggcagccgccaagacaagcatttcgtctttttcaaatccctgctcgaatccaaagggctgaagctcaatcaggtgcaatatctgcccgacgaacccgatttgctggtcaggcaactgcgccgcagcttttcagacggtataccgacgtttgttaccggcggcatcggcgccacgcccgacgaccacacgcgccaagcggccgccgccgctttggagttgcccgtcgtccgccatcctgaagccgccgggtttatcgaaggcataacccagaaacgcggcgagccgcttgattcgccggaacacgcccaacgcctgaaaatggcagattttcccgaaggcgcggaattggtgcccaatccgtttaacaacatcgccggattttccatccgcgagcattattttttccccggcttccccgtgatggcgcacccgatggcggaatgggtattggaaacttattacgccgaccgcttcaaccaaaccgaacgcggcagccgcagcgtgtatgtgttcgagcagcccgaatcgcgcattacgccgcttatggagtatatcgagcaaacttatctcggggtgcgttcgtacagcctgcccagcgtcggttggacgcattcagacggcacgcaggtcaaaccgcacattgagttcggcatcaaagccgaaggagaagccgtcaaccttttggacgcggcgtgggcggaagtgttgcacagcttggaaggattgggagcagagctgaaaaatcgggtaaactga

SEQ ID NO: 64105 - DNA, 249 bp, Neisseria meningitidis
atggcttcaagcaacgtaaacaatgaaatcaaaggcaaaaaactctccctgtgggccaagcgtcaaaacggttcggtaaaatggttctgcggacagccggttgcgcgcgccgccaaagacgacaccatcaaagccgccaccgacaccaccaccaacatcaacaccaagcacctgccgtcaacctgccgcgatgattcatctgctgtttgcatagaaacaccacctacggctttctataaaaatacctaa

SEQ ID NO: 64106 - DNA, 489 bp, Neisseria meningitidis
atgctcaaaataaccctaattgcggcgtgtgcggaaaacctgtgcatcggggcgggcaatgctatgccttggcacatccccgaagatttcgcatttttcaaagcctataccttgggcaaacccgtcattatggggcggaaaacgtgggaatccctgcccgtcaaacccctgcccggacggaggaacatcgtcatcagccggcaggcggattattgcgcggcaggcgcggaaactgtggcaagtttggaggcggcattggcattgtgcgccagcgcggaagaaaccgtcattatgggcggcgcgcagatatacggacaagcgatgccattggcgaccgatttgcggataaccgaagtggatttgtctgtggaaggagatgcatttttcccagaaatagaccggacgcattggaaagaagcagagcggacggaacgccgtgtaagcagcaaaggcacgagctatgcttttgtgcattatttgagatattga

SEQ ID NO: 64107 - DNA, 756 bp, Neisseria meningitidis
atggattcttttttcaaaccggcagtttgggcggttttgtggctgatgtttgccgtccgccccgcccttgccgacgagttgaccaacctgctcagcagccgcgagcagattctcagacagtttgccgaagacgaacagcccgttttacccatcaaccgagcccccgcccgacgggcgggcaatgccgacgaactcatcggcagcgcgatggggcttaacgaacagcccgttttacccgtcaaccgagtccccgcccggcgggcgggcaatgccgacgaactcatcggcaacgcgatggggcttaacgaacagcccgttttacccgtcaaccgagcccccgcccggcgggcgggcaatgccgacgaactcatcggcaacgcgatgggacttttgggtattgcctaccgctacggcggcacatcgatttctaccggttttgactgcagcggcttcatgcagcacatcttcaaacgcgccatgggcatcaacctgccgcgcacgtcggcagaacaggcgcggatgggtacgccggttgcccgaagcgaattgcagcccggggatatggtgtttttccgcacgctcggcggcagccgcatttcccatgtcggactttatatcggcaacaaccgcttcatccacgcgccgcgcacggggaaaaatatcgaaatcaccagcctgagccacaaatattggagcggcaaatacgcgttcgcccgccgggtcaagaaaaacgacccgtcccgctttctgaactga

SEQ ID NO: 64108 - DNA, 1263 bp, Neisseria meningitidis
atgtcaaacacacaaaaacagcttgcccttgccaaagcggcaaaaaaatccgtcaacacggcggatacggaagaaaaaaaccgcgcgctgtttgctatggcggacagcttggaagcggcggcggcagatattttggcggcaaaccgtcaagacttggaagccgcggcaggcaacattcccgaaagcatgaccgaccgccttttgttggacggcaaacgcatttgcgcgatggcggacggcatcagggcggttgccgcgctgcccgaccccgtgggcgaaatactggaaacctcgactttgcccaacggcttggaaatcgtcaaaaagcgcgtggcgatgggcgttatcggcattatttacgaaagccgcccgaacgttacgtccgatgcggcggctttggcactgaaaagcggcagcgcggtcgtactccgcagcggcaaagatgcattccaatccgcacgcgccatcgttgccgccctgaaaacggggttggcacaaacccgcatcgaccccgacgcgctccagttgattgaagacaccgggcgtgagggcagttacgaaatgatgagggcgaaagattatctagacctgctgattccgcgcggcggggcggggctgatacgggcggtggttgagaatgccgtcgtgccggtcattgaaacggggacgggcattgtccacatctacgtcgataaagatgcggacttagaaaaggcaatccgcattgtccgcaacgccaaaaccagccgtccgtccgtgtgcaactcgatggaagtgctgctggtgcatgaagacattgctgccgacttcctgcccaagctcgaacggctgttggttcgcgaccgtatagaagccggactgccgcccgtccgcttccgtttggatccgcaggcggcgcggcatatcggcggcgaagcggcgggtgcagacgatttcgataccgagtttttagactacatcctcgccgtgaaaaccgtcgcttcggtcgaagaggcggtcgggcacatcgaaacgcacggcacgcaccattcagacggcatcgttaccgaaaaccgccacgctgcggactatttcacgacccatatcgattctgccgccgtgtatatcaacgtgtccacgcgctttaccgacggcggcgaattcggcttgggttgcgaaatgggcatctccacgcaaaaactccacgcccggggcccgatgggtttaaaagagctgacgagttacaaatacatcgtacaaggcacgggacaggttagggaataa

SEQ ID NO: 64109 - DNA, 522 bp, Neisseria meningitidis; identical to SEQ ID NO: 39913

SEQ ID NO: 64110 - DNA, 171 bp, Neisseria meningitidis
ttgggtctaggctcaacctgcgtttgctgcatctttggaagaaatagtggattcgaaaaaataggaagaattctgattaatggtatgcgaggtgtagcagtggggactgttgctggtggcataaatggttatgcaggttctacggggaagaacactgacattcgccgttaa

SEQ ID NO: 64111 - DNA, 360 bp, Neisseria meningitidis
atgattaaattggatttaaaaagcataaatttatatgatattgactttgaaaaatttacccccgaaattccagataattttcatagatggatagatttggatatcggaatcgaaggagaacaaggctcatctattttttcactttgcatttgttctcctaaatggatttcccatcattgtaataaagaaggttttttttggtctaatgcattaatattagaacagtttgatcataagattattaaaagtgaaattgataaaatattagaatattgctcaaaagaaacttgggatttgacactttcaaacttattacgatttttttcttgggaattcgaagattacaatccaaacacataa

SEQ ID NO: 64112 - DNA, 435 bp, Neisseria meningitidis; identical to SEQ ID NO: 36184

SEQ ID NO: 64113 - DNA, 435 bp, Neisseria meningitidis; identical to SEQ ID NO: 40438

SEQ ID NO: 64114 - DNA, 126 bp, Neisseria meningitidis; identical to SEQ ID NO: 39360

SEQ ID NO: 64115 - DNA, 291 bp, Neisseria meningitidis; identical to SEQ ID NO: 45911

SEQ ID NO: 64116 - DNA, 186 bp, Neisseria meningitidis; identical to SEQ ID NO: 37143

SEQ ID NO: 64117 - DNA, 279 bp, Neisseria meningitidis; identical to SEQ ID NO: 37183

SEQ ID NO: 64118 - DNA, 411 bp, Neisseria meningitidis; identical to SEQ ID NO: 54400

SEQ ID NO: 64119 - DNA, 402 bp, Neisseria meningitidis
atgaaattaaaaagcttagatttcccaactggctatttctattttgataatgcagcaataaactttgataaagtagaagttatagccgttggttatagaaatacggataaaaccataaaaatttctattgaagatgttattcattttaggattgttgatgaatcatattttatagatacttttatggatttaatttcggaagatgcagatagagctttgcttcatgaaaatggtggtcaatctttttttgaacttcttaatgagcgttatgcggaatggatattaaaagaaagttattttcctttgaatagagaattctttaaatactatatttttatgtttgagcaaacattcatagaaataattggttctagtgcaacgtattcaattattgagggctag

SEQ ID NO: 64120 - DNA, 462 bp, Neisseria meningitidis
atgaatattattatggactcaacaagaaaatttgggattttatgggaagaaaactctgaatgtaatggttttatttatggaaaaattcagataataataggagagaatatatatcctaagatatgcccatatggatattttacgctaaatacagtttttaatagtttgaagtcatcctttgaagagaagtattatgcaggtggaaacaatggtttagattttagagagcaactatttgatatagataaatataattctctggaattatgcaatatattttctattgatactacatatatgagtggagggggtaattgtgaaatagattgtttagtattagaaatgggatattctggtgaggaagagagacttttttatagttttgacaatgggaaaaactttaaagaaatcaggtataagaaaggtacagttgagtctgttatttttcaattgaatctataa

SEQ ID NO: 64121 - DNA, 138 bp, Neisseria meningitidis; identical to SEQ ID NO: 39930

SEQ ID NO: 64122 - DNA, 393 bp, Neisseria meningitidis; identical to SEQ ID NO: 60138

SEQ ID NO: 64123 - DNA, 1504 bp, Neisseria meningitidis
atgagtcgtgaaatgttacagctggcagaagcactggcaagcgaaaaaaacgttgatgcggaagtcgtcttccaagcactggaattcgccctgtctaccgccgccaagaaaaaggcagaccgcgaacacatggacgtgcgcgtccaaatcaaccgcgacaccggcgaataccaaaccttccgccgctggctgattgtcgccgatgaagactatacctatcccgatgtcgaaaaaaccatcgaggaaatccaagaggaaattcccggcactaccatccaaatcggcgaatactacgaagagcagctgcccaacgaaggcttcggccgccaagccgcgcaaaccgccaaacaaatcatcctgcaacgcatccgcgatgccgagcgcgagcagaatctgaacgagtttctcgccgtcaaagaagacatcgtgtctggcacggtcaaacgcgtcgaacgccacggcatcatcgtcgaagtcgttgccggcaaactggacgcgctgattccgcgcgaccaaatgattccgcgcgaaaacttccgcagcggcgaccgcatccgcgccctcttcctgcgcgtcgaagaaatcggcaacaccggccgcaaacaagtcatcctgagccgtacttccggcgatttcctcgtcaaactgtacgccaatgaagtacctgaaattgcagacggcatgcttgaaatccgcgctgtcgcccgcgacccgggccagcgtgccaaagtcgccgtcaaagccaacgaccagcgcatcgatccgcaaggcacctgtatcggcgttcgcggttcgcgtgtcaatgccgtcagcaacgaattgtccggcgagcgcatcgacgttgtcctttggtcgcccgagcctgcccaattcgtcatgagcgcgctctcacccgccgaagtcagccgcatcgtcatcgacgaagacaaacacgccgtcgatgtcatcgttgccgaagaccagctcgcgctcgccatcggacgcggcggtcaaaacgtgcgccttgcttccgacctgaccggctggcagctcaacatcatgacttccgccgaggcagacgaacgcaatgcggcagaagatgccgccatccgccgcctgtttatggattacttgaacgtggacgaagaaaccgccgacgtactggttcaggaaggttttgcaaccttggaagaagtcgcctatgttcctgccgccgaactgcttgccattgaaggatttgacgaagaaatcgtcgatatgctccgcaaccgcgcccgcgatgccatcctgaccatggcgattgccgccgaagaaaaactgggcgaagtgtccgacgatatgcgcaacctcgaaggcatagatgccgatatgctccgcagccttgccgaagcaggcattactacccgcgacgacttggcagaactgtccgtggacgaactgattgaaatcaccggtgtaaacgaagaaaccgcaaaagccgtcatcctgaccgctcgcgaacactggtttaccgaagacaaataaa

SEQ ID NO: 64124 - DNA, 390 bp, Neisseria meningitidis; identical to SEQ ID NO: 37209

SEQ ID NO: 64125 - DNA, 174 bp, Neisseria meningitidis; identical to SEQ ID NO: 36913

SEQ ID NO: 64126 - DNA, 558 bp, Neisseria meningitidis; identical to SEQ ID NO: 50305

SEQ ID NO: 64127 - DNA, 396 bp, Neisseria meningitidis; identical to SEQ ID NO: 37459

SEQ ID NO: 64128 - DNA, 345 bp, Neisseria meningitidis; identical to SEQ ID NO: 49922

SEQ ID NO: 64129 - DNA, 306 bp, Neisseria meningitidis; identical to SEQ ID NO: 36883

SEQ ID NO: 64130 - DNA, 219 bp, Neisseria meningitidis; identical to SEQ ID NO: 36291

SEQ ID NO: 64131 - DNA, 297 bp, Neisseria meningitidis; identical to SEQ ID NO: 37913

SEQ ID NO: 64132 - DNA, 363 bp, Neisseria meningitidis; identical to SEQ ID NO: 37674

SEQ ID NO: 64133 - DNA, 438 bp, Neisseria meningitidis
atggtggaagctaaaatttttattctatacggtgcagccaacaaaggtaagagtacgacactcaatacgctttttaatcagatttgttggaaattttctaaatttctagtcttttttgaaagacatggaaatggcttagattttgttgcagtatttgatcatgaaggtcagagaattggtttttattcatctggtgataatgaatacgaggttaggagaaatttatacaaactttattcgcataattgtgattttatttttggcacgtcaaggacacggggtggtagttgcgatgcagtaggatgttatgcagagttattgcatggcgatgtaaatataattaattggtgtgaaaagtttgagcctacagatgaagacaatgagcgtgctgttaaagagttatttaagtcatttaaaaatataataaatgagttatag

SEQ ID NO: 64134 - DNA, 375 bp, Neisseria meningitidis
atgattattcaaaatgaatttaatttatatcctagtaatatgcttcctgaaaggttttgttatcctgaaaagtatgttcgtatctctaacgatacatctttaataccttatattcagccacataattttcactggtggtttgagaattatggaacagaaggggcagaagtagcttatatatttagaaattctatcctgcctgatttaaatcttatcccattcgctagtaatggagaatgggaagcttattttgatggtaatgatgtaacaggaaatcctagggttattgtcattaatttagataatatagaaaaccatgaattttttaatagttttgaagagtggcttgaattagcaattaaggatacttggtaa

SEQ ID NO: 64135 - DNA, 369 bp, Neisseria meningitidis; identical to SEQ ID NO: 37026

SEQ ID NO: 64136 - DNA, 453 bp, Neisseria meningitidis; identical to SEQ ID NO: 45961

SEQ ID NO: 64137 - DNA, 429 bp, Neisseria meningitidis; identical to SEQ ID NO: 41701

SEQ ID NO: 64138 - DNA, 315 bp, Neisseria meningitidis; identical to SEQ ID NO: 37950

SEQ ID NO: 64139 - DNA, 396 bp, Neisseria meningitidis
atgatgtattcgtttgaagcgaatgcaaatgcagtaaaaatatctgaaactgtttcagttgataccggacaaggtgcgaaaattcataagtttgtacctaaaaatagtaaaacttattcatctgatttaataaaaacggtagatttaacacacatccctacgggcgcaaaagcccgaatcaacgccaaaataaccgccagcatttcccacgccggcgtattggcggggggcggcaaacttgcccgcttaggcgcgaaattcagcacaagggcggttccctatgtcggaacagcccttttagcccatgacgtatacgaaactttcaaagaagacatacaggcacgaggctaccaatacgacaccgaaaccgacaaatttgtaaaggtctcaggctaa

SEQ ID NO: 64140 - DNA, 417 bp, Neisseria meningitidis; identical to SEQ ID NO: 39888

SEQ ID NO: 64141 - DNA, 528 bp, Neisseria meningitidis; identical to SEQ ID NO: 43903

SEQ ID NO: 64142 - DNA, 318 bp, Neisseria meningitidis; identical to SEQ ID NO: 43905

SEQ ID NO: 64143 - DNA, 864 bp, Neisseria meningitidis
atgagtgagattggtttggtaaagatctattctggaaaagtgcgcgatttatatgaaatcgacgataaacgtatgctgatggtcgcttccgaccgcctgtccgcgtttgatgtgattttggacgacccgattccgagcaaaggggagattctgacgcagatttccaatttttggtttaaaaaactggcgcatattatgcccaaccactttaccggtcaaacggtttacgatgttttgcctgaaaacgaagccaaagttttagaaaaacgcgccgtcgtggctaaaaagctcactccggtgaaagtagaggcgattgtgcgcggttatctggcaggcagcggttggaaagattatcaaaaaaccggctcggtttgcggtattcggctgcccgaaggtatgcaggaagcgcaacaactgcctgaagtgatttttacgccctcaaccaaagccgcagtcggcgatcacgatgaaaacatcagctttgaagaatgcgaacgcagtatcggaaaagaattggcggcggaagtgcgcgccaaagcgattcagctttatacagaagcggcggaatatgctaaatcgcgcggcatcatcatttgcgataccaaatttgaattcggtttggatgaagaaggtacgctgacgctgatggatgaggtattgactcccgattcgagccgcttctggccggcggatcaatatgaagtcggcaccaatccgccgtcttttgacaaacaattcgtccgcgactggctggaacaaagcggttggaacaaaaaagcccctgcgccgaaagtgcctgccgatgtgattcagaaaactgtcgagaagtatcgggaagcattgactttgctgactcaggattga

SEQ ID NO: 64144 - DNA, 2256 bp, Neisseria meningitidis
atgggacagtacaagaagctgtggtacttgctgtttgccgttctggcggtatgctttaccattcttggctatatgggcagcgaggtttataagaaagccccgccttaccccgaacaggtcgtttccgcatccggcaaagtcttgatgacgaaagacgatattttggcaggtcagtctgcgtggcagagtaccggcggcatggaagtcggttcgattttgggtcacggcgcatatcaggctccggactggacggccgactggctgcatcgtgagttgtccgcctggttggatttgaccgcgcaacagacttacggcaaaaaattcgatgacgtttcccctgaagaacaagctgtcttgaaaacacgcttggctgacgaataccgtaatcaaagccgtattaaagaagacggcagcgtcgtcatcagcgatacgcgcgtgaaagccatcgaaagcatcctgccttattaccacggtgtttacggcgatgatcccgcgctgcaaaccacccgcgaacactttgcaatgaaaaacaacacattgccaagccaagaagcgcgtgaaaaactgttcgacttcttcttctggacttcttggtctgcttcgaccaaccgtcctgacgagacgttcacttataccaacaactggccgcacgagcctttgatcaacaatgtaccgactactgaaaactatatgtggtcgtttaccagtgtcgtactgctcttgatgggcatcggtttgttgatgtggggttattccttcctgaccaaacacgaggaagtggaagtgccgtctgaagacccgatttccaaaatccaactgaccccttcgcaaaaagcattgggcaaatacgtcttcctgacggttgccctgtttgtggtacaagtattgctgggcggtctgaccgcgcactacaccgttgaaggtcagggtttctacggcatcgatgaggcgttgggctttgaaatgtccgactggtttccctatgccctgacccgtacttggcacatccaatccgccatcttctggattgcaaccggctttttgacggcaggtttgttcctcgcgccgattgtcaacggcggcaaagatcccaagttccaacgtgcaggcgtgaacttcctctatatcgccctcttcatcgtggtcggcggttcttacgcgggcaacttcttcgcgttgacgcacatccttccccccgaattgaatttctggttcggacaccaaggttacgaatacctcgatttgggccgtttctggcaactcctgctgatggtcggtctgctgttgtggctgttcctgatgctgcgttgcaccatctccgcctttaaagaaaaaggcgtggacaaaaacctgctggcaatctttgtcgcttctatggtcggtgtgggcgtattctacgcaccaggcctgttctatggcgaaaaatccccgattgccgtaatggaatactggcgttggtgggtggttcacctgtgggtggaaggcttctttgaagtatttgccactgccgcttttgcctttgtcttctacaatatgggctttgtccgccgcagtaccgccacagcttctactctggccgctgccgccatctttatgttgggcggcgttccgggtatgctgcaccacctgtacttctccggctctacctccgcctctatggcaatcggtgcctgcttctccgctttggaagtcgtgccgctggtgttgctgggccgtgaagcatacgaacactggtcttaccaacacctgtccgactgggcgaaacgcctgcgttggccgctgatgtgcttcgtggcagtcgccttttggaatatgatcggtgccggcgtattcggcttcctgatcaatccgccgatttccctgttctatatccaaggtttgaacacttctgccgttcacgcgcacgccgccttgtttggtgtgtacggtttcttggcattgggcttcgtattgctggttgcccgttatttgaaaccgaacgcgcagtttgacgacaaactgatgacttggggcttctggctgctcaacggcggcttggtcggtatgattgccatcagcctgctgcctgtcggcgcgattcaggcatacgcctccatcacgcacggtctgtggtatgcccgcagcgaagagttcctgcaaatggaaatcctcgataccttgcgttgggtacgtacggcagctgacttggtctttatcggcggtgcaatctgcgttgccatccaagccactaaaatcgtattcggccgcgacaaataa

SEQ ID NO: 64145 - DNA, 318 bp, Neisseria meningitidis; identical to SEQ ID NO: 45861

SEQ ID NO: 64146 - DNA, 375 bp, Neisseria meningitidis; identical to SEQ ID NO: 56062

SEQ ID NO: 64147 - DNA, 534 bp, Neisseria meningitidis; identical to SEQ ID NO: 37791

SEQ ID NO: 64148 - DNA, 354 bp, Neisseria meningitidis; identical to SEQ ID NO: 36586

SEQ ID NO: 64149 - DNA, 369 bp, Neisseria meningitidis; identical to SEQ ID NO: 39932

SEQ ID NO: 64150 - DNA, 2112 bp, Neisseria meningitidis
atgaaaatatcatttcatttagctttattacccacgctgattattgcttccttccctgttgctgccgccgatacgcaggacaatggtgaacattacaccgccacgctacctaccgtttccgtggtcggacagtccgacaccagcgtactcaaaggctacatcaactacgacgaagccgccgttacccgcaacggacagctcatcaaagaaacgccgcaaaccatcgatacgctcaatatccagaaaaacaaaaattacggtacgaacgatttgagttccatcctcgaaggcaatgccggcatcgacgctgcctacgatatgcgcggtgaaagcattttcctgcgcggttttcaagccgacgcatccgatatttaccgcgacggcgtgcgcgaaagcggacaagtgcgccgcagtactgccaacatcgagcgcgtggaaatcctgaaaggcccgtcttccgtgctttacggccgcaccaacggcggcggcgtcatcaacatggtcagcaaatacgccaacttcaaacaaagccgcaacatcggtgcggtttacggttcgtgggcaaaccgcagcctgaatatggacattaacgaagtgctgaacaaaaacgtcgccatccgtctcaccggcgaagtcgggcgcgccaattcgttccgcagcggcatagacagcaaaaatgtcatggtttcgcccagcattaccgtcaaactcgacaacggcttgaagtggacggggcaatacacctacgacaatgtggagcgcacgcccgaccgcagtccgaccaagtccgtgtacgaccgcttcggactgccttaccgcatggggttcgcccaccggaacgattttgtcaaagacaagctgcaagtttggcgttccgaccttgaatacgccttcaacgacaaatggcgtgcccaatggcagctcgcccaccgcacggcggcgcaggattttgatcatttctatgcaggcagcgaaaatggcaacttaatcaaacgtaactacgcctggcagtagactgacaacaaaaccctgtcgtccaatttcacgctaaacggcgactacaccatcggccgttttgaaaaccacctgaccgtaggcatggattacagccgcgaacaccgcaacccgacattgggtttcagcagcgcctttactgcttccatcgatccatacgaccgagcaagctggccggcttcgggcagattgcagcctatcctcacccaaaaccgccacaaagccgactcctacggcatctttgtgcaaaacatcttctccgccacgcccgatttgaaattcgtcctcggcggccgttacgacaaatacacctttaattccgaaaacaaactcaccggcagcagccgccagtacagcggccactcgttcagccccaacatcggcgcagtgtggaacatcaaccccgttcacacactttacgcctcgtataacaaaggtttcgcgccttatggcggacgcggcggctatttgagcatcgatacgtcatcttctgccgtgttcaacgctgaccccgagtacacccgccaatacgaaaccggcgttaaaagcagttggctggacgaccgcctcagcaccacattgtccgcctaccaaatcgaacgcttcaatatccgctaccgccccgacgcacaaaataatccctacacttgggcagtcggcggcaaacaccgttcgcgtggcgtggaattgtccgccatcgggcaaatcatccccaaaaaactctatctgcgcggttcgttgggcgtgattcaggcgaaagtcgttgaagacaaagaaaatcccgaccgagtgggcatccatttgaataacaccagcaacgttaccggcaacctgtttttccgttataccccgaccgaaaacctctacggcgaaatcggcgtaaccggtacaggcaaacgctacggttacaactcaagaaataaagaagtgactacgcttccaggctttgcccgagttgatgccatgcttggctggaaccataaaaatgttaacattacctttgccgcagccaatctgctcaatcaaaaatattggcgttcggactctatgccgggtaatccgcgcggctatactgcccgggtaaattaccgtttctga

SEQ ID NO: 64151 - DNA, 1176 bp, Neisseria meningitidis; identical to SEQ ID NO: 46694

SEQ ID NO: 64152 - DNA, 1164 bp, Neisseria meningitidis; identical to SEQ ID NO: 38788

SEQ ID NO: 64153 - DNA, 1266 bp, Neisseria meningitidis; identical to SEQ ID NO: 47268

SEQ ID NO: 64154 - DNA, 558 bp, Neisseria meningitidis; identical to SEQ ID NO: 45978

SEQ ID NO: 64155 - DNA, 666 bp, Neisseria meningitidis; identical to SEQ ID NO: 39840

SEQ ID NO: 64156 - DNA, 1218 bp, Neisseria meningitidis; identical to SEQ ID NO: 39744

SEQ ID NO: 64157 - DNA, 501 bp, Neisseria meningitidis; identical to SEQ ID NO: 37882

SEQ ID NO: 64158 - DNA, 4176 bp, Neisseria meningitidis
atgaatttgttgaacttatttaatccgttgcaaactgccggcatggaagaagagtttgatgccattaaaatcggtattgcctctcccgaaaccatccgctcatggtcttatggcgaagttaaaaaacctgaaaccatcaactaccgtacgttcaaacctgagcgtgacggtttgttctgtgccaaaatctttggcccggtcaaagactacgaatgcttgtgcggaaaatacaaacgcttgaaatttaaaggcgtaacgtgtgaaaaatgcggcgtggaagtaaccctgtccaaagtgcgccgcgaacgcatgggccatatcgaattggctgcgcccgtcgcacacatttggttcttaaaatccctgccttcccgcttgggtatggtactggacatgactttgcgcgatatcgaacgcgtattgtactttgaagcatttgtggtaaccgatcccggtatgactccgctgcaacgccgccaattgctgactgaagacgattactacaacaagctggacgaatacggcgacgatttcgatgccaaaatgggtgcggaaggtatccgcgaattgctgcgtaccctgaatgtagcgggcgaaatcgaaatcctgcgccaagagttggaatcgaccggttccgacaccaaaatcaaaaaaatcgccaaacgcttgaaagtattggaagccttccatcgttccggtatgaaactggaatggatgattatggatgtgctgccggtattgccgcctgatttgcgtccgttggttccattggatggtggtcgttttgccacttccgatttgaacgatttgtaccgccgcgttattaaccgtaacaaccgtctgaaacgtctgttggaactgcatgcgcctgacatcatcgtccgcaacgaaaaacgtatgttgcaagaagcagttgactcgctgttggataacggccgtcgcggtaaagccatgaccggtgccaacaaacgtccgctgaaatcattggcagacatgattaaaggtaaaggcggccgcttccgtcaaaacctgctgggtaaacgtgtggactactccggccgttccgtgattaccgtaggtccatacctgcgcctgcaccaatgtggtctgccgaaaaaaatggctttggagttgttcaaaccattcattttccacaaattggaaaaacaaggtttggcttctaccgttaaagctgcgaaaaaactggtagaacaagaagtacctgaagtatgggatatcttggaagaagtgatccgcgaacatccgattatgctgaaccgtgcgccaaccctgcaccgtttgggtattcaagcgttcgaacctatcctgattgaaggtaaagcgattcagttacacccattggtgtgtgccgcatttaacgccgactttgacggtgaccaaatggctgtacacgttccattgagcttggaagcacaaatggaagcgcgcaccctgatgctggcttcaaacaacgtattgtctccagccaacggcgaaccgattatcgtaccttcccaagacatcgtattgggtttgtactacatgacccgcgaccgtatcaatgccaaaggcgaaggcagcctgtttgccgatgtgaaagaagtgcatcgtgcataccataccaaacaggtcgagctgggtacgaaaattaccgtacgtctgcgcgaatgggtgaaaaacgaagcaggtgagtttgaacctgtcgttaaccgttacgaaacaaccgtcggccgtgcattgttgagcgaaatcctgccgaaaggcctgccgtttgaatatgtcaacaaggcattgaagaaaaaagaaatttctaaactgattaacgcatcgttccgcctgtgcggcttgcgcgatacggttatctttgctgaccacctgatgtacaccggtttcggatttgcggcaaaaggcggtatttccattgccgttgacgatatggaaatcccgaaagaaaaagcggccttgctggctgaagccaatgccgaggttaaagaaatcgaagaccaataccgtcaaggtttggttaccaatggcgaacgttacaacaaagtagtggatatttggggtcgtgccggcgataaaatcgctaaagcgatgatggataacttgtccaaacaaaaagttatcgaccgtgccggcaacgaagtcgatcaagagtcattcaactccatttatatgatggcggactccggtgcccgtggttctgcagctcagattaaacagttgtccggtatgcgtggcttgatggcaaaacctgacggctcgattattgaaacgccgattacctcaaacttccgtgaaggtctgaccgtattgcaatactttattgcgacccacggtgcgcgtaagggtttggcggataccgcattgaaaaccgcgaactccggttacctgactcgtcgtctggtagacgtaactcaagatttggtcgttgttgaagacgattgcggtacttcagacggctttgtcatgaaggcagtggtacaaggcggtgatgtgattgaagcattgcgcgatcgtattttgggtcgtgttaccgcgtctgacgttgtcgatccgtcaagtggcgaaaccttggttgaagccggtacgttgctgactgaaaaactggtggatatgatcgaccaatccggtgtcgatgaagtcaaagtccgtacgccgattacttgtaaaacccgtcacggcctgtgtgcacactgttacggtcgtgacttggcacgcggcaaactggttaacgccggtgaggcagtcggtgtgattgctgcacaatccattggcgaaccgggtacccagttgaccatgcgtacgttccacatcggtggtgcggcatcccgtgcggcagcagccagccaagtagaagccaaatccaacggtacagctcgtttcagcagccaaatgcgttacgttgccaacaacaaaggcgagttggttgtcatcggccgttcttgtgaagtcgtgattcacgacgatatcggtcgcgaacgtgaacgtcacaaagtaccttacggtgccatcctgctggtacaagacggtatggccattaaagccggtcaaaccttggcaacctgggatccgcatacccgtccgatgattaccgaacacgcaggtatggtgaaattcgaaaacgtggaagagggtgtaaccgttgccaaacaaactgacgatgtaaccggtttgtccactttggtggtgattgacggtaaacgccgttccagcagcgcgtccaaactgctgcgtccgactgtaaaattgttggatgaaaacggcgtggaaatctgtattcccggtacgtccactccggtttcgatggcattccccgttggtgcggtgattaccgtacgcgaaggtcaggaaatcggtaaaggcgacgtattggcgcgtatcccgcaagcctcttccaaaacccgcgacattaccggtggtctgccgcgcgttgccgaattgtttgaagcacgcgtgccgaaagatgccggtatgttggcggaaattaccggtaccgtttccttcggcaaagagaccaaaggcaagcaacgtctgattgttactgacgtggacggtgtagcatacgagaccttgatttccaaagagaaacaaattctggtacacgacggtcaagtggtaaaccgcggtgaaaccatcgtggacggcgcggtcgatccgcacgatattctgcgtttgcaaggtatcgaagcactggcacgctacattgtccaagaggtgcaagaggtttaccgtctgcaaggtgtgaagatttctgataaacacatcgaagtcatcatccgtcaaatgttgcgccgtgtgaacattgcggatgccggcgaaaccgggttcattaccggagagcaggtcgaacgcggcgatgtgatggcggccaatgaaaaagctttggaagaaggcaaagaaccggcgcgttacgaaaacgtattgctgggtattaccaaagcttccctgtctaccgacagcttcatttctgctgcatcgttccaagaaacgacccgtgttctgaccgaagccgcgattatgggcaaacaagacgaactgcgcggtttaaaagagaacgtcatcgtcggccgcctgattcctgccggtaccggtttgacttatcaccgcagccgtcatcagcaatggcaaggggtagagcaggagactgctgaaacccaagtaacggatgaataa

SEQ ID NO: 64159 - DNA, 321 bp, Neisseria meningitidis
atgggtatgaatcaacaacgtttgactcaagtgattttggcacctatcgtttctgaaaaaagcaacgtattggctgaaaaacgcaaccaaatgacgtttaaagtcttggcaaatgcaaccaaacctgaaatcaaagcggctgttgagctgctgtttggtgttcaagttgcttctgtaactaccgttacaactaaaggcaaaactaagcgttttggtcgtactttgggccgccgcagcgatgttaaaaaagcttatgtaagcttggctgccggtcaagagttggatttggaagccgctgctgcagctgcagataaggaataa

SEQ ID NO: 64160 - DNA, 279 bp, Neisseria meningitidis; identical to SEQ ID NO: 36930

SEQ ID NO: 64161 - DNA, 621 bp, Neisseria meningitidis
atggcacgttatattggccctaaatgtaagttggcacgtcgcgaaggtacggatttgtttttgaagagtgcgcgccgctctttggattctaaatgtaaaattgattccgctcccggtcagcatggtgcaaaaaaaacgcgtttgtcagactatggtttgcagttgcgtgaaaaacaaaaaatccgccgtatttatggcgtattagaacgtcagttccgtcgttatttcgcagaagctgatcgtcgtaaaggttctaccggcgagttgctgttgcagttgctggaatctcgtttggataatgtcgtttatcgtatgggtttcggttctacccgagctgaagcaagacagcttgtttctcataaggcgatagttgtgaatggacaagttgtcaatattccttctttccaagtgaaagctggtgatgttgtctcagttcgtgaaaaagccaaaaaacaggtacgtattcaagaagcattgggtttggcaactcaaatcggcttgccgggttgggtttctgtagatgcggataagcttgagggtgtgttcaaaaacatgccggatcgctcggaattgaccggtgatattaatgaacagctggtggtagagttctactctaaataa

SEQ ID NO: 64162 - DNA, 714 bp, Neisseria meningitidis; identical to SEQ ID NO: 37885

SEQ ID NO: 64163 - DNA, 2760 bp, Neisseria meningitidis
atgaaaagaatgttattcaacgcaacgcaggccgaagagctacgcgttgccatcgtcgacggacaaaacctgctggatttggacatcgaaacgctgggcaaagaacagcgcaaaggcaatatctacaaaggcatcattacccgcatcgagccgtcgctggaagcgtgtttcgtcgattacggaaccgaccgccacggctttttgccgtttaaagaagtctcccgctcatacttccaagactacgaaggcggacgcgcgcgcatccaagacgtgctcaaagaaggcatggaagtcatcgtccaagtcgaaaaagacgagcgcggcaacaaaggcgcggcactgaccaccttcatcagcctcgccggacgctatctggtattgatgccgaacaacccgcgcggcggcggcgtatcccgccgtatcgaaggcgaagagcgtcaagaactcaaagccgccatggcggaactcgacattccaaacggcatgagcattattgcccgcaccgcaggcatcggccgcagcgcggaagagttggaatgggatttgaactacctcaaacaactctggcaggcgattgaagaagcaggaaaggcgcatcatgacccctacctgctctttatggaaagctcgctgctcatccgcgccatccgcgactatttccgccccgacatcggcgagattttggtggacaatcaagaagtttacgaccaagttgccgagttcatgagctacgtcatgccgggcaatataggccgtctgaaactctacgaagaccacacgccgctgttttcccgcttccaaatcgaacatcaaatcgaaagcgcgttttcgcgcagcgtcagcctgccttccggcggcgcgatcgtgatcgaccacaccgaagccctcgtttccatcgacgtgaactccgcacgcgccacacgcggcgcggacatcgaagacaccgcgttcaaaaccaatatggaagccgccgaagaagtcgcccgacaaatgcgcctgcgcgacttgggcggtttggtcgtcatcgacttcatcgatatggaaaaccccaaacaccagcgcgatgtggaaaacgtcctgcgcgacgcgctcaaaaaagaccgcgcccgcgtgcagatgggcaaactgtcccgtttcggacttttagaattgagccgccaacgtttgaaaccggctttgggcgaaagcagccatgttgcgtgtccgcgctgtgccggcaccggcgtgattcggggcatcgaatccaccgccctgcacgttttgcgcatcattcaagaagaagcaatgaaagacaacaccggcgaagtgcgcgcacaagtgcccgtcgatgtcgccaccttcctgctgaacgaaaaacgcgccgagctgtttgcgatggaagagcgtttggatgtcaacgtcgtcctgattccgaacatccacctcgaaaatccgcactacgaaatcaaccgcatccgcaccgacgacgtagaagaagacggcgaaccgagctacaagcgcgttgccgagccagaagaagacgaatccgccaaaccgttcggcggcgaaaaagccaaagccgcccgtcccgaacccgccgtcaaaggcgtgcgccacaccagccccgccccgactgccgcccccgagaaaaaaacctcctggtgggacagcttcaaagcttggctcaaacgcattttcggcggcagcgaaacccaagccgcgcccgctgccgaaacctccgaaaaacgcagcacggcaaaccgcagcggcagccgcgccaacaaccgccgccaaaacccgcgccgcagcaaacgcgaaggcagcaaagtggaagtccgcgaagtggcaggcaaaactgccggacaggaagcgcgtgccgacaaagccgaaacgcgcaacaacggcaaccgccgccgcaacgaacgcggcgaccgtgccgccgaacgcgccaacgaagcggaaatccaagaccgcaacatacagcctgccgcaaccgttgcagatgccgcaccgtccgaaaccgaagtgcaaaccggaaaacgccgccgcaacggcagccgcagcgaacgcggccaaaccgcgccggaaaccgccgccgttgccgaaacaaccgttcagacagcggaaaacacgccgtccgaaccgcataccgcagaagacaaaggcagcaagcccaaatccgaacgcaaccgccgcgaacgcgacagccgagatgccaaagaacgccgcgagcgcaacaatcagcgcgaccgccgtcaaaacggcaaaaaacgcaatattccgtctgccgccaaaatcgagcagtacctgaatattcacgacaccgccgacaaagtccgttccgccgccgcacacgttttcggcgaaaccgacgcaaacgcgcccatcaccgtcagcattgccgaaccggttgcagaaagggacgttccgacagcatctcccgccgttccaaacaacgacgcaccggtttatgatgcggcagaaaaaatccgtcaggtcgttgccgccatcctgcccgaaggcgcggcaccggaagccgcggcacaggaaatgccgtctgaaaccgcaacctttacggctgcggcggaacaggcacgggaaaccgcacaaaccggcggactcgtcctgatcgaaaccgaccctgccgcattgaaggcatgggcggcacaacccgaagtccaagccggacgcggtttgcgccgttccgaacagcccaagccgtctgaagtcgcaaccgtcccaaccgaagaaatgatccaagtcgaaacccggcaaggctga

SEQ ID NO: 64164 - DNA, 291 bp, Neisseria meningitidis; identical to SEQ ID NO: 54697

SEQ ID NO: 64165 - DNA, 924 bp, Neisseria meningitidis
gtgcaaagcaagcagataaaaggcttcaagctttggaaatcttacgatgagcagttggagattctaagaagtagaggattgcagattgatgatgagaaaaaggcattaggatatttacgcaccattggttattaccgattaagcggttatttttactctttccgacaatttgctcctgaaagttctaagagcaggttggatgagtttattacagatactcgttttgaagatgtcaaaagcctttatatgttcgataagaaattgcggcaattggcattagatgcactggaaagaattgaagtagcgcttcgggtaaatattgcccatacattaggacggcatgacccattggcttacaaagatagcaaatattctgccacaggtttcgaccatgcggaatggctggataggtataacaggctggtcgagcgcgaaaagaaaaccggttttgttaaacatcatttggaacattatgccgacttacctgtttgggtagcctgcgaagtatgggatttcggcacgatgtctatgctgtataaagggatgttgaataaagataaagactctattgccaaattgtatcgtttgaaagacggtaagcatctgcaaacacatctgcacgcatttaactttatccgcaacgtttcggcacatcacagtcgattatggaatagggatattacttttaaagccagcttgaaaggtttgtctgatgcagaatggaaatcattgcctatcaataaaccgtttgtgtatttttgcctgatgaaacggatgttggatgttatttgtccgcgaaccgaatggggaaaccgtcttcttgctttactggatgagtttcccgatgtcgccaatgaagctgtaagtttgcgcgatatgggtttggaaaataatccgcgagactggagattgtggcagggataa

SEQ ID NO: 64166 - DNA, 873 bp, Neisseria meningitidis
atggaaatatggaatatgttggacacttggctcggtgccgtcccgatacgtgcggaggcggtcgaatccgtggcggcggttgcggctttgctgctggcgcgcgcccttctgttgaatatccacttcaaacggcatccggatttcggcatcgaaagcaagcggcggtttttggttgccagccgcaatataacgctgcttttggtgctgttttcgctggcatttatctggtcggcgcaaatccaaacgctggctttgtcgatgtttgcggtggcggcggcggtcgtcgtggcgacgaaggaactgattatgtgtctgtcgggcagtattttaaggtctgccacccagcaatactcggtcggcgactatatcgaaatcaacggcctgcgcgggcgcgtggtcgacatcaacctgttgaacacgctgatgatgcaggtcggtccgaaccccttggtcggacagcttgcgggaaccaccgtttctttccccaacagcctgttgttgagccaccccgtgcgccgcgacaatattttgggcgactacgtcatccatacggtcgaaatccctgttcccatccatttggattcggatgaagccgtatgccgtctgaaagccgtactcgagcccttgtgcgcgccctacatccccgccatccaacggcatttggaaaacgtgcaggcggaaaaactgtttatcacgcccgccgccagaccgcgcgttacccgcgtgccgtacgatgacaaggcataccgcatcatcgtccgcttcgcctcccccgtttcaaagcggctggaaatccaacaggcggttatggacgaatttttgcgcgtacaataccgcctgttaaattaccccgccggctccgaaacactttaa

SEQ ID NO: 64167 - DNA, 1452 bp, Neisseria meningitidis
atgctttctttccttagcggcttattgagcttgggtatagaagtcttgtgggtaaggatgttttcgttcgcagcacagtccgtgcctcaggcattttcatttacccttgcctgttttctgaccggtatcgccgtcggcgcgtattttggcaaacggatttgccgcagccgctttgttgatattccctttatcgggcagtgcttcttgtgggcgggtattgccgactttttgattttgggtgctgcgtggttattgacgggtttttccggcttcgtccaccacgccggtatcttcattaccctgtctgccgtcgtcagagggttgattttcccgctcgtacaccatgtgggtacggatggcaacaaatccggacgacaggtttccaatgtttatttctccaacgttgccggcagtgcattgggtccggtccttatcggctttgtgatacttgatttcttgtccacccaacagatttacctgctcatctgtttgatttctgctgctgtccctttgttttgtacactgttccaaaaaagtctccgactgaatgcagtgtcggtagcagtttccctaatgttcggcatcctcatgttcctactgccggattctgtctttcaaaatattgctgaccgtccggataggctgattgaaaacaaacacggcattgttgcggtttaccatagagatggtgataaggttgtttatggggcgaatgtatacgacggcgcatacaataccgatgtattcaatagtgtcaacggcatcgaacgtgcctatctgctaccctccctgaagtctggcatacgccgcattttcgtcgttggattgagtacaggttcgtgggcgcgcgtcttgtctgccattccggaaatgcagtcgatgatcgttgcggaaatcaatccggcataccgtagccttatcgcggatgagccgcaaatcgccccgcttttgcaggacaaacgtgttgaaattgtattggatgacggtaggaaatggctgcgtcgccatcctgatgaaaaattcgacctgattttgatgaatacgacttggtactggcgtgcctattccaccaacctgttgagtgcggaatttttaaaacaggtgcaaagccaccttaccccggatggtattgtaatgtttaataccacgcacagcccgcatgcttttgctaccgccgtacacagtattccctatgcataccgctatgggcatatggtagtcggctcggcaaccccggtagttttccctaataaagaactgctcaagcaacgtctctcccggttgatttggccggaaagcggcaggcacgtatttgacagcagcaccgtggatgctgcagcacaaaaggttgtctctcgtatgctgattcagatgacggaaccttcggctggggcggaagtcattaccgacgataatatgattgtagaatacaaatacggcagagggatttaa

SEQ ID NO: 64168 - DNA, 1077 bp, Neisseria meningitidis
atgcaagaatggttccaaaacctctttgccgcaacgctcggtctgggcgatttgggtattaccgtaggcttggtggtatccgtcatcgtcaaaattgtgattatcctgattccgctgattctgaccgttgcctacctgacgtatttcgaacgtaaagtcatcggctttatgcagcttcgtgtcggcccgaacgtaaccggcccgtggggtctgattcagccgtttgccgacgtgttcaaactcttgtttaaagaagtaacccgtccgaagctgtcaaacaaagccctgttctacatcggcccgattatgtcgctcgccccgtcttttgcggcatgggcagtgattccgttcaacgaagaatgggtgctgaccaatatcaatatcggccttttgtacatcctgatgattacctcgctgtcggtttacggcgtgatcatcgcgggctgggcttccaactccaaatattcgttcctgggcgcaatgcgtgcctccgcgcaaagcatttcctacgaaatcgccatgagtgccgcgctggtgtgcgtcgtgatggtatcgggcagtatgaacttctccgacatcgttgccgcacaagccaaaggtattgccggcggttcagtattctcttggaactggctgccgctcttcccaatcttcatcgtctatctgatttccgccgttgccgaaaccaaccgcgcgccgtttgacgtggcagagggtgagtctgaaatcgttgccggacaccacgtcgaatattccggcttcgcattcgcactgttcttccttgctgaatacattttcatgattctgattgccgcgctgacatcgctgatgttcctcggcggctggttgtccccgttcccgcaaagttggggctttatcggcacaccttccgcattctggatgttcgtgaaaatggcggcggtgttgtactggtacctgtggatccgtgcaaccttcccgcgctaccgttacgaccaaatcatgcgtttgggctggaaagtgctgattccgatcggcttcgcctacatcgtggttttgggcgtgtggatgatttcaccgctgaatttgtggaaataa

SEQ ID NO: 64169 - DNA, 1101 bp, Neisseria meningitidis
atgatgaaaatcaaagccctgatgattgccgccgcattgctggcagcagccgatgtccacgccgcaccgcaaaaggcaaaaaccgcatccgccaaagctgccaaagctgccaaagctgccaaagctgccaaagctgccaaagttgccaaagttgccaaagttgccaaagttgccaaagttgccaaagttgccaaagttgccaaagttgccgccacggcgcaaaaagaagccgcacccgcacaacagcagggcggtatccgcttttcagacggcattgccgccgttgccgacaacgaagtcatcacgcgccgccggcttgccgaagccgttgccgaagccaaagccaacctgcccaaagacgcgcagataagcgaatccgagctgtcccgacaggtgctgatgcagcttgtcaaccaatccctgattgtacaggcgggcaaacgccgcaacattcaagcaagcgaagcggaaatcgatgccgtcgtcgcaaaaaatcccgccctcaaaaacctcagccccgcccaacgccgcgattttgccgacaacatcattgccgaaaaagtccgccagcaggcagtgatgcagaacagccgcgtgagcgaagctgaaatcgatgccttcctcgagcaggcgcaaaaacaaggcatcaccctgcccgaaggcgcaccgttgcgccaataccgcgcccaacacatcctgattaaagccgacagcgaaaacgccgccgtcggcgcggaaagcaccatccgcaaaatctacggagaggcccgcagcggcacagacttttccagcctagcgcgccaatattcgcaagacgcgagcgcgggcaacggcggagatttgggctggtttgccgacggcgtgatggttcccgcctttgaagaagccgtccacgcgctcaaacccggacaggtcggcgcgcccgtccgcacccaattcggctggcatatcatcaaattgaacgaagtgcgcgatgccggcacacctcaggaacgtatccgcaattccgtgcggcaatacatcttccaacaaaaagccgaacaggcaaccgtcaacctgttgcgtgacctgcattccggcgcgtatgtcgacatccgctaa

SEQ ID NO: 64170 - DNA, 2379 bp, Neisseria meningitidis
gtgctggcattgggcttctgcttcggcacgcattgcgccgccgccgatgccgttgcggcggaggaaacggacaatccgaccgccggaggaagcgttcggagcgtgtccgaacccatacagcctaccagcctgagcctcggttcgacctgcctgttttgcagtaacgaaagcggcaaacccgaaaaaaccgaatctgccgtccaaggcagcggcgaagcatccatccccgaagactatacgcgcattgttgccgacaaggtggaaggacagtcgcaggtgcaggtgcgtgccgaaggcaacgtcgtcgtcgaacgcaaccggacgaccctcaatgccgattgggcggattacgaccagtcgggcgacaccgttaccgcaggcgaccggttcgccctccaacaggacggtacgctgattcggggcgaaaccctgacctacaatctcgagcagcagaccggggaagcgcacaacgtccgcatggaaaccgaacaaggtggacggcggctgcaaagcgtcagccgcaccgccgaaatgttgggcgaagggcattacaaactgacggaaacccaattcaacacctgttccgccggcgatgccggctggtatgtcaaggctgcctctgtcgaagccgatcgggaaaaaggcataggcgttgccaaacacgccgccttcgtgttcggcggcgttcccattttttacaccccttgggcggacttcccgcttgacggcaaccgcaaaagcggcctgcttgttccctcactgtccgccggttcggacggcgtttccctttccgttccctattatttcaaccttgcccccaatctcgatgccacgttcgcgcccggcgtgatcggcgaacgcggcgcggtctttgacgggcaggtacgctacctgcggccggattatgccggccagtccgacctgacctggctgccgcacgacaagaaaagcggcaggaataaccgctatcaggcgaaatggcagcatcggcacgacatttccgacacgcttcaggcgggtgtcgatttcaaccaagtctccgacagcggctactaccgcgacttttacggcaacaaagaaatcgccggcaacgtcaacctcaaccgccgtgtatggctggattatggcggcagggcggcgggcggcagcctgaatgccggcctttcggttctgaaataccagacgctggcaaaccaaagcggctataaagacaaaccgtatgccctgatgccgcgcctttccgccgattggcgcaaaaacaccggcagggcgcaaatcggcgtgtccgcccaatttacccgcttcagccacgacagccgccaagacggcagccgcctcgtcgtctatcccgacatcaaatgggatttcagcaacagctggggttacgtccgtcccaaactcggactgcacgccacctattacagcctcaaccgcttcggcagccaagaagcccgacgcgtcagccgcactctgcccatcgtcaacatcgacagcggcatgaccttcgaacgcaatacgcggatgttcggcggcggagtcctgcaaaccctcgagccgcgcctgttctacaactatattcctgccaaatcccaaaacgacctgcccaatttcgattcgtcggaaagcagcttcggctacgggcagctctttcgcgaaaacctctattacggcaacgacaggattaacaccgcaaacagcctttccgccgccgtgcaaagccgtattttggacggcgcgacgggggaagagcgtttccgcgccggcatcggtcagaaattctatttcaaggatgatgcggtgatgcttgacggcagcgtcggcaaaaaaccgcgcaaccgttccgactgggtggcatttgcctccggcagcatcggcagtcgcttcatcctcgacagcagcatccactacaaccaaaacgacaaacgcgccgagaactacgccgtcggtgcaagctaccgtcccgcacagggcaaagtgctgaacgcccgctacaaatacgggcgcaacgaaaaaatctacctgaagtccgacggttcctatttttacgacaaactcagccagctcgacctgtccgcacaatggccgctgacgcgcaacctgtcggccgtcgtccgttacaactacggttttgaagccaaaaaaccgatagaaatgctggcgggtgcggaatacaaaagcagttgcggctgctggggcgcgggcgtgtacgcccaacgctacgttaccggcgaaaacacctacaaaaacgctgtctttttctcacttcagttgaaagacctcagcagtgtcggcagaaaccccgcagacaggatggatgtcgccgttcccggctatatccccgctcactctctttccgccggacgcaacaaacgaccctga

SEQ ID NO: 64171 - DNA, 1869 bp, Neisseria meningitidis
atgcaagctgtccgatacaggcctgaaattgacggattgcgggccgttgccgtgctatccgtcattattttccacctgaataaccgctggctgcccggagggtttttgggggtggacattttctttgtcatctcgggattcctcattaccggcatcattctttctgaaatacagaacggttctttttctttccggggtttttatacccgcaggattaagcggatttaccctgcctttattgcggccgtgtcgctggcttcggtgattgcctctcaaatcttcctttatgaagatttcaaccaaatgcggaaaaccgtggagctttctgcggttttcttgtccaatatttatttggggtttcagcaggggtatttcgatttgagtgccgacgagaaccccgtactgcatatctggtctttggcggtagaggaacagtattacctcctgtatcctcttttgctgatattttgctgcaaaaaaaccaaatcgctacgggtgttgtgccacatcagtatcatcctgttcctgattctgactgcctcatcgtttttgccggccgcgttttataccgacatcctcaaccaacccaatacttattacctttcgacactgaggtttcccgagctgttggcaggttcgctgctggcggtttacgggcaaacgcaaaacggcagacggcaaacagcaaatggaaaacggcagttgctttcatcactctgcttcggcgcattgcttgcctgcctgttcgtgattgacaaacacaatccgtttatcccggtaatgaccctgctccttccctgcctgctgacggcactgcttatccggagtatgcagtacgggacgcttccgacccgcatcctgtcggcaagccccatcgtatttgtcggcaaaatctcttattccctatacctgtaccattggatttttattgctttcgcccattacattacaggcgacaaacagctcggactgcctgccgtatcggcggttgccgcgttgacggccggattttccctgttgagttattatttgattgaacagccgcttagaaaacggaagatgaccttcaaaaaggcatttttctgcctctatctcgccccgtccttgatacttgtcggttacaacctgtacgcaagggggatattgaaacaggaacacctccgcccgttgcccggcgcgccccttgctgcggaaaatcattttccggaaaccgtcctgaccctcggcgactcgcacgccggacacctgcgtgggtttctggattatgtcggcagccgggaagggtggaaagccaaaatcctgtccctcgattcggagtgtttggtttgggtagatgagaagctggcagacaacccgttgtgccgaaaataccgggatgaagttgaaaaggctgaagccgttttcattgcccaattctatgatttgaggatgggcggccagcccgtgccgagatttgaagcgcaatccttcctaatacccgggttccaagcccgattcagggaaaccgtcaaaaggatagccgccgtcaaacccgtctatgtttttgcaaacaacacatcaatcagccgttcgcccctgagggaggaaaaattgaaaaggtttgccgcaaaccaatatctccgccccattcaggctatgggcgacatcggcaagagcaataaagcggtttttgatttggttaaagatatccccaatgtgcattgggtggacgcacaaaaatacctgcctgaaaacacggtcgaaatacacggccgctatctttacggcgaccaagaccacctgacctatttcggttcttattatatggggcgggaatttcacaaacacgaacgcctgcttaaatcttcccgcggcggcgcattgcagtag

SEQ ID NO: 64172 - DNA, 450 bp, Neisseria meningitidis; identical to SEQ ID NO: 40267

SEQ ID NO: 64173 - DNA, 975 bp, Neisseria meningitidis
atgattgccaaacacatcgaccgcttcccactattgaagctagatcaagtgattgattggcaaccgatcgaacaatacctgaaccgtcaaagaacccgttacctccgagaccaccgcggccgtcccgcctacccgctgttgtccatgttcaaagccgtcctgctcggacaatggcacaacctctccgatcccgaactcgaacacagcctcatcacccgcatcgatttcaacctgttttgccgttttgacgaactgagcatccctgattacagcaccttatgccgctaccgcaattggctggcgcaagacgacaccctgtccgaattgctcaaactgatcaaccgccaactgaccgaaaaaggtttaaaaatagagaaagcatccgctgccgtcgttgacgccaccattattcagaccgccggcagcaaacagcgtcaggccatagaagttgacgaataaggacaaatcaacggccaaaccacaccgagtaaggacagcgatgcccgttggatcaagaaaaacggcctctacaaactcggttacaaacaacatacccgtaccgatgcagaaggctatatcgagaaactgcacattacccccgccaatgcccatgagtgcaaacacctgtcgccgttgttggaagggttacccgaaggtacgaccgtctatgccgacaaaggctacgacagtgcggaaaaccggcaacatctggaagaacatcagttgttggacggcattatgcgcaaagcctgccgcaaccgcccgctgtcggaagtgcaaaccaaacgcaaccgatatttgtcgaagacccgttatgtggtcgaacaaagcttcggtacgctgcaccgtaaattccgctatgcgcggtcaacctatttcggactgattaaagtgagtgcgcaaagccacctgaaggcgatgtgtttgaacctgttgaaagccgccaacaggctaagtgcgcccgctgccgcctaa

SEQ ID NO: 64174 - DNA, 978 bp, Neisseria meningitidis
atgcaagaaaacccgaccgtgtggctgttcgacctcgacaacacgctgcacaatgccgatgccggcctcttcacactcatcaaccgcgctatgacacgctatatggcacgccgcctcaaactctccgaatctgccgcgtccgacctgcgtcaagactattggcaccgctacggcgcaacgctcgccggactgcaaatccaccatcccgaaatcgacatcgccgaatttttgcgcgaaagccatccgatcgatgcaatcctgaccaggctgcacggcatggcggatacggaaaacaccctatgccgtctgaacgggcgcaaggcggttttttccaacggcccgtcgttttacgtccgtgccgttgtcggcgcactcggtttggaaaaccgtttcgacgcactgttcggcacagatgatttcggactgctgtacaaacccaatccgcaagcgtatctcaatgtctgccgccttttggacgtaccgcccgaatgctgcattatggtggacgacagcgcggacaacctgcatcaggcaaaagcattgggcatgaaaaccgtccggttcggtgcaaaatcccacgcgctgccctttatcgatgcctccgtaagcgatatggcgcaactggctcggtatgcagaaactttgtcagaacgccgccaaaatcattacaataccccctaacccccgaaaatacgaaagaatgttatgcgtaaaaccttccttatcctgatgactgccgccgcccttttgtcgggctgcgcgtgggaaacttatcaagacggcaacggcaagaccgccgtccgtcaaaaatatcccgccggcacgcccgtttattaccaagacggcagctactcgaaaaatatgaactacaaccaataccgtcccgaacgccatgccgtgttacccaaccaaaccggcaacaacgccgacgaagagcatcgccaacactggcaaaagcccaaatttcaaaaccgataa

SEQ ID NO: 64175 - DNA, 687 bp, Neisseria meningitidis
atggaaaaacaaaatattgcggttatacttgcgcgccaaaactccaaaggattgccattaaaaaatctccggaaaatgaatggcatatcattacttggtcatacaattaatgctgctatatcatcaaagtgttttgaccgcataattgtttcgactgatggtgagttaattgcagaagaagctaaaaatttcggcgtcgaaatcgtcctacgccctgcagagctggcctccgatacagccagctctatttcaggtgtaatacatgctttagaaacaattggcagtaattccggcacagtaaccctattacaaccaaccagtccattacgcacaggggctcatattcgtgaagctttttctctatttgatgagaaaataaaaggatccgttgtctctgcatgcccaatggagcatcatccactaaaaaccctgcttcaaatcaataatggcgaatatgcccccatgcgccatctaagcgatttggagcagcctcgccaacaattacctcaggcatttaggcctaatggtgcaatttacattaatgatactgcttcactaattgcaaataattgtttttttatcgccccaaccaaactttatattatgtctcatcaagactctatcgatattgatactgagcttgatttacaacaggcagaaaacattcttaatcacaaggaaagctaa

SEQ ID NO: 64176 - DNA, 999 bp, Neisseria meningitidis; identical to SEQ ID NO: 45992

SEQ ID NO: 64177 - DNA, 207 bp, Neisseria meningitidis; identical to SEQ ID NO: 41992

SEQ ID NO: 64178 - DNA, 378 bp, Neisseria meningitidis
atgtgtgagttcaaggatattataagaaacgttccttattttgaggggtatgacgaaaattcatttattggcaaatggtatgatgacggggtgtgggatgatgaagaatattggaaattggagaatgatttaatcgaggttagaaaaaaatatccttatccgatggatataccaagggatattgtgattggaatcagtaccattattgattttttaatggttccaaattgggagcttttcgaaattaaagcttccccttggctacctgatagcgtgggaattcatgaacgttatgaaagattcacaacaatgctccgttatatttttaccgagaaagacatagtcaacgtgcgatttgattattacaacaaaaaatag

SEQ ID NO: 64179 - DNA, 318 bp, Neisseria meningitidis; identical to SEQ ID NO: 43381

SEQ ID NO: 64180 - DNA, 1110 bp, Neisseria meningitidis
atgtccttgacccgcctaatcttgaaattctatgcactgttgcgcctttttttgggcaaaaacgcccgcaccgcatggatttcgcatcccgcctatgccgggcacgaacccggcgcaaaccatcccgattcgcccgaccgcatcctctgcatcgagcaggcattgcgccgcgccggtatttggcagcacctccaaaccatagaggcggaagaaatcagcgatacgcgcctcgcacttgtccactcgagcaaatatctgaaccgtttggaatcttgcctgccccaaaaaggcaagattttccgcctggataacgacactgcaatcagcacaggctcgctgtctgccgcacactttgccgccggttcggcagttcaggcagtcgacatggtcatgaaccgtaaagcatggcatgccttttgcgccgcccgcccgcccggacaccatgcgggcagcggcaaagccggcggattctgcctgctgaacaacgttgccgccggcgtcatgcatgccattgccgaataccgcctgaaacgcattgccgtcatcgatttcgatgtccactacggcgacggtacggcagaaatattcaaagacgatccgcgcatcctgtttttcaacctgtttgaaaccgaccttttccccttccccgaaaacaacgatatgcccgacggcggcaatatggtgcacctgcccttgccgccgggaacgggcagccgcacattccgcgaagccgtccgcaggcagtggctgccccgacttgccgcattcaaacccgaactggtgctgctgtcggcaggattcgacgcacaccgtctagacgaatcgggcaggctcaacctgcacgaggcggattttgcctggctgacacacaaaatcattcagacggcatcgggctgccccggcaaaatcgtatccgtactcgaaggcggctacacccttgaacctctggcacaatctgctgccgagcatatccgcgtgctggcggggctgggcaaatccgatgccgcaaccgcctatcagaaaacactggacccaacaaaaaaacggtttgccaaaccgaaaaccggacaggtgcgccaacctacccaatccgaccgttacgacatatag

SEQ ID NO: 64181 - DNA, 642 bp, Neisseria meningitidis
atgagatgttttatgattcaaaatgttgttacttcaataatcctgtattctgggacagccgtagacttacttattatcctaatgttattttttgccaaaagaaaaagcagaaaagacatcattaacatctatttaggacaatttctaggctctgttagcctgatattgctaagtttgctttttgcatttgtcttagattatattcctagtaaagagattttaggtttgctcggcttgattccaattttcctaggcatcaaagttttgctgttaggagattctgatggagaggctattgccaaagagggtttgcgcaaagataataaaaacctgatttttctagtcgctatgattacttttgcaagttgtggtgctgacaatattggtgtctttgttccatattttactaccttaaatttagcgaatttgatagtggctttacttacctttctagtcatgatttatctcttggttttttctgcccaaaaattagcacaagtcccttctgttggagaaactttggaaaaatatagcagatggtttgttgctgttgtttatttgggattgggggtatatatcctgattgaaaacaacagttttgatatgctatggactgtgtcgggccaggaaaaaatattatga

SEQ ID NO: 64182 - DNA, 543 bp, Neisseria meningitidis
atgaggacacaccgcaagacctgctctgcggtgtgttttgcttttcagacggcatcgaaacccgccgtttccatccgacatcccagcgagaacattatgagcctgaaaatccgccttaccgaagacatgaaaaccgcgatgcgcgccaaagaccaagtttccctcggcaccatccgcctcatcaacgccgccgtcaaacagtttgaagtggacgaacgcaccgaagccgacgatgccaaaatcaccgccatcctgaccaaaatggtcaaacagcgcaaagacagcgcgaaaatctacactgaagccggccgtcaggatttggcagacaaagaaaacgccgaaatcgaggtactgcaccgctacctgccgcaaatgctctccgccggcgaaatccgtactgcggtcgatgccgccgttgccgaaaccggcgcggcaggtatggcggatatgggcaaagtgatgggcgtattgaaaacccgacttgccggcaaagccgatatgggcgaagtcaacaaaatcctgaaagccgtgctgaccgcctga

SEQ ID NO: 64183 - DNA, 1332 bp, Neisseria meningitidis; identical to SEQ ID NO: 45968

SEQ ID NO: 64184 - DNA, 432 bp, Neisseria meningitidis; identical to SEQ ID NO: 40005

SEQ ID NO: 64185 - DNA, 717 bp, Neisseria meningitidis
ttgttaatccactatactttatgccgttaccgcaactggctggcgaaagacgacaccctgtccgaactactcaaactgattaaccgacaactgaccgaaaaaggtttaaaaatagagaaagcatccgccgacgtcgttgacgccaccattattcagaccgccggcagcaaacagcgtcaggccatagaagtcgatgaagaaggacaaatcaacggccaaaccacaccgagtaaggacagcgatgcccgttggataaagaaaaacggcctctacaaactcggttacaaacaacatacccgtaccgatgcagaaggctatatcgagaaactgcacattacccccgccaatgcccatgagtgcaaacacctgccgcctttgttggaaggactgcccaaaggtacgaccgtctatgccgacaaaggctacgacagtgcggaaaaccggcaacatctggaagaacatcagttgctggacggcattatgcgcaaagcctgccgcaaccgtccgctgtcggaaacgcaaaccaaacgtaaccgatatttgtcgaagccccgttatgtggtcgaacaaagcttcggtacgctgcaccgtaaattccgctacgctcgggcagcctatttcggactgattaaagtgagtgcgcaaagccacctgaaggcgatgtgtttgaacctgttgaaagcggccaacaggctaagtgcgcccgctgctgcctaa

SEQ ID NO: 64186 - DNA, 387 bp, Neisseria meningitidis
atgtggaaaattagtaaagaaaattgtgaagatttaggatttgcaatagtctgtatgttctatgatgctattaatctttctgaatttaaattatggttggatatagttgtcagagatactcctattgatacaattccattgtatatttttgatttgattgattttgataagagtataggggaaatttatgatgtaattggagtcgttaattatggttacatttcaaatgatcaaaaaaatgcattaacgggcattgccttcttaagggggatagatgtctatgatccgcctatttcaaaagaaaaagcattaaaagccttagagaaatatcctgaaatttatcagaggtttcagcatttctttccttttgtagagcttccgcttttt

SEQ ID NO: 64187 - DNA, 348 bp, Neisseria meningitidis
atgccgtctgaaaccgtgtttaattttcaggcgaccttccccttatttgaaacaggatattgggaactaagttcttcaaaaatcctacacctgctccttccacggcagcaccttggtcaaaacggcagacggctgaaaagcaaacaccgtccgtcgtgttgccgtttgcggatgagtacgggtcaaccccaatgccgccgaaaccgtcgaagccgccttcaacattgccgccgccaaagccgcaaagttggcaaaaacggtaaaaccggggagataaaagccgatggcaggaaagtaaatgtgaggatagacagtacggaggcagacctgctttatccggcagggcaa

SEQ ID NO: 64188 - DNA, 396 bp, Neisseria meningitidis
atgtgcgagttcaaggattttagaagaaacatcccttgttttgaagagtatgacgaaaattcatttattggcaaatggtatgatgacggggtgtgggatgatgaagaatattggaaattggagaatgctttaatcgaggttagaaaaaaatatccttatccgatggatataccaagggacatcgtgattggaatcggtaccattattgattttttaatggttcaaaattggaaactttttgaaattaaagcttctccttggttgcctaaaagtgtcaaaattaatgagcgttatgaaaggttcagagtaatgctccgttatatttttactgatctagatgtagaggactggaaatttttttactttccaatacaacatagtaaaggtagattgaga

SEQ ID NO: 64189 - DNA, 315 bp, Neisseria meningitidis
atgaatatattaccaagctggctgcgagtcggtatgaatatagcaatgctgggcatgatacactcagatatcaggttaattaccgtagattacgaggaaggaagaaggtttttaaaaatcaaaaattatttatcaagagaagccatcacagaagaccatgaagatatggaatatttgattacagagttatggtctatgtgtggagaatattttgatgaagctgactttgaatgtatttattctaatcattcttctatggagttaaaccaaataaatggtgcagtattcaggagaaaggaattaatttcgcaagcg

SEQ ID NO: 64190 - DNA, 309 bp, Neisseria meningitidis
atgaaaaatatgaaaaagaagctttctaaatattctctgtttctttcatctgttttttgtctaacagcttgcgctactaccttattaggtactgtcgtagtcggtacagccttgtacggtactagtagtaactggacaactactgataaggaacaccaagaaattatgaattgccttgataaggcattagtaaaactgaatatctattttgagaatgatgaagaaaagtacaaaaacaaaacagtaatggatatttactatcagtgcattaaaaatcctaattatgttgtaacacacaataacttataa

SEQ ID NO: 64191 - DNA, 315 bp, Neisseria meningitidis; identical to SEQ ID NO: 42635

SEQ ID NO: 64192 - DNA, 459 bp, Neisseria meningitidis
atgcccatcactccacccttaaacatcatctcccctaaactctaccccaatgaacaatggaacgaaagcgaagcactcggtgccatcacttggctatggtatcagtcgcctacgcatcgccaagtacctattgtggagatgatgacgtatatattgcctgtgttaaaaaacgggcagttcgctttgttttgcaagggtacccaaccaatcggttatatctcatgggcttattttgatgaagtggcgcaggcgcattatttagaatctgaccgccatttgcgtgacaacagcgattggaactgtggcgacaatatttggctgattcaatggtttgcgccatttggacacagtcatcaaatgcgctcagctgtgcgccagttatttcctagtacgacagtacgcgccttgtatcataaagggagcgataagggtttgagaattttaacttttaaaacttga

SEQ ID NO: 64193 - DNA, 465 bp, Neisseria meningitidis; identical to SEQ ID NO: 36919

SEQ ID NO: 64194 - DNA, 552 bp, Neisseria meningitidis
atggaattcctatctcttcacccttggtggtctttttttattatattaactattatccttagctatattggattctgtgcacatctccacattcaaaatagggcagttttcttttatagctatcgggatgtaactattgttttcttgacacctgtcatcctcatcgccctaagttatttaattaaaaataaagaaatcctatcagcttgtatcttatgtataactcttattgcattttcatgggcatggattataacctatcgatctaatactaaaaggttttttctttccttattgatagtatggggaaaattgttattaagtacaattgtttgggcaattctcgccatatcacttggcttagctgtaataacagggaacagcaagcgtaaaaaatatgaacgacgtgaccgtcatgctgaacgtaatgaaaaagcttttataggtgcgctattagtaggtttcgaattatcaagaaatttattgaatttatgttgcctacacaaggatttttccaccccatctaaaaacattgaagtcaatcgctcttaa

SEQ ID NO: 64195 - DNA, 216 bp, Neisseria meningitidis; identical to SEQ ID NO: 40407

SEQ ID NO: 64196 - DNA, 216 bp, Neisseria meningitidis; identical to SEQ ID NO: 37963

SEQ ID NO: 64197 - DNA, 375 bp, Neisseria meningitidis
atgagaaaaagtcgtctaagccggtataaacaaaataaactcattgagctatttgtcgcaggtgtaactgcaagaacagcagcagagttagtaggcgttaataaaagtaccgcagcctattattttcatcgtttacgattacttatttatcaaaacagtccacatttggaaatgtttgatggcgaagtagaagcagatgaaagttattttgctgaacgacaaaaccatattaatggaattgagaacttttggaaccgggcaaaacgtcatttacgcaagtttaacggcattcccaaagcgcattttgagctgtatttaaaggggtacgaacggcgttttaacaacagtgagataaaagttcttgttccattttaa

SEQ ID NO: 64198 - DNA, 354 bp, Neisseria meningitidis; identical to SEQ ID NO: 60208

SEQ ID NO: 64199 - DNA, 759 bp, Neisseria meningitidis
atgaatcccaaaatttcctccgaccatacagaagatgccgtgcgcctctccaaacgcatggcgcaactggggctttgttcgcgccgcgaagccgacggctacatcgaacagggctgggtaacggtcaacggcaaaaccgccgtactcggtcagaaagtttcaccggcagaccgtatcgaactgaacaagaaagcccacgaacagcaggcggcacgcattaccatcctgttgaacaaacccgtcggctatgtcagcgcacaagcggaaaaaggctataaatccgccgccgaactgattacccctgaaaatcactgggaaggcgataccggccgcatccgtttcgatccgaaacacaaaatcggcctcgcccccgccggcaggctggacatcgactcggtcggattgctggtattgactcaggacggccgtatcgccaagcagcttatcggcgaaaacagcggcagtgaaaaagaatatttggtgcgcgtgcgcggcaaattggacgaaaaaggacttgccttactgaatcacggattgagtttggacggcgagaaactgcgtcccgcccaagtagaatggcaaaacgaagaccaactgcgcttcgtgttgaaacagggtaaaaagcggcaaatccgccgtatgtgcgaactggtcggactgcgcgtcgtcgggctgaaacgcatccgcatgggcaaggtcaaactcggcaggctgccgcccggcaaatggcgttatctcgcccccggtgaatcgttttaa

SEQ ID NO: 64200 - DNA, 423 bp, Neisseria meningitidis; identical to SEQ ID NO: 42328

SEQ ID NO: 64201 - DNA, 324 bp, Neisseria meningitidis
atgataattgacgaaaaatctacttcagatgtactgaaacaatatcaagaactagggtttgatttgacaaaatcgatgataatagagttttttatagagggttctcaaaaaaatctgcaatcaatagaaagccaactcatttcttatcggcaagattttcaaatcagtattgaacaagatgaattcggagaaatgtggacttgctattgttccgtcaatatcgtcccttcccttgaaaacattttagctattgaaactacgttatttgatattgcacaaaaaaatgattgtaattatgaaagttttggttcgtatgggaactaa

SEQ ID NO: 64202 - DNA, 375 bp, Neisseria meningitidis
gtggactcgcatggaaatccgctcgattttaaagtcactgggggtaacgtgcacgacggtcaagttgcaaacgacttgatagaagtcatacaagaagcccagtattttatcgctgacaaagggtatgactcgcaagaaatcagagataaagcgatagaacacggtatgaaagctattataccaaagcgtaaaaatgccaagaaacctaaccctgattttgatagctacctttataaattacgccacttagtcgagaatgcatttgcacgattaaagcagtttcgtagtattgctactcgctatgagaaattagctcgtaattttaaatcgatgctttacttggcttgctctattattcatgctaagttaaattga

SEQ ID NO: 64203 - DNA, 273 bp, Neisseria meningitidis; identical to SEQ ID NO: 37685

SEQ ID NO: 64204 - DNA, 273 bp, Neisseria meningitidis; identical to SEQ ID NO: 37685

SEQ ID NO: 64205 - DNA, 846 bp, Neisseria meningitidis
atgctcagttacagacacgcattccacgccggcaaccacgccgatatgctcaaacacttcaccttgtttttagtgctgcaatatttcaaccgcaaagacaagccctactggtacatcgacacgcacggcggcgcgggtttgtacaatctcgaaggcagcgaagcacagaaagtcggtgaataccgccaaggcatcgccctgctccgacaggcgcaaaacctgcctgccgaactctctgactttgccgcgcacatacaaaaaatcctgccctcgcccgaactttactgcggttctccgtggctggcgcaatcgctgacccgcgtcggcgacaaattgcgcctgtttgagctgcaccccaccgactttgtccatctgcaaaacaatatgggcgaagcaggattgggcaaacgcggacaagtgttgcgcgaagacggttacaaagggctgatttccctgctgccgcccccgccgcgacgcgctgttattctcatcgacccgccctatgaggaaaaacaggactaccggcgtgtaacggaaacgctgaaagccgctttaaaacggtttgagtccggctgttatctcatctggtatcccagcctcagccgcgaagaaagccgcaagctgcccgaagaactgaaaaaactcgttcccgacaactaccttcacgccgaactgcacgtccacgcgccgaaagccgacggtttcggtatgcacggcagcggaatgttcgtcatcaatccgccctatctgttggcggaacaattggcggcaaacctccccgccctgacgcggctgctggcgcaagatgaaggcgcgcgctacctgttggacagcaaaatctgctga

SEQ ID NO: 64206 - DNA, 111 bp, Neisseria meningitidis; identical to SEQ ID NO: 40033

SEQ ID NO: 64207 - DNA, 414 bp, Neisseria meningitidis
ttgacagaagaaatgatgaaaaagcagcggcatatcctgtgtgtcggctgcctgtatatcgtattgaaggtcaacgtatttcccaataccggctggatggaagcgtcgaaagggatgcagggcatatcgttcagtaccttcggatacgcggatgcgccgggctatacattcagccgcattgtccatactttaattttcctacttggaaagaccactgggacacgtacaactgtttccgatagttcgcataatgtatattatgttaaattatatatttgtgcaaataactccaaggcattaagctgttgtttgatgctttgccagtttgggagaaagttgtccatatgcgccataaaacgggcgttgcgatggcgttcgagcaaatgggtcagttcgtggacgacgacgtattaa

SEQ ID NO: 64208 - DNA, 2484 bp, Neisseria meningitidis
atgcatcactttgggcgggctgcgacgagttgcgcggcggtatggatgcgagcctttataaagaactatgtgcttacgctattgtttttaaaatatgtttctgataagcataagtacggcggcggcatgattgagctgcacgccggtacgacttttgacgacatcgtcaaactcaaaaacaccgccgacatcggcgaccgcctgaataagattatcgcccaaattgccgaagccaacgacttaaaaggcgtgatcgacgttaccgacttcaacgacgaagacaaactgggtaaaggtaaggagatgatcgaccgtttgagcaggcttgtcggcatttttaaaaagctcaacctttcttccaaccaagccgaagacgacgatttgttaggtgatgcctacgaatacctgatgcgccattttgcgaccgagtcaggcaaatccaaagggcagttttacacgcctgccgaagtctcccgcattatggcgaagattatcggaatcagcgcagattgcccgtccagcaccagcgtttatgacccgacctgcggctcgggttcgctgttgctcaaagccgccgcccaagccggcagccaaatcagcctttacggtcaggaaaaagatgtggcaaccgcgtcccttgcccgtatgaatatgattttgcacaacaacgaaaccgccgaaatcaacaccgggaacaccttgtccgattcgtctttccgtgatgaaaacgacgggcttaagaccttcgattttgccgttgccaatccgccttatcccgcccgaaaaaaacggcgattacgcctttttgctgcatctgctcaaaagcctgaaaccaagcggcaaaggtgcgattattcttccgcacggtgtgctgtttcgcggcaatgccgaagcgcgtattcgcacggaattgcttaaccttgaccttattaaaggcattatcgggctgcctgccaacctgttttacggcacgggcattcctgcctgcatcatcgtcatcgacaaagaacacgcccaaaccgcccaatttgccgaagagggaacaaaccaagttatcagcggcggcagcgtgtttatgattgacgcatcgcgcggcttcattaaagacggcaacaaaaaccgtctgcgtgagcaagacattcacaaaatcatcgacactttcacaaacctcgttacagccgtatggtgcatttaagcgaaatcgcagcacaagattacaaccttaatctgcctcgctatatcgacagcggagaagtcgaagacctgcaaaatctcgccgcctatctatctttatggcggcatacctgcgcacgatatggacgcattggaagcctattggcaagttttaggccgtatgaaaaacgagttgtttgccgaacacgatggccactttaccactatacaacggaatcgattgcaaatctttcccactctcaacagcttaaaatcctgcgggattggtgtggaatttagggctaatctagtacagccccaaatttaatccactataaaatcgaaagcagccaaatcaaagcccatatattggcgcaccccgattacgccgccttcaaagccggacacctggcaaagtttgccgcgtggcacactcaaaacgaccttgccgccatccaaccgggcaggcttatccggaaatggagcgaaagcctgctggacgcgttcaaacccggcagcctgattgaagaatacgatttctaccaaatcctgacggactactgggcggaaaccctgcaagacgatgtttatctcatcgcccaagatggctggaaggcggttaaaaacctggccgaaatcaccaaagaaagcgatgaagccgcgaacctgaccgtcgtctttgaggaaaccgaaaccgacaaaaaaggcaaagccaaaaccaagcgcatcagcaaaaaataccgcagcgaagtcatcgcccccgagctggttgcccgccgctacttttcagacggcatcgccaagctggaagaaaaacaaagcgagctggaacgcctaagccaagaattggaaaaccacatagaagaacacggcggcgaagagggtgcgctgaacgacgtattggatgcaaaaggcaaactttccgccaaacttctgaaaaccgcattggaagaaagcggcatagaagaaggcgaacgggctgttttacaaaccacccaaacactgatgacgcaggaaaaagccgcgaaagacgcagtcaaaacccaaatcgaagccctgaaccttgccgtattcaaacaattcggccgactttccgaagccgaaatcaagcagcttgccgttcaagacaaatggcttgccgatttacaaagccgaatcgaaaatcgcttggaaaacagtattcagcagcttatcagctgcttgaacacgctggaagaccgctaccgcagcccgatggccgagcttgcccgagaagtggaaaagtggcaaagcaaagtcaatgcccaccttgaaaatatgggttttggaggc

SEQ ID NO: 64209 - DNA, 1224 bp, Neisseria meningitidis
gtgggacgcagaaaactttggtttgccctggcagcagcaggcgttatcggcggtttggtcggcattgtgctgacggaactgatgcacttcatacaacatacggcatacggttatggcacggacggcgtgtccatctcgttccgcgaaggtgtggcacaggcttccggtatgcggcgcgttgccgtgctgacgctgtgcggcgcggtcgcaggcagcggctggtggttgctgaaacgtttcggcaagccgcaaatcgaaatcaaagccgccttgaaacagccgttgcaggggctgccgtttctgacgacggttttccatgttctgctgcaaatcataacggtcggactcggttcaccgctcggacgggaagtcgccccgcgtgaaatgactgccgcgttcgcttttgccggcggcaggcggttgggtttggatgaagacgaaatgcggctgctgattgcttgcgcttcgggtgcgggtttggcggccgtgtataacgtgccgctcgcctccacactttttatcctcgaagccatgctgggcgtgtggacgcagcaagccgtcgccgccgcattgctgacttccgtcatcgccaccgccgtcgcgcgcatcggcttaggcgacgtgcagcaatatcatccggctaaccttaccgtcagcacctcattactttggttttccgccgtcatcggcccgatactgggcgcaaccgccgtctttttccagcgcacagcccaaaagtttccctttatcaagcgcgacaatattagaatcattctcttggcagtctgcatgtttgcgctcatcggcgtgatttccgtttggtttcccgaagttttgggcaacggcaaagcaggcaaccaactgacttttagtggtttgaccggttggcaatacgctttggaacttgccgccgtcaaatggccggtcgtcttgatggcgctggcggcaggcgcatacgtcggactgattacgccgtcgatgatgcttggcagcaccgtttcttttgctgccgccgccgcgtggaacagtgttttccccgcaatgccgtctgaaagcgcggcagtcgtcggagcggcggtgtttctcggcgtatcgctcaaaatgccgctgaccgccattgtgttcgtattagaactgacctacgcgccgctgtccctgctgctgcctttgtgcatcggcatggcgggggcattgggaacatcgggaaaaatgggcttcaaatga

SEQ ID NO: 64210 - DNA, 369 bp, Neisseria meningitidis; identical to SEQ ID NO: 54117

SEQ ID NO: 64211 - DNA, 1143 bp, Neisseria meningitidis
atgcagaaatggcaaaccgagctttattccacaccgctttggctttgtctgacactgaaaagcgcggtcaaagtcttgctgctgattacggcgatgattacgctggtgttaaccgaaatgcggctgaatgtgttgagtacctttatgtccaaagggctttacgactcgatgcaggatttgaatgcttcggcattttggatgtttgctgcaatgaacgcgggcgtggtgctgatacgggcgtttaacaacgtcgtcaacgacttcctcgatcaaggcttggcgattaaatggtcggagcggctcaacgaagtgctgacagcacgctggcttgccgacaaaaactactaccgcctgcaaatgcgccgccacgcgccagacaacatcgaccagcgtatccaacaggacgcgcaggaatttatcgcttcgaccatcgaatttgtgcgcggcatggtcaattcggtcgttacttctctggaatttgccgttgttttgcggggcttggctggcatcctgaccgtgttcggcttcgacattccgcacggcatcgtttggtttgtctatatatttgtgattttggcgacctttatcgccatgtggataggcaaccctttgattcgttacaattatgaaaacgaaaaactcaacggcgactaccgttattccctcatccgcgtgcgcgaccacgccgaaagcgtagcgttttacaacggcgaacaacacgaacacggccggctttccgaccgctttaaagccattatccgcaaccgttggcgcatcgcgcggcaaagcgtctgcttaagcggctttaacgatatgttcaccaacggcatcaaactcttccccattattttgcaagcgccgcgcctgtttgccggacaaatcaaaatcggcgacatccagcagaccgtccaagcctttgcgcgactgcaaaacgcgctatcttttttccggatgttctacaacaaattcaccgcctaccgcgcccgattggagcgtctgtacggctttttgctgagtaccgaagaacaacacagcgcgcggcaacccgagattagcgaagtttcagacggcattgcactggaatgtaaggcggcggcagcttttgcacgaattggcggcagcttttgcaccgccgaagcgtag

SEQ ID NO: 64212 - DNA, 1392 bp, Neisseria meningitidis
atgtttcccgatttctcccaaaccctctccaaagaccgccacttcctacgttccgccttcaaaaatcccaacaaatacggcggcttgtccaaagtcgaagaaaaataccaaaaatcgcacgaaatctttttgaagcgtttggctgccttgcccaaacccgaattcgataacaccctgcccgttcacgagaagctcgacgaaatcaaaaaagccattgccgagaatcaggtaacgattatttgcggcgaaaccggttcgggcaagaccactcagttgcccaagatttgtctggaactcgggcgcggggcggcgggtttgatcgggcatacccagccgcgccgtttggcggcgcgttccgtagcagagcggattgccgaagagctgaaatccgaaatcggcagcgcggtcggctataaagtgcgcttcaccgaccacacctcgcgcgatgcctgcgtcaagctgatgaccgacggcatcctgctggcggaaacccagaccgaccgttatctcgccgcctacgacacgattatcatcgacgaagcgcacgagcgcagcctgaacatcgacttccttttgggctatttgaaacaactcctgccgcgccgccccgatttgaaagtcatcatcacctcggcaacgatagacgcagaacgcttttcccaacacttcaacggcgcgcccgtgctggaagtgagcggacgcacctatcccgtcgaaatcctctaccgaccgctgatcggcaaagacgaagacgacgcggaaatagaattgaccgacgcgattgtcgatgcggcggacgaattggcgcgatatggcgaaggcgatattttggtattcctgccgggcgaacgcgaaatccgcgaagccgccgaagccctgcgcaaatccaccctgcgccgtaacgacgaaatcctgcccctgttcgcacgcctgtcgcacgccgaacagcacaaaatcttccacccctcaggcgcgaaacgccgcatcgtattggcaaccaacgtcgccgaaacctcgcttaccgtgccgggcatcaaatacgtcatcgacaccggtctcgcgcgcgtcaaacgctattccgcacgggcgaaagtggagcagcttcatgtcgaaaaaatctcccaagccgccgcccgccaacgctccggccgctgcggacgcgtatccgcaggcgtatgtatccgactgttttcagaagaagatttcaacagtcgccccgaatttaccgaccccgaaatcgtccgcagcaacctcgccgccgtcatcctgcgcatggcatcgctgaaactcggcgacgtagcggcattcccatttttagaaatgcccgattcgaggtatattaatgatgggtttcaggtgttgctggaattaggggcagtggaggccgcctga

SEQ ID NO: 64213 - DNA, 1077 bp, Neisseria meningitidis
atgaaaatcgttttgaccacatctatggcaggcttgggcggcacggaaaccgccaccgtccgcctcggcaggctactcaggcagcacggacacgacatcatgcttgcctcttcggacggaccgttgctcaaagaggcgcaagccttgggcatacgttggcaacccgtcgatttctatcgcggcggccttttcggctacctcaaaggtatgattgcctacgcccgaatgctgcggcgcgaacaacccgacatcatcgactgccaaatggcgcgcgtcgtacccgcctgcgccattgccgccaaaatcgtttcgccgaaaaccaaaatcatctaccactcgcacggtttggacgcggcaacctaccccaaaatcgccaaactcttcgacaagctgggcgtgtacatcatcggtaactgcaaacacgaacgcgaaaaactcatccgccacggtttccccgccgaccggattgtctacgcctacaacgcactcccccccccccccccggaatttcctttctggaaaaccgtcaaaggctgcgtcatgctcggcacgctgtcgcgtctggacaccgtccgcgccgtgcatctgatgctggacattttcaaaaaaatggtcgaccgcgatatgcccgtacgcctgaacgtggcgggcataggcgaagaaatggacaatttgaaagcgcaggcggaacgtctgggcatagacggcaaagttaccttcctcggcggcgtgcgcgatttgaccgcctacttcaaagacgtggatattttggtgaacacgccccactgcatcggcgaccacggcgcaggcgtgggcaacaacatcttagaagccggactttacgacacgcccgtcgttacctacgatatggcgggcatttccgaaatggtcgtcaacggggaaacgggttactgcattcctttcggcgaagacgaagcgtttatcgaagccgtcgatacactcatcaagcatccggagttgcgcggtcaaatgggcaaagccctgcacaaacacgtcgaaaccttatgttccgacgacgaaatctaccgtaccaccatggcggcgtataccatgtaa

SEQ ID NO: 64214 - DNA, 543 bp, Neisseria meningitidis
gtgcagagttggaaagaaaggcgcgatttcaatattgtaaagcaggatttggatttttcctgcggggcggcttcggtggcgacggttttgaacaatttttacgggcaaaagctgacggaagaggacgtgttaaaaaaactggataaggagcagatgccagcgtcgtttgaggatatgcggcgcattatgcctgatttgggttttgaagcgaaaggctatgccctgtctttcgagcagcttgcacagttgcaaatccccgtcatcgtgtatctgaaataccgcaaggatgatcatttctcggtattgcgcggtatagacggcaatacggttttgcttgccgacccgtcgctgggtcatgtttcaatgagcagggcgcagtttttggatgcttggcaaacccgtgagggaaatttggcaggtaagattttggcggtcgtgccgaaagggagggatgccggcggggataaggcgtttttcacacgcagtccgaaacgtcagacggagtttgcggtcggacaggtaaaatggtggcgtgcttattga

SEQ ID NO: 64215 - DNA, 965 bp, Neisseria meningitidis
atgaatccggcaatgattgagcgtcttaaggcagtcgagaatcaggcggaagcaatgggacgcggcgcacgctctgcatatcttaagcagcaggcgcaggaattgggcatcagccttgccacgctataccgcaagctggaggcggtcagcatcaagccgacgcgcaaacggcgcagcgatgcgggcaagacggagcttaaaccggaagaagccaaattgatttcggcggttttggtggaggcgatgaggcgcaacggcaagcggttgatgtcggtgcggcaggcggtggaaatgctgcgcgccaacggaaaaatcgaggcggcgcggattgatggggaaaccggggaagtcatcccgtccgtccgcactgctttccgcccgctggcaagacatcgacctcaccgcccggttatggcacatccccgccgccgacatgaagaccaaacacccctttaccgtcccactgtcggactgggcggtagaaatactccgagagctgcacacacagaccggcgacaacatccaccttttcccaggcatccgcccacggcgcaaacccgccccccatccgaccacatcagcatcaaattcgcccacaacgccatccgacgactgggctatgacggcagcacccccggcaaatccaaacacacaatgcacggattccgccacctcttcaccaacatcagcctgaccgccggaaaagacaccctcacaacagacctcgccctcggccacatcagccgcgccgccctccaacgcgccggcttctcaagcctgcaccactacctgaccgccgacagctaccgcctccaagagcggcgcgaactcgccgaatggtacagccgccgccaccgccaagcatacgaagccgccgcccaaaccccgcaaaacaaaaaccgcctgaaaaaaattcagacggcatcctgcccaaaacacttgcaataaaacctaaaaggtattaa

SEQ ID NO: 64216 - DNA, 558 bp, Neisseria meningitidis
atgaaacccaaatttaaaaccgttttaaccgcgctgcttttggcggtttccctgccgtctatggcggcaacccatgttttgatggaaaccgatatgggcaatatccgtttggttttggacgagtccaaagcccccaaaaccgttgctaatttcgtgcgctatgcccgaaaaggcttttacgacgacaccgtttttcaccgcgttatcgacggtttcgttatccagggcggcggatttaccgaagacttggtacaaaaggcaaccgataaggccgttgccaacgaatccggtaacggcttgaaaaacactgccggtaccatcgccatggcgcggacggccgatccggattccgccaccagccaattctttatcaatctggcggacaatgattcactcaactacaaaaacggacaatacggctataccgttttcggcagggtcgaaagcggcatgaacaccgtttccaaaatcgcccgcgtcaaaaccgccacgcacggcctttatcaaaacgtacccgtacagcccgtcaaaatccgtcgcgttgttgtcgggcagtaa

SEQ ID NO: 64217 - DNA, 519 bp, Neisseria meningitidis
atgagtgaaataataaatctcactgaatcaggtataacttttaatctagtaaaaaataacctgttttatatagaaccatatatccggaagagaaggcaagaaggtattaagacagtagagtttatctatctgcaagaagataatttgttatttgttgaggcaaaacaaagtattccaaatcaagaaagatctcctgagcgttttgatgaatatatttcagagatttatcaaaaatggtgtaatgcattaaatgttgaaattttgggaatattaggcagagaagatatcaaagaaacaattatgcctagtgctttttcaaatttgcaatggggtagcatagaaatcaaattattactggttatcccggatgtgccgcttaattatcttgggcaattgaatgaattaataaagcaagaatttaataagaaagatactttgcggttgatttctttatggaacatttctgtagaagtaattaatagggacttagccattcaaaaaggtttagctagctcttga

SEQ ID NO: 64218 - DNA, 768 bp, Neisseria meningitidis
atgaagaatttaaatttggaaaaagacactctggcagaatttcgtaacaagtttcttaaaggtgattctttagagattatgaaatcaataccctcgggatctatcgatctgattgttacatcaccgccttataatttaaaaaattctactggaaatggaatgaaagatggtcgaggtggaaagtggaaaaacgctagcttaattaatgggtattctgaccataatgattgtatgcctcatcatgaatatgtggagtggcaacgaaactgtctgtctgaaatgtatcgactacttaaagatgatggggctattttctataatcataaatggagagttcaggggggattattacaagatagacatgatattgtctctggttttcctgtaagacaaattattatttggcgtagaaaagggggaattaatttcaataaaggatatttccttcctacatatgaagtaatctatatgatttgtaaaccgaaattttccctctgcccgggtgctaataaatatggagatgtgtgggaatttacccaagaaatgaaaaatcctcatcctgcccctttccctgtagcactgatagagagaataattagcagtacaaatgctaaagtcattttagatccttttatgggtagtggcacaacagctattgctgcaaaaaaattatatcgtgagtttattgggattgaaatttcagctgaatacattgcattagctcaagaacgactaaatgaaactttgagggaaccaaaattattatga

SEQ ID NO: 64219 - DNA, 3099 bp, Neisseria meningitidis; identical to SEQ ID NO: 52059

SEQ ID NO: 64220 - DNA, 2190 bp, Neisseria meningitidis
atgaagacagacattcaagccgaattaacccaagccctgctaccacacgaaaaagtatgggcgaacgaagaaaaaaccattttagccaaaaacatcctgttggatttggtggaaaaaaccgacccgtccattatcgggttgttattggggaatgatgagttaaaacgccatttttttgtggaagtgaatggtgttttggtgtttaaattgcaggatttccgttttttcttggacaaacacagcgtcaataattcctacacaaaatacgccaaccgcattggtttgacggacggcaaccgctttttgaaagacagttcggatattgtgttggattttccgtttaaagattgcgtattgaatggcggacaaagcagcgaagaaagcgaagagatttattttaaacacagtaatagccagccagccagccagccagccagccagccagccagccagccagccagccagccagccagccagccccaattatacactaaattaacccgaaaaagacaagaaatcttttttaatcaaacgcttgcttttgatgaaatcgatcgactttttgacgcaaaagcattctcaaaattctctcgccacaccgcagacggcaaacaagcggttggcgaaatcaaacgacattcagacggtacgccagctgaaaatctcattatcaaaggcaataatctgattgtcctgcattcgcttgccaagcagtttaaaggtaaagtgaagctgatttatattgatccgccttattattttgttaaaaagaaacaacaagatagttttggttataacactaactttaaattatctacttggcttacatttatgaaaaatcgtttatcaattgccaaagaattattaactgatgatgggattattgttatttccattgatgatgacggaaatgcttatttaaagattttgttagatgaaatttttggatttgaaaattttatcggaaatttacccactattatgaatttaaaaggtaataatgatgaatatgcttttgcaggcactcacgaatacacactagtctttgctaaaaataaagataaatctactttttatgaatttccaatagatgaagataattttttagagaaatgggaagaagatgaaattgggttttataaaaaaggagctccaatgcgagcaacaggaaccgaagataaaagagaagatagacctgaaatgttctatccttttttggtaaaaaataacacagttagtacaattacagatgaagaattttctcaaatctataataaagatttagaagtattcaatgatgattttattcaaaaactaaaagagaaatacgaaaatcttggatacaattttattttacctattgctgataaacaatgggggcgttggcgttgggggtattcaataaagaataaggcaaggctgcagacggatattattgttagccaatctaaaaatggaatttccttgtataaaaaacaaagacctgaattagatgatttacctacaaaaaaacctaaaactattttttataaacctgaatacagtagtggtaatggaactgaacagatgaaaaatctttttggtgaaaaggcatttaaaaatcctaaaccagaagaacttatccaagattttattaccatcacaaccaacgaaaacgacatcgtcctagactaccatcttggtagtggcacaaccgccgccgttgcccacaaaatgaaccgccaatacatcggtattgaacaaatggactatattgaaacgcttgccgttgaacgcttgaaaaaagtgattgaaggcgagcaaggcggtatttccaaagccgtgaattggcaaggtggtggcgagtttgtttatgccgaacttgctccatttaacgaaaccgcaaaacaacaaattttggcttgcgaagattcagacggcatcaaaacgctgtttgaaggtttatgcgaacgctatttcttgaaatacaacgtcagcgtaaatgaatttagtcaaatcattcaagagcctgaatttcaatctttgccattagacgaacaaaaacaaatggtgcttgaaatgttggatttaaatcaaatgtatgtttcattatccgaaatggacgatgaacaatttgcaggctgcctgaatgatgacgataaagcgttaagccgtgcgttctatcaagcggagaaaaaagatggcgaataa

SEQ ID NO: 64221 - DNA, 984 bp, Neisseria meningitidis
atggctgcgtacgacagtttgatggtatttacaggcaatgccaatcccgaattggcacaacgtgttgtcaggcatttggacatttctttgggcaatgcttccgtatccaagttttcagacggcgaagttgccgtcgaactgttggaaaacgtacgcgggcgcgatgttttcatccttcagccgacctgtgcgccgaccaatgacaacctgatggaaatcctgacgatggcggatgcactgaagcgtgcttcggcaggtcgtattaccacagccattccgtatttcggctatgcgcgccaagaccgccgtccgcgttccgtccgcgttccgatttctgccaaactggtggcaaatatgctgtattcggcagggatcgaccgtgttttgactgtcgatttgcatgccgaccagattcaaggtttcttcgatattccggtggacaatatttatgccaccccgattctgttgaacgacatcaaacaacagcggattgaaaatctgaccgtcgtcagcccggacatcggcggtgtcgtccgcgcccgcgccgtggcaaaatccctgaatgccgacttggcaatcatcgacaaacgccgcccgaaagccaatgtggcggaagtcatgaacatcatcggcgatattcaaggtagaacctgtctgattgtggacgatatgattgacactgcaaatacgctgtgcaaagccgccgtcgctctgaaagagcggggggctgaacgtgttctagcctatgccagccacgccgtattctccggagaggcggtcagccgtatcgcctcatccgaaatcgaccaggtggtcgtaaccgataccattcctttgtctgaagcggctaaaaactgcgaccgtatccgtcaggtaacgattgccggtctgttggccgaaaccgtccgccgcatcagcaatgaagaatccgtttcatatctctttaatgaagaagtgatgacaggcagtatgttgctgccataa

SEQ ID NO: 64222 - DNA, 234 bp, Neisseria meningitidis; identical to SEQ ID NO: 40733

SEQ ID NO: 64223 - DNA, 492 bp, Neisseria meningitidis; identical to SEQ ID NO: 39917

SEQ ID NO: 64224 - DNA, 1368 bp, Neisseria meningitidis
atgtcttccccttcaaataccaatcgtcaaacctggtccagccgattaacctatatcctgaccgttgccggcgcgactgtcggtttcggcgcgacgtggcgtttcccgtatttggtcggtgaaaacggtggtggcgcgtatgtgtttttattctgtatcgcgatgctggttatcggcattccgatgattttggtggaaaatgtcatcggacggcgcaaaggcgtgaacgcgctggatgcgttcggcggtccgatgaacggcaaacccattgctaaaatttggaaactggtcggctggatggggctgctcggcacgttcggcatcatggcttattacatggcactcggcggctgggtaatcagctatatcgttaatattattggaggaaatttgaatatttccagccccatcgacggtgtggttacaaaaggcttctttgccgaacacataaacagcccttgggaaattgcgttttatacgctgctttttgtcgccgtgaaccaatggattttggtcaaaggcgttatcggcggcattgaaaaagcggcaaaatagctgatgccgctgctgtttttgttcctaatcgcgatggtcgtccgcaacgttacccttccgggcgcaatggaaggggttgctttctatctgaaacctgatttcagcaagattaccgccgaactgttcgtcttcgttttggggcaggtattttttgccctgagcctgggtttcggcgtgatgattaccttgtccagctatttggataaaaacgaaaatctggtgcaaaccgcagttatcacggcaattaccaataccatcatcgccgtacttgcgggctttatgattttcccgtcgctcttcagcttcggcgttgcctccgattccggtccgactttggtgttccaaagcttgccgattgtgttctcacatatgtgggcgggacctgtgttcgccgtgattttcttctctctgctcctgattgccgctctgacaacttcgctgacgatttatgaagtgttgattacgaccattcaggaaaaaaccaaaatccgccgtaccgccgcaatcacgattgtattggccgccatctacgttttcggcaacatcccgtctattttgagctatggcccgtggaaagacgtttccgtgttcggcaaaaatattttcgatgccttcgactacatcagcggcaacatcttgtttatgctgaccgcgcttggctcggcattgtttgtcggtttcgtgatgaaggatgaagcgaaggaagaattgctttataaaggcaaccatacgacggtcaatatttggtttgcctatgtgaaatacctcgtgccgctggtgattttgctgattttcgtcagcaacctgttttaa

SEQ ID NO: 64225 - DNA, 513 bp, Neisseria meningitidis; identical to SEQ ID NO: 44027

SEQ ID NO: 64226 - DNA, 1872 bp, Neisseria meningitidis
atgagccaagccttaccctaccgcccggacatcgacacattgcgcgccgccgccgtcttgtccgtcatcgtgttccatatcgaaaaaaattggctgccgggcgggtttctcggtgtcgatatattctttgtgatttcaggctttttgatgacgatgattcttcaccgcgaaatgtcggggggggggggggggttttccctgaaggcattttatatccgccgcatcaagcggattctgcccgcatttttcgccgtattggcggcaacgctgacaggcggcttctttttattcaccaaagatgatttctttcttttatggaaatccgcgctgaccgccttgggtttcgcctccaacctgtattttgcaagggggaaggattatttcgatcccgcgcaggaagaaaagcccttgctgcacatttggtctttgtcggtcgaagaacaattttactttgtctttccgatattgctgctgcttgtcgcccgcaaaagcccgcgcgtacagttcggcttcctcgccgcattgtgcgccttaagccttgccgcttcctttatgccttccgcgttcgataaatattacctgccccacctgcgcgcctgcgaaatgctggtcggatcgctgaccgccgtgtggatgcgctgccggcaacctgccgtcggcagacgctgtgccgccgccggcgcattgtttgccgtgtgcatattgtcaacctgcctgttttcctattcggaacaaaccgcctatttcccgggccccgccgctttgattccctgtctggctgttgccgcgctgatttatttcaatcattacgaacacccgcttaaaaaatttttccaatggaaaatcaccgttgccgccggtttgatttcctattcgctttatctgtggcattggccgatattggcctttatgcgctatatcggcccggacaacctgccgccttattcgccggcggcagcgatcgtcctgactctagcgttttccctgatttcttatcactgcatcgaaaagccgtttaaaaaatggaaaggttcgttcgcacaatccgttttatggatttatgccttgcctatgctcattttgggggcgggctcgtttttcgcgatgaggctgccgtttatggcgcaatacgaccgcttggggctgacgcgttccaacacctcctgccacaacaataccggcaaacaatgcctatggggggatacggaaaaacagccggaactgctggttttgggcgattcccacgccgaccattacaaaacattcttcgatgccgtgggcaaaaaagaaaaatggtccgccactatggtttccgccgacgcttgcgcctatgtggaaggctacgcgtcccgtgtgttccaaaactgggccgcctgccgcgccgtttaccgctatgccgaagaacacctgcccctgtattcaaaagtggttttggcgatgcgctggggcagccaaatgcccgaaaacagccgctcccttgcctacgatgccggttttttccaaaaattcgaccgtatgctgcacaaactctcatccgaaaaacaagccgtttacctgatggcggacaaccttgcctcgtcttacaacgtacaacgcgcctatatcttgtcttcacgcataccgggttaccgccaaaccctgcgcccggacgacgaaagcactctgaaagccaatgcacgcatcagggaattggcagccaaataccccaacgtctatattattgatgccgccgcctatatccccgcaaatttccaaatcggcggattgccggtttactcggacaaagaccacatcaacccttacggcggcacggaattggcgaagcgtttttccgaaaaacaacggtttctcgatacgcgccataaccattga

SEQ ID NO: 64227 - DNA, 848 bp, Neisseria meningitidis
atgaccttaatcggaataaagctcaaacagacccagcagctcaaccagcggctgcaacaatctttgcgcgtattgcagatgtcgggtatcgaacttgaacgcgaggtcgaaaactggctgtcggacaatcccctgctcgaacgcaaagacacggatgaattttccgatgctaggttttcccattacaccgcgcctgcccgtcaaatcggcggagacgaaggcgaagatatgctgtccaacatcgccggtgagcaggatttcaagcaatacctgcacgcgcaagtatgcgaacacccgctttccgaccaagaagccgcctgtgtccacatccttatcgatttccttgacgagcagggttatctgaccgacagcatcgaagacatcctcgaccatacgcccttagagtggatgttggatgaagcaatgctgcaacacgcgctgaccgcattgaaaaaattcgacccggcaggcgtggccgccgccgatttgaacgaatcgctgatactgcagatagaaagattgggcgaatgtgctgccaaacccgccgccctgcatatcgtccgaaacgccctcgacagcattgacggcaaccgcagccaaaccctcgcacgaataaaaaacacctgccccaaaccgacagcggcacactcgaagccgcactcgacctcattgcttcgctcaatccctttcccgccgccggttttgcctcgtccacacccacgccgtattctgacgaggcactcgccaacctgctggctttccgcggcatggaggtttctcgccgcaccattgccaaatacagagaatcccttgagattccggcagcacacaaacgcaaaaccgcagaa

SEQ ID NO: 64228 - DNA, 1275 bp, Neisseria meningitidis
atgaatagacccaagcaacccttcttccgtcccgaagtcgccgttgcccgccaaaccagcctgacgggtaaagtgattctgacacgaccgttgtcattttccctatggacgacatttgcatcgatatctgcgttattgattatcctgtttttgatatttggtaactatacgcgaaagacaacagtggagggacaaattttacctgcatcgggcgtaatcagggtgtatgcaccggatacggggacaattacagcgaaattcgtggaagatggagaaaaggttaaggctggcgacaagctatttgcgctttcgacctcacgtttcggcgcaggagatagcgtgcagcagcagttgaaaacggaggcagttttgaagaaaacgttggcagaacaggaactgggtcgtctgaagctgatacacgggaatgaaacgcgcagccttaaagcaactgtcgaacgtttggaaaaccagaaactccatatttcgcaacagatagacggtcagaaaaggcgcattagacttgcggaagaaatgttgcagaaatatcgtttcctatccgccaatgatgcagtgccaaaacaagaaatgatgaatgtcaaggcagagcttttagagcagaaagccaaacttgatgcctaccgccgagaagaagtcgggctgcttcaggaaatccgcacgcagaatctgacattggccagcctccccaagcggcatgagacagaacaaagctggcttgaacgcaccattgccgatatttctcaagaagttttggattttgaaatgcgctctgaacaaatcatccgtgcaggacggtcgggttatatagcaataccgaacgtcgaagtcggacagcaggttgatccttccaaactgctcttgagcattgttcccgaacgtaccgagctatatgcccatctatatatccccagcagtgcagcaggctttatcaagccgaaagacaaggttgtcctacgttatcaggcatatccctatcaaaaattcgggcttgcttccggcagtgtcgtatcagtagcaaaaacggcactgggcagacaggaattgtcgggattgggcatggtatcctccgatttggcgaagagcaacgaacctgtttatctcgtgaaaataaaacccgacaaaccaaccatcactgcatacggtgaggaaaaaccgctgcaaatcggcatgacgttggaagcagacatcctgcacgagaaacggcggctgtacgaatgggtattggagctgatttatagtatgtcgggcaaactgtaa

SEQ ID NO: 64229 - DNA, 1311 bp, Neisseria meningitidis; identical to SEQ ID NO: 50021

SEQ ID NO: 64230 - DNA, 1041 bp, Neisseria meningitidis
atgaaagcaatggtttatcacggcgcaaacgacatccgttttgaagaaaaaccccgtccgcagattatcgatccgaccgatgcggtggtgaaaatcgtcaaaaccacgatttgcggtaccgatttgggtatttggaaaggcaaaaaaaccgaagtcgccgacggccgtattctcggtcatgaaggcatcggtattgtagaagaagtcggcgaggctgtaaaaaacatcaaagtcggcgataaagtcattatttcatgcgtcagcaaatgctgcacttgcgacaactgcaaaatccaactctattcacactgccgcaacggcggctggattttgggctacatgattgacggcacgcaagccgaatatgtccgcacgccttatgccgacaacagcctcgtgccgctgcccgacaacgtcaacgaagaagtcgccctgttgttgagcgacgctttgccgaccgcacacgaaatcggcgtgcaatacggcgatgtcaaacccggcgacaccgtattcatcgcaggtgccgctcctgtcggtatgtccgccttgttgaccgcccaactgtatagccccgccgccattatcgtgtgcgatatggacgaaaaccgtttgaaactggcgaaagagttgggcgcgacccataccgtcagccccgcttccggtgatgtgggcaaacaagttgccgctatcgtcggcgaagacggtgtggactgcgcgattgaagcggtcggcatccctgcaacttggaatatgtgccaagacattgtgaaacccggcggccatatcgccgttgtcggcgtacacgttcaatccgttgatttcaaactggaaaaactgtggattaaaaatcttgccatcactaccggtttggtcaatgccaacaccaccgaaatgctgatgaaggcaatttccagcagctcagtggattacaccaaaatgttgacccaccatttcaaattcagcgaattggaaaaagcctacgacgtgttcaaacacgccgccgaaaatcaagcgatgaaagtggttttggaagcggattaa

SEQ ID NO: 64231 - DNA, 1467 bp, Neisseria meningitidis
atgatgaaattgggtttcaaaccgatacccctcgccattgccgcagtattgtgcgccctggttttggcactgcccgtacccgacggggtcaagcctcaggcttggacgctgctggccatgtttgtcggtgtgattgccgccattatcggcaaggccatgccgttgggcgcgctgtcgattattgccgtcgggttggtcgcagtaaccggcgtaaccgccgacaaaccgggcgcggcgatgagcgatgcgttgagtgcgttcgccaatccgttgatttggctgattgccatcgcagttatgatttcgcgcggtttgctcaaaacagggctggggatgcgtatcggatatttgtttatcgccgtttttggaagaaaaacgctgggcatcggttacagtctcgctctttccgaactgctgctggctcccgttaccccttccaataccgcgcgcggcggcggcattatacatccgattatgcagtcgattgccggcagttacggctccaatcccgcaaaaggcacagaaggcaagatgggtaaatatttggctttggtcaactatcattccaatcccatttcgtcggctatgtttattactgcaactgcccccaaccctttaatcgtcaacttgattgccgaaaatttaggcagtagtttccgtctttcttggggggcgtgggcgtgggcaatggctgttcccggcgttatcgcctttttcgttatgcctttgattttatattttttgtatccgcctgaaattaaagaaacgcccaatgccgttcaatttgccaaagaccgtctgagggagatgggtaaaatgtcggcagacgaaatcattatggcggtcattttcggtatcttgttgctgttgtgggcagatgttcccgcccttattaccggcaatcacgcttttagtatcaacgccaccgccaccgcatttatcggattaagcctgcttttgctttccggtgtattgacttgggacgatgttttgaaagaaaaaagcgcgtgggatacgattatttggtttggcgcattgattatgatggccgcatttttaaataaactcggactgattaaatggttctccggagtgttggcggaaagtgtcggcggtttgggcgttagcggcacggctgcgggcgtaatcctcgtgcttgcttatatgtatgcgcattatatgtttgccagtactactgcacatattaccgctatgttcggcgcatttttcgctgctgccgtttcactgaatgccccggcgatgccgaccgcgctgatgatggcggccgcatccaacattatgatgaccctcactcattatgcgaccggtacttcgcctgtgattttcggttcgggctacaccacaatgggagaatggtggaaggcgggttttatcatgagcgtagtcaattttctgatttttttcgttatcggcagcatttggtggaaagttctggggtattggtaa

SEQ ID NO: 64232 - DNA, 972 bp, Neisseria meningitidis
atgaaacactttcaatccaaagtactgaccgcagccatccttgccgccctcagcggcagcgcaatggcagaaccccccccttccactgacgaaattgccaaagccgccctggttggagtctacaacaatacccaagacatcaacggattcaaagtcggagacaccatctacgacattgaaaatggccagcctaaaggaagaccagcaacagaagacgatgttaaagccgatgacttcggcggtctgggtctgaaagaagtcttggctcaacacgaccaaagccttgccgacctgaccggaaccgtcgaggaaaacagcgaagcattggtgaaaaccgccgaggttgtcaatgacatcagtgccgatgtcaaagccaacacagcagctatcagggaaaacaaagctgctatcgctacaaaagcagacaaaaccgaactggatgaagtgtccggcaaggtaaccgcaaacgagactgctatcggtaaaaaagcaaacagtgccgacgtgtacactaaagctgaggtgtacaccaaacaagagtctgacaacagatttgtcaaaattggtgacagaatcggtaatctgaacactactgccaatggattggagacacgcttggccgatgccgaaaaatccgttaaagaccacggtacgcgcttggcttctgccgaaaaatccattaccgaacacggtacgcgcctgaacggtttggatagaacagtgtcagacctgcgcaaagaaacccgccaaggccttgcagaacaagccgcgctctccggcctgttccaaccttacaacgtgggtcggttcaatgtaacggctgcagtcggcggctacaaatccgaatcggcagtcgccatcggtaccggcttccgctttaccgaaaactttgccgccaaagcaggcgtggcagtcggcacttcgtccggttcttccgcagcctaccatgtcggcgtcaattacgagtggtaa

SEQ ID NO: 64233 - DNA, 267 bp, Neisseria meningitidis
ttgtactgtctgcggcttcgccgccttgtcctgatttttgttaatccactatatgctgatgccggagacgtatattgcgtctataacatcagactgaagcagtacactgcctgccaggttacccgagttgaagaacacggtggcaaaaaaacacatgcgaccctgctggctttggactggcagggcaacaaaccgcttggggcggaggagctggcggatttgaaaccgctttacaaagacttaaagaataatattggaaatattgta

SEQ ID NO: 64234 - DNA, 423 bp, Neisseria meningitidis
atgtattgggaacgcggtctgcacatgtataaggcaagtgccgtcgtgccgacgggatatgtacgggttgggaataccgcgccgctggtcggcgaagacacgcaacggtatgcctctttttggggcgacggctacgacgtgtaccgtcagttgagatggcagcagatatccgaaaaacagagaaaggcattcaaaaaagccgctaaaagcaaaaagaccgtgatgtttgccggacgggaatacggcatatccaaacagaatttgagcgatgtttgggatgattttgaagacgcgatggaactgaaggcgtttccctgcctgtcttcgctgtttctgaccaaatggcataaaaatctatatgatagtggattaacaaaaaccagtacggcgttgcctcgccttagctcaaagagaacgattctc

SEQ ID NO: 64235 - DNA, 3033 bp, Neisseria meningitidis
atgttttggatagttatgatcgttattttgttgcttgcgcttgccggcttgttttttgtccgcgcacaatccgaacgcgagtggatgcgcgaggtttctgcgtggcaggaaaagaaaggggaaaaacaggcggagctgcctgaaatcaaagacggtatgcccgattttcccgaacttgccctgatgcttttccatgccgtcaaaacggcagtgtattggctgtttgtcggtgtcgtccgtttctgccgaaactatctggcgcacgaatccgaaccggacaggcccgttccgcctgcttctgcaaaccgtgcggatgttccgaccgcatccgacggatattcagacagtggaaacgggacggaagaagcggaaacggaagaagcagaagctgcggaggaagaggctgccgatacggaagacattgcaactgccgtaatcgacaaccgccgcatcccattcgaccggagtattgctgaagggttgatgccgtctgaaagcgaaatttcgcccgtccgtccggtttttaaggaaatcactttggaagaagcaacgcgtgctttaaacagcgcggctttaagggaaacgaaaaaacgctatatcgatgcatttgagaaaaacgaaacagcggtccccaaagtccgcgtgtccgataccccgatggaagggctacagattatcggtttggacgaccctgtgcttcaacgcacgtattcccgtatgttcgatgcggacaaagaagcgttttccgagtctgcggattacggatttgagccgtattttgagaagcagcatccgtctgccttttctgcagtcaaagccgaaaatgcacggaatgcgccgttccgccgtcatgcagggcaggcggaggcaaaatccccggatgtttcccaaggacagtccgtttcagacggcacagccgtccgcgatgcctgccgccgcgtttccgtcaatttgaaagaaccgaacaaggcaacggtttctgcggaggcgcggatttcgcgcctgattccggaaagtcggacggttgtcgggaaacgggatgtcgaaatgccgtctgaaaccgaaaatgttttcacggaaaccgtttcgtctgtgggatacggcggtccggtttatgatgaagctgccgatatccatattgaagaacctgccgcgcccgatgcttgggtggtcgaaccacccgaagtgccgaaagttcccatgcccgcaatcgatattccgccgccgcctcctgtatcggaaatctacaaccgtacctatgaaccgccgtcaggattcgagcaggtgcaacgcagccgcattgccgagaccgaccatcttgccgatgatgttttgaatggaggttggcaggaggaaaccgccgctattgcggatgacggcagtgagggtgcggcagagcggtcaagcgggcaatatctgtcggaaaccgaagcgttcgggcatgacagtcaggcgatttgtccgtttgaagatgtgccgtctgaacgcccgtcctgccgggtatcggatacggaagcggatgaaggggcgttccaatctgaagaaaccgatgcggtatacgaacacctgccgacaaccgacctgcttctgccgccgctgttcaatcccgaggcgacgcaaaccgaagaagaactgttggaaaacagcatcaccatcgaagaaaaattggcggagttcaaagtcaaggtcaaggttgtcgattcttattccggccccgtgattacgcgttatgaaatcgaacccgatgtcggcgtgcgcggcaattccgttctaaatctggaaaaagacttggcgcgttcgctcggcgtggcttccatccgcgttgtcgaaaccatcctcggcaaaacctgtatgggtttggaacttccgaacccgaaacgccaaatgatacgcctgagcgaaatcttcaattcgcccgagtttgccgaatccaaatccaagctgacgctcgcgctcggtcaggacatcaccggacagcccgttgtaaccgacttgggcaaagcaccgcatttgctggttgccggcacgaccggttcgggcaaatcggtgggtgtcaacgcgatgattctgtctatgcttttcaaagccgcgccggaagacgtgcgtatgattatgatcgatccgaaaatgctggaattgagcatttacgaaggcatcccgcacctgctcgcccctgtcgttaccgatatgaagctggcggcaaacgcgctgaactggtgtgttaacgaaatggaaaaacgctaccgcctgatgagctttatgggcgtgcgtaatcttgcgggcttcaatcaaaaaatcgccgaagccgcagcaaggggagaaaaaatcggcaatccgttcagcctcacgcccgacgatcccgaacctttggaaaaactgccgtttatcgtggtcgtggtcgatgagtttgccgacctgatgatgacggcaggcaagaaaatcgaagaactgattgcccgcctcgcccaaaaagcccgcgcggcaggcatccatttgattcttgccacgcaacgccccagcgtcgatgtcatcacgggtctgattaaggcaaacatcccgacgcgtatcgcgtttcaagtatccagcaaaatcgacagccgcacgattctcgaccaaatgggcgcggaaaacctgctcggtcagggcgatatgctgttcctgccgccgggtacggcctatccgcagcgcgttcacggcgcgtttgcctcggatgaagaggtgcaccgcgtggtcgaatatctgaagcagtttggcgaaccggactatgttgacgatattttgagcggcggcggcagcgaagagctgcccggcatcgggcgcagcggcgacgacgaaaccgatccgatgtacgacgaggccgtatccgttgtcctgaaaacgcgcaaagccagcatttcgggcgtacagcgcgccttgcgtatcggctacaaccgcgccgcgcgtctgattgaccagatggaggcggaaggcattgtgtccgcaccggaacacaacggcaaccgtacgattctcgtccccttggacaatgcttga

SEQ ID NO: 64236 - DNA, 723 bp, Neisseria meningitidis
atggacaaagatttgtatgccgtattgggcgtgtcgccgcaggcgggagcggacgaaatcaaacgcgcctaccgcaagctggcgatgaaataccatcccgaccgcaatccgggcaatccgcaggcggaagaaaagttcaaagaaatccaacgggcttacgatacgctttccgacctgtcgaaacggatgcaatacgacgcgtccttcagacggcatgaggaacgcgggcggcaggaagaggcattccgccgcgaataggcgcgcagggagcagttttaccgcgaacagatgcgccgcgaacaggcgttcagacaggcgtttgaacggcaggcctcacgttcgcgccatgcttacgaaccgtccggcggcggaagcgggcgcaactatgtcctcgccgcctacatcctgttcggtttgggtgcaatcatgctgttcatgcccatagttggcgtgattttcgcctatatgcccatagtcggcgtgattctcgcctatatgaaacggaacagtttggacagcattgtctatgccacacataccgaatacctgattaaaaccttttggcgcacattttggctttatcttttgggcgcgctgactgcccttttgggtatcggcgtgctgattattattgcaacgaacgtctggtatttctaccgcatcatcgtcggctttatccgcttcaacagcggcagggcggttgcacccgagaaatggatatag

SEQ ID NO: 64237 - DNA, 360 bp, Neisseria meningitidis
atgaccgaccgtccgagcctgctgtggataaagcccggacaggctgaaatcatggaatattgcgaacctgaagaagcatccgacccgtacgcaacatacaggcgtgccaacctgatggcgggtctgccgctgtttgtcgtgattttggttctgctcaatattgtttttccgcttccggcgcatcccttagcttggctggtgcctgcaggtttcatggttttgggcggcggctttcccttatcgctgccgcttgtggcgctgcttgtcctgacctgctgcattctggcgcattgtccgccattatcccgtcttttgtgctacccttgcccgaatcatccgatgtctaaaaattctgcctga

SEQ ID NO: 64238 - DNA, 1335 bp, Neisseria meningitidis
atgccgccacttatatttgctactttcccgatgaagccgtttgccgaaaacatcccccacagccttcgcggcagctgccgcgacgaagccctgccgccgcatacggtagattgcccggaatgcggctgccgcgcagatgtgccccggttggacaggggagaggcggcgttctgtccccgttgcggacacaaactcttcagggtgggcaggcatcctttttccggcccgcccgcttatgcggcggcttcgctgattttgatggcgtttgcttacggtatgacgtatatcgaggtcgggataccgggtgcggcatccgtcctttcgctgcccgagatgatgcgcctgatggtgtttcaggattatggctttttggccgaagtgatgtttgtgctgaccttcggcgcgccggttctgttccttttgctgtgcctgtatgtctatgccgcgctgatacggaaacgggtgtatcctgcgctgcgtttggcaacgcgcgtaatggtgcgcttgaggcaggcgatgatggtggatgtgttttttgtttccactctggtggcgtatatcaagctctcgtctgtggcagaggttcgcttcgggccggcgttttatctgatgttcgcgctgtcggttatgctgattcggacttcggtatcggttccccagcattgggtgtattttcaaatcgggcggctgacgggggataatgcggttcagacggcatcagaaggcaaaacctgttgcagccgctgcctgtatttccgcgacagtgccgaatccccctgcggcgtgtgcggtgcggaactgtaccgccggcggccgaaaagtctgagtatttcgtcggcgtttctgacggcggcggttattttgtatttccctgccaatatcctgccgattatgatttcgtccaatcctgccgccacggaggtcaataccatccttaacggcatcgcttatatgtgggacgagggcgacaggctgattgcggcggttattttcagcgcgagtattttggtgccggtactgaagattgcggcaatgtcggttttgattgcgtccgcccgcttcgctttgccaacgggtgcaaagaaattgtcgcacctctaccgcatcaccgaagcggtcggccgctggtcgatgattgatatttttgtgattattattttgatgtgttcgttccacacttatgccgcgcgcgtcattccgggcagtgcggcagtctatttctgcctggtcgtgattctgacgatgctgtccgcctattatttcgacccgcgcctgctttgggacaaacgcgcttcagacggcattgctttcaatgaaacggaaaaacatgactga

SEQ ID NO: 64239 - DNA, 1347 bp, Neisseria meningitidis; identical to SEQ ID NO: 38402

SEQ ID NO: 64240 - DNA, 498 bp, Neisseria meningitidis
atgagaaaaagtcgtctaagccagtataaacaaaataaactcattgaactgtttgtcgcaggtgtaactgcaagaacggcagcagagttagtaggcgttaataaaaataccgcagcctattattttcatcgtttacgattacttatttatcaaaacagtccgcatttggaaatgtttgatggcgaagtagaagcagatgaaagttattttggcggacaacgcaaaggcaaacgcggtcgcggtgctgccggtaaagtcgccgtattcggtcttttgaagcgaaatggtaaggtttatacggttacagtaccgaattcaaaccgctactttatttcctattatccgtgaacaagtgaaacctgacagcatttttatacggattgttatcgtagctatgatgtattagatgtgcgcgaatttagccattttagcttcgctgaaacttcgttttcgtatcaatcacagcacacattttgctgaacgacaaaaccatattaa

SEQ ID NO: 64241 - DNA, 381 bp, Neisseria meningitidis
atgaatatcaggtttttcgcgctgaccgtaccggttttgtctttggcggcctgtgccgtgccggaggcgtatgatgacggcggacgagggcatatgccgcccgttcaaaaccaagccggcacggcagattttcgggcattttcctgcgagaacggtttgtctgtgcacgtccgccgtttggacggcggcagaatcgcgttgcggttggacggcaggcgtgccgtcctctcttccgacgttgccgcatccggcgaacgctataccgccgaacacggtttgttcggaaacggaaccgagtggcatcagaaaggcggcgaagcctttttcggctttaccgatgcctacggcaattcggtcgaaacctcctgccgcgcccgctaa

SEQ ID NO: 64242 - DNA, 318 bp, Neisseria meningitidis
gtggattggatgggcagtctgttcctgccgggtggcgcactgttgtttctgagcgtggtttcgaccactttacccgcacgtttgggaatgcctttgctgctggtttctcccgccggcgtgttggacggggcggcggaagccttggcgattgcggcgttcctgatgctggtcgcgcgtccgccggcagtgttcggcggtttgtggaaattcaattacagcctgcgtgaaaaggcgtatagccgaatagaaatgcagtccgacaccgtgcttcaggcggggatttggcgtggtacatcctgcccgacggcaaggtcgata

SEQ ID NO: 64243 - DNA, 177 bp, Neisseria meningitidis; identical to SEQ ID NO: 37349

SEQ ID NO: 64244 - DNA, 189 bp, Neisseria meningitidis; identical to SEQ ID NO: 42037

SEQ ID NO: 64245 - DNA, 366 bp, Neisseria meningitidis
ttgcacaaacaagtgcaacatattactacaaagctattttatttcaaaataactgatatatcttttttcatagattttaaatttcatatttttaatattttaggaattttattccaaagaaaaagaaacagattgataaaaacaatacccgccattcattcgggcaaaaccgcacggaacatccgttttcccatttccacgacaatccggtacagaacaccccgctgccgattccgcctgcacatccggcaaaatttcatacgcaaggaaaatgttgaaaacaaaaagaactcattgcttgaaaaaagatttaatgggaatgcgggtatttcccacactttttccatttatttatcctcattatag

SEQ ID NO: 64246 - DNA, 372 bp, Neisseria meningitidis; identical to SEQ ID NO: 38046

SEQ ID NO: 64247 - DNA, 312 bp, Neisseria meningitidis
atgccgtctgaagcattatccggccttcagacggcattttgttttccgacagtttataaactgtcgttgtttcttgacagaaacaacgaccttatttatttgaaacgattggaggacatgattatgggtttttggaatggtgtggcaaaagcagtgggagagggaatgattgaagccggcaatgagcataaggcgttgaaaatggaatatgcggagaaatcaagtgaggagctgcatgaaatcgtcaagagtgatggttttttaaaaattccacacgggagaaaagtgcggcttgagacctttgcaataaca

SEQ ID NO: 64248 - DNA, 381 bp, Neisseria meningitidis; identical to SEQ ID NO: 50035

SEQ ID NO: 64249 - DNA, 234 bp, Neisseria meningitidis
atgcgtattttggatatttttaaaaacccagcgacaggcaatgtgtcgcactcgaaactgtgggcaaacgttgcctgcgcggctgggacgtttaagtttgtgatgttgcccgatccgtcggcggaaatttgggcggtgtatttgggcattgtcggcggctatgcggtggcgcgctcgtttgtcagcgtcaaacgtcaggaggtcgagaatgaatctcgtgaaactgctggcgaa

SEQ ID NO: 64250 - DNA, 225 bp, Neisseria meningitidis; identical to SEQ ID NO: 38048

SEQ ID NO: 64251 - DNA, 198 bp, Neisseria meningitidis; identical to SEQ ID NO: 40083

SEQ ID NO: 64252 - DNA, 465 bp, Neisseria meningitidis
atgttacatatacccccaacggaacctgatcgatatgttagcagtattgtagccttaaacgtgcatagttctaacggtacaggcgattggcacagtgcagcagcccttaatgatgatgcttacccccaagatttctatatttatggcaaagatcaaacacgtagcacgttacatttgcttggtaacgttggtgtgattgatggaacaaaccgcttcaatgagatgggctattatcctgaaaacatcccagtttggctcgcagatcacccccgtgcttgcgtggattatctttacacagcagtgttacaaactggctcaatcggtcgggtgattttagatgattggtttccaagcgatgaagacaagcaatcagtttatgacttacttaaccaaatcgaaccgcacttgaatactcaagaatgggggaatttacagctatggaaacgcaaaaacccaataatgtaa

SEQ ID NO: 64253 - DNA, 513 bp, Neisseria meningitidis
atgcccgcccttccagttatgaagacgaacattatgcacacaccttccccgcataacgaatttatacgcgccatcaaagaaagttcgcccatacttatcggacttctgccttgggcattaatactcggtatgcagggtggacaaaaaggcatgagctggctggaaatgttgttgatgaccagtatgaacttcgccggcggctccgagtttgccacggtcaacctgtgggcggaacctctgccgatactgcttatcgccaccgtaacctttatgattaattctcggcatatcctgatgggggcggcacttgccccgcacctgaaaggaataccgctgaaaaaagccgtacccgcactgttttttatgtgtgatgaaagctgggcgatggcattctccgaaatccaaaaacggaaagcagccggtttgcccgcattcaatatgcctttttatagtggattaacaaaaaccagtacagcgttgcctcgccttagctcaaagagaacgattctctaa

SEQ ID NO: 64254 - DNA, 420 bp, Neisseria meningitidis; identical to SEQ ID NO: 37358

SEQ ID NO: 64255 - DNA, 258 bp, Neisseria meningitidis
ttgaaaaggaaaaataacatcattgaattatccattgaggatctggagctaatttatggcggaggcttaggggagagaatccttgaaggaggagcaaatggtgcacaaataggaggatcaattggtgcaggtattggtctgggtgtcggtatagtttctagtggtattcctgccggaccggctattattctcggtggcacagttggtgctgctgttggtgctgtaactggtatgggtgttgcagcatatgagtattac

SEQ ID NO: 64256 - DNA, 240 bp, Neisseria meningitidis
ttgctgattttgttaatttttgagtataggaagtttctaatggcaaccggtatcgtaaaatggtttaacgacgctaaaggttttggtttcatcacgcctgatgaaggcggcgaagatttgttcgctcacttctcagcaatcaatatggaaggtttcaaaaccctgaaagaaggccaacgcgtctctttcgacgtaaccaccggccctaaaggcaaacaggccgccaacattcaggctgct

SEQ ID NO: 64257 - DNA, 237 bp, Neisseria meningitidis; identical to SEQ ID NO: 44060

SEQ ID NO: 64258 - DNA, 300 bp, Neisseria meningitidis; identical to SEQ ID NO: 44062

SEQ ID NO: 64259 - DNA, 132 bp, Neisseria meningitidis
gtgcgtaccgcatataccctacacgttggttttgaagttccgcataattcacaggtagggtgtgtggcgcagccacgcacacggtcggttggatatgcaggctacagcttattacaggttatatacattaat

SEQ ID NO: 64260 - DNA, 204 bp, Neisseria meningitidis; identical to SEQ ID NO: 41400

SEQ ID NO: 64261 - DNA, 204 bp, Neisseria meningitidis; identical to SEQ ID NO: 48054

SEQ ID NO: 64262 - DNA, 204 bp, Neisseria meningitidis; identical to SEQ ID NO: 40089

SEQ ID NO: 64263 - DNA, 192 bp, Neisseria meningitidis
gtgaagcataagctcgcgtcttggtggaaaaccatcaagctgacagcaaacttgatggcaggcgtgcccgattatgaaaactacgttgcacagcagcgcaaacataatcccaacgcccctgtgatgaccaagctgcagtttcaagactattgccgcaaacgccgctgcggcgcaaacggcggacgctgctgt

SEQ ID NO: 64264 - DNA, 444 bp, Neisseria meningitidis; identical to SEQ ID NO: 37707

SEQ ID NO: 64265 - DNA, 195 bp, Neisseria meningitidis
atgtcctatgatttatcgaaacgacttgtaatcggcttagcatcaagtgccctattcgacttatccgaatcggataatatatttagaatggaaggggcagaaacctataggcaatatcagagaaaaaaacaaaaccatcccctaaaaaaggcgttgtctttccatttattaaaaaacttctgtcaatcaatgaaa

SEQ ID NO: 64266 - DNA, 807 bp, Neisseria meningitidis
atggcagacatcctgccatccgacaagcggcagcaaccgccaaaaacgaaaggaaatccaatgaacataatcgaacaagaaacgaaacgcgccgagttaagaaaaatagatgccgaaatcgccaaaatcattgccgacgcgcacaaaatcaacgccgaatccgtaaaaatagcccaagagtcccgctggtatcccatgatagcggccaccgggctggttaccgccatcgccgccgtgttggcactgatattcaaatttgcctgaccacaagccccgcgaggggctttatcccacgaacaaaatgaacagagccgcactattcaaccgctaccccgaatggattatcgggcaagacggcgcaagccgtttcattacccattgccgctatccccgcctgattgccaaaatccacaggcagacagacggcgaatgcccgggcgggcattaccgccattccgaaaacggcatcaccctttacgattttatttttttcgacggcaaaccggcagacgaagcccgatttgccgccgtccttaccgaaacctgccgccgggcagtcaaaaaaatatgcgaaacaaaataaaccgcaacgacatggaactcggctacacgccttacaaccttcgcaccctgcgcaaccgctgcaaactgacgcaggccgagttggcgcaaatcgtcggcgtgaagcactacatacaggtaggccgctgggaagccgaacccgataccgaaacgcggcgggccgatatgccgctggaaaaatggcggcagttcctcgattggatagaaaaaacaaacgccgtctga

SEQ ID NO: 64267 - DNA, 393 bp, Neisseria meningitidis
ctatgttcgagtaattcttattctgaacctgtaagattagaaagatcacaaattaaatttcaatcaagtaataatttaaaatcaagtggttttaaattagattcaagttctaagagttttgccaaattcatagaagcggcaaattttgagcacatccctacgggcgcaaaagcccgaatcaacgccaaaataaccgccagcgtttcccgcgccggcgtattggcgggggtcggcaaacttgcccgcttaggcgcgaaattcagcacaagggcggttccctatgtcggaacagcccttttagcccacgacgtatacgaaactttcaaagaagacatacaggcacgaggctaccaatacgaccccgaaaccgacaaatttgcaaaggtctcaggc

SEQ ID NO: 64268 - DNA, 126 bp, Neisseria meningitidis
atgaacaaggcaatgccgtctgaagggctttcagacggcattttgcgctattttgtgaaggtagggatgacggttagagacctttgcaaaattccccaaaatcccctaaattcccaccaagacatt

SEQ ID NO: 64269 - DNA, 978 bp, Neisseria meningitidis
atggcgatggcaggaaacgaaaaatatcttgattgggcacgcgaagtgttgcacaccgaagcggaaggcttgcgcgaaattgcggcggatttggacgaaaacttcgcccttgcggcggacgcgttgttgcactgcaaaggcagggtcgttatcacgggcatgggcaagtcgggacatatcgggcgcaaaatggcggcaaccatggcctcgaccggcacgcccgcgtttttcgtccaccctgcggaagcggcacacggcgatttgggcatgattgtggacaacgacgtggtcgtcgcgatttccaattccggtgaaagcgacgaaatcgccgccatcatccccgcgctcaaacgcaaagatatcacgcttgtctgcatcaccgcccgccccgattcaaccatggcgcgccatgccgacatccacatcacggcgtcggtttccaaagaagcctgcccgctggggcttgccccgaccaccagcaccaccgccgtcatggctttgggcgatgcgttggcggtcgtcctgctgcgcgcacgcgcgttcacgcccgacgatttcgccttgagccatcctgccggcagcctcggcaaacgcctgcttttacgcgttgccgacattatgcacaaaggcggtggcctgcctgccgtccgactcggcacgcccttgaaagaagccatcgtcagcatgagcgaaaaaggtttgggcatgttggcggtaacggacgggcaatgccgtctgaaaggcgtattcaccgacggcgatttgcgccgcctgtttcaagaatgcgacaattttaccggtctttcgatagacgaagtcatgcatacgcagcccaaaaccatctccaccgaacgcctcgccaccgaagccctgaaagtcatgcaggcaaaccatgtgaacgggcttctggttaccgatgcagacggcgtgctgacaggtgcgctgaatatgcacgacctgctggcggcacggattgta

SEQ ID NO: 64270 - DNA, 363 bp, Neisseria meningitidis
atgaagcggcaggctttcttcaaactgatggcgtgtgcggcatttctgtctgccgtttcgctgcgcctccccgtattgggcgcgtgttacgcaatattgtccctctatgcgtttgcactttacggcatcgacaaacggcgtgccgtgcggggaaaacgccgcattcccgaacaccgcctgctgctgcctgccttgttcggcggttgggcgggcgcatacttgggcagcaggatattcaggcataaaacggcgaaaaagcgttttgttgtgctgttccgtctgactgtttcgggcaatgtcctggcgaccctcatcctgatttatagtggattaaatttaaaccagtacggcgttgcctcgcct

SEQ ID NO: 64271 - DNA, 435 bp, Neisseria meningitidis
atgaaaaaacaaatcaccgcagccgtaatgatgctgtctatgattgcccccgcaatggcaaacggcttggacaatcagacatttgaaaaccaagtgttccacacgcgggcagatgcaccgatgcagttggcggagctttctcaaaaggagatgaaggagactgagggggagtggattcctaatgctgttggaggcattatgggaggagttggagggcatttcagctatatggctagtgctattgctagtggctcgtataatcgaaatgaacattggacagcaattggaggtggtgcgttaattggtgcgatgaaccctattaacggaggaagagcactgattaatggtatgcgaggtgtagcagtggggactgttgctggtggcataaatggttatgcaggttctacggggaagaacactgacattcgccgttaa

SEQ ID NO: 64272 - DNA, 303 bp, Neisseria meningitidis; identical to SEQ ID NO: 40930

SEQ ID NO: 64273 - DNA, 222 bp, Neisseria meningitidis
atgggcggcaaagtgcagcacaataaaggcaaaatacgcgacaatgctttaaaagccttagtgaaatccgatttgttccggtacaaggtggaacggaaaaggaaaggcaaaggcagctacaacaggcaggaagcgaaaaaatggcgggacggttttgatactgtcccgccatttttatgtcttaaacatggaagctttcgccgcagccgcaggagtctttga

SEQ ID NO: 64274 - DNA, 216 bp, Neisseria meningitidis; identical to SEQ ID NO: 40095

SEQ ID NO: 64275 - DNA, 198 bp, Neisseria meningitidis
atgccgtctgaaaaccgcagcgcgggggtttgtggtgcattatatgccgtattgcaggacaaggcacagggcagggcggtggggtgcatcgtagcaactgtatttttgcccgacggggtgaaaaatacagttgctacacccactgataatgaaaaaagagagcaatgccgtctgaaccgcgtgttgcggcgagcataa

SEQ ID NO: 64276 - DNA, 183 bp, Neisseria meningitidis; identical to SEQ ID NO: 56199

SEQ ID NO: 64277 - DNA, 660 bp, Neisseria meningitidis
atgggcaggcatttcgggcgcaggcgttttttgacggctgccgccgttgcggcggcgggcgcggcggtttcttttttgccgaatccttttgccgccggcggcgaaaaacgcaacggggatgaaaaacgcgatgaaaatgtgtttttctggaaaggtgtcgcgctgggttccggcgcggagctgcgcctgttcggcgtggataacagacaggcggcggatttggtcaacaaggttttggcggaagtggcgcgtttggaaaaaatgttcagcctttaccgtgaagacagcctgatcagccgcctgaacagggacggttatctgacttcgccgtcggcggattttttggaactgttgagcctgtgccgcgatattcacgcgctgacggacggcgcgttcgatccgacagtgcaggcgttgtggaaactgtatgccgattattttgccgcccgtcccgatgcggaaacgccgcctcctcaaaacagcgtgaaggaagccctgaaacgggtcggcttcggcaaagtctcgtttgacgaccgtgaaatccgttttgccgaaaagggtatgggtttgtccttgaacggcatcgcgcaaggctatagtggattaacaaaaaccagtacggcgttgcctcgccttagctcaaagagaacgattctctaa

SEQ ID NO: 64278 - DNA, 222 bp, Neisseria meningitidis; identical to SEQ ID NO: 40096

SEQ ID NO: 64279 - DNA, 171 bp, Neisseria meningitidis; identical to SEQ ID NO: 50701

SEQ ID NO: 64280 - DNA, 342 bp, Neisseria meningitidis
ttgtttgtatgctttgaaaaatgtttgtttccggattttgccattcccatccggttttgcgctgtacgatgtgttttagcgcggacttgctcaaaatcggatgtggttccggtatttggggctttgattagggatgcggactttcaatatatttttctcagctacaacaacgaaggcttgatgtctgtcgggcaggtaagggagatttttgagcgtttcggcaaatataatttggttcaaacggaatatcggcgttttaaggcagataagacagaaaaccgtaatcataaggcaaattcgatattcgaatatctgcatgagacctttgcaaaaatagtctgt

SEQ ID NO: 64281 - DNA, 414 bp, Neisseria meningitidis; identical to SEQ ID NO: 42058

SEQ ID NO: 64282 - DNA, 207 bp, Neisseria meningitidis
atggatgaagcggtttttgccgattgggcgttgaaaatctgcctgaccggcttgattatttttttgggttttatcgtttggaatttgggcaaggagtctaaagcgggcaaattcggcatcgccattttgtttttggttttgggcttgggcgtgtttggttttgtgttcaaagagttattgattaagtttttggtattgccgaaatag

SEQ ID NO: 64283 - DNA, 147 bp, Neisseria meningitidis
atgaaagaatacaaagtcgtcatttatcaggaaagcctgttgtccagcctgtttttcggcgcggcaaaggtcaaccccgtcaatttcagcgcgttcctcaacaaacaaacccccgaaggctggcgggtcgagacctttgcaataaca

SEQ ID NO: 64284 - DNA, 216 bp, Neisseria meningitidis; identical to SEQ ID NO: 42829

SEQ ID NO: 64285 - DNA, 138 bp, Neisseria meningitidis
atgtgcgcggctattatggcatattttggcggctttgttcgcgctttgttcgatcttggcgtgtttgaacgcggcggcaggagagggaggagggaatggttttcccacgtttggcggcggtgtcggcggggccgcgcc

SEQ ID NO: 64286 - DNA, 1134 bp, Neisseria meningitidis
atgaaaatcgtttttatcacaacagtcgcatccagcatttacggtttccgcgcccccgtcattaaaaaattaatcggcaaaaaccatcaggtgtatgcctttgtatcggagttttccgataatgaattggatattatcagggaaatgggggttacacccgttacctaccgttcaaaccgcagcgggctgaacccgttttccgatataaaatccaccttcctcatctttaaagaactcaaaaaaatatcgccggatttggttttcccttatttcgcaaaacccgtgattttcggcacttttgccgcaaaactggcaggcgtgcccagaatcgtcgggatgctggaaggtttgggattcgcatttaccccgcagccggaaggcataccgttaaaaacaaaaatcataaaggggattttgattgccttgtaccacattgccctgccgatgttggaaagcctgattgtattaaaccccgacgacaaagacgaactgacggacaaatacggcatcaaaataaaaaacatccatattttgggcggaatcggtctggatttgcggcaatatccttattccgaggcggatattcccgatgaaaaagaacccgtaaaattcctctttatcggcagatttctgaaagaaaaggggattgatgattttattcgggcggcggaacaggttaaggacaaataccccgatacggtttttaccgctttgggcgcaatcgacaaatcacgcggggggggggggggcgatttggaacgccttgccgcccgcgatattatccgtttccccggttttgtgaacaatgtttccgaagtgataaaagaacatcatatattcgtattgccgtcttattatagggaaggcgttccccgaagcactcaggaggcaatggccgtcggcagggcagtgattacgacggatgtccccggatgcagggaaacggtcgccgacaaggtcaacggcttcctgatcgagccttggaatccccgcatcttggccgaaaaaatgatttattttatcgaaaacagggaagccgtccgcctgatggggaatgcaagttatgcgattgccaaagataaattcgatgccgaaaaagtcgatttgaaattgctcgatattttgaaggcgtaa

SEQ ID NO: 64287 - DNA, 309 bp, Neisseria meningitidis
atggcaaaccgatttcggcagcgcaaatccgcataccgccgccttagcggcaagccgttgttttcagacggcattgcggccaacctttgcggcgggcgcaaaaccttgtcctataatttatcccgtttcaaaatcagcatacggtcggaaatgcaaaaaatatctttcaatttgttgaaacctgcaaccccgaaaatagggaaacgccgccccggtttgaacggcgcgccgcatattccgatgccctccccccgataccttccggcaagcccagaaatgcccggcaacaatatccatccggcaaaaatc

SEQ ID NO: 64288 - DNA, 1050 bp, Neisseria meningitidis
atggatttaagtatcgtagttcccatttataatgtcgagagttatttggaagcgtgtctaaattccatagaacctatattaagtaatgaaaatgtcgaacttatccttgtgaatgacgggtcaaaagacggaagtgaagatatatgttataaatatatagataaaacaacaaacaacaaacaacaaacaacaaacaacaaacaacaaacaacaaacaacaaacaacaaacaacaaacaacaccagataccgaacaccaaacatcaaatatatatatcaggataaccaagggacggcagaagctaggaataccggaataaaaaattcaaacggaaaatatatagtctttattgattcagatgattttattaattgtcaggtcttgctggattttcttagtaaagatgatattgatatgccggatgtggtttttttaaatgcggttaaatatgataagggaagtgtttcacattttggcgaagattatcagcctgaaaaaatactcaagcaatccaaagtcgaagttttgaaaggattatgccgatttagaaaatttccgggttcggcgtgtaataagattataaaaagggaattgattatcaaagaaaaactgttttttgaaaaagaggtttatgccgaagatatcgaatggtcaatgagattatttaatgcggcaacaactttttcttatttggacggttgttattactattatcggcagggaagaaaagattctaaaacaggaactgtttcggaaaaaagtataaagtcattattatatattttggagaaaaatgcggaaatggaatttgatagggatatatcaagttatctttattcttttctttcctacgaatatctcgttttgctttttatcatgacgagtaaaaatatagagtgtgatgctgatataaaaagaagggcgtatcatttaaggtttatgctgttaaagtccaataaattgatatataagctgatattcccgataatcacattattcggggtcgatattacaggcaggattttaaaagcaatcagggggaatatttaa

SEQ ID NO: 64289 - DNA, 3246 bp, Neisseria meningitidis
atggctgccttcaaacctaattcaatcaactacatcctcggcctcgatatcggcatcgcatccgtcggctgggcgatggtagaaattgacgaagaagaaaaccccatccgcctgattgatttgggcgtgcgcgtatttgagcgtgccgaagtaccgaaaacaggcgactcccttgccatggcaaggcgtttggcgcgcagtgtccgccgcctgacccgccgtcgcgcccaccgcctgcttcgggcccgccgcctattgaaacgcgaaggcgtattacaagccgctgattttgacgaaaacggcttgatcaaatccttaccgaatacaccatggcaacttcgcgcagccgcattagaccgcaaactgacgcctttagagtggtcggcagtcttgttgcatttaatcaaacaccgcggttatttgtcgcaaagaaaaaacgagggcgaaactgccgataaagagcttggcgctttgctcaaaggcgtagccgacaatgcccatgccttacagacaggcgatttccgcacaccggccgaattggctttaaataaatttgagaaagaatgcggccatatccgcaaccaacgcggcgattattcgcatacgttcagccgcaaagatttgcaggcggagctgaatttactgtttgaaaaacaaaaagaattcggcaatccgcatgtttcaggcggccttaaagaaggtattgaaaccctactgatgacgcaacgccctgccctgtccggcgatgccgttcaaaaaatgttggggcattgcaccttcgaaccggcagagccgaaagccgctaaaaacacctacacagccgaacgtttcatctggctgaccaagctgaacaacctgcgtattttagagcaaggcagcgagcggccattgaccgataccgaacgcgccacgcttatggacgagccatacagaaaatccaaactgacttacgcacaagcccgtaagctgctgagtttagaagataccgcctttttcaaaggcttgcgctatggtaaagacaatgccgaagcctcaacattgatggaaatgaaggcctaccataccatcagccgtgcactggaaaaagaaggattgaaagacaaaaaatccccattaaacctttctcccgaattacaagacgaaatcggcacggcattctccctgttcaaaaccgatgaagacattacaggccgtctgaaagaccgtatacagcccgaaatcttagaagcgctgttgaaacacatcagcttcgataagttcgtccaaatttccttgaaagcattgcgccgaattgtgcctctaatggaacaaggcaaacgttacgatgaagcctgcgccgaaatctacggagaccattacggcaagaagaatacggaagaaaagatttatctgccgccgattcccgccgacgaaatccgcaaccccgtcgtcttgcgcgccttatctcaagcacgtaaggtcattaacggcgtggtacgccgttacggctccccagctcgtatccatattgaaactgcaagggaagtaggtaaatcgtttaaagaccgcaaagaaattgagaaacgccaagaagaaaaccgcaaagaccgggaaaacgccgccaaattccgagagtatttccccaattttgtcggagaacccaaatccaaagatattctgaaactgcgcctgtacgagcaacaacacggcaaatgcctgtattcgggcaaagaaatcaacttaggccgtctgaacgaaaaaggctatgtcgaaatcgaccatgccctgccgttctcgcgcacatgggacgacagtttcaacaataaagtactggtattgggcagcgaaaaccaaaacaaaggcaatcaaaccccttacgaatacttcaacggcaaagacaacagccgcgaatggcaggaatttaaagcgcgtgtcgaaaccagccgtttcccgcgcagtaaaaaacaacggattctgctgcaaaaattcgatgaagacggctttaaagaacgcaatctgaacgacacgcgctacgtcaaccgtttcctgtgtcaatttgttgccgaccgtatgcggctgacaggtaaaggcaagaaacgtgtctttgcatccaacggacaaattaccaatctgttgcgcggcttttggggattgcgcaaagtgcgtgcggaaaacgaccgccatcacgccttggacgccgtcgtcgttgcctgctcgaccgttgccatgcagcagaaaattacccgttttgtacgctataaagagatgaacgcgtttgacggtaaaaccatagacaaagaaacaggagaagtgctgcatcaaaaaacacacttcccacaaccttgggaatttttcgcacaagaagtcatgattcgcgtcttcggcaaaccggacggcaaacccgaattcgaagaagccgataccctagaaaaactgcgcacgttgcttgccgaaaaattatcatctcgccccgaagccgtacacgaatacgttacgccactgtttgtttcacgcgcgcccaatcggaagatgagcgggcaagggcatatggagaccgtcaaatccgccaaacgactggacgaaggcgtcagcgtgttgcgcgtaccgctgacacagttaaaactgaaagacttggaaaaaatggtcaatcgggagcgcgaacctaagctatacgaagcactgaaagcacggctggaagcacataaagacgatcctgccaaagcctttgccgagccgttttacaaatacgataaagcaggcaaccgcacccaacaggtaaaagccgtacgcgtagagcaagtacagaaaaccggcgtatgggtgcgcaaccataacggtattgccgacaacgcaaccatggtgcgcgtagatgtgtttgagaaaggcgacaagtattatctggtaccgatttacagttggcaggtagcgaaagggattttgccggatagggctgttgtacaaggaaaagatgaagaagattggcaacttattgatgatagtttcaactttaaattctcattacaccctaatgatttagtcgaggttataacaaaaaaagctagaatgtttggttactttgccagctgccatcgaggcacaggtaatatcaatatacgcattcatgatcttgatcataaaattggcaaaaatggaatactggaaggtatcggcgtcaaaaccgccctttcattccaaaaataccaaattgacgaactgggcaaagaaatcagaccatgccgtctgaaaaaacgcccacctgtccgttaa

SEQ ID NO: 64290 - DNA, 3249 bp, Neisseria meningitidis
atgcgaacgaccccaaccttccctacaaaaactttcaaaccgactgccatggcgttagctgttgcaacaacactttctgcctgcttaggcggcggcggaggcggcacttctgcgcccgacttcaatgcaggcggtaccggtatcggcagcaacagcagagcaacaacagcgaaatcagcagcagtatcttacgccggtatcaagaacgaaatgtgcaaagacagaagcatgctctgtgccggtcgggatgacgttgcggttacagacagggatgccaaaatcaagcccccccccccgaatctgcataccggagactttccaaacccaaatgacgcatacaagaatttgatcaacctcaaacctgcaattgaagcaggctatacaggacgcggggtagaggtaggtatcgtcgacacaggcgaatccgtcggcagcatatcctttcccgaactgtatggcagaaaagaacacggctataacgaaaattacaaaaactatacggcgtatatgcggaaggaagcgcctgaagacggaggcggtaaagacattgaagcttctttcgacgatgaggccgttatagagactgaagcaaagccgacggatatccgccacgtaaaagaaatcggacacatcgatttggtctcccatattattggcgggcgttccgtggacggcagacctgcaggcggtattgcgcccgatgcgacgctacacataatgaatacgaatgatggaaccaagaacgaaatgatggttgcagccatccgcaatgcatgggtcaagctgggcgaacgtggcgtgcgcatcgtcaataacagttttggaacaacatcgagggcaggcactgccgaccttttccaaatagccaattcggaggagcagtaccgccaagcgttgctcgactattccggcggtgataaaacagacgagggtatccgcctgatgcaacagagcgattacggcaacctgtcctaccacatccgtaataaaaacatgcttttcatcttttcgacaggcaatgacgcacaagctcagcccaacacatatgccctattgccattttatgaaaaagacgctcaaaaaggcattatcacagtcgcaggcgtagaccgcagtggagaaaagttcaaacgggaaatgtatggagaaccgggtacagaaccgcttgagtatggctccaaccattgcggaattactgccatgtggtgcctgtcggcaccctatgaagcaagcgtccgtttcacccgtacaaacccgattcaaattgccggaacatccttttccgcacccatcgtaaccggcacggcggctctgctgctgcagaaatacccgtggatgagcaacgacaacctgcgtaccacgttgctgacgacggctcaggacatcggtgcagtcggcgtggacagcaagttcggctggggactgctggatgcgggtaaggccatgaacggacccgcgtcctttccgttcggcgactttaccgccgatacgaaaggtacatccgatattgcctactccttccgtaacgacatttcaggcacgggcggcctgatcaaaaaaggcggcagccaactgcaactgcacggcaacaacacctatacgggcaaaaccattatcgaaggcggttcgctggtgttgtacggcaacaacaaatcggatatgcgcgtcgaaaccaaaggtgcgctgatttataacggggcggcatccggcggcagcctgaacagcgacggcattgtctatctggcagataccgaccaatccggcgcaaacgaaaccgtacacatcaaaggcagtctgcagctggacggcaaaggtacgctgtacacacgtttgggcaaactgctgaaagtggacggtacggcgattatcggcggcaagctgtacatgtcggcacgcggcaagggggcaggctatctcaacagtaccggacgacgtgttcccttcctgagtgccgccaaaatcgggcaggattattctttcttcacaaacatcgaaaccgacggcggcctgctggcttccctcgacagcgtcgaaaaaacagcgggcagtgaaggcgacacgctgtcctattatgtccgtcgcggcaatgcggcacggactgcttcggcagcggcacattccgcgcccgccggtctgaaacacgccgtagaacagggcggcagcaatctggaaaacctgatggtcgaactggatgcctccgaatcatccgcaacacccgagacggttgaaactgcggcagccgaccgcacagatatgccgggcatccgcccctacggcgcaactttccgcgcagcggcagccgtacagcatgcgaatgccgccgacggtgtacgcatcttcaacagtctcgccgctaccgtctatgccgacagtaccgccgcccatgccgatatgcagggacgccgcctgaaagccgtatcggacgggttggaccacaacggcacgggtctgcgcgtcatcgcgcaaacccaacaggacggtggaacgtgggaacagggcggtgttgaaggcaaaatgcgcggcagtacccaaaccgtcggcattgccgcgaaaaccggcgaaaatacgacagcagccgccacactgggcatgggacgcagcacatggagcgaaaacagtgcaaatgcaaaaaccgacagcattagtctgtttgcaggcatacggcacgatgcgggcgatatcggctatctcaaaggcctgttctcctacggacgctacaaaaacagcatcagccgcagcaccggtgcggacgaacatgcggaaggcagcgtcaacggcacgctgatgcagctgggcgcactgggcggtgtcaacgttccgtttgccgcaacgggagatttgacggtcgaaggcggtctgcgctacgacctgctcaaacaggatgcattcgccgaaaaaggcagtgctttgggctggagcggcaacagcctcactgaaggcacgctggtcggactcgcgggtctgaagctgtcgcaacccttgagcgataaagccgtcctgtttgcaacggcgggcgtggaacgcgacctgaacggacgcgactacacggtaacgggcggctttaccggcgcgactgcagcaaccggcaagacgggggcacgcaatatgccgcacacccgtctggttgccggcctgggcgcggatgtcgaattcggcaacggctggaacggcttggcacgttacagctacgccggttccaaacagtacggcaaccacagcggacgagtcggcgtaggctaccggttctga

SEQ ID NO: 64291 - DNA, 1131 bp, Neisseria meningitidis
atgtttaaaaaattcaaaccggtactgttgtcattttttgcacttgtatttgccttttggctgggaacaggtattgcctatgagattaatccgcgttggtttttgagcgatacggcaactgaagtacctgaaaatccgaatgcttttgtggcgaaacttgcccgcctgttccgaaatgccgacagggcggttgtcatcgtgaaggaatcgatgaggacggaggaaagtcttgccggaactgcggatgacggtccgttgcagtcggagaaggattatctcgcgctcgctatccggctcagtcgtttgaaagaaaaggcgaaatggtttcacgtaacggagcaggaacatggggaagaggtctggctgaattaccatatcggcgagggcggtttggttgcggtttcgctttcgcaacgctcgccggaagcgtttgttaatgccgaatatctgtatcggaacgatcgtccgttttctgtaaatgtgtacggcggaacggctcacggagaaaattatgaaacgacaggagaatatcgggttgtttggcaaccggacggttcggtatttgatgcgtcggggtacgggaaaatcggggaagatgtttatgagcattgcctcgggtgttatcagatggcccaggtatatttggcgaaataccgggatgtcgcgaatgatgagcagaaggtttgggacttccgcgaagagagcaaccggattgcgtcggactcgcgcgattctgtgttttatcagaatatgcgggaattgatgccccggggataggcgaacagtcttgtggtcggctatgatgcggacggtctgccgcagaaagtctattggagtttcgacaatggaaaaaaacgccagagtttcgaatattatttgaaaaacggaaatctttttattgcacaatcttcgacggtagcattgaaagcggatggcgtaacggcggatatacagacctatcatgcgcaacagacgtggtatttggatggcgggcggattatccgcgaagagaaacagggagacagactgcctgattttcctttgaacttggaaaatttggaaaaagaggtgcgccgttatgcagaggctgcggcgagacgttcgggcggcaggcgcgacctttcttactga

SEQ ID NO: 64292 - DNA, 1176 bp, Neisseria meningitidis
atggatatacaaagtaaagcgaaaaaattgattgagatgattcagacggcaccggtggagtggaagccgttgggggaagtggcaagtataggaaagggaaagcagcttaataaatcactacttagagaaaaagataagtatcccgtaatcaatggcggtattaatccatcaggttattggcatgaatacaataacgaagctggcacgattgttattagccaaggaggagcaagtgcggggtttgttaattggatggatatccctttttttgcaggagctcacgcatatactattaaagcgaacgaagacaaactattgcaacggtttgcatatatttttaaaaatgaagcaaattacattcatgcaatgtcaatacggagaggtataccagcacttgctaaaagtgaattgcaaaacttacttattcccatcccgcccctagaaacccaacaaaaaattgtaaaaatacttgacaaattcaccgagctggaagctacgctggaagcggaattagccctgcgcaaacgccaataccggtattaccgcgactttcttttagattttgacaatcaaatcggggggatagctgatggctatcaatgccgtctgaaagatgtggtttggaagacgttgggggagattgccgaatattcaaaaaaccgtatttgttcggataaactgaacgaacataattacgtgggcgtggataatctcttacaaaatagagaaggtaaaaagttatccggttatgttccaagtgagggaaaaatgacagaatatattgccaatgacatcttgattggaaatattcgtccgtatttgaaaaaaatctggcaggcagactgcacgggcggaacaaacggtgatgttttggttatccgggtaacagatgaaaaggttaatccaaaatatctgtatcaggtattggccgatgataaattttttgcctttaatatgaagcacgccaaaggtgcaaaaatgccgcgtggcagcaaagcagcgattatgcaatataaaatccccatcccaccactccccgaacaggaaaaaatcgtcgccatcctagacaaattcgacaccctgacccactccgtcagcgaaggcctgccgtacgaaatcgccctgcgccgcaaacaatacgaatattaccgcgaacagctgcttgcctttcggtag

SEQ ID NO: 64293 - DNA, 1164 bp, Neisseria meningitidis
atgaacatcaccatagtcgccccctactgctcgctgccgtccgaaccgtatttcaaccgcttttggtatctggcagaacgattgtcgcaatcgcacgacgtgttgctgattaccagccgtttccgccactacgacaaatccttcagacggcatgaagatgctgccgccacttcaaacggcaggctgcacgtcaagctgctggacgaacccggctaccgaaaaaacgtctccctcgcccgcgtcgccagccaccgcgtattcgtccgcaatttggcacgctggctgcacagcccgcaggcggcggaacaggacatcgtctattccgcctatccgctgatggcgaccaacctgctgttgggcaaacacaaagcgcgtttgggctacaaactgattgtcgatgtgcaggacgtatggccggagtctttctcctcggtcgtaccatttttgaaaaaagtaccgcacaagctgctgccctttgcttcacgcgccaaccgtgcctaccgctgcgccgacgcgctggttgccgtatcgcagacttatctcgaccgcgccaaagaagccaatccgaacgtacccggcgaagccgtctatatcggtacggattttgccgccatcgcccccccgcgattccgctccaaaaccacccgccttttctacttgggtacgctcagttacagctatgacgtcgaaaccgtgtgcaaaggcgtccgcaaactgttggatgatggcgaagatgtagagctgcacatcatgggcggcggtcccgatttggacaggctcaaacaatacgcctgcgagggcatcaagttttacggctatatcccctacgccgaaatgatgtcagtcgccaaaggctgcgacatctccgtcaacgccatccattcctactccatggcatcgataaccaacaaactgtccgactacatggcattgcaaaaaccgattttaaacagccaggtcaacgacgaagtcgccgaagtcctcaccctgctgccgcatgcggactaccgttccggcgatgtggacagcttcatccaagccgccaaagacattctggcgcgcaaaaacgaccccgttcagtccgatgaaatcgtccgccgcttcaggcgcgacatttcctatcggaaaatcgtcaacctgattgaaagattggcaaatgagtaa

SEQ ID NO: 64294 - DNA, 1128 bp, Neisseria meningitidis
atgccaacatatctctctcgcctatcattcagtttctcgcgccgtttgcccgttattttgcaaacggaagcagccgaatgtggattagcgtgtttggtatcggtgttggggtttcatggtttttatacggatttgcgccatttaagggcgcgtttttctttgtcgcttaaaggcgcaacattggcggatttggtacggtttgctaatagcatgaatttaaccgctcgggctgttcggttggatttagatgagttagcaaatttgcgcgtaccctgtattttgcattgggatttaaatcattttgtggtgttgcatgaagttcatcgcaatcacattatgattatgaaccctgcttcgggttggcaaaaagtgcgtatggaagaagtctcgcgctgttttacaggtgtagcattggaactatttcctaacacgcaatttgaagagaaacacgaaacgcgtaaaattcgtgtactaccgatgttgcgcggagtggtgggattaaaaagatctttatttcagcttttaccgttggctactgtattacaggtatttgctttggcaagccctttttttatgcaatgggtaatagaccatgccattgtatcggcagaccgtgatttattgctgacattggcattgggttttggcttgttgatgattgtgcagcagttggtatcattgttacaaacttgggcgggtatgtacttatctacctctttgaatattcaatggaaagctaatgtattacgccgcttaatggatttgtgtgcaatttctgtgttggacggtgtttttaccgttggggcgttaatggcgtttatgtcctacaaaagtcagtttgagagtaaagcagggtcattgattgaccagtttgtgcaaatcaaaatgctaggattgcacgctgaacgtttggcggatattgtgctagaagaaacagaaaacgagcagaacaatgatttcaggctgcctgaaaatttagaacactttgatattcaaatagaaaatgtttcttttcgctatgctgaaaatgaaccatacattttgcaagattttagtttaatcatcaaacagggaacagcaaaaatccccgctgcaacggggatttttgttcggctctcgcctgtgtga

SEQ ID NO: 64295 - DNA, 1053 bp, Neisseria meningitidis
gtgtttgaaacgccgacatttgagcaaatccgcgagcgtatcctgcgcgataccaaaagcctgtggccggatgccgatatcagccccgacagcgaccattatgtgcacgccagccgtttggccagctgcgccgaagggcaatatgcgcatcaaagttggattgtgcggcagattttccctgataccgccgaccgcgagtatttggagcggcatgcctccatgcgcggcttgcgccgccgcaatcctaccacggccagcggcacgctgaccgtaagcggtattgcgcaatccatgctttcagacggcctgcaagtgcgtatcggccagcgtttttaccgcactaccgcccgcgccgttatcggcagcggcggcacggcggaaataccggcaatcgccgacgagccgggcgcggccgccaatgtcgacggcgaggcgcaactgatggccgcccccgccggtgtggccaccgaatgccgccttaccgtacaaggcggcaccgaccgagaaagcgatgcctcactgctggcgcgtctgttggaaatcatccgccgaccgcccgcaggcggcaaccgttacgactataaaaactgggcgttgagtgttgacggcgtaaccagcgcatatgtttatccgctgcgccgcggcttgggtacggtggatattgccattacctccgccgacggtgtgccatcggaagaaactgtgcgccgcgtacaggcttatatcgacgagatgcgcccggtaacggcaaaaaatgcgctggtactcaagccaaccgtaacggcggtgcctgttaccgtgcaagtcaagctcgacggcatcgacttggacgaggccaagcgccgcatacggacggccctaaaagaatatttcgacaccctgatccccggcgacggcctgactgtgtcgcaaatcgaggcggctatcagcaatgtggatggtgtgatcgaccgccgtctgactgcgccgacggccaaccgtgccgccgatacggttaaccgcatcgagtggtttaaagcgggcgcgattaatgtaacggagatgccgtcatga

SEQ ID NO: 64296 - DNA, 1653 bp, Neisseria meningitidis
atgtgtaaagatgtaaagccgaatttcgcagaagaagccgccccattgggcgatatgtcggaatttgccgcgccgtttgcacaaccgcgttacgacgtggacggcgcgggcgtgtggtatatcggcgttaagaccgatagggagggcaacacgcaggaagccacgccggtaaaactctcatcccccattgaaatcataggcaggggcacggacaacgacggcgcatattaccgcgtgatacgctggcaggacgctaacacacggcgaaccaaaatcgccgccatcccgcaatcggaaatcggtacagttcaaggctggcagcgtttgcagtcttacggcttggctgtcttatcgggcagggttaagcgtgagcggctttccgactatttgcagacacagggcagcggcgatatttacaccattaccgaccgcgcaggctggcacggcaacgcctatatcctgcccaatggcgaaaccatcaacgcagagggcgcaaacatcctatacaacggagacaccagccaaagggagggctatacggaatcgggcagccttgaagaatggcggctacacttggcgggcagttcgtccaaaggcaaaaccacagccgccaaccttgcattaagcgtatggggcagctatgaagccacaaaaagcaactgggacactaccgcattaggtttgcagaatgccgccttagcgcgtaacgacggctttttagcactggacgaaatcggacagaccgcagacccgcgaagaatcccccaaatggtttacagcgtgattaacggcatatcgaaaacacagggcgcgaaagacggtggcaaccgcaaacaaaagacatggcgcaatttgatactctcaacgggcgaaaccaaccccgaaagcctaatcggagaccgcgcccaatggagggcaggtaaccgcgcccgattgcccgatatacaggcagaagccaaacacggcatatacgacacgctgcacggcttcacagacggcgcgaaactgtcggagcatatcaacagggcagccgccaagaaatacggcacggcagggcgcgcccttatccgccaaatcctttcagacggcaaagaagccgccgccgaaaccatagaagcaacacgcgcccggtaccttgaagccttgccgcctatggaagggcaggcacggaggatagcccgccgttttacccttttagccgccgttttagaatatgccgcgcccatcacaggattaaaggcaggcggggcggcggttatgcagtgctttcacgaatggctggaagagaacggcacaggagaccgcgacgcagaagcgatatgcagccagttggacgactttatcgcacaatatgccgattccccgcgcttcctgtcgtggagcgaaagagacgcgccatacaccatgacaggcggcaaaggcaaagggcacgcaggctttaaagtgcaggctggtggcaatgacgagttttatatcctgccgctggtgtttagagaagaaatcgcccaatcgttcccgattcataccgtgtgtaaggtactatcgggaaaaggacgcttgaagccgtccaaaacaggctaccagcaccaaatcaaagtgaacaagaagccgatacgccattatttaatcattgagccgctagaacttgattga

SEQ ID NO: 64297 - DNA, 1200 bp, Neisseria meningitidis
atgtggacgggatttttttcaaaatcaggcactggcattgcagaggaaaggcatcaaaaccgccatcctcgcccccatgttccgttatctgcggaaagaaacagcaagtatcctgaccggccctacggttttgcccaataccggcaaagcggtttggacatctatgcatggcacggcatgtatttcttcccccgctttccgttcatcgacatcgaccgcatccgctgggtgtgtgcgggtttgaaagctttcaaacactacatccgcgaaaacgggctgcccgacctgattcacgcccaccgcatgaactatgccggcatactcgcccaaaaaatttcccaaaaatacggcatcccctatgtcgtcacggaacacagcagcaccatcacgcgcggtctgatccgtccccaccaatggcagccgatggaaaaagcagcggcgcacgcctccgcactgctcgctgtcagccgccatttcgcacacgtcctgcaacacaaatacggctgcgaatggcagtacctcccccacatactgggcggaatattcaaccgaccgtttgaacaaagagaaaaaaacaacaaaccgcatttcgtgttctgcaccgtctcgcaccttcgccgtctcaaaggacacgatgtcctactcactgcctttgcccgggcgttggcacaatgcccgcaactgcgtctaaacatcggcggcagcggacaggaagaacagcggctgaaacagcaggcggcagacttgggcattacccatgccgttacatttttaggcgcactgcaacccgaagcagtcttggatttgatgaagaacagcgacgcatttgtccttgccagccgcaccgaaaccttcggcgtggtctatatcgaagcactgtcccaaggattgcccgtcattgcaacacgctgcggcggtgcggaatctattgtttcagacggcaacggatatttggttcctgttgacgacgacgatgcccttgccgacgcactcatcaaaatgtatgaacaccactctgattttgaacctgcccgacttagggaaaactgtctgaacgaatttggcgaaaatgccgttataggcaggttgatctgcattttccgacaggcaatcgcagaatacggtaagaaaataccggtgaaatatagtggattaacaaaaatcaggacaaggcgacgaagccgcagacagtacaaatag

SEQ ID NO: 64298 - DNA, 465 bp, Neisseria meningitidis
atgcaaatagataatatatccgatgaacaggttgtgattgtcagaatgtcttgttatcttaagaaagatgaaatttttaagaatatagaaagatatggatatcagtcatcagatattaagaaaattagttctccttttccattaaatattttacctgctcccaaaccttattatttttatctttatgatacccatttgaatcaaatttatgatttggcttggtcatgtaatgattttttaatgtttgaaatatttattttggatagggaaagcatcaaatatatagataaagataaactttttaaatctggagaaacactatattcgaattttaaatctattaaaaatcaatgcaaaaattatttttgcggttttgattttgatgccccttactttaaaagcggtgtgagtcaggtggcagattataattttgttcctgatgcattttctttattctttatttaa

SEQ ID NO: 64299 - DNA, 420 bp, Neisseria meningitidis
ttgataaacatgaaaacatcgacggtcgtttttggcggattttttatggcagacaacggagagcgaatccaaatccccgttttggaaaatcctgacattagggaaatcaatcactttttcgtatcaaattttgagaaaaaagccggcgtccttgttttcagaatcatccccgagccggaatttggcgataccgaattaactatctattttgaaaaaggatattatttgccaatgattcaaacaattttagaagacggggatattgaagtcaaaaaccttaaaacagaaaattacagcgggaaggcaagggaaatcttgggagattcctaccctattgagcatatctctaaaaatatttctacaattcaaaatataatttctgaatttatgatacaaaaacaaacaccggcaccaataatt

SEQ ID NO: 64300 - DNA, 2109 bp, Neisseria meningitidis
atgacactgaaagcaagcaagcaagcaagcaagcaagcaagcaagcaagcaagcaagcaagcaagcggtcgggttaatctattaacattatctgttttatcgctgttttgcacgccatatgcttggggttcggatgcgtacgatcccgtcaaagaagccgagattaaaaacaaatttattttagaagcggcggaaaacagagattcacacgtttggcgcggcccgtgcagcatatcttttgattgctttggtatgttcagtgctcagcttggttcaaatactcgttctaccgaaatcggcggcgatgccgatttttcattttcagacaagccggcaaacggcgtttcccattatttttccagcggtaaaaccgatccaaattcatctgaagccttgtatgacgaaatcaatatcacgggtaaaaactacaatagcggcatcctcgccgtcgataatatgcccgttgttaagaaatatgttacagagaattacggagctgatttaaagcaggcggttaaggatcaattaaaggatttatataaaacaagacccgaagattgggaaaaaaataaaaaaatagttgaggaagcgataataaaacaatatggaatacctagaaataaaattaataaatttagaaaagttattgatccaattatagaagaagctgtactcactcctcatagtaatacatcacagactagtctcaacaacatcttcaataaaaaattacacgtcaaaatcgaaaacaaatcccacgtcgccggacaggtgttggaactgaccaagatgacgctgaaagattccctttgggaaccgcgccgccattccgacatccatatgctggaaacttccgataatgcccgcatccgcctgaacacgaaagatgaaaaactgaccgtccataaagcgtatcagggcggtgcggatttcctgttcggctacgacgtgcgggagtcggacaaacccgccctgacctttgaagaaaaagtcagcggacaatccggcgtggttttggaacgccggccggaaaatctgaaaacgctcgacgggcgcaaactgattgcggcggaaaaggcagactctaattcgtttgcgtttaaacaaaattaccggcagggactgtacgaattattgctcaagcaatgcgaaggcggattttgcttgggcgtgcagcgtttggctatccccgaggcggaagcggttttatatgcccaacaggcttatgcggcaaatactttgtttgggctgcgtgccgccgacaggggcgacgacgtgtatgccgccgatccgtcccgtcaaaaattgtggctgcgcttcatcggcggtcggtcgcatcaaaatatacggggcggcgcggctgcggacgggcggcgcaaaggcgtgcaaatcggcggcgaggtgtttgtacggcaaaatgaaggcagccgactggcaatcggcgtgatgggcggcagggccggccagcacgcatcagtcaacggcaaaggcggtgcggcaggcagttatttgcatggttatggcgggggtgtttatgctgcgtggcatcagttgcgcgataaacaaacgggtgcgtatttggacggctggttgcaataccaacgtttcaaacatcgcatcaatgatgaaaaccgtgcggaacgctacaaaaccaaaggttggacggcttctgtcgaaggcggctacaacgcgcttgtggcggaaggcgttgtcggaaaaggcaataatgtgcggttttacctgcaaccgcaggctcagtttacctacttgggcgtaaacggcggctttaccgacagcgaggggacggcggtcggactgctcggcagcggtcagtggcaaagccgcgccggcattcgggcaaaaacccgttttgctttgcgtaatggtgtcaatcttcagccttttgccgcttttaatgttttgcacaggtcaaaatctttcggcgtggaaatggacggcgaaaaacagacgctggcaggcaggacggcgctcgaagggcggttcggcattgaagccggttggaaaggccatatgtccgcacgcatcggatacggcaaaaggacggacggcgacaaagaagccgcattgtcgctcaaatggctgttttga

SEQ ID NO: 64301 - DNA, 1248 bp, Neisseria meningitidis
atgtttgttccgctggcaatgcttgcaggtatgttttcctactacgaaaccttccacgaaacggaagcgttgcaggacgacctgctccgtcaggcggcattgtacgtcgcccccgattccaaacccgaaactttgcccgagggcgacggcgatacgcgtattttggtacagatgccgcagcaggaagaccctgttgtcagcctgcctgcgcatctggcggacggtctgcacacgcttcaggcggacggggacgacgattattaccgcgtctatatccgcacgaccgaacagggacggattgccgttatgcaggaaaacgaataccgtgaagatttggcggcggatgcggcgtggcagagcgtgttgccactgctggcggcattgccgctgatgatactgctgaccgtgtggatcacgcatcaggcgatgcgccccgtccgcaaattgtcgcaaagtctcgaacaacgccgaatcaatgacctgtctgctttgagtgtggacaatattcccagtgaaatcagaggtttcgtaaccgccatcaacctgcttttgaaacgtgcggatgaagacatccgccaccgtcagcggtttgtcgccgacgcggcacacgaattgcgtacgccgatgacagccctttcccttcaggcggaacggctcaacaatatgtcgctcccacccgatgcagcgcggcagcctgccgttttgcagcagagcatcaggcgcaacaaacacctgctcgaacagcttttggcactggcgcgttcgcagtcggacgaaacccctctgacgaaaacgacattcggtctgcaaagccgtttccgccaagtgttgcaggaactgatgccgctggctttggaaaaacgtcaggacatcggtgtggcggtcagaggcgatgtcgaagtgtctgccgacgaaacagaaatctatacgctgattaaaacctttgccgataacgcggtacgttacacgccgcctgaaggcaggatagatttgggtttcacggacgaagggaaatatcttgccgtgtgggtggaagataacgggaacggcattcccgaatccgaacgcgcccgcgtcctcgatccgttttaccgtattttgggaacggagcagcaggggacggggctggggctgtcgattgccgacacgcttgccaaaaaatacggcggacatttggaattgaccgacagccgacgtttcggacacggtctgttgatacgggcgttgttggacaaggaaaccctgaaa

SEQ ID NO: 64302 - DNA, 2022 bp, Neisseria meningitidis
atgaaactcgaagcaagcaagcagaagtttaaaaaatcatttattataagtctatttttttctattctttatacctctccgcttttggctgttgattacgtttacgacaaaaccaagctcactgatgatgaaattacccgcttaaaaaaacttcgcgataaaacgagtgaatattggaaaaaagaaacttatcttataaccggggataatccaaaagttccatccgtccccgcactatactctaaaacacaccaattcaaaaacatcaacaactcaaaaaagatttctttttatgacaaggaatacactgaagattaccttgttggcttcgcccgaggtttcggggttgaaaaaagaaatggggaagaagaaaaaacactccagcaatattttaaggactgtgtaaatactgggaattccaataatgataagtgtgaacaaccatccttcgaaaactctggcccaagattaataaagagcgatattttcgccttagctccacaaataaaaaatagccatatcaacagcgaaattttatctgtaggtaattatatcgaatggcttcgcccaacacttaataagcttcctagttggcaagagcatctatattctggtttagatccattccactatattgaggttacagacaactcacacgttatcggacaaacaattagtttggatgaattccgcttagaaaattctctctgggaaccccgttgggattctgatgttggggaattaaaaacaacgaatgcagacatccgttttaatactaaaagtgaaagtttactcgtaaaagaagattatgctggcggagctcgttttcgttttgcttacggtctaaaagataaagtccctgaaacaccaattttaacttttgaaaaaaatataactggcacatcagatattatttttgagggaaaagcgttggataatttaaaacacctagacgggcatcaaattatcaaagtaaatggcacagcagataaacacgcattccgtctttctggcaaacaccaaaagggaatttatacgctttctttacaacaacgcccagagggcttttttaccaaagtgcaagaacgcgatgatattgcgatttatgcacaacaggctcaagccgccaataccttattcgccttgcgtttgaacgacaaaaacagcgatatttttgaccgcactttaccacgcaaaggcttgtggttgcgtgtgattgacggacattctaagcaatgggtgcaaggcaaaacagcacctgtagaaggctatcgtaaaggtgtgcaactcggtggcgaagtattcacatggcaaaacgaaagtaatcaactttccgttggcttaatgggcggacaagcagaacaacgcagtactttccgcaacccagatacagacaatcttacaacgggaaatgtgaaaggctttggtgcaggcgtttacgccacttggcatcagcttcaggacaaacagacaggtgcgtatgcggatagctgggtacaatatcaacgtttccgccaccgtatcaacactgaagatggtacagaacgttttacttcaaaaggtattactgcctcaattgaagcaggttacaacgctttattggcggaacacgtaactaaaaagggcaacagccttcgtgtttacctacaaccacaggcgcaattgacttatttgggggtaaacggaaaattcagcgatagcgaaaatgcccacgtgaatttacttggctctcgccaattacaaagccgagtgggcgttcaagctaaagctcaatttgctttcactaatggcgtcactttccaaccatttgtttccgtcaattcaatctaccaacaaaaacctttcggggtagaaatggacggagaacgtcgagtgataaacaataagacggcaattgagagccaattaggtgtagcagtgaaaatcaaatctcacttaaccttacaagccacattcaaccgccaaacaggcaaacatcatcaagctaaacaaggtgcgttgaatttgcagtggacgttttaa

SEQ ID NO: 64303 - DNA, 1971 bp, Neisseria meningitidis
atgctgccaagccaagccaagccaagccaagccaagccaagccaagccaagccaagccaagccaagccaagccctgatctaagcgacacagccggggcgaacaccgaggcaatctacacttcagacggcattaccgccaactctacccaactcgaacagctcaaaaaactgtttcccgcctgttttgacgcagacggaaatttccttatcgacagattacaagccgaaattgcgccacagaccgacatcggacgcgaattttacgaaatgaactggctgggcaaatcatatgcccgcctgcttcgcaacctgccgcccgaaaccctgataagtgaagataagacgcacaacgccaagcccgaaaatgtaggcagccaaaacctgctgattcgtggcgacaatctagaagtgttgaaacacttaaaaaacgcctatacaaacagcgtgaagatgatttacatcgacccgccctacaacactggctcggacggctttgtctatcaggacgaccgcaaattcacacccgccgaacttgccctcctggcgaatattgacgaagacgaagccgcgcggattttagatttcaccgacaaaggctcaaactcgcacagcgcgtggctgacctttatgtatccgcgcctgtatatcgcccgcgaactgttaaaggacgacggcgtgatttttatctcgattgacgataacgaagcggcgcaattgaagttgctttgcgatgaagtgtttggggaagggaattttgttgctaatgtgatttggcaaaagaaatatagcccacaaaacgatgcaaaatggttttcaaatatgcacgactacattttatgcgttgcaaaaaataaagatatttggcgaccaaacttattagagagaacagaagaacaaaatgcaagatattccaatcctgataatgatgaacgtggaaactggaaagcaactgatttttctgtgaaaacatattcagaaaattatgactatccaattaccacgccatcaggacgaattgttaatccgccacctagtagaagttggagaacttcaaaagaaaattttgaaaaattattagcagataacagagtttggtttggaataaatggtaataatgttccctcaattaaaaaattcttaacagaagtaaaacaaggaataacaccttcaacaatattatttagagaaaatgttggtgataatcaggaagctgcaaaaaatattagagacttatttgatattccaccttttgaaactccaaaacctgttaggttattaaattatcttattaaacttagttcaaattcggacgatatcgtgatggacttcttcgcaggcagcggcacgaccgcacacgccgtgatgcagcttaacgccgaagaacaaaacggcagccgccgctatatctgcgtgcaactgcctgaaaaaaccggtgaaaaatccgaagcccgtaaagcaggctacccgaccatcttcgacatcaccaaagcccgcatagaaaaagccgccgccaaaatccgcgccgaacatcccgattacacgggcgatttgggcttcaaaatctttcaaacggcagacaatttcagacagcatccggacaaggatttttcgcccgagcaaccggatttgccgcttaacgatgaattaagcgaagaacagctgcaaacgcttctgaccacctggacgctgtatgacggagcggcactgaccacgccggttgagcctgtgcggttgggcagttatacggcgtatttgtgcgaaaaacggctgtatctgatgaatgccggttttacttccgccgatttgttggcgtttatccgcaagctggacgacgatgcggctttcaatcccaaccgcgtgattgtattcggcagcaatatggcaagcgcaatgcagcacgaacttgaccaggcggtacgcggttataccaataaaaaagagattgagttaaacgtgattatcagggtttga

SEQ ID NO: 64304 - DNA, 534 bp, Neisseria meningitidis; identical to SEQ ID NO: 42952

SEQ ID NO: 64305 - DNA, 669 bp, Neisseria meningitidis
atgacgacccatctgtccaatgtcgcaccggacctgcaaaactatttgaacgccatcggcgaacccgaacatcccgttttgacgcggctgcgcgagaagaccgggcatcaccgtatgggcaaaatggcgattgcgcgcgaacaggcggcagttttggtttggctggcaaagctgatccgtgcggaaaaatatctagaaatcggcgtatttaccggatacagcagcaccgcgcttgcattggcactgcccgaacacgggcggattaccgcctgcgacatcaatgtaacctttaccgatacggcgcgtcaggtttggaacgaggccggtgtggcacataaaatcagcctgcacctgcaacccgcattgctgacattggatgatttgattgcacagggtgaagccggaagctacgatttggcactgatagacgcagacaaaccgcccacgccgcaatatttcgagcgttgcctcaaactcgtccgtcaaggcggcatcatcgccatcgacaatattttgctgaacggaagggtgatgcgcgaagcggcttccgatgcgccgcccagcgtcggcatcctcaaagatttcaatcaaaacctgccgaacgacccgcgcatcgtccccatcaccctgcccgtcggcgacggcttgaccctgcttctgaaaaaataa

SEQ ID NO: 64306 - DNA, 1386 bp, Neisseria meningitidis
atgacccgtaccgaacacgacacgatgggcaatgtcgaagtcccgtccgaagcctattggggcgcgcagacccagcgcagccgcaacaatttcaaaatcggcggcgaaaccctgccgcagccgctgatttatgctttggcgctggtgaaaaaagccgccgccgcgaccaatgtttccctcggcaggattaagccggaacaggcggatttgattacgcaggcggcggatgatgtgttgaacggcaagctcgacggacagtttcctttagtggtttggcagaccggctccggcacgcagtccaatatgaacatgaacgaagtgctggcgaatcgcgccaacgaaattgccggtacgggtttggcggcgtaccggcccgtccatcccaacgaccatgtgaaccacgcgcaatcgaccaacgacgcattcccgaccgctatccacgttgccgccgcgattgaaatcaaccgccacctcatccccgccgtaaaagccctgcgcgacacgttggacaaaaaagcccaagctttcgcccctatcgtcaaaatcggccgcacccacttgcaagacgcgacgccgctgactttgggacaggaattttccggctacgtttcccagcttgatcacggtttaggccgtctgaacgatgcgcttaaagacttgtatgaacttgctttgggcggtacggcggtcggcacgggtttgaacagccatcccgaatacgccgaaaaagctgctgctaaactcgccgaactgtctggcttgccgtttgtcagcgcgccgaacaaatttgaagccttaggcggacgcgatgccgccgttgccgcttcgggcgcattgaaaacgctggcggcaagcctgaataaaatcgccaacgacatccgctggctggcaagcggcccgcgttgcggtttgggcgaaatcaaaatccccgaaaacgagccgggttcgtccatcatgccgggcaaagtcaacccgacccaatgcgaagcaatgacgatggtgtgctgccaagtgttcggcaacgacgttaccatcggtatggcgggcgcgtcgggcaatttcgagctgaacgtctatatgcccgttatcgcctacaacctcttgcaatccatccgcctcttgggcgacgcgtgcaacagcttcaacgaacactgcgccgtcggcatcgaacccgtaccggaaaaaatcgactatttcctgcaccattccctgatgctcgttaccgcgttgaaccgcaaaatcggttacgaaaacgccgccaaagtcgccaaaaccgcctacaaaaacaacaaatcgttgcgcgaaaccgccgttgagctgggcttgctgacgggcgaagaatttgacgaactggtcgttcctgccgatatggttcatccgcgctaa

SEQ ID NO: 64307 - DNA, 447 bp, Neisseria meningitidis; identical to SEQ ID NO: 42843

SEQ ID NO: 64308 - DNA, 4170 bp, Neisseria meningitidis; identical to SEQ ID NO: 59769

SEQ ID NO: 64309 - DNA, 459 bp, Neisseria meningitidis; identical to SEQ ID NO: 41438

SEQ ID NO: 64310 - DNA, 654 bp, Neisseria meningitidis; identical to SEQ ID NO: 39949

SEQ ID NO: 64311 - DNA, 993 bp, Neisseria meningitidis; identical to SEQ ID NO: 44011

SEQ ID NO: 64312 - DNA, 546 bp, Neisseria meningitidis; identical to SEQ ID NO: 51021

SEQ ID NO: 64313 - DNA, 432 bp, Neisseria meningitidis; identical to SEQ ID NO: 62356

SEQ ID NO: 64314 - DNA, 1296 bp, Neisseria meningitidis; identical to SEQ ID NO: 45572

SEQ ID NO: 64315 - DNA, 204 bp, Neisseria meningitidis; identical to SEQ ID NO: 43658

SEQ ID NO: 64316 - DNA, 378 bp, Neisseria meningitidis; identical to SEQ ID NO: 37228

SEQ ID NO: 64317 - DNA, 651 bp, Neisseria meningitidis; identical to SEQ ID NO: 41065

SEQ ID NO: 64318 - DNA, 306 bp, Neisseria meningitidis; identical to SEQ ID NO: 36883

SEQ ID NO: 64319 - DNA, 747 bp, Neisseria meningitidis
atgaacgttttgatttccaacgacgacggctacctctccgaaggcatcgccgttttggcgcgcgttacggcggaatttgccaacgtcagggtggtcgcgcccgaacgcgacaggagcggggtcagcaattcgctgacgctggaacgccctttgcagttgaaacaggcgcaaaacgggttctactatgtcaacggcacgccgaccgactgtatccacatcgggcagtctgtattttcggattttcaggccgattttgtcttttcgggcatcaaccggggcgcgaatatgggggacgacacgctttattcggggacggttgcggcggcaaccgaagcctaccttatgggcatacccgctgtggcgttttccttaaacgacgcttccggacgctattgggcaaccgcagaaaaggcactgtggacattgttggcgcattttttcaaaaatcccccgcagtcccctattttgtggaacatcaatatccccgccgttgcgccggaagatgtgcggggcattaaaatcgcccgtttgggcaggaggcatcacggtcagaacgtcattcccgcgcgcaatccgcgcggcgaacagatttattggatagggccggtcggcgaagtttccgatcgggaagagggaacggatttcggtgaatgcggcgcaggtttcattaccgtaacgccgctgcaaatcgacctgaccgcctatccggacatggcggaaacagcggcgttctggcatgcggactga

SEQ ID NO: 64320 - DNA, 141 bp, Neisseria meningitidis; identical to SEQ ID NO: 42905

SEQ ID NO: 64321 - DNA, 1542 bp, Neisseria meningitidis; identical to SEQ ID NO: 50825

SEQ ID NO: 64322 - DNA, 1797 bp, Neisseria meningitidis
atgaataccgtatcgaattacctgtccgcattgcgcgaagccatgaaggcgcaaggcttggacgcgctcgtcatcccttccgccgacccccacctgtccgaatacctgcccgcacactggcaggcgcgccgcgaattgtcgggctttaccggctcggtcggcacattcgtcgttaccgccgatgaagcgggcgtatgggtggacagccgctattgggaacaagccgccaaacagcttgcgggcagcggcatcgaactgcaaaaaagcgggcaagtgccgccgtataacgaatggctcgcggcaaacctgcccgaaaacgccgccgtcggcatcccttccgatatggtctcgctcaccggcaaacgcactttggcgcaatccctgaccgccaaaaacatccgcatcgaacacccaaacgatctgcttgaccaagtgtggacaagccgtcccgctatccccgccgaaaccgtgttcatccacgaccccgcctacgtctccgaaaccgccgccgaaaaactcgcccgcgtgcgcgccgtgatggcggaaaaaggcgcggattaccacttggtttcctcgcttgacgacatcgcctggctgaccaacctgcgcggcagcgacgtacctttcaaccctgttttcgtgtccttcctgctgatcggcaaagacaacgccgtcctgtttaccgaccgatgccgtctgaacgccgaagccgccgccgcgctgcaaaccgccggcatcacggttgaaccttacgcccaagttgccgacaaactcgcgcaaatcggcggcgcgttgcttatcgaaccgaacaaaaccgccgtcagcacgcttgtgcgcctgcccgaaagcgtgcgccttatcgagggaatcaacccgtccacgctgttcaaatcctgcaaatccgaagccgacatcgcccgcatccgcgaagcgatggaacacgacggcgcggcgttgtgcggtttcttcgccgagtttgaagacatcatcggcaacggcggcagcctgaccgaaatcgacgtggacaccatgctctaccgccaccgcagcgagcgtccgggctttatttcattgagtttcgacaccatcgcaggcttcaacgccaacggcgcactgccgcattacagcgcaacgcccgaaagccacagcaccatcagcggcaacgggcttttgctcatcgactccggcgcgcaatacaaaggcggcacgaccgacatcacccgcgtcgtccctgtcggcacacccaccgccgaacaaaaacgcgacaacaccctcgttctcaaagcccatatcgcgcttgccgaagccgtgttcccagaaaacatcccctcgccgctgatagacgcgatttgtcgcaaacccctgtggcaggcgcaatgcgactacggccacggcaccggacacggcgtaggctatttcctcaacgtccacgaaggcccgcagcgcatcgccttcgccgcccccgccacgcccgaaaccgcgatgaaaaaaggcatggtaacctccatcgaacccggactctaccgtccgggaaaatggggcatccgcattgaaaacctcgccgccaaccaagccgtcgccgacccgcaggaaaccgaattcggcagcttcctctgttttgaaaccctgaccctctgccccatcgacacccgcctgatggacaccgccctgatgaccgacggagaaatcgactgggtcaaccgctaccacgccgaagtccgccgccgcctcgagccgctgaccgaaggcgcggcaaaagcgtggctgatcaaacgcaccgaaccgctggcgcgttaa

SEQ ID NO: 64323 - DNA, 2163 bp, Neisseria meningitidis
atgcaacaaaaagtccgtttccaaatcgaaggcatgacctgccaggcatgtgcttcgcgcattgaaaaagtgttgaacaaaaaagactttgtcaaatcagcgggagtgaacttcgccagcgaggaggcgcaggttacgtttgacgacagcaaaacctcagtagccgacattgccaaaatcattgagaaaaccggttacggcgcgaaggaaaaaacggaagatacattgccgcaacccgaagcagaacaccatatcggctggcggctgtggctgctgttcaccatcaacgtcccgttccttatcggcatggcggggatgatgatcggcagacacgattggatgattccgccgttgtggcagttcgcattggcaagcgtggtgcagctttggctggcaatcccgttttacaaaagcgcgtgggcgagcattaagggcggactggcgaatatggacgtgctggttaccatcggcacggtctcgatttacctgtattccgtctatatgctgtttttcagcccgcacgcggcgtacggtatggcgcatgtgtattttgaagtgggcgtgatggtgatcggttttgtgtcactgggtaaatttttggaacaccgtaccaaaaaatccagcctcaacagcttgggcttgctgctcaaacttacaccaacccaagtcaacgtgcaacgcaacggcgaatggaaacagcttcccatcgaccaagtgcaaatcggcgaccttatccgcgccaaccacggcgaacgcattgccgcagacggcatcattgaaagcggcagcggttgggcggacgagagccatcttaccggcgaatccaatcctgaagaaaaaaaggcgggcggcaaagtgttggcgggcgcgttaatgaccgaaggcagtgtggtgtaccgcgccacgcagctcggcagccaaacccagctcggcgacatgatgaacgcgctctctgaagcacaaggcagtaaagcaccgattgcgcgcgtagccgataaagcggctgcggtattcgtgcctgccgtcgtgggcattgcgttgttgacttttattgttacttggctgattaagggcgattggacggttgcgctgatgcacgccgtcgccgttttggtgattgcctgcccgtgcgcgctgggtctggcaacccctgccgcgattatggtcggtatgggcaaagcggttaaacacggtatttggtttaaagacgcggcagcaatggaggaagccgcccacgtcgatgccgtcgtgttggacaaaaccggtacgctgaccgaaggcagcccgcaggttgccgccgtttattgcgttcccgacagcggctttgacgaagacgctttgtaccgcatcgccgccgccgtcgaacaaaacgccgcccatccgctcgcccgtgccatcgtctccgccgcccaagcgcgcggtttggacattcccgccgcacaaaacgcacaaaccgttgtcggcgcaggcattaccgccgaagtggaaggcgtgggtttggtgaaagcaggcaaagccgaatttgccgaactggccttgccgaagtttttagacggcgtttgggatattgcaagcattgttgcggtctcagtcgataacaaacccatcggcgcattcgcacttgccgacgcgttgaaagccgataccgccgaagccataggccgtctgaaaaaacacaatatcgatgtctatattatgagcggcgacaaccaaggcacggtcgaatacgtcgccaaacaactgggcatcgcacacgccttcggcaacatgagtccgcgcgataaagctgccgaagtgcaaaaactcaaagccgccggcaaaaccgtggcgatggtcggcgacggcatcaacgacgcgcccgcgcttgccgccgctaacgtcagcttcgccatgaaaggcggagcggacgttgccgaacataccgcatccgccacgctgatgcagcattcggtcaaccaactcgccgatgctctgctggtgtcgcaagccactttgaaaaacatcaagcaaaacctgtttttcgccttcttctacaatattttgggcattcctctcgccgcgcttggctttttaaatcccgtcatcgctggcgcggcaatggcggcaagctcggtttccgtgttgagcaatgccttgcgcctgaaacgggtaaaaatcgattag

SEQ ID NO: 64324 - DNA, 663 bp, Neisseria meningitidis; identical to SEQ ID NO: 53364

SEQ ID NO: 64325 - DNA, 810 bp, Neisseria meningitidis
atgaccgccctcccccgttactccgtttttggcaaccccgttgcacacagtaaatcgccgcaaatccatcagcaatttgcccttcaggaaggcgttgacattgaatacgaacgcatttgcgccgacatcggcggtttcgcgcaggcggtttcgacattttttggaacaggcggttgcggggcaaacgttaccgtaccgttcaaacaggaagcgtttcatctggcggacgagcattccgaccgcgctttggcagcaggtgcggtcaatacgctgattctgttgaaaaacggcaagctgcgtggcgacaataccgacggtatcggtttggccaacgacatcacgcaggtcaaaaacattgccatcgagggcaaaaccattttgcttttgggcgcaggcggcgcggtgcgcggcgtgattccggttttgaaagaacaccgccctgcccgtatcgtcattgccaaccgtacccgcgccaaagccgaggaattggcgcagcttttcggcattgaagccgtcccgatggcggatttaaacggcggttttgatatcatcatcaacggcacgtcgggcggtctaaacggtcagattcccgatattccgcccgatatttttcaaaactgcgcgcttgcctacgatatggtgtacggctgcgcggcaaaaccgtttttggattttgcacgacaatcgggtgcgaaaaaaactgccgacggactgggtatgctagtcggtcaagcggcggcttcctacgccctctggcgcggatttacgcccgatatccgccctgttatcgaatacatgaaagccatgtaa

SEQ ID NO: 64326 - DNA, 1227 bp, Neisseria meningitidis
atgccgtctgaaactttccggagtaagaaaatgtcccaaaaattgatcttggttttgaactgcggcagctcgtccctcaaaggcgcggtcctggataacggcagcggcgaagtcctgctcagctgccttgccgaaaaactcaacctgcccgatgcctacatcacattcaaagtaaacggcgaaaaacacaaagtcgatctgtccgcacatcccgaccacaccggcgcggtcgaagccctgatggaagaactcaaagcccacggcctcgacagccgcatcggcgccatcggccaccgcgtcgtcagcggcggcgaactgtacagcgaatccatcctcgttgacgacgaagtcattgccggcatcgaaaaatgcatcccgctcgcccccctgcacaaccccgcccacctcttgggcctgcgtgccgcgcaaagcattttcaaaggcctgcccaacgtcgtcgtattcgatacctccttccaccaaaccatgcccgaagtcgcctacaaatacgccgttccgcaggagttgtatgaaaaatacggcctgcgccgttacggcgcgcacggtaccagctaccgcttcgtcgccgacgaaaccgcgcgcttcctcggcaaagacaaaaaagacctgcgtatggtcattgcccacttgggcaacggcgcgtccatcaccgccgtcgccaacggcgaatcgcgcgacaccagtatgggcctgaccccgctggaagggctggtaatgggtacgcgcagcggcgacatcgatccttccgtattcggcttcctcgccgaaaacgccaatatgaccatcgcccaaatcactgaaatgctgaataaaaaatccggtctgctcggcatttccggcctgtccaacgactgccgtaccattgaagaagaagccgccaaggggcataaaggcgcgaaattggccttggatatgtttatctaccgccttgccaaatacatcggcagtatggcggttgccgcaggcggtttggacgcactggtctttaccggcggcatcggcgaaaactccgacatcatccgcgaacgcgtgatcggctacttgggcttcctcggtctgaacatcgaccaagaagccaacctgaaagcccgcttcggcaacgccggcgtgattaccactgccgacagcaaagccgttgccgtggtcattccgaccaacgaagagctgatgattgcccacgacactgcccgtttgagcggtctgtaa

SEQ ID NO: 64327 - DNA, 1380 bp, Neisseria meningitidis; identical to SEQ ID NO: 50349

SEQ ID NO: 64328 - DNA, 396 bp, Neisseria meningitidis; identical to SEQ ID NO: 39569

SEQ ID NO: 64329 - DNA, 591 bp, Neisseria meningitidis; identical to SEQ ID NO: 38699

SEQ ID NO: 64330 - DNA, 402 bp, Neisseria meningitidis; identical to SEQ ID NO: 42860

SEQ ID NO: 64331 - DNA, 405 bp, Neisseria meningitidis; identical to SEQ ID NO: 51653

SEQ ID NO: 64332 - DNA, 330 bp, Neisseria meningitidis; identical to SEQ ID NO: 51824

SEQ ID NO: 64333 - DNA, 1185 bp, Neisseria meningitidis; identical to SEQ ID NO: 38307

SEQ ID NO: 64334 - DNA, 198 bp, Neisseria meningitidis; identical to SEQ ID NO: 46539

SEQ ID NO: 64335 - DNA, 1113 bp, Neisseria meningitidis; identical to SEQ ID NO: 58343

SEQ ID NO: 64336 - DNA, 546 bp, Neisseria meningitidis
atgaaacactatgccttactcatcagctttctggctctctccgcgtgttcccaaggttctgaggacctaaacgaatggatggcacaaacgcgacgcgaagccaaagcagaaatcatacctttccaagcacctaccctgccggttgcgccggtatacagcccgccgcagcttacagggccgaacgcattcgacttccgccgcatggaaactgacaaaaaaggggaaaatgcccccgacaccaagcgtattaaagaaacgctggaaaaattcagtttggaaaatatgcgttatgtcggcattttgaagtctggacagaaagtctccggcttcatcgaggctgaaggttatgtctacactgtcggtgtcggcaactatttgggacaaaactacggtagaatcgaaagcattaccgacgacagcatcgtcctgaacgagctgatagaagacagcacgggcaactgggtttcccgtaaagcagaactgctgttgaattcttccgacaaaaacaccgaacaagcggcagcacctgccgcagaacaaaattaa

SEQ ID NO: 64337 - DNA, 522 bp, Neisseria meningitidis
atgtcctgtttttcaatcaaacgtatgtccgcgtttcgggcgcggataacagtgttttttaccgcctttgtctttttgacggcggcactgcccgcttatgcggagcgtctgcctgattttctggcgaaaatacagccttcggaaatttttccgggtgcggaccgttacggcaagccggaaggcaagcctatggttgcccgcgtttacaaaggcgatgagcagttgggcttggtctatatcacgaccgatgcggtcaatacgcgcggttattcgagcaaaccgattgatacgctgatggcgttggcaaacgacggaacgatagccggagcgaaattgattgatcaccatgagtcgattatgctgatcggtatcccgcatttgcccgcgcccgggcgggcgatacgctcaaactggcttccggcgtatatcaaaccaaactttatatcgacaaaccgattacgattgaaggacctgccgaccgttccgcaaccatcgaaggggacaggagcggtcgtacgatag

SEQ ID NO: 64338 - DNA, 285 bp, Neisseria meningitidis; identical to SEQ ID NO: 42876

SEQ ID NO: 64339 - DNA, 594 bp, Neisseria meningitidis; identical to SEQ ID NO: 36941

SEQ ID NO: 64340 - DNA, 198 bp, Neisseria meningitidis; identical to SEQ ID NO: 36305

SEQ ID NO: 64341 - DNA, 660 bp, Neisseria meningitidis; identical to SEQ ID NO: 50175

SEQ ID NO: 64342 - DNA, 540 bp, Neisseria meningitidis; identical to SEQ ID NO: 44661

SEQ ID NO: 64343 - DNA, 843 bp, Neisseria meningitidis; identical to SEQ ID NO: 50329

SEQ ID NO: 64344 - DNA, 801 bp, Neisseria meningitidis
atgaacgcgttcaacctcatcatcatcggcgacgaaatcttacacggcagcagccaagacaagcatttcgcctttttcaaatccctgctcgaatccaaagggctgaagctcaatcaggtgcaatacctgcccgacgaacccgatttgctggtcaggcaactgcgccgcagcttttcagacggcatgccaactttcgttaccggcggcatcggcgccacgcccgacgaccacacgcgccaagccgcggctgctgctttggatttgcctgtcgtccgccatcctgaagccgccaagtttatcgaaggcataacccagaaacgcggcgagccgcttgattcgccggaacacgcccaacgcctgaaaatggcggatttccccgagggcgcagagcttgtgcccaacccgttcaacaacaccgccggattttccatccgcgagcattatttcttccccggctttcctgtgatggcgcacccgatggcggaatgggttttggaaacttattacgccggccgcttcaaccaaaccgaacgcggcagccgcagcgtgtatgtgtttgagcagcccgaatcgcgcattacgccgcttatggagcatatcgagcaaacttatcccggcgtgcgttcgtacagcctgcccagcgtcggttggacgcattcagacggcacgcaggtcaaaccgcacattgagttcggcatcaaagccgaaggagaagccgtcaaccttttggacgcggcgtgggcggaagtgttgcacagcttggacggattgggagcagagctgaaaaatcgggtaaactga

SEQ ID NO: 64345 - DNA, 1065 bp, Neisseria meningitidis; identical to SEQ ID NO: 50499

SEQ ID NO: 64346 - DNA, 201 bp, Neisseria meningitidis
atgaaatttgaagaacgtttcatagttcaagatttagaaacgcatgattttatttatcccgatcctttcggtgatgtggggtttactcaaaatattaaatccgcaggtcaatttgaaagctacgaagatgcgttgaattcaggcataaatgaaataggcggaggattccagatatttcagttcttcgtaaaatcggaataa

SEQ ID NO: 64347 - DNA, 711 bp, Neisseria meningitidis; identical to SEQ ID NO: 42623

SEQ ID NO: 64348 - DNA, 384 bp, Neisseria meningitidis; identical to SEQ ID NO: 38800

SEQ ID NO: 64349 - DNA, 366 bp, Neisseria meningitidis; identical to SEQ ID NO: 53193

SEQ ID NO: 64350 - DNA, 279 bp, Neisseria meningitidis; identical to SEQ ID NO: 36597

SEQ ID NO: 64351 - DNA, 252 bp, Neisseria meningitidis; identical to SEQ ID NO: 41525

SEQ ID NO: 64352 - DNA, 1068 bp, Neisseria meningitidis; identical to SEQ ID NO: 42520

SEQ ID NO: 64353 - DNA, 1170 bp, Neisseria meningitidis
atgagcaaaaaactccatccgcaaacgctcgccatacgcggcggcaaagaacaaaccgaataccgcgaacacaatcaggcattgttcctgaccagcagcttcatgtgggacaacgcccaacacgctgccgatttgttttcaaaaaaaatcaaaggcttcacttatacccgtaccgccaacccgaccaccgccgcctttgaaaaacgcatcgccgctttggaaggtgcggaacgcgcggtcgccacttcgaccggcatgtccgcgattcaggcggcgtttttcacctttttgcaggcgggcgaccatgtgatttccagccgcagcctgttcggcacgaccgtcggctttatcaataacatcgttaccaaattcggcatcgaagtgagtcacgtgtcgccgactgatataaacgaatggaaagccgccgtcaaagccaacaccaaactgctgtttttggaaacgccgtccaatcccttgggagaagtggccgacttggaagccttggcggaattggcgcacggcatcggcgcgctcttggtggtggacaacagcctgctgtcgcctgtcggctctcagcctttgaaacacggcgcggatatttccgtttcctccgcgaccaaagccatagacggacacgggcgcgtgatgggcggcgtgttggcgggttcggaagaactgatggcgcaggtcgccgtttactgcaactcttgcgggctggcaatgtcgccgtttaacgcatggcagttgttgagcggcgtggaaaccctgtctctgcgtatggaaaaacagttcgacaacgccttgaaaatcgcgcaatggctgcaagcgcagccgcaggttcaagccgtgtattacaccggattgcccgaccatccgcaggcggcgcttatccgcaaacagcaaaacggcggtggcatcgtcatcggctttgaagtagccgaccaagaagccgcgtggaaagttgtggacggcgtggaactcttttcccgaaccgccaacctcggcgacgtgcgctcgaccatcacccatccgtggacaaccacgcacggcaggatgcagcccgaagaaaaactcgccgccaacatccgcccgggactggtgcgcctgtcggtcggtttggaatatgttggcgatttgattgacgatttgaaacaggcactcgcacgctga

SEQ ID NO: 64354 - DNA, 1059 bp, Neisseria meningitidis; identical to SEQ ID NO: 51733

SEQ ID NO: 64355 - DNA, 1512 bp, Neisseria meningitidis
atgagcgaacaaaaccatccgcaaaccgagccgcagttggacgaaaaccaaatcatcgccctgcgccgcgaaaaactgcacaacatccgccaacagcgcaacgcctatcccaacgacttcaaacgcgacagcttcgccgccgatttgcacgcccaatacggcgaaatcggcaaagaagaactcgatccgcaaggcattcccgtcaaagtggccggccgcatgatgctgaagcgtcaaatgggcaaggcgagctttgccaccattcaagacgtgtccgggcaaatccagctttatctgaacaacaaaggcgtgagccaagaagttttggacgacttcaaccattgggatttgggcgacatcgtcggcgcggaaggcactttgttcaaaaccaaccacggcgaactgaccgtacgcgtgtccgacatccgcctgttgtccaaatccttgcgtccgctgccggacaaacacaaaggcttgagcgatcaggaaaccaaataccgccaacgctatgtcgatttgattgccaacgaagaatcgcgcaatacctttatcaaacgcagccaaatcatccaatccgtgcgtaattttatggtgggcgagcattatctcgaagtcgaaaccccgatgatgcacccgattcccggcggcgcgacggcaaaacccttcgttactcatcacaatgccttagatattccgctttacctgcgtatcgcgcctgagctgtatttgaaacgcctggttgtcggcggcttggaacgcgtgtttgaaatcaaccgcagcttccgcaacgaaggcatgtccgtgcgccacaaccccgaatttacgatgattgaattttacgaagccttctccgactacgaacgtatgatgcagatggcggaagacatcatccgcaacgcatcgcgcacggtaaacggcacggcaaacatcacttacaacggcaaagaagtcgatttggaaagcccgttcgagcgtctgaccatcctcgaagccatcaaaaaatacaatccgcactacaccgaccagcagttgaacgatgcggaatggctgaaaaaagaaatcgtcaaacacggcgaaagcctgccgccgtccccgggcatcggcagcctgcaactcgcgctgtttgaaggttgcgccgagggcaagctgtggaatccgaccttcatcgtcgattacccggtcgaagtttccccgttggcgcgcgcttcggataccaaacaaggtctgaccgaacgtttcgaattgttcgttgtcggccgcgaactggcaaacggctattccgagttgaacgaccccgaagaccaagccgaacgcttcaaagcgcaagtggcgcaaaaagacgcgggcgacgacgaagcgatgcactacgatgccgactacatccgcgcgatggagttcggtctgccgccgacaggcggttgcggcatcggtatcgaccgcttagtgatgctgctgaccgattcgcaaaccatccgcgatgtgattctgtttccgcagatgcgtcccgagtaa

SEQ ID NO: 64356 - DNA, 1020 bp, Neisseria meningitidis
atgaacacaatgctaatgtcgggcgcggctgccgcgctgcttgccggcatcatcctttatttcaaaagcgacaaaaagcggcaggaaaacggtgaatggagttccggtctggaatacgcctatatcctgacggcggtcggcgtgtttgccgctttgtccctgtttatgagctttgccgccgttttcctgattttcgttgtattgtgcggtacggcttggggggtatataaataccgcctgaagactcatcccgaaatctcggaaagcagccacttcggcgattatttcggcagtttcttccctaccgttttggtattgttcctcatccgatcgtttattgccgaaccgttccaaattccatccagctcgatgcgcccgggcctgatcaagggcgatttcattttggtcggcaaattttcctacggcctgcgcgtacccgttttaaacaatatatttattcctacaggcaaaatcgaacggggtgatgtcgttgtttttaattatcctctgcagccagagatgacctacatcaagcgtattgtcggcattccgggcgatgtggtcgaatatcgggataagattttgacggtaaatggcaaacccacttccgatattcctaacggcacataccgttatcccgacgacaccgacccttccgaaatccacaacacggatatgttccgcagcggtctagacggcaaatccttcaatattctgaaaaaagaaggacagcctgccgtttccctgcccgtattgggcaaatatacctccgatattatgtctgaaaacggatattccatagagcaaagcggtttggaacactgccaatatgccgacgacagcagcggtttcgtgtgcaaagttcccgaaggacgctatttcgctatgggcgacaaccgcgacaacagtgccgattcgcgctactggggatttgtggatgacaagctggttgtcggcaaggcaatgttcattttgatgaacttcggcgatttcggcagggccggtacggcaatccgttag

SEQ ID NO: 64357 - DNA, 888 bp, Neisseria meningitidis
atgtacacaggacgtttcgcccccagcccgaccgggctgctccacatcggctcgctgctgaccgccgtcgcttcctatgccgatgcacgcgcacacggcggaaggtggctggttcgcatggaagacctcgatccgccgcgcgaaatgccgggggcggcaagccatatcctgcacacgcttgaggcattcggattcgagtggtacggagaagtcgcctatcagagccgccgttacgccctgtatgaagaaaccctatgccgtctgaaaaccgccggactggtctatccctgccattgcagccgcaaagactggcaggctgcggcagtccacggcgcagacggattcgtctataacggacgttgccgcaatccgcagcaacgccctgcactgcaaggcaaacagcctgcgtggcgcatccgcgtccccgaccgcgacatcggcttttcagacggcatcgtcggcggttacgcccaaaacctcgcccgcgacatcggcgatttcgtcctgcttcgtgcagacggttactgggcataccagctcgccgtcgttgccgacgatgccgaacagggcgttacccacatcgtccgcggacaagacctgcttgtttctacgccgcgccaaatctatttgcagcaatgtttgggcgttccgacaccgcaatatgcccacctgccgctgctgaccaacgcacaagggcagaaatggtcgaaacagacgctcgcacccgcattggatttaaaccgccgcgaacaactcctccgccaagtgttccgttacctcaacctgcccgaagcaccggaagccgaccgccctgccgaactgctcgactgggcggtggcacactgggatatggacaaagtgccgaaacacgccattaccaccccctaa

SEQ ID NO: 64358 - DNA, 951 bp, Neisseria meningitidis
atgaaattacaacaattgaaatacgccttagaagtttaccagcacaacctgaacgtttccgaagcggccgaagccttgtttacttcgcaacccggcatctccaaacaaatcaaattgctggaagaagaaatcggcattcagatttttatccgcagcggcaagcgcgtggtttcggtctcgcagccgggcaaggtggttttggatattgcggaacgtattttacgcgatgtacagaacattaaaaatatcggcagcgagtttaccggacaggacagcggttcgctgacggttgccacgacgcatactcaggcacgctatgccctacccttgattgttgccgattttgtgaaacgctatccgaaagtcaacctgaccatcaaacaggggagccctgccgccatcgcacgtatggttacctcaggcgaggcggacttggcgattgttacggaacggatagacgaccatcccgaactgggaaaacttccctgctatgactggactcatgcggttatcgtaccgaacgaccaccccttgctcgaatgcagaaaccccctccgcattgaagatttggcgaggtttccgctgattacctatgaatttgcattcaacacgggcagcagcattgcacgggcattcgccaaagctcgtttggaacaacccgatgtcgcattggctgcggcagatacggacgtattgaagacttatgtgcgcttgggtttgggcgtgggactgatggcgaaaatggcgtacaacccggatacggacggcgatttgcagcttgtggatgcggcacacctgttcgagccgtcgccgacgtggattgctttgcgcagcgatacttatttgcgcggatatgcctacgactttatccaagcgtttgcgccgcacctgacacgcgagaaggtggataggattctgtacacgcccatcagcgaggatttttcgatttag

SEQ ID NO: 64359 - DNA, 582 bp, Neisseria meningitidis
atgaaaataagatggcggtacggaattgcgttcccattgatattggcggttgccttgggcggtctgtcggcatggttgggacgcatcagcgaagtcgagattgaagaagtcaggctcaatcccgacgaaccgcaatacacaatggacggcttggacggcaggcggtttgacgaacagggatacttgaaagaacatttgagctcgaagggcgcgaaacagtttccggaaagcagcgacatccattttgattcgccgcatctcgtgttcttccaagaaggcaggttgttgtacgaagtcggcagcgacgaagccgtttaccataccgaaaacaaacaggttctttttaaaaacaacgttgtgctgaccaaaaccgccgacggcaggcggcaggcgggtaaagttgaagccgaaaagctgcacgtcgataccgaatctcaatatgcccaaaccgatacgcctgtcagtttccaatatggtgcatcgcacggtcaggcgggcggcatgacttacgaccacgaaacaggcatgttgaacttctcatctaaagtgaaagccacgatttatgatacaaaagatatgtaa

SEQ ID NO: 64360 - DNA, 2835 bp, Neisseria meningitidis
atgaataagaaacacggttttcagcttaccctgactgccttggctgttgcaaccgcttttccggcttatgccgcccaagcggggggggcgacacctgatgccgcgcagacccaatccctgaaagaggttaccgtccgtgccgccaaagtgggacggcgatcgaaagaggcgaccggtttgggcaaaatcgtcaaaacgtcggaaacgttgaacaaggaacaggtactcggtatccgcgacctgacgcgctacgatccgggcgtggcggttgtcgaacagggcaacggcgcgagcggcggctactcgatacgcggcgtggataaaaaccgtgtggcggtttcggttgacggcgttgcccaaatacaggcgtttactgtgcaaggatcgttgagcggatacggcggacgcggcggcagcggtgcaatcaacgaaatcgaatatgaaaacatcagcacggtggaaatcgacaaaggtgccggttcgtccgatcacggcagcggcgcactcggcggcgcggtcgctttccgcaccaaagaagcggcagacctgatttcagacggcaaaagttgggggatacaggcaaaaaccgcctacggcagtaaaaaccgccaatttatgaagtcgctcggcgcggggttcagcaaagacggttgggaagggctgttaatccgaaccgaacgccaagggcgggaaacgcgcccgcacggcgatattgcggacggggtggcatacggcataaaccgtttggacgcgttccgccagacacacgatattcaaagcaaagataaaccagggcaatttttctcagtagagggcgagagtgaatccaagcccgtggcaaaattggcgggcaacggaaactatttgaaaaaccagctcaaccgctgggtggaagaacgccgttcaaaaggtcaggctttaaacagtgaagaagaagcgatggtgcgggaggcgcaggcgcgccacgaaaacctgtccgcccaagcttacacgggcggcggcaggatattgcccgatccgatggattaccgcagcggctcttggcttgccaagctgggctaccgcttcggcggcaggcattatgtcggcggcgtgtttgaggataccaaacagcgttacgacatccgcgatatgacggaaaaacagtattacggtacggacgaggcgaaaaagtttagcgacaagagcggggtgtacgacggcaacgatttccgcgacggcttgtattttaggccgaatatagaagagtggaagggcgatcaaaagttgattaggggcataggtttgaaatattcccgcaccaaatttattgacgaacatcaccgccgccgccgtatgggtttgctgtaccgttatgaaaacgaagcgtattctgacaattgggcggacaaggcggtgttgtcgtttgacaaacagggcgtggcaaccgacaacaatacgctgaagctgaattgcgccgtgtatcctgccgtggacaaatcctgccgcgcgtcggcggacaaaccgtattcctacgacagcagcgaccgtttccactaccgcgaacagcacaatgttttgaatgcctcgtttgagaaatcgctgaaaaacaaatggacgaaacaccatctgactttgggcttcggttacgatgcttccaacgcgatctcccgccccgaacagctttcccacaatgcggcaaggatttcggaatccacgggattcgatgataaaaatcaagataagtatcttttgggtaagcccgaagtcgtcgaagggtcggtctgcggctacatcgaaaccctgcgttcccgcaaatgcgtgccaagaaaaatcaacggcagcaatatccacatttctttgaacgaccgtttttcaatcggcaaatattttgatttcagcttgggcggcaggtacgaccggaaaaacttcaccacgtcggaagaactcgtccgcagcgggcggtatgttgaccgttcgtggaacagcggcatcgtgttcaaaccgaaccggcatttttctttgtcttaccgcgcctccagcggcttcagaacgccctcattccaagaacttttcgggatagacatttatcacgattatccgaaagactggcagcgtcccgccctgaaatcggaaaaggcagccaaccgcgaaatcggtttgcagtggaagggcgatttcggctttttggaaatcagcagcttccgcaaccgctataccgatatgattgccgttgccgatcacaaaacccaattgccggattcaacaggacgattgacagagattgatatacgcgattattacaatgcccaaaatatgtcgcttcaaggcattaatatattgggaaaaatcgactggaacggtgtgtacggcaaactgcccgaaggtttgtacaccacattggcgtacaaccgcatcaaaccgaaatcggtatccaaccggccgggactgtccctccgcagctatgctttggatgcggtacagccgtcgcgttatgttttggggttcggatacgaccagcctgaggggaaatggggcgcaaacattatgctgacctattccaaagggaaaaaccctgacgagcttgcttatctggcaggcgatcaaaaacgatattcgacaaaaagagcgtcgtcttcttggtcgacggcagacgtttccgcctatctgaatctgaaaaaacggctgaccttgagggcggctatctacaatatcggcaactaccgctacgttacttgggaatccttgcgccagactgcggaaagcacggcaaaccggcacggcggcgacagcaactatggaaggtatgccgcaccgggcaggaacttcagtctcgcgctcgaaatgaagttttaa

SEQ ID NO: 64361 - DNA, 513 bp, Neisseria meningitidis
atgaaaaactttaacggcaaactcatcctcatcggactgatgggcgcgggcaaaaccacgctgggccggcaaatggcgcagcggctggattaccgtttttacgacagcgatcacgaaatcgccgtagccgccggcgttcccatccccaccatatttgaaatggaaggcgaacagggattccgttcgcgcgaaaccgccatactcaaaaagctggttatcctgccccatatcgtcctgtccaccggcggcggcgcggtgttaaaagaagaaaaccgcgcccttatccgcaaaagcggcacggtcgtctatctgcacgccccgcccgaaaccctgctcgaacgcacgcgctgcgacaacagccgtcctttgctgcaagttgccgatcctttggcgaaattacgtgaactctacgccgcacgcgaccccgtttaccgccaaaccgccgactttaccgtagaatcggcaaactgccggcaaaccgtgcaaaccctgctcaaacgcttatcccgataa

SEQ ID NO: 64362 - DNA, 918 bp, Neisseria meningitidis
atgagcatcatccactacctctcgctgcacgtcgaatccgcgcgcaccgcgctcaaacagcttctgcgccaacctttcggcacactgcttaccctcataatgctcgccgtcgccatgaccctgccgctgtttatgtatttgggcatccaaagcggacaaagcgttttaggcaaactcaacgagtcgccgcaaatcaccatctatatggaaaccgccgccgcacaaagcgacagcgataccgtgcgcagcctgctgacgcgcgacaaacgactcgacaacatccgctttatcagcaaagaagacggtttggaagaattacagtccaatctcgaccaaaatctgatttccatgcttgacggtaaccccctgccggatgtctttatcgttacccccgacccggcaaccactcccgaccaaatgcaggcaatctaccgagacattaccaaactgcctatggtcgaatccgcgtctatggataccgaatgggtgcaaacgctgtaccaaatcaacgagttcatccgcaaaattttatggtttctttccctgacgctggggatggcgttcgtccttgtcgcgcacaacaccatccgactgcaaatcctcagccgaaaagaagaaatcgaaatcaccaaactcttgggcgcgcccgcgtcgtttatccgccgcccattcctttatcaagccatgtggcagagcatcctttccgccgccgtcagcttggggctttgcggttggctgctctctgccgtgcgccccttggtcgatgccatcttcaaaccctacggacttaatatcggctggcgtttcttctacccgggagaaatcgcactggtgttcggcttcgtcatcgcgttgggcgtattcggcgcgtggcttgccaccacccagcacctgctcggcttcaaagccaaaaaataa

SEQ ID NO: 64363 - DNA, 666 bp, Neisseria meningitidis
atgacgtttaccgcagtcctcttcgatctcgacggcgtgattaccgataccgccgaataccactaccgcgcgtggaaaaaactcgccgaagaactgggcatcggcatcgaccgcaagtttaacgagcagctcaaaggcgtgtcgcgcgacgattcgctcaaacgcatcctcgcgcacggcggtaaaaccgtcggcgaagccgagtttgccgaactgacccgccacaaaaacgacaactacgtcgagatgattcaggcagtcaaacccgaagacgtgtaccccggcattttgccgctgctggaagcattgaaagcaaacggcaaaaaaatcgccctcgcatccgccagtaaaaacggcccgttcctgctcgaacgcatggggctgacccacttcttcgacgccattgccgaccctgccgccgtcgcgcattccaaacccgcccccgacatcttcctcgccgccgccgagggcgtgggcgcagacatccgccgctgcatcggcattgaagacgctgccgcaggtgtcgccgccatcaaagccgccggcgccttacccatcggcgtgggcaaagccgaagacttgggcagcgacatcgcgctggtgtccggcaccgccgagctgacctacgcctacctgcaaaacgtgtgggcacagtcgggcaggtaa

SEQ ID NO: 64364 - DNA, 3081 bp, Neisseria meningitidis
atgaataaaactttaaaaaggcgggttttccgccataccgcgctttatgccgccatcttgatgttttcccataccggcgggggggggggggcgatggcgcaaacccatcaatacgctattatcatgaacgagcgaaagcagcccgaggtaaagtcgaatgtgccatcttcaataaaggacaaagacaggaaacgcgaatatactcattataagtacaaaacaggaggaggctctgtctcattcaacaatagcgatgagcttgtttctcaacaaagcggtactgccgtttttggcacagccacctacctgccgccctacggcaaggtttccggttttgatgacaaaaggctgaaagagcgcggcaatgccgttaattggattcatacgacccacccagggttgataggctacagctacgccggtgtcgtatgcagagacagcacaggctgtcccaaacttgtctataaaacccgattttccttcgataatcccgacttggcaaaaacaggaggcgggctggataggcacacagagccaagccgcgacaattcgcccatttacaaattgaaggatcatccatggttgggcgtgtctttcaatttgggcagcgagaataccgtcaaaaatggcaactcattcaacaaattgatatcttcttttagtgaaaacaataataatcaaaccatcgtctctacgacagaaagccaccctatttcccttggcgacgggcagcgcgaacataccgccgtggtctattatctgaacgccaaactgcacctgctggacaaaaaagggattaaagatatcaccgacaaaacagtgcagttgggtgtcttgaagccgagcatcgatgtgcggaaaggtgccggctggctaagtttttgggctagttgggacattaaagataccgggcagattccagtcaagctcggcctgcagcaagtcaaagcaggccgctgcatcaataaaccgaaccccaatcccaaagcccaagccctttcccccgcactgactgcccccgcgctgtggttcggacctgtgcaaaatggtaagatggagatgtattccgcttcggtttctacctaccccgacagttcgagcagccgcatcttccttcaaaatctgaaaagaaaaaacgaccccaacaaacccggccgctattccctcgcagacttgagcgcgtcggagattaaaagtaaagagccgactttcacagggcggcaaaccgtcatccgattggataaaggcgtacatcagatcaaacttaaaggcaatgaggtcgaaggttttaagggaaacaacggcaacgacactttcggcattgttagtgaagggagcttcatgcctgatgacagcgagtggaaaaaagtgctgctgccttggacggttcgtgctttcaatgatgacggtcaatttaacacagtcaacaaagaagaaaacaacggcaagccaaaatacagtcaaaaataccgcagccgcaacaacggcaagcacgagcgcaatttgggcgacatcgtcaacagccccatcgtggcggtcggcgagtatttggctacttccgccaacgacgggatggtgcatatcttcaaaaaaagcggcggggatgaccgcaactatagtctgaagctcagttatatcccgggcacgatgccgcgcaaggatattcaaagccaagactccacccttgccaaagagctgcgcgcctttgccgaaaaaagctatgtgggcgaccgctacggcgtggacggcggctttgtcttgcgccaagtcgaatggaaagggcaaaaccgcgtgtttatgttcggcgcgatgggctttggcggcagaggtgcatacgccttggatttgaccaaagccgaaaacggtgacccgaccgccgtttccctgtttgatgtcaaacatgacaataatggcaagaatagcaataatagcgtgcaattaggctacaccgtcggcacgccgcaaatcggcaaaacccacaacggcaaatacgccgccttcctcgcctctggttatgcgactaaagacattaacaacggcgacaataaaaccgcgctgtatgtgtatgatttggaaagcaacaacggtacgccgattgcaaaaatcgaagtacccaacggcaagggcgggctttcgtcccccacgctggtggataaagatttggacggcacggttgatatcgcctatgccggcgatcgcggcggcagtatgtaccgctttgatttaagcggcaacaacccgaccagttggtctgcacgcgccattttcagcggcaacaaaccgattacttccgcgcccgccatttcccaactgaaagacaaacgcgtggtcatcttcggcacgggcagtgatttgagtgaggaggatgtggacagcaaagaaatccaacacgtttacggtatttttgacaatgaaacagacacgggtacggcgaaagacgggcagggcaacgggctgctcgagcaagtgcttagtgaggaaaataaaaccttattcctgaccgattacaagcgatccgacggatcgggcagtaaggggtgggtagtgaagctgaaggaaggacagcgcgttaccgtcaaaccgaccgtggtattgcgtaccgcctttgtaaccatccgcaaatataacgacggcggctgcggcgcggaaaccgccattttgggcatcaataccgccgacggcggcaagctgaccaagaaaagcgcgcgcccgattgtgccggacaccaatacggctatcgcgcaatattccggccataagaaaggcaccaacggcaaatccatccctataggttgtatgcaaaaaggcaatgaaatcgtctgcccgaacggatatgtttacgacaaaccggttaatgtgcgttatctggatgaaaagaaaacagacggattttcaacaacggcagacggcgatgcgggcggcagcggtatagaccccgccggcaagcgtgccggcaaaaacaaccgctgcttctcccaaaaaggggtgcgcaccctgctgatgaacgatttggacagcttggacattaccggcccgatgtgcggtatgaaacgaatcagctggcgtgaagtcttctactga

SEQ ID NO: 64365 - DNA, 267 bp, Neisseria meningitidis
atggcacgcatggtattctgcgtcaagctcaacaaagaagccgaaggcatgaaatttccgccgcttcccaacgaattgggcaagcgcatttttgaaaacgtatcgcaagaagcgtgggcggcgtggacgcgccaccaaacgatgctgattaacgaaaaccgtttaagcctcgccgatccgcgcgcgcgcgaatacctggctcagcagatggagcagtatttcttcggcgacggcgcggatgccgtgcagggatacgttccgcaataa

SEQ ID NO: 64366 - DNA, 2691 bp, Neisseria meningitidis
atgtccgacaaccgcctcgacaccgcccgccgccattccctcttcctcgcccgccagctcgacaacggcaaactcaagcccgaaatattcctgcctatgctcgacaaggttttgaccgaagcggatttccaagcctttgccgactggggcgaaatccgcgcggaagaaaacgaggaagaattggcgcggcagttgcgcgagttgcgccgttatgtggtgtcgcagattatcgtgcgcgatatcaaccgtatcagcgatttgaacgaagtaacccgcacgattacgctgtttgccgattttgccgtcaataccgcgctggattttgcctacgcctattatcgggacatgtacggcacgccgatcgggcgttataccaaatcgccgcagcatttgagcgtggtggcgatgggcaaggcgggcggctatgagttgaacgtgtcttccgacatcgatttgattttcgtctatcccgaatcaggcgacaccgacggcaggcgcgaacggggcaatcaggaatttttcaccaaagtcgggcagaaactgattgcgctgctgaacgacattaccgccgatgggcaggtgttccgcgtcgatatgcggctgcggccggacggcgattcgggcgcgttggtattgagcgaaaccgcgctggagcaatatttgattacacaggggcgagaatgggaacgctacgcgtggtgcaaaggtcgcgtggttacgccgtatccgaacgacatcaaagcactggtgcgcccctttgtgttccgcaaatatctggattacggcgcgtatgaggcgatgcgtaagctgcaccgccaaatccgcagcgaagtcagcaaaaaaggcatggcggacaacatcaagctcggcgcgggcggcatccgcgaagtcgaatttatcgcccagattttccagatgatacgcggcggacaaatgcgcgcgctgcaactgaaaggcacgcaggaaacgctgaagaagcttgccgagctgggcatcatgctgtctgaacacgtcgaaaccctgcttgccgcctaccgcttcctgcgcgacgtcgaacaccgcctgcaatactgggacgaccaacaaacccaaaccctgcccacttcgcctgaacagcggcaactgctcgctgaaagcatgggtttcgacagctacgccgccttttcagacgatctcaatgttcatcggaacaaggtcaatcagttgttcaacgaaattctgagcgaacccgaagaacaaacgcaaagcaacagcgaatggcaatggacatggcaggaaaagcctgatgaagaagaacggctaggccgtctgaaagaatatgggtttgatgccgaaaccatcgccacgcggctcgaccaaatccgcaacggccataaataccgccacctttccgcccacgcccagccgcgttttgacgccattgtgccgttgttcgtacaagcggcggcagagcaaaacaacccgaccgatacattgatgcggctgttggattttctcgaaaacatcagccgccgatccgcctatctcgccttcctcaacgaacatccgcaaaccttggcgcaactggcgcagattatgggccaaagttcttgggtggcggcgtatctgaacaaatatccgattttgttggacgaactcatcagcgcgcagcttttggataccgcgtttgattggcaggcgctcgccgccgccctttcagacgacctcaaagcctgcggcggcgatactgaagcgcaaatggacaccctgcgccgcttccagcacgcccaagtcttccgtcttgccgtccaagacctcgccggactgtggacggtagaatccctctccgaccaactctccgccctcgccgacaccatcctcgccgccgccctgctgtgcgcatgggcggacatgcccaaaaaacaccgcgacacaccgcaattcgccgtcgtcggctacggcaaactcggcggcaaagaactcggctacgcctccgacctcgacctcgtctacctctacgacgatccccaccccgacgcaggcgacgtgtacagccgcctcgcccgtcgcctgaccaactggctttccgccgccaccggcgcaggcagcctctacgaaaccgacctgcgcctgcgccctaatggcgacgccggtttcctcgcccacagcatcgccgcctttgaaaaataccagcgcgaaaacgcctggacgtgggaacaccaatcccttacccgcgcccgcttcatctgcggcacgcccgaaattcagacggccttcgaccgcatccgcaccgaaatcctcaccgccgaacgcgaccaaaccgccttggcaggcgaaatcatcgaaatgcgcgaaaaaatgttccccacccacccgcctgccgacagcaacgtcaaatacgcgcgcggtggcgtggtcgatgtcgaatttatcgtccaatatctgatacttgcccatgcccgaaaatatccgcaacttctcgacaactacggcaacatcgccctcttgaatatcgccgccgactgcagccttatcgacaaaaacctcgccggacaaagccgcaccgcctaccgcttctaccgccagcaacagcacaacaccaaactgcgcgacgcggcaaaaaccgaagtaagcgacgaattactgtcccattacggcaatgtcaggaaattgtggcgggaagtgttcggcgaagaagcggcaaccgcctga

SEQ ID NO: 64367 - DNA, 234 bp, Neisseria meningitidis; identical to SEQ ID NO: 51696

SEQ ID NO: 64368 - DNA, 1185 bp, Neisseria meningitidis
atgacaccacaagtcctgaccatattaggcagtaccggcagcataggcgaaagcacgctggacgttgtctccctccaccccgaaaaattccgcgtattcgcgctggcagggcataagcaggtcgagaaactggcggtgcaatgccggacgttccgccccgaatatgccgtcgttgccgatgccgaacacgccgcccggcttgaagctttgttgaaaggcgacggcacggcgacgcaggttttacacggcgcgcaggcattggttgacgttgcctctgccgacgaagtcagcggtgtcatgtgcgccatcgtcggggcagtggggctgccttccgcgctcgcagcggcgcaaaaaggcaaaaccatttatctggcgaacaaagagacgctggtggtttccggcgcgttgtttatggaaaccgcccgtgcaaacggcgcggcagtgctgcccgtcgacagcgaacacaacgccgttttccaagttttgccgcgcgattacgccggccgtctgaacgaacacggcatcgcttcgattatcctgaccgcttccggcggcccgtttctgaccgccgatttaaacacgttcgacagcattacgcccgcccaagcggtcaaacaccccaattggagcatggggcgcaaaatttccgtcgattccgcgtcaatgatgaataagggcttggagttgattgaggcgcattggctgtttaactgtccgccggaaaaactggaagtcgtcatccatccgcaatccgtgattcacagcatggtgcgttatcgcgatggttcggtattggcgcagttgggcaatcctgatatgcgtacgcctattgcttattgtttgggtttgcccgagcgcatcgattcgggtgtcggcgacctggatttcgacgcattgtccgcgctgaccttccaaaagcccgactttgaccgcttcccctgcctgaagctcgcctatgaagccatgaacgcaggcggagccgcgccctgcgtattgaacgccgccaacgaagccgccgtcgccgcctttttggacggacagattaagtttaccgacattgccaaaaccgtcgcccattgtctttcacaagacttttcagacggcataggcgacataggggggctcttggcgcaagatgcccggacacgcgcacaagcgcgggcatttatcggcacactgcgctga

SEQ ID NO: 64369 - DNA, 1380 bp, Neisseria meningitidis
atgctgctcgacctcaaccgcttttccttttccgtcttcctgaaagaagtccgcctgctgaccgctcttgccctgcccatgctgttggcgcaggtcgcgcaggtgggcatcggttttatcgatactgtgatggcgggtggtgcaggcaaggaagacttggcggcggtggctttgggcagcagcgcgtttgccacggtttatattacctttatgggcattatggcggcgctgaacccgatgattgcccagctttacggcgcgggtaaaaccgacgaagtgggcgaaacggggcggcaggggatttggttcgggctgtttttgggcgtgttcggcacggtcttgatgtgggcggcgattacgccgttccgcaactggctgaccttgagcgattatgtggaaggcacaatggcgcagtatatgctgttcaccagcttggcgatgccggcggcaatggtacaccgcgcactgcacgcctacgcctccagcctgaaccgcccgcgcctgattatgttggtcagctttgcggcgtttgtgttgaacgtgccgctgaactatattttcgtttacggcaaattcggtatgcccgctttgggcggcgcaggctgcggcctggcgacgatggcggtgttttggttcagcgcactggcattgtggatttatatcgccaaggaaaatttcttccgcccattcggactgacggcgaaattcggcaaaccggattgggcggtgttcaaacagatttggaaaatcggcgcacccatcgggctgtcttattttttggaagccagcgcgttttcgtttatcgtgtttttgattgcgcctttcggcgaggattatgtggcggcgcagcaggtcggcatcagtttgtcggggattctctatatgattccgcaaagcgtcggctcggcggggacggtgcgcatcggcttttcgcttgggcggcgcgaattttcgcgggcgcgttatatttcgggcgtgtcactggtgttaggatggatgctcgccgtgattaccgtgctttccttggtattattccgttcgccgctggtaagtatgtacaacaatgatccggcggttttaagcatcgccgccaccgtcttactgttcgccggcttgttccaaccggcagacttcacccaatgtatcgcctcctacgccttgcgcggctacaaagttacaaaggtgccgatgttcatccacgccgccgccttttggggctgcggtctgctgccgggctacctgctcgcctaccgtttcgatatgggcatttacggcttctggacggcattgattgcctcgctcaccatcgccgccatcgccttggtgtggtgcttggaattgtgcagtagggagatggtcagatcgcataaggctgtctga

SEQ ID NO: 64370 - DNA, 459 bp, Neisseria meningitidis; identical to SEQ ID NO: 37616

SEQ ID NO: 64371 - DNA, 339 bp, Neisseria meningitidis
atgaaaaaaatcgaggcgattgtcaaaccgttcaaactcgacgacgtgcgcgaggcgttgacggaaatcggcattacggggatgaccgtcagcgaggtcaaagggttcggcaggcagaaggggcatacggaaatctatcgcggtgcggaatacgccgtcgatttcctgcccaaggtcaaaatcgagcttgtgttggcggatgatgctgtggaacgcgcgattgacgtgattgtcgaggtggcgcgttcgggaaaaatcggcgacggcaagatttttgtgctgccggtcgaggaggcaatccgtatccgcacgggcgaacgtgcggacgcggcggtttga

SEQ ID NO: 64372 - DNA, 219 bp, Neisseria meningitidis; identical to SEQ ID NO: 36510

SEQ ID NO: 64373 - DNA, 654 bp, Neisseria meningitidis
atgcaggataatgctttgaccatcgccttatccaaggggcgcatttttgaggagacgctgccgctgcttgccgctgccggcattgttccgactgaagagcctgaaaaatcgcgcaagctgattatcgggacgaaccatgaaaacatccgccttgtcattgtccgcgcaaccgatgtgccgacttatgtccgctacggcgcggcggacttcggcattgcgggcaaagacgtgctgatcgaacacggcggcacggggctttaccggcctttggatttggagattgccaagtgccgcatgatggttgctgtgcgtaaagggtttgattacgaagcagcttcgcaacccggatgccgtctgaagattgccacgaagtatcctgaaatcgcggcatctcattttgccggcaagggtgtccatgtggacattatcaaactgtacggctcgatggaacttgcgccgctggtcggcttgagcgatgcgattgtggacttggtttcgacgggcaacaccttgaaggcaaacggcttggaagcagtcgaacacatcgtcgacatttccagccgcctggtggtcaacaaggctgctttgaaaacgaaatacgcgctgctggagccgattattcaggcgttcggcggcgcagtgaaggcgaagtaa

SEQ ID NO: 64374 - DNA, 1128 bp, Neisseria meningitidis
atgtacactttccgcccgtttcccaaactgcacacagaaacacacattatgaacatacaaaacatccgcaccctcctcgacaccgtcgccgttccgaatacggcacgcacgctcggcggcgaaaaggccgtccgttcggtcgaacagcgttcagacggcatccatatcgccctgcatttcggcttccccgtcgcgcacattgcctcagaaacagccgaccgcatacaggaaatcctgatgccgctgacaggcgacacacacatccatctgtccatagacaccgaaatcggcacacacaaagtccagcccggcgttaccaccatcaaaggcgtgaaaaacatcatcgccgtcgcatcgggtaaaggcggcgtgggcaaatcgacgacgacagccaaccttgccgccgcaatggcgcggatgggcgcgcgcgtcggcgtactcgatgccgacctttacggcccgagccaacccacgatgctgggtgtggacgaccgcaaacccgatcagaaaaaccaaaaactcattcccgtcgaatcttcagacggcatacaggtcatgtctatcggctttctcgtcgataccgaccaagccgtcgtctggcgcgggccgatggtcagccaagccttgcagcaactgatgtttcaaagcgagtgggacgaagtggactacctgtttatcgacctgccccccggcacgggcgacatccaactcacgctgtcccaacgcatccccgtaaccggttccgtcatcgtaaccacgccgcaggacatcgccctgatagacgcgcgcaaagccgtggatatgttccgcaaagtcaacattcccattttgggcgtattggaaaatatgtccgtccacatctgcaccaactgcggacacagcgaagcactgttcggcacggacggcggcaaagatttagccgcacgcctcaacgtccccctgctcggacagcttcccctaagcctgcccgtgcgcgaagcaatggacggcggcacaccggcgcaactgttcgacgaacaccccgccatcgccaaaatctacaccgatgccgcattccaaatcgccctgagcattgccgacaaaggcaaagacttcagcagccgcttccccaaaatcgtcgtcgaataa

SEQ ID NO: 64375 - DNA, 384 bp, Neisseria meningitidis; identical to SEQ ID NO: 38324

SEQ ID NO: 64376 - DNA, 909 bp, Neisseria meningitidis
atgaatcaaaccgccatcaaccgcgccgatgtgcgtacccgctttatcttcgacgatatgcccgtgcgcgggctgcacgtccgtctggaaaacgtgtggcagcacattgtaaaacagaaaaactatcccgccgccatccgccgcgccttgggcgagctgttggctgccggtgttctgctgtcgggcaacctcaaaaacgaaggcacgctgattgtgcaggttcaggggcaggggcggctgaaaatgctggttgcggaagcgacttccgaccgtaccgtccgtgcgaccgcgcggtgggacgaggcggcagaaatagccgatgacgaaagcctcggcgaccttttgggcggcaacggcgtgttcgtattgacgctgcagcccaaagacggcgaaccctggcagggcgtagtgcctttggaaggcgacggtatcgcgcaaatgttgatgaactatatgaaacgttccgaacagcttgatacgcacatcgtcctgtctgcaagcgatgaagcggcgggcggtctgctggtgcagcgtctgcctgaagaggtgttggatgaagaggcatgggaacacgtcagtacgctggcgcgcacgctgacggcgggcgagttggcagaattggatgcgcaacatgttttgtaccgcttgttccacgaaacgccgccgcgcgtgttcgagccggaaacgtttgaattttcatgcacctgttcgcgcggcaaagtcagcgatatgctgttgatgctgggcggggaagaagtcggcggcgtggtggcggaacaaggcagcatcgaagtcgattgcgatttctgccacagcaaatatgtgtttgacgaaaccgatgtcaatgcgctgttcggggaggatgtggtcggcgttgcccgagagcagacccgacatactgtccaataa

SEQ ID NO: 64377 - DNA, 693 bp, Neisseria meningitidis; identical to SEQ ID NO: 50966

SEQ ID NO: 64378 - DNA, 375 bp, Neisseria meningitidis; identical to SEQ ID NO: 38650

SEQ ID NO: 64379 - DNA, 2097 bp, Neisseria meningitidis
atgtcaatatatctatctcgcctatcattcggcttttctcgccgtttactagttgtcttgcaaacggaagcagcagaatgtggattggcgtgtttggtatcggtattggggtttcatggtttttatacggatttgcgccatttaagggcgcgtttttctttgtctcttaaaggcgcaacattggcagatttggtacggtttgctaatagcatgaatttaactgctcgagctgttcggttggatttagatgaattggtaaatttgcgcttaccctgtattttacattgggatttaaatcattttgtggtgttgcatgaagttcatcgtaatcacattgtgattatgaaccctgcttcgggttggcaaaaagtgcgtatggaagaagtctcgcgctgttttacaggcatagcgttggagctattccctaacacgcaatttgaagagaaacacgaaacgcgtaaaattcgcatactaccgatgttgcgcggtgtggttggattaaaaaggtctttatttcagcttctgctgctggcggcagtattacaggtgtttgctttggcaagccctttttttatgcaatgggtaatagatcatgccattgtatcggcagaccgtgatttattgctaacattggcattgggttttggtttgttgatgattgtgcagcagttggtgtcattgttgcaaacttgggcaggtatgtatttgtctacttcattgaatatccaatggaaagccaacgtattccgccgcttaatggatttacctgtttcttatttcactaaacgacacttgggcgatgtggtttcacgttttggctcggtggatagtattcaaagtacgctcacttctactttctttgtgctggtactcaacagcattatggcagtatttacattagggttaatgtatttatacagccctagtttaacggctgttgtattggttgttttactgatttatatcggtattcgttgggtggcatattatccgttacgccatgcaaccgaagaaaatattgttcatgctgccaagcaaagcagttatttcatggaaaccatacgcggtattcaaaccgttaaattatttgataaaaatgcacaacgtcatgcggcttggctgaacttatttgttgatacaatcaacacaggtttaacgacacaaaaactttccgcaatgttcggttttgcgaacagccttttgtttggtatcgctaatattttaattgtgtattttggtgcggtttctgtgttggacggtgtttttaccgttggggcgttaatggcgtttatgtcctacaaaagtcagtttgagagtaaagcaggttcattgattgaccagtttgtacaaatcaaaatgctaggattgcacgcggaacgcttggcggatattgtgctagaaaaaacggaaaacgagcagaacaacgatttcaggctgcctaaaaatttagaacactttgatattaaaatagaaaatatatcatttcgctatgctgaaaatgaaccatacattttgcaagatttcagtttaattatcaaacaaggaacagccattgcttttgctggacattcaggctgtgggaaatctacgctcattcaaattctgacaggcagtctgaaacctgaaagcggtcacgtgttactaggcgagaatgatattcatgcgtttccacctgcatttatccgcaaatggagcgcaagtgtaatgcaagatgatgtgttatttgctggctcaatcgcagaaaacatcagtttttttgatgatacgcccaatatggaaaaaatcgcattttgcgctcaaatggcgaatattcatcatgaaattgtcgctatgcctatggcgtatgaaaccttaattggtgacatgggaagcgcattgagcggtgggcaaaagcagcgtattgttctagctcgtgctttatatcgtgaacccaaaattttgtttttagacgaagccagtagccatttggacatcaacaatgaacgtgtgattaacgataatctacgccaactcaacattaccaaaatcatggtcgcgcatcgtcaggaaactttaaatactgctgatagcgtagtttatttagacaaggtagcctga

SEQ ID NO: 64380 - DNA, 330 bp, Neisseria meningitidis; identical to SEQ ID NO: 43453

SEQ ID NO: 64381 - DNA, 2535 bp, Neisseria meningitidis
gtgctgaagacacctcctacgcttgctgcagaactttcgggtaaaaccggtgtgagcattagcgcgccgtatgccaatgaaaacagccgcatcctgctgagcaccacggatatcagttcggaaaacggcaaaatcaaactgcaatcctacggcgaccagttctactacgccggacagggtgagctctacaccttcgataaacgcagctataaaaccggtaagtggtacaaactaaaacatgttactgaaatcaaagagcataaaaacgccaaagccgacccggtgagcctcagtgcgtcacaaggtattgaaatcaaatccggcggcaatatcggtgcccacgccaccttgtttgatgcaccccgcggctccgttaaaatcgaagccggacgtgggctggttctctatgccgtggaagatctcaactacgacaaacttgacacccgtaccaagcgcaaatttatcggcattacctacgacaaggtgcacgacaccaccacccacaccatgaaaaccgccctgccctcaagggtagttgcagaatcggccaacctgcaatcaggctgggacgccaaactgcaaggcacccagtttgaaaccacgctgggcggcgcagccatccgtgcaggtgtaggcgatcaggcacgagcagatgccaagattattcttgaaggcatcaaaagtagtgtgcgcactgaaacagtaagcagtagcaaatctgccctctggcagaaacaggccggacgcggcagcaatatcgaaaccttgcaactgccaagtttcacaggctccgttgcgcccgtactctctgcccccggcggctatatcgttgatattccgaaaggcaatctgaaaaccgaaatcgaaaagctggccaaacagcccgaatacgcctacctgaaacagcttcagacggccaagaacgtcgattggaaacaggtgcagcttgtctacgacaagtgggactataaagccgaaggcctgaccggagccggagccgccattatcgcactggccgttaccgtggtcacctcaggcgcaggaaccggagccgtattgggattaaacggtgcggccgccgccgcaaccgatgcagcattcgcctctttggccagccaggcttccgtatcgttcatcaacaacaaaggcaatatcggtaacaccctgaaagagctgggcagaagcagcacggtgaaaaatctggtggttgccgccgctaccgcaggcgtagccgacaaaatcggcgcttcggcattgaacaatgtcagcgataagcagtggatcaacaacctgaccgtcaacctggccaatgcgggcagtgccgcactgattaataccgctgtcaacggcggcagcctgaaagacaatctggaagcgaatatccttgcggctttggtgaatactgcgcatggagaggcagcaagtaaaatcaaacaattggatcagcactacatagtccacaagattgcccatgccatagcgggctgtgcggcagcggcggcgaataagggcaagtgtcaggatggcgcgataggcgctgcagtcggtgagattgttggtgaggctttggttaagaatactgatttcagtcgtatgagtgcgaccgaaatcgaaaaatctaaagcgaagattactgcctattcaaaactggttgccggcactgcgtctgccgttgtaggcggggatgtgaatacagcggcgaatgcggcacagatagcggtggagaataatactttgtatcctagatgcgttggtgcaaagtgtgatgaatttcaaaaggaacaacaaaaatggatacgtgaaaatcctgaagaatatcgagaagttttgcttcttcagacaggatttattccaattatcggtgatatacagagttttgtacaagcacagaccgctgccgatcacctgtttgctttgctgggtgtggttccgggtatcggtgaatcgatacaggcctataaagtagcgaaagcggcaaaaaatttacaaggcatgaaaaaagccttggacaaggcagcaaccgttgccactgcacagggctatgtcagtaaaaccaaaatcaaaatcggtcaaactgaattaagggttactgcagcaactgacaaacaattgctgaaagctattggcgaaggaagggacacgacaggtaaaatgaccgagcagttatttgactctttagctaaacaaaatggcttcagagtgctttcgggcggcaaatacggcggaaataacggttttgatcatgtatggcaggctgccgatggtagtgttgttttgattgtagaaagtaagcagattaggaacggtacggtacagctgaatccgaatggtgcgggtggatatacgcagatgagtcgtgaatggattaaacaagttgtaaaaagtttacctgatggtagtcctgctaaggcagttgtcttaaaagcaaatcagaacggcaaattaaaaacggcaatagcaggcgttgatcgtcaaacaggtaaggccgttattctttctgtcaaagttccttctaaaaccaatataaggagataa

SEQ ID NO: 64382 - DNA, 975 bp, Neisseria meningitidis
atggacacactgacccgattcctccccgaacacctgcaacaaaaccagctgcccgaagcactcggcggcgttttactgtccgttgtttccgcctgcaccgaaatcaacgccaaagtccgcctcggcgcactggccggcgtattgggtatggcgggcacaggcaatattcagggcgaagaccagaaaaaactggatgttatcgccaacaacattatgattgacacactcaaagccaaccctgccgttgccggtttggcaagcgaggaagaagacactttcgtaagtgccggtgaaaacggacgctatctcgtcctattcgaccctttagacggatcgtccaatattgatgtcaacatttccgtcggtacgattttctccatccttgaaaaacccgatggcgaattaaaaaccgagtccttcttgcaagccggccggcaccagcttgccgcaggctatgtcctctacgggcctcaaacccagctcgtattcacattcggacacggcgtatatatgttcacgcttaatgccgaaaacgaatttgtgctgaccaaagaaaacccgaaagtacccgaaagtaccaaagaatttgccatcaatatgtccaaccgccgccactggctgccccccgtccaacaatacatcgacgagctcttgacgggcgaaaccggcacgcgcggcaaaaactacaatatgcgctgggtagccagcatggttgccgaaatccaccgcatcctgatgcgcggcggcgtgttcatgtatccgcaagacaaacgcgaccccgccaagcccggcaaactgcgcctgatgtacgaagccaaccctatgagcctgatactcgaacaggcgggcgcatcggcaagcaacgcatatcaagccatgctcgacatacagcccgaaaacctgcaccaacgcgtcgccgtcttcatgggcagcagcgaagaagtcgcctatctcgaccgcctgcacgcaaaatag

SEQ ID NO: 64383 - DNA, 1365 bp, Neisseria meningitidis; identical to SEQ ID NO: 60128

SEQ ID NO: 64384 - DNA, 1443 bp, Neisseria meningitidis
atgaaacaattggccatgtacatcaacggacgctttgaaaacgacttcaacggcgaatggcgcgacgtattgaacccgtccaccgaagaaaccatcgcccgcgaacccaaaggcggcaaagcggacgttgaccgagccgtggcggcggcacgcgcggcgcaaccggcttgggaacgtctgcctgcggtcgaacgcggcgcgtatttgcgcaaaatcgcccaaggcatacgcgaacgtgccgacgagctgaccgacaccatcgttgccgaaggtggcaaaaccaaagacttggcacgcgtggaagtcatgtttaccgccgactatctcgattaccaggccgaatgggcgcgccgttacgaaggcgaaatcatccaaagcgaccgcccgcgcgaaaacattttattgttcaaacgtccgctgggcgtaattgccggcattttgccgtggaacttccccttcttcctgattgcccgcaaaatgggtcccgctttggtaacgggcaacaccatcgtcgtcaaacccagcagcgtaaccccgatcaactgccacatcttcgccgaaatcgtcgatgcggtcggactgcccgcaggcgtgttcaacgtagtgaacggtccgggtgcggaaatcggcaatgccttgtccgcccatccgcaagtcgatatggtcagcctgaccggctccgtcgaagcaggccgccaagtgatggaagccgcttccgccaacatcaccaaagtttcgttggaactcggcggcaaagcccctgccatcgtgttgaaagacgcggatttggatttggcggtgaaatccatcttggcttcgcgcgtcggcaacaccggtcaaatctgcaactgcgccgagcgcgtctatgtccacagctgcctgaaagacgcgttcattgaaaaaatgaccgccgccatgaaaggcgtacgctacggcaaccctgccgaagccgaagcaggcgcgctggaaatgggcccgctgattgaagagcgcgccgtcaaagccgttgccgaaaaagtggaacgggcagtcaaacaaggtgcgaaattggtttgcggcggcaaacgcgccgaaggacgcggctatttcttcgagccgaccctgctgaccgacaccgacaacagtatggacattatgaaagaagaaaccttcggccccgtcctgcctgtttccactttcgacacgctcgaccaagtcatcgcactggctaacgattgcgagtttggtctgaccagttctgtttatacgactaatttaaacgaagccttctacgttacccgccgcctgcaattcggcgaaacctacatcaaccgcgaaaactttgaagcgatgcagggtttccacgccggttggaaaaaatccggtatcggcggcgcggacggcaaacacggtttggaagaatatctgcaaacccaagtcgtttatctggaaaccgatatttaa

SEQ ID NO: 64385 - DNA, 246 bp, Neisseria meningitidis; identical to SEQ ID NO: 37539

SEQ ID NO: 64386 - DNA, 1047 bp, Neisseria meningitidis; identical to SEQ ID NO: 53363

SEQ ID NO: 64387 - DNA, 672 bp, Neisseria meningitidis; identical to SEQ ID NO: 51112

SEQ ID NO: 64388 - DNA, 582 bp, Neisseria meningitidis
atgaggaatgaggaaaaacgcgccctgcgccgcgaattgcgcgggcggcgttcgcaaatggggcgggacgtgcgggcggcggcaacggtaaaaatcaaccgcctgctcaaacgttatattaaaaaagggcggaaaatcggcgtgtattggccgatgggcaaggaattgcgtttggacggctttgtccgtgtcgcacaaaaacgcggcgcaaaactttatctgccttatatcgaaccgcgttcgcggcggatgtggtttacgccgtatcctgaaagcggaatggaacgggagcgcatacggggcagggcgaagttgaacgtgccgcagtttgcagggcggaaaaggcgtgtgcatgatttgaacctcttgcttgtgccagtggtcggtatggacaggctgggctaccgtttgggacaggcaggcggctattacgatgcgacgcttgcggcgatgaaataccgtttgcaggcaaaaaccgtgggcgtgggctttgcctgccagttggtggacagactgtcggtcgaggcgcacgacctgccgctggacggttttgtgtcggaggcggggatattgtgtttttag

SEQ ID NO: 64389 - DNA, 585 bp, Neisseria meningitidis; identical to SEQ ID NO: 51987

SEQ ID NO: 64390 - DNA, 390 bp, Neisseria meningitidis; identical to SEQ ID NO: 51660

SEQ ID NO: 64391 - DNA, 819 bp, Neisseria meningitidis; identical to SEQ ID NO: 50753

SEQ ID NO: 64392 - DNA, 180 bp, Neisseria meningitidis
atgccgtctaaacgcacgttttgccgttcagacggcattttcatttcctttttccgcctgccgccccttgaaaatcccttacgcgccgccctgtttgaaacaaagcaaacgcccgccgcgaaccggacaatcttgatacgcagccaaagcaagtccggcggtaagttgttaaatatataa

SEQ ID NO: 64393 - DNA, 606 bp, Neisseria meningitidis; identical to SEQ ID NO: 42337

SEQ ID NO: 64394 - DNA, 171 bp, Neisseria meningitidis; identical to SEQ ID NO: 50701

SEQ ID NO: 64395 - DNA, 279 bp, Neisseria meningitidis; identical to SEQ ID NO: 38377

SEQ ID NO: 64396 - DNA, 393 bp, Neisseria meningitidis; identical to SEQ ID NO: 54037

SEQ ID NO: 64397 - DNA, 927 bp, Neisseria meningitidis; identical to SEQ ID NO: 51820

SEQ ID NO: 64398 - DNA, 2451 bp, Neisseria meningitidis; identical to SEQ ID NO: 51683

SEQ ID NO: 64399 - DNA, 750 bp, Neisseria meningitidis; identical to SEQ ID NO: 45151

SEQ ID NO: 64400 - DNA, 639 bp, Neisseria meningitidis; identical to SEQ ID NO: 52442

SEQ ID NO: 64401 - DNA, 174 bp, Neisseria meningitidis; identical to SEQ ID NO: 36913

SEQ ID NO: 64402 - DNA, 516 bp, Neisseria meningitidis; identical to SEQ ID NO: 51842

SEQ ID NO: 64403 - DNA, 207 bp, Neisseria meningitidis
atgtttacttttttaaataaaaatatatttatcaaaacaattgtacttggctgtttttattcctttttattttttagtttttttgtatctggtaagtcatttggttattcatttgaaatttttaatatggatacaagtgcgcttgcttttttaagcgtatatatgggcttttttataagcgtggctgtgcatatttacgatatttaa

SEQ ID NO: 64404 - DNA, 540 bp, Neisseria meningitidis; identical to SEQ ID NO: 47703

SEQ ID NO: 64405 - DNA, 144 bp, Neisseria meningitidis; identical to SEQ ID NO: 53494

SEQ ID NO: 64406 - DNA, 528 bp, Neisseria meningitidis; identical to SEQ ID NO: 43903

SEQ ID NO: 64407 - DNA, 831 bp, Neisseria meningitidis; identical to SEQ ID NO: 54954

SEQ ID NO: 64408 - DNA, 372 bp, Neisseria meningitidis; identical to SEQ ID NO: 36794

SEQ ID NO: 64409 - DNA, 1410 bp, Neisseria meningitidis
atgaaatacatcagcacgcgcggcgaaaccgcacacaaaccgttcagcgaagttttattgatggggcttgcccccgacggcggcctgatgctgccggaacattatccgcaaatcgggcgcgaaaccttggacaaatggcgcggtttagcttatcccgaattggcgtttgaaattatgcgcctgtttgttacggatattccggaggacgatttgcgcgacattctgaaccgtacttacacggaagcggcgttcggtactaaggaaatcacccccgtccgcacgctttcagacggcatcaaaatccaagccttgtccaacggcccgacgctggcgttcaaagatatggcaatgcagtttttgggcaatgcgtttgaatatgttttaaacaaagaaggcaaaaaactcaatatcttgggcgcgaccagcggcgatacgggttcggctgcggaatatgccttgcgcggcaaaaagggcgtgaacgtatttatgttgtcgcccgacggtaaaatgagcgcgttccaacgcgcgcaaatgtacagcctgcaagacgagaatatccacaatatcgccgtgaagggaatgtttgacgactgtcaggatattgtgaaggcggtgcagaacgatgccgcgttcaaggaaaaataccatatcggtacggtcaactcgatcaactggggacgcatcgtcgcgcaagtggtttattactttgcaggctatttcaacgccacttcaagcaatgacgaaaccgtcagcttctgtgtaccgagcggcaacttcggcaatgtttgcgcgggacacattgccaaacaaatgggcctgcctatccgccgcctgattgtcgcgaccaatgaaaacgatgtgttggacgagtttttcaaaaccggtgcataccgcccgcgcaacagcgcgcatacttatgtaacctccagcccgtctatggacatttccaaagcgtccaacttcgagcgtttcgtgttcgacctgatggatcgcgatcctgcggaaatcaatacgctgtgggcggaagtggctgcaggcaaaggctttgacctgcgatttgccttggacaaagtcggtggcaaatacggttttacctctggcaaatccacccacgccgaccgcctcgccaccatcaagcaggtttacgagcaagaccaagaactcatcgacccgcacactgccgacggcgtaaaagtcgcccgcgaagtgcgcgaagaaggtgaaatggtggtttgtttggaaaccgcgttggcggcgaaattcgatgcgaccatacgcgaagccgtcggcgatgccgccattccgcgccctgccgcgctggaaggtttggaaaacctgccgcagcgcgtgcaaaccgtgccgaacagtgcggatgcggtaaaaggcatcatcgaacaaacccttgcctga

SEQ ID NO: 64410 - DNA, 1458 bp, Neisseria meningitidis; identical to SEQ ID NO: 50942

SEQ ID NO: 64411 - DNA, 468 bp, Neisseria meningitidis; identical to SEQ ID NO: 50927

SEQ ID NO: 64412 - DNA, 303 bp, Neisseria meningitidis; identical to SEQ ID NO: 43286

SEQ ID NO: 64413 - DNA, 1296 bp, Neisseria meningitidis
atgattcgtcctgattttcaagaatatctgccttcttattattttagttcggttaatcctcatactgtttatccgaaacttcaatgccgtctgaaaaccgatacctgtatcatcggcggcggattgagtggtttgtgcactgcattgcccttggcggagcagggacatgaaacggttgtgttggaagccgcgcgtatcggcttcggcgcgtccggcaggagcggcggtcaggttatcagcgactacgcctgcggtatggaggaaattgaaaaacaggttggtttggagcgggcgcaatggttttggcaacagtctttgcaggcggtcgaactggtggacgaacgcgtccgcaaacatgccgtcgattgtgattggcagcgcggttatgccacggttgccgtccgtccgcagcattgggaagagttgcagcagtggcatgaacacgcccaacggcattacggtgcgagtcattatcaactttgggataaagccgagttgaaacagcagcttgacagcgatatgtaccaaggggcacaattcgaccccttatccggacacctgcatccgctcaattacactttgggcatcgctcgtgccgctgccgaagccggtgcgcagattttcgagcaatccccgatgacgcgcatcgaaccgcatcaaaacggttggctggtttacacgcccgaaggcagcgtcgaatgcaaaaatctggtgtacgccgtcaatacctatgccggtttgagtccgatatttaagcctttggaacgcaaggcgattgccgtcagcacctttattattgccaccgaacccttgggggcgcgcgcaaaagggcttatccgcaacaatatggcagtatgcgacaaccgccatattttggactattaccgcctcagtgcggacggcagattgcttttcggcggtaaagaccatgaatttatcgacgatcccgcgcgtatgaccgaacttgtccgccaagatatgcttaaagtttttccgcagcttgccgatgttagaatcgaatattcgtggggcggggagtgcgacattaccgccaaccttgtcccgcatttcggacgtttggccgcgaatgttttttatgcgcaaggttattccggacacgggatggcgataacaggcattgcaggtctggcggttgccgaagcaattttaggggacgaatgccgtctgaagccgtttgagcggttgcgccagccgaatattatcctgcaaccgtttttgcgcaaactcggttctttcctcggctcgaaatattatcagtggaaagacagccgttaa

SEQ ID NO: 64414 - DNA, 432 bp, Neisseria meningitidis; identical to SEQ ID NO: 38797

SEQ ID NO: 64415 - DNA, 8115 bp, Neisseria meningitidis
atgaaccgcaccctgtacaaagttgtatttaacaaacatcgaaactgcatgatagccgttgctgaaaatgccaaacgcgagggcaaaaacacagccgacacccaagctgtaggtattttgccaaatgatattgcgggctttgcgggttttatccattctatctctgttatctcattctccctttcattactgctcggttctgcccttatcctgacttcttcttctgctactgcccaaggtatcgttgccgacaaatccgcacctgcacagcaacagcctaccatcctgcaaacaggtaacggcataccgcaagtcaatattcaaacccctacttcggcaggggtttctgttaatcaatacgcccagtttgatgtgggtaatcgcggggcgattttaaacaacagtcgcagcaacacccaaacacagctaggcggttggattcaaggcaatccttggttggcaaggggcgaagcacgtgtggttgtaaaccaaatcaacagcagccattcttcacaactgaatggctatattgaagtgggcggacgacgtgcagaagtcgttattgccaatccggcagggattgcagtcaatggtggtggttttatcaatgcttcccgtgccactttgacgacaggccaaccgcaatatcaagcaggagaccttagcggctttaagataaggcaaggcaatgttgtaatcgccggacacggtttggatgcacgtgataccgattacacacgtattctcagttatcattccaaaattgatgcacccgtatggggacaagatgttcgtgtcgtcgcgggacaaaacgatgtggccgcaacaggtgatgcacattcgcctattctcaataatgctgctgccaatacgtcaaacaatacagccaacaacggcacacatatccctttatttgcgattgatacaggcaaattaggaggtatgtatgccaacaaaatcaccttgatcagtacggtcgagcaagcaggcattcgtaatcaagggcaatggtttgcctcagccggcaatgtggcagtgaatgctgagggtaaactggtcaacacgggcatgattgcagcgacgggagaaaatcatgcggtttcacttcatgcccgcaatgttcataatagcggtacggttgcctcacaggatgatgccaatattcacagccagacgctggacaattcaggtacggtcttatcctcaggtcgattgactgttcgtaatttaggccgtctgaaaaaccaaaacaacggtacgatccaggctgcccgcttagatatgtcaacaggtggtttggataacacaggtaatattactcaaacaggttcacaagcattggatttggtatctgccggcaaattcgataacagtggcaagattggtgtaagtgacgttccacagaccggtttgaatcccaatccatcagtcataccacagattccgagtactgcaacaggttcaggcagcagcactgtctcggtatctaagcctggttcaaacaatcccgtttcacctacagcacctgcaaaaaactacgccgtaggacgcattcaaacaacaggagcatttgacaatgcaggatcaattaatgcgggtgggcaaattgacattgccgcccaaaacggtttgggaaattcgggtagtctgaatgcggctaaactacgagtatcaggcgattcatttaacaatacggtaaaaggcaaactccaggcacacgatctggctgttaacactcaaactgctaaaaacagcggtcacttattaactcaaaccggcaagattgataaccgtgaactgcataatgccggagaaattgccgccaacaatctgacactcattcattcgggccgcttgagcaatgataaaaaaggcaatattcgagctgcacatttacagcttgataccgccggtttacataatgcaggtaacattcttgccgatagtggaaccgttaccaccaagaataatcttcgcaatacaggaaaagtttctgttgcacgactgaataccgaaggtcagactctagataatacgcgcggacgtatagaggctgaaacggttaacatccaaagtcagcaactgactaaccaaagcggccatattactgctaccgaacaactgactatcaatagtcgaaatgtagacaaccaaaacggcaaactcctatctgcaaaccaagcacaattagctgtttcagacggcctatacaaccaacatggtgaaattgccaccaaccggcagttgtctattcacgataaaaatcaaaacactttggcgttaaacaatgcggatggcacgattcaatctgccggtaatgtatcgctacaagccaaatcactcgccaacaatggcacattaacagccggtaacaaactggatattgctttgacggacgatttcgtcgtagagcgcgacctcactgcaggcaaacaattaaatctaagcataaaaggccgtctgaaaaatacccataccctacaagcaggccatacgctcaaactcaatgccggcaatatagataaccaagttacaggcaaaattattggtggagaacaaacggacatcacatccgaacagcatgttgacaacaggggcttgatcaacagcgacggtttgacccacatcggtgcaggtcaaaccctgaccaacaccgggacaggcaaaatctatggcaaccatattgccctggacgcgcaaatactgcttaaccgggaagaaacgacggaaggcagtaccaaagcgggggcaatagctgcaaggaaacgtttggatattggagcgaaagagattcataaccaagaaggtgccctactatccagcgaaggtatttttgccgtaggtaatcgactggatgaacaacatcatgcggcaggcatggccgatacctttgttaatggcagtgccggtttggaagtacaaggtgatgcattgatgtccgttcggaatatgcagaatatcaataatcactttaaaacagagacatacttagccaaagcggaaaagcaagtccgcgactacaccgtactggggcaaaatacctactatcaggcgggaaaagacggtttattcgacaactcgcaaggacaaaaagaccaaactactgctacgttccatttaaaaaatggttctcgtattgaggccaaccaatggcatgtccgagactaccacatcgagacttataaagaacgcatcatcgaaaaccggccggcacacattactgtgggcggtgatttgactgcctcaggtcaaaattggctgaacaaagacagccggattgtagtaggcgggcgtattatcactgatgatttaaaccagaaagaaattaccaatcaaagtacaacaggcaaaggtcgcacagatgctgtcggcacacagtgggattcagttacaaaaaaaggatggtacagcggtagaaaaagacaacgccgtactgaaagaaaccatactccttaccatgatacccaactatttacccacgacttcgacacgcctgtatccgtcatccaacagaatgccgcctccccttcctttcaacccgccgcatctgcaatcaaactgattgacggagtatccacggcagccgtcaatggtcagcgcatccataccggtaatgtggtctcgttaaataacgctactgttactctgcctaacagcagcctctataccacccatcctgacaataaaggctggttggttgaaaccgatcctcaatttgcagactaccgccgctggttgggcagcgactacatgttgcaacaactgcaattggacaccaatcatctacacaaacggcttggcgacggctactacgaacaaaaacttgttaatgaacaaatccatcagttaacaggctaccgccgactcgacggctacaggagtgatgaagaacaattcaaagctctgatggacaacggccttactgctgccaaaacattcggtctcaccccaggtatcgccttgagtgcagagcaagttgcccgcttaacttcagatatcgtttggatggaaaatcaaaccgtcaccctgtctgacggttcgactcaaaccgtactggttcctaaagtctatgccctggcgcgcaaaggtgatctcaatacctccggtggcctgattagtgccgaacaagtcttacttaaactgcaaaacggcaacctgactaacagcggtaccattgcggggcgacaggccgtactcatccaggcacggaatattaacagcaacggtaacattcaagccgaccaaatcggcttaaaagctgaaaaaagtatcaatatcgacggcgggcaggtacaagcaggcagactgctgactgcccaagcgcaaaatatcaaccttaacggtacaacccaaacttccggtaatgaacgtaacggcaataccgccatcgatcgtatggccggcattaacgtggtcggaagccatactgaacaagtagataacagaacttcagacggcatcctatccctgcatgccagcaacgatatcaacctcaatgcggccaccgtctctaaccaagttaaagacggcactacccaaattaccgccggcaataatctcaacctcggcaccatccgtaccgaacatcgcgaagcctatggtacattagatgacgagaaccatcgccatgtccgccaaagtaccgaagtcggcagcagtatccgcacgcaaaacggcgcactgcttagagccggtaacgacttaaaaatccgccaaggcgaactggaggccgaagaaggcaaaaccgtccttgccgcaggacgtgatgtcactatcagcgaaggacgccaaataaccgaactggatacctcggtaagcggaaaaagcaaaggcatcctttccagtaccaaaacacaggatcgctaccgcttcagtcatgatgaagcagtcggcagcaacatcggcggcggcaaaatgattgttgcagccgggcaggatatcaatgtacgcggcagcaaccttatttctgataagggcattgtcttaaaagcaggacacgacatcgatatttctactgcccataatcgctataccggcaatgaataccacgagagcaaaaaatcaggcgtcatgggtactggcggattgggctttactatcggtaacctgaaaactaccgatgacactgatcgtaccaatattgtccatataggcagcattataggcagcctgaatggagacaccgttacagttgcaggaaaccgctaccgacaaaccggcagtaccgtctccagccccgaggggcgcaataccgtcacagccaaaagcatagatgtagagtccgcaaacaaccagtatgccactgactacgcccatacccaggaacaaaaaggccttaccgtcgccctcaatgtcccggttgtccaatctgcacaaaacttcatacaagcagcccaaaatgtgggcaaaagtaaaaataaacgcgttaatgccatggctgcagccaatgctgcatggcagggttatcaagcagcccaacaaatgcaacaatttgctccaagcagcagtgcgggacaaggtcaaaacaacaatcaaagccccagtatcagtgtgtccatcacctacggcgaacagaaaagtcgtaacgagcaaaaaagacgttacaccgaagcggcagcaagtcaaattatcggcaaagggcaaaccacacttgcggcaacaggaagtggggagcagtccaatatcaatattacaggttccgatgtcatcggccatgcaggtactaccctcattgccgacaaccatatcagactccaatctgccaaacaggacggcagcgagcaaagcaaaaacaaaagcagtggttggaatgcaggcgtagccgtcaaaataggcaacggcatcagttttggaattaccgccggaggaaatatcggtaaaggtaaagagcaagggggaagtactacccaccgccacacccatgtcggcagcacaaccggtaaaactaccatccgcagcggcggggataccaccctcaaaggtgcgcagctcatcggcaaaggcatacaggcagatacgcgcaacctgcatatagaaagtgtacaagatactgaaacctctcagagcaaacagcaaaacggcaatgtccaagttactgtcggttacggattcagtgcaagcggcagttacagccaaagcaaagtcaaagcagaccatgcctccgtaaccgagcaaagcggtatttatgccggagaagacggctatcaaatcaaggtcggaaaccatacagacctcaagggcggtatcatcacctccggcaagagtgccgaagacaaaggaaaaaacctttttcagacggccacccttactgccagcgacattcaaaaccacagccgctacgaaggcagaagcttcggcataggcggcagtttcgacctgaacggcggctgggacggcacggttaccgacaaacaaggcaggcctaccgacaggataagcctggcagccggctacggcagcgacagcgacagtcaaagcagcatcacaaaaagcggcatcaacacccgcaacatacacatcaccgacgaagcgggacaacttgcccgaacaggcaggactgcaaaagaaaccgaagcgcgtatctacaccggcatcgacaccgaaactgcggatcaacacacaggccgtctgaaaaacagcttcgacaaagacgcggtcgccaaagagatcaacctgcaaagggaagtaacgaaggagttcggcagaaacgccgcccaagccgtagcggccgttgccgacaaactcggtaatacccaaagttacgaacggtatcaggaagcccgaaccctgctggaggccgaactgcaaaacacggacagcaaagccgaaaaagccgccatccgcgcatccctcggccaagtaaacgcctatcttgccgaaaaccaaagccgctacgacacctggaaagaaggcggcataggcaggagcatactgcacggggcggcaggcggactgacgaccggaagcctcggcggcatactggccggcagcggcacttcccttgctgcaccatatttggacaaagcggcggaaaacctcggtccggcgggcaaagcggcggtcaacgcactgggcggggcggtcatcggctatgcggcgggcgggaatgtcggtacggcggcagtgggggcgaatgtcgattggaacaataggcagctgcatccgaaagaaatggcactggcggacaaatatgccgaagccctcaagcgcgaagttgaaaaacgcgaaggcagaaaaatcagcagccaagaagcggcaatgagaatccgcaggcagatactgcgttgggtggacaaaggttcccaagacggctataccgaccaaagcgtcatatcccttatcggaatgaaaggcgaagacaaagccttgggttatacttgggactaccgcgactacggcgcaagaaatccgcaaacctacaacgatccgaagctgtttgaggaataccgccgacaggacaaacccgaataccgcaacctgacctggctgcacagcgggacgaaagacaccaaaatcaggcagggagagcggaaaaacgaagagtttgcactgaacgttgccgaaggactgacgagccttgtcaaccccaatccgaggataaaagtcccgattcttgcaggcatccgcaacctgaaaaacatcaagccgacagttaccggcagcgatcccttattggcgggtgcggggaatatccgtatccctgcaaacggcaatgttgcgaagggggacaggattccggatacggcattggctagcaagggaatcaaacataaaaatcgtaaagatcaactggaaaaaaataaaaaatctggtgaggattttgagatggaaatttatcagaagaaagttaaacaaggctttaaaccgcaaagacagattacagttaaaacaaaaagtggtgtaaaaactaggcttgatattatttcgaaagaaggtggtcttgatgtttgtacagagtgtaaggcttcaataactgcgccacttactaaaaatcagaaaaaagcttttcctgaaattgaaagaacgggagcaacagtggtcggtaagggaaaaccgggctatccaaaggggaccaaaattgaacctactaaagttataattgaaaggaaaagataa

SEQ ID NO: 64416 - DNA, 1770 bp, Neisseria meningitidis
atgaccgtacagaccaagacaaaaggtttggcgtggcaagaaaaaccgctatccgacaacgaacgtctgaaaaccgaaagcaattttttacgcggcacgattttggacgatttgaaagacccgctcacgggcggcttcaaaggcgacaacttccaactcatccgcttccacggtatgtatgagcaggacgaccgcgacatccgcgccgaacgcgccgaggcaaaactcgagcccttgaaatttatgcttttgcgctgccggctgccgggcgggatcatcaaaccgtcccaatggatagaactggacaaatttgcccgggaaaacagtcattaccgctccatccggctgaccaaccggcaaaccttccaatttcacggcgtgccgaaagccaagttgcagacgatgcaccgcctcttgcacaaactgggtttggattccatcgccacggcggcggatatgaaccgcaacgtgctttgcacgtccaacccgatcgagtccgaactgcaccggcaggcttacgaatacgcgaaaaagatttccgaacacttgctgccgcgcacgcgcggttatctggatgtgtgggtggacggcaaaaaagttcaaagttccgacgacttccttcaagaagacgagccgattttgggcaaaacctatctgccgcgcaaattcaaaaccgcagtcgtcatcctgcccttgaacgatgtggactgctacggcaacgacttggattttgtcgccatttcagacggtaacggacagcttgccggattcaatgttttggcgggcggcgggctttcgatggaacacggcaacaccaaaacctatccgaacatttcactggaactgggtttcgtgcctccggaacacgcgctgaaggccgccgaagcggtggtaaccacgcagcgcgacttcggcaaccgcagcgaccgcaaaaacgcccgcacccgctacaccattcaaaatatgggcttggacaacttccgcgcggaagtcgaacgccgtatgggtatgccgttcgaacccatacgcccgttcaaatttaccgggcgcggcgaccgcatcggctgggtgaaaggcatagacggcaactggcatttgacccttttcatcgaaagcgggcgtttggttgacgaaggcgggaaacagcttctgaccggcgtgttggaaatcgccaaaatccacaaaggcgacttccgcatcaccgccaaccaaaacctcatcgtggcaaatgtacccgaaagaggcaaagcccggatcgaacagctcgcccgctcatacgggctgatacacgacggtgtcagcaaactgcgcgaaaatgcgatgtcgtgcgtttccttcccgacctgcccgctggcaatggcggaagccgaacgcgtgctgccggacttcatcggcgagctggataagattatggcgaaacacggcacgtcggacgactacatcgttacccgcattaccggctgcccgaacggctgcggacgggcgatgttggcggaaatcggactggtcggcaaagccgtcggacgctacaacctccatatcggcggcgaccgtgaaggcgtacgcatcccccgtctttacaaagaaaacatcaccctgcccgaaatccttgccgaattggacgacctgatcggcaaatgggcggcagaacgcaatatcggcgaaggtttcggcgatttcgccatacggacgggcatcgtcaaacccgtattaaatgcacccgttgatttttgggacgcatccaaagccgtcgcgattgcccgcgcctga

SEQ ID NO: 64417 - DNA, 657 bp, Neisseria meningitidis; identical to SEQ ID NO: 51734

SEQ ID NO: 64418 - DNA, 1692 bp, Neisseria meningitidis
gtgaacgcctcgcaattaatcagcagcctgacccaaaccgtaggcgaaaaatacatcatcaccgaccccgcgaaaaccgaacaataccgccagggctaccgcttcggcgagggtaaggcgttggcggtggtgcgccccggaagcattctggaaatgtggaaaattctacaggcgtgcgtcgaagcggacgtgattgtgattacgcaggcggcgaataccggtttgacgggcggctcgacccccgacggcaacgattacgaccgcgacatcgtgatagtgaacactatgcggatgaacatcatccaaaccatcaacgacaacgaacaagtcgtctgcctgcccggctcgaccctgaaccagcttgaattgctgctgaaacctttgggacgcgaaccgcattcggtcatcggctcatcctgcatcggcgcgtccgttttaggcggcgtgtgcaacaactccggcggcgcgttggtacagcgcggcccggcctacaccgaaatggcactgttcgcccaaatcaacgaagaaggcaggttggaactggtcaaccacttgggcatagacttgggcgacacgcccgaagaaatcctgaccaacctgcaaggtcatcattatcaaaacaaagacatcaaacaagacgcgggcaaagggcacgaccacgcctattgcgaacacgtccgccaagtggacgaaccgaccgccgcgcgtttcaatgccgaccccgcccgccattacgaagcctcgggctgcgcgggcaaactgatggtttttgccgtccgtttggacaccttcccgcaagaaaaacaaaccgccgtgttctacatcggcacgaacgacatcaacgagctgaccgacatccgccgcgccgccttgggcgaatttgaaagcctgcctgtttccggcgaatacatccaccgccacgctttcgatattgccgacgtgtacggcaaagacacgttttacgtcatcaaaaaattcggtacgcaccaactgccgaaattatttgacttgaaggcgcgcgtggacaggttcggcaaaaaagccagcttcctgcccaaacatttttccgacaaggccatgcagttcgtcagcaaatacctgcccgaccacctgcccaaatccatgcgcgattaccgcgacaaatacgaacaccacctgattctgaaaatgggcgggaaaggcgtggatgaggcgcgcgcgttcttaaaagaatattttgcacaccacggcggcgcgttttttgaatgcaacgccgaagaaacccaagccgcgatgctgcaccgttttgccgtcgcttccgccgccatccgctaccgcgccgtgcatgatgacgaagtggaagatttggtcgcgctcgacatcgccctgcgccgcgacgatcgcgactggtttgaaaaactgccgtcggaaatcgacaataaaatcatccataaactctactatggacatttcatgtgccacgttttccatcaggattacatcatcaaaaaaggcaacgactgcatggcgttggaacacgaaatgctgcatcttttagaccaacgcggcgcgcaatatcccgccgaacacaacgtcggtcatttgtatgaagccaaacccgcgctcaaacagttttaccgcaaacttgacccgaccaacagcttcaacccgggcgtaggcaaaaccagcaaaaagaaaaactgggcggaataa

SEQ ID NO: 64419 - DNA, 510 bp, Neisseria meningitidis; identical to SEQ ID NO: 36289

SEQ ID NO: 64420 - DNA, 1014 bp, Neisseria meningitidis; identical to SEQ ID NO: 43060

SEQ ID NO: 64421 - DNA, 285 bp, Neisseria meningitidis; identical to SEQ ID NO: 42876

SEQ ID NO: 64422 - DNA, 126 bp, Neisseria meningitidis; identical to SEQ ID NO: 51925

SEQ ID NO: 64423 - DNA, 630 bp, Neisseria meningitidis; identical to SEQ ID NO: 51337

SEQ ID NO: 64424 - DNA, 291 bp, Neisseria meningitidis; identical to SEQ ID NO: 42317

SEQ ID NO: 64425 - DNA, 1881 bp, Neisseria meningitidis
atgaatattttttacgaagagtccggccaattcaaaatcgccgccatcatccaaaaaaacgacgctacctaccaagtcgataccccacacggcaaacgcaccaaagtgaaggcgaacaacgtctttgccgagtttgacggcgatatggcggcgtttttggaaaacgcgcaggcgcaggcggcggacatcgacaccgatttattgtgggaagtgtgcggcgaagaggaatttaccgctgaagccatagccgaagaatattacggccatgcgccgaccaaaaccgaactggcggcgaccttgattgcgctgtacgccgcgccggtgtatttctacaaaaaagccaaaggcgtgttcaaagccgcgcccgaagaaactttaaaacaagcacttgccgccatcgaacgcaaaaaacagcaagacgcgcaaatcgatgcttgggcggaagccttgaaacgcggcgagatgccgtctgaaatcgcggcggatttgaaaaccatcctgcacgcgcccgacaagcagtcgctgacctacaaagcctttaccaaagccgccgacgcgctgaaaacctctgcctacgaattggcgaaaaaaacgggcggcattacgtccattccccaatacctgcaagacggatttgaaatcaaatactttcctaaaggcacaggcttccccgaccttgcccttcctgaaatgcccgacctgcctaaagccgacgttaccgccttttccattgacgacgaatcgaccaccgaagtggacgacgctttaagcctgaccgacttgggcaacggtatgaaacgcgtcggcatccacatcgccgcgccgtcacttgccgttaaaccgggcgacaaaatggaaaaaaacatcatggaacgcttgagtacggtttatttccccggcggcaaaatcaccatgctgcccgaaaactggattgccgcgttcagccttgatgcaggcgcataccgccctgccgtcagcatttatttcgatgtggacagcaaattcaacgtcggcgagccgacctgtaaaatcgaagcggtcaacatcgccgaaaacctgcgcattcaaaccatcgagccgcatttcaacgccgaagcgggcttggacgaagcgggcgaaatgatgttcgcccaccatcaagacctgatttggttttatcaattcgccatcaccctgcaaaaagcgcgcggcaaatacgaacccgaccgcgcgccgcaatacgattacagcatcgaattggatgaggaaggcaaagtctccgtcgtccgccgcgaacgcggttcgcccatcgatacgctggtcagcgagatgatgattcttgccaacagcacttgggcacaaatgctccatgacaacgacctgcccggcctcttccgcgtccaacccaccggaaaagtgcgcatgagcaccaaatccgagccgcatatcggcatgggcgtgcagcattacggctggtttacctcgccgctgcgccgcgccgccgactacatcaaccaaaagcagctgatcagcctgatcgacgacactgccgaaccgctgtatcaaaacagcgatgccgaactcttcgccgccctgcgcgactttgatgccgcctataccgcctacgccgacttccaacgccaaatggaagcctactggagcctggtttacctgcaacagcaaggcacgagcgagctgacggcgacgattctgaaagaagacctcgtccgcatcgaaggtctgccgctagtaacacgcgcgaccggtattccgtttgacgcgctgcccaaatcacaggcattgttcaaaatcaccgaattagatgccgagaagcagtttgtctcgctcaactacatcaaggcagtcgcacccgcgggtacaacggcaggcaatgccgtctga

SEQ ID NO: 64426 - DNA, 1224 bp, Neisseria meningitidis; identical to SEQ ID NO: 50114

SEQ ID NO: 64427 - DNA, 645 bp, Neisseria meningitidis; identical to SEQ ID NO: 42084

SEQ ID NO: 64428 - DNA, 276 bp, Neisseria meningitidis
atgaatgagggtgaagttgttttaacaccagaacaaatccaaaccttgcgtggttatgctttccgtggcgatacctatggcggttggcgttatttggctaatttgggtgaccgttatgcggatgatgctgctgcaattgtcggtaaggatgcaaacttaaatggtttgaatttatggatgaaaaaaggtgtggaaaacctatgggatgatacggtcggtaaaaagatccgtttaatgtgtatttctgttttttggattgtggttttcaatttgtag

SEQ ID NO: 64429 - DNA, 114 bp, Neisseria meningitidis; identical to SEQ ID NO: 43789

SEQ ID NO: 64430 - DNA, 1386 bp, Neisseria meningitidis; identical to SEQ ID NO: 38195

SEQ ID NO: 64431 - DNA, 411 bp, Neisseria meningitidis; identical to SEQ ID NO: 37452

SEQ ID NO: 64432 - DNA, 2214 bp, Neisseria meningitidis
atgaccgccatcagcccgattcaagacacgcaaagcgcgactctgcaagaattgcgcgaatggttcgacagctactgcgccgctctgccggacaacgataaaaacctcatcggtaccgcatggttgctggcgcaggaacattaccccgccgatgccgccacgccgtatggcgagccgttgtccgaccacttcctcggcgcggcgcaaatggttcatgaactcgacctgctccccgatgccgtcgccgccaccctgcttgccgacatcggacgctacgtccccgactggaacctattggtttccgaacgctgcaacagtaccgtcgccgagctggtcaaaggtgtggacgaagtgcagaaactcacccacttcgcccgggtggacagcctcgccacgccggaagaacgcgcccagcaggcagaaactatgcggaaaatgctgctggcgatggttaccgacatccgcgtcgtgttaatcaaactggcgatgcgtacgcgcaccctgcaatttttaagcaacgcccccgacagccccgaaaaacgcgccgtcgccaaagaaaccctcgacatcttcgccccgctcgccaaccgtttgggcgtgtggcagctcaaatggcagctcgaagatttgggcttccgccatcaaaagcccgaaaaataccgcgaaatcgcgctgcttttggacgaaaaacgcaccgaacgcctcgaatacatcgaaaacttcctcaacatcctgcgcggtgaactcaagaaatacaatgtccatttcgaagtcgccggccgcccgaaacacatctactccatttacaaaaaaatggtgaagaaaaaactcagcttcgacggcctctttgacatccgcgccgtgcgaattctggttgataccgtccccgagtgttacaccacgctgggtatcgtccacagcctctggcagcccattcccggcgagttcgacgactacatcgccaatcccaaaggcaacggctataaaagtttgcacaccgtcatcgtcggcccggaagacaaaggcgtggaagtacaaatccgcaccttcgatatgcaccaattcaacgaattcggtgtcgccgcccactggcgttacaaagagggcggcaagggcgattccgcctacgaacagaaaatcgcctggttgcgccaactcttggactggcgcgaaaacatggcggaaagcggcaaggaagacctcgccgccgccttcaaaaccgagcttttcaacgacacgatttatgttttgaccccgcacggcaaagtcctctccctgcccacgggcgcgacccccatcgacttcgcctacgccctgcacagcagcatcggcgaccgctgccggggcgcgaaagtcgaagggcaaatcgtgccgctgtccaccccgcttgaaaacggacagcgcgtcgaaatcattaccgccaaagaagggcatccttccgtcaactggctgtacgaaggctgggtcaaatccggcaaggcaatcagtaaaatccgcgcctacatccgccagcaaaacgccgacaccgtgcgcgaagaaggccgcgtccaaatcgacaagcagcttgccaaactcacgcccaagcccaacctgcaagagcttgccgaaaacctcggcttcaaaaaactcgacgacctctacactgccgtcggacaaggcgaaatttccaaccgcgccatccaaaaagcctgcggcacgctgaacgaacctccgcccgtacccgtcagcgaaaccaccatcgtcaaacagtccaaaatcaaaaaaggcggcaaaaacggtgtgctcattgatggcgaagacggtttgatgaccacgcttgccaaatgctgcaaacccgcgccgcccgacgacattgtcggcttcgttacccgcgatcgcggcatttcggtacaccgcaaaacctgcccctctttccgacacctcgccgaacaagcacctgaaaaagtgctggacacaagctgggcggcgttgcaggaaggacaagtgtttgccgtcgatatcgaaatccgcgcccaagaccgctccgggcttttgcgcgacgtatccgacgcgctcgcccgccacaaactcaacgttaccgccgtgcaaacccagtcccgcgacttggaagccagtatgcggttcacgctcgaagtcaaacaagttaccgacctcccacgcgtcctcgccagcctcggcgacgtcaaaggcgtattgagcgttacccggctttaa

SEQ ID NO: 64433 - DNA, 174 bp, Neisseria meningitidis; identical to SEQ ID NO: 42248

SEQ ID NO: 64434 - DNA, 1776 bp, Neisseria meningitidis; identical to SEQ ID NO: 54581

SEQ ID NO: 64435 - DNA, 423 bp, Neisseria meningitidis; identical to SEQ ID NO: 51372

SEQ ID NO: 64436 - DNA, 753 bp, Neisseria meningitidis; identical to SEQ ID NO: 38815

SEQ ID NO: 64437 - DNA, 717 bp, Neisseria meningitidis
gtgttcaataatttccttgcttcgctgccgtttatgacggaaacacgcgccgatatgattgtcagcgcgtttttgcctatggtcaaagccggcttcgcggtctctctgcctttggcggcagcttctttcgttatcggtatgatgattgcggtagccgtggctttggtgcggattatgcccgccggcggcatcgtgcggaaaatcctgctgaaattggtggaattttatatttccgtcattcgcggtacgccgctgttggtgcagcttgtgattgtgttttacgggctgccgtccgtcggtatctatatcgatccgattcccgccgccattatcggcttctcgctcaatgtcggtgcatacgcttccgaaaccatacgcgcggcaattttgtccgtaccgaaaggccaatgggaagcaggtttctccatcggtatgacctatatgcagacgttccgccgcatcgtcgcgccgcaggcattccgcgttgccgtgccgcctttgagcaacgagtttatcggcttgttcaaaaacacctcgctcgcagcggtggtaacggtaactgaattgttccgcgtcgcgcaggaaacggcaaaccgcacttacgactttttgcccgtctatatcgaagccgcattggtttactggtgtttctgcaaggttctgttcctgattcaggcacgtttggaaaaacgtttcgaccgttatgtcgccaaataa

SEQ ID NO: 64438 - DNA, 2007 bp, Neisseria meningitidis
atggctgatatgaagaaaattacccctcaaaacctgcgccccctgctttcggaaagcttgggacataccgattttgtcaacgtcctcaacgcactgattaaatttttgcgccgtggcggcaaaaaatgtgcgggggaacgtttcgacctgattatcgacacattcaaacaagacagggaattgctgtcccgcttcagccggtgtttttacatctggctcgcgcaaatacacatttatccggcactcatcaaactcggcatcttctcgcgccacagctttgcccgggaaatgggcatacgcatctacgaacgcttcagcccgtcatataaagattttgccaacttgggcgaagtcttcctttatcttttccattccgaaaacgacgacaaatggctgcaaacgctcaatatccgccaatggctggttttatacgaactcatccggagccacgccgagccgtccaaattgcagacggcgggcatccgccttgccgatgcgcgtttgcgcgccatcgaaatgctgtctgtctggacggcatccgaagccatcgaacccgacctcatccgcatcgccccgcgcctgctggaagccgattcttccttcgtcgccctccaacgcgaaaccgccaaactggtcgaacactaccgcaacggcaccacgccttacgacaccgcccacctcgaagtgatgttcgaccaatgtttcagccagattgactatttgcgccgcaaagggacgggcgccggctccggttcgtcggtcaaagtcgcccacctgctcgaacggctccggcagaccgtagaccgtctgaagctgctcaccgacatccaaaccggcgccggcaacagcaaccgcctgaccatcgcgctgatgaactccctcatctacgcggcggtcgaacaatacagcacccgccacctgcgccgcagcagcatccgtatgctcgcccgcagcattaccgaaaacaaaagccaccacggcgaacactacattacccgcaaccgcaaagaatatttcaaaatgttctactcggcggcaggcggcggcatcatcatcgccctgatggcgctgctcaaaatccgcatcggcacactcggcctcagccccttcctgacttccttgtcggctgggttcaactacggcatcggctttatgatcatccatatgctgcactgcaccgtcgccaccaaacagcccgcgatgactgccgccagctttgccgaacaggtcgatctcaacgaaggcggcaaagcggtggacaacaaactcgccaagctcctcatcgacgtatgccgttcccaaagtgtcgccgttttcggcaacgtttccatcgccatccttttggcgtgcgccatatcgttcggctatgcccatctgtaccggcagcccatactcgatgcccacaccgccgcctaccagttcaaatccatagacatcatcgcttacccgacgctgtggtatgccgccattgcaggtctgtggctgttctgctccggcatcatcgcaggttttttcgacaaccgcgccgactacctcaacctgcgccaacgcctgcccttcaaccccttgctgcgtaaaatcatgcgccccgggccccgccgcgtcctcgccgcctacatccacaaacactacggctcgttggcaggcaacttcatcttcgggatgctcttgggtatgaccggctatttcggacacctcctcgggctgccgctggacatccgccacgtcgccttttcctccgccaacctcggctatgccgccgtcagcggcaacgtcggtttgggcacgttcgtactcggcattttcagcgtcctcgccatcggcctggtcaacctctgcgtcagcttcagcctcgccctcttcgtcgccctgcgctcgcgcggcacgaaaatcggcagcatccgcaatctgattaagagtttttggaatcagattaaaagcaatccctgcatacttttcctcccgcccgccaaagaacagggacatcctccttcggacaagccttga

SEQ ID NO: 64439 - DNA, 672 bp, Neisseria meningitidis
atgactttttccgcgattctgttctatatccttgccgccatcgttttgtacggtgcggttcgtaccgttaccgctaaaaaccctgttcacgccgctttgcatctggtgctgaccttctgcgtgagcgcgatgctttggatgctgatgcaggctgagtttttgggcgtgacgctggtggtggtttatgtcggcgccgtgatggtgttgttcctgttcgttgtgatgatgttgaacatcgacattgaagaaatgcgcgccggtttctggcgtcatgcgccggttgccggtgtggtcggcacattgttggcagttgccctgattctgattctggtcaacccgaaaaccgaccttgccgcatttggtctgatgaaagacattcctgccgattacaacaatatccgcgatttgggcagccgtatttataccgactacctgttgccgtttgaattggcggcggtattgctgctgttgggtatggtggcctcgattgcattggttcaccgtaaaaccaccaatccgaaacgtatggatcctgccgaccaagttaaagtacgcgccgatcaaggccgtatgcgtctggtgaaaatggaagcggtcaaaccgcaagttgaatctgccgaagaaagcgaagtttcagacggcctcaagccggaaggggagggcaaagcatga

SEQ ID NO: 64440 - DNA, 339 bp, Neisseria meningitidis; identical to SEQ ID NO: 42934

SEQ ID NO: 64441 - DNA, 582 bp, Neisseria meningitidis; identical to SEQ ID NO: 51313

SEQ ID NO: 64442 - DNA, 1281 bp, Neisseria meningitidis; identical to SEQ ID NO: 50822

SEQ ID NO: 64443 - DNA, 1809 bp, Neisseria meningitidis
atgcgtaccaactattgcggtctgatcagtgagcaatacttagaccaaaccgttaccgtcaaaggctgggtacaccgtcggcgcgaccacggcggtgtgatttttatcgacctgcgcgaccgcgaaggcatcgtccaagtcgtgattgatcccgacacgcccgaagcgtttgccgctgccgattccgctcgcaacgaatacgttttgagcattaccggccgcgtacgcaaccgtcccgaaggtacgaccaacgacaaaatgatttccggcaaaatcgaaatccttgccaaagaaatcgaagtcttgaacgccgccgccacgccgccgttccaaatcgacgatgaaaacatcagcgaaaacgttcgcctgaccaaccgcgttatcgacttgcgccgtccggtgatgcaacgcaacctgcgcctgcgttatcaagtcgctatgggcgttcgccgttatctggacgcgcaaggcttcatcgacatcgaaacgccgatgctgacccgctccactccggaaggcgcgcgcgactacctcgtgccgagccgcgttcatccgggcgagtttttcgcgctgccgcaatcaccgcaattatttaagcaactgttgatggtggccggtttcgaccgttactatcaaattaccaaatgtttccgtgacgaagacttgcgtgccgaccgtcagcctgaattcactcaaatcgacttggaaacctcgttcttgaacgaggatgaaattatggacatcaccgaaggtatggcgaaacaagtcttcaaagatgctttaaacgtagatttaggcgacttcccgcgtatgccttacgccgaagccatgttctactacggctctgacaaaccggatatgcgtatcaacttgaaatttaccgagttgaccgacctgatgaaaacggaagaattcaaagtcttccgtggcgcggcagatatgaaaggcggccgtgtagtcgccctgcgcgtaccgaacggcgcaaaattcagccgcaaagaaatcgacgaatacactaaatttgtcggcatctacggcgcgaaaggtctggcatacatcaaagtaaacgatgtgggcaacctctcaaacggcgaagacagcggcctgcaatctccaatcgtaaaattcctgtctgagaatgccctgaaagaaatcatcgagcgtaccggcgcacaaaacggcgatattattttcttcggtgcggacaaaaccaaagttgtgaacgaagccatcggcgcattgcgtatcaaagtcggcttggaacacggcaaagacaacggctacttcacagacgaatggaaacctttgtgggttgtcgatttcccaatgttcgaatacgacgaagaagccgaccgctacgttgccgtacaccatccgtttactgcgccaaaagaaggtcatgaagacctgatggtttccgacccggcaaattgtttggcacgcgcctacgacatggtattgaacggctgggaaatcggcggcggctctatccgtatccaccgtgcagacgtacaagagaaagtgtttgccgcgctgaaaatcagccctgaagagcaacaagagaaattcggcttcctcttggacaacctgaaattcggcgcacctccgcacggcggccttgcattcggcctcgaccgtttggttaccctgatgaccggcgccgaatctatccgcgacgtgattgccttcccgaaaacacaacgtgcccaatgcctgctgaccaacgcgcccaacagcgtggacgacaagcagttgcgcgaattgagcttgcgcctgcgtcaaaaggtggctgaaaccaaagaagcataa

SEQ ID NO: 64444 - DNA, 741 bp, Neisseria meningitidis
atgctgattgtccgaccgtcgggcagggcgaaggacgatgtggaaacctgccgtcgtgccggatggcaggcggaagtgttgagcccgattgaaatcgaagcagatgctgccggactggaacttttgtccgaacaatatgcccgtgcggatgccgtgttttgggtcagtccgaccgccgttgaaaccgccgtcccgtaccttaacctttcagacggcataaaggcgcagattgccgtagggcagggcagccgccgcgcattggaacgctgtttggtcagaacggtcatcgcgcctgatgacggcaacgacagcgaggcggttttgcgcctgccggtttggaacagtctgcccgaaggtgcgcgcgtattgtttgtgcgcggacacggcgggcgggattttttgatgaatgccttgcaggagaaaggttttcggacggaggtggcagaagtctatttcagacggcataaacctttgaactttcaaaatttccaaaccgaaaatattgccgccgcctatattacgtcgaccgagctggtgcgcttgctgttcgggcagcttccgccgcaattttcccgattcttcaaatccttgctatactttacccatcatccgcgcattgcggaggcattgaagcgcgaaggcgtgtgttcggtcgaaaccgtccctacgctggaagccgcgctttcccattcttccatttccgtttcagacggcatggtctttcccggaacctcaaattaa

SEQ ID NO: 64445 - DNA, 2853 bp, Neisseria meningitidis
atgaaactgtccgaactgttcaaccccgacgaatttgccgcgcggcatttgagtttcggcgacgaagcggcgttgcttgccgctgtcggcgagaaaagtatggacgattttgtcggcaacaccgtgccgcaaagcatccgtatgccgtctgaactcgatttgcccgatgccctgaccgaagcggacgcgttggcaaaattgaaaggcattgcgtcgaaaaacgtgatcaacaagtcctatatcggtttaggctattacccgacccgcgtgccgaatgtgattttgcgcaacgtattggaaaatccgggctggtataccgcctacacgccgtatcaggcggaaattgcccagggtcgtttggaagctttgttgaacttccaacaagtgtgtatcgatttgaccggtttccctgtggcgggcgcgtctttgctggacgaagcgaccgccgccgccgaagcgatggcgatggcgcaccgcgtgggcaaggtaaaatccgagcgtttctttgtggacgagcgcgtgtatccgcaaactttggacgtgatgaaaacccgtgccaagtatttcggcttcgagctggtggtcggcgattttgccaaagcggatgaaggcgaatacttcggcgcgctgttccaatacgtcggcaaagacggcgatgtgcaagacttgcaggacgttatcggccgtctgaaagccaaaggcacaatcgtggccgttgccgccgacattatgagcttggttttgctgaagtctccggctgaattgggcgcggatattgctttgggcaacacccaacgcttcggcgtaccgatgggcttcggcggtccgcatgctgcttatttcgcgtttaaagacgagttcaaacgttccgccccgggccgtatcatcggcgtatccaaagacgcatcgggcaaacctgccttgcgcatggcgttgtccacccgcgagcaacacatccgccgcgaaaaagcgacatccaatatttgtaccgcgcaggcattgctggcgaacttggcgggtatgtacgccgtttaccacggccctgaaggtgtgaaacgcatcgccaaccgcattcacgcgctggcttctgcctttgccgatgcgctggtttcagacggcctgaatgtggttcataaggtcttcttcgataccgttaccgtcgatttcggcaacaaagagaaagcagaccaagtgtttgccgctgctttggaatcgggctataacctgcgccgcgttaacgatactcaagttgcggctgcattccacgaaacatcggcatgcgaagatttggttgatttgtaccgcgcgtttaccggcaaggatacgttcgcatttgccgatgatgtcaaaggccgtctgaacgccgaactgctgcgtcaagacgacattctgcaacatcctgtgttcaacagttaccacaccgaacacgaaatgctgcgctacctgaaaaaactcgaagaccgcgacttggcgatgaaccgcagtatgatttcattgggcagctgcaccatgaaactcaatgcgactgcggaaatgctgccgattacttgggcggagttctccgacatccacccttacgctcccgaagcgcaaaccgccggctaccgcgaattgcttgccgacatggaaaacagcctgaaagccatcaccggctttgacgcgatttccttccagcccaactccggcgcgcagggcgaatacagcggtatgctctccatccgccgctatcaggaagccaacggcgagggacaccgcaacatctgcctgattcccaaatccgcccacggcaccaaccccgccaccgccgccatgctcggtttgaaagtcgtcgtcgtcgataccgacgaacacggcaacgtcaacatcgacgatttgaaagccaaagccgaacaacaccgcgacgccttgtccgccatcatgattacctacccgtccacccacggcgtatacgaagaaggcatccgcgacatctgccgcatcatccatgaaaacggcggacaggtttacatggacggcgccaacctcaacgctcaaatcggtatcatgcagcctgccgaagtcggcgcggacgtgttgcacatgaacctgcacaaaaccttctgtatccctcacggcggcggcggcccgggcatgggtccgattggcttgaaagcccacctcgccccgttcgcaccaggacacgctttgaccgacacccacagcacaagtgccgagcaaaccgccgtggctgccgcagcatatggttctgcatccatcctgccgattacttggatgtacctgaccatgatgggcaaacaaggcatggaacaggcgacacgctgggcattgctcaacgccaactacgtcgccaaacggctgggcgaagactatccgattctgtacacaggcaaaaacggccgcgtcgcgcacgaatgtatcgttgatttgcgtccgctcaaagccgaaagtggcattaccgaaaccgacatcgccaaacgcctgatggactacggcttccacgcgccgacggtttccttccccgttgccggtacgctgatgatcgagccgaccgagagcgaaagcaaagccgaactcgaccgcttcatcgccgccctgaaacaaatcaaacaggaagtgctgaaagtcgggcgcggcgaatggccgaaagacgacaacccactggtcaacgcgccgcacaccgccgcagatataaccggcgactgggcgcgcccgtattcccgcgaagaagccgtcttcccgctgcccttcgtgcgcgaacacaagttttggcccttcgtcaaccgcgtggacgacgtgtacggcgaccgcaatctcgtgtgcagctgcccaccgatggaaaattatgaagactga

SEQ ID NO: 64446 - DNA, 738 bp, Neisseria meningitidis; identical to SEQ ID NO: 59405

SEQ ID NO: 64447 - DNA, 423 bp, Neisseria meningitidis; identical to SEQ ID NO: 42328

SEQ ID NO: 64448 - DNA, 447 bp, Neisseria meningitidis; identical to SEQ ID NO: 50949

SEQ ID NO: 64449 - DNA, 1083 bp, Neisseria meningitidis
atgtttttatggctcgcacatttcagcaactggttaaccggtctgaatatttttcaatacaccacattccgcgccgtcatggcggcgttgaccgccttagcgttttccctgatgttcggcccgtggacgatacacaggctgaccgcgctcaaatgcgggcaggcagtgcgtaccgacggcccgcaaacccacctcgtcaaaaacggcacgccgacgatgggcggttcgctgattctgaccgccattaccgtgtccaccctgttgtggggcaactgggcgaacccgtatatctggattctcttgggcgtactgcttgccaccggtgcgctcggtttttacgacgactggcgcaaagtcgtctataaagaccccaacggcgtgtccgccaaattcaaaatggtgtggcagtcaagcgttgccattatcgccggtttggcattgttttaccttgccgccaattccgccaacaatattttgattgtcccgttcttcaaacaaatcgccctgccgctgggcgtggtcggctttttggtgttgtcttacctgaccatcgtcggcacatccaatgccgtcaacctcaccgacggcttggacggccttgcgaccttccccgtcgtcctcgttgccgccggcctcgccatcttcgcctatgccagcggccactcacaatttgcccaatacctgcaattaccttacgttgccggcgcaaacgaagtggtgattttctgtaccgccatgtgcggcgcgtgcctcggtttcttgtggtttaacgcctatcccgcgcaagtctttatgggcgatgtcggtgcattggcattgggtgccgcgctcggtaccgtcgccgtcatcgtccgccaagagtttgtcctcgtcattatgggcggattatttgtcgtagaagccgtatccgttatgcttcaagtcggctggtacaagaaaaccaaaaaacgcatcttcctgatggcgcccatccatcaccactacgaacaaaaaggctggaaagaaacccaagtcgtcgtccgcttttggattattaccatcgtcttggtgttgatcggtttgagtaccctcaaaatccgctga

SEQ ID NO: 64450 - DNA, 360 bp, Neisseria meningitidis; identical to SEQ ID NO: 40630

SEQ ID NO: 64451 - DNA, 354 bp, Neisseria meningitidis
gtgaacagacaaaccgcttacctccttacctctttcagcctgatcgcactgataatcctgtccctttcctgggaactgtggattgcaccgttacgcccgggcggctcgtggctcgcgctcaaagccctccccctctgtctgccgctttcaggcatcttgaaaaagaaaatctatacctaccaatacagctccatgctggttctgatttactttgccgaagccgtcatgcgcctgttcgacgcctatccggcagaacaaatttgcgccgcgctttccgcagtattcagcatcatcttcttcatatcctgcctgtcgttcgtcaaacaatacaaggaaacaaacaatgcccgctga

SEQ ID NO: 64452 - DNA, 1557 bp, Neisseria meningitidis
atgacattagcagagttttggccgctgtgcctccgccgtcttcacgatatgttgcctcaagggcagtttgcgcaatggattgcgccccttaccgttggtgaggagggtggcgtatgggtggtgtacggcaagaaccagtttgcctgcaatatgctcaagagccagtttgccggaaaaatagaagcggtgagggaagagttggctgccggccgttccgccttcgtattcaaaccgggagaaggcgtgcgttatgagatggcggcggttgaaggtgctgtcgaacctgccgagccgtccttgcatgcggtgtcggagggaatgcccgtgcaggaggttctgttggacgagctgccgtctgaagagcctgtcaaacccgctgcgtcgaaaacggcggcggatattttggcggaacgtatgaaaaacctgccgcacgagccgcgtcaggctgccgggtctgcttcccggccggaatcggtggcagttgccaaagcacggacggacgtgcagcgcgatgcggaagaggcgcgttacgagcagaccaacctgtctccggattacacgtttgatacgttggtagaaggtaagggcaaccgccttgcggcggctgcggcgcaggcgattgcggaaagcccggggcagagttacaacccgttcttcctctatggcagtacgggtttgggcaaaacccaccttgtgcaggcggtcggcaacgagctgctgaaaaaccgtcccgatgccaaagtgcgctatatgcattcggatgactatatccgcagctttatgaaggcggttcgcaacaacacttacgacgtgttcaagcagcaatacaagcaatacgacctgctgattatcgacgacatccagttcatcaaaggcaaagaccgtacgatggaagagtttttctatctgtacaaccatttccacaacgagaaaaaacagctcatcctcacttgcgatgtgttgcctgcgaaaatcgaaggcatggacgaccgcctcaaatcccgtttttcatggggactgactttggaactcgagccgcccgaattggaaatgcgcatcgccattttgcagaaaaaggcggaagcggcgggcatcagtatcgaagacgaagccgcgctgttcattgccaatctgatccgttccaacgtgcgcgagcttgaaggcgcgtttaatcgtgtcggagcgagcagccgctttatgaaccgtcccgtcatcgacatcgatttggcgcgtaccgctttgcaggacattattgccgagaagcacaaagtcatcaccgccgacatcatcatcgatgcggtggcgaaatattaccgcatcaaaatcagcgatgtgctcggtaagaaacggacacgaaacattgcccgtccgcgccaggtggcgatgagcctgaccaaagaactgaccactttgagcctgccgtctatcggcgattcgtttggtgggcgcgaccatacgaccgttatgcacggcatcagggcagtggcgaaactgcgcgaagaagatccggaattggctcaggattatgaaaagctgctgattctgattcaaaactga

SEQ ID NO: 64453 - DNA, 435 bp, Neisseria meningitidis; identical to SEQ ID NO: 50524

SEQ ID NO: 64454 - DNA, 885 bp, Neisseria meningitidis; identical to SEQ ID NO: 50330

SEQ ID NO: 64455 - DNA, 423 bp, Neisseria meningitidis; identical to SEQ ID NO: 51488

SEQ ID NO: 64456 - DNA, 138 bp, Neisseria meningitidis; identical to SEQ ID NO: 39930

SEQ ID NO: 64457 - DNA, 165 bp, Neisseria meningitidis
atgggacaggttgcgttttacgaaaagatgattgggctgtggtcggccaaaagccgtgaggcaagcgaacaggcggacttggctgcgtttgaatttgcggagggcgaactggccaattatcgggaaatgctgaaacggcacttgcaaaccaaaagtgtggaatag

SEQ ID NO: 64458 - DNA, 714 bp, Neisseria meningitidis; identical to SEQ ID NO: 42984

SEQ ID NO: 64459 - DNA, 387 bp, Neisseria meningitidis
gtgagaaagattctgcttgatacccatgcgttgctgtggtggttgttggatgacaagaaactggggatatctgcacgcaaactgatagaaaatccgagaaatgcgatctttgtcagtgcagcaagtatttgggaaatttccatcaagcagaacaaggggttgttgaaattaccggaagagttttttgatgtgcttcaagaagaggattttgaaatgctgcctataggtctgtttcatgcaaaacaggctggaagccttccggaaatacacaaagaccctttcgataggatgttgattgcacaaacccaagcggaaggctttgaactgatgactgtcgatgaatatattccgcaatatggaattagagttgtcaatgcatcaagctga

SEQ ID NO: 64460 - DNA, 228 bp, Neisseria meningitidis
atggacataaaattcaatactttgggggttatcctgaatgggggcaatcctgaagaaaaattcataaaaattattgatgatcaggaaaataccgggggatttctgatactgttatcttcaaatgacaaattctcatcatttgacagttacgatgactgggtcgaaaacttagaaatattaaaagaatacctgcaagaatctcattggataataaagtgggtcggatag

SEQ ID NO: 64461 - DNA, 1131 bp, Neisseria meningitidis
atgaccaaacatctgcccctggccgtcctgactgctttgctgcttgcagcgtgcggcggttcggacaaaccgcctgccgaaaaaccggcaccggcggaaaaccaaaacgtattgaaaatttacaactggtcggaatatgtcgatccggaaaccgttgccgattttgaaaagaaaaacggcatcaaggttacttatgatgtgtacgacagcgatgaaacgctggaaagcaaggtgctgacaggcaagtccggttacgacattgtcgcgccgtccaatgcgtttgtgggcaggcagattaaggcaggtgcgtatcagaaaatcgataagtcgctgattcccaattataaacacctcaaccccgaaatgatgaggctgatggacggggtcgatcccggccacgaatacgccgtgccgttttattgggggacaaataccttcgccatcaataccgaacgcgtgaaaaaggctttgggtacggacaagctgccggacaaccagtgggatttggtgttcgaccccgaatacacgtccaaactcaagcaatgcggcatcagctatttggacagcgcggcggaaatctatcctatggtgttgaactatttgggtaaaaacccgaacagcagcaatacggaagacatcagggaggcaaccgccctactcaagaaaaaccgccccaatatcaaacgctttacttcgtccggctttatcgatgatttggcgcgcggcgatacctgcgtaacaatcggtttcggcggcgatttgaacatcgccaaacgccgtgccgaagaagcgggcggcaaggaaaaaatccgcgtgatgatgcccaaagagggcgtggggatttgggtggattctttcgtgattccgaaagatgcgaaaaacgtcgccaacgcgcacaaatacatcaacgacttcctcgacccggaagtgtcggcgaaaaacggcaatttcgttacttatgcgccttcgagcaagccggcgcgtgagctgatggaagacgaatttaaaaacgacaatacgattttcccaaccgaggaggatttgaaaaacagctttatcatggtgcctatccagccggcggcattgaagtttatggtgcgccagtggcaggatgtgaaggcggggaaataa

SEQ ID NO: 64462 - DNA, 600 bp, Neisseria meningitidis; identical to SEQ ID NO: 38193

SEQ ID NO: 64463 - DNA, 1923 bp, Neisseria meningitidis
atgattgaaatcaaaaacctcaccctgcaacgcggtttgaaagtcctgctcgacaaagccaacgctaccgtcaatcccggtcagcgcgtcggtttgatcggcaaaaacggaacgggcaaatcgagcctgtttgccttaatcaagggtaaaatcactcaggacggcggcgatgtctcgattccgaaaaactggcggctcgcttccgtttcccaagaaacgcccgatttggatatttccgctttggattacgttttgcagggcgatgccgagttgcaggcttttcagacggcattgaggcaggcggaagcgcaaaatgacggcatgaagcaggcggaatatcatgccaaattggaagaaatcgacgcttataccgcgccggcccgcgcggcaaaattgttgaacgggctgggtttttcgcaagaagaacacagccgccccgtcaaatccttttccggcggctggcgtatgcgcttgaatcttgcgcaagccctgatttgccgcgccgatttgctcttgcttgacgaaccgaccaaccacttggatttagaaaccgtcttgtggctggaaaaccaccttgcctctttaccctgcacgcaaatcatcatttcccacgaccgcgattttctcaacgcggcaactacccaaaccattgaattatcgcagcaaaaactcacgcaatacggcggcaattacgatttttaccaaaacgaacgcgcgcagcgtctcgcgcaacaacaagctgcctatgtcaaacagcaggcgcaaatcaaacatctgcaatcctttatcgaccgcttcaaagccaaagccaccaaagccgttcaagcgcaaagccgcatgaaggctttggcaaagctagaacgcgttgcgcccgcgcatctggacagcgagttttcctttgagttttaccatcccgaccatctgcccaatcctttgttaaagctagaacacgctgatttgggttacgaaggcaaaaccgttctgcatgacattaccctgtcgctggaaagcggcgcacgctacgggctattgggtgtcaacggcagcggtaaatctacctttatcaaagccttggcgggcaaaatcgatttgctttccggcagcatcgtccgttccgaaaaactcaatatcggctattttgcccaacaccaactcgacaccatccgcgccgaccaaaaccctgtttggcatattcagcagctttctcccaaagtacgcgaacaagaaatccgaaatttcctcggcggcttcaattttgttggcgatatggcgttacagaaaaccgaacctttttccggcggagaaaaagcccgccttgcccttgccatgattatctggcaaaagccgaacctgttgctgcttgacgaaccaaccaaccatctggacttggatatgcgccacgccctgacgctcgctctgcaaagtttccaaggcgccttaatcatcgtatcgcacgaccgcagcctgcttgaagcgactaccgacagcttcctcctgatcgacaaaggccgtctgaagaacttcgacggcgatttgaacgattaccgccaatggcgtttggcacaggaaaacgccgccgccgcacccgcagcatccgcacaaagccaaagccgcaaagacaccaagcgcatcgaagcgcaaatccgtcaggaaaaagcccgacgcgacaagccgatacagcagaaaatagaccgtgccgaaaaagaaatggcgcagctttccgaaattcagacggcatgtgaagcatttttagcacaagaagacgcttaccttgaagcaaacaaagaaaaattgcaaaataccttatcccagctggcaaaagtcaaaacacaacttgcccaaatcgaagaggtttggctggcttgtcaagaagaattggaacggattgaaactgaaatcgagaaacagtttgccgagcgataa

SEQ ID NO: 64464 - DNA, 717 bp, Neisseria meningitidis; identical to SEQ ID NO: 51288

SEQ ID NO: 64465 - DNA, 918 bp, Neisseria meningitidis; identical to SEQ ID NO: 42983

SEQ ID NO: 64466 - DNA, 771 bp, Neisseria meningitidis; identical to SEQ ID NO: 51398

SEQ ID NO: 64467 - DNA, 744 bp, Neisseria meningitidis
atgttaagcgcgcgctacctccacctgcacgaagccttgggtttgggcccgatgtggttgaagcggggagccgtcgtcctgccgtccgcaacattgccggaaagcccgacacaaatccgcccgcaaaagcaaaccgtcctcagcattccgcagcgtccgtccgaacagcataccggtcaggcacggctcaaaaccatgaaagtgttggaaacaaccgccgtacatacgcgcaaacccgcgcctgaaaccgaaacgcctctgtccggcgtttcagacggcatcgcccccgttcccgccgcttcgggcataaccaaacttgccgttgtcagcctgtgtccgccgaccgaggatatggtttacgggcaactgttccacggaaaagcgggtgtcctgctcgacaatatactcaaagccgtagggctcgatgccgcctatgtccacaaaacctgttgggtgaaaaccgccgccgtcggcaacccgatgccgtctgaagcggcaatcgcaaatgcgctggaacaaaccgcccgcgaactcgacggctgccgcgcacccgccgtcctgttcctcggacaggcgtttgtcaaaccggaacggcaggcgatgattgaaactttgtgcgccggccgccccttcttcatcatcgaccatcccgcccggctgttgcgccaacccgaactcaaagcccgcgcctggcagacgctcaagcagctcaaacgtgtcttggcgcaaggcggcggcagttga

SEQ ID NO: 64468 - DNA, 714 bp, Neisseria meningitidis; identical to SEQ ID NO: 54498

SEQ ID NO: 64469 - DNA, 507 bp, Neisseria meningitidis
atgcccctgttagacagtttcaaagtcgatcacacccgtatgcatgcccccgccgtacgcgtggcgaaaaccatggccacgcccaaaggcgacaccattaccgtgttcgacctgcgcttttgcgttcccaacaaagaaatcctgcccgaaaaaggcatacacacgctggagcatttgttcgcaggttttatgcgcgaccacttgaacggcaacggcgtggaaatcatcgacatttccccgatgggctgccgcaccggtttctacatgagccttatcggcacgccttccgaacagcaggtcgccgatgcgtggctggcttcgatgcaggatgtgggcaatgtcaaagaccaaagcaaaatccccgagttgaacgaataccaatgcggcacttatcaaatgcactcgctcgccgaagcgcagcaaatcgcgcaaaacgtgttggcgcgcaaagtggcggtgaacaaaaacgaagagctgacgctggatgaagggctgctgaacgcctaa

SEQ ID NO: 64470 - DNA, 1116 bp, Neisseria meningitidis; identical to SEQ ID NO: 51133

SEQ ID NO: 64471 - DNA, 579 bp, Neisseria meningitidis; identical to SEQ ID NO: 36436

SEQ ID NO: 64472 - DNA, 285 bp, Neisseria meningitidis; identical to SEQ ID NO: 37122

SEQ ID NO: 64473 - DNA, 231 bp, Neisseria meningitidis
atgaacatcgttaaaaaatacgctgtaaaagcagccttggcagccggtatcttcacaccggccattgttatggcagatacctttgatgcatccgcgattggtacgcaagtagcgaatgtaatcatgggttttgtggcaatggtttccgccgtgggtatggcggccattacggtcatcttggcaatccaaggcttcaagatggcttggagcatgatcaaatctgtcaaataa

SEQ ID NO: 64474 - DNA, 318 bp, Neisseria meningitidis; identical to SEQ ID NO: 54811

SEQ ID NO: 64475 - DNA, 756 bp, Neisseria meningitidis; identical to SEQ ID NO: 51882

SEQ ID NO: 64476 - DNA, 306 bp, Neisseria meningitidis; identical to SEQ ID NO: 42487

SEQ ID NO: 64477 - DNA, 762 bp, Neisseria meningitidis; identical to SEQ ID NO: 41676

SEQ ID NO: 64478 - DNA, 336 bp, Neisseria meningitidis; identical to SEQ ID NO: 38968

SEQ ID NO: 64479 - DNA, 2364 bp, Neisseria meningitidis
atgaaaccattacaaatgctccctatcgccgcgctggtcggcagtattttcggcaatccggtcttggcagcagatgaagctgcaactgaaaccacacccgttaaggcagagataaaagcagtgcgcgttaaaggtcagcgcaatgcgcctgcggctgtggaacgcgtcaaccttaaccgtatcaaacaagaaatgatacgcgacaataaagacttggtgcgctattccaccgatgtcggcttgagcgacagcggccgccatcaaaaaggctttgctgttcgcggcgtggaaggcaaccgtgtcggcgtgagcatagacggtgtaaacctgcctgattctgaagaaaactcgctgtacgcccgttatggcaacttcaacagctcgcgtttgtctatcgaccccgaactcgtgcgcaacatcgaaatcgtgaagggcgcagactctttcaataccggcagtggtgcattgggcggcggtgtgaattaccaaacgctgcaaggccgtgatttgctgttggacgacaggcaattcggcgtgatgatgaaaaacggttacagcacgcgtaaccgtgaatggacaaatactctcggtttcggtgtgagtaacgaccgcgtggatgctgctttgctgtattcgcaacgtcgcggtcatgaaaccgaaagtgcgggaaaccgaggctatgctgtggaaggggaaggcagtggcgcgaatatccgtggttcggcacgcggtatccctgattcgtccaaacacaaataccacagctttttgggtaagattgcttaccaaattaacgataaccaccgcatcggcgcatcgcttaacggccagcagggacataattacacggttgaagagtcttataacctgaccgcttcttcctagcgcgaagccgatgacgtaaacagacggcgcaatgccaacctcttttacgaatggatgcctgattcaaattggttgtcgtctttgaaggcggacttcgattatcagaaaaccaaagtggcggcggttaacaacaaaggctcgttcccgatggattattccacctggacgcgcaactataatcagaaggatttggacgaaatatacaaccgcagcatggacacccgattcaaacgttttactttgcgtttggacagccatccgttgcaactcgggggggggcgacaccgcctgtcgtttaaaactttcgtcagccgccgtgattttgaaaacctaaaccgcgacgattattacttcagcggccgtgttgttcgaaccaccagcagtatccagcatccggtgaaaaccaccaactacggtttctcactgtctgaccaaattcaatggaacgacgtgttcagtagccgcgcaggtatccgttacgaccacaccaaaatgacgcctcaggaattgaatgccgagtgtcatgcttgtgacaaaacaccacctgcagccaacacttataaaggctggagcggttttgtcggcttggcggcgcaactgaatcaggcttggcgtgtcggttacgacattacttccggctaccgtgtccccaatgcgtccgaagtgtatttcacttacaaccacggttcgggtaattggctgcccaatcccaacctgaaagccgagcgcagcaccacccacaccctgtctctgcaaggccgcagcgaaaaaggtactttggatgccaacctgtatcaaagcaattaccgcaatttcctgtctgaagagcagaagctgaccaccagcggcgatgtcagctgtactcagatgaattactactacggtatgtgtagcaatccttattccgaaaaactggattggcagatgaaaaatatcgacaaggccagaatccgcggtatcgagctgacaggccgtctgaatgtggacaaagtagcgtcttttgttcctgagggctggaaactgttcggctcgctgggttatgcgaaaagcaaactgtcgggcgacaacagcctgctgtccacacagccgctgaaagtgattgccggtatcgactatgaaagtccgagcgaaaaatggggcgtgttctcccgcctgacctatctgggcgcgaaaaaggtcaaagacgcgcaatatactgagtatgagggctaccgatttatcaaaaaagtcaaagattatccgtggttgaataagtcggcttatgtgttcgatatgtacggcttctacaaaccggtgaaaaacctgaccctgcgtgcgggcgtgtacaacctgttcaaccgcaaatacaccacttgggattccctgcgcggtttgtatagctacagcaccaccaatgcggtcgaccgcgatggcaaaggcttagaccgctaccgcgccccaggccgcaattacgccgtatcgctggaatggaagttttaa

SEQ ID NO: 64480 - DNA, 1623 bp, Neisseria meningitidis; identical to SEQ ID NO: 43332

SEQ ID NO: 64481 - DNA, 975 bp, Neisseria meningitidis
atgccgtctgaaaaaaatatcggttttatggcaggaagcagccgtccgttgtgggtcgcttttgcactgttgctggtttcctgcgttctgtttatgacgctcaacgtcaaaggcgattgggactttgttttgcacctgcgcctgaccaagcttgccgcgctactgatggtcgcctatgcggtcggcgtttccacccagctttttcaaacgctgaccaacaatccgattctgaccccttcgattttgggtttcgattcgctgtatgtgtttttgcagaccttgctggtgtttacgttcggcggcgtgggctatgcttccctgccgttgacgggcaaattcggctttgaactggtcgttatgatgggcggctcgctgctgctgttttacacgctcatcaaacagggcgggcgcgatttgccgcgtatgattttaatcggcgtgattttcgggattttgttccgcagcctgtcgtcgctgctttcgcgcatgatcgatcccgaagaatttaccgccgcgcaggcgaatatgtttgccggattcaataccgtccacagcgagcttttgggcataggcgcgctgattctgctcgtcagcgcggcggtcgtttggcgtgaacgctaccgcttggacgtacaccttttggggcgcgaccaagccgtcaacttgggcatcaactacacgcgcaacaccttatggatactgctttggattgccgcgctggtggcgacggcgaccgccgttgtcggcccggtaagctttttcgggcttctcgccgcctcgcttgccaaccatttttccccgtcggtcaaacattccgtccgcctgccgatgacggtttgtgtcggcggcatcctcttggtcggcggacagaccgtattcgaacacttcttgggcatgaaggcggtattaagcgtggtggtcgaatttgcgggcggactcgttttcctctatctcgttttaaaacacaaaaaatga

SEQ ID NO: 64482 - DNA, 5928 bp, Neisseria meningitidis
atgaataaaggtttacatcgcattatctttagtaaaaagcacagcaccatggttgcagtagccgaaactgccaacagccagggcaaaggtaaacaggcaggcagttcggtttctgtttcactgaaaacttcaggcgacctttgcggcaaactcaaaaccacccttaaaaccttggtctgctctttggtttccctgagtatggtattgcctgcccatgcccaaattaccaccgacaaatcagcacctaaaaaccagcaggtcgttatccttaaaaccaacactggtgcccccttggtgaatatccaaactccgaatggacgcggattgagccacaaccgctatacgcagtttgatgttgacaacaaaggggcagtgttaaacaacgaccgtaacaataatccgtttctggtcaaaggcagtgcgcaattgattttgaacgaggtacgcggtacggctagcaaactcaacggcatcgttaccgtaggcggtcaaaaggccgacgtgattattgccaaccccaacggcattaccgttaatggcggcggctttaaaaacgtcggccgcggtatcttaaccaccggtacgcctcaaatcggcaaagacggtgccttgacgggatttgacgtgcgccaaggcacattgaccgtcggtacgtcaggttggaacgacaaaggcggagccgattacaccgaagtgcttgcccgtgcggttgctttgcaggggaaattgcagggtaaaaacctggcggtttcgaccggcgcacagaaagtagattacgccagcggtgaaatcagcgcaggaacggcagcaggtacgaaaccgaccgttgccctcgatactgccgcattgggtggtatgtacgcagacagcattaccctgattgccaatgaaaaaggcgtaggcgtcaaaaatgccggcacactcgaagcggccaagcaattgattgtgacttcgtcaggccgcattgaaaacagcggccgcatcgccaccactgccgacggcaccgaagcttcaccgacttatctctccatcgaaaccaccgaaaaaggagcggcaggcacatttatctccaatggtggtcggatcgagagcaaaggcttattggttattgagacgggagaagatatcagcttgcgtaacggagccgtggtgcagaataacggcagtcgcccagctaccacggtattaaatgctggtcataatttggtgattgagagcaaaactaatgtgaacaatgccaaaggcccggctactctgtcggccgacggccgtaccgtcatcaaggaggccagtattcagactggcactaccgtatacagttccagcaaaggcaacgccgaattaggcaataacacacgcattaccggggcagatgttaccgtattatccaacggcaccatcagcagttccgccgtaatagatgccaaagacaccgcacacatcgaagcaggcaaaccgctttctttggaagcttcaacagttacctccgatatccgcttaaacggaggcagtatcaagggcggcaagcagcttgctttactggcagacgataacattactgccaaaactaccaatctgaatactcccggcaatctgtatgttcatacaggtaaagatctgaatttgaatgttgataaagatttgtctgccgccagcatccatttgaaatcggataacgctgcccatattaccggcaccagtaaaaccctcactgcctcaaaagacatgggtgtggaggcaggctcgctgaatgttaccaataccaatctgcgtaccaactcgggtaatctgcacattcaggcagccaaaggcaatattcagcttcgcaataccaagctgaacgcagccaaggctctcgaaaccaccgcattgcagggcaatatcgtttcagacggccttcatgctgtttctgcagacggtcatgtatccttattggccaacggtaatgccgactttaccggtcacaataccctgacagccaaggccgatgtcaatgcaggatcggttggtaaaggccgtctgaaagcagacaataccaatatcacttcatcttcaggagatattacgttggttgccggcaacggtattcagcttggtgacggaaaacaacgcaattcaatcaacggaaaacacatcagcatcaaaaacaacggtggtaatgccgacttaaaaaaccttaacgtccatgccaaaagcggggcattgaacattcattccgaccgggcattgagcatagaaaataccaagctggagtctacccataatacgcatcttaatgcacaacacgagcgggtaacgctcaaccaagtagatgcctacgcacaccgtcatctaagcattaccggcagccagatttggcaaaacgacaaactgccttctgccaacaagctggtggctaacggtgtattggcactcaatgcgcgctattcccaaattgccgacaacaccacgctgagagcgggtgcaatcaaccttactgccggtaccgccctagtcaagcgcggcaacatcaattggagtaccgtttcgaccaaaactttggaagataatgccgaattaaaaccattggccggacggctgaatattgaagcaggtagcggcacattaaccatcgaacctgccaaccgcatcagtgcgcataccgacctgagcatcaaaacaggcggaaaattgctgttgtctgcaaaaggaggaaatgcaggtgcgcctagtgctcaagtttcctcattggaagcaaaaggcaatatccgtctggttacaggagaaacagatttaagaggttctaaaattacagcaggtaaaaacttggttgtcgccaccaccaaaggcaagttgaatatcgaagccgtaaacaactcattcagcaattattttccaacccaaaaggcagccgaactcaaccaaaaatccaaagaattggaacagcagattgcgcagttgaaaaaaagctcgcctaagagcaagctgattccaaccttgcaagaagaacgcgaccgtctcgctttctatattcaagccatcaacaaggaagttaaaggtaaaaaacccaaaggcaaagaatatctgcaagccaagctttctgcacaaaatattgacttgatttccgcacaaggcatcgaaatcagcggttccgatattaccgcttccaaaaaactgaaccttcacgccgcaggcgtattgccaaaggcagcagattcagaggcggctgctattctgattgacggcataaccgaccaatatgaaattggcaagcccacctacaagagtcactacgacaaagctgctctgaacaagccttcacgtttgaccggacgtacgggggtaagtattcatgcagctgcggcactcgatgatgcacgtattattatcggtgcatccgaaatcaaagctccctcaggcagcatagacatcaaagcccatagtgatattgtactggaggctggacaaaacgatgcctataccttcttaaaaaccaaaggtaaaagcggcaaaatcatcagaaaaaccaagtttaccagcacccgcgaccacctgattatgccagcccccgtcgagctgaccgccaacggtatcacgcttcaggcaggcggcaacatcgaagctaataccacccgcttcaatgcccctgcaggtaaagttaccctggttgcgggtgaagagctgcaactgctggcagaagaaggcatccacaagcacgagttggatgtccaaaaaagccgccgctttatcggcatcaaggtaggtaagagcaattacagtaaaaacgaactgaacgaaaccaaattgcctgtccgcgtcgtcgcccaaactgcagccacccgttcaggctgggataccgtgctcgaaggtaccgaattcaaaaccacgctggccggtgccgacattcaggcaggtgtaggcgaaaaagcccgtgtcgatgcgaaaattatcctcaaaggcattgtgaaccgtatccagtcggaagaaaaattagaaaccaactcaaccgtatggcagaaacaggccggacgcggcagcactatcgaaacgctaaaactgcccagcttcgaaagccctactccgcccaaattgtccgcacccggcggttacattgtcgatattcccaaaggcaatctgaaaaccgaaatcgaaaagctggccaaacagcccgaatacgcctacctgaaacagcttcagacggccaagaacgtcgattggaaacaggtgcagctggcctacgacaaatgggactataaacaggaaggcttgaccggagccggtgcagcgattgtggtgattattgtaaccgctctaacttatggatacggagcggctgcagcgggtagcgtaactgccgcaggaagtagtacagccgcagctgcaacaacgacagcggcagcaactaccactgtttctactgcagctgccatgcaaaccgcagctttagcctccttgtatagccaagcagctgtagccatcatcaataataaaggcgatgtaggcaaagcattaaaagatctcggcaccagtgatacggtcaagcagattgttacttccgcactgacggcgggtgcattaaaccagatgggcgcagatattgcccaattgaacagcaaggtaagaaccgaactgttcagcagtacgggcaatcaaaccattgccaaccttggaggcagattggccaccaacctcagcaatgcaggtatctcagctggtatcaataccgccgttaacggcggcagcttgaaagacaacttaggcaatgccgcattgggagcattggttaatagcttccaaggggaagccgccagcaaaatcaaaacaaccttcagcgacgattatgttgccaaacagttcgcccacgctttggcgggttgtgttagcggactggtacagggaaaatgtaaagatggggcaattggcgcagcagttggggaaatcgtagctgaatccatacttggcggcagaaaccctgctacactcagcgatgcagaaaagcataaagttatcagttactcgaagattattgcgggcagcgtggcggcactcaacggcggcgatgtgaatactgcggcgaatgcggctgaggtagctgtggtgaataatgctttgaattttgacagtacccctaccaatgcgaaaaagcatcaaccgcagaagcccgacaaaaccgcactggaaaaaatcatccaaagtattatgcctgcacatgcggcaggtgcgatgactaatccgcaggataaggatgctgccatttggataagcaatatccgtaatggcatcacaggcccgattgtgattaccagctatggggtttatgctgcaggttggacagctccgctgatcggtacagcgggtaaattagctatcagcacctgcatggctaatccttctggttgtactgtcatggtcactcaggctgccgaagcgggcgcgggaatcgccacgggtgcggtaacggtaggcaacgcttgggaagcgcctgtgggggcgttgtcgaaagcgaaggcggccaagcaggctataccaacccagacagttaaagaacttgatggcttactacaagaatcaaaaaatataggtgctgtaaatacacgaattaatatagcgaatagtactactcgatatacaccaatgagacaaacgggacaaccggtatctgctggctttgagcatgttcttgaggggcacttccataggcctattgcgaataaccgttcagtttttaccatctccccaaatgaattgaaggttatacttcaaagtaataaagtagtttcttctcccgtatcgatgactcctgatggccaatatatgcggactgtcgatgtaggaaaagttattggtactacttctattaaagaaggtggacaacccacaactacaattaaagtatttacagataagtcaggaaatttgattactacatacccagtaaaaggaaactaa

SEQ ID NO: 64483 - DNA, 225 bp, Neisseria meningitidis
atgatgaaaaacaaatatattttaacaaaagcagcaatcggcataaccgccatatctatattttatcttctaaatcaagaaagcagcggcaaaactgaagaaccatcatatttcttgatgtttatgtttctcaacttgctttggtttgaagaaaataaaacagttatggctgccgttacggcaataattgccgcccactttatatttgtcgcactatccgattaa

SEQ ID NO: 64484 - DNA, 1008 bp, Neisseria meningitidis
atgagcaccttcttccggcaaaccgcccaagccatgattgccaaacacatcgaccgtttcccgctattgaagttggaccaggtgattgattggcagccgatcgaacaatacctgaatcgtcaaaaaacccgttaccttagagatcaccgcggccgtcccgcctatcccctgttgtccatgttcaaagccgtcctgctcggacaatggcacagcctctccgatcccgaactcgaacacagcctcattacccgcatcgatttcaacctgttttgtcgttttgacgaactgagcatccccgattacagcaccttatgccgctaccgcaactggctggcgcaagacgacaccctgtccgaactgttggaactgattaactgccaactgaccgaaaaaggcttaaaagtagagaaagcatccgccgccgtcattgacgccaccattattcagaccgctggcagcaaacagcgtcaggccatagaagttgacgaagaaggacaaatcagcggccaaaccacaccgagtaaggacagcgatgcccgttggatcaagaaaaacggcctctacaaactcggttacaaacaacatacccgtaccgatgcggaaggctatatcgagaaactgcacattacccccgccaatgcccatgagtgcaaacacctgtcgcctttgctggaagggatagccgaaggtacgaccgtctatgccgacaaaggctacgacagtgcggaaaaccggcaacatctggaagaacatcagttgcaggacggcattatgcgcaaagcctgccgcaaccgtccgctgacggaagcgcaaaccaaacgcaaccgatatttgtcgaagacccgttatgtggtcgaacagagcttcggtacgatgcaccgtaaattccgctatgcgcgggcagcctatttcgggctgagcaaagtgagtgcacaaagccatctgaaggcgatgtgtttgaaccttttgaaagcggccaacaggctaagtgcgcccgctgccgcctaa

SEQ ID NO: 64485 - DNA, 384 bp, Neisseria meningitidis
ttggtcgaaggtcaaaaatcagccgtcaccgagtattacctgaatcacggcgaatggcccgccaacaacagttctgccggcgtggcatccgtctccaccgacatcaaaggcaaatatgttcaaagcgttacagtcgcaaacggcgtcattaccgcccaaatggcttcaagcggcgtaaacaaagaaatccaaggcaaaaaactctccctgtgggccaagcgtcaagacggttcggtaaaatggttctgcggacagccggttacgcgcaccgcccccaccaccaccaacgacgacgtcaaagccgacaccgccgccaacggcaagcagatcgacaccaagcacctgccgtcaacagcatcgacaagaaaatcgacaccaaactag

SEQ ID NO: 64486 - DNA, 972 bp, Neisseria meningitidis
atgctcgagaatctgccctatttccagcgacatctgcctgaagaccttgccaaagtcaatgaagtcatcaaccgtgcggtgcaatccgatgtcgcactgatttcgcaaatcggtacatatatcatcagcgcgggcggcaaacgcctgcgtccgattatgacgattttggcgggtaaggcggtcggttatgatgacgagaaactgtatgcgctggcggcgatggtcgagtttatccacacttccaccctcctgcacgacgatgtcgtcgatgaaagcgatttgcgccgtgggcgggcaacggcaaacaatctgttcggcaatgcggcggctgtgttggttggcgactttttatacacgcgcgcctttcaactgatggttgcctcgggcagtatgcgcgttttggaagtgatggcggatgcaaccaacattattgccgagggcgaagtcatgcagctgatgaacatcggcaatacggacattaccgaagaacaatatatccaagtcatccaatataaaacggcaaaattgtttgaagctgccgctcaagtcggcgcaattttgggcaaggcttcccccgaacacgaacaggcgttgaaagactacggtatgtatgtcggtacggcattccaaattattgacgatgtgctggactattctggcgaaaccgaagaaaccggcaaaaacgtcggcgacgatttggcggaaggaaaaccgactttgcctttgatttatctgatgcgtcagggttccgaacaggttgcgaacgatgtgcgtactgctttggaaaatgcagatcgcagctattttgagaaaatccacgattatgtcgtccgttcggatgctttggcatattcgataggcgaggcgcgcaaagcagtcgattgtgccgttaccgccttggatgccctgcccgacagcgaagtgaaggatgccatgattcagctggcgaaggaatctttggtcagggtgtct

SEQ ID NO: 64487 - DNA, 747 bp, Neisseria meningitidis; identical to SEQ ID NO: 44728

SEQ ID NO: 64488 - DNA, 465 bp, Neisseria meningitidis; identical to SEQ ID NO: 58455

SEQ ID NO: 64489 - DNA, 690 bp, Neisseria meningitidis
atgaagcgcaaaaatatcgcgctgattcccgccgccggcatcggggcgcgtttcggtgcggacaaacctaagcagtatgtcgaaatcggaagcaaaaccgttttagaacatacgattgggatttttgaacggcatgagggcgtcgatttgaccgtcgttgtcgtctcgcccgaagacacgtttgccgataaggttcagacggcatttccacaggttcgggtgtggaaaaacggcggacagacccgcgccgaaaccgtccgaaacggtgtggcaaaactgttggaaatcggcttggcatcggcggatgacaatattctggtacacgatgccgcgcgctgctgcctgccgtctgaagctctgacgcgtttgatagaacaggcgggcaacgccgccgaaggcgggattttggcaattcccgttgccgatacgctcaagcgcgcggacggtgggaacattagtgcaaccgtcgagcggacgagcctttggcaggcacaaacgccgcagcttttccgcgccgggctgctgcaccgcgcattggctgcggaaaacttggacggcattaccgatgaagcgtccgccgtggaaaaattgggcatccgccctttgctggtgcagggcgacgcgcgcaatttgaaactgacgcagccgcaggacgcatacatcgtcaggctgctgctcgatgccgtctga

SEQ ID NO: 64490 - DNA, 1302 bp, Neisseria meningitidis
atgccgtctgaacatcaacacacatcatcattgcttgatttcgaccgtacccatctgctccatccctatacttccatgaccgatccgcttcccgtttatcctgtcaaacgtgcagaaggggtgtttatcgaattggcggacggcacgcggctgattgacgggatgtcgtcttggtggtgtgcgatacacggttacaatcatcccgttttgaatcaggcggttgagacgcagatgaaacagatgtcgcatgtgatgttcggcggtttgacgcatgagccggcggtggagctgggcaaattgttggtcgggattttgccgcaggggctggatcgtattttttatgcggattcgggttcggtttcggtggaagtcgcgttgaagatggcggtgcaataccagcaggcgcggggtttgcgtgcaaaacaaaatatggcgacggtgcggcgcgggtatcacggcgatacttggaacgcgatgtccgtctgcgatccggaaacggggatgcaccatattttcggcagcgcgttgccgcagcgttattttgtcgataacctgacaagccgtttcgacgatgaatgggacgaggcggatttgcagcctgtccgcgccttgtttgaagcgcatcatacggacattgccgcctttattttggaaccggtcgtgcagggcgcgggcggtatgtatttttatcatccgcagtatcttcgcggattgcgcgatttgtgcgacgagtttgatatcgttttgatttttgatgaaatcgccaccggattcgggcgcacgggcaagatgtttgcctgcgaacacgcggaggtcgtgccggatattatgtgcatcggcaagggtttgagcggcggctatatgacgctggcggcagcaatcacttcgcaaaaagttaccgaaacgatttcgcgcggcgaagcgggcgtgttcatgcacggcccgacatttatggcgaacccgctggcgtgtgccgttgcctgcgcttcggtcaaactgcttttgtcccaagattggcaggcaaatatccgccgcatcgaaagcatcttaaaatgccgtctgaaaaccgcgtgggacattcgtggtgtgaaagacgtgcgcgttttgggcgccatcggcgtgatcgagttggaaaaaggcgtggatatggcgcgttttcaagcggattgcgtggcgcagggcatttgggtgcgcccgttcggcaggttggtgtatctgatgccgccttacatcatttcagacggcgttttgaccaaacttgccgacaaaaccgtgcaaatcttgaaggaacacagcaaatga

SEQ ID NO: 64491 - DNA, 633 bp, Neisseria meningitidis; identical to SEQ ID NO: 59251

SEQ ID NO: 64492 - DNA, 357 bp, Neisseria meningitidis
atgaatgaacacaacctgttaattttctgtttaaaagacaatgtttcaattagtgaatatactgaaatgattgattgggcttataaaaacattcaatctgaaacagttgtagaaattacggaaaatcaaattattgaatatcaaaatcgtggattatggagacttgtttctgaaattaccgataattggttatttggaccaagtgagggggattggctaatagataaggaaagtattttggctgtaaaagaaaaattacaaaattcagatttttctacagagcccttagtgaaaaatattattcatgtacttgaatatgctataaaaaatgaaaaaacaataatttttcatttttga

SEQ ID NO: 64493 - DNA, 768 bp, Neisseria meningitidis; identical to SEQ ID NO: 51522

SEQ ID NO: 64494 - DNA, 822 bp, Neisseria meningitidis
atgatgaaaggtatggataaattgagataccaacaggattttttaaatatccgccccatttttacagccggcgaacaagaatacctgaccgaattgtccgatcggcttcctttatctgttttaacggactccgtgcgtaatattgaagaaatcggtatcgattttgtgtacagttctgccaaattggaaggaaacacttataatcaatacgatacgcaggcattgcttaaactcgggcaaaccgcaggcgggaagttatattcggatgccgtaatgttaatcaacctgagggaaagttaccggcacctgctgtccggtttggacagccccgagccgtttgactggttggatttcttaaaaaccacccacagcctgatttccgaaaacttactggaaaaaggctccggcggcgtagtccgccgcgacagcgttaccataagcgggacagactacacccctttatctaacccgcaaagtttggatacggaattaaaatggttgcttcaagaagctcccaaaatagaaaatcctttcgaccgcgccgtttatctccataataatttggcgtatcttcaatattttaaagattgcaataaacgtactgccagaaactgcatgaccttgtcgctgatgcgctccggtttttttccttgcgtattctcccccgacagttatcccgcctatgccgaggctgtcgtagcctattacgaaaccggcgattacggtttattcaagaaatattttatttcggcatacgaaaataccgtaaataagtacggcccacagcctgatatggatattttccgcaacttctccctttaa

SEQ ID NO: 64495 - DNA, 495 bp, Neisseria meningitidis; identical to SEQ ID NO: 39710

SEQ ID NO: 64496 - DNA, 423 bp, Neisseria meningitidis; identical to SEQ ID NO: 50913

SEQ ID NO: 64497 - DNA, 567 bp, Neisseria meningitidis; identical to SEQ ID NO: 43403

SEQ ID NO: 64498 - DNA, 426 bp, Neisseria meningitidis
atggcgattgaacgtaccatctccatcatcaaacccgatgccgtcggcaaaaacgttatcggcaaaatatacagccgctttgaggagaacggtctgaaaatcgttgccgccaaaatgaagcagcttaccctcaaagaggcgcaagaattttatgcggttcataaagaccgccccttctacgccggattggttgaatttatgaccggcggtccggttatgattcaggtattagagggtgaaaacgccgtcctgaaaaaccgcgaactgatgggtgcaactaatccttccgaagccgccgaaggcacgatacgcgcggactttgccacttcggtcagcattaatgccgtacacggttccgacagcgtggaaaatgccgctttggaaattgcctactttttcagccaaaccgaaatctgcccccgttga

SEQ ID NO: 64499 - DNA, 492 bp, Neisseria meningitidis; identical to SEQ ID NO: 50230

SEQ ID NO: 64500 - DNA, 606 bp, Neisseria meningitidis; identical to SEQ ID NO: 51371

SEQ ID NO: 64501 - DNA, 249 bp, Neisseria meningitidis; identical to SEQ ID NO: 41549

SEQ ID NO: 64502 - DNA, 750 bp, Neisseria meningitidis
atgcttatccaggcagttaccattttccccgaaatgttcgacagcattacccgctacggcgtaacgggacgcgcgaacagacagggaatctggcagtttgaagcagtcaatccccgaaagtttgccgacaacagattgggctacatcgacgaccgcccgttcggcggcggcccgggaatgattatgatggctccgccgcttcatgcagcaatagaacacgccaaagcacaatcctcccaagctgcaaaagtcatctacctcagcccccaagggaaaccgctgacacaccaaaaagcggtagaactggcagaacttccgcatctgattctgctgtgcggacggtatgagggcatagacgaaaggcttctgcaaagcagcgtcgatgaagaaatcagcatcggagacttcgttgtttccggcggagagcttcccgccatgatgctgatggatgcggtattgaggctcgtacccggcgtattgggcgatatgcagtctgccgaacaagattcgttctcaagcggcattttggactgcccccactacaccaaacccttagaatttcaaggcatggctgttccggaagtattacgttccggcaatcatggcttgatagcggaatggcggttggaacaatcgctgcgccgcaccttggagcgcagacccgatcttttggaaaagcgcgttttaatcccaaaggaatcccgcctcttagaaaccatccggcaagagcaacgggaaatccaatcataa

SEQ ID NO: 64503 - DNA, 1065 bp, Neisseria meningitidis; identical to SEQ ID NO: 50385

SEQ ID NO: 64504 - DNA, 1131 bp, Neisseria meningitidis
atgattaaaatcagcacccgcttcgatgccggctcggtcgtcgtcaaagacctgaccgatccttccaacatccgcctcgccctgcgtcccgacaacgcctccgattttgcacaatggttctacttccggctgcaaggcgcggcatatcaaaactgcatcatgcattttgaaaacgcggcagaagccgcctacccgaaaggctgggaaggctatcaggcgtgtgcctcatacgaccgccgcaactggttccgcgtaccgacttcctacgaaaacggcgtactgaccgtcaatcatacgccgctgtccaacagcgtgtattacgcctatttcgaaccttactccgaagaacagcatttaaacctcctcggcgacgcgcaaggcagcggcctgtgccgcatcgacgacttgggcagcaccgtgcaagggcgcgacatcaatctgctgaccatcggcaatcaggtcgaaagcgatctgaaaatctggattaccgcccgccagcatccgggcgaaaccatggcggaatggtttgtcgaggggctgctcggcaggctgctcgatccgcaagacccgacagcgcgcaccctgctcgaccgcgccacgttctatatcgtccccaatatgaaccccgacggttcggcactgggcaaccttcgtaccaacgccgccggtgcgaacctcaaccgcgaatgggaaaatccgactttggaaaaaagccccgaagtgttcttcgtgcgtgaaagaatgctggaaaccggcgtggatttgttcttggacatccacggcgacgaagggctgccctttatctttgttgcaggaactgaaggcgtgccaaactacaatccgcgcatttccgcgttggaaacacagttcaaaaccgcccttttgaacgccagccccgatttccaagacgaatacggttacgaaaaagatgcgcccggtcaggcaaacatgaccttggcaacaaactgggtcggcaaccgtttcaactgccttgcctatacgttggaaatgccgttcaaagacaatgccaacctgcccgacgacgatttcggatggaacggtcaacggtcgttgcgcttgggcgaagccgcgttgtccgccatcctcaacatcatcggcgatttgcgctga

SEQ ID NO: 64505 - DNA, 1458 bp, Neisseria meningitidis
atgaaaccaaccatcgcgcttgtcggccgccccaacgtcggcaaatctactttattcaaccgtttgacgcgcaccaaagacgcgctcgtacacgacctgcccggtctgacgcgcgaccgccattacggacacggcaaagtcggcagcaaaccttatttggtcatcgataccggaggtttcgagccggttgtggacagcggcattttgcacgaaatggcaaaacaaaccttgcaggctgtcgatgaagccgatgccgtcgtatttttggtggacggccgcaccggtctgaccccgcaagacaaaatcattgccgaccgtttgcgccaaagcccgcgccctgtttatctggcggtaaacaaaggcgaaggcggcaacagggccgtgcttgccgccgagttctacgaacttgctttgggcgacccttatgttatttccggtgcgcacggcgacggcgtgtattacctgattgaagaaattttagaaaacttccccgagccggaagtcgaagaagccgatgcaaaacatcccgtttttgccgtcatcggtcgtccgaacgtcggcaaatccacgctggtaaacgccattctcggcgaagagcgcgtgattgccttcgatatggccggcacgacgcgcgacagtatccatatcgatttcgagcgcgaaggcaaaccgttcaccatcatcgataccgcaggtgtgcgccgtcgcggcaaagtcgatgaagcggtggaaaagttctccgttatcaaagcgatgcaggcggttgaagcggcaaacgtcgctgttttggtattggacgcgcagcaggacatcgccgaccaagatgcgacgattgcaggtttcgctttggaggcaggccgtgctttggtggtggcggtcaataaatgggacggcatcagcgaagaacgtcgcgagcaagtgaaacgcgatatcaaccgcaaactgtatttccttgattttgctaaattccactttatttccgcattgaaagaacgcggcatagacggattgttcgacagcattcaggctgcctacaacgcggcgatgattaagatgccaacaccgaaaatcacgcgcgtcctgcaaagcgcgatcgagcgtcagcaaccgccgcgtgccggcttggtgcgtccgaaaatgcgctatgcccaccaaggcggcatgaatccgccggtgattgtggtacacggcaattcgctgcacgcaatttccgacagctatacgcgctacctgacccaaacattccgcaaagccttcaatctgcaaggcacgccgctcagaattcaatacaatgtttcagaaaacccctatgaaaatgcggaagacaaaccgaagaaaaaaccgctgcgccgtgtcagcctgagcaaccgtattgagaaacgcgaagaccgcaaagaagagaaaaaccgcttcaagaagaaaaccaaagtcagtgtgaaaaaacaattcagcaaataa

SEQ ID NO: 64506 - DNA, 564 bp, Neisseria meningitidis
atgaaaatactcgctttattaattgccgctacctgtgctttatctgcgtgtggcagccaatctgaagaacaaccggtatctgcacaaccccaagagcaggcacaatccgaattaaaaaccatgccggtaagctataccgactatcaatcagcagccaataaagggctgaatgaccaaaaaaccggtctgacccttcctgaacatgttgtccctatcgacaatgcggaaggaaagaatctgctgcatgacttttcagacggcctcacaatcttaaccgttgataccgataaagccgacaaaattactgctgtccgagtagtctggaatacagatgcaatgcctcaaaaagcggaaaaactgtccaaagctgccgcagccttgattgcggcaaccgctccggaagaccgcacaatgctgcgtgataccggcgaccaaatcgaaatggcgattgacagccataatgcgcaaaaagagccaacccgagaatgggcgcgtggtgggattgcttataaagtcactgttaccaatttaccgagcgtggttttgacggcaaaagctgagtaa

SEQ ID NO: 64507 - DNA, 213 bp, Neisseria meningitidis; identical to SEQ ID NO: 51240

SEQ ID NO: 64508 - DNA, 129 bp, Neisseria meningitidis; identical to SEQ ID NO: 42393

SEQ ID NO: 64509 - DNA, 291 bp, Neisseria meningitidis; identical to SEQ ID NO: 55030

SEQ ID NO: 64510 - DNA, 1041 bp, Neisseria meningitidis; identical to SEQ ID NO: 51903

SEQ ID NO: 64511 - DNA, 186 bp, Neisseria meningitidis; identical to SEQ ID NO: 42933

SEQ ID NO: 64512 - DNA, 471 bp, Neisseria meningitidis; identical to SEQ ID NO: 58964

SEQ ID NO: 64513 - DNA, 1806 bp, Neisseria meningitidis
atgcgctacaaaccccttctgcttgccctgatgctcgttttttccacgcccgccgttgcggcccacgacgcggcacacaaccgttccgccgaagtgaaaaaacagacgaagaacaaaaaagaacagcccgaagcggcggaaggcaaaaaagaaaaaggcaaaaatggcgcagtgaaagataaaaaaacaggcggcaaagaggcggcaaaagagggcaaagagtccaaaaaaaccgccaaaaaccgcaaagaagcagagaaggaggcgacatccaggcagtctgcgcgcaaaggacgcgaaggggataagaaatcgaaggcggaacacaaaaaggcacatggcaagcccgtgtccggatccaaagaaaaaaacgcaaaaacacagcctgaaaacaaacaaggcaaaaaagaggcaaaaggacagggcaatccgcgcaagggcggcaaggcggaaaaagacactgtttctgcaaataaaaaagtccgttccgacaagaacggcaaagcagtgaaacaggacaaaaaatacagggaagagaaaaatgccaaaaccgattccgacgaattgaaagccgccgttgccgctgccaccaatgatgtcgaaaacaaaaaagccctgctcaaacaaagcgaaggaatgctgcttcatgtcagcaattccctcaaacagcttcaggaagagcgtatccgccaagaacgtatccgccaagagcgtatccgtcaggcgcgcggcaaccttgcttccgtcaaccgcaaacagcgcgaggcttgggacaagttccaaaaactcaataccgagctgaaccgtttgaaaacggaagtcgccgctacgaaagcgcagatttcccgtttcgtatcggggaactataaaaacagccagccgaatgcggttgccctgttcctgaaaaacgccgaaccgggtcagaaaaaccgctttttgcgttatacgcgttatgtaaacgcctccaatcgggaagttgtcaaggatttggaaaaacagcagaaggctttggcggtacaagagcagaaaatcaacaatgagcttgcccgtttgaagaaaattcaggcaaacgtgcaatccctgctgaaaaaacagggtgtaaccgatgcggcggaacagacggaaagccgcagacagaatgccaaaatcgccaaagatgcccgaaaactgctggaacagaaagggaacgagcagcagctgaacaagctcttgagcaatttggagaagaaaaaggccgaacaccgcattcaggatgcggaagcaaaaagaaaattggctgaagccagactggcggcagccgaaaaagccagaaaagaagcggcgcagcagaaggctgaagcacgacgtgcggaaatgtccaacctgaccgccgaagacaggaacatccaagcgccttcggttatgggtatcggcagtgccgacggtttcagccgcatgcaaggacgtttgaaaaaaccggttgacggtgtgccgaccggacttttcgggcagaaccggagcggcggcgatgtttggaaaggcgtgttctattccactgcaccggcaacggttgaaagcattgcgtcgggaacggtaagctatgcggacgagttggacggctacggcaaagtggtcgtggtcgatcacggcgagaactacatcagcatctatgccggtttgagcgaaatttccgtcggcaagggttatatggtcgcggcaggaagcaaaatcggctcgagcgggtcgctgccggacggggaagaggggctttacctgcaaatacgttatcaaggtcaggtattgaacccttcgagctggatacgttga

SEQ ID NO: 64514 - DNA, 939 bp, Neisseria meningitidis
atgagacgtaaaatgctaaacgtaccaaaaggcagttatgatggtatgaagggttttaccattattgaatttttggttgcgggcatgctcagtatgattgtcctgatggcggtcggatcgagttactttacgtcccggaaattaaatgatgcggcaaacgagcgtcttgccgcgcaacaggatttgcggaatgcggcaacattgattgtccgcgatgcgagaatggcgggcggcttcggttgtttcaatatgtccgagcattctgcaactgatgttattcccgatacgacgcaacaaaattctcctttttccttaaaaaggaacggtatagataaacttattcccatagcggaatcttcaaatatcggatatccggattttacccagcgccttaacgcattgattttccaatacggaatcgatgatgttaatgcaagcgccgatactaccgtcgtcagcagctgtgccaaaatagcaaaaccgggtaagaaaatatctaccttgcaagaagcaaagagtgcattacagattactaatgatgataaacaaaatggaaatatcacccgtcaaaggcatgtggtcaatgcctatgcggtcggcaggattgccggtgaggaaggtttgttccgcttccaattgaatgataatgggcagtggggtaatcctcagttgttggttaaaaagattaataaaatggatatacggtatatttatgtttccaactgtcctgaagatgacgatgccggcaaagaggaaacattcaaatatacggataaattcaacagcgcccaaaatgctgttacgcccgccggggtggaggttttattgagtagcggtactgataccaagattgccgcttcttcagacaatcatatttatgcttaccgtatcgatgcgacaatacgcgggggaaatgtatgcgcaaacagaacactttga

SEQ ID NO: 64515 - DNA, 2889 bp, Neisseria meningitidis
atgagtaacacaaccgtagaacaatttgccgccgagctgaaacgccccgtcgaagacctgttgaaacagttgaaagaagccggcgtcagcaaaaacagcggcggcgattccctgacgctggacgacaaacagcttctgaacgcctacctgaccaagaaaaacggcagcaacggcggtaccatcagcatccgccgcaccaaaaccgaagtcagcaccgttgacggcgtaaaagtcgaaacacgcaaacgcggacgcactgtcaacattccttctgccgaagaattggcagcacaggtaaaagccgcccaaacccaagccgcacctgtccggccggagcagacggcagaagacgcggcaaaagcccgagccgaagctgccgcacgtgcagaagcccgtgccaaggcagaagcggaagcggcaaaactgaaagcggcaaaagcaggcaacaaagccaaacctgccgcgcagaaacccaccgaagcaaaagccgaaaccgcacccgttgcggcggaaaccaaacccgccgaagaaagcaaagcggaaaaagcccaagccgacaaaatgccgtctaaaaaacccgccgagcccaaagaaaaagccgccaagccgaaacacgagcgaaacggcaaaggcaaagatgccaaaaaaccggcgaaacctgccgcacctgccgtgccgcaacccgtggtcagcgcggaagaacaggcgcaacgcgatgaagaagcacgccgtgccgccgcacttcgcgcccaccaggaagccctgttgaaagagaaacaggaacgccaggcacgccgcgaagccatgaaacaacaggcagaacaacaggcaaaagccgcacaggaagccaaaaccggcagacagcgtcccgccaaacctgccgagaaaccgcaggcagccgcgccggccgtcgaaaacaaacctgtcaatccggcaaaagcgaaaaaagaagaccgccgcaaccgcgatgacgaaggtcaaggccgcaacgccaaaggcaaaggcggaaaaggcggacgcgaccgcaacaatgcacgcaatggcgacgacgagcgcgtacgcggcggtaaaaaaggcaaaaaactcaaactcgagccgaaccaacacgccttccaagcaccgaccgaacctgtcgtgcacgaagttttggtgcctgaaaccattaccgttgccgacttggcacacaaaatggcagtcaaaggcgtggaagtggtcaaagccctgatgaagatgggcatgatggttaccatcaaccaatccatcgaccaagacaccgccctgattgtcgtcgaagaactcggacacatcggcaaacccgccgccgccgacgatcccgaagccttcttggacgagggcgcggaagcggtggaagccgaagcattgccgcgtccgcccgtcgttaccgtcatgggccacgtcgaccacggcaaaacctcgctgctggactacatccgccgtaccaaagtggtacagggcgaagcaggcggcattacccaacacatcggtgcataccacgttgaaaccccacgcggcgtgattaccttcttggatactccgggtcacgaagcgtttactgccatgcgtgcgcgcggtgcgaaagcaaccgatatcgtgattcttgtggtcgccgccgacgacggtgtgatgccgcaaaccatcgaagcgattgcccacgccaaagcggcaggcgttccgattgtggttgccgtcaataaaatcgataaagacactgccaaccccgaacgcatccgtcaggaactgacccaacacgaagttatccccgacgattggggcggcacggttcaattcatcgacgtttctgcgaaaaaaggaacaaacatcgacgcgctgctcgaagccgtattgctcgaagccgaagtattggaactgaccgcacctgtcgatgcgcccgccaaaggcatcatcgtcgaggcgcgcttggacaaagggcgcggcgcggttgccacattgctggttcaaagcggtacgctgaaaaaaggcgatatgctgctggccggtaccgcgttcggcaaaatccgcgcgatggtcgatgaaaacggcaaagccatcaatgaagccggcccgtccatccccgtcgaaatcctcggcttgtccgacgtaccgaacgcaggcgaagacgcgatggtgttggcggacgagaaaaaagcgcgcgaaatcgccctcttccgccaaggcaaataccgcgacgtgcgccttgccaaacagcaggcggcgaagctggaaaatatgttcaacaatatgggcgaaacccaagcccaatctttgtcggtcatcatcaaggcagacgtgcaaggttcttacgaggctttggcgggcagcctgaaaaaactgtccacagacgaagtgaaagtgaacgtattgcacagcggcgtgggcggcattaccgaatcggatgtcaaccttgccatcgcttcgggcgcattcattatcggctttaacgtgcgtgcagatgcctcttcgcgcaaacttgccgaaaatgaaaacgtggaaatccgctactacaacatcatctacgatgccatcgacgacgtgaaggcggcgatgagcggtatgctttccccggaagagaaagaacaggttaccggtacggtcgaaatccgtcaggtcatctccgtttccaaagtcggcaacattgcaggctgtatggttaccgacggcgtggtcaaacgcgattcccatgtccgcctcatccgcaacaacgtggttatccacacgggcgaactggcttcgttgaaacgctataaagacgatgtaaaagaagtccgcatgggcttcgagtgcggtctgatgctcaaaggctacaacgaaatcatggaaggcgaccaactggaatgcttcgacatcgtcgaagttgcccgcagcctgtaa

SEQ ID NO: 64516 - DNA, 777 bp, Neisseria meningitidis; identical to SEQ ID NO: 39763

SEQ ID NO: 64517 - DNA, 2139 bp, Neisseria meningitidis
atggcaaacgggaacatgaaactgtcgttggtgttaaccgcccgagatgacggagcgagacggctactggctgatactcaacgacaattagatcgtaccgcgaaatcgcgggcgcaacttgaacggcaaagccatacttatgcgttgaccggcatccgctcagaaaaacagattcaacgcgaaatcatgctgacacaggctgcgtttaaccgtttggcgcgcagcggcaaggcatcacaaaatgatttggcacgggcggcggtcgctacgcgtaaccgaattcgcgagctgaacgcggaactgaaacagggcacgggatttgcggacaagatgggaaaaatcggaagattcggtgcagctgcggtggctggtggcgcggcagcgtatacggtgcttaagcctgctatggacaacagaaagcagcttgatgagaacatcaaccgcgtgtccagacaggcatttattgaggataacagtaaatcggcagcgtggattgcaactgaaggtgcgcaacagatcaaggatttggcacttgaacttgtcgagaaaaatggcgggacccacgataaggctttggatttaatcagcggcatgatgaccaccagtctgaattttgcccaaaccaagaatgaagcgcaggcggcatatgcttttgcacttgcctcagaaggcagtggcgaggatacggcaaaactgattaaaaccctgaaagatggcggcatgagcggtaaagacctgcaactcgggcttgagcacgtcttgcaatcgggtttagacggcactttcgaggtgcgggatatggttcgggagctgccgagcctgctccctgccgcgcaacaggcagggatgaatggtgtcggcggtttggactacctgctctcactcttacaatctgcggcgaataaatcgggcagtcctgccgaagcggcgactaatgtgcaaaatcttttgagtaaaactctgtcgcctgacacgataggtcgtctgaagaagatggcaaatccgaatgacccgaagaaaggtgtcgattggataggctcggttgtgcaaggcaagcaaaacggcgaaaacgcagtgcaggtgttgtcccgtcttgccgatgccatgctagtaaaggataagcaataccaagattataagaaacgcgcggctgcaggcgataagacggcggcggagcaggcaaatatgcttaagggcgcgcttttggcgcaactgctgcctgatttgcaggcaaaacaaggtttgctggctgcaacggatatgacgcaaatccgtgaatatatggcttcgttggctggcgtaacgttggataacggaaaaattgctaagaacaacgaggcgcgaatgttgtcggcagcggcgcaacaagagcaacaggaatcgctggcaatgttgcgggaaagtctgacgggaacattggtggatatggaaacctcgtttaaaaagctggcagcggaataccctaatgccactctagccctgcaagcattgacgacggcggcaacagcggcgtctgccgcaatgttattaaccgccggtggcggtaaaggtgcaggctttctgaaagatgtaggtagtaaagcgttgggatggggtaaggcttccgcaggcggcgtggcagcaggtgccacagcggcaggcggtaagttgctgtcatggggaaaatctgccggtagcgggctcatgaataatccagcgttagttaaacgggcgggtttgttaggtatgttgctgtattccgagtctttgggtgacggcacattgacaaagggtttgcgtggtaccaagacaactcctgaaatgattaatcgtctgaaaaacaacggtatccgatttgaacctgcgccgaagcgggaacaggcgcggggtggtgtccctcagtatttggctgctccgtcagcgcagcctaccgataagatgttgtctccgttgttttcaactcagacggcggcgtatcaggcagcattggcgcaggatacggctgcagttacaacaggtttggcacaagtgcaaagtgcgatggcgtcggcaagtcagaccatcaataccaatgtgagcctgaatatcgacggacgtgttatcgcgaatgaggtatcgcggtatcaagtggccatgttcggccgtggagcgggtcaataa

SEQ ID NO: 64518 - DNA, 1662 bp, Neisseria meningitidis
atgactgacaacagccctcctccaaacggacacgcccaagcacgcgtccgcaaaaacaacaccttgctctccgccgtctggctggtcccgctgattgcgctgattgccggtggctggctgtggattaaggaaatccgcaacagggggcctgtggttacgctcttgatggacagcgcggaaggcattgaggtcaacaatacggtcattaaggtattgagcatcgatgtcggacgcgttacccgaatcaaactgcgcgacgaccagaaaggcgtggaagtaaccgcccaactcaatgcggacgtatccggcctcatccgcagcgacacacagttttgggtggtcaagccgcgtatcgaccaaagcggcgtaaccggtttgggtacgctgctttcgggttcgtacatcgcctttacacccggcaaaagcgacgaggcaaaagacgtgttccaagtgcaggacattccgcccgttaccgccatcgggcaaagcggtctgcgcttgaatttgattggtaaaaacgaccgcatcctcaacgtcaacagccctgttttgtatgaaaactttatggtcgggcaaatcgaaagcgcgcatttcgacccgtccgaccaaagcgtgcattacaccatcttcatccaaagccccaacgacaaactgattcattccgccagccgtttttggctggaaagcggcattaatatcgaaaccacaggcagcggcatcaaactcaattccgcccctctgcctgccctgctgtcgggcgcgatttcatttgattcgccgaaaaccaaaaacagtaaaaacgtcaaaagcgaagacagcttcacgctttacgacagccgcagcgaagtcgccaacctgcctgacgaccgctcgctgtactacaccgcgtttttcaaacaatccgtgcgcggactgaccgtcggttcgcctgttgaatacaaagggctgaatgtcggcgtggtttccgatgtcccttattttgaccgcaacgacagcctgcacctgtttgaaaacggctggattcccgtgcgcatccgcattgagccttcccgtttggaaatcaatgccgacgaacaaagcaaagagcattggaaacaacaatttcagacggctttaaacaaaggcctgaccgccaccatctccagcaacaacctgctgaccggcagcaaaatgattgagttgaacgatcagccttccgcatcgcctaagctgcgaccgcataccgtttatgcaggcgataccgttatcgcgacccagggcggcggtttggacgatttgcaggtcaaattggcggatttgctggacaagttcgacaaactgcctttagataagacggttgccgaattgaacggttcgcttgccgagctcaaatccacactcaaatctgccaatgccgccctaagctccatcgacaaactggtcggcaaaccgcagacacaaaacattccgaacgaactgaaccaaaccctgaaagagttacgtcaaaccctgcaaggcgtatcgccgcaatcgcctatctacggcgacgtacaaaatacgctgcaaagtttggacaaaaccttaaaagacgttcaacccgtcattaacactttgaaagaaaaacccaacgcgctgattttcaacagcagcagcaaagaccctatcccgaaaggaagccgataa

SEQ ID NO: 64519 - DNA, 771 bp, Neisseria meningitidis
atgaaaatcaccacttggaacgtcaattcgctcaatgtgcggctgccgcaggtgcaaaacctgcttgccgacaatccgcccgatattttggttttgcaggaactcaaactcgatcaggacaaatttccggccgccgctttgcaaatgatgggctggcactgtgtttggagcgggcagaaaacctacaacggcgtggcaatcgtcagccgcagcgtgccggaagacgtgcatttcggtttgccttccctgccggatgacccgcaacgccgcgtaattgcggcgaccgtcggcggcgtgcgcgtcatcaatgtctattgcgtcaacggcgaagccatcgacagcccgaaattcaaatataaagaacaatggtttgccgcgttaaccgaatttgtccgcgatgaaatggcacgccacggcaaactggtgctgctgggcgatttcaatatcgcgcctgccgatgcggactgttacgaccctgaaaaatggcatgaaaaaatccactgttcgtccgtcgaacggcagtggttcaaaaacctgctggatttgggactgaccgacagcctgcgccaagtccatcccgaaggcgcgttctatacctggttcgactatcgcggcgcgatgttccaacgcaaactgggcctgcgtatcgaccatattttggtgtcgcctgcgatggcggcggcgttgaaggatgtccgcgtcgatttggagacgcgcgcgctggagcgtccgagtgaccacgcgccggtgacggcagaattcgattggtaa

SEQ ID NO: 64520 - DNA, 180 bp, Neisseria meningitidis; identical to SEQ ID NO: 36820

SEQ ID NO: 64521 - DNA, 1422 bp, Neisseria meningitidis
atggacacaaaagaaatcctcggctacgcggcaggctcgatcggcagcgcggttttagccgtcatcatcctgccgctgctgtcgtggtatttccccgccgacgacatcgggcgcatcgtgctgatgcagacggcggcgggactgacggtgtcggtattgtgcctcgggctggatcaggcatacgtccgcgaatactatgccgccgccgacaaagacactttgttcaaaaccctgttcctgccgccgctgctgtctgccgccgcgatagccgccctgctgctttcccgcccatccctgccgtctgaaatcctgttttcgctcgacgatgccgccgccggcatcgggctggtgctgtttgaactgagcttcctgcccatccgctttctcttactggttttgcgtatggaagggcgcgcccttgccttttcgtccgcgcaactcgtgtccaagctcgccatcctgctgctgctgccgctgacggtcgggctgctgcactttccggcgaacaccgccgtcctgaccgccgtttacgcgctggcaaaccttgccgccgccgcctttttgctgtttcaaaaccgatgccgtctgaaggccgtccggcacgcaccgttttcgcccgccgtcctgcaccgggggctgcgctacggcataccgatcgcactgagcagcatcgcctattgggggctggcatccgccgaccgtttgttcctgaaaaaatatgccggtctggaacagctcggcgtttattcgatgggtatttcgttcggcggggcggcattattgttccaaagcatcttttcaacggtctggacaccgtatattttccgcgcaatcgaagaaaacgccccgcccgcccgcctctcggcaacggcagaatccgccgccgccctgcttgcctccgccctctgcctgaccggcattttctcgcccctcgcctccctcctgctgccggaaaactacgctgccgtccggtttatcgtcgtatcgtgtatgctgccgccgctgttttgcacgctggtagaaatcagcggcatcggtttgaacgtcgtccgaaaaacacgcccgatcgcgctcgccaccttgggcgcgctggcggcaaacctgctgctgctggggcttgccgtgccgtccggcggcgcgcgcggcgcggcggttgcctgtgccgcctcattctggctgttttttgccttcaagaccgaaagctcctgccgcctgtggcagccgctcaaacgcctgccgctttatctgcacacattgttctgcctgacctcctcggcggcctacacctgcttcggcacgccggcaaactatcccctgtttgccggcgtatgggcggcatatctggcaggctgcatcctgcgccaccggaaagatttgcacaaactgtttcattatttgaaaaaacaaggtttcccattatga

SEQ ID NO: 64522 - DNA, 441 bp, Neisseria meningitidis
gtgaacatccgccgcaccgtttatgccgattgcgcggcactcgccgcactcgatgccgtctgcaacccgtccgcgtggacacaacgccaattcgagtccgcattggtttcgccgtccgaacaggttttccttgcggaaaaagacggcaggattgccgcctttatcgtttggcagaacctgcccgatgaatccgaactgcacctgattgccaccgcgcccgaatgccgccgccgtggcattgcgtccgccctgctcgaatattggtacgcacatctgctcgaagacacgcaacgcctgctgctcgaagtccgcgcaggcaacactgccgcacaggcactgtacgcggcgcacggcttcagcattgcgggcaggcggaaaaactattaccgtacagccgacggtaaaaccgaagatgccgtcttaatggagaaaatatgttaa

SEQ ID NO: 64523 - DNA, 1902 bp, Neisseria meningitidis
atgactacgccaaaaaaaaccgccaaaacttccggcaacgaagcgcgcgaacttgccgacttgagcgaagacatcggcatccgcttcaaatatccgaactcggaacgcgtgtatctgcaaggcagccgtggcgacatccgcgtgcctttgcgcgaaatccgccaggacgacacctacacggcgcaaggcacggaagccaacccgccgattcccgtctatgacaccagcggcgtgtatggcgatccggcggcgcacatcgacctgaaacaaggcctgccgcacatccgcaccgcatggctgaacgaacgcggcgataccgaaatcctgcccaagctctccagcgaatacggcatcgaacgcgcacacgatccgaaaaccgcccatctgcgcttcaaccaaatcacccgcccgcgccgcgcgaaaagcggcggcaacgttacccagcttcactacgcgcgccgcggcatcatcacgcccgaaatggagtttgtagccatacgcgaacgtttaaaattagacgaattgtcccaaaaaccggaatacgccaaactcttgaaacagcacgcagggcaaagtttcggcgcgaatatcccgacccatcccgaccaaatcacgcctgaattcgtgcgccgagaaattgccgccggacgcgcgattatccccgccaacatcaaccaccccgaactcgaaccgatgattatcggccgcaacttccgcgtcaaaatcaacggcaacttgggcaattccgccgtcacttccagcctgaccgaagaagtcgaaaaaatggtgtggtcgctgcgttggggcgcggacacgattatggatttgtccactggtgcgcacatccacgaaacgcgcgaatggattatccgcaacgcccccgtccccatcggcaccgtgccgatttaccaagcgttggaaaaaaccggcggcatcgccgaagatttgacttgggatttgttccgcgacaccctcatcgaacaggcggagcaaggcgtggactatttcaccatacacgcgggcgtgttgctgcgttatgtgccgatgaccgccaaccgcctcaccggcatcgtctcgcgcggcggttcgattatggcgaaatggtgtctggcacatcatcgggaaaatttcctctacacgcatttcgacgaaatctgcgaaattatgaaagcgtatgacgtatcattcagcctcggcgacggcctgcgccccggctgcattgccgatgccaacgacgaatcccagttcgccgaattgcacaccttgggtgaattgaccgataaagcgtggaaacatgacgtacaagtcatgatcgaaggccccggccatgtgccgctgcaacgcgtcaaagaaaacatgaccgaagagctgcaacactgctttgaagcacctttttacacactcggcccgctcgttaccgacatcgcacccggctacgaccacatcacctcgggcataggcgcggccaatatcggctggtacggcacggcgatgctttgttacgttacccccaaagaacatttggggctgcccgacaaagaagacgtgcgcaccggcatcatcacctacaaactcgccgcccacgccgccgatctcgccaaaggctggccgggcgcacaattacgtgacaacgccctgagcaaggcgcgtttcgagttccgttggcgcgaccaatttcgcttaagcctcgaccctgaacgtgccgagagcttccacgacgaaaccctgcctgccgaaggcgcgaaaatcgcccacttctgctcaatgtgcggccccaaattctgctcgatgaaaatcacgcaggaagtgcgcgactacgccgacaagcaaaaagcccaacggcagggcatggaggaaaaagcggtcgagttcgtcaaaaaaggcgcgaagatttacagttga

SEQ ID NO: 64524 - DNA, 195 bp, Neisseria meningitidis; identical to SEQ ID NO: 42321

SEQ ID NO: 64525 - DNA, 1815 bp, Neisseria meningitidis; identical to SEQ ID NO: 50925

SEQ ID NO: 64526 - DNA, 798 bp, Neisseria meningitidis
atgaatccagcccccaaaaaaccttctcttctcttctcttctcttctcttctcttctcttctcttctcttccgcagcgcaggcggcaagtgaagacagcagccgcagcccgtattatgtgcaggcggatttagcctatgccgccgaacgcattacccacaattatccggaaccaaccggtgcagacaaagacaaaataagcacagtaagcgattatttcagaaacatccgtgcgcattccatccaccctcgggtgtcggtcggctacgacttcggcgactggagaatagcggcagattatgccagttacagaaaatggaaagaaagtaattcttctactaatgcagaaaatagagataatgcaaaaaactacgtaaagattgaaacaaaacatcaaggaaacggcagcttccacgccgcttcttctctcggcttatccgccatttacgatttcaaactcaacgataaattcaaaccctatatcggcgcgcgcgtcgcctacggacacgttaaacatcaggttcattcagtggaaacaaaaaccacgactgttacctctaaaccgacggcaacctctccacagggaggccctattatacaaactgatcccagcaaacctccctatcacgaaagccacagcatcagcagcttgggtcttggtgtcatcgccggtgtcggtttcgacatcacgcccaagctgaccttggacaccggataccgctaccacaactggggacgcttggaaaacacccgcttcaaaacccacgaagtctcattgggcatgcgctaccacttctga

SEQ ID NO: 64527 - DNA, 1566 bp, Neisseria meningitidis; identical to SEQ ID NO: 42664

SEQ ID NO: 64528 - DNA, 198 bp, Neisseria meningitidis; identical to SEQ ID NO: 43350

SEQ ID NO: 64529 - DNA, 1503 bp, Neisseria meningitidis; identical to SEQ ID NO: 50475

SEQ ID NO: 64530 - DNA, 237 bp, Neisseria meningitidis; identical to SEQ ID NO: 39540

SEQ ID NO: 64531 - DNA, 702 bp, Neisseria meningitidis
atgttcagacggcatcggcatttgaaaaatatgcagattaaaaaaatcatgaaatggcttcccgtcgccttgtcgcttttgggtgcgttgggttatacggggtacggcagcgaggcggtgcggacggcggttgccgtactcgacgtactcggcgcggcaggggacgcgggttccgacgcgcccgcccgccgccgagcatcggcgaaatccggccaccgctacacaggcacggtgtccaaagtctatgacggcgacacccttcacgttatcgacggcgacggcgcgaaacacaaaatccggatggcgtatatcgacgcgccggagatgaaacaggcttacggcacgcgttcgcgcgacaacctgcgcgcggcggcggaaggcaggaaagtcagcgtgcgcgtgttcgacaccgaccgctaccagcgcgaagtggcgcaggtttctgtcggcaaaaccgatttgaacctgatgcaggtgcaggacggggcggcgtggcattataaaagttatgctaaagaacagcaggataaggcggattttgccgactatgccgacgctcaaattcaggcggaaagggaacgcaaaggattgtggaaagctaaaaatccgcaagcgccgtgggcgtaccgccgggcaggcaggagcggcgggggcaataaggattggatggatgccgtgggcgaatggttgggcatttggtaa

SEQ ID NO: 64532 - DNA, 171 bp, Neisseria meningitidis; identical to SEQ ID NO: 36504

SEQ ID NO: 64533 - DNA, 852 bp, Neisseria meningitidis
atgattacccatccccaattcgaccccgtccttatcagtatcggtccgcttgccgtccgctggtatgccctaagctacatcctcggatttattctttttacctttctcggcagaaggcgcatcgcgcaaggcttgtccgtttttaccaaagaatcgcttgacgacttcctcacttggggcattttgggcgtaatttttggtgggcgtttgggttacgtcctgttttacaagttttccgactacctcgcccatccgcttgatattttcaaggtatgggaaggcggaatgtcgttccacggcggctttttgggtgtagttattgccatatggttgttcggccgcaaacacggcatcggcttcctcaaactgatggacacggtcgcaccgctcgttccgctgggtctcgcttcgggacgtatcggcaacttcatcaacggcgaactttggggacgcgttaccgacatcaacgcattttgggcaatgggcttcccgcaggcgcgttacgaagatgccgaagccgccgcgcacaatccgctttgggcagaatggctgcaacaatacggtatgctgccgcgtcatccctcgcagctttatcagtttgcacttgaaggcatctgcctgttcgccgtcgtttggctgttctctaaaaaacagcggccgaccggacaagtcgcctcgctcttcctcggcggctacggcatattccgcttcattgccgaattcgcacgccaacccgacgactatctcgggctgctgaccttggggctgtcgatggggcaatggttgagcgtcccgatgattgttttgggtatcgtcggctttgtccggttcggcatgaaaaaacagcactga

SEQ ID NO: 64534 - DNA, 474 bp, Neisseria meningitidis; identical to SEQ ID NO: 50426

SEQ ID NO: 64535 - DNA, 1479 bp, Neisseria meningitidis
atgttcagcaagttaacccctttggctgaaaccggcatcccgaccctgtcgtgtgcaaacgcagcagggcgtttgttgcattcagacagccgccaaatcaaacaaggcgatattttcgttgcctgtccgggcgaatatgccgacggccgcagttatatccccgccgccgttgccaacggcgcggcttttgttttttgggacgacgacggcaaattcgcgtggaatcccgaatggaaagtccccaatcaaggcatcaaagatttgaaacaccgtgccggcatattggcggcgcaagtttacggcaacgtttcagacggtctcaaattctggggcgtaaccggaaccaacggcaaaacctccatcacgcaatggctggcgcaagctgccgatttgttgggcgaaaaaaccgccattgtcggcacggtcggcaacggcttttggggtgcattggaagaaaccacgcataccacacccgcccccgtcgatgtccaaaccctgctctaccgtttccgtcaacaaggcgcaacagtcgccgcgatggaagtctccagccacgggcttgaccagtcgcgcgtcaacggcgtgtcattccgcagcgcaatctttaccaacctcacccgcgaccacctcgactaccacggcacgatggaagcctacggtgccatcaagtcgcgcctgttttactggcacggcttgaaacacgcagtcatcaacgtggatgacgaatacggcgcggaactcgcaggtcgtctgaaaaaagactgccccgatttggccgtttatagctacggcttcagcgaacacgccgacatccgcattaccgactttaccgcctcttcagacggcatagaagccgtattccgaaccccgtggggcgaagggaaatgccacacgcgcctgctcggacggttcaacgcgcaaaatctcgccgcctgtgtcgctttgctttgcgccaacggctatccgctggataaagtattggatgtgctggaaaaaatccgtcccgcttcggggcgcatggactgcatcatgaacagcggcaaacctttggtcgttgtcgattatgcccatacgcccgacgcattggaaaaagcactcgccaccttgcaggaaatcaaaccgcagggtgcggctttgtggtgcgtattcggttgcggcggtaaccgcgatcgcggcaaacgcccgctgatgggcgcggcagccgtacagggcgcggataaagtcgtcgtcaccagcgacaacccgcgcttggaaaatccgcacgacatcatcaacgacatcctgcctgccgttcccgcgcccgaatgcgtcgaagccgaccgtgccgccgccatccgttatgcggttgaacaagccgccgcaaacgacatcatcctgattgccggcaaagggcatgaaaactatcaggatgtacaaggcgtgaagcaccgtttttccgatcttgaaatcgtcggacaggctttgttaactcgtaaataa

SEQ ID NO: 64536 - DNA, 1086 bp, Neisseria meningitidis; identical to SEQ ID NO: 38486

SEQ ID NO: 64537 - DNA, 168 bp, Neisseria meningitidis; identical to SEQ ID NO: 37435

SEQ ID NO: 64538 - DNA, 204 bp, Neisseria meningitidis; identical to SEQ ID NO: 36264

SEQ ID NO: 64539 - DNA, 540 bp, Neisseria meningitidis; identical to SEQ ID NO: 58729

SEQ ID NO: 64540 - DNA, 2838 bp, Neisseria meningitidis; identical to SEQ ID NO: 51213

SEQ ID NO: 64541 - DNA, 303 bp, Neisseria meningitidis; identical to SEQ ID NO: 37853

SEQ ID NO: 64542 - DNA, 141 bp, Neisseria meningitidis; identical to SEQ ID NO: 51058

SEQ ID NO: 64543 - DNA, 873 bp, Neisseria meningitidis; identical to SEQ ID NO: 50880

SEQ ID NO: 64544 - DNA, 372 bp, Neisseria meningitidis; identical to SEQ ID NO: 51765

SEQ ID NO: 64545 - DNA, 1212 bp, Neisseria meningitidis; identical to SEQ ID NO: 43211

SEQ ID NO: 64546 - DNA, 936 bp, Neisseria meningitidis
atgagtgtattgattattgtcgaacacgacaacaaacagttgaatcctaccactttgcatgctgttaccgctgccgctaagctgggtaaaatcgatttattggttgccggaagcggtgcatctgctgtggtagagttcgcaaaacaagtggcgggtgtggaaaaagttttggttgcagatgctgcccattatgccgaaggtttggctgaagagttggctccgctggttgttaaattggcagcggattactgctatgttgcagcaacggcaactacattcggtaaaaaccttttgcctcgcgtagcagccttattagacgtaccgcaaatttctgatttgaccgaaattgtggataacacgacttttgtgcgccccatttatgcgggtaatgcatttgaaaccgtgcaagctgattcagaaaaattggtgctgaccttccgtgcgacggtttttgacgcagtggcggcgcaaggtggtaatgctgaggtaattaatgttgaagcaacccctgcccaaaacctgagtcgttttgttaaccgtcagctttcccattccgatcgtcctgaactgactcaggcaaaagtgattgtttccggtggtcgtgcgttgggtagtgcggaaaaattcaatgaagtgctgacaccgttggcggatgttttaggtgcggcaatcggtgcatcccgtgcggcggttgatgccgaatatgcgccaaacgatgctcaagtcggacaaaccggtaaagtagttgcgccgcaactctattttgcaatcggtatttcaggtgcgattcaacacgttgccggtatgcaagacagtaaggtgattgttgcaatcaataaagatgctgatgcgccgattttcaatgtagccgattacggattggttggcgatttatttgaaatcgttccacaattaacagaagtattgaaaaattaa

SEQ ID NO: 64547 - DNA, 483 bp, Neisseria meningitidis; identical to SEQ ID NO: 42793

SEQ ID NO: 64548 - DNA, 1011 bp, Neisseria meningitidis
atgtccatcaaaatcctgattatttctcccagttggataggcgactgcgtgatgacccagcccttgttccgccgtttgaaggaacttcaccccggttgcacgattgatgtgttcgcaccgaagtggtcgatggaggtgtttgagcgtatgccggaagtgaatgagattcttgaaaatccgttcggacacggtgcgttggagttgaaacgccgttggcgggtcggtagggatttggggcggcgcggatacgatcaggttattgtgttgcccggttctttgaaatcggcaatcatcgcgctggcgacaggtatcggtaaaaggacgggttatgtcggtgaaagccgttattttctgttgaacgatatacgcaggctggataaggaacgtctgcctttgatggtggacagatatacggctctcgcgcatccgagtcaggaagattttgacgggcattcgggattccccgagttttccattgatgaacggcggcgggaaatttctgtcgaaactttcggtttgaatcttggaaagcctgttttggctttttgtccgggtgcggaattcgggccggcaaagcgttggccgacaaagcattttgccgagttgggcaaacattattcggcggcgggttggcaggtttggctgttcggttcgcaaaaagatgatgaaattgccgaggaaatcaaccgcctttcagacggtatgtgtgtcaatttgtgcggcaaaaccgatttgtcgcaggcaatggatttgttgtcgttggcggacacggttgtgtgtaacgacagcggattgatgcatttggcggcagctttgggcaggaaggtggtggcggtttacggttcttccagcccgacgcatacgccacctttgagcgacagggcgaaaatcgtcagcctgcacttggaatgttcgccgtgttttaagcgggaatgtccactagggcatacagactgcctcaacaggctgtatcccgagaagattgtgcaggcggttgaagaggcggtatga

SEQ ID NO: 64549 - DNA, 444 bp, Neisseria meningitidis
atggcaattttttattttagttcaaaaaaaatagaaagaaatattatctcatcaaatctgaatcgaaaacaagttcgtgcaatatttagttctgatgtacaagaaatttataagtcatcatactctcgggttcctatggatgtttttcccgaattgaatatccattgtttttatgatgataaaaatcagcttgaagcgatagagatatttgaaccaaataagttttttttagaagatatttcttttaattggcttggaaaaattaatgatgaaataataagctatctttataagagtggaattaatgattttgaaattgatgatttgggtattaggctccttaatattcctgtttcaactataatcaattctataggtaaagtagaatgttgttatttagatttttcaaatagagacacaaaattttatgtaaaacaagtgtag

SEQ ID NO: 64550 - DNA, 962 bp, Neisseria meningitidis
atgaaaattttgcttgtccgcttgtctagtatgggcgatttaattcacactttgcccgcaatcgaagatttggcgcgacaatgtcctgatgtagaactgcattggctatgtgaggctggatttgcagatattgcgcgcctgcatccgtttgtaaaaaaaatccatgtgatgaaatggcggcaatggcgcaaacatctctttcgggctgaaacttggcgggaaatgggtcatctgaaacagactttgcggcaggaagtatttgatttcgtattggacagtcaaggtctgattaaaagcgcgtgtttcgctaaaatggcaaaatccccgatttgtggtttggataaaaacagtgcgcgcgagggatgggctgctttggcgtatgtaaaaacatacgctgtaccgaagggaaaaaatgccgtttggcgcaaccgtgaactgtttgcccaagtatttgggtatgtaatgccggaaacgcaggtatttggcttgactgttcctgaagcaggccgtctgaaaaatttagcgcagccgtattatgcggctttgcatgcgaccagtcgggacagtaagttatggcctgtggaaaactggcggtcgttgctgcaaaagttgaatgaagaacagcaatgcaatatttacctgccttggggaaatgaagatgaaaaaacgcgtgccaaacagattgcagacggactgccgtttgctattgtgtgcgacaaaataaatttattgcaggcagcgtatctgctgaaatacgcggtcggaattgtcggcgtggataccggtttgctgcatttggcaaatgccttggaaaaacctgtggtcggcatttataccgataccgatccgattaaaacaggcgttcaggtttcgccaattgcaaaaaatttgggcaatatcgggcagattccgaccgcagatttggtttatcaagcgctgatggattgtgttgcagcagataa

SEQ ID NO: 64551 - DNA, 447 bp, Neisseria meningitidis
atgaatttcagttttgttcccctgtttctggttacgctgattctgttgggggtggtcagcaacaacaattcgattaccatctcggcaaccatattgctgctgatgcagcagacggcattggtacagtttgtcccgttggtcgagaagcatgggttgaatctcggtatcattcttttgaccataggggttttgagtccgttggtttcaggaaaggcgcaggttcctcctgttgccgaatttttgaattttaaaatgatatccgccgtttttatcggtattttcgtggcttggctggcgggacgcggcgtgcctttgatgggacagcagcctgttttaattacagggctgttaatcgggacggttatcggggtggcatttatgggcggtatccctgtcgggccgctgattgcggccggcatcttgtcttttgtcgtcggaaagggttaa

SEQ ID NO: 64552 - DNA, 1257 bp, Neisseria meningitidis; identical to SEQ ID NO: 43860

SEQ ID NO: 64553 - DNA, 678 bp, Neisseria meningitidis
atgagcatcaagcaatggccggaaggcgaaagacccagggaaaagctgttggaacgcggggcggcggctttgagtgatgccgaacttttggcaatcctgctgcgcgtcggcacgcgcggaatgagtgcggtcgatttggcgcgttatttgctgcaggagttcggcagtttggggaggctgatgagcgcggaggtcggcaaactgtcggcatacaaagggatggggacggcaagtttcacacagtttgccgtggtcagggaaatcgggcggcggatattggcggaagaattgcaggagagcatcgtcctgtccgatccggatacggtggccgattatttacgctttcatttggggcaggaaaaagtcgaagtcagcgtcgcgctgctgctgaaccgccaaaaccaactgattgcggtcagagagctgtcgcgcggtacggttgcggaaaacacgatttacatccgcgaaatcgtcaaactggcattggacgaatatgccgacagcctgattattgcgcacaaccatccgggcggctcgcccgaaccttcgcaggaagacatcatgttcacaaggcggctggcacaggcaatgtcgctggtcgatgtgtcgctgctcgaccattttatcgtaacggcgcaaaccgtccgttcgttcaggcagctcgggctgatgccctga

SEQ ID NO: 64554 - DNA, 435 bp, Neisseria meningitidis
atgcgccgggcgttgattgcgaaaattaagattgctcaaaaggagctgggcttggatgacggtacctatcgcgcggtgttggagcgtgtgacgggcaagcggtcgtgtgcggatatggatgtttccgaacttgagtctgttgtcgctgatatgcggtcgcacggatttaagcctaaagcaaaaggtaacccacacggtaaaccacatctgcgtcggacattatcagcggcaatgttggacaaagtcgaagccctgctgaccgtcggcggcaaacattggaactatgcacacgcaatggcgcggcggatgtttggtaaggataaggtcgaatatttagacgatacgcagctacataaactggttgctgcgttgcagattgcggaaaacaggaaaacggaaaaagcgagtggggatgatggggttcgaaaaagttga

SEQ ID NO: 64555 - DNA, 2760 bp, Neisseria meningitidis
atgaaaagaatgttattcaacgcaacgcaggccgaagagctgcgcgttgccattgtcgatggccaaaaccttttggacttggacatcgaaacgctgggcaaagaacagcgtaaaggcaatatctacaaaggtatcattacccgcatcgagccgtcgctggaagcgtgtttcgtggattacggaaccgaccgccacggcttcttgccgtttaaagaagtctcccgctcatacttccaagactacgaaggcggacgcgcgcgcatccaagacgtgctcaaagaaggcatggaagtcatcgtccaagtcgaaaaagacgagcgcggcaacaaaggcgccgcgctgaccaccttcatcagcctcgccggacgctatctggtattgatgccgaacaacccgcgcggcggcggcgtatcccgccgtatcgaaggtgaagagcgtcaagagttgaaagccgccatggcggaactcgacattccgaacggcatgagcatcatcgcccgtaccgccggcatcggccgcagcgcggaagagttggaatgggacttgaactacctcaaacaactctggcaggcgattgaagaagcaggaaaagcgcatcacgacccctacctgctctttatggaaagctcgctgctgatccgagccatccgcgactatttccgccccgacatcggcgagattttggtggacaatcaagaagtttacgaccaagttaccgagttcatgagctacgtcatgccgggcaatataggccgtctgaaactctacgaagaccacacgccgctgttttcccgcttccaaatcgaacatcaaatcgaaagcgcgttctcgcgcagcgtcagcctgccctccggcggcgcgattgtgatcgaccataccgaagccctcgtttccatcgacgtgaactccgcacgcgccacacgcggcgcggacattgaagacaccgcgttcaaaaccaatatggaagccgccgaagaagtcgcccgacaaatgcgcctgcgcgacttgggcggtttggtcgtcatcgacttcatcgatatggaaaaccccaaacaccagcgcgatgtggaaaacgtcctgcgcgacgcgctcaaaaaagaccgcgcccgcgtgcagatgggcaaactgtcccgtttcggacttttagaattgagccgccaacgtttgaaaccggctttgggcgaaagcagccatgttgcgtgtccgcgctgtgccggcaccggcgtgattcggggcatcgaatccaccgccctgcacgttttacgcatcattcaagaagaagcgatgaaggacaacaccggagaagtgcgcgcacaagtgcccgtcgatgtcgccaccttcctgctgaacgaaaaacgcgccgagctgtttgcgatggaagagcgtttggatgtcaacgtcgtcctgattccgaacatccacctcgaaaatccgcactacgaaatcaaccgcatccgcaccgacgacgtagaagaagacggcgaaccgagctacaaacgcgtcgccgagcctgaagaagacgaatccgccaaaccgttcggcggcgaaaaagccaaagccgcccgtcccgaacccgccgtcaaaggcgtgcgccacaccagccccgccccgactgccgcccccgagaaaaaaacctcctggtgggacagcttcaaagcttggctcaaacgcattttcggcggcagcgaaacccaagccgcgcccgctgccgaaacctccgaaaaacgcagcacggcaaaccgcagcggcagccgcgccaacaaccgccgccaaaacccgcgccgcagcaaacgcgaaggcagcaaagtagaagtccgcgaagtggcaggcaaaactgccggacaggaagcgcgtgccgacaaagccgaaacgcgcaacaacggcaaccgccgccgcaacgaacgcggcgaccgtgccgccggacgcgccgacgaagcggaaatccaagaccgcaacatacagcctgccgcaaccgttgcagatgccgcaccgtccgaaaccgaagtgcaaaccggaaaacgccgccgcaacggcagccgcagcgaacgcggccaaaccgcgccggaaaccgccaccgttgccgaaacaaccgttcagacagcggaaaacacgccgtccgaaccgcataccgcagaagacaaaggcagcaagcccaaatccgaacgcaaccgccgcgaacgcgacagccgagatgccaaagaacgccgcgagcgcaacaatcagcgcgaccgccgtcaaaacggcaaaaaacgcaatattccgtctgccgccaaaatcgagcagtacctgaatattcacgacaccgccgacaaagtccgttccgccgccgcgcacgttttcggcgaaaccgacgcaaacgcgccgattactgtcagcattgccgatccggttgcagaaagggatcttccgacagcatctcccgccgtttcaaacggcgacgcaccggtttatgatgcggcggaaaaaatccgccgtgccaccgccgccatcctgcccgaaggcgcgacaccgaaagccgaagcacaggaaatgccgtctgaaaccgcaacctttacggctgcggcggaacaggcacgggaaaccgcacaaaccggcggactcgtcctgatcgaaaccgaccctgccgcattgaaggcatgggcggcacaacccgaagtccaagccggacgcggtttgcgccgttccgaacagcccaagccgtctgaagtcgcaaccgtccctgccgaagaaatgatccaagtcgaaacccggcaaggctga

SEQ ID NO: 64556 - DNA, 906 bp, Neisseria meningitidis
atgcttaccttccaacaaatcatcttcaaactgcaaaccttctgggcagacaaaggctgcaccgtcatccaacccttcgacatggaagtcggtgccggcacatcccatcccgccacctgcctgcgcgcgctcggtcccgagccttggtttgccgcctacgtccaacccagccgccgccccaaagacggccgctacggcgacaaccccaaccgcctgcaacactattaccaattccaagtcgccctcaaacccgcccccgccaatatccaagacctctatctcgactccctgcgcgaattgggcatcgatcccaaagtccacgacatccgctttgtcgaagacgactgggaaaaccccaccctcggcgcgtggggtttgggctgggaagtctggctcaacggcatggaagtaacccagtttacctatttccaacaagtcggcggcatcgactgcacgcccgtactcggcgaaatcacctacggcatcgaacgcttggcgatgtacctgcaaggcgtggaaaacgtctatgacctcgtttgggcaaaaacgctggacggtaatacagtaacttacggcgacgtgtaccaccaaaacgaagtcgagcaatccacctacaacttcgaatacagcgatgccgactggctgctgcgccagttcaacgactacgaagcgcaagccaaacgcctgcttgccgaagaaaacgccagccttgccttgcctgcctacgagctggtcctcaaagcggggcatacgttcaacctcttggacgcgcgcggcgcgatttccgtaaccgagcgggcaacttatattggacgtattcgtgcattgagccgcgccgtggcgcaaaaatatgttgaaagccgcgaaaaactgggcttccctttaatgaaggcaaatgccgcctaa

SEQ ID NO: 64557 - DNA, 1002 bp, Neisseria meningitidis
atgcagtttccttaccgcaatgttccggcttcgcgtatgcgccgtatgcgcagggacgatttttcacgccgcctgatgcgcgaacacacgctgaccgccgatgatttgatttatccggtgttcgtattggaggggtcggcgcgcgaggaggatgtgccttctatgccgggtgtgaagcgtcaaagtttggacaggctgctgtttacggcggaagaggcggtaaagctcggtattccgatgttggcactctttcccgtggttacggcaaacaaaaccgagcgtgcagaggaagcgtacaatcccgaaggactcgtgccggcagccgtccgcgccctgcgcgagaggtttcccgaactgggcattatgacggatgtcgcgctcgatccttatacggttcacggtcaggacgggctgacggacgaaaacggttatgtgatgaacgatgaaaccgtagaggttttggtcaagcaggctttgtgccacgctgaagcgggcgcgcaggtggttgccccttccgatatgatggacgggcgtatcggtgcgattcgcgaggcgttggaggatgccgggcatatccacacgcggattatggcgtattccgccaaatatgcttcggcgttttacggaccgttccgcgatgcggtgggcagttcgggcaatttgggcaaggcggacaagaaaacctaccagatggatccggcaaataccgatgaggcgttgcacgaagtggcgttggacattcaggaaggtgcggatatggtaatggtcaagcccggtttgccgtatttggacgttgtccgccgcgtgaaggacgagttcggtgtgccgacttatgcctatcaggtttcgggcgaatatgcgatgttgcaggcggcggttgccaacggatggctggatggcgataaagtggttttggaaagcctgctggcattcaaacgtgcgggcgcggatgggattttgacctattatgccattgaggcggccaagatgctgaagcgttga

SEQ ID NO: 64558 - DNA, 771 bp, Neisseria meningitidis; identical to SEQ ID NO: 48269

SEQ ID NO: 64559 - DNA, 780 bp, Neisseria meningitidis; identical to SEQ ID NO: 43687

SEQ ID NO: 64560 - DNA, 552 bp, Neisseria meningitidis; identical to SEQ ID NO: 60199

SEQ ID NO: 64561 - DNA, 1410 bp, Neisseria meningitidis; identical to SEQ ID NO: 50733

SEQ ID NO: 64562 - DNA, 561 bp, Neisseria meningitidis
gtgggaatccaggacgaaaaatctccagaaaccgttttacccgataagtttccgcaccgacaggtctggattcccgcctgcgcgggaatgacgatgcaggtatttctgacgattcccggctatgatgttgaggcagaaatcgaaaaattcgtttggatggatgctgtgatttggcagatgccgagctggtggatgcacgagccttggacagtgaaaaaatacatagacgaagtattaaccgctggacacggcaaactctaccaaagcgacggcagacacagcgtcaatccgactgagggctacggcacaggcggcttgttgcaaggcaaaaaacatatgctttcactgacttggaatgcgccgattgaggcgtttacccgcgaaggcgatttctttgaaggcaaaggcgttgatgttttgtatatgcacttccacaaagccaacgagtttttgggtatgacccgcctgccgacattcttatgtaacgatgtggttaaaaatccgcaagtggaaaaatacttggcagattatcaggcacacttggaaaaagtgttcggctaa

SEQ ID NO: 64563 - DNA, 2637 bp, Neisseria meningitidis
atgactatgcaagaacaatatcaacccgccgccatcgagcctgcggcgcagaaaaaatgggacgacgcccgtattttcaacgtctccgaagacgcttccaaacccaaatattattgcctctccatgttcccctatcccagcggcaagctgcatatggggcatgtgcgcaactacaccatcggcgatgtattgagccgcttcaaacttttaaacggcttcaacgtcatgcagcctatgggttgggacgcgttcggcatgccggcggaaaacgcggcgatgaaaaacaacgtcgcccctgccgcttggacgtacgataacatcgaatacatgaaaacccagctcaaaagcctgggttttgcgattgactgggcgcgcgaaaccgcaacctgcaaacccgaatactaccgctgggaacaatggctgtttaccaagctgtttgaaaaaggcatcgtttatcgcaaaaacggcacggtaaactgggacccggtcgaccaaaccgtccttgccaacgagcaagttatcgacggacgcggttggcgttcgggcgcgttgatcgaaaaacgcgaaatcccgatgtattacttcaaaatcaccgattacgccgaagagctgctcaacgacttggacaagctggaacactggcctgaacaagtcaaaaccatgcagcgcaactggatcggcaaatctcgcggcatgaccgtgcgctttgctgtttcagacgacagcaaacaaggcttggaaggcgattacgcgaacttcctgcaagtttataccacccgtcccgacacgctgatgggcgcgacttatgtcgccgttgccgccgagcatccgctggcaaccgccgcagccgccggcaaacccgaattgcaggcatttatcgccgaatgcaaagcaggttcggttgccgaagccgatatggcgacgatggagaaaaaaggcgtgccgaccggccgctacgtcgtcaacccgctcaacggcgacaagctggaagtgtggattgccaactatgtattgtggggctacggcgacggcgcggtgatggcggttccggcgcacgacgaacgcgattttgagttcgccaccaaatacaatctgccgaaaaaacaagtcattgccgtcggcgacaacgcatttgacgaaaaccaatggcaagaatggtacggcgacaaagaaaacggcgtattggtcaacagcggcgacttggacggcttggattttcagacggcattcgacgccgtcgccgccaagctgcaaagccaaggcgcgggcgaaccgaaaacccaataccgcctgcgcgactggggcatttcgcgccaacgctactggggctgcccgattcccatcgtccattgcgaacaatgcggcgacgtacccgtccctgccgaccaattgccggtcgttttgcctgaaaacgtcgtacccgacggcatgggttcgccgctggcaaaaatgcccgagttttacgaaactgcctgcccatgctgcggcggcgcggcgaaacgcgaaaccgacaccatggacaccttcatggaatcgagctggtatttcttccgctacatgtcgccaaaattttcagacggcatggtcgatcctgccgccgcgaaatactggggcgcggtcgaccaatacatcggcggcatcgaacacgcgattttgcacctcttgtacgcgcgtttcttcaccaaactgatgcgcgacgaaggtctagtcaatgttgacgaaccgtttgaacgcctgctgacgcaaggcatggtcgtttgcgaaacctactaccgcgaaaacgacaaaggcggcaaagattggatcaaccccgccgatgtcgagctgacgttcgacgacaaaggccgccccatttccgccgtcctcaaagccgacgggctgcccgtcgtcatcagcggcacggaaaaaatgtccaagtccaaaaacaacggcgtcgatccgcaagaactgattaacgcctacggcgcggacaccgcccgcctgtttatgatgttcgccgcaccgcccgaacagtccctcgaatggagcgacagcggcgtcgaaggcgcacaccgcttcctgcgccgcctgtggcgtaccgtttacgaatacttgaagcaaggcgaagcggtcaaagcgttcgcaggcagccaagacggtttgtctaaagaactcaaagacctgcgccacaaactgcacgcgaccactgccaaagtcagcgacgactacggccgccgccagcagttcaacaccgccatcgccgccgtgatggaattgctcaaccaatacgacaaaaccgacaccggcggcgaacaaggacgcgccgtcgcccaagaagtattggaaaccgccgtacgcctgttgtggcccatcgtgccgcacatctgcgaaaccctgtggagcgaattgaacggcgcgaaactgtgggaagcaggctggccgacagtcgacgaagccgccttggtcaaatccgaaatcgaagtgatggttcaagtcaacggcaaactgcgcggcaaaatcactgttgccgccgacgcatccaaagccgacctcgaagccgccgcactcgccaccgaaggcgcggtgaaattcatggaaggcaagcccgcgaagaaaatcatcgtcgtaccgggcagactggtgaacatcgtcgtctaa

SEQ ID NO: 64564 - DNA, 1197 bp, Neisseria meningitidis
atgccgtccgaaccgttcggacggcataacgcaacaaacactttaatatccatcacacaggatgacacgatgacccatatcaaacccgtcattgccgcgctcgcactcatcgggcttgccgcctgctccggcagcaaaaccgaacagcccaagctcgactaccaaagccggtcgcaccgcctgatcaaacttgaagtcccacctgatttgaacaaccccgaccaaggcaacctctaccgcctgcctgccggttcgggcgccgtccgcgccagcgatttggaaaaacgccgcacacccgccgtccaacagcctgccgatgccgaagtattgaaaagcgtcaaaggtgtccgcctcgagcgcgacggcagccaacgctggctcgttgtcgacggcaagtctcctgccgaaatctggccgctcctgaaagccttttggcaggaaaacggcttcgacatcaaatccgaagaacccgccatcggacaaatggaaaccgagtgggcggaaaaccgcgccaaaatcccccaagacagcttgcgccgcctcttcgacaaagtcggtttgggcggcatctactccaccggcgagcgcgacaaattcatcgtccgtatcgaacagggcaaaaacggcgtttccgacatcttcttcgcacacaaatccatgaaagaagtgtatggcgacaaaaacaaagacacgaccatgtggcagccttccgcttccgaccccaacctcgaagcggcattcctgacgcgctttatgcaatatttaggcgttgacgggcagcaggcggaaaatgcattggcaaaaaaaccgacccttcccgccgccaacgaaatggcgcgtatcgaaggcaaaagcctgattgtctttggcgactacggcagaaactggcggcgcaccgcgctcgccctcgaccgcatcgggctgaccgtcgtcggtcaaaacaccgaacgccacgccttcctggttcaaaaagccccgaacgaaagcaatgcaattaccgaacaaaaacccggcctgttcaaacgcctgctgggcaaaggcaaagcggagaaacctgccgaacagccggaactgattgtctatgcagaacccgttgccaacggctcgcgcatcgtcctgctcaacaaagacggcagcgcatatgccggcaaagacgcatccgcattattgggcaaactccattccgaactgcgttaa

SEQ ID NO: 64565 - DNA, 210 bp, Neisseria meningitidis; identical to SEQ ID NO: 41321

SEQ ID NO: 64566 - DNA, 1419 bp, Neisseria meningitidis
atggaaaatatattgtctgttctggtgggtacagtcaatcggttcctttgggactacctgctgatttacgcgcttttgggtatcggcctgttttttacgctgtatctcggtgcgccgcagattaccaagctgggcgcgggattcaaatccgtattcggcggcttgtttgccaaaggcgataaagacgacaagtctttatcgcagtttcaggcgttggcggttgccatatctgcgcaaatcggtacgggcaacgtcgccggcgtggcgaccgccatcaccgcaggcgggccgggcgcgattttttggatgtgggtttctgccgttttggggatgtccacgatttttgcggaggcactgctggcgcagaaataccgcgtcgtcagccacggcaaatacatcggtgggccggcgttttatattacgcacggtctgactccgaaaatcggcaggggcgcggcgcgtttcctgtcgggctttttctccattgcgttgattatcgcattgggctttatcggtaatgcgacacaggcaaactccattgcttctgccgttaccattgcatttgatgtgccttctttggcagtcggtattgtgcttgccgtccttgcgggcatggttgtgattggcggcgtgaaccgtattgccaatattgcccagtttgtcgtgccgtttatggcggttgtttatattttgtgcgccgtcgttatcctgtttgaattttccgaccatattgtgccgatgttcaaccacatctttaccgccgccttcaatcccgaagccgttttgggcggtgctgcgggtatcggtatgcgcgaagcgatacgtttcggcgtggcgcgcggtctgttttccaacgaagcaggtatgggttcgactccgcacgcccacgcgactgcggatgtgaagcatcctgtgcagcaaggtatggcggcatttgtcggtgtgtttatcgatacgattttggtatgtacggctacggcattgattatcctgctgactgatgccaacctttcgggcgaacagggcgcggcggttactcaatttgcctttaacaaggcatttccgggcttcggttcgcaattgcttgccgtgtgtctgacctttttcgccttgacgaccattatcggctggtattatttcggcgagtccaacatccgttttcttttcaggggaagacacttgggcatctatcgcgcattggttctgcttgccatcgttttgggtacgctcggcaaagtcgatttggtttggagcctgtccgatatgttcaacggctttatggttatcccgaacttgatagccctgtttttgttgcgtaaggaaatccgtgccatttatgatgattatttggcacagaaaaaagcgggtcgggatttgtcctatcagtatgaatttcacgagttccacgacaagggctga

SEQ ID NO: 64567 - DNA, 648 bp, Neisseria meningitidis; identical to SEQ ID NO: 58723

SEQ ID NO: 64568 - DNA, 1080 bp, Neisseria meningitidis
atgaaaacactgaccgtacacaccccgtcccacagctaccccatctttatcggcaacggactgctgccgcaggcaggaagcctgctcaaaccgcatttgggcaaacgcgccgccatcatcgccaacgaaaccgtcgccccgctctacctcggcacgcttcagacggcattggatgcggcaggcgtatcccatttcagcatcatcctgcccgacggcgaggcgcacaaaaactggcagacgctcaacctcatctttgacgggctgatgcaaaaccgcgccgaacgcaaaaccacattaatcgcactgggcggcggcgtgatcggcgacatggtcggctttgccgctgccacctaccagcgcggcgcaccgttcgttcaaataccgaccacactgttgagtcaagtcgactcatcggtgggcggcaaaaccgccatcaaccacccgctcggcaaaaatatgatcggcgcgttctaccagccgcaggcggtgcttgccgacttggacacgctgcacaccctgcccgtccgcgaattgtccgccggtatggcggaagtcatcaaatacggcgcgctcggcgacatcggttttttcgaatggctcgaacaaaacatatccggactgatgacgctcgatcgggaaaaactcgcccaagccgtgtaccgctgctgccaaatgaaggcagacatcgtcgcccaagacgaaaccgaacagggcatacgcgcatggctcaacctcggacacaccttcggacacgccattgaaaccgagatgggttacggcacttggctgcatggagaagccatcgccgccggctgcgtgttggcggcgcgtttgtccgaacaactgggcaaaatctccgccgcagataccgcgcggctcgccgccctgctcgaagccgccggactgccgtccgcgccacccgtgtttgcctttgaaaaatggctcgaacatatgagccacgataaaaaagtcagcggcggcatcatgcgctttatcggtctgaaccggctgggcgaagccaacatcaccgaaattaccgacacggacatcctccgccgcaccctgcaaccgtatctctga

SEQ ID NO: 64569 - DNA, 822 bp, Neisseria meningitidis; identical to SEQ ID NO: 52031

SEQ ID NO: 64570 - DNA, 672 bp, Neisseria meningitidis; identical to SEQ ID NO: 59564

SEQ ID NO: 64571 - DNA, 870 bp, Neisseria meningitidis; identical to SEQ ID NO: 36835

SEQ ID NO: 64572 - DNA, 1014 bp, Neisseria meningitidis; identical to SEQ ID NO: 53143

SEQ ID NO: 64573 - DNA, 288 bp, Neisseria meningitidis; identical to SEQ ID NO: 50130

SEQ ID NO: 64574 - DNA, 897 bp, Neisseria meningitidis
atggagtctgaaaacattatttccgccgccgacaaagcgcgtatccttgccgaagcgctgccttacatccgccggttttccggttcggtcgccgtcatcaagtacggcggcaacgccatgaccgaacctgccttgaaagaagggtttgcccgcgatgtcgtgctgctgaagctggtcggcattcatcccgtcatcgttcacggcggcgggccgcagatcaatgcgatgcttgaaaaagtcggcaaaaagggtgagtttgtccaaggaatgcgcgttaccgacaaagaggcgatggatattgtcgaaatggtgttgggcgggcatgtcaataaagaaatcgtgtcgatgattaacacatatggcggacacgcggtcggcgtaagcggacgcgacgaccatttcattaaggcgaagaaacttttgatcgatacgcccgaacagaatggcgtggacatcggacaggtcggtacggtggaaagcatcgataccggtttggttaaagggctgatagaacgtggctgcattcccgtcgtcgcccccgtcggcgtaggtgaaaaaggcgaagcgttcaacatcaacgccgatttggtagcaggcaaattggcggaagaattgaacgctgaaaaactcttgatgatgacgaatatcgccggtgtgatggacaaaatgggcaatctgctgaccaaactcacgccgaaacggattgatgaactgattgccgacggcacgctgtatggcggtatgctgccgaaaatcgcttctgcggtcgaagccgccgtcaacggcgtgaaagccacgcacatcatcgacggcagggtgcccaacgcgcttttgctggaaatctttaccgatgccggtatcggttcgatgattttgggcggtggggaagatgcctga

SEQ ID NO: 64575 - DNA, 1068 bp, Neisseria meningitidis; identical to SEQ ID NO: 42366

SEQ ID NO: 64576 - DNA, 378 bp, Neisseria meningitidis; identical to SEQ ID NO: 42275

SEQ ID NO: 64577 - DNA, 1047 bp, Neisseria meningitidis
atgtcagacgacaaaagcaaagcccttgccgccgcactggcgcaaatcgaaaaaagtttcggcaaaggcgccatcatgaaaatggacggcagccagcaggaagaaaacctcgaagtcatttccaccggatcgctcggattagacctcgccctcggagtcggcggtctgccgcgcgggcgcatcgtcgaaatcttcggccccgaatcctccggcaaaaccaccctctgcctcgaagccgtcgcccaatgccagaaaaacggcggcgtgtgcgcctttgtcgatgccgaacacgcctttgatcccgtttacgcccgcaaactcggcgtaaaagtcgaagagctttacctgtcccagcccgataccggcgaacaggctttggaaatctgcgacacactcgtccgttcgggcggcatagatatggtagtcgtcgattccgtagccgcactcgtccccaaagccgaaatcgaaggcgatatgggggacagccatgtcggactgcaggcgcgcctgatgagtcaggctttgcgcaaactgaccggacacatcaaaaaaaccaacacgctggttgtgttcatcaaccaaatccggatgaagatcggcgtaatgttcggcagccccgagaccaccaccggcggcaacgcgctgaaattctattcttccgtccgcctcgacatccgccgcaccggatccatcaaaaaaggcgaagaagtattgggcaacgaaacccgcgtcaaagtcatcaaaaacaaagtcgcccccccgttccgtcaggcagagtttgacatcctctacggagaaggcatcagttgggaaggcgaattgatcgacatcggcgtgaaaaacgacatcatcaacaaatccggcgcgtggtacagctacaacggcgcgaaaatcggtcagggcaaagacaacgtccgcgtctggctgaaggaaaatcccgaagtcgccaatgaaatcgacgcaaaaatccgcgccctcaacggcgtagaaatgcacatcaccgaagggacgcaggacgaaaccgacggcgaacgccccgaagaataa

SEQ ID NO: 64578 - DNA, 489 bp, Neisseria meningitidis; identical to SEQ ID NO: 58481

SEQ ID NO: 64579 - DNA, 1662 bp, Neisseria meningitidis
atgacagaatccatcacccgcgacagtatgcaatacgatgtcgtgattgtcggcgcaggcccgtcgggtttgtctgccgccatcaaactcaagcagcttgccgaacaaaacgggcgcgaaatcagcgtttgcgtggtggagaaaggttcggaggtgggggcgcattcgctggctggcgcagttatcgatccgattgcgctgaatgagttgatttccgactggaaagaaaaaggcgcaccgctgacacgcacagtaacgcaggacaaagtgttgttcctgaccgagaaaaaagcgttcaacctgccgattaccccgaatttcgacaatcacggcaactacatcgtcagcttgggcgaagtcgtgcgctggttggcggagcaggcggaaaatatgggcgtggaaatctatccgggctttgccgccgccgaagtgctgtatcacgaagacggttcggtcaaaggcattgcaaccggcaatatgggcattggcaaagacggcgagccgaccgattcattccaacccggcatggagctttgggcgcagcaaaccctgtttgccgaaggttgtcgcggttcgctttccaaacaaatcatcgaacgtttccaactcgaccaaaacagccagccgcaaacttacggcttgggcattaaagaagtttgggaagtgccgtccgaacagcatcagcccggtttggtggtgcacagcgcaggctggccgctggacagcaaaacctacggcggcgcgtttgtttaccatttcgacgacaacaaagtcgccgtcggcttcgtggtcggtttggactatcaaaatccttatctgtcgccgtttgaagagttccaacgtttcaaaacccatcccgaaatccgcaaaacctttgaaggcggccgccgcattgcttacggcgcgcgttcgctgattgaaggcggtttgcaaagtttgccgaagctctcgttcaaaggcggcgttttaatcggcgacgcggcaggcttcctcaatatgccgcgcatcaaaggcattcataccgcgatgaaatccgccatgctcgccgcagaagccgtgttccccttgttggaaaaccttgaagaagtggagggtttcgacagcggcaaagaggcggcggattatcagcaacgttttgaacaaagctggctgtatcaagagctttacgccgcgcgcaatgtccgtccgtcattcaaatggggcgtttacctcggctcaatctacaccggcatcgatcagatgattttcagaggcaaagccccgtggaccttgaaacatcacggcaaagacaacgagcagcttaaaaaagccgccgcgtgtaagccgattgattatccgaaacccgacggcgtgttgaccttcgaccgcttgagcagcgtcttccttgccaatctcgcgcacgaagaaaaccagcccgaccatttggtgctgaacaatccgcaaacgatgatagacgtgaactacaaagaatacgcctcgcccgaaacgcgctattgtccggccggcgtgtacgaaattgttgaagaaaacggcaatccgcgcctgcaaatcaacgcggcaaactgcgtgcactgcaaaacctgcgacatcaaagacccgacgcaaaacatcacttggatttgccccgaaggcgcgagcgggccgaattacggcgggatgtga

SEQ ID NO: 64580 - DNA, 543 bp, Neisseria meningitidis; identical to SEQ ID NO: 42127

SEQ ID NO: 64581 - DNA, 1929 bp, Neisseria meningitidis; identical to SEQ ID NO: 51502

SEQ ID NO: 64582 - DNA, 432 bp, Neisseria meningitidis
atggatatccaaaccatcctcgaaaaaaccctgcccggcctgggctacgaactggtcgattttgaactaaccgcgcaaggaacattgcgcgtgttcatcgacaaagaaggcggcattaccgtcgaagactgcgcaaccgtcagcaaccacttgagccgcgtcttcatggttgaagacatcgactacaaaaacctggaaatttccagccccggactcgaccgccccttgaaaaaagccgccgacttcgtgcgctttgccggtcagaatgccaaaatcaaaacccgcctgccgatagacggtcaaaaaaactttatcggtaaaatcgaaggctgcgaaaacgataccgttaccgtatccttcgacggcaaaaccgtacaaatcgaattgggcaacatcgacaaagcccgcctgcgccccgaattcaaattctaa

SEQ ID NO: 64583 - DNA, 324 bp, Neisseria meningitidis; identical to SEQ ID NO: 43376

SEQ ID NO: 64584 - DNA, 807 bp, Neisseria meningitidis
atgaatatgaaaaaatggattgccgccgcccttgcctgttccgcactcgcgctgtctgcctgcggcggtcagggcaaagatgccgccgcgcccgccgcaaatcccgacaaagtgtaccgcgtggctgccaacgccgagtttgccccctttgaatctttagactcgaaaggcaatgtcgaaggcttcgatgtggatttgatgaacgcgatggcgaaggcgggcaattttaaaatcgaattcaaacaccagccgtgggacagccttttccccgccttgaacaacggcgatgcggacgttgtgatgtcgggcgtaaccattaccgacgaccgcaaacagtctatggacttcagcgacccgtattttgaaatcacccaagtcgtcctcgttccgaaaggcaaaaaaatatcttcttccgacgatttgaaaaacatgaacaaagtcggcgtggtaaccggctacacgggcgatttctccgtttccaaactcttgggcaacgacaatccgaaaatcgcgcgctttgaaaacgttcccctgattatcaaagaactggaaaacggcggcttggattccgtagtcagcgacagcgcggtcatcgccaattatgtgaaaaacaatccggccaaagggatggacttcgttaccctgcccgacttcaccaccgaacactacggcatcgcggtacgcaaaggcgacgaagcaaccgtcaaaatgctgaacgatgcgttggaaaaagtacgcgaaagcggcgaatacgacaagatttacgccaaatattttgcaaaagaagacgaacaggccgcaaaataa

SEQ ID NO: 64585 - DNA, 1542 bp, Neisseria meningitidis; identical to SEQ ID NO: 50787

SEQ ID NO: 64586 - DNA, 417 bp, Neisseria meningitidis; identical to SEQ ID NO: 50630

SEQ ID NO: 64587 - DNA, 462 bp, Neisseria meningitidis; identical to SEQ ID NO: 50218

SEQ ID NO: 64588 - DNA, 1212 bp, Neisseria meningitidis
ttgcagaccgtcagaaccacattaacggcattgagaatttttggaatcaggcaaaacgcgtcttgcgaaaatatagtggattggcacgaacgtttccccgaattggaagcgcaactgggtgcgccgattgaggattacgcgccgccgaaacattggacgcgcaagcagctcagaagtatggggcgtgtgtcgtatttgtgcgtcgatgcggcggagcaggctttgacggatgccggtttgctcggagacgaaagcattactgacggacgcatgggcgttgcctgcggctcttccagcggcagcaccaaagacatcggcgatgtgggcgaattgttgctgaccggcacgtcgcgcaacttcagtgccaacacctatgtgcgtatgatgccgcacaccgccgccgccaatatcggcatctttttcgggctgaaaggacgcatcatcccgacatcgagcgcgtgttcgtccggcagccaaggcataggttatgcctacgaagccatcaaatacggtctgaccgatatgatgctggcgggcggaggcgaagaatttttcccgtccgaagtgtatgttttcgactcgctttatgccgccagccgccgcaacggcgaaccggaaaaaaccccgcgcccatacgacgcgaaccgcgacgggctggtcatcggcgaaggcgcggggattttcgtgctggaagaattggaacacgccaaacggcgcggtgcgataatttacgccgaactcgtcggctacggagccaacagcgatgcctaccatatttccacgccgcgccccgacgctcaaggcgcaatcctcgcctttcagacggcattgcaacacgcaaaccttgcgcccgaagacatcggctggattaacctgcacggcaccgggacgcaccacaacgacagtatggaaagccgtgccgttgcagcggttttcggcaacaatacgccctgcacgtccaccaagccgcaaaccggacacacgctgggtgcggcgggcgcaatcgaagccgcgttcgcgtggggcattgccgaccggcaaagcaatcccgaaggaaaacttccgccccagctttgggacgggcagaacgatccgaaccttcccgccatcaacctgaccggcagcggcagccgctgggaaaccgaaaaacgcattaccgccagctcgtcgtttgccttcggaggaagcaactgcgtcttaatcatcggatga

SEQ ID NO: 64589 - DNA, 282 bp, Neisseria meningitidis; identical to SEQ ID NO: 49862

SEQ ID NO: 64590 - DNA, 810 bp, Neisseria meningitidis; identical to SEQ ID NO: 51392

SEQ ID NO: 64591 - DNA, 444 bp, Neisseria meningitidis
atgagcgaagaactgcaacccgtattcagcatcgagcgactgtatgtcaaagacttgtctttggaagtgccgcacgcgccgcaaatctttttggaacagggcgagcctgaagtggatatgcgcgtttccaccggcagccaaaagctggaagacggctactacaacgtggacgttaccgtaaccgttaccgccaagctggataacgagcgcacgatgtttttgaacgaagtaacccaaagcggtattttccgtttggaaaacatccccgaagaagatgtgcagctgctgctgggcgtggcgtgtccgaacatcctcttcccttacgcgcgcgaagccgtttccggtacggtaacacgtgccggcttcccgcccgtcctgctcgcgccgattaattttgaggcgatttaccaacaacagcaggaagccgaagccgccggggcttga

SEQ ID NO: 64592 - DNA, 2430 bp, Neisseria meningitidis
atgcggttctcaaggtttgagcccaaaggtcgtctgaaacaacaaatacggtttcagacgacctttctttcaacaagccaccacggcaatcagacaaaagcagcacatcgccacatccatgtcggcagtacggccggcacaaccaccatccgcagcggcggggataccaccctcaaaggtgcgcagctcatcggcaaaggcatacaggcagatacgcgcaacctgcatatagaaagtgtacaagatactgaaacctctcagagcaaacagcaaaacggcaatgtccaagttactgtcggttacggattcagtgcaagcggcagttacagccaaagcaaagtcaaagcagaccatgcctccgtaaccgagcaaagcggtatttatgccggagaagacggctatcaaatcaaggtcggaaaccatacagacctcaagggcggtatcatcacctccggcaagagtgccgaagacaaaggaaaaaacctttttcagacggccacccttactgccagcgacattcaaaaccacagccgctacgaaggcagaagcttcggcataggcggcagtttcgacctgaacggcggctgggacggcacggttaccgacaaacaaggcaggcctaccgacaggataagcctggcagccggctacggcagcgacagcgacagtcaaagcagcatcacaaaaagcggcatcaacacccgcaacatacacatcaccgacgaagcgggacaacttgcccgaacaggcaggactgcaaaagaaaccgaagcgcgtatctacaccggcatcgacaccgaaactgcggatcaacacacaggccgtctgaaaaacagcttcgacaaagacgcggtcgccaaagagatcaacctgcaaagggaagtaacgaaggagttcggcagaaacgccgcccaagccgtagcggccgttgccgacaaactcggtaatacccaaagttacgaacggtatcaggaagcccgaaccctgctggaggccgaactgcaaaacacggacagcaaagccgaaaaagccgccatccgcgcatccctcggccaagtaaacgcctatcttgccgaaaaccaaagccgctacgacacctggaaagaaggcggcataggcaggagcatactgcacggggcggcaggcggactgacgaccggaagcctcggcggcatactggccggcagcggcacttcccttgctgcaccatatttggacaaagcggcggaaaacctcggtccggcgggcaaagcggcggtcaacgcactgggcggggcggtcatcggctatgcggcgggcgggaatgtcggtacggcggcagtgggggcgaatgtcgattggaacaataggcagctgcatccgaaagaaacacaaatccttaacaaactgtcaaaaggcaaatcggctgaagaacagtaccgcctaaaagccgctgcatgtgcattaacccggtgcgcggaaggcgtacctgacttcgaccctctttataaaggactaaaaaacctccaagatgccggtaaacagtttgtagcggaacaaaacgtattgatgcggacggatgcatttaaatatggaacatggaacagcctgaatgatatacgcagcagttacgaccgtgctgccaccaaaattaagggtgcgggcaatatgggattgggtgcaacgacttttgtcggttcgggtgctataggcggaggtctgtgcagtaccgggattggctgtgcggccggtggacttattgcaacggcaggtatgaccggtggttatacacaggcctcagaaggaagccggcaattgtttggcacttaccagtccgattttggtaaaaaagttgtcctatctttgggtacaccaatagaatacgaatcgccgttagtatctgatgcgaaaaatctagccgtatggggattggaaacgctgattacgcgcaaattgggaaacttggcaacgggtgtgaaaacttccttgactccgaaaactgctgacgtacagcgaaatatcctgtcccaatccgaagtcggtatcaagtggggcaaggggattgaaggacagggaatgccttgggaggattatgtcggtaagggcttgtctgccaatgcaaggttacctaaaaattttaaaacatttgattattttgatcgtggtacaggcacggcaatcagtgccaaaactctggatacgcaaactacggcacgcctgtccaaacccgaacagctttacagtaccatgaaagggtacatcgataagacggcaaatttcaaaagttatgaattatcagaagtaccgttaagggcagacatgatcaaacagcgcgaaatccatctggccatacccgcacaaactaataaggagcaaagattgcagttgcaacgtgtggtagagtatggcaaaagtcaaaacattacagtcaaaattacggagatcgaataa

SEQ ID NO: 64593 - DNA, 363 bp, Neisseria meningitidis; identical to SEQ ID NO: 37674

SEQ ID NO: 64594 - DNA, 324 bp, Neisseria meningitidis; identical to SEQ ID NO: 51944

SEQ ID NO: 64595 - DNA, 633 bp, Neisseria meningitidis
atggatttgcacaatattcgggaagattacagcaaacgggaattgtcggaaggcgattgcgccgacaatccgatcgagcagttcgagcggtggttggacgaggcggtacgcgcacaggtcaacgagccgacggcggtcaatgtggcggcggtcgacggacgcggcaggcctaacagccgtatggtgctgctgaaggaagttaattctgaaggttttgttttctttacgaattatcacagccgcaaggggcgttcgctggatgctcatccatttgcggcgatgacgtttttttggccggagctggagcgtcaggtgcgcgtggaagggcgtgttgaaaggctggcggagaagttgtcggacgaatattttgagagtcgcccgtatcagagccgtttgggtgcgtgggcaagtgcgcagagcgaggttattccgaacaaggcggtattggtggcaaaggcggcggcggttggactcaaacatcctctgcatgtgccgcgtccgccgcattggggcggctatattgtgattcccgatttgcttgagttctggcagggcagaccgagcaggctgcacgaccgcatccaataccgtttgctggatggtggctggatacgcgagcggctgtcgccttga

SEQ ID NO: 64596 - DNA, 891 bp, Neisseria meningitidis; identical to SEQ ID NO: 43530

SEQ ID NO: 64597 - DNA, 1296 bp, Neisseria meningitidis; identical to SEQ ID NO: 50261

SEQ ID NO: 64598 - DNA, 752 bp, Neisseria meningitidis; identical to SEQ ID NO: 45857

SEQ ID NO: 64599 - DNA, 462 bp, Neisseria meningitidis
atgaaaccgcaaaaatccctacgcgcccgcgcgatggacatcctctcgcgccaagaactcagccgcatcggtctgaaacgcaaacttgcaccgcacgccgaaagcgaagaggagttggaaaacgtgttaaacgaatttgccgaacgcaactggcagtcggatttgcgctatgccgaagcctatatccgcagcaaaagccgcaaacacggttcattgaggctgaaacaggctttggcgcaacagggcatagatgaagaaaccagctgcaacctgcttcccgaccgctcaagcgaaaaactggccgccatagccgtgttgcgtaaaaaattcaaacaccccgccgccgacctcaaagaaaaacaaaaacaggcgcgtttcctcgcctatcgcggattcgatgccgataccgttcagacggcattgaaacacgcttgggacgaaaattgggaagacggctgctga

SEQ ID NO: 64600 - DNA, 294 bp, Neisseria meningitidis; identical to SEQ ID NO: 42632

SEQ ID NO: 64601 - DNA, 1107 bp, Neisseria meningitidis
atgtctctttatccgatttacaatttttccgccggccctgccgtattgcccgaagccgtgttggaaacggcgcggcaggaaatgtcggattacaacggtacgggtttttccgtgatggaaatgagccaccgttcggatatgtttttgagcatcctgcatcatgccgaacaagacctgcggcagcttttgaacattccgtccaactataaaatcctgtttttacagggcggggcgaccacgcaattcaatatggcggttttgaatctggcacacggtttccgcactgccgacgcggtggtaacgggcaactggagccgtatcgcttatgaacagatgagccgtttgaccgatacggaaatccgtttggcggcgcatggcggcgagcagttcgactatctcgacctgccgcctgtggaaacgtgggatgttgcacccgattcggcgtttgtccattttgccgtcaatgaaacggtcaacgggctgcaataccgtgaagtgccgcgcctttcagaaggcatgccgccgctggtgtgcgatatgtccagcgagattttgtcgcgcgagtttgatgttgccgactacggactgatttacgcaggcgcacagaaaaacatcgggccggcaggggttacggtggtgattgtgcgtgaggatttgctcgagcgttgtccgaacgatattcccgatgtgttcaactaccgttcgcacatcaaccgcgacggtatgtacaacacgccgtcaacttacgcgatttatatgtcggggctggtgttccgctggctgcaggcgcagggcggtgtgaaaaaaattgaagcggtcaatcggctgaaggcgcaaaccttgtatgagacgatagatggcagcggcggtttctatatcaaccgtatccgtccgaatgcgcgttctaaaatgaatgtcgtgttccaaacgagggatgaggagcttgaccgccgttttgtgctggaagccgaattgcagggcttgtgcctgcttaagggctataaaaccgtcggcggtatgcgtgccagcatttataatgcgatgccgcttgaaggcgtgcgggctttggcggattttatgcgcgatttccaacggcgttacggttga

SEQ ID NO: 64602 - DNA, 918 bp, Neisseria meningitidis; identical to SEQ ID NO: 58934

SEQ ID NO: 64603 - DNA, 780 bp, Neisseria meningitidis; identical to SEQ ID NO: 58421

SEQ ID NO: 64604 - DNA, 285 bp, Neisseria meningitidis; identical to SEQ ID NO: 52145

SEQ ID NO: 64605 - DNA, 777 bp, Neisseria meningitidis
atgaccctcatccacccgaccgccgtcatcgaccccaaagccgaactcgactccggcgtcaaagtcggcgcgtacactgttatcggccccaacgtccaaatcggcgcgaataccgaaatcggtccgcacgccgtcatcaacggccacaccagcatcggcgaaaacaaccgcattttccaatttgccagcctcggcgaaatcccgcaggacaaaaaataccgcgacgagccgaccaagctgattatcggcaacggcaacaccatccgcgaattcaccacctttaatttaggcacggtaaccggcatcggcgaaacccgtatcggcgacgacaactggattatggcgtactgccacctcgcgcacgactgcgtcatcggcaaccacaccatcttcgccaacaacgcctcgcttgccggacacgttaccatcggcgactacgtcgttttgggcggctacacgctggttttccaattctgccacatcggcgactacgccatgaccgcgtttgccgcaggcgtacacaaagacgtgccgccctactttatggcatcgggctaccgcgccgaaccggcggggctcaacagcgaaggcatgcgccgcaacggttttaccgcagaacagatttccgccgtcaaagacgtgtacaaaaccctctaccatcgcggcattccgtttgaagaggccaaggcagacatcctccgccgcgccgaaacccaagccgagcttgccgtattccgagactttttcacacaatcgacgcgcggcatcatccgctga

SEQ ID NO: 64606 - DNA, 2262 bp, Neisseria meningitidis; identical to SEQ ID NO: 59247

SEQ ID NO: 64607 - DNA, 546 bp, Neisseria meningitidis; identical to SEQ ID NO: 50627

SEQ ID NO: 64608 - DNA, 1071 bp, Neisseria meningitidis
atgtatcggaggaaagggcggggcatcaagccgtggatgggtgcctgtgcggcgtttgccgccttggtctggctggttttcgcgctcggcgatactttgactccgtttgcggttgcggcggtgctggcgtatgtattggaccctttggtcgaatggttgcagaaaaagggtttgaaccgtgcatccgcttcgatgtctgtgatggtgttttccttgattttgttgttggcattattgttgattatcgtccctatgctggtcgggcagttcaacaatttggcatcgcgcctgccccaattaatcggttttatgcagaacacgctgctgccgtggttgaaaaatacaatcggcggatatgtggaaatcgatcaggcatctattattgcgtggcttcaggcgcatacgggagagttgagcaacgcgcttaaggcgtggtttcccgttttgatgaggcagggcggcaatattgtcagcagtatcggcaacctgctgctgcttcccttgctgctttactatttcctgctggattggcagcggtggtcgtgcggcattgccaaactggttccgaggcgttttgccggtgcttatacgcgcattacaggcaatttgaacgaggtattgggcgaatttttgcgcgggcagcttctggtaatgctgattatgggcttggtttacggtttgggattggtgctggtcgggctggattcggggtttgccatcggtatgcttgccggtattttggtgtttgtcccttatctcggggcgtttacgggattgctgcttgccaccgtcgccgccttgctccagttcggttcgtggaacggcatcctatcggtttgggcggtttttgccgtaggacagtttctcgaaagttttttcattacgccgaaaatcgtgggagaccgtatcgggctgtcgccgttttgggttatcttttcgctgatggcgttcgggcagctgatgggctttgtcggaatgttggcgggattgcctttggccgccgtaaccttggtcttgcttcgcgagggcgtgcagaaatattttgccggcagtttttaccggggcaggtag

SEQ ID NO: 64609 - DNA, 1554 bp, Neisseria meningitidis
atgaaccggacttatgccaatttctacgaaatgctcgccgccgcctgccgcaaaaacggcaacggcacggcagtgttcgacggcaaggaaaaaaccgcctaccgcgcgctcaagcaggaagccgaagccgttgcggcgtatctgcaaaatatcggcgtgaagttcggcgacacggtcgcgctggcggtttccaattccacagaatttattaccgcctatttcgccgtgtccgccatcggcgcggtcgccgtaccgatgaacacatttttgaaaaacagcgaatacgcgtatatcctgaacgactgcaaggcgcactgcctgttcgcctcggtcggcctgtcaaaagaattggcgggcttgaaggcgcaaacgcccgtcgaaaaaatcatttggacggacaaaagccgtccggccggcgaaatggcggaaggcgatgccttttttgaagacgtgcgccgcttccccgaaaaacccgacttgggccgccaaccccggataaatgatttggcacacatcatctacacctccggcacgacggggcatcccaaaggcgcgctaatcagttacgccaacctgttcgccaacctgaacggcatcgaacgcatctttaaaatctccaagcgcgaccgctttatcgttttcctgccgatgttccacagcttcacgctgacggctatggtgctgctgccgatttatatggcgtgttcgattattttggtcaaatccgttttccccttttccaacgttttgaaacaggcactgctcaaacgcgcgaccgtgtttttgggcgtgcccgcgatttacaccgcgatgagcaagacgaaaatcccttggtatttcagatggttcaaccgcatccgcctgtttatcagcggcggagcacctttggcggaacaaaccatcctcgatttcaaagccaagttcccccgcgccaaattgctggaaggctacggactgagcgaagcctcgcccgtcgtcgccgtcaatacgcccgagaggcaaaaagcccgcagcgtcggcatccccctgcccggtttggaagccaaagccgtcgatgaagaattggtcgaagtgccgcgcggcgaagtgggcgaactgatcgtcaggggcggttcggtgatgcggggctacctcaatatgcctgccgccaccgatgaaaccatcgtcaacggctggttgaaaacgggcgatttcgttaccatagacgaagacggctttatctttatcgtcgaccgcaaaaaagatttgattatttccaaaggtcaaaacgtctatccgcgcgaaatcgaagaagaaatctacaaactcgatgccgtcgaagccgccgccgtcatcggcgtgaaagaccgttatgccgacgaggaaatcgtcgccttcgtccaattgaaggaaggtatggatttgggcgagaacgaaatccgccgccacctgcgtaccgtgctggcaaatttcaaaatccccaaacaaatccactttaaagacgggctgccgcgcaacgctacgggcaaggtattgaaacgggtgttgaaggagcagtttgacggaaacaaatga

SEQ ID NO: 64610 - DNA, 2394 bp, Neisseria meningitidis; identical to SEQ ID NO: 63975

SEQ ID NO: 64611 - DNA, 948 bp, Neisseria meningitidis
atggaatttttcattatcttgctggcagccgtcgttgttttcggcttcaaatcctttgttgtcatcccacagcaggaagtccacgttgtcgaaaggctcgggcgtttccatcgcgccctgacggccggtttgaatattttgattccctttatcgaccgcgtcgcctaccgccattcgctgaaagaaatccctttagacgtacccagccaggtctgcatcacgcgcgacaatacgcagctgactgttgacggtatcatctatttccaagtaaccgaccccaaactcgcctcatacggttcgagcaactacattatggcgattacccagcttgcccaaacgacgctgcgttccgttatcgggcgtatggaattggacaaaacgtttgaagaacgcgacgaaatcaacagcaccgtcgtctccgccctcgatgaagccgccggagcttggggtgtgaaggttttgcgttatgagattaaagacttggttccgccgcaagaaatccttcgctcaatgcaggcgcaaattactgctgaacgcgaaaaacgcgcccgtatcgccgaatccgaaggtcgtaaaatcgaacaaatcaaccttgccagtggtcagcgcgaagccgaaatccaacaatccgaaggcgaggctcaggctgcggtcaatgcgtcaaatgccgagaaaatcgcccgcatcaaccgcgccaaaggtgaagcggaatccttgcgccttgttgccgaagccaatgccgaagccatccgtcaaattgccgccgcccttcaaacccaaggcggtgcggatgcggtcaatctgaagattgcggaacaatacgtcgccgcgttcaacaatcttgccaaagaaagcaatacgctgattatgcccgccaatgttgccgacatcggcagcctgatttctgccggtatgaaaattatcgacagcagcaaaaccgccaaataa

SEQ ID NO: 64612 - DNA, 2247 bp, Neisseria meningitidis
atgtgtaaaccgaattatggcggcattgtcttgttgcccttacttttggcatcttgtattggcggcaatttcggcgtgcagcctgttgtcgaatcaacgccgaccgcgtaccccgtcactttcaagtctaaggacgttcccacttcgccccctgccgggccttcggtagaaaccacgccggtcaaccggcccgccgtcggtgcggcaatgcggctgttgaggcggaatatcgcaacttctgataaggatggcaatgattttccaaatagcaaacaagcagaagaaaagctgtcgtttaaagaggaagatatcctgtttttatacggttccaaaaaagatcaacgtcagcagcttgaagataaaattcatcaacgcaatcctaatgtaaaaattaggacatcagaaaatgaaaataaaaaatatggttataactttgtagatgcaggttatgtatatgtaaagggagaagatgaaattgagaggacttcaaattacaagtattttactcaccggtttggttatgacggttttgtatattattccggagaacgtccttcccaatctttaccgagttcgggaacggtgcaatattccggcaactggcaatatatgaccgatgccatacgtcatcggacaggaaaagcaggagatcctagcgaagatttgggttatctcgtttattacggtcaaaatgtcggagcaacttcttatgctgcgactgccgacgaccgggagggggagggaaaacatcctgccgaatatacggttgatttcgacaaaaaaaccctgaatggcaagctgattaaaaatcagtatgtgcaaaagaaggacgatgaaaagaaaccgctgaccatttacaacattactgcaaaattggacggcaaccgctttaccggcagtgccaaggtcaatcctgatttagcgaaaaaccatgccaagaaggagcatttgtttttccataccgatgccgatcagcggcttgagggcggttttttcggcgataagggggaagagcttgccggacggtttatcagcaacgacaacagcgtattcggcgtattcgcaggcaaacaaaaaacagaggcagcaaacgcagcagatacaaaacttgccttgccgtctagaaaacacaccaaaatcttggattctctaaaaatttccgttgacgaggcaagtgataacaatgcccgccagtttgccatttcctctatgcccgatcttggtcatcccgacaaacttcttgtcgaagggcgtgaaattcctttggtaaaccaagaacaaaccatcgatcttgccgacggcaggaaaatgaccgtccgtgcttgttgcgattttctgacctatgtgaaactcggacggataaaaaccgaccgcccggcaagtaaatcaaaggcggaagataaaggggaggatgaagagggtgcaggcgttgataacggcgaagaagacgaaatcagcgatgaagacgaagtttccgaagatgaaagcgaagaagacgaagaaatcgtcgaagaagaaaccgaagaagacgaaaccgaagaagacgaagagggggaagctgaagaggaagaagccgaagaagcagaagaaactgaagaaaaatcgccggcagaaggcaacggcgattcaggcagcatcctgcctgccccggaagcccctaaaggcagggacatcgaccttttcctgaaaggtatccgcacggcggaagccgacattccgcaaaccggaaaagcacactataccggcacttgggaagcgcgtatcagcaaacccattcaatgggataataaggcggataaagcggcaaaagcagagtttaatgttgatttcggcgagaaatcgatttccggaacgctgacggagaaaaatggtgtagaagctgctttctatattgaaaaaggtgtgattgagggcaacggtttccacgcgacagcgcgcactcgggagaacggcatcgacctttccgggcagggttcgaccagatcgcagagcttcaaagccgacaatcttcttgtaacgggcggcttttacggcccgaaggcggaggaattgggcggtactattttcaataatgatgggaaatctcttagtataactgaaaatattgaaaatgaagttgaagttgaagctgaagctgaagttgaagttgaagctgatgttggcaaacagttagaacctgatgaagttaaacaccaattcggcgtggtatttggtgcgaagaaagataataaagaggtggaaaaatga

SEQ ID NO: 64613 - DNA, 354 bp, Neisseria meningitidis; identical to SEQ ID NO: 54883

SEQ ID NO: 64614 - DNA, 492 bp, Neisseria meningitidis; identical to SEQ ID NO: 60120

SEQ ID NO: 64615 - DNA, 171 bp, Neisseria meningitidis
atggcgcaatatatgtgcggcccctgcggctggatttacgatgaagaactcggcgacccagaacacggcatcccccctgggacaaagtttgaagacattcccgacgactggaaatgccccgaatgcggcgtaggtaaagaagatttctacctgttggatttcgtgatatag

SEQ ID NO: 64616 - DNA, 522 bp, Neisseria meningitidis
atgatttttgggaatccatataaatttgcaatttggattgaggagatagacgaatggagttcagaaaatttttccgaagggatttttacattttttgtgaatggagacatgattcctcaagaactaccaaatacatctacttttttaccaaattctttgcgtagcatacaacagtttatttcaataattgatgatctagagtgtcctaatttatttgacttagactattgtaatgcatatatttttttgaacgatgccgttcattatcgtaatatgaaattatcagaagaagaatcttattcatattggaaatactgtataacagaatatattgacaaccatgaagaaaaagacaatatttggtatttatccaataagcataatgaaaaattgctatatttaaataataatattattaaggaatccgtgtttaaaaaaggatatataaaaaatattatggaaaaaataattatgaaatataattatattttaaatggtaatgataaaatttatctcacataa

SEQ ID NO: 64617 - DNA, 486 bp, Neisseria meningitidis; identical to SEQ ID NO: 37367

SEQ ID NO: 64618 - DNA, 552 bp, Neisseria meningitidis; identical to SEQ ID NO: 43927

SEQ ID NO: 64619 - DNA, 816 bp, Neisseria meningitidis; identical to SEQ ID NO: 51788

SEQ ID NO: 64620 - DNA, 1518 bp, Neisseria meningitidis
atggtgatttccaacccccgcgaacttgaaaaactcaaagaccggattcccaatctgatcaacatcatccgcgtcgccatcgtttttccgctgatgattatgcacatcctcgggctggaaaccggcagccgtgcgaacctgcacgcttcgtggacggcgtgggcgttttatgtttggctcgccattgcctgctggctgattttcttttccatcatccatccgcattggcaatggcaggctttgagaataccgagtttcagcgcggtggcggacatcacgatgatcggcgtgctgacctacctgttcggcggcatcgactccggcttcggcatcctgattctgcccttcgtcgtctgctcctgcctgctcagctacgggcgctaccccctgctctattccagctacgccgccatcctgctgatattcaacgccattgccgacggcgatatcaatatgtatccgctgattttggatgcaaaaaccgtcaccaacaccttcgtcctcgtgaccggctcctatttcgtcgccatgattgcctcgctgtcggtcagatacatcgaccgtgccggcaaacttgcccatgaaaaccacgccgcctaccgccgcatcaggggcttgaaccaaatcgtgctcaaccgcgttcaggaagcggtcgtcatcatcaacgtcgagtatcagaccgtactgttcaataaaaaggcaaaagatctgctccccacgcttgaaatcggacagcataccgccctgttcgaccctattaccgttttatgggacaaggccccttcgcgtactttcgaacgcaatatcgacacgcccgccctgaccgcccgcatccgcgccgtgccgatgaacaaagagcagaacaagctgctcatcctctacatccgcccgcaaagcgaaattcaggcagaagccctgtccgtcaaacttgccgcgctcggacaactgaccgccaacatcgcccacgaaatccgcaaccccatgtccgccatccgccatgcaaacgacctgttgcgcgaaaatatggaagcgggggcggcagatccgttcaacgccaaattgtgcaaaatcatcgacggcaacgtctgccgtatcgacaaaatgctcgaagatatttcctcgctcaacaagcgcaacaaaaccgaacgcgaaaccatcggcctgataccgttttgggaagaattcaaacaagagttcctgctcggccatcccgatgccgccggctgcatccgcctagatatgcagggcaatcacctgactgcctatttcgatcctgcccacctgcggcaaattatgtggaacctcgccaacaacgcgtggcggcacagccgcaaacagcccggctcgatttccgtcaccatccgccccgcgcaaaaaaacaccgtctgtatcctctttgccgaccgcccgaagtgcaggaacacctgttcgaacccttttacaccacggcggaaaacggcaccggcctcgggctgtatgtcgcccgcgaactggcgcacgccaatttcggcgatttga

SEQ ID NO: 64621 - DNA, 204 bp, Neisseria meningitidis; identical to SEQ ID NO: 43658

SEQ ID NO: 64622 - DNA, 1479 bp, Neisseria meningitidis; identical to SEQ ID NO: 50550

SEQ ID NO: 64623 - DNA, 780 bp, Neisseria meningitidis
atgttttttgtcctttcccctgcgaagaaccttaatgaaaaagaccctgcccctgtcagcgagtttacccaacccgacctgctggcagagtccgacattctaatgcagcagttgcgcgagcttgcgccgcaacagattgccgaactgatgcacgtttccgacaaaattgccctcttaaacgcgcagcgcaatgcagaatggaacacgccgtttacgccggaaaacgccaaacaggcggtctttatgttcaacggcgatgtttacgaaggtatggatgcaaacacattggatattggacagatacgctatctgcaaaaccatgtccgcctgctgtccggtctgtacggtcttcttcgcccgttagacctgatacagccctatcgtttggaaatggggacggcatttgccaatttgcgcggcaagaatttgtatgagttttggggcgacatcattaccaaccttttaaatgacacgcttgcccaagcaggcagcaatacgcttgtcaaccttgcctcacaggaatatttcaagtccgtcaacacgaaaacacttcgggcgcggctgattaccccgatatttaaagacgaaaaaaacggtaaatataaaatcatcagtttctatgccaagcgtgcgcgtggattaatggtgcgctatgcggcagaacatcatattaccgaccctgaaatgctgaaaaattttaattacgaaggctacgcattcaatgatgcggcctcaaatgaaagcgaatgggtttttatgcgttcggaacaaataaagtga

SEQ ID NO: 64624 - DNA, 798 bp, Neisseria meningitidis; identical to SEQ ID NO: 38316

SEQ ID NO: 64625 - DNA, 225 bp, Neisseria meningitidis; identical to SEQ ID NO: 36622

SEQ ID NO: 64626 - DNA, 687 bp, Neisseria meningitidis
atggcagacctgaccttccaacaagccgtttccaacatcatcggtatgaaaggcgaaatcgtccgcgcattgggcgaaaccttcgtgatggtcggcttgtccaccacattcgccgtcgttttcggcacgttgctgggcgtgttgctcttcgtaacttccagccgccaactgcattacaacaagccggtgaacttcctgctcgacaacctcgtcaacctcatgcgcgccttccccttcgtcatcctgatgattgccatgatacccgcgacccgcaccatcgtcggcagcaccatcggtccggttgccgcctcgctggtgttgagcgtgtcgggattgttttattttgcccgactggtggaacaaaacctgcgcgaagtccccaaaggcgtgattgaagccgccgccgcgatgggtgcgcctccgattgccatcgtctgcaaagtcctcttgaatgaagcgcgcgcgggcatggtttccagcattaccgtgcttgccatcgggcttttgtcatacagcgcggcggcagggatgataggcggcggcggcttgggcgacctcgccatccgctacggctactaccgctaccaaaccgaagtcatcgtcttcatcgtcgccctcctcgtgctgctcgttatcctgattcaaagcaccggcaacgcgttggcgcggaaactcgacaaacgttga

SEQ ID NO: 64627 - DNA, 1815 bp, Neisseria meningitidis
atgagtgaacacgatatgcagaacacaaatccgccattaccgcctctgccgcccgaaatcacgcagctcctgtcggggctggacgcggcacaatgggcgtggctgtccggctacgcttgggcaaaagcaggaaacggggcatccgcagggctgcccgcgcttcagacggcattgccggcggcagaacctttttccgtaaccgtcctttccgcctcgcaaaccggcaatgcgaaatccgttgccgacaaagcgtcggacagcctggaagccgccggcatccaagtcaggcgcgccgaactgaaagactataaggcgaaaaacatcgccgacgaacgccgcctgctgctggttacgtccacccagggcgaaggcgaaccgccggaagaagccgtcgtgctgcacaaactgctgaacggcaaaaaagccccgaaattggacaaactccaatttgccgtactgggtttgggcgacagttcctatccgaatttctgccgggcgggcaaagatttcgaccggcgttttgaagaattgggcgcaaaacgcctgctcgaacgcgttgatgcggatttggactttgccgccgccgcagacggatggacaggccgcattgtcgcgcgcttaaaagaagaagccgcaaaaaaccgggcaacgcccgcgccgcagacaacgccccccgccggccttcagacggcaccggatggcaggtactgcaaggcagacccctttcccgccgccctgctggccaatcagaaaatcaccgcccgccaatccgataaagacgtgcgccacatcgaaatcgatttgagcggttcggatttgcactacctcccgggcgacgcgctcggcgtttggtttgacaacgatccggcactggtcagggaaatcctagacctgctcggcatcgatccggcaacggaaatacaggcgggcggaaaaaccctgccggttgcctccgcactgttatcccattttgaactcacgcaaaacacccccgcctttgtcaaaggctatgccccgttcgccgatgatgacgaactcgaccgtattgctgccgacaacgccgttttgcaaggctttgtgcaaagcacgccgattgccgatgtgctgcaccgcttcccggcaaaactgacggcggaacaattcgccggcctactgcgcccgcttgcgccgcgcctgtattcgatttcctcgtcgcaggcggaagtgggggacgaagtgcacctgaccgtcggcgcggtgcgtttcgaacacgaagggcgcgccagggcgggcggcgcatcgggtttccttgccgaccggctggaagaggacggcacggtgcgcgtgtttgtggaacgcaacgacggcttcaggctgcccgaagacagccgcaagccgattgtgatgatcggctcgggcaccggcgtcgcaccgttccgcgcattcgtccaacaacgtgccgcagaaaatgcggaaggcaaaaactggctgattttcggcaatccgcattttgcccgtgattttctctatcaaaccgaatggcagcagtttgccaaagacggtttcctgcacaggtacgatttcgcctggtcccgcgatcaggaagaaaaaatctatgtgcaggacaaaatccgcgaacaggcggaaggactttggcaatggctgcaggaaggcgcgcatatctatgtgtgcggcgatgcggcaaaaatggcaaaagacgtggaagccgccttgctggatgtgattatcggggcaggacatttggacgaagagggcgcagaagaatatttggatatgctgcgcgaagaaaaacgctatcagcgtgatgtttattga

SEQ ID NO: 64628 - DNA, 132 bp, Neisseria meningitidis; identical to SEQ ID NO: 38518

SEQ ID NO: 64629 - DNA, 3204 bp, Neisseria meningitidis; identical to SEQ ID NO: 51610

SEQ ID NO: 64630 - DNA, 126 bp, Neisseria meningitidis; identical to SEQ ID NO: 42720

SEQ ID NO: 64631 - DNA, 237 bp, Neisseria meningitidis; identical to SEQ ID NO: 37424

SEQ ID NO: 64632 - DNA, 219 bp, Neisseria meningitidis; identical to SEQ ID NO: 40879

SEQ ID NO: 64633 - DNA, 1155 bp, Neisseria meningitidis; identical to SEQ ID NO: 45755

SEQ ID NO: 64634 - DNA, 168 bp, Neisseria meningitidis; identical to SEQ ID NO: 43416

SEQ ID NO: 64635 - DNA, 279 bp, Neisseria meningitidis
atgccggccgtcgatctgatccgcgaacgcctgcagacgctcgatccgctggtgttggaaatcggcgatgagagccatctgcacaaaggacacgcgggcaataccggcggcggacattatgccgttttggtcgttagcggccgttttgaaggcgtaagccgcctgaaccgccagaaaacggtcaaatcgctgctcaaagatttgttttcaggcggcatgattcacgcgctcggcatccgggcggctacccctgacgagtatttccatacggcggactga

SEQ ID NO: 64636 - DNA, 309 bp, Neisseria meningitidis; identical to SEQ ID NO: 38004

SEQ ID NO: 64637 - DNA, 1104 bp, Neisseria meningitidis; identical to SEQ ID NO: 51720

SEQ ID NO: 64638 - DNA, 747 bp, Neisseria meningitidis
atggaaaccccgaccaacaccccgcaacgctccctgcgtcaaaacagtatctacctgctgcccaactcctttaccatcgccgcgctgttttccgcattttacgcaatcacccaatccatgcacggacgttatgaaaccgccgccatcgcggtattcatctctatgttgctggacggtatggacgggcgcgtggcgcggctgaccaacagccaaagcgcgttcggggagcagctcgacagccttgccgatatggtcagcttcggcgttgctcccgctctgattgcctacaaatggcagctttggcagttcggcaaaatcggttattccgtcgccttcatctactgcgcctgcgccgccctgcgcctcgccctgttcaacacactcatcggcaaggtggacaaacgctggtttatcggcgtgcccagtccgactgccgccgcgctgattgtcgggctgatttgggtcaaccacagcgtcgaaaaattccccgccgtccactggtgggcattgggcatcacactgtttgccggcctgtcgatgattgtccaaatccctttttggagttttaaagaaatcaacatccgcagacaagtcccctttgtcggaatgctgcttgccgtcttactgctgcttctggtcacttgggaaccgtcgctcgtcctcttcctgttctttctcggatacagcctgtccggctacattatggcggcacgccgattttggaaaaaatacagaaaggcggattaa

SEQ ID NO: 64639 - DNA, 1839 bp, Neisseria meningitidis
atgttacccgcccgtttcaccattttatctgtgctcgcggcagccctgcttgccgggcaggcgtatgccgccggcgcggcggatgcgaagccgccgaaggaagtcggaaaggttttcagaaagcagcagcgttacagcgaggaagaaatcaaaaacgaacgcgcacggcttgcggcagtgggcgagcgggttaatcagatatttacgttgctgggaggggaaaccgccttgcaaaaggggcaggcgggaacggctctggcaacctatatgctgatgttggaacgcacaaaatcccccgaagtcgccgaacgcgccttggaaatggccgtgtcgctgaacgcgtttgaacaggcggaaatgatttatcagaaatggcggcagattgagcctataccgggtgaggcgcaaaaacgggcggggtggctgcggaacgtgctgagggaaagaggaaatcagcatctggacggactggaagaagtgctggctcaggcggacgaaggacagaaccgcagggtgtttttattgttggcacaagccgccgtgcaacaggacgggttggcgcaaaaagcatcgaaagcggttcgccgcgcggcgttgaaatatgaacatctgcccgaagcggcggttgccgatgtggtgttcagcgtacagggacgcgaaaaggaaaaggcaatcggagctttgcagcgtttggcgaagctcgatacggaaatattgccccccactttaatgacgttgcgtctgactgcacgcaaatatcccgaaatactcgacggctttttcgagcagacagacacccaaaacctttcggccgtctggcaggaaatggaaattatgaatctggtttccctgcacaggttggatgatgcctatgcgcgtttgaacgtgctgttggaacgcaatccgaatgcagacctgtatattcaggcagcgatattggcggcaaaccgaaaagaaggtgcttccgttatcgacggctacgccgaaaaggcatacggcagggggacgggggaacagcggagcagggcggcgctaacggcggcgatgatgtatgccgaccgcagggattacgccaaagtcaggcagtggctgaaaaaagtatccgcgccggaatacctgttcgacaaaggtgtgctggcggctgcggcggctgtcgagttggacggcggcagggcggctttgcggcagatcggcagggtgcggaaacttcccgaacagcaggggcggtattttacggcagacaatttgtccaaaatacagatgctcgccctgtcgaagctgcccgacaaacgggaggctttgagggggttggacaagattatcgaaaaaccgcctgtcggcagcaatacagagttacaggcagaggcattggtacagcggtcagttgtttacgaccggcttggcaagcggaaaaaaatgatttcagatcttgaaagggcgttcaggcttgcacccgataacgctcagattatgaataatctgggctacagcctgctttccgattccaaacgtttggacgaaggcttcgccctgcttcagacggcataccaaatcaacccggacgataccgctgtcaacgacagcataggctgggcgtattacctgaaaggcgacgcggaaagcgcgctgccgtatctgcggtattcgtttgaaaacgaccccgagcccgaagttgccgcccatttgggcgaagtgttgtgggcattgggcgaacgcgatcaggcggttgacgtatggacgcaggcggcacaccttacgggagacaagaaaatatggcgggaaacgctcaaacgtcacggcatcgcattgccccaaccttcccgaaaacctcggaaataa

SEQ ID NO: 64640 - DNA, 2298 bp, Neisseria meningitidis
atgcaaccgcacgctccacataccgattccaatacgctgatgctcggtcaatacgccgaacgcgcctatctcgaatacgccatgagcgtggtcaaaggccgcgcgctgcctgaagtttcagacggccagaagcccgtgcagcggcgcattttgtttgccatgcgcgatatgggtttgacggcgggggcgaagccggtgaaatcggcgcgcgtggtcggcgagattttgggtaaataccacccgcacggcgacagttccgcctatgaggcgatggtgcggatggcgcaggattttaccttgcgctatcccttaatcgacggcatcggcaacttcggctcgcgcgacggcgacggggcggcggcgatgcgttacaccgaagcgcggctgacgccgattgcggaattgctgttgtccgaaatcaatcaggggacggtggattttgtgccgaactacgacggcgcgtttgacgaaccgctgcacctgcccgcccgcctgcctatggtgttgctcaacggcgcgtcaggcattgcggtgggcatggcgaccgagattccgtcgcacaatttgaacgaagtgacgcaggcggcgattgcgttgttgaaaaagccgacgctggaaaccgccgacctgatgcaatacattcccgcacctgattttgccggcggcggtcaaatcatcacgccggcggacgaattgcgccggatttatgaaaccggcaagggcagcgtgcgcgtgcgtgcgcgttatgaaatcgaaaaattggcgcgcggacaatggcgcgtcatcgtaaccgagctaccgccgaacgccaattccgccaaaatccttgccgaaatcgaagagcagaccaacccgaaaccgaaagcgggcaaaaagcagctcaaccaagaccagctcaataccaaaaagctgatgctggatttaatcgaccgcgtgcgcgacgagtccgacggcgaacatcccgtgcgactggtgttcgaaccgaaatccagccgcatcgataccgataccttcatcaacacgctgatggcgcaaacttcgctggaaggcaatgtgtccatgaacttggtgatgatggggctggacaaccgccccgcgcagaaaaacctgaaaacgattttgcaggaatggctggatttccgcaccgtaaccgtaacacgccgtctgaaattccgtttgaaccaagtggaaaaacggctgcacatcctcgaaggccgtctgaaagtctttctgcacatcgacgaagtgattaaagtcatccgcgaatcagatgacccgaaagccgatttgatggcggcgttcgggctgaccgaaatccaagccgaagacattttggaaatccgcctgcgccagttggcacgtttggaaggtttcaaactcgaaaaagaattgaacgaattgcgcgaagaacaaggccgtctgaacatccttttgggcgatgaaaacgaaaagcgcaagctgattatcaaagagatgcaggcggatatgaaacaatacggcgatgcacgccgcacgctggtggaagaggccggacgcgccgtgctgacacaaaccaccgccgacgaacccatcacactgattctgtcggaaaaaggctggatacgcagccgtgccggacacaatctcgatttgagccaaaccgcgttcaaagaaggcgaccgcctcaaacaaacccttgaaggcagaacggttttacccgtcgtcatcctcgattcattgggcagaacctatacactcgatgccgccgaaattcccggcggacgcggcgacggcgtgccggtttcatccttgatcgagttgcaaaacggcgcgaaacccgttgcgatgttgacaggattgccggaacaacattatttattatcaagcagcggcggctacggcttcatcgccaagttggctgatatggtcggacgcgtaaaagcgggcaaagtggtgatgaccacagacagtggcgaaaccgtcctgccgccgattgccgtctatgcctcctcgttcatcaaccccgactgcaaaatcattgccgccaccagtcaaaaccgcgccctcgccttccccatcggcgaattgaaaattatggcgaaaggcaaagggctgcaaatcatcggattaaacgccggcgaatcgctgacgcataccgccgtttcttccgagccggaaatcctgattgaaagcgaaggcaggcgcggcgcggcgcacaaagaccgcatccccgtctccctgcttgaggcaaaacgcggcaaaaaaggcaaactattacccatatcgggcagcctgaaacagctttcttcccccaaataa

SEQ ID NO: 64641 - DNA, 1887 bp, Neisseria meningitidis; identical to SEQ ID NO: 56077

SEQ ID NO: 64642 - DNA, 240 bp, Neisseria meningitidis; identical to SEQ ID NO: 43044

SEQ ID NO: 64643 - DNA, 798 bp, Neisseria meningitidis; identical to SEQ ID NO: 43358

SEQ ID NO: 64644 - DNA, 123 bp, Neisseria meningitidis; identical to SEQ ID NO: 50914

SEQ ID NO: 64645 - DNA, 2628 bp, Neisseria meningitidis
atgcccgccggccgactgccccgccgatgcccgatgatgacgaaatttacagactgtacgcggtcaaaccgtattcagccgccaacccacaggggatacatcttgaaaaacaacagacaaatcaaactgattgccgcctccgtcgcagttgccgcatcctttcaggcatatgctggactgggcggactgaatatccagtccaaccttgacgaacccttttccggcagcattaccgtaaccggcgaagaagccaaagccctgctaggcggcggcagcgttaccgtttccgaaaaaggcctgaccgccaaagtccacaagttgggcgacaaagccgtcattgccgtttcttccgaacaggcagtccgcgatcccgtcctggtgttccgcatcggcgcaggcgcacaggtacgcgaatacaccgccatcctcgatcctgtcggctactcgcccaaaaccaaatctgcactttcagacggcaagacacaccgcaaaaccgctccgacagcagagtcccaagaaaatcaaaacgccaaagccctccgcaaaaccgataaaaaagacagcgcgaacgcagccgtcaaaccggcgtacaacggcaaaacccataccgtccgcaaaggcgaaacggtcaaacagattgccgccgccatccgcccgaaacacctgacgctcgaacaggttgccgatgcgctgctgaaggcaaacccaaatgtttccgcacacggcagactgcgtgcgggcagcgtgcttcacattccgaatctgaacaggatcaaagcggaacaacccaaaccgcaaacggcgaaacccaaagccgaaaccgcatccatgccgtccgaaccgtccaaacaggcaacggtagagaaaccggttgaaaaacctgaagcaaaagttgccgcgcccgaagcaaaagcggaaaaaccggccgttcgacccgaacctgtacccgctgcaaatactgccgcatcggaaaccgctgccgaatccgccccccaagaagccgccgcttctgccatcgacacgccgaccgacgaaaccggtaacgccgtttccgaacctgtcgaacaggtttctgccgaagaagaaaccgaaagcggactgtttgacggtctgttcggcggttcgtacaccttgctgcttgccggcggaggcgcggcattgatcgccctgctgctgcttttgcgccttgcccaatccaaacgcgcgcgccgtaccgaagaatccgtccctgaggaagagcctgaccttgacgacgcggcagacgacggcatagaaatcacctttgccgaagtcgaaactccggcaacgcccgaacccgctccgaaaaacgatgtaaacgacacacttgccttagatggggaatctgaagaagagttatcggcaaaacaaacgttcgatgtcgaaaccgatacgccttccaaccgcatcgacttggatttcgacagcctggcagccgcgcaaaacggcattttatccggcgcacttacgcaggatgaagaaacccaaaaacgcgcggatgccgattggaacgccatcgaatccacagacagcgtgtacgagcccgagaccttcaacccgtacaaccctgtcgaaatcgtcatcgacacgcccgaaccggaatctgtcgcccaaactgccgaaaacaaaccggaaaccgtcgataccgatttctccgacaacctgccctcaaacaaccatatcggcacagaagaaacagcttccgcaaaacctgcctcaccctccggactggcaggcttcctgaaggcttcctcgcccgaaaccatcttggaaaaaacagttgccgaagtccaaacaccggaagagttgcacgatttcctgaaagtgtacgaaaccgatgccgtcgcggaaactgcgcctgaaacgcccgatttcaacgccgccgcagacgatttgtccgcattgcttcaacctgccgaagcaccgtccgttgaggaaaatgtaacggaaaccgttgccgaaacacccgatttcaacgccaccgcagacgatttgtccgcattacttcaaccttctgaagtacctgccgttgaggaaaatgcagcggaaatcgttgccgatgatttgtccgcactgttgcaacctgctgaagcaccggccgttgaggaaaatgtaacgaaaaccgttgccgaaatacctgatttcaacgccaccgcagacgatttgtccgcattacttcaaccttctgaagtacctgccgttgaggaaaatgcagcggaaaccgttgccgatgatttgtccgcactgttgcaacctgctgaagcaccggccgttgaggaaaatgcaacggaaatcactttggaaacgcctgattccaacacctctgaggcagacgctttgcccgacttcctgaaagacggcgaggaggaaacggtagattggagcatctacctctcggaagaaaatatcccaaataatgcagataccggtttcccttcggaatctgtaggttctgacgcgccttccgaagcgaaatacgaccttgccgaaatgtatctcgaaatcggcgaccgcgatgccgctgccgagacagtgcagaaattgctggaagaagcggaaggcgacgtactcaaacgtgcccaagcattggcgcaggaattgggtatttga

SEQ ID NO: 64646 - DNA, 1128 bp, Neisseria meningitidis; identical to SEQ ID NO: 51985

SEQ ID NO: 64647 - DNA, 810 bp, Neisseria meningitidis
atgcccgatttttcgatgtccaatttggccgttgccttttccattacgttggctgccggtttgtttaccgtattaggcagcggcttggtgatgttttccaaaacgcccaatccgcgcgtgttgtcgtttggtttggcatttgccggcggtgcgatggtgtatgtttccctgacggagattttcagtaagtccagcgaggcgttcgctgaaatttatgataaagaccacgcgtttgcggcggcgaccatggcatttttggcagggatgggcggcattgcgctgattgaccgtctggtgccgaacccgcatgaaactttagacgcgcaagacccgtcgtttcaagaaagcaaacgccgccatatcgcgcgagtcggcatgatggcggcgtttgcgattactgcgcacaatttccccgaaggcttggcgacgttttttgccacattggaaaatccagcagtcgggatgcctttggccttggcgattgccatccataatattccggagggcatttccatcgccgcgccggtttattttgccacccgcagccgtaagaaaacggtgtgggcgtgtctgctatccggcttggccgagccgttgggggcggctttgggctatttggttttgcagccgtttttgtcgcctgccgtgtttggttcggtattcggcgtgatagccggtgtgatggtgtttttggcgttggacgagctgctgccggctgccaaacgctattcagacggccatgaaaccgtttacggcctgacaatgggcatggcggtgattgccgtcagcttggtattgttccatttttaa

SEQ ID NO: 64648 - DNA, 963 bp, Neisseria meningitidis; identical to SEQ ID NO: 59038

SEQ ID NO: 64649 - DNA, 231 bp, Neisseria meningitidis
atggaaacattagacgaacgaataaaaaatttaggaaaatctcttgaagatagaattgacgctaatctaattgatgccacactagagtacattactttttcagaacgtttgctagcttttgaaacgctatgtgattatatagaagatttcaatatccagcttacggaaaaagaatcccaagaaatctcttttattaataaggaatttggaattgaaagtacatcagattaa

SEQ ID NO: 64650 - DNA, 480 bp, Neisseria meningitidis; identical to SEQ ID NO: 42689

SEQ ID NO: 64651 - DNA, 1914 bp, Neisseria meningitidis
atgaacccaagccccctactcgacctgattgacagcccgcaagatttgcgccgtctggacaaaaaacagctgccgcgccttgccggcgagttgcgcgcctttctgctggaatctgtcgggcagaccggcgggcatttcgccagcaatttgggcgcggtcgaactgaccatcgccctgcactatgtgtacgatacgcccgaagacaagctggtatgggatgtcggacaccaaagctatccgcacaaaatcctgacaggcaggaaaaaccagatgcacaccatgcgccaatacggcggtttagctggcttcccaaaacgcagcgagtcggaatacgacgcgttcggcgtagggcattcttccacatccatcggcgcggcgttgggcatggcggcggcagacaaactcttgggcagcgaccgccgcagcgtcgccatcatcggcgacggcgcgatgacggcggggcaggcgtttgaagccttgaattgcgcgggcgatatggatgtggatttgctggtcgtcctcaacgacaacgaaatgtcgatttcccccaacgttggcgcgctgccgaaatacctcgccagcaacgtcgtgcgcgatatgcacggcctgttgagtaccgtcaaagcgcaaacgggcaaggtattagacaaaatacccggcgcgatggagctcgcccaaaaagtcgaacacaaaatcaaaacccttgccgaagaagccgaacacgccaaacagtcgctgtctttgtttgaaaacttcggcttccgctacaccggccccgtggacggacacaacgtcgaaaatctggtggacgtattgaaagacttgcgcagccgcaaaggccctcaactgctgcacgtcatcaccaaaaagggcaacggctacaaactcgccgaaaacgatcccgtcaaataccacgccgtcgccaacctgcctaaagaaagcgcggcgcaaatgccgtctgaaaaagaacccaagcccgccgccaaaccgacctatacccaagtgttcggcaaatggctgtgcgaccgggcggcggcagattcccgactggttgcgattacccccgccatgcgcgagggcagcggcttggttgagtttgaacaacgattccccgaccgctatttcgatgtcggcatcgccgagcagcacgccgttacctttgccggcggtttggcttgcgaagggatgaagcccgtcgtggcgatttattccacctttttacaacgcgcctacgaccaactggtgcacgacatcgccctgcaaaacctgcccgttttgtttgccgtcgaccgcgcgggcatcgtcggcgcggacggcccgacccatgccggtttgtacgatttaagctttttgcgctgcattccgaatatgattgtcgccgcgccgagcgatgaaaatgaatgccgcctgctgctttcgacctgctatcaggcagacgcgcccgccgccgtccgctatccgcgcggcacgggtacgggcgtgccggtttcagacggcatggaaaccgtggaaatcggcaagggcattatccgccgcgaaggtgggaaaaccgcattcattgccttcggcagtatggtcgcccccgcattggcggtcgccggaaaactgaacgccaccgtcgccgatatgcgcttcgtcaaaccgatagacgaagagttgattgtccgccttgcccgaagccacgaccgcatcgttacccttgaagaaaacgccgaacagggcggcgcaggcggcgcggtgctggaagtattggcgaaacacggcatctgcaaacccgttttgcttttgggcgttgccgataccgtaaccggacacggcgatccgaaaaaacttttagacgatttgggcttgagtgccgaagcggtggaacggcgtgtgcgcgcgtggctgtcggatcgggatgcggcaaattaa

SEQ ID NO: 64652 - DNA, 2286 bp, Neisseria meningitidis
atgaataccaaactgacaaaaatcatttctggtctctttgtcgcaaccgccgcctttcagacagcatcggcaggaaacattacagacatcaaagtttcctccctgcccaacaaacagaaaatcgtcaaagtcagctttgacaaagagattgtcaacccgaccggcttcgtaacctcctcaccggcccgcatcgccttggactttgaacaaaccggcatttccatggatcaacaggtactcgaatatgccgatcccctgttgagcaaaatcagtgccgcacaaaacagcagccgtgcgcgtctggttctgaatctgaacaaaccgggccaatacaataccgaagtacgcgggaacaaagtttggatattcattaacgaatcggacgataccgtgtccgcccccgcacgccccgccgtaaaagccgcgcctgccgcaccggcaaaacaacaggctgccgcaccgtctaccaagtccgcagtatccgtatccaaaccctttaccccggcaaaacaacaggctgccgcaccgtttaccgagtccgtagtatccgtatccgcaccgttcagcccggaaaaacaacaggcggcggcatcagcaaaacaacagacggcagcaccagcaaaacaacaggcggcagcaccagcaaaacaaaccaatatcgatttccgcaaagacggcaaaaatgccggcattatcgaattggctgcattgggctttgccgggcagcccgacatcagccaacagcacgaccacatcatcgttacgctgaaaaaccataccctgccgaccacgctccaacgcagtttggatgtggcagactttaaaacaccggttcaaaaggttacgctgaaacgcctcaataacgacacccagctgattatcacaacagccggcaactgggaactcgtcaacaaatccgccgcgcccggatactttaccttccaagtcctgccgaaaaaacaaaacctcgagtcaggcggcgtgaacaatgcgcccaaaaccttcacaggccggaaaatctcccttgacttccaagatgtcgaaatccgcaccatcctgcagattttggcaaaagaatccgggatgaacattgttgccagcgactccgtcaacggcaaaatgaccctctccctcaaagacgtaccttgggatcaggctttggatttggttatgcaggcacgcaacctcgatatgcgccaacaagggaacatcgtcaacatcgcgccccgcgacgagctgcttgccaaagacaaagccttcttacaggcggaaaaagacattgccgatctgggcgcgctgtattcacaaaacttccaattgaaatacaaaaatgtggaagaattccgcagcatcctgcgtttggacaatgccgacacaaccggaaaccgcaatacgcttgtcagcggcaggggcagcgtgctgatcgatcccgccaccaataccctgattgttaccgatacccgcagcgtcatcgaaaaattccgcaaactgattgacgaattggacgtacccgcgcaacaagtgatgattgaggcgcgtatcgtcgaagcggcagacggcttctcgcgcgatttgggcgttaaattcggcgcgacaggcaagaaaaagctgaaaaatgatacaagcgcattcggctggggggtaaactccggcttcggcggcgacgataaatggggggccgaaaccaaaatcaacctgccgattaccgctgccgcaaacagcatttcgctggtgcgcgcgatttcctccggtgccttgaatttggaattgtccgcatccgaatcgctttcaaaaaccaaaacgcttgccaatccgcgcgtgctgacccaaaaccgcaaagaggccaaaatcgaatccggttacgaaattcctttcaccgtaacctcaatcgcgaacggcggcagcagcacgaacacggaactcaaaaaagccgtcttggggctgaccgttacgccgaacatcacgcccgacggccaaatcattatgaccgtcaaaatcaacaaggactcgcctgcgcaatgtgcctccggtaatcagacgatcctgtgtatttcgaccaaaaacctgaatacgcaggctatggttgaaaacggcggcacattgattgtcggcggtatttatgaagaagacaacggcaatacgctgaccaaagtccccctgttgggcgacatccccgttatcggcaacctctttaaaacacgcgggaaaaaaaccgaccgccgcgaactgctgattttcattaccccgaggattatgggtacggccggcaacagcctgcgctattga

SEQ ID NO: 64653 - DNA, 264 bp, Neisseria meningitidis; identical to SEQ ID NO: 37542

SEQ ID NO: 64654 - DNA, 483 bp, Neisseria meningitidis; identical to SEQ ID NO: 51496

SEQ ID NO: 64655 - DNA, 1305 bp, Neisseria meningitidis
atgaagccgtttgccgaaaatatcccccacagccttcgcggcaactgctgcgacgaagccctgccgccgcatacggtagattgtccggaatgcggctgccgcgcggatgtaccccggttggacagtggagaagcggcgttctgtccccgttgcggacacaaactcttcagggtgggcaggcatcctttttccgccccgcccgcctatgcggcggcttcgctgattttaatggcgtttgcttacggtatgacgtatatcgaggtcgggataccgggtgcggcatccgtcctttcgctgcccgagatgatgcgcctgatggtgtttcaggattatggttttttggccgaagtgatgtttgtgctgactttcggcgcgccggttctgtttctgctgctgtgcctgtatgtctatgccgcgctgatacggaaacaggcgtatcctgcgctgcgtttggcaacgcgtgtgatggtgcgcttgagacaggcgatgatggtggatgtgttttttgtttccactttggtggcgtatatcaagctctcgtctgtggcagaggttcgcttcgggccggcgttttatctgatgttcgcgctgtcagttatgctgattcggacttcggtatcggttccccagcattgggtgtattttcaaatcgggcggctgacgggggataatgcggttcagacggcatcggaaggtaaaacctgttgcagccgctgcctgtatttccgcgacagtgccgaatccccctgcggcgtgtgcggtgcggaactgtaccgccgacggccgaaaagtctgagtatttcgtcggcgtttctgacggcggcggttattttgtatttccctgccaatatcctgccgattatgatttcgtccaatcctgccgccacggaggtcaataccatccttaacggcatcgcttatatgtgggacgagggcgacaggctgattgcggcggttattttcagcgcgagtattttggtgccggtactgaagattgcggcaatgtcggttttgattgcgtccgcccgcttcgctttgccaacgggtgcaaagaaattgtcgcacctctaccgcatcaccgaagcggtcggccgctggtcgatgattgatatttttgtgattattattttgatgtgttcgttccacacttatgccgcgcgcgtcattccgggcagtgcggcagtctatttctgcctggtcgtgattctgacgatgctgtccgcctattatttcgacccgcgcctgctttgggacaaacgcgcttcagacggcattgctttcaacgaaacggaaaaacatgactga

SEQ ID NO: 64656 - DNA, 1674 bp, Neisseria meningitidis; identical to SEQ ID NO: 51209

SEQ ID NO: 64657 - DNA, 919 bp, Neisseria meningitidis
ttggcaactgatcgagcaatacctgaaccgtcaaaggacccgttacctctgagaccaccgcggccgtcccgcctatcccctgttgtccatgttcaaagccgtcctgctcggacaatggcacagtctctccgatcccgaactcgaacacagcctcattactcgcatcgatttcaacctgttttgtcgttttgacgaactgagcatccccgattacagcaccttatgccgctaccgtaactggctggcgcaagacaacaccctgtccgaactgttggaactgattaactgccaactgaccgaaaaaggcttaaaagtagagaaagcatccgccgccgtcattgacgccaccattattcagaccgctggcagcaaacagcgtcaggccatagaagttgacgaagaaggacaaatcagcggccaaaccacaccgagtaaggacagcgatgcccgttggatcaagaaaaacggcctctacaaactcggttacaaacaacatacccgtaccgatgcggaaggctatatcgagaaactgcacatcacccccgccaatgcccatgagtgcaaacacctgtcgccgttgttggaagggttacccgaaggtacgaccgtctatgccgataaaggctatgacagtgcggaaaaccggcaacatctggaagaacatcagttgttggacggcattatgagcaaagcctgccgcaaccgtccgctggcggaaacgcaaaccaaacgtaaccgatatttgtcgaagccccgttatgtggtcgaacaaagcttcggtacgctgcaccgtaaattccgctatgcgcgggcagcctatttcgggctgctcaaagtgagtgcgcaaagccatctgaaagcgatgtgtttgaacctgttgaaagccgccaacaggctaagtgcgcccgctgccgcctaa

SEQ ID NO: 64658 - DNA, 1701 bp, Neisseria meningitidis
atgtccgtcaaaatccaaacccgctccgtcaataccgacgtttttaatcatttgctcaccgccggtgccgatcctttaatcgcccggctttgtgcttcgcgcggtgtgcaaagtcctgccgaattggacgacaaactcgcttccctcctgccttatcaatcgctgacgaattgcgaagccgccgcccgccgtttggcggatgcggttgagcgtcaggaaaaaatcctgattgtcgccgactatgatgccgacggcgcgacggcgtgtgccgtcggtttggacggtttggcggcgatgggcgcgaaagtggatttcctcgtgcccaaccgctttgaacacggctacggcttaacgcccgagctggctgaaatcgcggcagagcaaggtgtggatttgctgattacggttgataacggtatcgccagcatcgcaggcgtggcgagggcgcaggaattgggtttggatgtcatcgttaccgaccaccatctgcctgccgagaccgtgcccgactgcatcatcgtcaatccgaaccaaaaaggctgcggttttccaagcaaaagcttggcgggcgtgggcgtgattttttatgtattgatggcgttgcgtgccgaattgcgccgccgcaattatttttcagacggcatcaaagagccgaatctgggcgaacttttggatttggtcgcactcggcacggttgccgatgtcgtccctctcgaccacaacaaccgcatcctcgtgtcgcaaggtttgaaacggatgcgctccggcaaaatgcgccccggtatccgcgccttgtttgaagtggcgcggcgcgattggcgcaaggcgcagccgtttgatatgggttttgcgttgggcccgcgcatcaacgccgccggacggctggacgatatgtcggtcggtattgcctgcctgttggcgcgagatgataccgaggcgcaggaactggcggcgcagttaaacaacctcaatatcgagcgtcgcgaaatcgagcagtctatgctgcaagacgcgctgaatacttttcctgaaaccctgccttcaggtcagacgactttggcggtgtatcgcgacgacttccatcaaggcgtggtcggcatcgttgccagccgcctcaaagaccgtttttatcgtccgaccatcgtgtttgctccggcggacaacggcgaagtgcgcggttcgggacgctccattcccaatttgcacctgcgcgatgctttggacttggtgtccaaacgccatcccgatttgattttgaaattcggcggacacgcaatggcggcgggcttgagcatacttgaacacaatattcccgcgtttcagacggcctttgaagaagccgtgcgcgagatggtgcgcgaagacgatttgtcgcaaaccttcatcaccgacggcagcctgaaagcctgcgacatcacgctggaacaggctcaaaaccttgcccgacacgtttgggggcagggcttcgcgccgccaagctttaccgacgagttccacgtcgtccgccagcagcctttgggcgcggagggtaaacacaaaaaagcgtggctgcagaaagacggctgcgaatttgaagccatgttttggcgttgcagcgaagacatccccgaatacatccgcacggtttaccgccccgttgccaacgaatggcgcaacaatctcgaattgcagctttatatcgactactgggaagcggcgtag

SEQ ID NO: 64659 - DNA, 234 bp, Neisseria meningitidis; identical to SEQ ID NO: 42120

SEQ ID NO: 64660 - DNA, 624 bp, Neisseria meningitidis; identical to SEQ ID NO: 42844

SEQ ID NO: 64661 - DNA, 453 bp, Neisseria meningitidis; identical to SEQ ID NO: 42252

SEQ ID NO: 64662 - DNA, 651 bp, Neisseria meningitidis
atgcccgtgacccgccccgccaaaatcaatacttacacacgcatcatcgacgccagccttgcgcttttcaacgaggaaggcgagcgcaacatcagcaccaaccatattgccgcccacttgggcatcagtccgggcaatctctattaccacttccgcaacaaagacgaaatcatcgtccaactgttcaaacgttacagcgaagccctgctggaatacctcaacgaagccgtgttgccgtctgatgtggaagactccatcaattatatggcgggcatttacgacgtgatgtgggaataccgcttcctctttagcgatgtaaacaccctgcttgcccgcagtgccgaattattgggcgaacacaacaccttcacccaagccaaagtctccccgctcttggtcaacctgctgacccagctcaacggtctgaacatcatccaagccgaccaaaccgccatgaacgatctcgccgtcaatatgtggatggtcacgaaatactggttcgacttcgacagctccctgcgcggccgcaccaagctgaccgaagactccaaagcacgcggcatccgccgcaccttaagcctccttcgtccttatcttttgcccgaacaccgcaagaaatacgaccggaaaatcggcaacggcaacccgtaa

SEQ ID NO: 64663 - DNA, 411 bp, Neisseria meningitidis
gtgaaactgctggcgaataactggcaaccgattgccattatcgcgcttgtcggcacgggcttggctgtgtcgcaccatcaaggctacaagtcggcatttgcgaagcagcaggcggtcatcgacaagatggagcgcgacaaggcgcaagccctgctgttgtcggctcaaaactatgcgcgcgaactggaacaggcgcgtgcggaagcgaaaaaatatgaagtcaaggcgcacgctgtcggcatggctttggcgaaaaaacaggcggaagtcagccgtctgaaaacggaaaataaaaaggaaatcgaaaatgtccttactcaagaccgtaaaaatgcaagcggcggttgcattgacggctttggctctcacggcctgcagctctacaaccgcgccctcggctacggaaattaa

SEQ ID NO: 64664 - DNA, 1392 bp, Neisseria meningitidis; identical to SEQ ID NO: 44003

SEQ ID NO: 64665 - DNA, 1248 bp, Neisseria meningitidis; identical to SEQ ID NO: 51657

SEQ ID NO: 64666 - DNA, 465 bp, Neisseria meningitidis; identical to SEQ ID NO: 36919

SEQ ID NO: 64667 - DNA, 1335 bp, Neisseria meningitidis; identical to SEQ ID NO: 50513

SEQ ID NO: 64668 - DNA, 1209 bp, Neisseria meningitidis
ttgttcgcaaagaaagaaaaacgctttatctttgaaggcaggcattccgcctccgacaaactggtcaacggcgaagtatccgcgtttaccgaagaagaggcgcgcaaaaaactggcaaaacgcggcatccgcccgttgcagattacccgtgtgaaaacaagctccaagcgcaaaatcacacaagaagacatcaccgttttcacccgccagctgtccacgatgattaaagcgggcctgccgctgatgcaggcatttgaaatcgtggcgcgcggacacggcaacccgtctatgacggaaatgctgatggaaatccgaggcgaagtggaacagggcagctcgttgagccgcgcattctcaaaccacccgaaatatttcgaccgcttctactgcaacctggttgcggcgggcgaaacgggcggcgtattggaaagcctgctggacaaattggcaatttacaaagaaaaaacccaggccatccgcaaaaaggtaaaaaccgcgctgacctatccggtatccgtcatcgccgtcgccatcggtttggtattcgtgatgatgattttcgtactgcccgcctttaaagaagtttacgccaatatgggcgcggagcttcccgcactgacccaaacagtgatggatatgtccgactttttcgtctcatacggctggatggtgctgatcgcactgggctttgccatatacggcttccttaaattgaaggcgcgttcgattaaaatccaacggcgtatggatgccatactgctgcgtatgccgattttcggagacattgtccgcaaagggacgattgcccgctggggcaggacgacggcgacgctgattgcggcaggcgtgcctttggtcgatgtattggactccactgccggcgcggcgggcaatttaatctatgaagaagccacccgggaaatccgtacgcgcgtcatccaaggtttgtctatgacttcggggatgcgtgcgacggaactgttccccaatatgatgttgcagatgtcttccatcggcgaggaatcgggttctttggacgatatgctcaacaaagccgccgaattttacgaagacgaggtggacaatgcggtcggcaggctgtccgctatgatggagccgatcattatcgtgattttaggcttggtcatcggcacgcttctggtcgccatgtatctgccgctgtttaatttgggcaacgtggtcgcctga

SEQ ID NO: 64669 - DNA, 516 bp, Neisseria meningitidis; identical to SEQ ID NO: 38602

SEQ ID NO: 64670 - DNA, 1302 bp, Neisseria meningitidis
atgaccgaatccctccgcctccctgccgcctcgctcaaaccttccaccgtcgccctgcccggctccaaaagcatcagcaaccgcaccctgctgctcgccgccttgtccgacaatacttgtgaaatccattccctgctcaaatccgacgataccgaccgtatgctcgaagcactcgataaactcggcgttgaaatcgaatatcttgccgaagaccgtctgaaagtgcacggcacaggcggacgcttccccaaccgcactgccgatttgtttttgggcaacgcgggcacggcgttccgtccgctgactgccgcacttgccgttttgggcggcgattatcatctgcacggcgtgcctcgtatgcacgaacgccccatcggcgatttggccgatgcgctgcggattgccggcgccgatgtcgaatatctcggcaaggaacactatccgccgcttcatatcggcaaacgtcaagacaacggcgaacgcgtgattccgattaaaggcaatgtgtccagccagtttctgaccgcccttttaatggcgttgccgctgaccgggcaggcgtttgaaatccgtatggtcggcgaattgatttccaagccctatatcgacattactttaaaactgatggcgcaattcggcgtacaggttgccaatgaaaactaccgcgtcttcaaaattcccgccgatgcgcactaccacgcgcccgaacacttgcacgtcgaaggcgatgcctccagcgcgtcctacttcctcgcagccggtttgattgccgccacgcccgtctgtgttatcggtatcggcgcaaacagcatacagggcgatgtcgcctttgcccgcgagctggaaaaaatcggggcggacgtggtttggggcgaaaacttcgtcgaagtttcacgcccgaaggaacgtgccgtccaatcctttgatttggatgcgaaccatatccccgatgccgccatgaccctcgccatcgtcgcgcttgctacagggcaaacctgcacgctgcgcaacatcggttcgtggcgcgtcaaagaaaccgaccgcatcgccgcgatggcaaacgagttgcgcaaactcggggcaaaagtcgtcgaagaagccgaagcaattcacatcaccccgcccgaaacgccgacacccgacgccgtcatcgacacgtacgacgaccaccgcatggcgatgtgtttctcgctggtttcgctgttgggcgtacccgtcgtcatcaacgatccgaaatgcacccacaaaaccttcccgacttatttcgacgtgttctcatcgctgaccgaaacagcggaataa

SEQ ID NO: 64671 - DNA, 1782 bp, Neisseria meningitidis
atgccctatttcgccctgtttgacgatgccgtaagcggccgcgcaaaacgctatcaaaattatgtagaaagccgttttttccgtcccgaagaactcgatgctttggacggcgcgctgcaaaagggctggcaaaaagggctgcattcggtgttgtttgcagactacgaattcggtttgccgctgacgggggttgagtccgagcgcggcggcaaccttgccctgcactggtttgccgactgcaccgacaccgatgccgcaagctggcttgcccgacactcagacgaccttcccgccggcatttccacgccgcaatcctccgtatccgaaaccgattacctcgaccgcatccgccaaatccacgaagccatccggcgcggcgacacctatcaaatcaactacaccactcgcctgcacctgcaagcctacggcaatcccgtcagcctctaccgccgcctgcgccagcccgtcccctatgccgtcttgtcccacctgcccgatgcggaggggcaatccgcgtggacgctgtgtttctcgcccgaactcttcctcaaaatcggttcagacggcaccatcagcaccgaaccgatgaaaggcaccgcgccgattttgggcgacggacaagacgaacgccgcgccgccgagttgcaagccgacccgaaaaaccgcgccgaaaacgtgatgattgtcgatttgctgcgcaacgacttcggcaagatcgcccaaaccggcaaagtatgcgtgcccgaaccgtttaaagtgtcgcgtttcggcagcgtctggcagatgaccagcaccatccaagcccaagccctgccggacacctcgttcgccgacatcctccgcgccgccttcccctgcggcagcatcaccggcgcgcccaaaaaaatgagtatgcagattatcgaatcgctcgaaaccgaagcgcgtgggctttatacgggcagcatcggctacctgaaaccttgcgcgggcggcttggggtttgaaggcgcgttcaacgtcgtcatccgcaccttatcgctcacgccgctttcagacggcatttatcaaggcgtgtacggtgtcggttccggcatcgtcatcgacagcgaccccgccgccgaatatcgcgaatgcggctggaaagcccgtttcctcaacgaattgcgccccgacttcggcatttttgaaaccctgcgcgcggaaaacggacgctgcaccctgctcgaccgccacctatgccgtctgaaaacctccgcccaagccctcaacctgcccctgcccgacggctgcgaaaatcaaatcaaacaatacattgccgacttgcccgatggcgcgttccgcgtcaaagccctgctcgcttcagacggcatcagcctgtcccgcgccgttttaaaccgtctgaccgacaaacaacgcgtcatcatttcgccgaccatcctgcccgcacaaaactacctgcgccgcttcaaaaccacctgccgcaccgtcttcgaccaagcgtggcaaaccgccgaaacacaaggcgcgttcgacagcctgtttttcaattcagacggcatcctgctcgaaggcggcagaagcaacgtgttcgtcaaacatcgcggacaatggcttacgccctctttagatttggacattttaaacggcataatgcgccaagccgtattggacgaaccgcaaaaatatttgcaaacaaatcaagtaatcgaaacacacatcacacaaaaaacactgcaagaagccgaagaaatccgcctctccaacgccttgcgcggcgtatttgccgccgcccttgcctga

SEQ ID NO: 64672 - DNA, 378 bp, Neisseria meningitidis; identical to SEQ ID NO: 36713

SEQ ID NO: 64673 - DNA, 2043 bp, Neisseria meningitidis
atgatgtcgcccgaaacccagaaacagctcaaaatcaccgatgtttccgccaagaagctcgacaaactcaacctccataccgcgtgggatttggtgttgcacctgccgctgcgttacgaggacgagacgcacattatgccgattaaggacgcgccgattggcgtgccgtgccaggtcgagggcgaggttatccatcaggaagtaacgttcaaaccgcgcaagcagttgattgtccaaatcgccgacggttccggcagcgtcctttttctgcgcttcatccacttttacgccagccatcagaaacagacggcggtcggcaaacgcatccgcgccgtgggcgaaatcaaacacggcttttacggcgacgagatgattcatcccaaaatccgcgatgccgagggcggcggtttggcggaaagcctcacgccggtttacccgaccgtaaacggtttgaaccagcccactttgcgccgtattattcagacggcgttggacgttacgccgctgcacgacacgctgcccgatgccctgctgtgccgtctgaagctgccacacctcgccgaaagcctgcgtcttttgcatttgccgccgccgagtttcacgattcatcagctttcagacggcacgctgcctgcatggcaacggctcaaattcgatgaacttttggcgcaacagctttcgatgcgcttggcgcgacagaagcgtatcggcggcacggcggcggcattgggcggcgacggcacattgacccaagccctgcgccaagccctgccgtttgccctgaccgatgcgcaagaaaaagttgtttccgaaatctgccgcgatatggcgcaaacctacccgatgcaccgcctgctgcagggcgatgtcggcagcggcaaaaccattgtggctgctttgtctgctttgacggctatcgaatccggtgcgcaggtggctgtaatggcgcccactgaaatccttgccgaacagcattttattaaatttaaacaatggctcgaacctttgggcattgaagttgtccgcctttttggcagtttgcgtaaaaaagccaaagacgaagccaaagccaaactggctgacggcagcgtcaaaatcgccgtcggcacgcacgccctgttttcagacggcgtggcgtttcacaatttgggcttgaccattgtggacgaacagcaccgtttcggcgttgcccaacgcctcgccctcaaaaacaaagggcgcgaagtccatcagctgatgatgtccgccacgcccatcccgcgcacgcttgcgatgagttttttcgccgatttggacgtgtccgtcatcgacgaattgccgcccgggcgcacaccgattaaaacgcgcctcgtcaacaacgtccgccgcgccgaagtcgaaggcttcgtcctcggcacttgccgaaaagggcggcaggcgtattgggtctgcccattgattgaagaaagcgaaaccctgcaactgcaaaccgccgccgaaaccctcgcccggcttcagacggcattgcccgaactcaatatcggactggtacacgggcgcatgaaggccgccgaaaaggccgaagtgatggcgcggttttcttcgggggggctgaacgtcttggtcgccaccaccgtcatcgaagtcggcgtagatgtgcccaatgccgccctgatggtcatcgaacacgccgagcgcatgggcttggcgcagcttcaccaattacgcggacgggtagggcgcggcgcggcggaaagcgtgtgcgtcctcctgtttgccgaacccttgggcgaactcgccaaagcgcggctgaaagtcatctacgaacacaccgacggctttgaaatcgcccgccaagacctcaacatccgcggccccggcgaatttctcggcgcgcgccaaagcggcgtgcctatgctgcgtttcgccaagctcgaagaagacctgcacctcttggaacaagcgcgcgaaaccgccccgatgctgattgaacaaaaccccgaaatcgtcgaagcgcatttggcaaggtggctttccggcagggaagggtatttgggcgtgtga

SEQ ID NO: 64674 - DNA, 723 bp, Neisseria meningitidis; identical to SEQ ID NO: 40785

SEQ ID NO: 64675 - DNA, 684 bp, Neisseria meningitidis; identical to SEQ ID NO: 59768

SEQ ID NO: 64676 - DNA, 567 bp, Neisseria meningitidis; identical to SEQ ID NO: 50541

SEQ ID NO: 64677 - DNA, 1536 bp, Neisseria meningitidis
atgttggggatgttttcggttaattcttatgccgaacgttctaagtatcacattggaaattcaaatgttagattggatattgatcatacaaaatctgtagttaccgattttcgtgttgatggtcagcgtttttcaggtcgaattatcgaaccttcaataatagaacacgtgccaacaggtgcacgctctcttgaaaaagtccccgttaaatttaccgcatcagtttcccgcgccggagtcttggcaggagtcggcaaacttgcccgcttaggcgcgaaattaagcacaagggcagttccttatgtcggaacagcccttttagcccatgacgtatacgaaactttcaaagaagacatacaggcacaaggctaccaatacgaccccgaaaccgacaaatttgtaaaaggctacgaatatagtaattgcctttggtacgaagacaaaagacgtattaatagaacctatggctgctacggcgttgacagttcgattatgcgccttatgtccgatgacagcagattccccgaagtcaaagaattgatggaaagccaaatgtataggctggcacgtccgttttggaattggcataaagaagaactgaataaattaagttctttggattggaataattttgttttaaatcgttgcacatttaattggaatggcggagattgtttggtcaataaaggtgatgatttcagaaatggggctgatttttcccttattcgcaattcaaaatacaaagaagaaatggatgccaaaaagctggaagagattttatcgttgaaagtcgatgccaatcccgacaaatacataaaggcaaccggatatcccggttattccgaaaaagtagaagtcgcacccggaacaaaagtgaatatggggcccgtcacggacaggaacgggaatcccgttcaggttgtcgcaacattcggcagggattcgcaaggcaacaccacagtggatgttcaagtaatcccgcgtcccgatttaacccccggaagcgcggaagcaccgaacgcacagccgctgcccgaagtatcgcccgccgaaaaccccgcaaacaacccgaaccccaatgagaaccccggcacgagccccaatcccgaacccgaccccgatttgaatcccgatgcaaatcccgatacggacggacagcccggcacaagacccgattcccccgcagttccgggccgcacaaacggcagggacggcgaagacggcggccttttgtgcaaattcttccccgacattctcgcttgcgacaggctgcccgagcccaatccggcagaagatttaaatctgccgtctgaaaccgtcaatgtagagtttcagaaatcaggaatctttcaaaattccgcacagtgtcccgcacctgtcactttcacagtgactgtgcttgattccagcaggcagttcgcgttcagctttgagaacgcatgtaccatagccgaacggctaaggtacatgcttctcgcccttgcttgggcggttgccgcatttttctgtatccgcacagtatcccgtgaagtctag

SEQ ID NO: 64678 - DNA, 1104 bp, Neisseria meningitidis; identical to SEQ ID NO: 50449

SEQ ID NO: 64679 - DNA, 921 bp, Neisseria meningitidis
atgcctaatccgctttacagacagcatatcatctccatttcggatttgtcgcgcgaacagttggaatgcctgcttcagacggcattgaagctgaaggcgcatccgcgcggcgacctgttggaaggcaaacttatcggttcgtgctttttcgagccgtccacgcgcacgaggctgtcgtttgaaacggcggtgcagcggctgggcggcaaagttatcggtttctcggacggcgcgaataccagtgccaaaaaaggcgaaacgcttgccgataccgcccgcatcatttccggctacaccgacgcaatcatccaacgccaccccaaagacggcgcggcgcgcgtggcagcggagttttcgcgcgtccccgttatcaacgccggcgacggcacgaaccagcatcccagtcagacgctgctcgacctggttaccatttatgaaacacagggacgtttggacaagctcaaaatcgccatggcgggcgacttgaaatacggacgtaccgtgcattcgctttgtcaggcgttgaaacgctggaattgtgaatttgcctttgtttcgccgcccagcctagccatgcccgactatattaccgaagagttggacgaagccggctgccgataccgtatcctcggtagtttggaagaagcggcggaatgggcggatatcctgtatatgacccgcgtccagcgcgaacgtttcgacgaacaggaatttgccaaaatccaaggcaaattcaacctcgaagcgtctatgctcgcccgcgccaaaccgaacctgcgcgtgctgcaccccctgccgcgcgtggacgaaatccatcccgatgtcgatgccacgccgcatgcctattatttcgagcaggcaaccaacggcgtttatgcgcgtatggcgatattgtcgctggtgttgaacgaagaagtgtga

SEQ ID NO: 64680 - DNA, 471 bp, Neisseria meningitidis; identical to SEQ ID NO: 42963

SEQ ID NO: 64681 - DNA, 342 bp, Neisseria meningitidis; identical to SEQ ID NO: 50795

SEQ ID NO: 64682 - DNA, 384 bp, Neisseria meningitidis; identical to SEQ ID NO: 38550

SEQ ID NO: 64683 - DNA, 297 bp, Neisseria meningitidis; identical to SEQ ID NO: 38749

SEQ ID NO: 64684 - DNA, 1386 bp, Neisseria meningitidis; identical to SEQ ID NO: 56080

SEQ ID NO: 64685 - DNA, 204 bp, Neisseria meningitidis; identical to SEQ ID NO: 37144

SEQ ID NO: 64686 - DNA, 279 bp, Neisseria meningitidis; identical to SEQ ID NO: 37183

SEQ ID NO: 64687 - DNA, 840 bp, Neisseria meningitidis; identical to SEQ ID NO: 43911

SEQ ID NO: 64688 - DNA, 549 bp, Neisseria meningitidis; identical to SEQ ID NO: 39055

SEQ ID NO: 64689 - DNA, 381 bp, Neisseria meningitidis; identical to SEQ ID NO: 42684

SEQ ID NO: 64690 - DNA, 696 bp, Neisseria meningitidis
atgaaagcgatgatactggcggcaggacgcggcgagcgtatgcgccctttgaccgataccactccgaagccgctgctcgatgtggcgggtaagcctctaatcggttggcacctatgccgtctgaagcaggcggggtttaccgaaatcgtcatcaaccatgcttggttaggtcggcagatagaagaggctttgggcgacggctcggcttatggcgtgaacatcgcctattcgcccgaacccgcaggcggcttggaaacggcaggcggcatcgcgcaggcattgccgctgttgggcgatgccccgtttttggtcgtcaatggcgacgtgttgaccgacatcgattttaccgccgcgtttcaggcggcatcgtccctgcccgagcacatttccgcccatctgtggctggcggacaatccgccgcacaactccgacggcgatttttccctgctgcccgacggcagcgtgcggccggaagtaaatggcggcaacggattgacatttagcggcgtgggtatttaccgtcctgaaatgtttgacggaatcgaagcgggcagtgtggcgaaactcgcgcccgtattgcggaacgaaatgcggcaaaaccgcgtgagcggacagaagcatacgggcttgtggctggatgtcggcacggtatgccgtctgaaagaggctcaagcccttgcaggggcttggaagtga

SEQ ID NO: 64691 - DNA, 924 bp, Neisseria meningitidis
atgctgcaaagaactttggcgaaatccatcagcgttaccggagtcgggctgcattcgggcgaacgcgtcgcgctgaccctgcaccccgcgcctgaaaacagcgggatttccttccgccgtaccgatttggacggcgagatgggcgaacaaatcaagctgaccccttatttgatcaacgatacccgcctttcctccaccatcgttaccgacaaaggcgtgcgcgtcggcacaatcgaacacattatgtccgcgctgtccgcctacggtatcgacaacgcgctgattgagctgaacgcacccgaaatcccgattatggacggctccagcctgccgtttatttaccttttgcaagatgcgggcgtggtcgatcaaaaggcgcaaaagcgttttttgaaaatcctcaagcctgtcgaaatcaaagaagcgggcaaatgggtgcgctttacgccgtatgacggctttaaggtaacgctgaccatcgaattcgaccatccggttttcaaccgcagctcgcccacttttgaaatcgatttcgccggcaaatcctacatcgacgaaatcgcgcgcgcgcgcactttcggctttatgcacgaagtggaaatgatgcgcgcccacaatctgggtttgggcggcaatttgaacaacgccatcgtgattgacgacacggatgtcctgaatcctgaaggcttgcgctatcccgatgagtttgtgcgccacaaaatccttgatgccatcggtgatttgtatatcgtcggacatccgattgtcggcgcgtttgaaggctacaaatcgggacacgccatcaacaacgcactcttgcgcgcagttttggcagacgaaacggcttacgaccgggtggaatttgccgacagcgatgatttgcccgacgcatttcacgagctgaacatcagaacttgtggataa

SEQ ID NO: 64692 - DNA, 1464 bp, Neisseria meningitidis
atgcgtatcgtagaaaaagcctatactttcgacgatgttttgttggttcccgcacattcgaccgtgctgccgcgagacgttaaacttcaaaccaagctcacccgcgaaatcacactcaacctccccctgctttccgctgcgatggacactgttaccgaggcgcgcctcgccatttcgatggcacaggaaggcggcatcggcatcatccataaaaacatgccgcccgaaatgcaggcgcgcgccgtttccaaagtgaaacgccacgaaagcggcgtggtcaaagaccccgtaaccgttgcaccgacgacgctcatccgcgaagtcttggaaatgcgtgcgcagcgcaaacgcaaaatgtccggcctgcccgtcgttgaaaacggcaaagtcgtcggcatcgtaaccaaccgcgacctgcgttttgaaaaccgtgtcgatttgcccgtttccgccattatgaccccgcgcgaacgtttggttaccgtccccgaaggcacaagcatagacgaagcgcgcgaactgatgcacacgcacaaagtcgagcgcgttttggttctgaacgaaaaagacgaactcaaaggtctgattaccgttaaagatattttaaaaaccaccgagtttcccaacgccaacaaagactccgaaggccgtctgcgcgtcggtgcggcagtcggcaccggcggcgataccgaagagcgcgtcaaagccttggtcgaagccggcgtggacgtgattgtcgtcgatactgcccacgggcacagccaaggcgtgattgaccgcgtgaaatgggtgaaagaaacctatccgcacatccaagtcatcggcggcaacatcgccactgccaaagccgcattggatttggtcgccgccggtgcggatgccgtcaaagtcggtatcggcccgggatcgatttgcaccacccgtatcgtggcaggcgtgggcgtgccgcaactgaccgccatccacaacgttgccgaagccctcaaaggcacaggcgttcccctgattgccgacggcggcatccgcttctccggcgacatcgccaaagccctcgccgcaggcgcgtacagcgtcatgctcggcggtatgtttgccggcacggaagaagcgccgggcgaaatcgaactctatcaaggccgctcgtacaaatcctatcgcggtatgggttcattgggcgcgatgagccaaggttctgccgaccgctacttccaagacaaaaccgacagcaccgacaaatacgtccccgaaggcatcgaaggccgcgttccttacaaaggcccgattgtgaacatcatccaccagctgaccggcggtctgcgttccagtatgggttacttgggttgcgccaatattgccgaaatgcacgaaaaagccgaatttgtggaaatcacttccgcaggtatgagcgaatcgcacgttcacgacgttcaaatcactaaagaagcaccgaactaccaccgctga

SEQ ID NO: 64693 - DNA, 369 bp, Neisseria meningitidis
atgaatccgaaaaccttgagccgtttgtcgctgtgtgcggcggtcttggctctgaccgcctgcggcgacaacgggcaaaaatccctgtattattacggcggctatcccgataccgtctatgaaggtttgaaaaacgacgacacttcgttgggcaagcagaccgaaaagatggaaaaatactttgtggaagccggcaacaaaaaaatgaatgccgccccgggtgcgcacgcccatctgggactgctgctttcccgttcgggagacaaagagggcgcgttccgccagtttgaagaagagaaaaggctgtttcccgaatcgggcgtatttatggacttcctgatgaaaaccggtaaaggaggcaagcgatga

SEQ ID NO: 64694 - DNA, 756 bp, Neisseria meningitidis
atgaagtttgcccggttactctttctctgtgcggcactcgccggcactcaagcggcggctgccgaaatggttcaaatcgaaggcggcagctaccgcccgctttatctgaaaaaagataccggcctgattaaagtcaaaccgttcaaactggataaatatcccgttaccaatgccgagtttgccgaatttgtcaacagccacccccaatggcaaaaaggcaggatcggttccaaacaggcagaacccgcttacctgaagcattggatgaaaaacggcagccgcagctatgcgccgaaggcgggcgatttaaaacaaccggtaaccaatgtttcctggttcgccgccaacgcctattgcgccgcacaaggcaaacgcctgccgaccattgacgaatgggaatttgccggacttgcctccgccacgcagaaaaacggctcaaacgaacccggctacaaccgcactattctcgactggtatgcggatggcgaccggaaagacctgcacgatgtcggcaaaggtcgcccgaactactggggcgtttatgatatgcacggtctgatttgggaatggacggaagatttcaacagcagcctgctttcttccggcaatgccaacgcgcaaatgttttgcagcggcgcgtctatcgggtcgagcgactcgtccaactatgccgccttcctccgctacggcatccgcaccagcctgcaatccaaatatgtcttgcacaacttgggcttccgttgcacaagccgataa

SEQ ID NO: 64695 - DNA, 1419 bp, Neisseria meningitidis
atgtctattaaaaacgccgtaaaattgattgaagaaagcgaagcccgctttgtcgatttgcgctttaccgataccaaaggcaagcagcaccactttaccgtgcctgcgcgcatcgtgttggaagaccccgaagagtggtttgaaaacggtcaggcgtttgacggttcgtccatcggcggctggaaaggcattcaggcttccgatatgcagctgcgtcccgatgtgtctacagccttcgtcgatcctttttatgatgatgttaccgtcgttattacctgcgatgtcatcgaccctgccgatggtcagggttacgaccgcgacccgcgctccatcgcccgccgcgctgaagcctatttgaaatcttccggtatcggcgacacggcatacttcggccccgaacccgaattcttcgtcttcgacggcgtagaatttgaaaccgatatgcacaaaacccgttacgaaatcacgtccgaaagcggcgcgtgggcaagcggtctgcatatggacggtcaaaacaccggccaccgccctgccgtcaaaggcggttacgcgcccgtcgcgccgattgactgcggtcaggatttgcgttccgcgatggtaaacattttggaaggactcggcatcgaagtcgaagtccaccacagcgaagtcggcaccggcagccaaatggaaatcggcacgcgcttcgccaccttggtcaaacgcgccgaccaaacccaagacatgaaatatgtgattcaaaacgttgcccacaacttcggcaaaaccgccaccttcatgcccaaaccgattatgggcgacaacggcagcggtatgcacgttcaccaatccatctggaaagacggtcaaaacctgttcgcaggcgacggctatgccggtttgagcgacaccgcgctctactacatcggcggcatcatcaaacacgccaaagccctgaacgcgattaccaatccgtccaccaactcctacaaacgccttgtgccgcactttgaagcgccgaccaaactggcttattccgccaaaaaccgttccgcttccatccgcattccgtccgtgaacagcagcaaagcacgccgcatcgaagcgcgtttccccgatccgaccgccaacccatacttggcgttcgccgctttgttgatggccggtttggacggtattcaaaacaaaattcatccgggcgaccctgccgataaaaacctgtacgatctgccgccggaagaagatgcattggtgccgaccgtctgcgcctctttggaagaagccctcgccgccctcaaagccgaccacgaattcctcctgcgcggcggcgtattcagcaaagactggatcgacagctacatcgctttcaaagaagaagatgtccgccgtatccgcatggcaccgcatccgctggaatttgaaatgtattacagcctgtaa

SEQ ID NO: 64696 - DNA, 789 bp, Neisseria meningitidis; identical to SEQ ID NO: 39818

SEQ ID NO: 64697 - DNA, 1596 bp, Neisseria meningitidis; identical to SEQ ID NO: 51174

SEQ ID NO: 64698 - DNA, 210 bp, Neisseria meningitidis; identical to SEQ ID NO: 39306

SEQ ID NO: 64699 - DNA, 2028 bp, Neisseria meningitidis
ttgtccctgtctgaatttatagaacgccgaacgtcatttaatctgatggttattttgacgactttgttttttgtgtgtgttttggtggtattggttttaaccgtgccggatcaggtgcagatgtggctcgatcgggcaaaagaaatcatttttaccgagttcagctggttttatgttttaacgttttccatttttctgggtttcctgctgatactctcggtcagcagtttgggaaacatcaggctcggacgggatgaagatgtgccggaattcggcttcctgtcgtggctggcgatgctgtttgcggccgggatgggcgtgggtctgatgtttttcggcgtggcagagccgttgatgcattatttttcggacattacggccggcacgccggaacacaggcagcagcaggcattgctgcacacggtgttccattggggcgttcacgcttggtcggtgtacggtacgattgcattggctttggcttatttcggtttccgctacaagctgccgcttgccctgcgttcttgtttttaccccctgttgaaagaaaaaatttccggaaggttcggcgatgccattgatattatggcgttgcttgctacttttttcggcatcatcaccacattggggttcggggcttcgcaactgggcgccggattgcaggaaatgggctggattgccgaaaacagcttcagcgtgcaggttttgattatcgccgccgtcatgtccctcgccgtcgtttcggcaatatccggcgtggggaagggcgtgaaggtgttgagcgagttgaacctgagccttgcgtttttgctgctgttttttgttttggcggcgggtcccactgtttacctgttgtcggcattcggcgacaacatagggaactacctcggaaatctggtgcgcctcagttttaaaacttatgcgtacgaacgggaacacaagccgtggtttgaatcttggacggtgctttattgggcgtggtggtgttcttgggcgccgtttgtgggtttgtttatcgcgcgcatttcaaaggggcgcaccatccgcgagtttgtcttcggggttttgctcatccccggcctgttcggcgttttgtggtttaccgtcttcggcaatacggcgatttggctgaatgacggggttgcggggggaatgctcgaaaagatgacctcctctccggaaacgctgctttttaaattctttaattacctccccctgcccgaattgacgagcatcgtcagcctgctggtcatttctctgttttttgtaacttctgccgattccgggatttatgtcctgaacaatattacctctcgggacaaaggcttgagcgcgccacggtggcaggcggttatgtggggcgtgctgatgtctgccgttgccgttttgctgatgcgctcgggcggactcggcaacctgcagtctatgaccctgattgtttccctgccgtttgccctgctgatgctgataatgtgtttcagcctgtggaaaggcttgagtgcggataagaaatattttgagacccgggttaaccctaccagtgtattttggacgggcggcaagtggaaagaacggctggtgcagataatgagccagacgcaggagcaggatattttaaaattcctcaaacataccgcatcgcccgctatgcacgagttgcaacgggagctttcggaagaatacggcttgagcgtccgggtcgataagatgtttcatcaggacgagcccgcaatcgagttcgtcattcggaaagagacgatgcgcgattttatgtacgggattaagtctgtcgggcaggatgtatccgaccagttgattaacgacggcaagctgccgcatatccggcatcagacaacttacaaaccctacgcttattttttcgacgggcgcgtcgggtacgatgtgcagtatatgaacaaggacgagctgattgccgacattttgaaaaactacgaacgttatttgatgttgttggatgatgtcggtcaggaactgatggcgcacgagcaggtggaattggcagagtaa

SEQ ID NO: 64700 - DNA, 1230 bp, Neisseria meningitidis
atggcgttcggcaaatccttatttcatgcgatcggccgcgtcagcctggtcaggcagattgccgccggtttggcgttgggcatcgtaatcggttcggtttccccgcaactgggcttggcggcaggcttgttcggcagcctgtttgtcggcgcgctcaaagcggtcgcgccggttttggtatttattttggtggcggccacaatcgcgcagcaccaaaaaggcaacaaggcgcatatcaggccgattatcatcctttacctcatcggtacgttttccgcagccctgaccgccgtcatcgccggtatggttttcccgacgcacattgttttggcgggcgcgggcgatgtgtccgccgcgccgccttccggcattgtggaagtattgaaatcgctgctgatgaacctggtcgccaacccgattaacgcgattgccaatgccaactatatcggcattttggcttgggctttggttttgggcgcggcgttgcggaatcacggttcggacgttacgcggcaggtcgttgccgatttggcggaagcggtttccaccgtcgtgaaatggattatccgttttgcccctttgggcattttcgggctggtgtcgtccacaatcgcggagacgggtttcggcgcgctggcggggtatgcgaagctgcttgcggtgctgttgggctgtatggcgtttatcgcgctggcggtcaatcccgccatcgtgtggtggaaaatccgccgcaacccttatccgctggtgtttacctgcctgcgcgaaagcggcgtgtatgccttctttacccgttcttccgccgccaatatccccgtgaatatggctttggcgaaaaaactggggctgcacgaagacacttattcgatttccatcccgttgggggcgaccgtcaatatgggcggcgcggcgattacgattaccgttttggctatggcggcggcgcacacccaaggcatacaggttgattttgccaccgcgctgctgttgagcctggtggcgacggtcagcgcgtgcggcgcgtccggcgtggcgggcggttcgctgctgctgattccgctggcgtgcagcctgttcggcatcagcaacgatgtcgccatgcaggtggttgccgtcggctttatcatcggcgtgattcaggattcggcggaaacggcgttgaattcttcaaccgatgttttgtttaccgctgccgccgatttgggccgacagagaaaccgggcggaataa

SEQ ID NO: 64701 - DNA, 153 bp, Neisseria meningitidis; identical to SEQ ID NO: 43283

SEQ ID NO: 64702 - DNA, 843 bp, Neisseria meningitidis; identical to SEQ ID NO: 59981

SEQ ID NO: 64703 - DNA, 798 bp, Neisseria meningitidis; identical to SEQ ID NO: 51687

SEQ ID NO: 64704 - DNA, 1197 bp, Neisseria meningitidis; identical to SEQ ID NO: 42563

SEQ ID NO: 64705 - DNA, 225 bp, Neisseria meningitidis
atgaagaaaaacgccccgaaatcgtttgaagaggccctgtcgcgccttgaatcactgacccagtccatgcagggggaaatgcccttggaagacgcgcttgccgcctatcaggaaggcaacgagctggtcaggtactgccaaaccaagctggcacaagtcgaacagaaattacaggttttggatgcggacgggccgaaggagttgaaccttgaatccgacgaatga

SEQ ID NO: 64706 - DNA, 822 bp, Neisseria meningitidis
atgtctttgcaaaacattatcgaaaccgcctttgaaaaccgcgcggacattaatccgaccaccgttactcccgaagttaaagaagccgtgttggaaaccatccgccaactcgattccggcaaactgcgcgtcgccgaacgcttgggcgtgggcgaatggaaagttaacgaatgggcgaaaaaagccgtgttgctgtccttccgcatccaagacaacgaaatcctcaacgacggtgtgaacaaatacttcgacaaagtgccgaccaagtttgccgactggtctgaagacgagttcaaaaacgcaggcttccgcgccgttccgggtgcggttgcccgacgcggcagctttgtggcgaaaaatgtcgtgctgatgccgtcttacgtcaacatcggcgcatacgttgacgaaggtgcgatggtcgatacttgggcgaccgtcggctcttgcgcgcaaatcggcaaaaacgtccacttgagcggcggtgtcggcatcggtggcgtactcgaacccctgcaagccagcccgaccattattgaagacaattgcttcatcggtgcgcgttccgaaatcgttgagggcgtgattgtcgaagaaggcagcgtgatttctatgggcgtgttcatcggtcaatccaccaaaatcttcgaccgcaccaccggcgaaatctaccaaggccgcgtaccggccggttcggtcgtcgtgtccggcagtatgccttccaaagacggcagccacagcctttactgcgccgtcatcgtcaaacgcgtggacgcgcaaacccgtgcgaaaaccagcgtgaacgaattgttgcgcggcatctga

SEQ ID NO: 64707 - DNA, 315 bp, Neisseria meningitidis
atgaacaaaccgtttatcactcaggcgcagttggcactttataaatatcagccgtctagcaagtattatggtaaaacaatggcatatactttcgctagtgagcttttggattattcaaaagttaataaatttataattcatgaagaaatccaatgttttttaaatagaaggatttctaataatatttggaaaatttatttttctgatgagtctgttgcgtatataaaaattttagaattacaggatgattctagtcgtggaattgaaattaaaacgtttgattttaatcctaatgttggggatgttttcggttaa

SEQ ID NO: 64708 - DNA, 939 bp, Neisseria meningitidis
atggatgcctaccccgaagccgaagctccgccgcaaagcatcgtcgagctggttcccgtattgattgccgttaccgacggcggcctgcgggtattgaccgtcgcccaaggcacgctcctgcccaacggcccgctctcccctctgcgcaattccctgcaggcgggcgtgaagctgtgggttgccaagcagacttcgcagcctatgggctatgtggaacagctttacacctttgtcgatacccaccgccgcaacgaacacggtatgcccgttctgtacgtcagctatttggggctggtgcgtgaggcagccgacagcatcctgcatcccgacgcgaaatggcaggactgctacggctatttcccgtgggaagacttgcgcaccgacggcggacagcgcgacgccgtcgtcagccgactgcgcatttgggcaaactcggcggacacggaggaagtgcgtcaaatgcggctcaagcgcattcatttgtgttggggggtcgaaccggaaaactggtcggaagaatacgttttgcaacgctatgaaatgctgtatgaaagcggcctgatagtggaagccgccgagccgcaggcaaacttcgatttcgcgctcacagggcagcccatgcgccacgaccaccgccgcgtactggcgaccgccctgtcccgcctgcgcgccaaaatcaaataccgccccgtgattttcgaactgatgccgcccgaattcacgttgctgcaactgcaaaacagcgtcgaagccatcagcggcagattgctgcacaagcaaaacttccgccgccagattcagcagcaaaaccttatcgagccgtcggataccggcgtatcgggcagcaaaggccgtcccgcgcagctttgccgcttccgcgacgacgtcctgcccgacaggctgatttcggacatcggattgccgctgggcagccgttag

SEQ ID NO: 64709 - DNA, 1155 bp, Neisseria meningitidis; identical to SEQ ID NO: 43638

SEQ ID NO: 64710 - DNA, 627 bp, Neisseria meningitidis; identical to SEQ ID NO: 50959

SEQ ID NO: 64711 - DNA, 2280 bp, Neisseria meningitidis; identical to SEQ ID NO: 43035

SEQ ID NO: 64712 - DNA, 399 bp, Neisseria meningitidis; identical to SEQ ID NO: 41900

SEQ ID NO: 64713 - DNA, 1791 bp, Neisseria meningitidis; identical to SEQ ID NO: 59647

SEQ ID NO: 64714 - DNA, 378 bp, Neisseria meningitidis; identical to SEQ ID NO: 53475

SEQ ID NO: 64715 - DNA, 435 bp, Neisseria meningitidis; identical to SEQ ID NO: 40706

SEQ ID NO: 64716 - DNA, 1635 bp, Neisseria meningitidis
atgaccaaattcattttcgtcaccggcggcgttgtctcctcactgggtaaaggtatcgccgccgcttctattgccgccatcctcgaatcgcgcggcttgaacgttaccatgctcaagctcgatccttatatcaacgtcgatcccggcacgatgagcccgttccaacacggcgaagtgttcgtaaccgacgacggcgcggaaaccgacctcgacttgggacactacgaacgctttatcgattccacgatgacccgccgcaacagcttcagcacggggcaggtgtacgaaaacgtcatcgccaaagaacgacggggcgactatttgggcggcacggttcaagtcatcccgcacattaccgacgaaatcaaacgccgcatccacgaaggcgcggcaggttacgatgtggcgattgtcgaaatcggcggcacggtcggcgacatcgaatcgctgccgtttttggaagccatccgccagatgcgaagccagttgggacgcaacaacaccctgttcgcccacttgagctacgtcccctacatcgccgccgccggcgaaatcaaaaccaaaccgacccagcatactgttaaagaaatgttgagcatcggtttgcaaccggacatcctgatctgccgtatggacagagaaatgcctgcggacgagcgccgtaagattgcattgttctgtaacgttgaagaacgtgccatcgtgggcagctacgatgtggacagcatctacgaatgccccgaaatgctgcacgaccaaggcatcgacaacatcattaccgagcagttgcagcttaacgtgcaacaggcggatttgaccgcgtggaaaaaaatcgtccacgccgtcaaaaatccgaaacacaccgtcaaaatcgcgatggtcggcaaatacgttgatttgaccgaatcctacaaatcactgattgaagccttgaaacacgcaggtgttcacaccgaaaccgacgtacaaattacctttgttgacagcgaaagcatcgagaaaaacaagggcgacgtttctatgctcaaagatatggacgccatcctcgttcccggcggttttggttcgcgcggcgtggaaggcaaaatcgccgctgtgcgctatgcccgcgaaaacaacgtgccatacttgggcatctgcctcggtatgcagattgcgctgatcgaatacgcccgcgacgtggcaggtttgaaaggtgcgaattccaccgagttcgacctcaaatgcgccgcccccgtcgttgccctgattgacgaatggcaaactgccgacggcagcgtcgaaacccgagacgagtccgccgatttgggcggcacgatgcgtttgggcgcgcaagaagtcgaattgaaagcaggcagcctcgccgccaaaatctacggcagcggacacatccgcgaacgccaccgccaccgctacgaagtcaacaacaactatgttcctcagtttgaaaaagcaggcttggtcatcggcggtgtatctgccggacgcgaacgcttggtcgaaaccatcgaactgccgaaccatccttggttcttcgcctgccagttccaccccgagtttacctccaatccgcgcaaagggcatcctttgttcaccgcgtttgtcaaagctgcgttgaacaataaaaaagcctga

SEQ ID NO: 64717 - DNA, 2292 bp, Neisseria meningitidis
atgcttgcacccgaattggaacagattttgcagcagctttaccgcgaggcgcgtaaggctcattatgaatttatcagcctcgagcatctgcttttggtactcatcgaagaagatgcctccgtgccgaacgtcttaaaactctgcggcgcggatttgaaagtggtgtccgaacagctcgccgccagcgttgccgaaaacacccccctgattcccgaacaccttttagacacggtcgaaacccggcccacgctcggcttccaacgcgtgatgcaacgggcgatggtgcatacccagtctgccggaaaagccgcagtcgaaccgttggacgttttggtcgcgctgatgagcgaaaccgacagccacaccgtctatttcctcaagctgcaatcggttacgcgttttgaagttttgcgctgtattgcccacggctctcccgatgaagatgaagacgatggcaactattcttcagacggcatggacgacgataatgaaaaccgcaccaaaccgggcaaaaaccctttatcggcgtacaccgtcaacctcaacgccgaagtcaaagccggccgtatcgaccctttgattggtcgcaaacacgaaatggaacggctggtgcaaatcctatgccgccgccgcaaaaacaatccgcttttggtcggcgaagcgggcgtgggcaaaaccgcgctggcggaaggtttggcacatcaaatcgtcaacggcggcattccagacgcgctcaaagatgccgaagtgtacgcgctggatatgggctcgctgttggcgggcacgaaataccgcggcgactttgaagcgcgggtcaaatccgtcttgaaacagctcgaaaaaatcccgcacgccattttgtttatcgacgaaatccacaccatcatcggcgcaggcagcaccagcggcggcaccatggacgcgtccaacctgctcaaacccgcgctggcaaaaggttcgctgcgctgcatcggcgcgaccacttacgacgaataccgcaccattttcgacaaagaccacgccttaagccgccgcttccaaaaaatcgacgtggtcgaacccaccgtttccgaaaccgtacaaatcctgcgcggcttgaagccgatgtttgaagccttccaccaagtccgctatacgcaaggcgcactcgaagccgccgccgaactctccgcacgctacatcaacgagcgtttcctgcccgacaaagccatcgacgtgatggacgaagcaggcgcggcgcaacggattctgcccaaatccaaacagaaaaaagtcatcggcaaagcacaaattgaaaccgtcatcgccaaagttgcgcggattcccgaaaaaaccgtgtcgcacgacgacaaacaagtgctgcaattcctcggtcgcgatttgaaaaacatggtttacggtcaagaaaacgccatcgacgcgctggttgccgccgtcaaaatgtcgcgttccggccttgccctgcccgacaaaccgataggcagcttcctcttctccggcccgaccggcgtgggcaaaaccgaagccgccaaacagcttgcctactcgctgggcgtaccgctgcaacgctttgatatgtccgaatacatggaacgccatgccgtatcgcgcctcatcggcgcgccaccgggctacgtcggctttgaacaaggcggccttttgaccgaagccatcaacaaacagccgcattgcgtattgctcttggacgaaatcgaaaaagcccaccccgacattttcaacgtcctcctgcaagtcatggacgcaggcaaactgaccgacaacaacggcaagagtgccgatttccgcaacgtcatcctaattatgaccactaacgcaggtgcggagagtctcagccgacccagcctcggctttaccgccaaacgcgagcgcggcgacgaaatgcaggctatcaacaagctcttcacgcccgagttccgcaaccgcttggatgcgattatcccgtttgcgcccttatccgaacccgtcatcaccaaagtcgtggacaaattcctgctccagctcgaacaccggctcctcgacaaaaaagtcgaagccgaattcacgtcggcattgcacaaatatctggcggaaaaaggttttgacccgcaaatgggcgcgcgcccgatgcaccgcctgattcaggaaaaaatccgcaaaccgctcgccgacgaactcctgttcggcaaactatccgacggcggcttcgtacggatagactgggatgcggcaaaagaagaagccgtgttgaagtttaagaaaagcaaggtcaaaataaaaaccgcctccgcataa

SEQ ID NO: 64718 - DNA, 1089 bp, Neisseria meningitidis; identical to SEQ ID NO: 50476

SEQ ID NO: 64719 - DNA, 168 bp, Neisseria meningitidis; identical to SEQ ID NO: 50106

SEQ ID NO: 64720 - DNA, 1266 bp, Neisseria meningitidis
atgttcagcttcttccgtcgcaagaaaaaacaggaaacgccggctcccgaggaggctcaagttcaggaaactgcagcaaaagcagaatccgaagttactcaaatagttgaaaatattaaagaagaagtcgaatctttaacggaaagcgtcaaagggcaggtcgaatcggctgttgaaaccgtcagcggtgcggttgaacaagtaaaggaagccgttgccgagatgctgtctgaagcagaggaagcggcggaaaaagcagcggaacaagtcgaagcggcaaaagaagccattgccgaaaccgtcggcgaggctgtcgggcaagttcaagaagccgttgcaacaactgaagaacacaagctcggttgggcggcgcgtttgaaacaaggtttgaccaaatcgcgcgacaaaatggcgaaatcgctggcgggcgtgttcggcggcggacaaatcgacgaagatttgtacgaagagctggaaaccgtgctgattaccagcgatatgggcatggaagccaccgaatacctgatgaaagacgtgcgcgaccgcgtcagcctcaaagggctgaaagacggcaacgaattgcgcggcgcgctgaaagaagccttgtacgacctgattaagcctctggagaaacctttggttttgcccgaaaccaaagagccgtttgtcatcatgcttgctggcatcaacggcgcgggcaaaaccacatccatcggcaaactcgccaaatatttccaagcgcagggcaaatctgtgctgcttgccgccggcgatactttccgcgccgccgcgcgtgagcagcttcaagcttggggcgaacgcaacaacgtaaccgtgatttcgcaaaccacgggcgattccgccgccgtgtgcttcgatgccgtccaagccgccaaagcgcgcggcatcgacattgtgctggccgacaccgccggccgcctgcccacgcagcttcacttgatggaagaaatcaaaaaagtgaaacgcgtgctgcaaaaagccatgcccgacgcgccgcacgaaatcatcgtcgtgcttgatgccaatatcggtcaaaacgccgtcaaccaagtcaaagcctttgacgacgcattagggctgaccggtttaatcgtgaccaaactcgacggcacggcaaaaggcggcatcctcgccgcgcttgcctccgaccgccccgtccccgtccgctatatcggcgtgggcgaaggcatagacgacctgcgcccgtttgacgcgcgcgcgtttgtggacgcactgctggattga

SEQ ID NO: 64721 - DNA, 327 bp, Neisseria meningitidis
atgaataaaatcattaaaggcgatagggttgtagtaattgctggtaaggataaaggtaagcagggtcaagtagttcgagtgttgggtgataaaaaagttgttgttgagggcgttaatgttgtaaaacgccatcaaaaacctaatccaatgcgtggcattgagggcggtattattactaaagaaatgcctttggatatttctaatatcgcaatcctgaatccggaaactaataaagcggaccgtgttggtattaagctgattgaaaatgaaggcaaagttaaacgcgttcgtttcttcaaatcaaatggctctatcattggggcataa

SEQ ID NO: 64722 - DNA, 297 bp, Neisseria meningitidis; identical to SEQ ID NO: 39905

SEQ ID NO: 64723 - DNA, 990 bp, Neisseria meningitidis
atgaaaattaccgttatcggcgcaggttcgtggggtacggcgctcgccctgcacttttcccaacacggcaaccgcgtatccctgtggacgcgcaacgcagaccaagtccgccaaatgcaggaagcgcgtgaaaacaaacgcggactgcccggcttttcctttcccgaaaccttggaagtgtgtgcggatttggcagacgcgctcaaagacagcggacttgtccttatcgtaacctccgttgccggattgagaagcagcgcagagctgctcaaacagtacggcgcgggacacctccccgtcctcgccgcctgcaaaggattcgagcaggatacagggctgctgacctttcaagtattgaaagaagtattgcccgacaataaaaaaatcggcgtactttccggtccgagttttgcacaggaactcgccaaacaactgccctgcgccgtcgtcctcgcctctgaaaaccaagagtggattgaagaactcgtaccgcagctcaacacgaccgtcatgaggctttacggcagtaccgacgttatcggcgtggcagtcggcggcgcggtaaaaaatgttatggcgattgccaccggattgtccgacggtctagagtacgggcttaacgcccgcgccgcactggttacgcgcggattagctgaaatcacccgccttgcctccgcaatgggcgcacagcccaaaaccatgatggggctggcaggcatcggcgacctcatcttgacctgcaccggcgcactctcacgcaaccgccgcgtcggcttgggtttggcagaaggcaaggaactgcatcaggtgctggtcgaaatcggacacgtttccgaaggggtcagcacgatagaagaagtcttcaatactgcctgtaagtaccaaatcgacatgccgattacccaaaccctgctgcaactcatccgcaaagaaatgaccccgcaacaggtcgtcgaaaggctgatggaacgcagcgcgcgttttgaataa

SEQ ID NO: 64724 - DNA, 357 bp, Neisseria meningitidis; identical to SEQ ID NO: 50177

SEQ ID NO: 64725 - DNA, 1341 bp, Neisseria meningitidis
ttgcacacccttctagcttttatcttcgccatcctgattttggtcagcctgcacgagttcggacactacatcgttgccagattgtgcggcgtcaaagtcgtacgcttttccgtcggcttcggcaaaccgtttttcacccgaaagcgcggcgacaccgaatggtgcctcgccccgattccgttgggcggctacgtcaaaatggtcgacacgcgcgaaggcgaagtatcagaagccgatttaccctacgcttttgacaaacaacaccccgccaagcgcatcgccatcgtcgccgccggcccgctgaccaacctcgcactggcggttttgctgtacggactgagcttttccttcggcgtaaccgaactgcgcccctacgtcggcacagtcgaacccgacaccattgccgcccgcgccggcttccaaagcggcgacaaaatacaatccgtcaacggcacacccgttgcagattggggcagcgcgcaaaccgaaatcgtcctcaacctcgaagccggcaaagtcgccgtcggcgttcagacggcatcgggcgcgcaaaccgtccgcaccatcgatgccgcaggcacgccggaagccggtaaaatcgcaaaaaaccaaggctacatcggactgatgccctttaaaatcacaaccgttgccggcggcgtggaaaaaggcagccccgccgaaaaagcaggcctgaaaccgggcgacaggctgactgccgccgacggcaaacccatcgcctcatggcaagaatgggcaaacctgacccgccaaagccccggcaaaaaaatcaccctgaactacgaacgcgccggacaaacccataccgccgacatccgccccgatactgtcgaacagtccgaccacaccctgatcgggcgcgtcggcctccgtccgcagccggacagggcgtgggacgcgcaaatccgccgcagctaccgtccgtctgttgtccgcgcattcggcatgggctgggaaaaaaccgtttcccactcgtggacaaccctcaaatttttcggcaaactaatcagcggcaacgcctccgtcagccatatttccgggccgctgaccattgccgacattgccggacagtccgccgaactcggcttgcaaagttatttggaatttttggcactggtcagcatcagcctcggcgtgctgaacttgctgcccgtccccgttttggacggcggccacctcgtgttttatactgccgaatggatacgcggtaaacctttgggcgaacgcgtccaaaacatcggtttgcgcttcgggcttgccctcatgatgctgatgatggcggtcgccttcttcaacgacgttacccggctgctcggttag

SEQ ID NO: 64726 - DNA, 621 bp, Neisseria meningitidis; identical to SEQ ID NO: 51257

SEQ ID NO: 64727 - DNA, 1509 bp, Neisseria meningitidis
atgaccaccacccccgcaaacatcctcgcctccgtcgatttgggttccaacagtttccgcctccagatttgcgaaaacaacaacggacaattaaaagtcatcgattcgttcaaacagatggtgcgcttcgccgccggtctggacgaacagaaaaacctgagtgccgcttcccaagaacaggctttggactgtctggcaaaattcggcgaacgcctgcgcggcttccgccctgaacaggtacgcgccgtggcaaccaatacattccgcgtcgccaaaaacatcgcagatttccttcccaaggccgaagcggcactgggtttccccatcgaaatcatcgccgggcgcgaagaggcgcggctgatttataccggcgtgatccacaccctccccccgggcggcggcaaaatgctggttatcgacatcggcggcggttcgacagaatttgtcatcggctcgacgctgaatcccgacattaccgaaagcctgcccttgggctgcgtaacctacagcctgcgcttcttccaaaacaaaatcaccgccaaagacttccaatctgccatttccgccgcccgcaacgaaatccagcgcatcagcaaaaatatgaggcgcgaaggttgggatttcgccgtcggcacatcgggttcggcaaaatccatccgcgacgtgcttgccgccgaaatgccccaagaggcggacattacctacaaaggtatgcgcgcccttgccgaacgcatcatcgaagccggttcggtcaaaaaagccaaatttgaaaacctgaaaccggaacgcatcgaagtttttgccggcggacttgccgtgatgatggcggcgtttgaggaaatgaaactcgacagtatgaccgtaaccgaagccgccctgcgcgacggcgtgttttacgatttgatcgggcgcggtttaaacgaagatatgcgcggacaaacggttgccgagttccaacaccgctaccacgtcagcctcaatcaggcgaaacgcaccgccgagaccgcgcaaacctttatggacagcctctgccacgctaaaaacgttacagttcaagagcttgccttatggcaacagtatctcggacgcgccgccgcgctgcacgaaatcggtttggacatcgcccacaccggctatcacaagcattccgcctacatcctcgaaaacgccgatatgccgggtttctcacgcaaagaacagaccatacttgcccaactggtcatcggtcatcgcggcgatatgaaaaaaatgagcggcatcatcggcaccaacgaaatgttgtggtatgccgttttgtcgctgcgccttgccgcactgttctgccgttcgcgccaagacctgtctttcccgaaaaatatgcagttgcgtacggacacggaaagctgcggcttcatcctgcgtattgacagggaatggctggaacgccatcccctgattgccgacgcattggaatatgaaagcgtccaatggcaaaaaatcaatatgccgttcaaagtcgaggccgtctga

SEQ ID NO: 64728 - DNA, 198 bp, Neisseria meningitidis; identical to SEQ ID NO: 36305

SEQ ID NO: 64729 - DNA, 738 bp, Neisseria meningitidis; identical to SEQ ID NO: 59047

SEQ ID NO: 64730 - DNA, 843 bp, Neisseria meningitidis
atgtcgggaggggttatgcctgaattgccggaagtggaaacgacgttgcgcggcatcgcgccgcatattgaagggaaaacggtggaagccgtggtattgcgccaattgaagctgcgctggcagattaatcccgatttgggggagattttgtccggccggcaggtgttgtcctgcggcaggagggcgaaatacctgcttatccgctttcaaacgggcgtgctgctgattcacttggggatgtcgggcagcttgcggatttttacgccgtcggacggacgtatcggcaggccggacagacacgatcacgtcgatattgtgttttcagacggcacggtcatgcgttaccgcgatccgagaaagttcggcgcgatactttggtatgagggaatcgaagaacatcatccgctgttggaaaaactggggccggagcctttgtcggaggcattttgcacggattatctgtatgtgaggctgaaagcgcagaaacgcgcggtcaaacttgccctgatggacaatgcggtcgtggtcggtgtgggcaacatttatgccaacgagagcctgtttagggcgggcatttcgccccaccgtcctgccaaccgcctgaaaaagaaagagtgcgcgcttttggttgaaaccgtcaaagcggtgttgcagcgcgccattgaaacgggcggcagcaccttgagggattttgtggacagtgacggcaaaagcggctacttccaacaggaatatacggtgtacgggcggcacaatcagccgtgcccccggtgcggcggtttggttgtgaaagaaactttggggcagcgcggcacgttttattgcccgaactgtcagaaatag

SEQ ID NO: 64731 - DNA, 195 bp, Neisseria meningitidis
atgaataattactatctatataggaattgcagcagcgatgtgttatgggtcaaacgtatccaacgccaaatcgacggcagcctactcttgatttctgacaattcaacctatccacccatgcccttggcactggcggaacaccccgatattcaaatcatcgggcaggtagtgcaggtatcaaaagacttgaactag

SEQ ID NO: 64732 - DNA, 807 bp, Neisseria meningitidis
atgaaaagctcttttgtgcaaacgcttaccatcgccggttcggattcgggcggcggtgcgggcattcaggcggatttgaaaacatttcagatgcgcggcgtgttcggaacgtgcgtcatcaccgccgttaccgcgcaaaataccttgggcgtgtcggcggttcatctcgtcccgaccgaaaccatcaccgcacaaatccaagcaatcagggaagacttcgacatccgcgcctacaaaataggaatgctcggcacggcggaaatcatcgaatgcgttgccgacaagctgaaacactgcgacttcggcaggcgcgtactcgaccctgtgatgattgccaaaggcggtgcgccgctgttgcaggattccgccgttgcggcactgacgcgcctgctgcttcccgatacggatgtattgacccccaacctgcccgaggcggaagccctgaccggcgtgcatatcgaaaaccgtaaagatgcggaacgtgcggcaaaaatcctgcttgattacggtgtcaaaaatgtcgtcatcaaaggcggacatttgaatggcagcagcagcggacgctgcacggattggctgtttacgcaaaacgaaacgctggaattggacagcccgcgctttccgaccgcccacacgcacggcacgggctgcacgttttccgcctgcattaccgccgagttggcaaaaggcttagacgtttgcgaagccgtacagactgccaaggcctacatcacggcggcaatctcaaaccctttggaaatcggcgcaggacacggcccggtcaatcattgggcgtatcgggactaa

SEQ ID NO: 64733 - DNA, 1188 bp, Neisseria meningitidis
atgaataccttactcaagcagcttaaaccctatccctttgcccgactgcgtgaagcgatgcagggcatttccgcccccgaaggtctggaagccgtcccactgcatatcggcgaaccgaaacatccaacaccgaaagtcattacggatgcgctgaccgcctcattgcacgagttggaaaaatatccgctgacggccggtttgcctgaactgcgtcaggcgtgtgcgaactggttaaaacgccgttatgacggcttgacgctgaatcccgacaccgaaattctgccggttttgggaagtagggaggcgttgttttcttttgtccaaaccgtgttgaaccctgtttcagacggcctcaaacccgtaatcgtcagcccgaatcccttttatcagatttacgaaggtgcgacacttttgggcggcggtgaaatccattttgccaattgccccgcgccgtctttcaaccccgattggcgtagtatttccgaagaggtttggaaacgcaccaaactggtgttcgtctgctcgcccaacaaccccagcggcagcgtgctggatttggacggatggaaagaagtttttgatttacaggacaaatatggtttcattattgcctcggacgaatgctattccgaaatctatttcgacggcaacaagcctttgggctgcctgcaggccgctgcacagttggggcgaagcaggcaaaaactgcttatgttcaccagtttgtccaagcggtccaatgttccaggcctgcgttccggttttgtcgccggcgatgccgaactgcttaaaaattttctgctttacagaacctatcacggcagcgcaatgagcattcccgtgcagcgcgcaagcattgccgcttgggatgacgaacagcacgttatcgacaaccgccgcctgtatcaggaaaaatttgagcgcgttattcccattttgcaacaggtatttgatgttaaattaccggatgcctcgttttacatctggttgaaagtccccgatggcgacgatttggcatttgcacgcaatttatggcaaaaagccgctatccaagtattgcccggacgttttttggcacgggataccgaacagggcaatcccggggaaggttatgtgcgtattgctttggttgccgatgtcgcaacttgtgtcaaagctgcggaaaccattgtttccctatatcggtaa

SEQ ID NO: 64734 - DNA, 774 bp, Neisseria meningitidis; identical to SEQ ID NO: 51816

SEQ ID NO: 64735 - DNA, 1311 bp, Neisseria meningitidis
gtggctaatcaacaaacgtcatcaggttcatccaaatttggagatcttaagaaacgtcttttgtttctatttggagcattgattgtttttcgaattggtgcccatatacccgtacctggagttgatgctgttgctttagctaaattatacgaaagcgctggaaacggcatcctgggaatattgaatatgttttccggtgggtcgttagagcgctttagtatatttgcaataggaattatgccatatatttcagcttctattattgtacagctcgcttctgaaattttgccatcattgaaggctttaaaaaaagaaggggaggctggtagaaaggtaattacgaaatatactaggtatggtactgttttgttagcaattcttcaaagtctaggtgttgcatctttcgtatttcagcaaggaattgttgtaacaagttcatttgagtttcatgtttccacggtagtttctttggtaacgggaaccatgtttcttatgtggcttggggagcaaattactgaaaggggtatcgggaacggtatttctttaatcattacggcaggtattgcttcaggtattccttcgggtattgcaaagctggttacactgacgaaccaaggttctatgagcatgcttacggcgttgtttattgtatttggtgccttattattaatttatttggttgtatactttgaaagtgcacagcggaagattcctattcattatgcaaaacgccagtttaatggtagggcgggtagtcaaaatacgcatatgcctttcaagttgaatatggctggtgttattcccccaatttttgcttccagtattattctatttccatctactcttttaggttggtttggttcggctgatacaaatagtgttttgcacaaaatagctggattgttacaacacggtcaattgctgtatatggctttatttgcagtgacagttattttcttttgttatttttatacggctttggtttttagccctaaagaaatggcagagaatttaaaaaagagtggtgcttttgttcctgggattagacctggtgagcagacctctaggtatttagaaaaagttgtattacgtttgacattgtttggagctctttatattacaactatttgtttaattccagagttcttaactacggttttaaatgtacctttttatttgggtggcacgtctttgttgattctagttgttgtaacgatggattttagtacacaaataaattcgtataggcttactcaacagtatgataagttaatgactcgttcagaaatgaaatcattttctcggaaatag

SEQ ID NO: 64736 - DNA, 183 bp, Neisseria meningitidis; identical to SEQ ID NO: 39725

SEQ ID NO: 64737 - DNA, 519 bp, Neisseria meningitidis; identical to SEQ ID NO: 51206

SEQ ID NO: 64738 - DNA, 1392 bp, Neisseria meningitidis
atgcaattgtttttagacaatctcaaagcctttttcgaaaccgtcagcggctgggtctggggatctgttatgttgatgctgctggtcggcaccggcattgtgctgaccgttatgctgaaaggcttacagttcactatgttgggctatgcgctgaaacaggcgtttgtgccgtcaaagaagtatgaaggcggcgaaggccacgaaggcgatatttcccattttgcggcgttgatgaccgcgctgtccgccaccatcggtacgggtaacatcgccggcgtggcgactgcggtggtaaccggcggcccgggcgcggtattttggatgtggatgaccgccattttcggcatggccaccaaatacggcgaaggcgtgttggcggtgaaataccgcgtcaacaattccaaaggcgaaatgtccggcggcccgatgtattacatcgaaaaaggcttgggcaaaaactggaaatggatggccgttgcatttgcgctgttcggcacattcgcttccttcggtatcggcagctcggtgcagtccaactcggttgcacaggcggtgcaaaccagcttcggtatcgaacctgcctataccggcattacgttgaccgttctgactgccgttgtcgttttaggtggtattaaaggcatcgccaaagccgcttctttcatcgtgcctgctatggcggtgttttatgtgttgggcggtctttccattatcgcgattaattccgatgcactgatgcctgccgtcaagctgattttctccgatgcgttcagcgcgcaggcagtggcgggcggcgctatcggtacggtcatccgctacggtgtggcgcgcggcgtgttctccaatgaggcgggtatgggttctgcgcctattgccgccgcagccgcgaaaaccgaccatcccgtccgtcaggccttggtttctatgaccggtacgtttttggataccatcgtcgtttgctcgattaccggcatcgtgttggtaatgggactgctcggcgcgggcggcgagtttgtcaaacctgaagtgagcggcgcggcactgacaaccgtcacattccaaaaaatgctgcccggcatcggcggctggattgtcaccatcggcctgattttctttgcctactcaaccattctcggctggtgctattacggcgaaaaatgcgcggtgtatgttttcggcgagaaatttgccggtttgtaccgcgtcggttatgtttcttccgttatgctgggtaccgtgttgagccttgatttggtgtggctggcttcggacacattcaacggcttgatggcattgcccaacctgattgcacttttattgatggcgaaagtcatcgtcaatgaaacgcgcgacttcaaacaaaaaatcacaaacggcgaattgccgcattaa

SEQ ID NO: 64739 - DNA, 822 bp, Neisseria meningitidis
atgatgcggatattttcgacaggaggaaaaatggatacgcaggcagttatcacacatatcgcccgatggttggacgaatacgccgcccgggcaaatgcaaaagggtttgtcgtgggcgtttccggcggcatcgattccgccgtcgtctccgcactcgccgcccgcaccggccgccccacgctgcttctggatatgccgatacgccaacaccccggccagcttgagcgggcaaggctgcacatccgcaatctgcaacggcaatatgccaatgtaagcgcgcaaacggtcgacctgaccgacaccttccagacctttgaacaaaccgtcggtgctcatcagacggcatttgacagtcagccgctttccctcgccaacgccagaagccgcctacgtatgctgaccctgtactactacgggcagatacacggactgctggttacggggacaggtaataagattgaagatttcggcgtgggcttttttactaaatacggcgacggcggcgtggacatcagcccgattgccgacctgaccaaaacgcaggtttaccggcttgccgaagcattgggcgtggacgaggcgattcaaaaagccccgccgaccgacggcctgtgggatacggaacgcaccgacgaagaacagatgggcgcaagctatcccgaactggagtgggcaatgggcgtgtacggcacgcgcaaacccgaagattttgaagggcggcagcgcgaagttctagaaatctatacgcgacttcaccgcgccatgcggcacaaaatcaacccgattcccgtatgccgcattccgcccgaattgctgggctga

SEQ ID NO: 64740 - DNA, 1245 bp, Neisseria meningitidis; identical to SEQ ID NO: 43384

SEQ ID NO: 64741 - DNA, 1137 bp, Neisseria meningitidis
atggaaatgaaacaagccgattcaaccatcaaatctcgtgcggcggtggcattcgcccctaaccaacccttacaaattgtggaaatcgacgtagaaatgccgcgtaaaggcgaggtgttaatccgcaatacccacactggcgtgtgccatactgatgcgtttacgttatcaggaagcgatcctgaaggcgtattccctgtggtgcttggacacgaaggtgcgggtgtggtcgttgctgtgggcgaaggtgtgtcaagcgtaaaaccgggtgatcacgtgattccgctttacaccgccgaatgtggcgaatgtgagttttgttgttcaggtaaaaccaacttgtgcgtctcagtgcgtgatacacaaggtaaaggcttaatgccggacggcacgacgcgtttttcttatcaaggtcagccgatttatcactatatgggctgttcgactttcagtgaatactccgttgttgccgaagtttcactggcgaaaatcaaccctgaagccaaccatgaacaagtatgtttgctcggctgcggcgttaccacaggtattggtgcggtacataatacggcaaaagtgcaagaaggcgactctgttgccgtgtttggcttaggcgcgattggtttggcggtggtgcaaggtgcgcgtcaagccaaagccggccgcattatcgccattgataccaatccatcaaaatttgagttggcaaaacagtttggtgcaacggattgtttgaacccgaacgattacgataaaccgatcaaagatgtgttgttagacattaataaatggggcattgaccatacctttgaatgtatcggcaacgtaaacgtaatgcgtcaggcattagaaagtgcacatcgtggttggggacaatccattatcatcggcgtagcgggtgcgggacaagaaatttcaacgcgtccgttccaattggtaacaggtcgtgtttggaaaggctctgcatttggtggtgtgaaaggtcgctccgaactgccgaaaatggtggaagattcaatgaaaggcgatatcgagttagaaccgtttgtaacccacacaatgacactcgatcaaatcaataaagcctttgacttaatgcacgaaggtaaatcgatccgcgccgttattcactactaa

SEQ ID NO: 64742 - DNA, 1467 bp, Neisseria meningitidis; identical to SEQ ID NO: 42324

SEQ ID NO: 64743 - DNA, 954 bp, Neisseria meningitidis
atgacacataccgtccacctgcatttagaagaaatcgacaacttggcgttgcagcgtctgtgcggttcttttgacaacaaccttgatttacttgccaaagcactcgatatccacatcagccgccgttttgaacatttcactttcaacggcgcatttgcacacgccggcaaacgcgcactgctcaaactcttagaaacggcgcagacgcgtgacctaaacaacggcgacatcagacttgccgccgtcgaagcccaaacagaagatgccggtcatcaagaaaaaaaccatgaccacgcctattatttccgtacgaagcgcggcagcatcggcggcaggacacccagacaaaacggctatatccgcgccctgctcaaccacgatatcgtattcgggctggggcccgcaggcacgggcaaaacctatcttgccgtcgccgccgccgttgacacaatggaaaaacaccaaatcgaacgcatcgttttagtccggcctgctgtcgaagccggtgagaaactgggttttctacccggtgacctgacccagaaagtcgatccctaccttcgtccgctttatgatgccctctatgacctgatgggcttcgaccgtgtaaccaagctgattgaaaaaggcctgattgagattgccccgctcgcctatatgcgcggcaggacgctcaacggcgcatacatcatcctcgacgaggcacaaaataccacgcccgaacaaatgaaaatgttcctgacccgcatcggatttggtgcgaaagccgtcatcaccggcgacatcagccagattgacctgcccaaaaacatcaaatcaggattgaaagacgcacgtgagaaactgcacgatgtggaaggcctgtatttccacacctttaccagtgaagacgtcgtccggcatcctttagtgcaaaaaatcgtcgaagcctacgaatcggcagaacacgactga

SEQ ID NO: 64744 - DNA, 1188 bp, Neisseria meningitidis; identical to SEQ ID NO: 50463

SEQ ID NO: 64745 - DNA, 1170 bp, Neisseria meningitidis; identical to SEQ ID NO: 59980

SEQ ID NO: 64746 - DNA, 876 bp, Neisseria meningitidis
atgaatacagaaattgaaattatcgcaaccgacaaagtaagcaatcaggcagcgatgcgcagtgtgctggtgatggagcagtggggtaacggcgagacttatagcgaagagcgttgggttgaacgcggtcgtcaagcagtacggcagacgatggaaggcatgttcgaactgggacgtgcgctgattattttaaaagagcatacggaacacggacggtttatggaaattgtgaaaagccaatttgggctgggtatcgcagaaacatcacgtctgatgtcagccactcgccgctttgcgaccccgcaaatgcagaaagccgcgccgaagctgatggatttgggcaagtcgaagctgcttgagctgctggtcgaagaagacgttacgctggtgggtttggccgaaggggaagaagtcaacggcatgacctttgacgatgtggaccgaatgacggtgcgcgagctgcgcgtcgccctgcgcgaaagccgcgaaaacctcgccgccaaagacgaagtgatgaaaaccaaaacagccaaaattgatgagctggccgagaagctggctaagaagcaaaccgttgtcagagagccgaaggcggaagacgtaggcagcgagttggcgatgcagttaacaagccttgaggtcggtatccgcagtcaagtgagccgtttgaaagatttgttcgaccaacttaatgcgcacagtgaggcacacgagatcagccatcaggcaaagatggtcggcacgctcaatcaaattattttggactgcgagcaactgcgcgaaagctatgccctgccgactgaagcaccgacagacaatgtgccggaatggttgggcggtgaaacgggagaaggcgatgaatccggcaatgattga

SEQ ID NO: 64747 - DNA, 567 bp, Neisseria meningitidis; identical to SEQ ID NO: 59303

SEQ ID NO: 64748 - DNA, 1500 bp, Neisseria meningitidis; identical to SEQ ID NO: 48324

SEQ ID NO: 64749 - DNA, 3090 bp, Neisseria meningitidis; identical to SEQ ID NO: 50555

SEQ ID NO: 64750 - DNA, 1014 bp, Neisseria meningitidis
atgattttctccatcatcgtccctatttacaatgtggaaaaatacctccgctgctgcgtggattccgtgcttgccgaaaattttgccgattatgaaatgattttggtcgatgacggttcgccggatggctgcgggaagatttgcgacgaatatgcaggcaaatatccgcatataaaagtgattcatcaagaaaacggcgggctgtcggatgcccgcaacgccggtatccgagcggcaaaaggcgattacctgatctttttggacagcgacgactattgggccgataccaaccgttcaaaaaacgcggggggggggattctctttgatttacaacaacttgcagacaaaaaggttgatttgatcctgcatccctcgtccctcaattaccacgtcatccccaaaggggcggacttttcggataatgattttgtccgccattttgaaacgttggtggaggggcggtactatatcgccaacgcgtggacaaaaatcgtcaggcgggaaataatcatcaaaaacaatctgtttttcccaaaaggatacattcacgaggatttcccgtacagtttgcaattggcgcgttttatcaagacttttgccttttacgataaccctttttaccagtaccgcgttctcggcggctctatcagccacaacatcaaatacaaaaatttcagcgatgtgctgacgcatctcgaccggggtgtggattttttagtcgaaaacaaaaattcccccatctacggcggtttgcaaaaatttgtcttcgacaatatcggctatctgaggtctatattggtaaggctttatttttccaaaaacattatcgtcatctaccggaaatatttttcatttaaagaaaaatgcagaaagatattcggcgcgaaggcaatccgtccggtttttatcgggaagaccgcattcatcataggattgccgatattgcgcctgctcgtaccgcctatgctgtacccggcaatcaaggccgtttatcaaaaatttttttcggaataa

SEQ ID NO: 64751 - DNA, 651 bp, Neisseria meningitidis; identical to SEQ ID NO: 50221

SEQ ID NO: 64752 - DNA, 834 bp, Neisseria meningitidis; identical to SEQ ID NO: 43709

SEQ ID NO: 64753 - DNA, 270 bp, Neisseria meningitidis; identical to SEQ ID NO: 43524

SEQ ID NO: 64754 - DNA, 1470 bp, Neisseria meningitidis; identical to SEQ ID NO: 51067

SEQ ID NO: 64755 - DNA, 1092 bp, Neisseria meningitidis
atgaacgcccaaaccctgattgccaacgttgccgaattcgtcaaaaccaagctcaaacccatagtggacgacatcgaccgcaaaggatactaccccgaagcatttatgcgcgaactcggcgcaatcggtggattcggcgcagtcggcacagaagccgaaggcggcaacggcttgggtttggcaacgcaaatcgccgtattgcgcgaaatcggcaaagaatgcggcgcaacctctttcagtgcgtggtgtcaggcggcttgcgcgtggtatctgcaccaaacgcccaaccgggccgtcaaagacaaataccttgccgacatcctgcaaggcaaagtattggcgggtacgggcatgtccaataccgtcaaacaccttgccgacatcgaaaaacacaacctccaagccgagcgcgtggagggcggctacacagtcaacggcgcgctgccgtgggtgtccaacatcggcgaagaccacatttgggcgaataccgcccaaatcggcggcggctacgtcatgttcatcacaggcggacaatgggaaggcgtaagcctgcaaaactgccccgaattttgcgccctcgaaggcacgcgcaccttcagcctgaacttcaaagacgtatttatccccgacgaagacatcatcgccgcgcccgaacagtttgccgactacatccaaagcatcaaagcaggctttatcctcctgcaaatcggcatcggcgcgggcgtgatagacggcagcctcggcatcatccgcctcgccaacgtcgtcaacgccgaagtcaaccgctatctcgacgacggctacgacagcctcaaaacaaggctggacggcgcgtgggcagaaaccgaacggctcgccggattggcttggagcggcacgcccgacaaccttaccaccctcaagctgcgcgaagccgccgccgtactgacacttgccgccgcccaatccgccgccctgcattccggcgcaaaaggctacctgatgcggagtcccgcccaaaggcgcgtccgcgaagcaatgtttgtcgccatcgtaactcccgcgatcaaacacctccgcaaagaaatagcggcaatcgaagccgcaaaataa

SEQ ID NO: 64756 - DNA, 561 bp, Neisseria meningitidis; identical to SEQ ID NO: 59272

SEQ ID NO: 64757 - DNA, 471 bp, Neisseria meningitidis; identical to SEQ ID NO: 39685

SEQ ID NO: 64758 - DNA, 2019 bp, Neisseria meningitidis; identical to SEQ ID NO: 57434

SEQ ID NO: 64759 - DNA, 1509 bp, Neisseria meningitidis; identical to SEQ ID NO: 43352

SEQ ID NO: 64760 - DNA, 621 bp, Neisseria meningitidis; identical to SEQ ID NO: 37903

SEQ ID NO: 64761 - DNA, 294 bp, Neisseria meningitidis
atgaactttcaggaagaaaacgagaacatcaagaatgacatagagattaatctctcgcattccgctgaagccgacagcgtggaggcaatgatggacttggcggtttacgggctggcggcgatggttgccaaacacaacaaaacgcgcggcgagcagcttgtgttacaggcgattgccggtcatatgcggaagcttttggccgcgcttcccgaaaccgagtcattggtgcagaccgggaaggtttaccgccgacttgaagatttgatttttaaaacgtatttgccggagcagtaa

SEQ ID NO: 64762 - DNA, 324 bp, Neisseria meningitidis
atgatgaccgaaagcgagtttatccgcgcgagcgaagcattatttgaacacatcgaagaccaaatcgacgaaaacggctgggatttcgactgccggtttgccggaaacgtcctgaccatcgaagccggagacggcacgcaaatcatcgtcaaccgccacacgcccaatcaggaattgtggattgccgccaaaagcggcggctaccatttcgccgagcaaaacggcaaatggctggcaacgcgagacagccgcgatttttatgatgttttaaacgaagccctgagcgcggcttcgggcgaagcggtagagattgaggaattgtga

SEQ ID NO: 64763 - DNA, 2082 bp, Neisseria meningitidis; identical to SEQ ID NO: 44306

SEQ ID NO: 64764 - DNA, 654 bp, Neisseria meningitidis; identical to SEQ ID NO: 59971

SEQ ID NO: 64765 - DNA, 1092 bp, Neisseria meningitidis
atgagtttgaaatgcggcatcgtcggtttgcccaacgtcggcaaatccaccctctttaacgcgctgacccaatcgggtatcgaagcggcaaactatcctttctgcaccatcgaacccaacgtcggcatcgttgaagtccccgatccgcgtatggctgaattggcaaaaatcgtcaatccacaaaaaatgcagcctgccatcgtcgaatttgtcgacatcgccggtttggttgcaggtgcaagcaaaggcgaaggcttgggcaaccagttcctcgccaacatccgcgaaaccgatgcgattgtgaatgtcgtgcgctgctttgacgacgacaacatcgttcacgttgcaggcaaagtcgatccgattgccgacatcgaaaccatcggtacggagttggcgcttgccgacttggccagcgtcgaaaaagccatcgtccgcgaagaaaaacgcgcacgctcaggcgacaaagacgcacaaaaactggtcgatctgtgcaaaaaactgctgcctcatctggacgaaggcaagcctgtacgctccttcggtttggacgcagaagaactcgccatgctcaagccgctgttcctgctgactgccaaaccggccatgtatgtcggcaacgtttccgaagacggttttgaaaacaacccgcacctcgaccgcctgaaagaattggctgcaaaagaaaacgcgccggttgtggctgtatgcgccgcaatggaaagcgaaatcgccgaattggaagaggacgaaaaagccgaattcctcgccgaaatgggcttggaagaaccgggcctgaaccgcctgatccgcgccggctacgacctcttgggcttgcaaacctactttaccgccggcgtaaaagaagtccgcgcctggaccattcacaaaggcgacaccgcaccacaagccgccggcgtgattcacaccgactttgaacgcggcttcatccgcgcccaagttatctcctacgaagatttcatcgctttaggcggcgaagccaaagccaaagaagccggcaaaatgcgcgtagaaggcaaggaatatgtcgtgcaagacggcgatgtgatgcactttttgtttaacgtgtaa

SEQ ID NO: 64766 - DNA, 996 bp, Neisseria meningitidis; identical to SEQ ID NO: 42282

SEQ ID NO: 64767 - DNA, 822 bp, Neisseria meningitidis; identical to SEQ ID NO: 42663

SEQ ID NO: 64768 - DNA, 207 bp, Neisseria meningitidis
atggatgaagcggtttttgccgattgggcgttgaaaatctgcctgaccggtttgattatttttttaggttttatcgtttggaatttgggcaaggagtccaaagcgggcaaattcggcatcgccattttgtttttggttttgggcttgggcgtgttcggttttgtatttaaagaactgctaatcaagtttttggtattgcccaaatag

SEQ ID NO: 64769 - DNA, 234 bp, Neisseria meningitidis; identical to SEQ ID NO: 51244

SEQ ID NO: 64770 - DNA, 507 bp, Neisseria meningitidis; identical to SEQ ID NO: 50148

SEQ ID NO: 64771 - DNA, 1356 bp, Neisseria meningitidis; identical to SEQ ID NO: 43735

SEQ ID NO: 64772 - DNA, 2559 bp, Neisseria meningitidis; identical to SEQ ID NO: 54653

SEQ ID NO: 64773 - DNA, 579 bp, Neisseria meningitidis; identical to SEQ ID NO: 59640

SEQ ID NO: 64774 - DNA, 969 bp, Neisseria meningitidis
atgactgccaaacctttttccctcaacctgaccaacctcctgctgctggcggtgttgtttgccgtcagcctgtcggtgggcgttgccgatttccgctggtctgatgtgttttcgctgtcggacagccagcaggttatgttcatcagccgcctgccgcgcacgtttgcgattgtgctgacgggcgcgtcgatggcggtggcggggatgattatgcagattctgatgcgtaaccgttttgtcgagccttctatggcgggcgcgggtcagagtgcggctttgggtttgcttctgatgtccctgctgctgcctgccgcgccgctgccggtcaaaatgtcggttgccgccgttgccgcgctaatcggaatgctggtgtttatgctgctgatacgccgcctgccgccgacggcgcaattaatggtgccgctggtggggattattttcggcggcgtggttgaggcggtggcgacgtttgtcgcgtatgagtttgagatgctgcaaatgttgggcgtatggcaacagggcgatttttccggcgtgttgctcgggcggtatgagctgttgtgggcaacggggattttggctttgtttgcctatttgattgccgaccagctgacgattttgggtttgggcgaaacggtgagtgtgaacttggggctgaaccggacggcaattctgtggtcggggttgattattgtggcgctgatcacgtctttggtggtcgtgacggtcggcaatattccgtttatcggcttggtcgtgccgaacatcatcagccgcctgatgggagacaagctgcgccaaagcctgcctgctgtggctttactgggcgcatctttggtgttgctgtgcgatattgtcggacgcgtgattgtgtttccgtttgaaattccggtctctacggtttttggcgtgatggggacggctttgtttttatggcttttattaaggaaacctgctcatgccgtctga

SEQ ID NO: 64775 - DNA, 1494 bp, Neisseria meningitidis; identical to SEQ ID NO: 40700

SEQ ID NO: 64776 - DNA, 723 bp, Neisseria meningitidis; identical to SEQ ID NO: 42576

SEQ ID NO: 64777 - DNA, 864 bp, Neisseria meningitidis; identical to SEQ ID NO: 50338

SEQ ID NO: 64778 - DNA, 1986 bp, Neisseria meningitidis; identical to SEQ ID NO: 51691

SEQ ID NO: 64779 - DNA, 738 bp, Neisseria meningitidis; identical to SEQ ID NO: 50415

SEQ ID NO: 64780 - DNA, 903 bp, Neisseria meningitidis; identical to SEQ ID NO: 38685

SEQ ID NO: 64781 - DNA, 729 bp, Neisseria meningitidis; identical to SEQ ID NO: 40848

SEQ ID NO: 64782 - DNA, 171 bp, Neisseria meningitidis; identical to SEQ ID NO: 42347

SEQ ID NO: 64783 - DNA, 777 bp, Neisseria meningitidis
atgtccgacaacgctttgacctcttcgcgacgcttcggcggcatcgccagactctacggagactctgccttggcgcacttttcacaggcacacgtctgcgtagtcggcgtgggcggtgtcggctcgtgggcgatcgaggctttggcgcggacgggcatcggacgtttgactttgattgatttggacaacgttgccgaatcgaatgtcaaccgccagctgcacgccctgaccggagacttcggcaaagcaaaagttaccgccttgcgcgaacgcgtcgcccaaatcaacccaggatgccaagtgtttgaaattgaagatttcgttaccgaagacaatttgccggaatacttcggaaaaggttttgatttcgtcatcgacgcgatcgaccaagtgcgcgtcaaagcagcaatggcggcttattttgtggaacgcaaacaaccgtttgtcctcagcggcggcgcgggcggacaaaaaaatccggcgttaatccaaaccgccgatttgagccgcgtaacccacgatccgctgcttgccaacctgcgctacaccttgcggaaacgctacggcttcagccgcgatacgaaagccaaaatgcgcgtgccgtgcgtgttctcaaccgaaaacatcacgccgccgcaatcgggcgcggcgtgttctaccgatgccgctccgcaaggcttgtcgtgcgccggctacggtgcaagcatgctcgttaccgcttcgttcgggctatattgcgcacaggcggcggtggaacacatcgcagacaaaaaataa

SEQ ID NO: 64784 - DNA, 1071 bp, Neisseria meningitidis; identical to SEQ ID NO: 50196

SEQ ID NO: 64785 - DNA, 2037 bp, Neisseria meningitidis
atgactgacaacgcactgctccatttgggcgaagaaccccgttttgatcaaatcaaaaccgaagacatcaaacccgccctgcaaaccgccatcgccgaagcgcgcgaacaaatcgccgccatcaaagcccaaacgcacaccggctgggcaaacactgtcgaacccctgaccggcatcaccgaacgcgtcggcaggatttggggcgtggtgtcgcacctcaactccgtcgccgacacgcccgaactgcgcgccgcctacaatgaattaatgcccgaaatcaccgccttctttaccgaaatcggacaagatattgccttatacaaccgcttcaaaaccatcaaaaactcccccgaatttgcaacgctttccaccgcacaaaaaaccaagctcaaccacgacctgcgcgatttcgtcctcagcggcgcggaactgccgcccgaacagcaggcagaactggcccaactgcaaaccgaaggcgcacaactctccgccaaattctcgcaaaacgtcctagacgcgaccgacgcattcggcatttactttgacgatgccgcaccgcttgccggcattcccgaagacgcgctcgcgatgtttgccgccgccgcgcaaagcgaaggcaaaacaggctacaaaatcggcttgcagattccacactacctcgccgtcatccaatacgccgacaaccgcgaactgcgcgaacaaatctaccgcgcctacgttacccgcgccagcgaactgtcagacgacggcaaattcgacaacaccgccaacatcgaccgcacgctcgcaaacgccctgcaaaccgccaaactgctcggcttcaaaaactacgccgaattgtcgctggcaaccaaaatggcggacacgcccgaacaagttttaaacttcctgcacgacctcgcccgccgcgccaaaccctacgccgaaaaagacctcgccgaagtcaaagccttcgcccgcgaaagcctgaacctcgccgatttgcaaccgtgggacttgggctacgccagcgaaaaactgcgcgaagccaaatacgcgttcagcgaaaccgaagtcaaaaaatacttccccgtcggcaaagtattaaacggactgttcgcccaaatcaaaaaactctacggcatcggatttaccgaaaaaaccgtccccgtctggcacaaagacgtgcgctattttgaattgcaacaaaacggcgaaaccataggcggcgtttatatggatttgtacgcacgcgaaggcaaacgcggcggcgcgtggatgaacgactacaaaggtcgccgccgtttttcagacggcacgctgcaactgcccaccgcctacctcgtctgcaacttcaccccgcccgtcggcggcagagaagcgcgtttgagccacgacgaaatcctcatcctcttccacgaaaccggacacgggctgcaccacctgcttacccaagtggacgaactgggcgtatccggcatcaacggcgtagaatgggacgcagtcgaactgcccagccagtttatggaaaatttcgtctgggaatacgacgtcttggcacaaatgtccgcccacgaagaaaccggcgttcccctgccgaaagaactcttcgacaaaatgctcgccgccaaaaacttccaacgcggcatgttcctcgtccggcaaatggagttcgccctctttgatatgatgatttacagcgaagacgacgaaggccgtctgaaaaactggcaacaggttttagacagcgtgcgcaaagaagtcgccgtcatccaaccgcccgaatacaaccgcttcgccttgagcttcggccacatcttcgccggcggctattccgcaggctattacagctacgcgtgggcggaagtattgagcgcggacgcatacgccgcctttgaagaaagcgacgatgtcgccgccacaggcaaacgcttttggcaggaaatcctcgccgtcggcggatcgcgcagcgcggcagaatccttcaaagccttccgcggacgcgaaccgcgcatagacgcactcttgcgccacagcggtttcgacaacgcggtctga

SEQ ID NO: 64786 - DNA, 1410 bp, Neisseria meningitidis; identical to SEQ ID NO: 42893

SEQ ID NO: 64787 - DNA, 801 bp, Neisseria meningitidis; identical to SEQ ID NO: 50869

SEQ ID NO: 64788 - DNA, 1059 bp, Neisseria meningitidis; identical to SEQ ID NO: 50596

SEQ ID NO: 64789 - DNA, 159 bp, Neisseria meningitidis; identical to SEQ ID NO: 43473

SEQ ID NO: 64790 - DNA, 345 bp, Neisseria meningitidis
ttgaaagccatcaatctttacgattgtgcctttgaagatttcgttcccgaaatcaaagacaatttttgtgtgggaattgatttagacataggaactgatgatagtgatgctgcagatatattttctgttcgcatatgctctcctaaatggattttgcataattgtttccaaaatcaaagggttaaatggggagcgggtatgatgattatgaatgaatttaatcattctgttattaaatcggaaattgagaaaattcttaaagaatgttcaaaagaaacttgggaaaagtcattgacttatttacttcgttttttttcgtgggaatttgaagattatcagtgctaa

SEQ ID NO: 64791 - DNA, 507 bp, Neisseria meningitidis; identical to SEQ ID NO: 55584

SEQ ID NO: 64792 - DNA, 819 bp, Neisseria meningitidis; identical to SEQ ID NO: 37573

SEQ ID NO: 64793 - DNA, 1302 bp, Neisseria meningitidis; identical to SEQ ID NO: 50407

SEQ ID NO: 64794 - DNA, 1455 bp, Neisseria meningitidis
atgagcatcgaaccaacccctccgaaccttgaaaacgacggtatcgaaaacgatgtagaacgcgtttccgccgatttcgaccgtgtccactccctctgcgaaatcctcgaacctgcttttgaacaaatcgaaaacggcacaccgctcgaagacgcgtcgctgcgcgacaagctgaccgagctgaccgtcctcttgagcgagctgcaccctgccgacgtggcggcggtattggaatcgctgccgccgcgcgaacgcaatatcgtctggattctggtcaaaccggaagacgacggcgaagtcttgctggaagtgtccgacgcggtgcgcgaaacgctgatcgagtcgatggacaaagacgaattgttggcggcagttgacgatttggacgcggacgaattggcggaactggcagacgatttgccgcaccaagtggtttacgaagcgctacaaacccgcgatgaggaagaacgcgcccaagtcaaagcggcaatgtcctacgaagacaaccaagtcggtgcgattatggacttcgaattggtcagcatccgcgccgatgtcgcctgcgaagtggtgctgcgttacctgcgccgcttcgacagcctgcccgaccataccgacaagatttttgtcgtcgatgaaaacgacgtgctgcaaggcgtgctgcccatccgcaaacttttggtcgccgaccccgaagacttggtggaaaacgtgatggcgaaagatgtcgtgcgtttccgcgccgaagacgacgtggaagaagcggcgcaggcgtttgaacgctacgacttggttaccgcgcccgtcgtcgatgaaaacaaaaagctcatcggcaggattaccatcgacgagatggtggacgtgatccgcgaagaatccgaagcggatatgttgaacatggcaggtttgcaggaagaggaagacctgttcgcccccgtcttggattccgtcaaaaaccgctggatgtggctcgccatcaacctctgcaccgccttccttgccagccgcgtcatcggcgcgtttgaaggcagcatcgaaaaaatcgtcgcactcgccgcgctgatgcccatcgtcgccggcataggcggcaactcgggcaaccagacgattaccatgattgtccgcgcgatggcgatggggcagctgacggatatgcaggcggggcgtttgctgaaaaaagaagtcggcgtcgccttggtcaacggcatcatttggggaacggtcatgggcgcagtatcttggctgctttacggcagcctcggcatcggtttggtcatggttgccgcgatgacgctcaacctgctgctggcggcaaccgtcggcgtattaattcccgtggtaatggaaaagttcggacgcgatcccgcgctgggcagctcggtgctgattaccgccgttaccgactccggcggcttcctgattttcttgggtctcgccaccctgttcctgctttaa

SEQ ID NO: 64795 - DNA, 780 bp, Neisseria meningitidis; identical to SEQ ID NO: 39113

SEQ ID NO: 64796 - DNA, 1398 bp, Neisseria meningitidis; identical to SEQ ID NO: 59673

SEQ ID NO: 64797 - DNA, 336 bp, Neisseria meningitidis; identical to SEQ ID NO: 43247

SEQ ID NO: 64798 - DNA, 291 bp, Neisseria meningitidis; identical to SEQ ID NO: 42317

SEQ ID NO: 64799 - DNA, 471 bp, Neisseria meningitidis; identical to SEQ ID NO: 51023

SEQ ID NO: 64800 - DNA, 1242 bp, Neisseria meningitidis; identical to SEQ ID NO: 52048

SEQ ID NO: 64801 - DNA, 1239 bp, Neisseria meningitidis; identical to SEQ ID NO: 51721

SEQ ID NO: 64802 - DNA, 1266 bp, Neisseria meningitidis
atgaacacactccaacgccgcaagacgcatcaagtccgcatcgatcatattaccgtcggttcagaagcacccgtcgttatccaatctatgaccaacaccgacactgccgatgcaaaagccaccgcattgcagattaaggaattgagcgatgccggatccgaaatggtgcgtattaccgtcaacagccccgaagccgcgtccaaagttgccgaaatccgccgccgcttggacgatatgggctatgccacaccgcttatcggcgatttccacttcaacggcgaacgcctgttggcggaatttcccgaatgcggcaaagcattgtccaaataccgcatcaatcccggcaatgtcggcaaaggcgtaaaaggcgatgaaaaatttgcctttatgattcggactgctgctgaaaacgataaagccgtccgcatcggcgtaaactggggttctttggatcaaagcctcgccaaacgtatgatggatgccaacctcgcttcttccgcgccgaaaccgcccgaagaagtgacgaaggaagcactgattgtctcctctttggaatctgccgaaaaagccgttctattgggactgcccgaagacaaaatcatcctgtcgtgcaaagtcagcgcggttcaggatttgattcaggtttaccgcgaactgggcagccgttgcgcctatccgctgcatttgggtttgaccgaagccggtatgggcagcaaaggcattgtcgcatcaacggcggcattatccgtcttgcttcaagaaggaatcggcgacaccatccgcatttcactgactccggaacctggcagcccgcgtactcaggaggtcgtcgtcgggcaagagattttacagactatgggattgcgttcgtttacgccgatggttaccgcctgccccggctgcgggcgtaccaccagtaccgtatttcaagagctggcacaagatgttcaaaattacctgcgccaaaaaatgtctatatggcgtaccctttatcctggggttgaatccctgaacgttgccgtaatgggctgcgttgtcaatgggcccggagaaagcaaattggccgacatcggcatcagcctgcccggtacgggagaaacacccgttgcccctgtttatgtagatggtgaacgtaaagtaacgctgaaaggcgacaacattgcaacggaatttctggctattgttgaagagtatgtcaaaaccaattatggggagaacggactcaaacgccatcaagggaaggttatcccgatacactccctataa

SEQ ID NO: 64803 - DNA, 1980 bp, Neisseria meningitidis; identical to SEQ ID NO: 50937

SEQ ID NO: 64804 - DNA, 519 bp, Neisseria meningitidis
atgcgccttttcccgattgccgccgccctgacgcttgccgcctgcggtactgtgcaaagcacacaatatttcgtgttgcccgacagccgctacatccgccctgcaacgcaaggcggcgaaaccgccgtcgaagtccgtcttgccgaaccgctcaaacgcggcggactggtctatcaaaccgacccctaccgcctcaacaccgcacaaaaccacgtctgggcagacaccttggacgatatgctcgaagcggcgttgagcaatgcattcaaccgtttggacagcacacgcatctttgttcctgcctcacgcagcggcagtaccgaaaaatggacggtctatatcgacgcattccaaggcagctacacgggcaaaaccctcatcagcggctacgccgtcctacccgacggtacgaacagacccttccatatcgaaaccgaacagcagggtgacggctacgccgcgatgaccgccgcactcgaacagggactgaaacaggcggcgcaacagatggtcgagtaa

SEQ ID NO: 64805 - DNA, 180 bp, Neisseria meningitidis
atgttttggtatgtaatcggcttttgcgcctttgtcgtcgcgctgctgtcgctgtgggtcaatgccggcgcgttcggtatgcaggaagacgatactccgcaatcggattatgaaaggcgtttgggcttgggtgcgaagctgaaaaacaaaaatccggatacggacgaaaaacggcaataa

SEQ ID NO: 64806 - DNA, 456 bp, Neisseria meningitidis; identical to SEQ ID NO: 50674

SEQ ID NO: 64807 - DNA, 891 bp, Neisseria meningitidis; identical to SEQ ID NO: 58838

SEQ ID NO: 64808 - DNA, 183 bp, Neisseria meningitidis; identical to SEQ ID NO: 42652

SEQ ID NO: 64809 - DNA, 1041 bp, Neisseria meningitidis
atggatatttcagattttgattttaccctgcccgaaaagctgattgcccagcatccgcccgaagtgcgcggcagcagccgccttttggttgcgttgcccgatatgccgctgcaagaccgggtgttcggcgatttatccgattatgtcggtgagggcgacgttttggtgttcaacaacaccaaagtcatgaaagcgcggctgtttgggcagaaagacagcggcggcaggatcgaagccctgattgagcgcgtgttggacaaccataccgcactggcgcacatccgttcgtccaagtcccccaagcccggtatggggctggtgtttgaaggcggcatccgtgccgtgatggtcgggcgtgagggcgaactgttctgcctgcgttttgaaggcggtcaaaccgtttacgaacttttggaacagaacggacacctgcccctgccgccttatatcgaacgtgccgccgatgcggatgacgacagccgttatcaaaccgtttatgccaaatatcagggtgcagtcgccgcgccgacggcgggtctgcattttacggaagaacttttgcgccgcctgaaagacaaaggcgcggtaaccgcagaagtaaccctgcacgtcggtgcggggacattccaacccgtgcgtgtggaaaaaatcgaagaacacaaaatgcacagcgaatggtttgaagtgccgtctgaaaccgccgccgccgttgaggcggcaaaagcccgggggaacaaagtctgggcggtcggcacgacttccatgcgcgccctcgagtctgccgcgcgtgcgacgggtcgtctgaaagcggggcagggcgacaccgatattttcatcacgccgggctaccgttttaatgttgccgacaggctggttaccaatttccatctgccgaaatcgacgctgctgatgcttgtcagcgcgttttcgggtatgggtcatatccgcgccgcgtatcgttatgcggtcgaacgtgaataccgtttcttcagctacggcgatgcgatgattttggggcggaacgaaggggtggtacgttag

SEQ ID NO: 64810 - DNA, 870 bp, Neisseria meningitidis; identical to SEQ ID NO: 60101

SEQ ID NO: 64811 - DNA, 366 bp, Neisseria meningitidis; identical to SEQ ID NO: 42928

SEQ ID NO: 64812 - DNA, 270 bp, Neisseria meningitidis
atggcaatgaacaaattgaatttccttctgctgcttgcggtgtgcgtttccgctttttccgttgtgatgcagcaaaaccagtacaggctcaacttcacagctttggacaaggcgaaaaaacaggaaatcgccttggagcaggattatgcacaaatgaggctgcaacaggcgcgtttggcgaaccacgaagcgatcagggcggcggcagaaaaacaaaacctccatccgccggtttcgggcaatacctttatggtggagcatcaaagatag

SEQ ID NO: 64813 - DNA, 2016 bp, Neisseria meningitidis; identical to SEQ ID NO: 51225

SEQ ID NO: 64814 - DNA, 771 bp, Neisseria meningitidis; identical to SEQ ID NO: 42376

SEQ ID NO: 64815 - DNA, 312 bp, Neisseria meningitidis
atgtttaatcaaactcaaactgtaacttatcccgcaacttttttaggagctaaaaaattcaaaggcgaaattgatggctctaatatcgacacttgttccgtattggttgcaacacctttgccggcacagtcgggaaatgctgtcggattcacggctgcccaaatgaaattcggtgacagtaagaatttctcaagattagagaatctcaaatatccgtgcgaagtcatggtaacggttgaaatgacttcgacaggtaaaggcatggttccatcattaattgattttcaggtggcagaaaagccgaaaggttga

SEQ ID NO: 64816 - DNA, 519 bp, Neisseria meningitidis; identical to SEQ ID NO: 46493

SEQ ID NO: 64817 - DNA, 933 bp, Neisseria meningitidis; identical to SEQ ID NO: 51401

SEQ ID NO: 64818 - DNA, 5361 bp, Neisseria meningitidis; identical to SEQ ID NO: 51483

SEQ ID NO: 64819 - DNA, 363 bp, Neisseria meningitidis
atgacgggatttaatgatgccgccggcgtggcatcctccccctccgacatcaaaggcaaatatgttcagaaagttgaagtcgcaaaaggcgtcattaccgcccaaatggcttcaagcaacgtaaacaatgaaatcaaaggcaaaaaactctccctgtgggccaagcgtcaaaacggttcggtaaaatggttctgcggacagccggttacgcgcgccgacaccgccaccaacaacgacgccgttaccgccgccaccgacaacagcaacaacatcaacaccaagcacctgccgtcaacctgccgcgatgattcatctgccgtttgcatagaaacaccacctacggctttctataaaaatacctaa

SEQ ID NO: 64820 - DNA, 483 bp, Neisseria meningitidis; identical to SEQ ID NO: 36693

SEQ ID NO: 64821 - DNA, 1143 bp, Neisseria meningitidis; identical to SEQ ID NO: 51917

SEQ ID NO: 64822 - DNA, 735 bp, Neisseria meningitidis
atgagcgcaaacgtcagccgccttgttgttcaaaacctgcaaaaaagtttcaaaaaacgccaagtcgttaaaagcttctccctcgaaatcgaaagcggggaagtcgtcggcctgctcgggcccaacggtgcgggtaaaaccaccagcttctacatgatagtcggactcatcgccgccgacgcaggcagcgtaaccctagacggacaagaattgcgccacctgcccatacacgaacgcgcccgcctcggtgtcggctacctgccgcaggaagcctcgatattccgcaaaatgaccgtcgaacaaaacatccgcgccatcttggaaatcagaaccaaagataaaaatcaaatcgacagggaaatcgaaaaactgcttgccgacctgaatatcgagcgtttgcgcaataatcctgccccatctttgtcaggcggcgaacgccgacgcgtcgaaatcgcccgcgtactcgccatgaaaccgcattttattttgttggacgagccttttgccggcgtcgatcccatcgccgtcatcgacatccagaaaatcatcggatttctcaagtcgcgcggtatcggcgtattgattaccgaccacaacgtacgcgaaaccctcagcatctgcgatcgggcctacattatttcagacggcacggtgttggcatcgggaaaacctgatgatttggtcggaaacgaacaggttcgttctgtttatctgggtgagaacttcaaatattga

SEQ ID NO: 64823 - DNA, 1086 bp, Neisseria meningitidis
gtgcatgcgccggacgtaacgctccgcaacctgaccgttacacgttccggtatgagcctgccagcaatggatgccggtatttatctcgaagaaaccgccccacgcgccctgattgaacacaacaatatttttgataattcggtcggcgtatatctgcatggttctgccgaagcgatggtgcgcgagaataaaatcgtcggcgacgcgactttgcgcgtgaacgagcgcggcaacggcgttaccgtttggaacgcacccggtgcgcaggtcgtcggcaacgacatttccaaagggcgggacggcattttttccaacaccagcacgcacaacacctataaaaacaaccgcttcagcgatttgcgtttcgccgtccactatatgtacaccaacgacagcgaagtcagcggcaatatttccgtgggcaacaatatgggctatgtgctgatgttttccgaacggctcaaagtattcgacaatattgccgtcggtagtcgcgactagggcatcatgctcaactatgtcaactattccgatattcacgacaatattatcaacaaagcgggcaagtgcgtttttgcctacaatgccaactacgataaactgtccgccaatcattttgaaaactgccaaatcggcatacactttaccgccgccatcgaaggcacgtctctgcacgacaattcctttatcaacaacgaaagccaggtcaaatacgtcagcacgcgctttctcgactggagcgagggcggacacggcaactattggagcgacaacagtgcgttcgatttgaacggcgacggcttcggcgacagcgcgtaccggcccaacggcatcatcgaccaaatcatctagcgcgcgcccgtattgcgcctcttgatgaacagtctcgcaatcagcatcgtcaaatgggcgcaggcgcagtttcccgccgttctgcccggcggcgtggtggacagcaaaccgctgatgaagccttatgtccccaaaattcaaacccgctatcaggcaatgaaggacgagttgctcaaagaagccgaaacacggcagtcggaatggggcagggcggaaaacggttctttgaactag

SEQ ID NO: 64824 - DNA, 918 bp, Neisseria meningitidis
atgtctgtttataccagtgtttccgatgatgaaatgcgcggcttcctgagcggttacgatttgggggaatttgtttccctgcagggcatcgcgcaggggattaccaacagcaattattttctgacgacaacttcgggacgttatgtgctgaccgtgtttgaagtgttgaaacaggaagagctgccgttttttctggagcttaaccggcatttgagtatgaagggcgtggctgttgccgcgccggttgcgcgcaaagacggccggcttgattccgttttggcgggcaagcccgcctgcttggttgcctgcctgaaaggttcggatactgcgctgccgacggcggagcagtgtttccataccggtgcgatgttggccaaaatgcaccttgtcgccgccgatttccctttggaaatggaaaacccgcgttacgatgcgtggtggacggaggcgtgcgcccggctgctgcccgtcctgtcgcaagacgatgctgcgctgctgtgttccgaaatcgatgcgctgaaggacaatctcggcaatcatctgccttcgggcatcatccacgccgatttgtttaaagacaatgtgttgcttgacggcggtcaggtgtcgggctttatcgatttttattatgcctgccggggcaattttatgtatgacttggcgattgcggtcaacgattgggcaaggacggcggacaataagttggatgaggcgttgaaaaaggcgtttatcggcggttatgagggcgtgcgccccttgagtgccgaagaaaaggcgtattttccgaccgcccaacgcgccggctgcatccgtttttgggtgtcgcgcctgttggattttcattttccgcaggcgggcgagatgacgtttatcaaagacccgaacgcgttccgcaacctgctgttgagtttggattga

SEQ ID NO: 64825 - DNA, 606 bp, Neisseria meningitidis; identical to SEQ ID NO: 62439

SEQ ID NO: 64826 - DNA, 747 bp, Neisseria meningitidis; identical to SEQ ID NO: 51012

SEQ ID NO: 64827 - DNA, 225 bp, Neisseria meningitidis; identical to SEQ ID NO: 38459

SEQ ID NO: 64828 - DNA, 1029 bp, Neisseria meningitidis
atggcaagaaggtcaaaaacatttgaagaagctgctgctgaggttgaggaacgtttcggtcatcgtggcattaagttggtcgagtttgagggtacagccaagccgtgtgtaatcaactgccctaaacatggaaaccaaacctgttcgaggtactccaatatgttcataggaagtagctggggttgcccctcttgtggtaatgagcaagctgcaaaagccggtatagcgacccttaggaagaatcacatagcgttagaaatgctgaaacaggctgtaacaggtatgaccaagcaagagcgcatcacgacgcaagcctacaatgagatgaccaaatccgtggcaggttcaaacagcatagtccttaacgatgtccaaggcgatacgaccatcaacaaccatcatacgcatacgcacaaccgcagcgttgccgacggcaaagcactgtcgatgaggctcacaccccgtcctttgttgtcagaccgtcaggcggcggctttcgcccgtacaggcaaactcacgggcagtttcgacctgtttgcttcggtggtcgccccctcgcagtacacgtttgccgttgccatgcccgacacgtccatgtcgccggttatcgaaaagggagacttgctggtggtcgagccgcgtatgtgccctgcggacgaagacatcgcgctgattgaactgtccgacaagcggctggtcgtcgcgcaccttgttatcgatattgcgggcaggatgctgatttatcagacgggcaggccgtctgaagcctttgacctgcccgaaggcagcacgattttaggtgtggtgctggagtcaaaaaacggtttatgtccgccgcacaggcaagaaggcgtgttgattcggattaccgcccctgatgtgtggacggttggtatgatttccgcttccaaaacgtcgtgtacgcgcccgaccgcagcccggaaatcagccgtatgctttcttcgattttggcaggctacgcgtgggataccgaaaacccgttcgtggcgaaatccgaacaacgcctga

SEQ ID NO: 64829 - DNA, 1035 bp, Neisseria meningitidis; identical to SEQ ID NO: 42242

SEQ ID NO: 64830 - DNA, 735 bp, Neisseria meningitidis
atgaccaaacagctgaaattaagcgcattattcgttgcattgctcgcttccggcactgctgttgcgggcgaggtgtccgttcagggttacaccgtaagcggccagtcgaacgaaatcgtacgcaacaactatggcgaatgctggaaaaacgcctactttgataaagcaagccaaggtcgcgtagaatgcggcgatgcggttgctgcccccgaacccgagccagaacccgaacccgaacccgcacccgcgcctgtcgtcgttgtggagcaggctccgcaatatgttgatgaaaccatttccctgtctgccaaaaccctgttcggtttcgataaggattcattgcgcgccgaagctcaagacaacctgaaagtattggcgcaacgcctgagtcgaaccaatgtccaatctgtccgcgtcgaaggccataccgactttatgggttctgacaaatacaatcaggccctgtccgaacgccgcgcatacgtagtggcaaacaacctggtcagcaacggcgtacctgtttctagaatttctgctgtcggcttgggcgaatctcaagcgcaaatgactcaagtttgtgaagccgaagttgccaaactgggtgcgaaagtctctaaagccaaaaaacgtgaggctctgattgcatgtatcgaacctgaccgccgtgtggatgtgaaaatccgtagcatcgtaacccgtcaggttgtgccggcacacaatcatcaccaacactaa

SEQ ID NO: 64831 - DNA, 1164 bp, Neisseria meningitidis; identical to SEQ ID NO: 45612

SEQ ID NO: 64832 - DNA, 966 bp, Neisseria meningitidis
atgagcgacacgcaactgacccaaggcgaacgataccacatccaatacctgtcccgccactgcaccgtcaccgaaatcgccaaacagctgaaccgccacaaaagcaccatcagccgcgaaatcagacggcaccgcacccaagggcagcaatacagcgccgaaaaagcccagcggcaaagccagactatcaaacagcgtaagcgacaaccctataagctcgattcgcagctgattcagcacatcgacacccttatccgccgcaaactcagtcccgaacaagtatgcgcctacctgtgcaaacaccaccggatcacgctccaccacagcaccatttaccgctaccttcgccaagacaaaagcaacggcagcacgttgtggcaacatctcagaatatgcagcaaaccctaccgcaaacgctacggcagcacatggaccagaggcaaagtacccaaccgtgtcggcatagaaaaccgacccgctatcgtcgaccagaaatcccgtatcggcgattgggaagccgacaccattgtcggcaaaggacagaaaagcgcattattgaccttggtcgaacgcgttacccgctacaccatcatctgcaaattggatagcctcaaagccgaagacactgcccgggcagctgttagggcattaaaggcacataaagacagggtgcacaccattaccatggataacggcaaagagttctaccaacacaccaaaataaccaaagcattgaaagcggagacttatttttgtcgtccttaccattcttgggagaaagggctgaatgagaacaccaacggactcatccggcaatacttccccaaacaaaccgatttccgtaacatcagtgatcgggagatacgcagggttcaagatgagttgaaccaccgaccaagaaaaacacttggctacgaaacgccaagtgttttattcttgaatctgttccaaccactaatacactag

SEQ ID NO: 64833 - DNA, 2391 bp, Neisseria meningitidis
atgactgaacaaaaacacgaagaatacggcgccgacagcattcaggtgctcgaaggcttggaagcggtacgcaaacgccccggtatgtacatcggcgacacgcaggacggcagcggcctgcaccacatggtgttcgaagtattggacaacgccattgacgaagcactcgccggacattgcgacaaaatcaccgttaccatccacgccgaccattccgtcagcgtcgccgacaacgggcgcggtatgcccaccggcatccacccgaaagaaggacgctccgccgccgaagtcatcatgaccgtattgcacgcgggcggtaaattcgacaacaacagctacaaaatctccggcggcctgcacggcgtgggcgtgtccgtcgtcaacgcgctgtccgactgggtaacgctgaccatctaccgcgacggcaaagaacacttcgtccgcttcgtgcgcggcgaaaccgaagagccgttgaaggttgtcggcgattccgataaaaaaggcacgaccgtgcgcttcctcgccagtgcggaaaccttcggcaacgtcgaatacagcttcgacatcctcgccaaacgcatccgcgaactttcgttcctgaacaacggcgtggacatcgaattgaccgacgagcgcgacggcaaacacgaaagcttcgccctttccggcggcgtggctggattcgtgcaatacatgaaccgcaaaaaaacgcccttgcacgaaaaaatcttctacgcgttcggcgagaaagacggcatgagcgtcgaatgcgcaatgcaatggaacgacagctatcaggaaagcgtgcagtgttttaccaacaacattccgcaacgcgacggcggcacccacttgaccgcgttgcgccaagtgatgacccgcaccatcaacaactatatcgaagccaacgaagtggctaaaaaagccaaagtggaaaccgccggcgacgatatgcgtgaaggtctgacctgcgttttgtccgtcaaactgcccgatccgaaattctcatcgcaaaccaaagacaaactggtttccggcgaaatcggccccgtcgtcaacgaagtcatcagccaagccctgaccgacttcctcgaagaaaatccgaacgaagccaaaatcatcaccggcaaaatcgtcgatgccgcccgcgcgcgcgaagccgcccgcaaagcacgcgaaatcacccgccgcaaaggcgtgatggacggcttggggctacccggcaaactcgccgactgccaagaaaaagaccccgcattgtcagaactttatctggtcgagggcgattctgcaggcggttccgccatgcaggggcgcgaccgcaaattccaagcgattttgccgcttaagggcaagattttgaacgtcgaaaaagcgcgctttgaaaaaatgctcgccagtcaggaagtagccgctttgattaccgcgttgggcgcgggcatcggcaaagaagaattcaatgccgaaaaactgcgttaccaccgcatcatcatcatgaccgatgccgacgtggacggcgcgcacatccgcaccctgctcctgaccttcttctaccgccaaatgcccgagctggtcgaacgcggctacatctacattgcccagccgcctttatacaaagccaaatacggcaaacaagaacgatatctcaaagacgaattggaaaaagaccaatggctgctcggtttagccttggaaaaagccaaaatcgtttcagacagccgcaccatcgaaggcgaagagcttgccaataccgccaaacaattcctgttggccaaaaccgtcatcgagcaagaaagccgcatcattgacgaactcgtcctgcatgccatgctacatgcttcgccggtcgatctcagcacagcagaaagcgcagaccgctccgttgccgaattgaacggcctcttggacgaaaaagaagtcgcgctcgaacgtatcgaaggccacgaaggacaccagttcatcaaaatcacacgcaagctgcacggcaatgtggtggtgagctacctcgagcctaagttcctcaacagcaaagcctatcaaacccttacccaaaccgccgccgcacttaaaggcatggtcggcaaaggggcgaagctctacaaaggcgacaacgaatacgacatcgacagctttgaaggcgctttggacatcttgatgagcgttgcccaaaaaggtatgtccatccaacgatacaaaggcttgggcgagatgaaccccgaacagctgtgggaaaccacgatggatcccgccgtgcgccgccttctgaaggtacgcattgaggacgccattgccgccgacgaagtgttcgttaccctgatgggcgacgaggtcgaaccgcgccgcgcctttatcgaaaacaacgcgctgattgcccaaaatatcgacgcataa

SEQ ID NO: 64834 - DNA, 600 bp, Neisseria meningitidis; identical to SEQ ID NO: 36546

SEQ ID NO: 64835 - DNA, 1116 bp, Neisseria meningitidis; identical to SEQ ID NO: 60911

SEQ ID NO: 64836 - DNA, 540 bp, Neisseria meningitidis; identical to SEQ ID NO: 44661

SEQ ID NO: 64837 - DNA, 432 bp, Neisseria meningitidis; identical to SEQ ID NO: 43974

SEQ ID NO: 64838 - DNA, 654 bp, Neisseria meningitidis
gtgtttggttattttgtttttctatttgatttttttgcgtttttgttttttgcaaacgtctttcttgctgtaaatttattatttttagaaaaaaacataaaaaacaaattattgtttttattgccgatttctattattatatggatggtaattcatattagtatgataaatataaaattttataaatttgagcatcaaataaaggaacaaaatatatcctcgattactggggtgataaaaccacatgatagttataattatgtttatgactcaaatggatatgctaaattaaaagataatcatagatatggtagggtaattagagaaacaccttatattgatgtagttgcatctgatgttaaaaataaatccataagattaagcttggtttgtggtattcattcatatgctccatgtgctaattttataaaatttgcaaaaaaacctgttaaaatttatttttataatcaacctcaaggagattttatagataatgtaatatttgaaattaatgatggaaacaaaagtttgtacttattagataagtataaaacattttttcttattgaaaacagtgtttgtatcgtattaattattttatatttaaaatttaatttgcttttatataggacttacttcaatgagttggaatag

SEQ ID NO: 64839 - DNA, 216 bp, Neisseria meningitidis; identical to SEQ ID NO: 63430

SEQ ID NO: 64840 - DNA, 318 bp, Neisseria meningitidis; identical to SEQ ID NO: 54811

SEQ ID NO: 64841 - DNA, 246 bp, Neisseria meningitidis; identical to SEQ ID NO: 59399

SEQ ID NO: 64842 - DNA, 423 bp, Neisseria meningitidis; identical to SEQ ID NO: 47340

SEQ ID NO: 64843 - DNA, 795 bp, Neisseria meningitidis; identical to SEQ ID NO: 50651

SEQ ID NO: 64844 - DNA, 792 bp, Neisseria meningitidis
atgattactgtgaacacactgcaaaaaatgaaggcggcgggcgaaaaaatcgctatgctgaccgcttacgaatccaattttgccgcgctgatggacgatgccggcgtggaaatgctgctggtcggcgactctttgggtatggcggttcaagggcggcagtcgacgctgcccgtcagcctgcgcgatatgtgctatcacaccgaatgtgtagcacgcggtgcaaaaaatgcgatgattgtcagtgatttgccgtttggtgcatatcagcagagtaaggagcaggcgtttgccgccgccgccgaactgatggcggcaggagcgcatatggttaaacttgaaggcggtgtgtggatggcggaaactaccgaattcttgcaaatgcgcggtattccggtttgtgcgcacatcggtctgacaccgcaatccgtgtttgcttttggcggctacaaagttcaggggcgcggcggcaaggcgcaggctttgcttaacgatgccaaggcgcacgatgatgcgggggctgcggttgtattgatggagtgtgttcctgcggaactggcaaaaaaggtaactgaaactgttgcctgtccgaccatcggcatcggcgcgggggtcgattgcgacggtcaggttttggtgatgcacgatatgctcggtattttcccgggtaagacggcgaaattcgtcaaaaactttatgcatgggcaaagcagcattcaggcggcggttcgggcgtatgtcgaagaagttaaagccaaaaccttccctgctgcggaacatatttttgcagactga

SEQ ID NO: 64845 - DNA, 198 bp, Neisseria meningitidis; identical to SEQ ID NO: 50321

SEQ ID NO: 64846 - DNA, 540 bp, Neisseria meningitidis; identical to SEQ ID NO: 44661

SEQ ID NO: 64847 - DNA, 606 bp, Neisseria meningitidis; identical to SEQ ID NO: 54648

SEQ ID NO: 64848 - DNA, 594 bp, Neisseria meningitidis; identical to SEQ ID NO: 50571

SEQ ID NO: 64849 - DNA, 315 bp, Neisseria meningitidis; identical to SEQ ID NO: 42635

SEQ ID NO: 64850 - DNA, 426 bp, Neisseria meningitidis; identical to SEQ ID NO: 51344

SEQ ID NO: 64851 - DNA, 1602 bp, Neisseria meningitidis
atgcactcaatatatttttttaaggagaagcagatgagtcaaaccgatacgcaacgggacggacgatttttacgcacagtcgaatggctgggcaatatgttgccgcacccggttacgctttttattattttcattgtgttattgctgattgcctctgccgccggtgcgtatttcggactatccgtccccgatccgcgccctgttggtgcgaaaggacgtgccgatgacggtttgattcacgttgtcagcctgctcgatgctgacggtttgatcaaaatcctgacgcataccgttaaaaatttcaccggtttcgcgccgttgggaacggtgttggtttctttattgggcgtggggattgcggaaaaatcgggcttgatttccgcattaatgcgcttattgctcacaaaatctccacgcaaactcactacttttatggttgtttttacagggattttatctaataccgcttctgaattgggctatgtcgtcctaatccctttgtccgccatcatctttcattccctcggccgccatccgcttgccggtctggctgcggctttcgccggcgtttcgggcggttattcggccaatctgttcttaggcacaatcgatccgctcttggcaggcatcacccaacaggcggcgcaaatcatccatcccgactacgtcgtaggccctgaagccaactggttttttatggtagccagtacgtttgtgattgctttgattggttattttgttactgaaaaaatcgtcgaaccgcaattgggcccttatcaatcagatttgtcacaagaagaaaaagacattcggcattccaatgaaatcacgcctttggaatataaaggattaatttgggctggcgtggtgtttgttgccttatccgccctattggcttggagcatcgtccctgccgacggtattttgcgtcatcctgaaacaggattggtttccggttcgccgtttttaaaatcgattgttgtttttattttcttgttgtttgcgctgccgggcattgtttatggccgggtaacccgaagtttgcgcggcgaacaggaagtcgttaatgcgatggccgaatcgatgagtactctggggctttatttggtcatcatcttttttgccgcacagtttgtcgcattttttaattggacgaatattgggcaatatattgccgttaaaggggcgacgttcttaaaagaagtcggcttgggcggcagcgtgttgtttatcggttttattttaatttgtgcttttatcaatctgatgataggctccgcctccgcgcaatgggcggtaactgcgccgattttcgtccctatgctgatgttggccggctacgcgcccgaagtcattcaagccgcttaccgcatcggtgattccgttaccaatattattacgccgatgatgagttatttcgggctgattatggcgacggtgatcaaatacaaaaaagatgcgggcgtgggtacgctgatttctatgatgttgccgtattccgctttcttcttgattgcgtggattgccttattctgcatttgggtatttgttttgggcctgcccgtcggtcccggcgcgcccacattctatcccgcaccttaa

SEQ ID NO: 64852 - DNA, 2277 bp, Neisseria meningitidis; identical to SEQ ID NO: 50362

SEQ ID NO: 64853 - DNA, 360 bp, Neisseria meningitidis
atgaatatcaaacacctgattaccgccgcactcattgcctcagccgcctttgccgcgcaggcagccccgcaaaaacccgtatccgccgcccaaaccgcgcaacatccggccgtttggatcgatgtccgttccgaacaggaatttagcgaagggcatttgcacaacgcagtcaacatccccgtcgaccaaatcgtccgccgcatacacgaagccgcgcccgacaaagacacgccggtcaacctctactgccgcagcggacggcgtgccgaagccgcccttcaggagctgaaaaaagcaggttatacaaatgttgccaatcacggcggttataaagacctgctcaaaaaagggatgaaatga

SEQ ID NO: 64854 - DNA, 315 bp, Neisseria meningitidis; identical to SEQ ID NO: 37950

SEQ ID NO: 64855 - DNA, 1194 bp, Neisseria meningitidis; identical to SEQ ID NO: 50684

SEQ ID NO: 64856 - DNA, 315 bp, Neisseria meningitidis; identical to SEQ ID NO: 64707

SEQ ID NO: 64857 - DNA, 303 bp, Neisseria meningitidis
atgggctatcgtgtcggcataaattgttttgatacaagattgcaggcagacgactatttattgtcgtcccttcctcctactgttacccaggacggaaaaatcatcaggccggaaagggtgggcgataaatggattttgaacggaaagccggttacgttgtcttatccggaatgttccaattttgagcagataaagcaaggttcttatgtcggttcgacggttctaattctgtttgtagtcatttacggtttcaggcttctgattaattttttaaaagacataggcaaggttggtactgattga

SEQ ID NO: 64858 - DNA, 633 bp, Neisseria meningitidis; identical to SEQ ID NO: 41416

SEQ ID NO: 64859 - DNA, 1644 bp, Neisseria meningitidis
atgaatgcttttacccgtgcatggcatgcgctcgaacgccattatcaggatacgcgtcatgtccttttgcgcgaccgctttgcctgcgaacccgaccgttttgagcgtatgcacgagcgtttggacgggatgttgttcgattacagcaaaaaccgtttgggcgaagatacgctgcaactgctctgcaatcttgccgatgcggcggatttggaagggaaaatgcgtgctttgcggacgggtgcgaaggtcaacaacagtgaggggcgtgccgcgctgcatacggctttgcgcctgcccgacggtgcgggtgccgtttatgcggacggcagggacgtgttgcccgaaatccgccgcgagttaaatcgtgcgttggagtttgcacacagtttggacgacggttcgtatcaggggataactgggaaacggattacggattttgtccacatcggcataggcggatccgacctcgggccggcaatgtgcgttcaggcactcgagccgttcagacggcatatcgccgtccattttgccgccaacgccgatcctgcctgcctggatgcggttttatgccgtctgaaccccgaaacgacagtgttttgcgttgccagcaagtccttcaaaacaccagaaaccctgctcaatgcacaggcagtcaaggcgtggtatcgcggtgcggggttctcggaatccgaaacggcgtgccatttttgcgcggtgtctgccgacactgcggcagctgcggctttcggtatcgcggcggaacgcgtgtttgcgatgtacgactgggtgggcggacgctattccgtctggtcgtccgtcggtttgcccgtgatggttgcggtcggcggggcgcgtttccgcgagttgttggcgggggcgcacgcgatggacagccattttttccacacgccgccgcgccgcaacattcccgttctgatggcactgattgccgtgtggtataacaatttccaacacgcggacgggcagaccgccgttccgtacagccacaacctgcgcctgctgccggcgtggctgaaccagctcgatatggagagtttgggcaaaagccgcgcttcagacggcagtcccgccgtgtgcaaaacgggcggcatcgtgttcggcggtgaaggggtcaactgccagcacgcctatttccaactgcttcatcaaggcacgcgcctgattccctgcgactttatcgtcccgatgacggcgcagggcgtggaggaaggacgcagccgttttaccgttgccaacgcctttgcacaggctgaagccctgatgaaaggcaaaaccttggacgaagcacgcgccgaattggcagatttgcccgaagcggaacgcgaacgcctcgcgccgcacaaagagttccccggcaaccgccccagcaacagcatcctgctcgaccgcctcacgccctacaatctgggtatgctgatggcggcttacgaacacaaaacctttgtgcagggtgtaatttgggacatcaaccccttcgatcagtggggggtggaatacggcaaacagttggcgaaaaccatcatcggcgaactggaaggcggcacgtccgtacacgatgcctcgaccgaagggctgatggcgttttaccgcgaatgccgtctgaaaggcggcggcgcggcataa

SEQ ID NO: 64860 - DNA, 1008 bp, Neisseria meningitidis; identical to SEQ ID NO: 64484

SEQ ID NO: 64861 - DNA, 1110 bp, Neisseria meningitidis
atgagcaactggaaacccgatattccctataacgatttaccacccctgccgccaaaacaggatattgaaagcaaaaccatcctgaaacgttgtatagccgcccgtgcatcccttgcccgtttaaagcaggcggcagaactgataccgaatcaagccatgctgattaacacccttcctgttatggaagcccgtgcaagttcagaaattgaaaacatcgtaaccacaacggataagctgtttcaatccctgcaaatggatacggaacggcaagaccctgccacgaaagaagccctgcaataccgcaccgccctgtttgcaggctatgaatcactgacgagccgccctttatgcacacaaaccgccatcatggtctgcaacgccatcaagcacccctacgaaatggccatccgcaaaacaggcggcacagccctaaaaggaggcaacagcggaaatgttgtctataccccgcccgaaggagaagaaaccatacgcggcaagctggcaaattgggagcggtttattcacgaaagcggcgatttagacccgcttatcatcatggcggcggcacattaccaatttgaagccatccatccgtttacggacggcaacgggcggacggggcgcatattgaacagcctgctattgattgaaaaagggcttttggatttgcctattttgtatttgagccgctatattatcgaaaacagggcggactattaccgcctgcttttaggcgtaaccgaacggcaggactgggaaagctggataatctacatcttagacggcgtagccgacaccgccgattggacggtagcgaaaatagatgcgatacgccgcctgtttgagcagacacgtcaacacatacggacacacgcacaaggaatctacacgcacgaactggtaaatcttctgtttgagcagccatatacacgcattgccaacctagaagcggcagggatagccaaacggcagacggcctctaagtacctgaaagagctttcagacataggtgtgctgcaagaaatcgtcatcggcagggacaaactattcattcatccgcgcctaatggaactattgcggggagagggcaacagctttacttcattctaa

SEQ ID NO: 64862 - DNA, 312 bp, Neisseria meningitidis; identical to SEQ ID NO: 64815

SEQ ID NO: 64863 - DNA, 600 bp, Neisseria meningitidis; identical to SEQ ID NO: 41967

SEQ ID NO: 64864 - DNA, 138 bp, Neisseria meningitidis; identical to SEQ ID NO: 39131

SEQ ID NO: 64865 - DNA, 408 bp, Neisseria meningitidis
atgacttatactactgccaaagccgccgaaaaaataggcatctccgcccacaccctacgtttttacgacaaagaaggtttgttgcccaatatcggacgtgatgaatacggtaaccgctgttttaccgataacgatttgcaatggttgggcttattgcaatgcttgaaaaatacggggatgagcttaaaagacatcaaacgctttgcggaatgtaccgtcattggcgacgataccattgaagaacgcctttccttgtttgaaaatcaaatagaaaatgtgaagtgtcaaattgccgaattaaaacgctatttagatttgcttgaatacaaattggcgttttaccaaaaagcgaaagcattaggctcggtaaaagctgtaaatttgccgcaaattcctgaaacggcttag

SEQ ID NO: 64866 - DNA, 1116 bp, Neisseria meningitidis; identical to SEQ ID NO: 37027

SEQ ID NO: 64867 - DNA, 321 bp, Neisseria meningitidis; identical to SEQ ID NO: 39509

SEQ ID NO: 64868 - DNA, 297 bp, Neisseria meningitidis; identical to SEQ ID NO: 42747

SEQ ID NO: 64869 - DNA, 588 bp, Neisseria meningitidis
atggaacataagctgccgcaactgccttatgaaccggacgcattgtccccgcatctgagcaaagagactttggaattccactacggcaaacaccatcaaacctacatcaccaacctgaacaatcaaatcaaaggtaccgaatttgaaaacctacctttggaagagattgtgaaaaaatcttcgggcggcgtgttcaacaacgcggcacaaacttggaaccacaccttctactggctgggtttcacgcccaaaggtcaaggcaaaccttccggcgaactggccgccgccatcgacgcgaaatggggcagcttcgagaaattccaagaagcgttcaatgcctgcgctgccggtactttcggctccggttgggcatggctggtgaaaacccctgccggcggattggatttggtttccacttccaacgcagcaactccgctgaccactgaaaacacgccgctgctgacctgcgacgtgtgggaacacgcctactacatcgactaccgcaacagccgtcctaactacctgaaaggtttctgggaaatcgtcaactgggacgaagtcgccaaacgttttgctgccttgtcctga

SEQ ID NO: 64870 - DNA, 1434 bp, Neisseria meningitidis
atggacacacaaacttacaactacaaagtggtgcgccagttcgccatcatgactgtagtttgggggattgtgggtatgttggtcggcgttatcgtcgccgcccagctttttgctcctgccctcgacttgtctaatatcggaccttggttccacttcggccgcctgcgtccgctgcacaccaatgcggttattttcgcatttggcggttgcggcctgatcggcacatcatactacgttgtccaacgtacttgtaatacccgtcttttcggcggttggctgccggcatttaccttttggggctggcaggcggtaatcgttgccgccgtcgtcagcttccctatgggttggacccaaggtaaggaatatgccgaactggaatggccgatcgatattctgattactttggtttgggtggcttacgccatcgtattcttcggtacgattgccaaacgtaagattaaacatatttacgttgccaactggttctacggcggctttattttggcggtcgcacttttacacatcgtcaacaatatcagcatcccggccggtttgatgaagtcataccccgtctattccggtgcgattgatgctatggttcaatggtggtacgggcataatgccgtgggcttcttcctgactgccggcttcttgggtatgatgtactatttcgtacccaaacaagcagcccgccccgtttactcctaccgcctgtccgtcgttcacttctgggcgttgattttcacctatatgtgggcgggtccgcaccatcttcactacactgcgctgcctgactggacgcaatctttgggtatggttctgtctttgattctgttcgcaccctcttggggcggtatgattaacggcatcatgaccttgtccggcgcgtgggacaaactgcgtacagacccgattcttaaattcctgattgtatccttgtccttctacggtatgtctacctttgaaggcccgatgatgtcgattaaaacggtcaatgcattgagccactatacggactggaccgtcgcgcacgttcatgcgggtgcgttgggctgggtaggctttgtaaccatcggttccgtctattacatgattccccgtctgttcggcaaagaacagatgcacagcaccaagctggtagaagcacatttttggattgcgaccatcggcgtggttctgtatatcgctgccatgtggattgccggtgtgatgcagggtttgatgtggagttctttgaacgatgacggtacgctgacctactcgtttgtcgaatccgtaaaacgcaccatgccttactacgtgatccgttttgcaggtggtttattgtatctgagtggtatgtgcattatggcgtacaacgtgtaccgcacagccatcggtggtaaagcagtcgatgccgaaatccctgcggtttcccaaacacagcaccactaa

SEQ ID NO: 64871 - DNA, 1686 bp, Neisseria meningitidis; identical to SEQ ID NO: 51664

SEQ ID NO: 64872 - DNA, 2265 bp, Neisseria meningitidis; identical to SEQ ID NO: 51506

SEQ ID NO: 64873 - DNA, 1788 bp, Neisseria meningitidis
atgaaacttcctttatcctatttgcctaatattcgctttttgtcttggtgctgcttattggcaggtatcattgctcctgctactttgttggcctcccccaaccctgccgaaatccgtatgcagcaagatattcagcaacgccaacgcgaagagcagttgcgccaaaccatgcagcctgaaagcgatgtgcgtttgcatcaaaaaaacacgggggaaacggttaatcagttgatgggcgatgacagcagccaaccgtgttttgccattaacgaagtggtgttggaaggcgaacaccatgctcggtttcagtttgccctaaaacgtgccttgcgcgaaacgggttttcaggctggcaagtgtctgcatgcgggcaacattaatcaaatcatgtccttagcacaaaatgctttgatcggcaggggatataccacgacccgtatcttggctgcgccacaggatttgaatagtggcaagcttcaattaaccctgataccgagctatctgcgctccatacgaatcgatcggtctaacgatgatcaaacccatgcaggacgtattgcagcattccagaacaaatttcccacccgctcgaacgatctgttgaatctgcgtgatttggaacaaggactggaaaatctcaaacgtctcccgactgcggaagccgatctccaaatcgttcccgtagagggagaaccaaaccaaagtgatgtcgtggtgcaatggcggcaacgtctgctgccctaccgtgtgagtgtggggatggataattcgggtagtgaggcgacaggaaaataccaaggaaatatcactttctctgccgacaatcctttgggactgagtgatatgttctatgtaaattatggacgttcgattggcggtacgcccgatgaggaaagttttgacggccatcgcaaagaaggcggatcaaacaattacgccgtacattattcagcccctttcggtaaatggacatgggcattcaatcacaatggctaccgttaccatcaggcagtttccggattatcggaagtctatgactataatggaaaaagttacaatactgatttcggcttcaaccgcctgttgtatcgtgatgccaaacgcaaaacctatctcggtgtaaaactgtggatgagggaaacaaaaagttacattgatgatgccgaactgactgtacaacggcgtaaaactgcgggttggttggcagaactttcccacaaagaatatatcggtcgcagtacggcaggttttaagttgaaatataaacgcggcaccggcatgaaagatgctctgcgcgcgcctgaagaagcctttggcgaaggcacgtcacgtatgaaaatttggacggcatcggctgatgtaaatactccttttcaaatcggtaaacagctatttgcctatgacacatccgttcatgcacaatggaacaaaaccccgctaacatcgcaagacaaactggctatcggcggacaccacaccgtacgtggcttcgacggtgaaatgagtttgtctgccgagcggggatggtattggcgcaacgatttgagctggcaatttaaaccaggccatcagctttatcttggggctgatgtaggacatgtttcaggacaatccgccaaatggttatcgggccaaactctagtcggcacagcaattgggatacgcgggcagataaagcttggcggcaacctgcattacgatatatttaccggccgcgcattgaaaaagcccgaatttttccaatcaaggaaatgggcaagcggttttcaggtaggctatacgttttaa

SEQ ID NO: 64874 - DNA, 1515 bp, Neisseria meningitidis; identical to SEQ ID NO: 51153

SEQ ID NO: 64875 - DNA, 2580 bp, Neisseria meningitidis
atgcgatacgacaaattaaccgccaaattccaacaagcccttgcagaagctcagagtttggcgttggctgcggacggcagctatctggaagcaggctttgtgttaaaagccctgcttgacgaccaaaacagcggagccgccgcgttgctggcgcattcgggcgtgaacgtgccgcaggtgaaacagcgtttgcagcagcatttgagcagcctgccgaaagtgtccggccagggcggcgacattctgcccagccgcgaattgcaggcggtgttgaacctgatggacaaagccgcaaccaaacgcggcgatgcctatatcgccagtgaacttttcctgcttgccttggtgcagcagaacgatgcggccggcaaaattttgaaagaagccggcgcgaccgaacaaaacatcaatgccgcgattgacgcggtacgaggaggacaaaacgtgaacgatgccaatgccgaagaccaacgcgatgctttgaaaaaatatacgctcgatctgacccaacgcgcccgagacggtaagctcgaccccgttatcggccgtgacgacgaaatccgccgtgcgattcaggtattgcaacgccgtaccaaaaacaaccctgtgctgattggcgaaccgggcgtgggtaaaaccgccatcgtcgaaggtttggcacaacgcatcgtcaatggcgaagtacctgaatccctgcgcaacaaacgcctactggttttggacttggcggcattgattgccggcgcgaaataccgcggcgaatttgaagaacgcttgaaaggcgtgttgaacgacttggcgaaagacgacggcaacactctgattttcatcgacgaaatccatactttggtcggcgcaggcaaaaccgacggtgcgatggatgcgggcaatatgctgaaaccggctttggcacgtggcgaattgcactgtatcggcgcgaccaccttggacgaataccgccaatacatcgaaaaagacgcggcactcgaacgccgcttccaaaaagtattggttggcgagccaagtgtagaagacaccatcgctatcttgcgcggtttacaggagcgttatgaaatccaccacggtatcgatattaccgaccctgctatcgttgccgcagcggagttgagcgaccgctacattaccgaccgcttcctgcctgataaagcgattgatttgattgacgaagccgccagccgtgtcaagatggaaaaagaaaccaagccggaagcaatggacaaaatcgaccgccgtctaattcagcttcggatggaaaaggcgcacgttgaaaaagaaaaagacgatgccagcaaaaaacgtttggaactgatagacgaggaaatcaacggtctgcaaaaagaatacgccgatttagacgaaatctggaaagccgaaaaagcaatttcagacggtgctgctaatattaagaaacaaattgacgaagtcaaaattaaaatcgaacaggcaaaacggcaaggcgatttggcactggcttcaaaattgatgtatgaagatttggagcatttggaaaaacagcgtgcagccgccgaacgggcagatacggacagcacaaaaccggcaaacaaactcttgcgtaataatgtcggcgcggaggaaatcgcagaggtggtttcccgtatgaccggcattcccgtatccaaaatgatggaaggcgaacgcgacaaactgctgaaaatggaagaagtattgcaccgccgcgtggtcggacaggacgaagccgtgcgtgccgtgtccgacgctatccgccgcagccgctccggtcttgccgatccgaacaagccttacggcagcttcctgttcttgggcccgaccggcgtgggtaaaaccgagttgtgtaaggcattggcaggcttcctgtttgacagtgaagatcatctgattcgtatcgatatgtccgaatatatggaaaaacacgccgttgcccgcttaatcggcgcgcctccgggctatgtcggctacgaagaaggcggctacctgactgagcaagtccgccgcaaaccgtacagcgtgattcttttggacgaagtggaaaaagcccatcccgacgtgttcaacatcctgctgcaagtattggatgacggtcgtttgaccgacgggcaaggcaggacggtagattttaaaaataccgtgattgtgatgacttccaacatcggcagccagcacatccaacaaatgggcattcaggattacgaagcggtaaaagaagttgtgatggaggatgtgaaagaacatttccgtcctgaaatgatcaaccgcatcgacgaagtggtcgtgttccacggactggatcaggataatatccgcaacattgcgaaaatccagctcaaaggcttggaaaaacgtttggaaaaacaaaacctccgcctgactgtttccgatgccgctctggacatcatcgccaaagccggtttcgacccgatttacggcgcacgtccgctcaaacgcgccatccagtcggaaatcgaaaacccgctggcaaaagccctgcttgccggaaactatgcgcccgaaagcgaaatcagggtggaagccgacggcgacagactgaaatttgcctga

SEQ ID NO: 64876 - DNA, 1044 bp, Neisseria meningitidis; identical to SEQ ID NO: 59973

SEQ ID NO: 64877 - DNA, 1392 bp, Neisseria meningitidis
atgagcggtcatatgggaaaaggggcggatgcgcctgatttggtgtacggtttggaggataggccgccgttcggtaatgcgctgttgagcgcggttacccatcttttggcgattttcgtgccgatgattacgcccgcgctgattgtgggcggcgcgctggaactgccggtggagatgacggcgtatctcgtgtcgatggcgatggttgcgtcgggtgtcggcacttatttgcaggtcaaccgcttcgggccggtcggttcggggatgctgtccatccagtcggtgaatttctcgttcgttaccgtcatgattgcgctgggcgcggggatgaaagagggcggtttgactaaggatgcgatgatttcgacgctcttgggcgtatcgtttgtcggcgcgtttttggtgtgtttctcggcgtggcttctgccgtatttgaaaaaagtgattacgccgacggtcagcggcgtggtcgtgatgctcattggtttgagtttggtacacgtcggcattaccgatttcggcggcggcttcggcgcgaaggcggacggcacgttcggctcgatggaaaacttagggctggcatcgctggtgctgctgattgtgctggtgttcaactgcatgaaaaacccgctgctgcggatgagcggcattgcggtcggtctgattgccggctatatcgtcgcgctgtttttgggcaaggtggatttttcggcactgcaaaacctgccgctggttacgctgcccgtaccgtttaaatatggttttgcttttgactggcacgcatttattgtggcgggtgcgattttcttgttgagcgtgtttgaggcggtcggcgatttgacggcgacggcaatggtgtccgaccagccgattgaaggcgaggaatacaccaaacgcctgcgcggcggcgtgttggctgacggcttggtgtcagtgattgcgacggctttgggttcgctgccgctgacgacgtttgcgcaaaacaacggcgtgattcagatgaccggcgtggcttcgcgccatgtgggcaaatatattgccatgattttggtgctgttgggtctgttccccgttgtcggacgcgcgtttacgacgattccgagtccggttttaggcggcgcgatggttttgatgttcggcttgattgcgattgcgggtgtgcggattttggtcagccacggcatccgcaggcgcgaggcggtgattgcggcgacttcggtcggcttgggcttgggcgtggcgtttgagccggaagtgtttaaaaacctgcctgtcttgttccaaaactctatttccgccggcggcattacggcagtcttgctgaatttggtcttgcccgaagataaaaccgaggcggcggtcaagtttgataccgaccacttggaacactga

SEQ ID NO: 64878 - DNA, 402 bp, Neisseria meningitidis; identical to SEQ ID NO: 53833

SEQ ID NO: 64879 - DNA, 897 bp, Neisseria meningitidis
ttgaatccgacgaatgatttgaaagcgtggcaacagagggcgcaggcgcaaacagagctgctgctggaacgctttttgccgtctgaaaacgaaatcccgcacacgctgcacgaagcgatgcgttatgcggctttggacggcggcaaacgtctgcgcccgatgctggtgctggcggcttcggaattgggtggggctgtggcggacgcggtcggacaggcaatggcggcaatcgaaatgatccacgtctattctttggttcacgacgatatgccggcgatggacaacgacagcctgcggcgcggcaaaccgacctgccacatcaaatatggcgaagccaccgcgctactggtcggcgacgctttgcaaacccaagccttcgatgtattggcgcgtccgtccggcctgcctgcttcgaggcagctggcaatgttgtcagttttggcaaaagcgggcggaagcaggggtatggcgggcggtcaggcaatcgatttggcgaatgtcggcaaacaaatggttcaagccgatttggaacagatgcacagcctgaaaacgggtgctttgattcgtgcggcggttttattgggggcgatgtcctgcccgaatctgtctgaagacagtctggcggtattggatgattatgcggcaaaattgggcttggcgttccaagtcatcgacgatgtgttggactgcgaagcggacacggcaaccctggggaaaacagcaggcaaagacgcggacaacgataagccgacttatgtgaaactgatgggcttggaagcggcgcgctcatacgcacacaaactggttgccgaagcggtcgcgctgctcgaacccttcggcgacaaagccctgcgcctgcggcagttggcagaatttgcagtcgcccgcaaatattaa

SEQ ID NO: 64880 - DNA, 669 bp, Neisseria meningitidis; identical to SEQ ID NO: 51814

SEQ ID NO: 64881 - DNA, 642 bp, Neisseria meningitidis
atgctgaaacccgaaaccatacacatatccggtcctgccggcattttagaaaccatccatatcccgtccgaacaagtactggcacgcggtgttgccgtcatcaatcatcccaaccccctccagggcggaacaaacaccaacaaagtcatccaaaccgccgccaaagccttaagcaaacttggcttccactgctacctgcccaaccttcgcggcgtaggcaacagcgaaggcacacacgattacggacgcggcgaaacgcaagactgcctcgccgtcatcgactatgcccgcgcccaacatcccgaagcccccgaatttgccttatccggcttctccttcggcggttatgtcgccacatttgccgcacaagcgcgcatacccgatttattgctgctcatcggcgcggcagtctgccactataccggccgccccgagccgtccgccgttcccaacgttgccaaaaccctgatgatacacggtgcggaagacgaagtcgtcgaaatcgggaaagccctgaaatgggcggaaccgcaagatttgcccgtcattaccatcgccggttccacgcatttctttcacggcaaactcatcgtcttgcgcgacaccatcctccgcttcgcgcccgtatgcctgaacggataa

SEQ ID NO: 64882 - DNA, 930 bp, Neisseria meningitidis; identical to SEQ ID NO: 58405

SEQ ID NO: 64883 - DNA, 993 bp, Neisseria meningitidis
atgaaaaaatccctgattgccctgactttggcagcccttcctattgcagcaatggctgacgttaccctgtacggcaccatcaaaaccggcgtagaaacttcccgctctgtatattacgaagacggcaaagctgctgaagttacaaccggtaccggcatcgttgatttgggttcgaaaatcggcttcaaaggccaagaagacctcggtaacggtctgaaagccatttggcaggttgagcaaaaggcatctatcgccggtactgactccggttggggcaaccgccaatccttcatcggtttgaaaggcggcttcggtaaattgcgcgtcggccgtttgaacagcgtcctgaaagataccggcgacatcaatccttgggatagcaaaagcgactatttgggtgtaaacaaaattgccgaacccgaggcacgcctcatttccgtacgctacgattctcccgaatttgccggcctcagcggcagcgtacaatacgcgcttaacgacaatgcaggcagacataacagcgaatcttaccacgccggcttcaactacaaaaacggcggcttcttcgtgcaatatggcggtgcctataaaagacatgagcagatagataacgtgaagattgagaaataccagattcaccgtttggtcagcggttacgacaatgatgccctgcacgcttccgtagccgtacaacaacaagatgccaaattggttgaagacaattattcgcacaactctcaaaccgaagttgccgctaccttggcataccgcttcggcaacgtaacgccccgcgtttcttacgcccacggcttcaaaggctcgtttgatgatgcagaccgctacaatacttacgaccaagtggttgtcggtgcggaatacgacttctccaaacgcacttctgccttggtttctgccggttggttgcaagaaggcgaaggcgaaagcaaattcgtatcgactgccggcggtgtcggtctgcgccacaaattctaa

SEQ ID NO: 64884 - DNA, 720 bp, Neisseria meningitidis; identical to SEQ ID NO: 50382

SEQ ID NO: 64885 - DNA, 1413 bp, Neisseria meningitidis
gtgaaaatcctcattttaggcaacggacaggtaggttctaccgtcgcacaaaaccttgccgccatacccaacaacgacgtaaccgttatcgacatcgacgaaaaagcattgcaggaaacaggcagccgcctcgatgtccaaaccgttttcggcaacggcgcatcccccttcacattagaacgcgccggcgcggaagatgccgacttgctgctcgcgctctcccgcagcgacgaaaccaacatcgtcgcctgcaaagttgccgccgacctgttcaacatccccggccgcatcgcgcgcgtccgttccagcgaatacctcgaatacctcagccccaagctcgaaaacaacgaaaacggcagcctttccatattcggcataaccgaaaccatcagccccgaacagctcgttaccgaacagcttgccggcctgatagactgcccgggcgcattgcaggttttacgttttgcagacgaccgcgtgcggatggtcatcatacaggcgcggcgcggcgggctgcttgtcggacgcagcattgccgacatcgcccaagatttgcccgacggggccgactgccaaatctgcgccgtttaccgcaacaaccgcctcatcgtccccgcgccgcaaaccgtcatcatcgaaggcgacgaaatcctgtttgccgccgccgccgaaaacatcggcgcggtcatacccgaattgcgccccaaagaaaccagcacccgccgcatcatgattgccggcggcggcaacatcggctaccgtctcgccaagcagctcgaacacgcatacaacgtcaaaatcatcgaatgccggccgcgccgtgccgaatggatagccgaaaacctcgacaacaccctcgtcctgcaaggttcggcaaccgacgaaaccctgctcgacaacgaatacatcgacgaaatcgacgtattctgcgccctgaccaacgacgacgaaagcaacattatgtccgcccttttggcgaaaaacctcggcgcgaagcgcgtcatcggcatcgtcaaccgctcaagctacgtcgatttgctcgaaggcaacaaaatcgacatcgtcgtctccccccacctcatcaccatcggctcgatactcgcccacatccggcgcggcgacatcgttgccgtccaccccatccggcgcggcacggcggaagccatcgaagtcgtcgcacacggcgacaaaaaaacttccgccatcatcggcaggcgcatcagcggcatcaaatggcccgaaggctgccacattgccgccgtcgtccgcgccggaaccggcgaaaccattatgggacaccataccgaaaccgtcatccaagacggcgatcacatcatctttttcgtctcgcgccggcgcatcctgaacgaactggaaaaactcatccaagtcaaaatgggctttttcggataa

SEQ ID NO: 64886 - DNA, 783 bp, Neisseria meningitidis; identical to SEQ ID NO: 50923

SEQ ID NO: 64887 - DNA, 1293 bp, Neisseria meningitidis
atggctgtcttcccactttcggcaaaacatcggaaatacgcgctgcgcgcgcttgccgtttcgattattttggtgtcggcggcatacattgcttcgacagagaggacggagcgcgtcagaccgcagcgcgtggaacaaaaactgccgccgctgtcttggggcggcagcggcgttcagacggcatattgggtgcaggaggcggtgcagccgggcgactcgctggcggacgtgctggcgcgttcgggtatggcgcgggacgagattgcccgaatcacggaaaaatatggcggcgaagccgatttgcggaatttgcgtgccgaccagtcggttcatgttttggtcggcggcgacggcggcgcgcgcgaagtgcagttttttaccgacgaagacggcgagcgcaatctggtcgctttggaaaagaaaggcggcatatggcggcggtcggcttctgaggcggatatgaaggttttgccgacgctgcgttcggtcgtggtcaaaacgtcggcgcgcggttcgctggcgcgggcggaagtgcccgtcgaaatccgcgaatccttaagcgggattttcgccggccgcttcagccttgacggtttgaaggaaggcgatgccgtgcgcctgatgtacgacagcctgtatttccacgggcagcaggtggcggcgggcgatattttggcggctgaagtcgttaagggcggcacaaggcatcaggcgttctattaccgttcggacaaggaaggcggagggggcggcaattattatgatgaagacggcaaggtgttgcaggaaaaaggcggcttcaacatcgagccgctggtctatacgcgcatttcttcgccgttcggctaccgtatgcaccccatcctgcacacatggcggctgcacacgggcatcgattatgccgcaccgcagggaacgccggtcagggcttccgccgacggcgtgattacctttaaaggccggaagggcggatacggcaacgcggtgatgatacgccacgccaacggtgtggaaacgctgtacgcgcacttgagcgcgttttcgcaggcggaaggcaatgtgcgcggcggcgaggtcatcggttttgtcggttcgaccgggcgttcgaccgggccgcacctgcattacgaggcgcgcatcaacgggcagcccgtcaatcctgtttcggtcgcattgccgacaccggaattgacgcaggcggacaaggcggcgtttgccgcgcagaaacagaaggcggacgcgctgcttgcgcgcttgcgcggcataccggttaccgtgtcgcaatcggattga

SEQ ID NO: 64888 - DNA, 3216 bp, Neisseria meningitidis
atgcccaaacgtaccgacctaaaatccatccttatcatcggcgccggccctatcgttatcggtcaggcctgcgaatttgactattcgggcgcacaggcctgcaaggctttgcgtgaagaaggctataaagtcattctggtgaattctaaccccgccaccatcatgaccgaccctgaaatggcggatgttacctacatcgagccgattatgtggcagacggtggagaagattatcgccaaggagcggcccgatgcgattctgcccacgatgggtggtcagaccgcgctgaactgtgcgctggatttggcgcgcaacggcgtgctggcgaaatacaatgtcgagttgatcggtgcgacggaagacgcgattgacaaggcggaagaccgcggtcgctttaaggaggcgatggaaaaaatcggtttatcttgcccgaaatcttttgtctgccacaccatgaacgaagctttggcggcgcaagaacaggtcggcttccctaccctgattcgtccgtctttcacgatgggcggttcgggcggcggcattgcctacaataaagacgagtttttggcgatttgcgaacgcggtttcgatgcgtcgcccacgcacgagctgctgattgagcagtccgtcctcggctggaaagagtacgagatggaggtggtgcgcgataagaacgataactgcatcatcatttgctcgattgaaaacttcgacccgatgggcgtgcatacgggcgactcgattacggttgcgccggcgcaaacattgacagacaaagaataccaaatcatgcgtaatgcttcgttggcagtattgcgcgaaatcggcgtgaacacgggcggctcgaacgtgcagtttgcggtgaaccctgaaaacggcgagatgattgtgattgagatgaacccgcgcgtgagccgttcgtccgcgctggcttccaaagcgacgggcttcccgattgcgaaggtggcggcaaaactggcggtcggctttacgctggacgagttgcgcaacgacatcaccggcggcaaaacccccgcgtcgttcgagccttccatcgactatgtggtaaccaaaatcccgcgtttcgcatttgaaaaattccctgccgcagacgaccgcctgaccacgcagatgaaatccgtgggcgaagtgatggcgatgggccgcacgattcaggaaagcttccaaaaagccctgcgcggcttggaaacaggcttgtgcggcttcaatccgagaagctccgacaaagcggaaatccgccgcgaactggcgaaccccggccccgaacgtatgctgtttgtggcagacgcgttccgcgcgggcttcacgctggaagaaatccacgaaatctgcgccatcgacccttggttcctggcgcaaatcgaagacttgatgaaggaagaaaaagcggtttcagacggcattttgagtgatttggatttcgccgccctacgccgtctgaaacgcaaaggcttctccgacaaacgtttggcacaattgttgaacgtaagcgaaaaagaagtgcgcgaacaccgctacgcgctgaagctgcatccggtttacaaacgcgttgacacctgcgccgccgagttcgccaccgaaaccgcctatctttactccacttacgaagaagaatgcgaatcccgtccttccgaccgtaaaaaagtgatgattctcggcagcggcccgaaccgcatcggtcagggcatcgagtttgactactgctgcgttcacgccgcgctcgccctgcgcgaatccggttttgaaacgattatggtcaactgcaacccagaaaccgtgtccaccgacttcgacaccagcgaccgcctctatttcgagccgctgacattggaagacgtgttggaaatcgtccgcaccgaaaacccgtggggcgtgattgtgcattacggcggtcaaaccccgctgaaactcgccaacgcgttggttgaaaacggcgtaaacatcatcggcacgtccgccgacagcatcgatgccgccgaagaccgcgaacgcttccaaaaagtgttgaacgacttaggcctgcgccaaccgcccaaccgcatcgcccacaacgaagaagaagccctcgtcaaagccgaagaaatcggttatccgctggtcgtgcgcccgtcttacgtcctcggcggacgcgcgatgcagattgttcactctgccgaagagttgcaaaaatacatgcgcgaagccgtgcaggtttccgaagacagccccgtgttgctcgatttcttcctcaacaacgcgattgaagtcgatgtggactgcgtttcagacggcaaagacgtggttatcggcggcatcatgcagcacgtcgaacaggcgggcatccactccggcgactccggctgctcgctgccgccctactccttaagcgaagaaatccaagacgaaatccgccgccaaaccaaagcgatggcgtacgcgctgggcgtggtcggactgatgaacgtgcagtttgccgtacaagacggcgtggtgttcgtattggaagtgaacccgcgcgccagccgcaccgtgcccttcgtctccaaagccaccggcgtgccgctcgccaaagtcggcgcgcgctgcatggcaggcatttccctgaaagaacaaggcgtggaaaaagaagtcgtccccgatttctatgccgttaaagaggccgtgttccccttcatcaaattcccgggcgtggatacgattttgggaccggaaatgcgctccaccggcgaagtgatgggcgtgggcgcaagcttcggcgaagcctactacaaagcccaactcggcgcaggcgaacgcctcaacccgaccggcaaaatcttcctctccgtgcgcgaagaagacaaagaacgcgtcattaaaaccgctaaaaacttccaagccttaggctacggcatctgcgccacgcgcggcacggcgcaatacctgaccgaacacgggctgattgtgcagaccatcaacaaagtccccgaaggccgcccgcacatcggcgacgcgctgaaaaacggcgaaatcgcactggtcgtgaacaccgtttccagcgatccgcaatccgtgtccgacagccacatcatccgccaaagcgcattgcagcaacgtgtgccgcaatacaccaccactgccggcggcgaagcgatgagcgaaggtgcgaaaagccgagaccatctgggcgtgtacagcgttcaagagttgcacgggcgtttgaaaaaccgcaactga

SEQ ID NO: 64889 - DNA, 951 bp, Neisseria meningitidis; identical to SEQ ID NO: 42789

SEQ ID NO: 64890 - DNA, 6198 bp, Neisseria meningitidis
atgaataaaggtttacatcgcattatctttagtaaaaagcacagcaccatggttgcagtagccgaaactgccaacagccagggcaaaggtaaacaggcaggcagttcggtttctgtttcactgaaaacttcaggcgacctttgcggcaaactcaaaaccacccttaaaaccttggtctgctctttggtttccctgagtatggtattgcctgcccatgcccaaattaccaccgacaaatcagcacctaaaaaccagcaggtcgttatccttaaaaccaacactggtgcccccttggtgaatatccaaactccgaatggacgcggattgagccacaaccgctatacgcagtttgatgttgacaacaaaggggcagtgttaaacaacgaccgtaacaataatccgtttctggtcaaaggcagtgcgcaattgattttgaacgaggtacgcggtacggctagcaaactcaacggcatcgttaccgtaggcggtcaaaaggccgacgtgattattgccaaccccaacggcattaccgttaatggcggcggctttaaaaacgtcggccgcggtatcttaaccaccggtacgcctcaaatcggcaaagacggtgccttgacgggatttgacgtgcgccaaggcacattgaccgtcggtacgtcaggttggaacgacaaaggcggagccgattacaccgaagtgcttgcccgtgcggttgctttgcaggggaaattgcagggtaaaaacctggcggtttcgaccggcgcacagaaagtagattacgccagcggtgaaatcagcgcaggaacggcagcaggtacgaaaccgaccgttgccctcgatactgccgcattgggtggtatgtacgcagacagcattaccctgattgccaatgaaaaaggcgtaggcgtcaaaaatgccggcacactcgaagcggccaagcaattgattgtgacttcgtcaggccgcattgaaaacagcggccgcatcgccaccactgccgacggcaccgaagcttcaccgacttatctctccatcgaaaccaccgaaaaaggagcggcaggcacatttatctccaatggtggtcggatcgagagcaaaggcttattggttattgagacgggagaagatatcagcttgcgtaacggagccgtggtgcagaataacggcagtcgcccagctaccacggtattaaatgctggtcataatttggtgattgagagtaaaactaatgtgaacaatgccaaaggctcggctaatctgtcggccggcggtcgtactacgatcaatgatgctactattcaagcgggcagttccgtgtacagctccaccaaaggcgatactgaattgggtgaaaatacccgtattattgctgaaaacgtaaccgtattgtccaacggcagtattggcagtgctgctgtaattgaggctaaagacactgcacacattgaagcgggtaaaccgctttctttagagacttcaaacgttgcttctaacatccgtttgaacaacggtagcattaaaggcggaaagcaggtggtattgatggctgatgacgacattcaggcaaaagcctcccacctgaatgcgtccggcaatctgtatattcatgcaggtaaggatctggatttgaatgccgataaagacttatcaacacaaagtatcagcctgagggcagacaacaccgccctcatcagcagcaacggtaacaccttgactgcagaaaagaatctggatattcaggcaggtagcttgagtgtgcgtcaaagtaatctgcaatccagtggcggtaatgtgcagatgagcgcgactaaaggcaacatcagcttgaatcagagttggataaatgccagtcagaatattgatacggcagcacttcaaggcaatattatttcagacggtctgactgctgttgccgaagttggacgcgtatctcttcttgccaacggcaatgttgatttcaacggtctaaataccttgattgcggaaggagacattaatgctggttcagtcggtaaaggccgtctgaaaatggacaataccgatatttatgcttctgcaggcgatgtgaaactggttgccggaggtcaattagatttaggcaacggcaccgttaacggcggtcatatcagcttagacagcaataaaggcagcatggtggtgcagaatgtacacctgaatgcccgcgcatcactgaaagtggatgcggatcaaactttaaccattaataacagcaagctcaattccgatcacaatacccagattaatacaaatcatggtcatatgacgcttaatcagcttgatgctcattcacgtcgtcatatgagtatcagtgcacagggtaaaggcaaaggaaaagacagcggtcaaattttacaaaacgaccagcaaaacagtaaaagtactttggcggcagatggtgtattgtcattgaacagcagcgcattacaggttttggacaatactaccctgcgcggtggcgcgataaacatcaaagctggcggaggcatcatcaaacgggggcatatcgattgggaaacccaagatacggcaactatgcgttcagcggaactgaaaccactgtccggtatgatgtcgatagaatcgggcggtgataaccctttaaccgttgaacccggtaaccgtatcgtttctgcaggtgatttggccgtgaaccacaacggcacattccaaatcagtgccagagcaggaaataacggcaatccgagtgcgcaaacagccagcgtttcagctaaaggcaatatcgggattgtggcgggagaggtggatattgatgcagcaaatattgccgcagggaaagatttggctttagtggcaactaaagggaatatttcactaaacagtattaggaatacgtttagtaactatcaattgaaaacagataaacacaatatcacacagcaacttactgatgtagagcaggagcttagtaagttaacgagcgatcctaaatatcgtaaagcacaggatctttcacaaatgttgaggcgtaaatataagaggcgtgacaaagtattcggtgatagtgaggccagattacgtggtttacgagcaaagataaatgctgctgatgaggcttgggcagaacgccaatccccagtaaaagcgttacttgaacgtaaacaattgttacaacaagcccttttaacagtttcccaaccgggtagtggtcacgaaaaccaaggtagcacccttagcggtcaaaatatcaaactgctcgctgcaggtggtatccgtatccagggctccaaagttgctgccacccaacaggcaaatatccaagctgcaggatttttacctgcaccagccgcagaggaactgcaagaaggtcgacttcaatcagccattgacatcagcggtgtacttgatacttttgaatatggtcagcaaggcagcgataaatacggctatgccattttcagcaggccatctgaaatttcaggaaaaacaggtgttaccctctctgcaccaaatgccaatgagaacagccgcatcagtctgagtgcggcaaacatcgaagctgaaaacggcaaaatcaaaattcaatcctacggcgaccaatcctattacgccggacagggcgaactctatacctttgaacgccgcagctacaaaaccggcaaatggtacaaccgcaaacacattaccgaagtcaaagaacacaaaaacgccaagcccgacgcagtaaacctcagcgcatcccaaggcatcgacatcaaatctggtggcagcatcgacgcctacgccaccgcattcgatgcccccaaaggcagcattaacatcgaagccgggcggaaattgacactctatgccgtagaagagctcaactacgacaaactagacagccaaaaaaggcgcagatttctcggcatcagctacagcaaagcacacgacaccaccacccaagtcatgaaaaccgcgctgccctcaagggtagttgcagaatcagccaatctgcaatcaggttgggataccaaactgcaaggcacacagtttgaaaccacactgggtggcgcaaccatacgcgcaggcgtaggcgagcaggcacgggcagatgccaagattatcctcgaagggatcaaaagcagcatccacacagaaaccgtgagcagcagcaaatctactctatggcaaaaacaggcaggacggggcagtaacatcgaaaccttgcaattgccgagtttcaccggtcccgttgcgcccgtactgtccgcacccggcggttacattgtcgatattccccaaggcaatctgaaaacccaaatcgaaaccctcaccaaacagcccgagtatgcttatttgaaacaacttcaagttgcgaaaaacatcaactggaatcaggtgcagcttgcttacgataaatgggactacaaacaggagggcttaaccgaagcaggtgcggcgattatcgcactggccgttaccgtggtcacctcaggcgcaggaaccggagccgtattgggattaaacggtgcggccgccgccgcaaccgatgcagcatttgcctctttggccagccaggcttccgtatcgttcatcaacaacaaaggcaatatcggtaacaccctgaaagagctgggcagaagcagcacggtgaaaaatctggtggttgccgccgctaccgcaggcgtagccgacaaaatcggcgcttcggcactgaacaatgtcagcgataagcagtggatcaacaacctgaccgtcaacctagccaatgcgggcagtgccgcactgattaataccgctgtcaacggcggcagcctgaaagacaatctggaagcgaatatccttgcggctttggtcaataccgcgcatggagaagcagccagtaaaatcaaacagttggatcagcactacatagtccacaagattgcccatgccatagcgggctgtgcggcagcggcggcgaataagggtaagtgtcaggatggtgcgatcggtgcggctgtgggcgagatagtcggggaggctttgacaaacggcaaaaatcctgccactttgacagctaaagaacgcgaacagattttggcatacagcaaactggttgccggtacggtaagcggtgtggtcggcggcgatgtgaatacagcggcgaatgcggctaaagtcgcgattgaaaataacctattatctcaagaagagtatgctcttagagaaaaattgatcaaaaaagccaaagggaaaggcctattatctttagattggggcagcctgaccgaacaagaggcaaggcagtttatctatttgattgagaaagatcgatattctaatcaattgcttgaccgatatcaaaaaaatccaagtagtttaaataatcaagaaaaaaatattcttgcatattttattaaccaaacctctggaggtaacacagcttgggcagcttcgatactgaaaacgccccagtcaatgggtaatctcactattccttccaaagatattaataacaccttatcgaaagcctatcaaacattgagtcgttatgattcttttgattacaaatcagctgttgccgcacaacctgcactttacttattaaacggaccgcttggcttcagtgtcaaagcagctactgtggcagcaggaggatataacattggacagggagcgaaagcaatctctaatggagaatatctgcatggtacagttcaggttgttaatggcacattgatggttgcaggatctgtatctgcacaggctgcaatatcggccaagcctgcacctgttacccgttatctgagcaatgacagtgctcctgctttaagacaagctttaactgctgaaagccagagaatccgcatgaaactgccggaagagtatcgacaaatagggaatcttgcgatagcaaaaattgatgttaaaggattaccgcaaaggatggaagcatttagttctttccaaaaaggggaacatggatttatttcgttacctgaaacaaaaatttttaaacctatatctgttgataaatatcataatattgcctctcctcctagaggaacattaagaaatatagatggagaatataaattacttgaaactatagcacagcaactcggaaataatcgtaatgtatcaggtagaattgatctatttacagaattaaaggcctgtcaatcttgcagcaatgttattttagagtttagaaatcgctatccaaatattcaattaaatatttttacaggaaaatag

SEQ ID NO: 64891 - DNA, 474 bp, Neisseria meningitidis
atggaacaaaaagggtttacattgattgagatgatgatagtcgtcgcgatactcggcattatcagcgtcattgccataccttcttatcaaagttatattgaaaaaggctatcagtcccagctttatacggagatggtcggtatcaacaatatttccaaacagtttattttgaaaaatcccctggacgataatcagaacatcaagagcaaactggaaagatttgtctcaggctataagatgaatccgaaaattgccgaaaaatataatgtttcggtgcattttgtcaatcaggaaaaaccaagggcatacagcttggtcggcgttccaaagacggggacgggttatactttgtcggtatggatgaacagcgtgggcgacggatacaaatgccgtgatgccgcttctgcccaagcccatttggagaccttgtcctcagatgccggctgtgaagccttctctaatcgtaaaaaataa

SEQ ID NO: 64892 - DNA, 567 bp, Neisseria meningitidis; identical to SEQ ID NO: 38679

SEQ ID NO: 64893 - DNA, 966 bp, Neisseria meningitidis; identical to SEQ ID NO: 43603

SEQ ID NO: 64894 - DNA, 1470 bp, Neisseria meningitidis; identical to SEQ ID NO: 43805

SEQ ID NO: 64895 - DNA, 267 bp, Neisseria meningitidis; identical to SEQ ID NO: 38160

SEQ ID NO: 64896 - DNA, 549 bp, Neisseria meningitidis; identical to SEQ ID NO: 50193

SEQ ID NO: 64897 - DNA, 429 bp, Neisseria meningitidis; identical to SEQ ID NO: 41701

SEQ ID NO: 64898 - DNA, 351 bp, Neisseria meningitidis; identical to SEQ ID NO: 41719

SEQ ID NO: 64899 - DNA, 321 bp, Neisseria meningitidis; identical to SEQ ID NO: 55167

SEQ ID NO: 64900 - DNA, 486 bp, Neisseria meningitidis
atggacgcgctgcacaccatcgcccgaaacctgacgaaaaaacgtcaaaccgtaagctgtgccgagtcctgtacgggcggaatgcttgccgccgcattcacaagcgttgcaggcagttcgcaatggttcgaccagagttttgtaacatacagcaacaaagccaaagaagactgcttgggcgtgttgcccgaaaccctgctcgaacacggcgcggtcagccgccaaaccgtctatgagatggcgcgcggcgcgaaagccgtggcgcaggcggattacgccgtcggtatttccggcatcgccggaccgggcggcggcagcgaaagcaaacccgtcggcacggtttggttcgggtttgcctttccgggcggaagttgcgaagcaatgcgccgttttgacggcaaccgcgaatccgtccgcgcgcaggcggtcgccttcgcgttggaacggttggcggggctgattgaaaacggcggcgatgctgtctaa

SEQ ID NO: 64901 - DNA, 987 bp, Neisseria meningitidis
gtgagtggagcagaaagttaccggcatatcacggtcttgctgaatgaggcggtggatgcgcttgccgtgcgcgaagacggtgtctatgtggacggtacgttcggcaggggagggcattcccggctgattttgtcgcgtttgggcgatgcggggcggttgattgttttcgacaaagacccgcaggcgattgctgtggcagaagagctggcgcgttcggacaaacgggtcggtgtcgtgcatggcggttttgcttcgtttcagacggcattggacggtttgggtatcggcaaggtggacggtgcgctgtttgatttggggatttcgtctccgcaaatcgatgacggcagccgcggtttcagctttcgtttcgatgcccctttggatatgcgtatggatacgacgcgcggtatgtctgccgcagagtggatagcggttgcgtcggaacaggatttgcacgaggtaatcaagaattatggtgaagagcggtttagccgccagattgcgcgcgccattgttgcgcaacgggcggaaagtccaatcgatacaacccgcaagctggcgcagatcgtggcacaaaacgtccgtactcgcgagcgggggcaggatcctgcgacgcgcaccttccaggcaatccgcatctttattaaccgcgagcttgaagaagtaggggcagtattgccgcaggtcatgtgtcgtctgaaagagggcggacgtttggcggtcattgctttccattcgttggaagaccgcattgtgaagcagtttgtcaaaaaatattcgcaacacgcgcccctgccgcgttgggcggcggtcagggaagcggatttgcccgagccgcccctgaaaatcgtgggcagggcattaaagccgggtgaggcggaaattgccgccaatccgagggcgagaagtgcggttttgcgtgtggcggagcggactgccggtccgataccggaacaatcacagagaaaaacgtctgaatggcaatga

SEQ ID NO: 64902 - DNA, 1185 bp, Neisseria meningitidis
atgaccgaaccgacctcccgccgccgttttctgaaaacctgcaccgccgctgccggcgcggggctgcttcaggcttgcggcacatccgccacatccgttccgccccttccctcttcccattccgttgtgaaagcccgaaccgtgcctctccaaacgccacgccgtcaaagttcggacggcaaccttctgcgcgttgtcgcttcgtcaggatttgccgaagacaccaaccgcgtcaacacagccttaacccgcctttacaatgtcggttttaccgtaaccaaccaacaggcgggcagccgccgtttccaacggtttgccggcacggacacgcaacgtgccgccgatttccaagaggtcgcttccggccgcgtcgccacgcctaaagtgctgatgggcttgcgcggcggttacggtgcggcgcggattctgccgcatatcgattttgcttcgctcggcgcaaggatgcgcgaacacggcacgctgtttttcggattcagcgacgtatgcgccgtccagctggcattgttggcaaaaggcaatatgatgagttttgccggcccgatggcttatagcgattttggcaaacccgcccccggtgcgtttacgatggatgcctttatcaagggtgcaacccaaaaccgcctgaccgttgatgttccttatatccaacgcgccgatgtcgaaaccgaaggcatattgtggggcggcaacttaagcgtcctcgcctcgctcgccggcacgccttatatgcccgacatcgacggcggcattttgttcctcgaagatgtcggcgaacagccctaccgcatcgaacgtatgctcaatacgctgtatctttcgggtattttgaagaaacagcgcgccatcgtgttcggcaatttccgtatggaaaaaattcgagatgtctatgatccgtcttatgatttttccgccgttgccaaccatgtttcgcgcacggcgaaaatccccgtgctgacgggcttcccgttcggacacattgccgacaaaatcactttccctctaggcgcgcacgcccgaatccgtatgaatggaaacggcggttatgcggtcgcgtttggaggctacccgacactcgatgcgtccgccctgactttggataccctgctcccaccgccggatttgcccatcttccccgaaagcggtgttgccgatatttcggaataa

SEQ ID NO: 64903 - DNA, 204 bp, Neisseria meningitidis; identical to SEQ ID NO: 42415

SEQ ID NO: 64904 - DNA, 1128 bp, Neisseria meningitidis; identical to SEQ ID NO: 59944

SEQ ID NO: 64905 - DNA, 186 bp, Neisseria meningitidis; identical to SEQ ID NO: 38793

SEQ ID NO: 64906 - DNA, 345 bp, Neisseria meningitidis; identical to SEQ ID NO: 50572

SEQ ID NO: 64907 - DNA, 645 bp, Neisseria meningitidis; identical to SEQ ID NO: 38405

SEQ ID NO: 64908 - DNA, 1443 bp, Neisseria meningitidis
gtgaattatttccccattttcgccaacctcgccggccgccccgtattggtcgtaggcggcggttcggtcgccgcgcgcaaaatcagcctgttgctggatgccggcgcgcaagtcagggttgttgcaaatcagttgaatgctgaattaagtgcgctggcggcagaaaacaaaatcctgtggcttgccgaagaatttcgtgccgaacacatccgcacagttttcctcatcattgcggcaagcagcgaccaagccctcaaccggcgcgttttccagcttgccgaaagctgccaaaaaccggtcaacgtggtggacgatcgcgattattgcagttttatttttccttcgattatcaatcgcaatccgattcaaattgccgtttccagctccggcagcgcgcccgtcctcgcccgtttgctgcgtgaaaaactggaagccctgctgccgccgtctttgggcgatatggcggaaatctccggaagatggcgcgatgcggtcaaagccaaactgaaatccgttaccgaacgccgccgtttttgggaaaagcagttcaacggccgttttgccgccctcgttaaaaatcaacaaaccgcccaagccgaacaggagttggcaaagcagttggaacaaaattatcaaggcggttttgtgtctttggtcggtgcgggtcccggcgatgcggggctgctgacgctcaaagggctgcaggaaatccagcaggcagacgtggtgctttacgacgcgctggtttcagacggcatactgtccctcgtccgccgcgatgcggaacggatttttgtcggcaagcgcgcccggggcggccgcaccccgcaagaggacaccaatgcgcttatggtcaggctggcccgcgaaggcaggcgcgtggtgcgtttaaaaggcggagaccctttcgtgttcggacgcggcggcgaagaattggaaaccttggcacgccatcagatcccgttttcggtcgtccccggcattaccgccgccgtcggcgcgaccgcctatgccggcatcccgctcacgcaccgcgattatgcccaaagtgcggttttcgtaaccggccaccgcaaggcggatgcgcccgacatcgaatggcagaccctcgcccgcagccaccagaccttggtgatttatatgggtgcgctcaaagccgccctgattgccgaacggctgcaacagcacggacgctcgcccgacacgccggcagccgttatcagccaaggcacgctgccggctcaaaaaaccgcaaccggcacgctcgccaaccttgccgaactcgccgaaaccgcgccgaatccggcattgattgtcataggcgaagtggtggggctgcacgaaaaactcgcctggttcggtgaaaacggcgaaggagaaaaccgggtcgggcaggcgtatcccgcattgggcggactgaatgccggacaacgggcggcataa

SEQ ID NO: 64909 - DNA, 453 bp, Neisseria meningitidis; identical to SEQ ID NO: 49903

SEQ ID NO: 64910 - DNA, 285 bp, Neisseria meningitidis; identical to SEQ ID NO: 39906

SEQ ID NO: 64911 - DNA, 354 bp, Neisseria meningitidis; identical to SEQ ID NO: 51512

SEQ ID NO: 64912 - DNA, 126 bp, Neisseria meningitidis; identical to SEQ ID NO: 41141

SEQ ID NO: 64913 - DNA, 1272 bp, Neisseria meningitidis
atgttccaatggctttatgatgcattgtggctgcttgcgccgatatggatacggcgttatttggacaaacgctccggaagtgcccctgcatatcgggcgcatcgggacgagcgtttcggcaagccgtatccgaatcccgttaccggcgcggtttggatacacgccgtttcggtcggagaaacgcgtgccgcccagcccttgatacgcgagttgcggcagcgttttcccgatgcgccgctgctgatgactcagatgaccccgacgggacgggaaaccgcgcaagttctgtttcctgatgcacaatgccgttatcttccgtatgacaaaaaaacgtgggtacggcagtttttgcgcgaacaccgcccgatgttcggcattttgatggaaaccgaaatctggcccaacctgatgacggagtgccggaaatcgggcgttccgctgtttttggcgaatgcgcggctgtcggaaaaatcgctaaacggttatctgaaagtccgccgcctgatccgtcctgccgccgcttcgctgacgggttgtctggcgcagacggaggcggatgcggcgcggttggcgaaattgggcgcggcatccgtgcaggtgtgcggcaataccaaatacgacctgatgccgtcggaacagatgaaaacgctggcggggcagtttgaaaaacgcatcggagaccggccggttgccgtgtgcggcagcacgcgcgtttatcggggtgaagacgaggcggaaaaactgctggcggcgtggcaacaatatcgcggcgatgccctgctggtcgtcgtgccgcgccatcctgagcattttcagacggtatttgaaacggcaaaacgcttcgggtttaaggttcagcggcgcagcgacggtttgccggtcgaacccgatacgcaggtgtggataggcgacagtatgggcgagctgtgtgcgtattacctgtgcgccgatgtcgcttttgtcggcggcagtctggtcgattcgggctgtcagaacatcatcgaaccgctttcctgcggcgttccgacgatattcggcttttcgacctacaatttttccgaagcctgccggcacgccttggcatcgggtgcggcggttcaagtcgaatcggcggacgcgtggcgggaagccgttgaaaaaaccttatcgtccgaggagggcggaatgcagatgcaggcgcgcgcggacggctttatcgcacaacatcgcggagcgggcgcgagaatcgccgaggcggtacgggaagcggtatgcggacatcggggacgatag

SEQ ID NO: 64914 - DNA, 2397 bp, Neisseria meningitidis
atgattaaaaagattttaacgacttgttttggtttggtttttgggttttgtgtatttggagtgggtttggttgccattgctattttggtaacgtatccgaaactgccgtctttggattctttgcagcattaccagcctaaaatgccgttgactatttattcggcggatggggaagtcatcggtatgtatggggagcagcggcgcgaatttacaaaaatcggcgatttcccagaggtgttgcggaatgcggttatcgccgccgaggataaacgcttttaccggcattggggggtggatgtttggggtgttgcccgcgctgccgtcggcaatgtcgtgtccggcagcgtgcagtcgggtgcgagtacgattacgcagcaggtggcgaaaaatttttatttgagcagtgaaaaaacgttcacacgcaaattcaatgaggtgttgcttgcctataaaatcgagcagtctttaagcaaagacaaaatcctcgagttgtatttcaatcagatttacctcggtcagcgcgcctatggttttgcatctgccgcgcaaatctatttcaataagaatgtccgagatttgactttggcggaagccgccatgcttgcgggactgcccaaggctccgtctgcctataatccgattgttaatccggaacgtgccaagttgcgccagaagtatattttgaacaatatgctcgaggagaagatgattaccgtgcaacagcgcgatcaggcgttgaatgaggaactgcattatgagcggtttgttcggaaaatcgatcagagtgctttatatgtggcggaaatggtgcgtcaggaactgtatgagaaatacggtgaagatgcctatacgcagggttttaaggtttataccacggtccgcgccgatcatcagaaggtggcaaccgaggcattgcgcaaggctctacggaatttcgatcgcggcagcagctaccgcggtgcggaaaactatatcgatttgagtaagagtgaagatgtcgaggagactgtcagccagtatctgtcgggactctataccgtcgataaaatggttcccgccgttgtgttggatgtgactaaaaagaaaaatgtcgtcatacagctgcccggcggcaggcgggttacgcttgacaggcgcgccttgggttttgcggcccgcgcggtcaataatgaaaaaatgggggaggaccgtatccgcaggggcgcggtcatccgtgtcaaaaacaacggcgggcgttgggcggtggttcaagagccgttgctgcagggggctttggtttcgctggatgcaaaaaccggagctgtgcgcgcgctggtcggcggttatgattttcacagcaaaacattcaatcgtgccgttcaggcaatgcggcagccgggttcgacctttaagccgtttgtctattcggcggcattatctaaggggatgaccgcgtccacagtggttaacgatgcgccgatttccctgccggggaaagggccgaacggttcggtttggacacctaaaaattcagacggcagatattccggctacattactttgagacaggctctgacggcttccaagaatatggtttccatccgtattttgatgtctatcggtgtcggttacgcgcaacagtatatccggcgtttcggcttcaggtcgtccgagctgccggcaagcctgtctatggctttaggtacgggcgagacaacgccgttgaaagtggcggaggcatatagcgtatttgcgaacggcggatatagggtttcttcgcacgtaatcgataagatttatgacagagacggcaggttgcgcgcccaaatgcaacctttggtggccgggcaaaatgcgcctcaggcaatcgatccgcgcaatgcctatattatgtataagattatgcaggatgtggtccgtgtcggtacggcaaggggggcagctgcgttgggaagaacggatattgccggtaaaacgggtacgaccaatgacaataaggatgcgtggtttgtcggttttaaccctgatgtggttactgccgtatatatcggcttcgacaaacctaagagtatggggcgtgtcggctacggcggtacgattgcggtgccggtttgggtggactatatgcgttttgcgttgaaaggaaagcagggcaaggggatgaaaatgcctgaaggtgtggtcagcagcaatggcgaatactatatgaaggaacgtatggtaaccgatccgggcttgacgctggacaacagcggtattgcgccgcaaccttcccgacgggcaaaagaagatgacgggggcgcggcagaaggcggacggcaggcggcggatgacgaagtccgccaagatatgcaggaaacgccggtgcttccgagtaatactggttccaaacagcagcagttggattctctgttttaa

SEQ ID NO: 64915 - DNA, 336 bp, Neisseria meningitidis; identical to SEQ ID NO: 50355

SEQ ID NO: 64916 - DNA, 435 bp, Neisseria meningitidis
atgaactttgctttatccgtcatcacatttaccctcgcctctttcctgcccgtcccgcccgccgaagccgccgtctttacttggaaggacggcggcggcaacagctattcggatgtgccgaaacagcttcatcccgaccagagccaaatcctcaacctgcggacgcgccaaaccaaaccggcgatcaaacccgcccaagccgacgcagggaagcgcacagacggcgcggcacaggaaaacaatcccgacactgccgagaaaaaccggcagcttgaggaagaaaagaaaagaattgccgaaaccgaacggcagaacaaagaagaaaactgccggatttcaaaaatgaacctgaaagcggtgggaaattcaaatgcaaaaaacaaggatgatttgattcggaaatacaataacgccgtaaacaaatactgccgttaa

SEQ ID NO: 64917 - DNA, 528 bp, Neisseria meningitidis; identical to SEQ ID NO: 36183

SEQ ID NO: 64918 - DNA, 450 bp, Neisseria meningitidis; identical to SEQ ID NO: 36806

SEQ ID NO: 64919 - DNA, 645 bp, Neisseria meningitidis; identical to SEQ ID NO: 37921

SEQ ID NO: 64920 - DNA, 1977 bp, Neisseria meningitidis; identical to SEQ ID NO: 51625

SEQ ID NO: 64921 - DNA, 852 bp, Neisseria meningitidis; identical to SEQ ID NO: 50814

SEQ ID NO: 64922 - DNA, 393 bp, Neisseria meningitidis; identical to SEQ ID NO: 39912

SEQ ID NO: 64923 - DNA, 786 bp, Neisseria meningitidis; identical to SEQ ID NO: 42976

SEQ ID NO: 64924 - DNA, 1836 bp, Neisseria meningitidis; identical to SEQ ID NO: 51658

SEQ ID NO: 64925 - DNA, 768 bp, Neisseria meningitidis; identical to SEQ ID NO: 51004

SEQ ID NO: 64926 - DNA, 1578 bp, Neisseria meningitidis
atgcgcgccaaccccaaaacacaggcaatgccgtctgaaaccatatccctgatgaaaacacgcagcctaatttcccttttatgcctccttctctgttcatgttcttcatggttgcccccactggaagaacggacggaaagccgtcatttcaatacttccaaacccgtccgcctggacaacatcctgcaaatccggcacacccctcataccaacgggctatccgatatctatctgttgaacgacccccacgaagcctttgccgcacgcgccgcccttatcgaatctgccgaacacagcctcgatttgcaatactacatctggcgcaacgacatttccggccgactgctgttcaacctcgtgtaccttgccgcagaacgcggtgtgcgcgtacgcctgctgttggacgacaacaacacgcgcggattggacgacctcctgctcgccctcgacagccatcccaatatcgaagtgcgcctgttcaaccccttcgtcttccgcaaatggcgcgcactcggctacctgactgacttcccccgcctcaaccgccgcatgcacaacaaatcctttaccgccgacaaccgcgccaccatactcggcggacgcaatatcggcgacgaatacttcaaagtcggtgaggacaccgttttcgccgacctggatatcctcgctaccggcagcgtcgtcggcgaagtatcgcacgacttcgaccgctactgggcaagccattccgcccacaacgccacgcgcatcatccgcagcggcaacatcggcaagggtcttcaagcactcggatacaacgacgaaacgtccagacacgcgctcctgcgctaccgcgaaaccgtcgaacagtcgcccctctaccaaaaaatacagacaggacgcatcgactggcagagcgtccaaacccgcctgatcagcgacgaccctgcaaaaggactcgaccgcgaccgccgcaaaccgccgattgccgggcggctgcaagacgcgctcaaacagcccgaaaaaagcgtctatctggtttcaccctatttcgtccccacaaaatccggcacagacgcactagcaaaactggtgcaggacggcatagacgttaccgttctgaccaactcgctacaggcgaccgacgttgccgccgtccattccggctatgtcaaataccgaaaaccgctgctcaaagccggcatcaaactctacgagctgcaacccaaccatgccgtccctgccacaaaagacaaaggcctgaccggcagctccgtaaccagcctgcacgccaaaaccttcattgtggacggcaaacgcatcttcatcggttcgttcaacctcgacccccgttccgcgcgtctcaacaccgaaatgggcgttgttatcgaaagccccaaaatcgcagaacagatggagcgcacccttgccgataccacccccgaatacgcctaccgcgttaccctcgacaggcacaaccgcctgcaatggcacgatcccgccacccgaaaaacctacccgaacgaacccgaagccaaactttggaaacgcatcgccgcaaaaatcctatccctgctgcccatagaaggtttattatag

SEQ ID NO: 64927 - DNA, 381 bp, Neisseria meningitidis; identical to SEQ ID NO: 39320

SEQ ID NO: 64928 - DNA, 216 bp, Neisseria meningitidis; identical to SEQ ID NO: 37416

SEQ ID NO: 64929 - DNA, 555 bp, Neisseria meningitidis; identical to SEQ ID NO: 39520

SEQ ID NO: 64930 - DNA, 759 bp, Neisseria meningitidis; identical to SEQ ID NO: 42687

SEQ ID NO: 64931 - DNA, 759 bp, Neisseria meningitidis
atgaaaatcacccccgtcaaagccctaaccgacaactacatttggatgatacagcacggcaaccatgccgtctgcgtcgacccttccgaaccctcgcccgtcttggaattcctcgtccgcaaccgcctcatgcttgcccaaacatgggtaactcacccccatcccgaccacgagggcggtgcggcggcactctggcgcggctacatggaatcgcccgtttacggcgaatccgacatcgaagcggcaacccacaccgtaaccgcaggcacccaatttaccttcggcgaagggttaatcaccgtttgggcaaccccgggccataccgaccgccatatcagctacctcatggaaacttcagacggcatacacgtcttttgcggcgacaccctgttttccgccggctgcggacgcgtgttcaccggtacggtcgaacaactttacgacagcttccaacggttcaaccaattacccgaaggcaccctattctatccggcgcacgaatacaccgccgccaacctgcgtttcgccgcccatatcgagccggacaacgccgacattcagacggcattgaaggcggcagaacacacgcccaccctgcccgttaccctcgcccacgaacgccgcgtcaatccgtttttgcgcgtcgacctgccgcacgtcagagaccgcgccgaggcattgagcgggaaaacgttaaacagcagcctcgatacctttgtcgcgctgcgtgaacttaaaaaccaataccggacgaaataa

SEQ ID NO: 64932 - DNA, 642 bp, Neisseria meningitidis
atgaccgatttccgccaagatttccttaaattctccctcgcccaaaatgttttgaaattcggcgaattcaccaccaaggcaggacggcagtcgccttatttcttcaatgctggcctctttaacgacggcttgtccacgctgcaactggcaaaattttacgcacaatccatcattgaaagcggcatccaattcgatatgctgttcggccccgcctacaaaggcattattttggcggcggcaaccgcgatgatgctggcggaaaaaggcgtaaacgtcccgtttgcctacaaccgcaaagaagccaaagaccacggcgaaggcggcgtgttggtcggcgcgccgcttaaagggcgcgtgctgattatcgacgatgtgatttccgccggcacatccgtacgcgaatcgatcaagctgattgaagcggagggtgcaacccccgccggtgtcgccatcgcgctcgaccgcatggaaaaaggcacgggtgaattgagcgcggttcaggaagtggaaaaacaatacggcctgcccgtcgcccccatcgccagcctgaacgatttgtttattctgttgcaaaacaaccccgaattcggacagttcctcgaacccgtccgagcctaccgtcggcagtacggcgtagaataa

SEQ ID NO: 64933 - DNA, 492 bp, Neisseria meningitidis; identical to SEQ ID NO: 42417

SEQ ID NO: 64934 - DNA, 177 bp, Neisseria meningitidis; identical to SEQ ID NO: 38352

SEQ ID NO: 64935 - DNA, 354 bp, Neisseria meningitidis; identical to SEQ ID NO: 36480

SEQ ID NO: 64936 - DNA, 360 bp, Neisseria meningitidis; identical to SEQ ID NO: 44577

SEQ ID NO: 64937 - DNA, 657 bp, Neisseria meningitidis
gtggcttcagtatttttagaaggagaagcagtcgaggtcggcaatattttctgtatcggcaggaactatgccgcacatattgaagagttaaaaaacgaaataccttccgaacctgtggtgtttatgaagccgtcaggcagcattttgaatagcggcggtacaatcttgctgcccgagtttagtagggatgtgcagtttgagtgcgaactcgtgctgctggtcggtaaggattcagacggcatgggagagggtgaagatattttgggatgtgtggcggggtacggcgtgggtttggatttgaccgcgcgagacatccaatgccatctgaaggcgcaggggctgccctggctgaaggcaaaagggttcaggcattccgcgtgcgtgtcggattttgcggcggcagacagaatcggcaatcccgagaaggtgttgttttcattaaaacaaaacggcgtattgaaacagcgcggggataccggtttgatgatttacccgattcgggaaattttacacaaactggcggcagattacggtttggggaaaggggatttggtgtttaccggaacgccttccggcgtgggcgcaatcggtgcgggggacaatttggcattggagctggacggcttggtgcgcgcctctttcacggtagggtgttaa

SEQ ID NO: 64938 - DNA, 621 bp, Neisseria meningitidis; identical to SEQ ID NO: 42375

SEQ ID NO: 64939 - DNA, 1362 bp, Neisseria meningitidis
atgctgaaaaaatggttaaataagatgctgccttccggtcggagcagtaaaaaagcggaaagtaaaacgatcattcctgccgaaagacacaacatccgtgccgaaatgttgagctttgccgccgaaaacgtcatacgccgcctgaaaggggcggggtttcaggcttatgtggtcggcggcgcggtcagggacctgctgctcggcatcgaacccaaggatttcgatgtcgcaaccgatgccacgcccgaacaggtgcacaaactcttccgccgcagccgcatcatcggcaggcgttttcagattgtccatgtgatgaacggtgcagagattatcgaagtaacgacgtttcgcggcggtgcaaaggttcatcagaacgcgcacggcaggattatgaaggacaacacctacggcagcatcgaagaagatgcgatgcggcgcgattttacctgcaatgccttgtattacgatcctgaaaaagaagagattttggatttccacaacggaattgccgatgttgccgcccgcaggctggttatgattggcgatgccgccgaacgctatcaggaagaccctgtcaggattttgcgcgccatccgcctgtcgggcaaattgggatttgatctgtcggaagaaaccaccgcaccgattgccgaatcgatatgccgtctgaagcacgaaccggtagcgcggctgtttgacgaaatcatgaaactgctgttttcagggcacgcgcgcgagtgtctgaaacgtttgaacggatttgacataccggacgacatccatccgctgctcaatgccttgcgcgtttcagacggcatcgccggaaaaatgacggtgcttgccctgaaaaataccgatgagcggctgcgtgccgacaaatcggtttcggtcggttttgtactggcggctctgatgtggcccgagttggaacgccattggaaaagcaatctgcaacagggtttgaaacccgcgcccgccctgtccgatgcaatcaatacgatgcgtgaaaccgtcgaacgcggttggggcgtgccgcaacgcttttccgccacgatgcgcgaaatttggatgtttcagccgcagtttgaaaaccgcaaaggcgcacgtccgcacaaactgtttgcacaggcgcgtttccgtgccgcctatgatttcctgctcttgcgcgccgaaaccggcaatgcggaccgcgcccttgccgagtggtggacggcgtttcagacggcatcgacggaacagcggacggaaatgaccaaaaacgaggctgccgcccggcacgaaaaaaacgaaggacaggcgaaaaaacgccgccgtcgcaggcgcaaacccaagccgaaggttgtgggaacggattgggaataa

SEQ ID NO: 64940 - DNA, 1086 bp, Neisseria meningitidis; identical to SEQ ID NO: 43799

SEQ ID NO: 64941 - DNA, 450 bp, Neisseria meningitidis
atgaaaaaattattgattgccgcaatgatggcggctgccttggcagcttgttcgcaagaagccaaacaggaggttaaggaagcggttcaagccgttgagtccgatgttaaagacactgcggcttctgccgccgagtctgccgcttctgccgtcgaagaagcgaaagaccaagtcaaagatgctgcggctgatgcaaaggcaagtgccgaggaagctgtaactgaagccaaagaagctgtaactgaagccaaagaagctgtaactgaagccaaagaagctgtaactgaagccaaagaagctgtaactgaagccaaagaagctgtaactgaagccaaagaagctgtaactgaagccaaagaagctgtaactgaagcagctaaagatactttgaacaaagctgccgacgcgactcaggaagcggcagacaaaatgaaagatgccgccaaataa

SEQ ID NO: 64942 - DNA, 1347 bp, Neisseria meningitidis; identical to SEQ ID NO: 42142

SEQ ID NO: 64943 - DNA, 480 bp, Neisseria meningitidis
atgactgacaacctaatacagatagcaacgccgatattgactgttatcggcgtttttgttgccgcttacggcatcatgaggaatacagaaaacgccaaaaagcgcgccaccatcgacatgatcatggccgaacgtaacaatgccgcccttcaagaagccataaccatagtaaacgggctggcaaaaacagacggatgcatactcgccacctatacatcggataccccggacaagaagaaagaccgtgaagccatactgacagttttaaaccagcgcgaatttgtctgtgcgggcgtattgggcggagcactgcacgagaaaatgtataaagatttcgaatactccatgctgttacgtgactgggacaacctaagcagcttcatttttgaaatacgccgtatcaggagcgcaccgacggcctttcaagaatttgaagccgtagcccgaaaatggaagaaaaagcctctgaaaaccaaatag

SEQ ID NO: 64944 - DNA, 711 bp, Neisseria meningitidis
atgctgtttgaaggcttaccgtgtttggcggtttggtgcaaaaaccggctgtctgccgttttgcctgttggaggattgaacgtgtctgaaaatctgcttgaaatcgaaacccatcccttcgatcccgtgttgccgtcgaaggctgcggtcatgatgatggggacgtttccgcccaaggaagacaaacgcgcgatgcagtttcattatccgaatttccaaaacgatatgtggcgcgtttacgggctggtgtttttcggcgatgcggattatttcaaagtgccgtccaacggggaggctgcgcactctgaaaaagcgtttgacgcggagaaaatcaaaacgtttttgcacgaacgggggattgcgtcctgcccgaccgtgttgaaggcggtacgtcagcacggcaatgcgtccgacaagtttttaaaggtagtcgaaaccgtcgatttggcggcggtgttggcgaaaataccagactgccgccatatttgtacgacaggcggcaaggcgacggaaatcctgctcgatattcagggtggcggcatcaaaatgccgaaaacgggcgaaaccgtgccgttcccgtttgccggacgggatttgaccctgacgcgcctgccttcgacttcgcgtgcctatcctttgagtttggcgaaaaaggcggcggcgtatcgggcgtttttcgaaatggcgggtttgtgtgaaaaacagttataa

SEQ ID NO: 64945 - DNA, 1344 bp, Neisseria meningitidis
atgtttcacagtgtcaatgtatttacgggcgaaacgctttaccgccgtccagctcaagattatgcggagtttgaacggcggctggcggatttgaaaatgcgcggcggggcgttcgcgcaactgggcgtaaccgaacgtgccgcgcgtctgcaaaaatttgccgaccgtttggaggcggagaaagagcgttttgcggaaatggtgtgcgaagaagtcggacgctgcctgcacgaatgccgtgcggaaatcggcaagtctatcgagctgatacgttattacgcccgccttgcccccgaactgctcgcccacaaaaccattgcgacgcaggcgagtttgagtcaggtaaggtttgagcctttgggcgtggtgtttgccgtcatgccttggaactatcccgtctggcaggtattgcgtttcgccgttcccgctatgtgcgcgggcaacgcgtgcgccgtcaaacccgcgcccagcgtggcacgcgtcagtcaggcgttgtttgatttggtttcagacggcattcctttggcaggcgcgtggttggatgaggcgggcacgctcaaggcggttgaagataccgatgcgatggcgtttaccggctcgacgcatacggggcgcatccttgcggcacatgcgggcgcaaacctcaagaaaaccgtcttggaactcggcggcagcaacgcctttatcgtgatgcccgatgccgatttggaacgcgccgccgcagaagcctgttattcccgtttccgcgatgcggggcaatcgtgcaacgccgccaaacgcatcatcgtaaccgaagccgcagccgatcgttttatcacgctgtttcttgccgaatgcgccaaattgaaaatgggcgaccccaaacatcccgatactacgcttgcaccgctgcaccgcgaagatttgcgggacagggttcacgggcaggttgaagatgccgtttcaaacggcgcggtatgcctgaccggcggaaaaatcccacaagggcgaggctggttttatcccgcgacggttttagacagggtaaatcctgcctgccgcgtctggagagaagaagtattcgggccggccgccctgattttgcgcgccgaaaacgaagaacatgccatcgcccttgccaatgattccccgttcgggctaggtgcctgcatttataccgccgataccgaacgcgcttggcggtttgccgaaaaaatacaggcgggatcggtgtttatcaaccgccataccagcagcgatttgcgcctgcctttcggcggagtcaaagattccggttacgggcgcgaattgtccgaattcgggctgtacgagttcgtcaacgtcaaaacctactggcagaaataa

SEQ ID NO: 64946 - DNA, 813 bp, Neisseria meningitidis
atggacaaaatcagagttgccgccgtgcagatggtgtcgggcgtgtcgccggaaaccaacgtcgctgccatgaaacgcctggtcgcacgggcggcggagcagggggcggattgggtgctgctgcccgaatattgggtgctgatgggcgcaaacgataccgacaaactcgcgcttgccgagcctttgggcggcggacgctttcagacggcattgagcgaaacggcgaaagaatgcggcgtggtgctgtttggcggaactgtgccgctgcaaagcagtgaggcaggcaaggtgatgaatacactgttggtgtacggacgggacggcgtaagaacgggtctgtaccacaaaatgcacctcttcggtttttctggtttgggcgaacgctatgccgaagccgataccatcagcgcagggcgggaagtgccgcacttgtcggcagaaggcgtgtcggtggcggcgggcatttgttacgatgtccgctttcccgaatttttccgccgccagctgccgtttgacgtattgatgctgcccgctgcgtttacgcacacgacgggcaaggcgcattgggagctgctgctgcgcgcgcgtgccgtcgaaaaccaatgttacgtcgtggcggcggcacagggcggtttgcacgaaaacggacggcgcacgttcggacacagcatgattgtcgatccgtggggcgacgtgttggacgtattgcccgaaggcgaaggcgttgttacggcagacatcgatgccaatcgcctgaacagcgtccgcaaccgcctgcccgccttgaaataccgggttttggatgccgtctga

SEQ ID NO: 64947 - DNA, 657 bp, Neisseria meningitidis
atgaacagacaaaaagtcatcgccatcgacggcccgggcgcatcgggcaaaggcacggttgccgcccgcgttgccgccgcattgggatacgattatctcgataccggcgcactctaccgcctgactgccctatatgcacaaaaacaaggcgtgggatggcacgatgaagaaaacgtttccgaactggcaaaaaaactgcccgccgtattttcaggcagccgcatcctgctcggcggcgaagacgtttcagacggcatccggacagaagccatcggcatgggcgcatccgcagtcgcacagttgcctaaagtccgcgccgccctgctgcaacgccaacgcgattttctgaccgaaaaaggactggttgccgacggacgggacaccggatcggtcgtcttcccccaagccgaacttaaaatcttcctgacggcagaatccaaaatccgtgccgaacgccgcgccaaacaaatcggcatcccctgcgaaggtttggcattcgagcgcatcctgtccgacatcgaagccagagacgaggcagaccgaaaccgcaaggttgcccccctgaaacaacaacccgatgccctgcttttggatacgagccgcctgactatagaagaaactgtaaaaaaagtgcttgattggtatcgtaaagtttaa

SEQ ID NO: 64948 - DNA, 660 bp, Neisseria meningitidis
atggacacttggcacgatgcactcggcggcgaaaaacagcagccgtattttcaggaaattttaaatgcagtcaggcaggaacgtttgtcgggacaaatcatctatccgccggcggcggatgtgttcaacgcattccgcctgacagcgttcgaccgggtcaaagccgtcattctcggacaagatccgtatcacggggcagggcaggcgcacggtttggcattttccgtcaggcagggcgtccgcatacccccgtctttactcaatatctacaaagaattggaaaccgacatcgaaggcttttccattcccgcgcacggctgcctgacagcgtgggcggagcagggcgtattacttctgaacacggttttgacggtgcgtgcaggacaggcgcattcgcacgcccttttaggctgggaacgctttaccgataccgtcatcaggcagcttgcgacacaccgcaagcatcttgtctttatgctgtggggtgggtatgcacaacaaaaaaggaaactgatagacagtcaaaaccatttgatattgaccgcaccgcatccgtctcctctgtcggcatatcgcggttttttcggttgccgccatttttcacaggcaaacagctatttgagccggcacggtatcgatccgataaactggaagctgtga

SEQ ID NO: 64949 - DNA, 2751 bp, Neisseria meningitidis; identical to SEQ ID NO: 59246

SEQ ID NO: 64950 - DNA, 1638 bp, Neisseria meningitidis; identical to SEQ ID NO: 58456

SEQ ID NO: 64951 - DNA, 1101 bp, Neisseria meningitidis; identical to SEQ ID NO: 51709

SEQ ID NO: 64952 - DNA, 417 bp, Neisseria meningitidis; identical to SEQ ID NO: 42505

SEQ ID NO: 64953 - DNA, 987 bp, Neisseria meningitidis
atgcaataccgaatcagaagagaaaacgaagcacccgaagcaaaaaatgcgggggaaaccttatgggagcgcgacatcatgcgcgaagtgctgctgtccgcctatcaggacaggcgcagggagcggatgtggaaaaacatctggcgcgccgtcagcaccctgattctggttgccctgattgcaggcattttccgaaaagacgaagccgcattgcagttggcgggcaacacgccgcatacggcagtcgtcaacctgtacggcgaaatcggcaacggcgtagaagaccaggtcaaaaaactcaaagacggtatggaagccgcctacaaaaacccgcaggcaaaagccatcgtcatccgcgccaacagccccggcggttcgcccgtcgtgtccaacaccgcttttgaagaaatacgccgtctgaaggcgcagcaccccggcattcccgtttatctcgtggcggaagatatgtgcgcgtccggctgctactacatcgcggcggcggcggacaaaatctatgccgacccgtccagcatcgtcggcagcatcggcgttatcggcagcagtttcgacgcgaccggcctgatggaaaaaatcggcgtgaaacgcagggttaaaattgcgggcagcaacaaaggcatgggcgatccgttttctcccgaaacgcccgaacagtcgaaaatctgggaagaaatgctgaccggcatacacggagaatttatcaaggcagttaagaccggacggggcagccgccttaagttccagcagtatcccgacgtgttcagcggtcgggtgtacacgggtgcggatgcgctgaaagtcgggctggtggacggactcggcaatatttacagcgtggcgcaagacgtggtcaaagctcccgatgtggtggattacactccgaaggacgatttcggcagaatcttgggcagacgcttcggcgcagaactcaaagcaagcgtgcgcgaagccctgcaggccgtccggtag

SEQ ID NO: 64954 - DNA, 1311 bp, Neisseria meningitidis
atgagcgtaactgttgaaactttagaaaatttggaacgcaaagtagtgttgtccctgccttggtccgaaatcaacgcagaaaccgataaaaaactgaaacaaacccaacgccgtgcaaaaatcgacggtttccgtccgggtaaagcacctttaaaaatgattgcccaaatgtacggtgcgagcgcacaaaacgacgtgatcaacgagctggtgcaacgccgcttctacgatgttgccgttgcccaagagttgaaagtggcaggcttcccccgttttgaaggcgttgaagaacaagacgataaagagtctttcaaagttgccgccatttttgaagtgttccccgaagtcgttatcggcgatttgtctgcacaagaagttgaaaaagtaaccgcttccgtcggtgatgccgaagtggaccaaaccgtagaaatcctgcgcaaacaacgcacccgcttcaaccatgtcgaacgcgaagcccgaaacggcgaccgcgtcatcattgactttgaaggcaaaatcgacggcgaaccttttgccggcggcgcatccaaaaactacgccttcgtattgggcgcaagtcaaatgctgcctgaatttgaagccggcgtagtcggcatgaaggctggcgaaagtaaagacgttaccgtcaatttccctgaagactaccacggtaaagacgttgccggtaaaactgccgtgttcaccattacgctgaacaacgtttccgaagcgactctgcctgaagtcgatgcagattttgcaaaagccttgggtattgcggatggcgacgttgccaaaatgcgcgaagaagtgcagaaaaacgtaagccgcgaagtggaacgccgcgtaaacgaacaaaccaaagaatccgtaatgaacgcgctgctcaaagccgtagagctgaaagcacctgttgctttggtcaatgaagaagccgcacgcttggcaaacgaaatgaaacaaaattttgttaaccaaggtatggctgatgctgccaacttggatctgcctttggatatgttcaaagaacaagccgaacgccgcgtatctttaggtctgattttagccaaactggttgacgaaaacaaactggaaccgactgaagagcaaatcaaagccgttgttgccaactttgcagaaagctacgaagatcctcaagaagtgattgactggtactacgcagatccttcccgcctgcaagccccgacttctttggcggtagaaagcaacgtcgttgatttcgttttgggcaaagccaaagtaaatgaaaaagctttgtcttttgacgaagtgatgggcgcgcaagcctga

SEQ ID NO: 64955 - DNA, 273 bp, Neisseria meningitidis; identical to SEQ ID NO: 50472

SEQ ID NO: 64956 - DNA, 453 bp, Neisseria meningitidis
atgaatattgaagtagaaatgaaagtattggacgagaggatggcggattttatccctgcctatgcgacggcgggttctgccggtttggacttgcgcgcctgtttggatgaggaagtcgttttgcagccgggtgaaacgtttcttgtgccgacaggtttggcaatttatttggccgatccttcatatgccgccgttttgctgccccgttccggattggggcataaacacggtattgtcttgggtaacttggtcggtttgattgactccgattatcaaggggaattgaaggtgtcgttatggaacagaagcagcgaaccgtttactgtcaagccgttcgagcgtatcgcgcagatggttgtcgtgccaatcgtgcaggcgcgtttcaaacgtgtcgaggaatttgtcggaagcagccggggtgagggcggcttcggcagtacgggtttgcattga

SEQ ID NO: 64957 - DNA, 537 bp, Neisseria meningitidis
atgcgctattggaaaaattcgagaatcaagatgtttgaacaagaagacgaatggatcagcaaaacccaaatgaaaaagcagatgaacgatttgcaggatttgggtatggcgttgaccaagctctcaaacgatacgctgaaaaaaatcggtttggatgcggatttgtacgaggcggtaaccgcctataaaaaaatcacatccaacggcgcgctcaaacgccaggcacaatttatcggcaggctgatgcgcgataccgatcccgcgcccatcgaggcgtttcttgccaagctgcgcggcgacgatgcggcgcacaacgcctttttgcaacgcgtggaacaggcgcgcgtacggctgttggcagacgacggcgcgttgacgcagtttatgtcggattttccgcatgcggacgcgggcaagctgaggacgctcgtccgcaacaccaaaaaagagcaggagcaaaacaaaccgccgaaaaacttccgcgcgctgtttcaagaattgaaaaccgtgatggaaaacggggacgcggaaatttag

SEQ ID NO: 64958 - DNA, 225 bp, Neisseria meningitidis; identical to SEQ ID NO: 39134

SEQ ID NO: 64959 - DNA, 1221 bp, Neisseria meningitidis
atgaccctattttgcgaacaagtcccctacccccgccttgccgaagcattcggcacaccgctttatgtgtacagccaatccgcgctgaccgaagcatttgaacactaccaaactgcctttgccgagctctccccgctcgtctgctatgcggttaaagccaatggcaacctgagcatcatcaaacactttgcttctttggggagcggttttgacattgtgtccggcggagaactcgtgcgcgttttggcggcaggcggcgacgcggcgaaaacgattttttccggtgtgggtaagagtgaggcggaaatcgagttcgcgctgaatgccggcgtgaaatgcttcaatatggagagcattcccgaaatcgaccgtattcagaaagttgccgcgcgtttgggtaaaaccgcgcccgtctccctgcgcatcaaccccgatgtcgatgcaaaaacccatccctacatctccacaggtctgaaagccaacaaattcggcatcgcctacgccgacgcgctcgaagcctaccgccacgccgcacaacagcccaatttgaaaatcatcggcatcgactgccacatcggctcccaactaaccgacttaagcccgctcatcgaagcctgcgagcgcattttgattttggttgacgcgcttgccgccgaaggcattgtgttggaacatttggacttaggcggcggtgtcggcattgtttacaaagacgaaagcgtccccgatttgggcgcgtatgcccaagcggttcaaaaactgatcggcacacgccgtctgaaactcattcttgagcccggccgcagcctggtcggcaacgcaggttcgctgctgacacgcgtcgagtttgtcaaacacggcgaagagaaaaactttgtgatggtcgatgcggcgatgaacgatttaatgcgtccggccctatacgatgcctatcaccacatcgaagcggttgaaaccaaaaacatctcgcctctgaccgccaacatcgtcggcccgatttgtgaaaccggcgacttcctcggcaaagaccgcaccatcgcctgcgaagaaggcgatttgctgcttatccgcagcgcgggcgcatacggggccagtatggcgagcaattacaacgcgcgcaaccgtgcggcagaggtgttggtggacggcaacgaataccgactcatccgccggcgcgaaaccttggaacagcaaatggcaaacgaactcgcctgcctgtaa

SEQ ID NO: 64960 - DNA, 1869 bp, Neisseria meningitidis; identical to SEQ ID NO: 50267

SEQ ID NO: 64961 - DNA, 1497 bp, Neisseria meningitidis
atgttttccaactacctactcagcttggcaatatggatacccatcgccgcaggtgtgctggttttggcgaccggtaaagacagccgtgcgccgctggcgcgtgtgcttgccttcatgggtgcgcttgccggtttcttggtaacgctgcccctgtttaccggtttcgaccgtttgagcggcggctatcaatttaccgagttccacgagtggattccgcttctgaaaatcaactacgcattgggcgtggacggtatttcagtgctctttatcatcttgaatgcgtttattacgctgttggtggtattggcaggttgggaagtcattcagaaacgtccggcgcagtatatggcggcattcctgatgatgtcgggtttgattaacggcgcgtttgccgcgcaggatgcgattctgttttatgtgttcttcgagggtatgctgattccgttgtacctgattatcggggtatggggtggcccgcgccgtgtctatgcgtcggtcaagctgttcctctatacgctgatgggttcgctcctgatgctggttgcgatggtttacctgtactatcaaacaggcagcttctctattgtcgatttccaaaacattaaacagattccgttgggcgtacagcagcttttgtttgcggcgttcttcctgtcgtttgccgtaaaagtgccgatgttccccgtacacacttggctgccggatgcccacgttgaagcgccgaccggcggttcgatggtgttggcggcgattacgctgaaactgggtgcgtatggtttcttgcgctttatcctgccgattatgccggatgcggcacgctattttgcccccgtgatcatcgtattgagtctgattgccgtgatttatatcggtatggtggctttggtgcaaaccgatatgaaaaaactggtggcgtattcgtccatcagccatatgggttttgtaacgcttgggatgtttttgtttgttgacgggcagttggacgactgggcattgaaaggtgcaatcattcaaatgatttcgcacggtttcgtgtctgccgcgatgtttatgtgtatcggcgtgatgtacgaccgcctgcacacgcgcaatattgctgattatggcggcgtggtcaatgtgatgcccaagtttgcggcgtttatgatgctgttcggtatggcgaacgcgggtttgcctgcgacttccggcttcgtgggcgagtttatggtgattatgggcgcggttaaagtgaatttctgggtgggcgcgttggcggctatgacgctgatttacggtgcgtcttataccctgtggatgtacaagcgcgtgattttcggcgcgattcacaatccgcacgttgccgaaatgaaagacatcaactgtcgcgagtttacgattctggcggttttggcggttgcggtattgggtatgggcctgtatccgaacgcatttatcgaagtggtgcatcaggcggcaaacgatttgattgcccaagtggcgcaaagcaagatgtga

SEQ ID NO: 64962 - DNA, 735 bp, Neisseria meningitidis; identical to SEQ ID NO: 60707

SEQ ID NO: 64963 - DNA, 693 bp, Neisseria meningitidis; identical to SEQ ID NO: 50503

SEQ ID NO: 64964 - DNA, 1257 bp, Neisseria meningitidis
atgaaagtgcttgttttaggtgcgggtgttgccggcgtgtcttccgcgtggtatctggcagaggccggacatgaagtaacggtcatcgaccgcgccgagggtgtggcgatggaaaccagttttgccaatgcaggccagctttcttacggctataccacgccttgggctgcacccggtattccgaccaaagcactgaaatggctgtttaaaagccatccgcctttgctgtttcgccccgacggcagcctgtatcaaatcgaatggctgtggcaaatgctgcaaaactgcacggcagcgcactatcaaaccaataaagagcgcatggtcaggatttccgaatatagccgtgaaatgttccgccgttttgaagcgcaaaccggcatgaattttgaggaacgcaaaaaagggacgttgcagattttccgccaaaccaaagaagtcgaagcggcagaacaagacattgccgttttggaacgctacggcgtgccgtaccgccgtctgaaacccgaagaatgtgcagaatttgagcctgcgctggcacgcgttaccgccaaaattgccggcggcctgcacctgcctgcagatgcgaccggcgactgccacctcttcactgaaaacctatacaaattgtgtcaggaaaagggcgtacagtttcatttcaaccaaaccatcagccgcatcgaccataacgggctgcgcatcaaagccgttgaaaccgaaacagggcggtttgaagcagatgccgttgtctgtgcgctcggctgcttcagtaggactgtgttggcgcagttagacctcgatctgccgatttatcccgtcaaaggctattccttgaccctgccggtcaccaattcagacggcgcaccggtgtccaccgttttagatgaaagctacaaagtcgccatcacgcgctttgacaacagaatccgcgtcggcggtatggcggaattgtcgggctacgaaatcaaactgcccgaaaaacgccgcgaaaccttggctttggtcgtcaacgacttgttcccggaaggcggcgatttgagccaagcatcgttctggagcggcctcagaccgatgacgcccgacagcacgccgttaatcggtcgcacccgctttgacaacctgtttctgaataccggccacggtactttaggctggaccatgtcgctgggttcggcaaaattaaccgccgatatcgtgagcggcaaagacaccgaaatccgaagcgacgatttgagcctgtcgcgctatcaggcttaa

SEQ ID NO: 64965 - DNA, 1173 bp, Neisseria meningitidis
atggcaacacgcggagacgaagtgaaaattcaaaacgggcaagaagccgatagcgcaaaagccaaacgcaaacgccgcctgacggcattgacgctgctgttcgcgcttgccgccgtagccgctgggtcggcgttttttttatggtggcagcacgaagaggaaacggaagacgcttatgttgccggacgcgtggttcaggttacgccgcaaaagggcggtacggtgcggaaggttttgcacgacgatacggatgccgtgaaaaaaggcgacgtgctggcggtattggacgacgataatgatgtgctggcttacgagcgggcaaaaaacgagctgattcaggcggtgcggcaaaaccgccggcaaaatgccgccacttcgcaggcggcggcacaggttgccttgcgccgggcggatttggcgcgcgcgcaggatgatttgcgccgccggtctgctttggcggaatcgggcgcggtgtcggctgaagagctggcacacgcccgtgcggcagtgtctcaggctcaggcggcagttaaggcggctttggcggaagaatcttcggcgcgtgcggctttgggcggtcaggtttctttgcgcgaacagccggcggttcagacggcaatcggcaggttgaaagatgcgtggttgaaccttcagcggacgcaaatccgcgcgccggcggacggtcaggtggcgaagcgttcggtgcaggtcgggcagcaggtggcggcaggcgcgccgctgatggcggtggtgccgctgtcggatgtgtgggtggatgctaattttaaagagacgcagttgcggcatatgaaaatcggacagcctgccgagctggtgtccgatttgtacggcaaacaaattgtttatcgcggcagggtggcaggtttttcggcaggtacgggcagcgcgttttcgctgattccggcgcaaaacgcaacgggcaactggattaaagtggtgcagcgcgtccccgtccgtatcgtgctgaaccgcgaagatgtggacaggcatccgttgcgtatcggtttgtcgatgacggttaaagtggatacttccgccgcaggcgcgcctgtttcaaaaacgccgggtgcggcattgccggaaatagaaagtaccgactggtcggaagtcgatcggacggtcgatgaaatcctcgggcaatccgcgccctga

SEQ ID NO: 64966 - DNA, 441 bp, Neisseria meningitidis
atggatgtgaaatatgaatttaccctgccttcgagcagcggtgcggattttcattcggcagaacatctgcctttggtcgtgtatttttatccgaaagacagtacgcctggctgtacgacggaaggcttggatttcaatgcgcgtttggaacagtttgaggcattgggttataccgtggtcggtatttcccgcgacggcgtaaaggcgcatcagaatttttgcgccaagcagggtttccggttcgagctgttgagcgacaaggatgaaacagtgtgccgcctgtttgatgtcatcaaattgaagaaactgtacgggaaagagtcgttaggtatcgagcgcagtacgttcgtcttgaataaggatggagaaatcgcccatgaatggcggaaagtcaaagtggcgggtcacgcgcaggaagtattggaaacgctttcccgataa

SEQ ID NO: 64967 - DNA, 843 bp, Neisseria meningitidis; identical to SEQ ID NO: 42158

SEQ ID NO: 64968 - DNA, 1089 bp, Neisseria meningitidis
atgagcgactacacgcagcagcttcaagataaaaaagaccaccttaaaaccctttttgcaggtttggatgttcctgagtgggaagtgtacgaatctccggacaaacattaccgtatgcgtgccgagttccgtatttggcacgaaggcggtgaaatgttttacgccatgtttgaaaaagggcagaaggctggcggggcaagcctgatccgttgcgaccgcttcgatgctgcttcagaggcagtcaattgcctgatgcccgaattaattgccgttgccgcccaatctgccgaactgagaaaccgttggtatgccgtcgaatttttgtctacgctcagcggggaaatgctggttaccatgatttaccacaaaaggcttgatgatgagtggatgcaggcggcgcaagcgttacagcaacagttggatacttccgttattgggcggagcagggggcagaaaatagtcttgaaacaggactatgtaacggaaactttaaaggtcggtaatcgggattttcgttatcggcaaattgaaggcggttttacccaaccgaatgccgccgtgtgtcagaaaatgcttgaatgggcctgcggtgcggcagaaggattggatggggatttgctcgaactgtattgcggaaacggcaactttacgcttcctttatctgaaaagtttgaacgtgttttggcaaccgaaatctccaaaacctccgtcagcgcggcgcaatggaatatcgaagccaaccgcatcggcaacatcaaaatcgcccgtctgtctgctgaagaatttaccgaagcctataccggaaaacgtgagtttaaacgccttaaggatggcggtattgctttgacggattacgcattttccactattttcgtcgatccgccgcgtgccggtatcgatgaggaaactttgaagctggtgtcgcagtttgacaacatcatctacatttcctgcaatcccgaaacgctgcgtgccaatttggacaccttggcggaaacccatgcggtcgaacgtgccgccctgttcgaccaattcccgtttacgcaccatatcgaaagtggtgtattgttgaaaaagaaaatcctttga

SEQ ID NO: 64969 - DNA, 474 bp, Neisseria meningitidis; identical to SEQ ID NO: 36318

SEQ ID NO: 64970 - DNA, 402 bp, Neisseria meningitidis
atgagaaaattgaataatcacgatgttcataaacggtatcaagatcgtttagaagaggatgtagagttcactatcaactatgagcttcctttgagttgtttgtggtcaaccatcaaagacttttccagcgattttgaggaaaaaactgaagcgttctttattcttttcaaagagctgctgcgcagaggtcatctgaaactgcaacgcgacgggcaaattatcgggcatacgcccgaagaatgggaacaaatatttagggaagtatggcctgaatatgaaatcgaacccaatccacttcccggctatgccccatttgatattggaatgtggcttacggtcgaggctcctgcctacgccgtatggatagatcccgaagacggtagcgaatactgggcgggataa

SEQ ID NO: 64971 - DNA, 708 bp, Neisseria meningitidis; identical to SEQ ID NO: 51380

SEQ ID NO: 64972 - DNA, 819 bp, Neisseria meningitidis
atgaatccagcccccaaaaaaccttctcttctcttctcttctcttctcttctcttctcttctcttctcttctcttctcttctcttccgcagcgcaggcggcaagtgaagacagcgggcgcagcccgtattatgtgcaggcggatttagcttatgccgccgaacgcattacccacaattatccggaaccaaccggtgcaaacaacacaagcacagtaagcgattatttcagaaacatccgtgcgcattccatccaccctcgggtgtcggtcggctacgacttcggcgactggaggatagcggcagattatgccagttacagaaaatggaacaacaataaatattccgtcaacacaaaagtgttgaaagaaaacaagggcaacagggaaaacctgaagacggaaaatcaggaaaacggcagcttccacgcctcttcttctctcggcttatccgccatttacgatttcaaactcaacgataaattcgataaattcaaaccctatatcggtgcgcgcgtcgcctacggacacgttaaacatcaggttcattcggtggaaacagaaaccacgatttataccactgcaccaacgaaaggcgctaaagtgggaggcactatcccaaacaaagcgattagcaaacctccctatcacgaaagccacagcaccagcagcttgggtcttggtgtcatcgccggtgtcggtttcgacatcacgcccaagctgaccttggacaccggataccgttaccacaactggggacgcttggaaaacacccgcttcaaaacccacgaagtctcattgggcgtgcgctaccacttctga

SEQ ID NO: 64973 - DNA, 171 bp, Neisseria meningitidis; identical to SEQ ID NO: 38633

SEQ ID NO: 64974 - DNA, 1356 bp, Neisseria meningitidis; identical to SEQ ID NO: 50474

SEQ ID NO: 64975 - DNA, 1311 bp, Neisseria meningitidis
atgaccgatttgtttgcccgagaacccgacgcgccgcttgccgaacgattgcgtccgcatacgcttgacgacgtggtggggcaggaacacctcatcggcgaaggtaaacctttgcgcgtggcggtagaaggcggcaagccgcattctatgttgctgtgggggccgccgggcgtgggcaagacgacgttggcgcggattttggcgcagagtttcaacgcccagtttttgcctgtttccgccgtattttccggcgtgaaggacatccgcgaggcaatcgataaagccgaaatcgctttgcagcagggacgcgcgacgattttgtttgtcgatgaagtccaccgcttcaacaaggcgcagcaggacgcgtttttgccgcatgtcgaaagcggtttgctaacctttattggtgcgacgacggaaaatccgtcgtttgaagtgaatcccgcgctgttgagccgcgcgcaggtgtatgttttgcaatccttgtcttcagacgacctgaaaaagctgattgccaaggtattggctttgcctgaataccaagagtttacgattgaaacggatgcgcaaaaattactcgtgaataccgccgacggtgatgcgcgcagattgttgaatttgttggaacaactgttaggcgccgctgaaacgcgccgtctgaaaaccctgactgccgaatttctcgccgacagtctcggggcgcaaatccgccgtttcgacaaaggcggcgagagtttctacaaccaaatctccgccctgcacaaatccgtgcgcggttcgcatccgaacgccgcgctgtattggttctgccgtatgctcgacggcggcaccgacccgcgctacctcgcccgccgcatcgtgcgtatcgcttgggaagacatcgggcttgccgacccgcgcgccttgcaaatcgccaacgatgccgccgccaccttcgaacgcttaggctcgcccgaaggcgaactggctttggcgcaagcggtattgtatcttgccgccgccgcgaaatccaacgcgggctacaaggcatacaatcaaatgcgccgtttcgtcaaagaaaacgccagcgacgaagtacccgtccacctgcgcaatgccccgaccaagctgatgaaggaattgggctacggacgcgaataccgctacgcccacgacgaaccgaacgcctacgccgccggcgaaagctatatgcccgactgcttggacgaaccggacttctaccaacccgtcccgcgcgggttggaaatcaaaatcggcgaaaagctggaatggttgaaatcgctggacgaagaagtattaaaggcaaaatga

SEQ ID NO: 64976 - DNA, 1233 bp, Neisseria meningitidis; identical to SEQ ID NO: 51079

SEQ ID NO: 64977 - DNA, 216 bp, Neisseria meningitidis; identical to SEQ ID NO: 59667

SEQ ID NO: 64978 - DNA, 369 bp, Neisseria meningitidis; identical to SEQ ID NO: 42727

SEQ ID NO: 64979 - DNA, 876 bp, Neisseria meningitidis; identical to SEQ ID NO: 51729

SEQ ID NO: 64980 - DNA, 696 bp, Neisseria meningitidis; identical to SEQ ID NO: 38171

SEQ ID NO: 64981 - DNA, 906 bp, Neisseria meningitidis; identical to SEQ ID NO: 60068

SEQ ID NO: 64982 - DNA, 795 bp, Neisseria meningitidis; identical to SEQ ID NO: 42340

SEQ ID NO: 64983 - DNA, 513 bp, Neisseria meningitidis; identical to SEQ ID NO: 40766

SEQ ID NO: 64984 - DNA, 417 bp, Neisseria meningitidis; identical to SEQ ID NO: 51640

SEQ ID NO: 64985 - DNA, 441 bp, Neisseria meningitidis; identical to SEQ ID NO: 38836

SEQ ID NO: 64986 - DNA, 1635 bp, Neisseria meningitidis
atggcagcaaaagacgtacagttcggcaatgaagtccgccaaaaaatggtaaacggcgtgaacattctggcaaacgccgtccgcgtaaccttgggtcccaaaggccgcaacgtggtggttgaccgcgctttcggcggcccgcacatcaccaaagacggcgtaaccgtcgccaaagaaatcgaactgaaagacaagtttgaaaatatgggcgcgcaaatggtgaaagaagtcgcgtccaaaaccaacgacgtggcgggcgacggtacgactaccgccaccgtattggcgcaatccatcgttgccgaaggtatgaaatacgttaccgccggtatgaacccgaccgacctgaaacgcggtatcgacaaagccgttgccgctttggttgaagagctgaaaaacatcgccaaaccttgcgacacttctaaagaaatcgcccaagtcggctcgatttccgccaactccgacgaacaagtcggcgcgattatcgccgaagcgatggaaaaagtcggcaaagaaggcgtgattaccgttgaagacggcaagtctttggaaaacgagctggacgtagttgaaggtatgcagttcgaccgtggctacctgtctccttacttcatcaacgatgcggaaaaacaaatcgctgctttggacaatccgtttgtattgttgttcgacaaaaaaatcagcaacatccgcgacctgctgcctgttttggaacaagtggcaaaagccagccgtccgctgttgattatcgctgaagacgtagaaggcgaagccttggcgactttggtcgtgaacaacatccgaggcatcctgaaaaccgttgccgtcaaagcccctggcttcggcgaccgccgcaaagcgatgttgcaagacatcgccatcctgaccggcggcgtggtgatttccgaagaagtcggtctgtctttggaaaaagcgactttggacgacttgggtcaagccaaacgcatcgaaatcggtaaagaaaacaccaccatcatcgacggctttggcgacgcagcccaaatcgaagcgcgtgttgccgaaatccgccaacaaatcgaaaccgcaaccagcgattacgacaaagaaaaactgcaagagcgcgtggctaaattggcaggcggcgtggcagtcatcaaagtcggtgccgcgaccgaagtcgaaatgaaagagaaaaaagaccgcgtggaagacgcgctgcacgctacccgcgcagccgttgaagaaggcgtggttgcaggcggcggcgtagccctgttgcgtgcccgtgctgctttggaaaacctgcacaccggcaatgccgaccaagacgcaggcgtacaaatcgtcttgcgcgccgttgagtctccgctgcgccaaatcgttgccaacgcaggcggcgaacccagcgtggttgtgaacaaagtattggaaggcaaaggcaactacggttacaacgctggcagcggcgaatacggcgatatgatcgaaatgggcgtactcgaccccgccaaagtaacccgttctgcgctgcaacacgccgcatctatcgccggcttgatgctgaccactgattgcatgatcgctgaaatccccgaagacaaaccggctgtgcctgatatgggcggcatgggtggtatgggcggcatgatgtaa

SEQ ID NO: 64987 - DNA, 1671 bp, Neisseria meningitidis
atggaaaaaatctggttagacagctacgagaagggcgtcagtgccgaaatcgacatcacgcaatacaattccgtcagcgacgtattccgccaaagcgtggaaaaatttgccgaccaacctgcttttcaaaacatgggtaagacgctgacttatgccgaaaccggcaaactggcgaccgatttcgcctcttatctgcaaaacgtcctcaagctgccgcgcggcgaacgtgttgccattatgatgccgaacgtattgcaatacccgattgcccttttcggcattttgcaggcaggtttggtagcggtgaacaccaatccgctctataccccgcgcgagctggagcatcagttgaaagacagcggcgcgaccgccatcatcgttttggaaaatttcgccaacacgctggatctagtgctgccgcgcacgcagatcaaacacgtcatcgtcgcctctgtcggcgaaatgttcgggctgcttaaaggttcgctgatcaatttcatcatccggaaaatcaagaaaatggtgcccgaataccgtattcgggaaaccgtttcctttcagacggcattgaaagagggggcgaagcacgttttccaacctgtcgcattaaaccgcgaagataccgcgctgttgcaatacacgggcggcacgacaggtgttgccaaaggggcggtgctgagtcacggcaacatctgcgccaatatgcttcaggcaaaagaatggattaaaaaccagttgcgcgagggcaaagaaaccgttatcgccgccctgccgctgtatcatatttttgccttaaccgtgaatctgatgatttttgccaatgccggctcgaaaatcatcctgattaccaacccgcgcgatatgaaaggctttatcggagaactgaaaaaacagcgggttaatgtatttatcggcgtgaacacgctgtttaacgcgatggttaaccgtcctgattttgccgaagtcgatttttcagaattgcggctgactttgggcggcggtatggcgacccaaaaagccgttgccgaaaaatggaaaaaaatcaccggcacgcccatcgtcgaagcctacggtctgaccgaagccagccccggcgtgtgctgcaaccccttaaacatcgaatcatacagcggcagcatcggtttgcccgtctcgtccaccgaagtcgaactgcgcgacgcaaacggcaaagaagtccccgtcgggcagccgggcgaattgtgggtaaaaggccctcaagtgatgcaaggctactggaaccgtcccgaagaaaccgctaaagccatagacgcgcgcggtttcttggaaaccggcgatattgccgtcatggacgaaaaaggctggttgaagctggtcgatcgtaagaaagacctcgtcgtcgtttccggattcaatgtttatccgaacgaaatcgaggaagtcatcgcgcatcacggcaaagtgatggaagtcgcctgtatcggcgttcccgacgaaaaaaccggagaagccctaaaagtatttgtcgtcaaaaaagacccgtcattgaccaaagaagaacttatcgccttttgccgcaccgaattaaccgcatataaagtaccgaaaaacattgaattccgtgaggaactgccaaaatccaacgtcggtaaaattctgcgtcgcgagttgcgccaaagtaccgggaaataa

SEQ ID NO: 64988 - DNA, 537 bp, Neisseria meningitidis; identical to SEQ ID NO: 45905

SEQ ID NO: 64989 - DNA, 393 bp, Neisseria meningitidis
atgcccacttccaccaaaccctacatcctccgcgccctctgcgaatggtgcagcgacaacagcctcacaccgcacatccttgtctgggtcaacgaacacacgcgcgttcctatgcagtatgtccgcgacaacgaaattatgctcaacatcggcgcgaccgccacgcaaaaccttcaaatcgacaacgattggatcagtttttccgcccgcttcggcggacaggcgcacgatatatggatacctgtcggacacgtcctcagccttttcgcacgggagaccggcgaaggtatggggtttgaattggaagcgtatcgccccgacacgccgcctgaaaacacctctgccgaaaccgcgccccggcccgccaaaaaaggcttgaaattggtcaaataa

SEQ ID NO: 64990 - DNA, 378 bp, Neisseria meningitidis; identical to SEQ ID NO: 50436

SEQ ID NO: 64991 - DNA, 435 bp, Neisseria meningitidis; identical to SEQ ID NO: 38693

SEQ ID NO: 64992 - DNA, 678 bp, Neisseria meningitidis; identical to SEQ ID NO: 51353

SEQ ID NO: 64993 - DNA, 2112 bp, Neisseria meningitidis
atgaaaatatcatttcatttagctttattacccacgctgattattgcttccttccctgttgctgccgccgatacgcaggacaatggtgaacattacaccgccacgctacctaccgtttccgtggtcggacagtccgacaccagcgtactcaaaggctacatcaactacgacgaagccgccgttacccgcaacggacagctcatcaaagaaacgccgcaaaccatcgatacgctcaatatccagaaaaacaaaaattacggtacgaacgatttgagttccatcctcgaaggcaatgccggcatcgacgctgcctacgatatgcgcggtgaaagcattttcctgcgcggttttcaagccgacgcatccgatatttaccgcgacggcgtgcgcgaaagcggacaagtgcgccgcagtactgccaacatcgagcgcgtggaaatcctgaaaggcccgtcttccgtgctttacggccgcaccaacggcggcggcgtcatcaacatggtcagcaaatacgccaacttcaaacaaagccgcaacatcggtgcggtttacggttcgtgggcaaaccgcagcctgaatatggacattaacgaagtgctgaacaaaaacgtcgccatccgtctcaccggcgaagtcgggcgcgccaattcgttccgcagcggcatagacagcaaaaatgtcatggtttcgcccagcattaccgtcaaactcgacaacggcttgaagtggacggggcaatacacctacgacaatgtggagcgcacgcccgaccgcagtccgaccaagtccgtgtacgaccgcttcggactgccttaccgcatggggttcgcccaccggaacgattttgtcaaagacaagctgcaagtttggcgttccgaccttgaatacgccttcaacgacaaatggcgtgcccaatggcagctcgcccaccgcacggcggcgcaggattttgatcatttctatgcaggcagcgaaaatggcaacttaatcaaacgtaactacgcctggcagtagactgacaacaaaaccctgtcgtccaatttcacgctaaacggcgactacaccatcggccgttttgaaaaccacttgaccgtaggcatggattacagccgcgaacaccgcaacccgaccttaggttacaaccgcgacttttccgcctccataaacccctacgaccgcgcaagctggccggcttcgggcaggctgcaacccgtcttcacccaaaaccggcacaaagccgacgcctacggcattttcgtgcaaaacatcttctccgccacgcccgacttgaaattcgtcctcggcggccgttacgacaaatacacctttaattccgaaagcaaactcaccggcagcagccgccaatacagcggccattcgttcagccccaacatcggcgcagtgtggaacatcaacccagtccacacactttacgcctcgtataacaaaggcttcgcgccttatggcggacgcggcggctatttgagcatcgatacgtcgtcttccgccgtgttcaacgccgaccccgagtacacccgccaatacgaaaccggtgtgaaaagcagttggctggacgaccgcctcagcactacgttgtctgcctaccaaatcgaacgcttcaatatccgctaccgccccgatccaaaaaacaacccttatatttatgcggttagcggcaaacaccgttcgcgcggcgtggaattgtccgccatcgggcaaatcatccctaaaaaactctatctgcgcggttcgttgggcgtgatgcaggcgaaagtcgttgaagacaaaaaaaatcccgaccgagtgggcatccatttgaataacaccagcaacgttaccggcaacctgtttttccgttataccccgaccgaaaacctctacggcgaaatcggcgtaaccggtacgggcaaacgctacggttacaactcaagaaataaagaagtgactacgcttccaggctttgcccgagttgatgccatacttggctggaaccataaaaatgtcaacgttacctttgccgcagccaatctgttcaatcaaaaatattggcgttcggactctatgccgggtaatccgcgcggctatactgcccgggtaaattaccgtttctga

SEQ ID NO: 64994 - DNA, 438 bp, Neisseria meningitidis; identical to SEQ ID NO: 39862

SEQ ID NO: 64995 - DNA, 1338 bp, Neisseria meningitidis
atgacttttcaaaacaaaaaaatcctcgtcgccggactcggcggtacgggtatttccatgattgcctatctgcgcaaaaacggcgcggaggttgccgcgtatgatgcggagctgaaaccggagcgcgtgtcgcaaatcggtaagatgtttgacgggttggtgttttacacgggccgtctgaaagatgcgctggacaacggtttcgatattctggctctcagtcccggcatcagcgagcggcagccggatattgaggcgttcaagcaaaacggcggacgcgtgttgggcgacatcgaattgctggcggacattgtgaaccgccgggacgacaaggtaattgcgattaccggcagcaacggcaaaaccacggtaacgagcctggtcggctatctctgtatcaagtgcgggctggataccgttatcgcgggcaatatcggcacgccggttttggaggcggaatggcagcgcgaaggcaaaaaggcggacgtgtgggtgttggagctttccagcttccaactggaaaacaccgaaagcctgcgcccgactgcggcgacggtgctgaacatttccgaagaccatctcgaccgctacgacgacttgctcgactacgcgcataccaaagccaagattttccgtggcgatggcgttcaggttttgaattcagacgacgtgttctgccgcgccatgaaacgggcagggcgtgaagtgaaatggttttcgttggaacacgaagccgatttttggttggaacgcgagacaggccgcctgaaacaaggcaatgaagatttgattgccacgcaagatattccgttgcaaggcttgcacaacgccgctaacgtcatggctgccgtggctttgtgtgaggccatcggtttgtcgcgcgaagcattgctcgaacacgtcaaaaccttccaaggcctgccgcaccgcgtggaaaaaatcggcgagaaaaacggcgtggtgtttatcgacgacagcaaaggcacgaatgtcggcgcgactgccgccgcgattgccggtttgcaaaatccgctcttcgtgattttgggcggcatgggtaaagggcaggacttcacgcccctgcgcgatgcactggtaggcaaggcaaaaggcgtgttcttgattggtgtcgatgcgccgcaaatccgccgcgatttggacggctgcggcttgaatatgaccgactgcgccactttgggagaagccgttcagacggcatatgcccaagccgaagcaggcgatattgtgttgctcagccccgcctgcgcgagctttgatatgttcaaaggctacgcgcaccgttcggaagtgtttatcgaagcgtttaaggctttgtga

SEQ ID NO: 64996 - DNA, 1287 bp, Neisseria meningitidis; identical to SEQ ID NO: 42118

SEQ ID NO: 64997 - DNA, 825 bp, Neisseria meningitidis
atgaaatggctcttcacccttttggcggtactcaatattgccgtattcggcggcacggtgggctataaattggccgttaaagcgacgggcggcgtgccggaaaaccgggccgtcgaaaacacgccccccgcaacgcccgccgccgacaatgcggcggcatccgtggaggatacggcggcactgctcaaaccgggcgacatcctgaccgaagagcaggccgagcagttgcgcttgaaaaaggaagcggaacagaaaaaactgagggagaaaaaacagcgtgaagaaaaagcccgccgcgaaaaactcgccgccgaaaaggcgcaggcggaacgcgaaaacggcgcggcggatgccttatgcgccgcgcaggcaagcctcacgatggacgaagacgactaccaccgcatcaaagggcttttgggcaaatggtcgcacgttgccagcaggagcgttgaaaaacgcaccgccaaagccaaacctgccgacaaaacctaccgcgtcgtcctgcccgtttccgccgatgccgaaaatcaggcggcggagctgtctgccaaaggtttcaaccccataccgtttgacggcgcattgagtttgggtgtcggcaacagtcgggaaaacgcccaagccctgcaaaaccggcttgccggcgccggattcggcggggcgcatattgtcgaacactttgccgaagctgacaggcaggacgattctttgagcgtgtcgcgtatgacggttttgtttaccggcgtgaatgccgccgatgcggacgaaatccgtaaaatcacgtccctatacggcaaactgaacctcaagtcttgcaaatag

SEQ ID NO: 64998 - DNA, 876 bp, Neisseria meningitidis; identical to SEQ ID NO: 43311

SEQ ID NO: 64999 - DNA, 759 bp, Neisseria meningitidis; identical to SEQ ID NO: 42408

SEQ ID NO: 65000 - DNA, 1431 bp, Neisseria meningitidis; identical to SEQ ID NO: 51930

SEQ ID NO: 65001 - DNA, 2226 bp, Neisseria meningitidis
atgactcaaaaatccaccattgtttatacccataccgacgaagcccccgcgctggcgacccaatcgctgctgccgattgtgcaggcttttacccgccacgccgatattgatgtcaaaactgccgacatttccctgtccggccgtattttggcggcattccccgaatatctgaccgaagcgcaacgcgtacccgacgcgcttgccgaattgggcgaactggtaaaacaacccgatgcaaacgtaatcaaactgccgaacatcagcgcatccgtaccgcaactgaccgccgcgattaaagaattgcagtctaaaggctttgccgttcccgattatcctgccgacccgcaaaccgatgaagaaaaagccgtgcgcgaacgctacgaccgcatcaaaggcagcgcggtaaaccctgtcctgcgtgaaggcaactccgaccgtcgcgcccccaaagcggtgaaaaactttgccaaaaaaaatccgcacagcatgggcgcatggacaaaagactccaaaacccacgttgccaccatgcaaagcggcgactttttccataacgaacaatccgttaccgtacctgaagcgacttccgtatccatcgtgttcaccgacaaacaaggcaataaaaaagagctgcgcgcgcctgttgccctgaaagccggcgaaatcatcgacgcgaccgtgatgagtaaaaaagccctgctcgccttccttgccgaacaagtaaaagatgcgaaagcaaaaggcgtgttgttctcgctgcacatgaaagccactatgatgaaagtgtccgacccgattatcttcggacacgccgtcaaagtattcttcgcgcctgtttttgaaaaattcggcgacaaactggctgctgccggcgtcaacgttaacaacggcttcggcaacctgcttgccaatttggacaaactggatgcggacacccgcaccgccgtcgaagccgaaatcgccgccgtttacgccgccaaccccgatttggcgatggtcgattccgataaaggcattaccaacctgcacgttcccagcgatgtcatcgttgatgcttctatgcctgcgatgattcgtaactccggccgtatgtgggataaagacggcaaagcgcaagacaccaaagccgtgattcccgacagcagctacgccggcgtttaccaagcaaccatcgacttctgccgcgaacacggcgcatttgacccgacaaccatgggtactgtgcccaacgtcggactgatggcgcaagcggcggaagaatacggctcgcacaacaaaacctttgaaatcgaagccgacggccaagtccaagtcattgatgcggcaggaaaagtcctaatgcagcacgacgttgaagccggcgacatctggcgtatgtgccaaaccaaagacgctccggttaaagactgggtacaacttgccgtcaaccgcgcccgtctgagcaacacgcctgccgtgttctggctcgacgaaaaccgtccgcacgacaagagcctgctcgccaaggttaaagcctaccttgccgaactggataccaatggcctcgacatccgcgtcctcgctcctgaagaagccgccaagttcagcttgggtcgtctgaaaaacggcgaagacaccatctccgtaaccggtaatgtcttgcgcgactacctgaccgacttgttcccaattttggaactcggcacaagcgcgaaaatgctgtctatcgttccattgatgaacggcggcggtatgtttgaaaccggcgcgggcggttctgcaccgaaacatgttcaacaattcctcgaagaaaaccatttgcgctgggactcgctgggcgaattcctcgcactcgccgtatcgtttgaacatttggcgcaaaaaaccggcaatgccaaagcccaagtcctcgccgacactttggatgcagccaccgaaaaactgctgttgaacgacaaatcgcctaaacgtaaagccggcgaactcgacaaccgcggcagccatttctacctcaccctctactgggcgcaagaattggcggcgcaagacaaagatgccgaactgaaagccgcatttacgccattggcagccgctttgaccgccgacgaagcgaaaatcgttgccgagctttccgccgtacaaggcaaagcggccgacatcggcggctactacgccgccaatcctgaaaaagccgcacaagtgatgcgtccgagcgtaacctttaatcaggcactaaacgccttataa

SEQ ID NO: 65002 - DNA, 1536 bp, Neisseria meningitidis; identical to SEQ ID NO: 64677

SEQ ID NO: 65003 - DNA, 735 bp, Neisseria meningitidis
atgacgacacgccaaatcatcctcgataccgaaaccaccggtctgtatgccgacggcggcgaccgcttggtcgagtttgccggtttagaaatggtcaaccgccaaatgaccgacaaaaacctgcacctctatgtccaccccgagcgcgatatgcccgaagaggcggcgagggtgcacggtctgacgatagaggttttggaagggaaaaacgcgccgccgtttgcagaggtcggcaggcagattgccgatttcctgcgcggtgcggaactgattatccacaatgccaaattcgacgtgggcttcctcaatatggagttccgccggatggggctgccgactgtcgaggaactcggctgtaccgttaccgataccctggcgatggcgcgcgaaatgttccccgggcagaaagccagcctagatgccctgtgcaaccgtttttccgtcgaccgcagcaagcgcgtcctgcacggcgcgctgatcgactgcgaacttttgggcgaagtttatttagcgatgacgcggcggcagttcgacctgatgggggaggccgaggaggaagagccggcagccaaacctgttgcatctgccgaaatgaaactcggtgccaaactgaaagtgattaaggcggatgaagccgaactggcggcgcacgggcaatatttggacggcttgggcgaagcctgtatctggcgcaaggaagccgtgccgtcggaaaacggcggggcggacgcatga

SEQ ID NO: 65004 - DNA, 795 bp, Neisseria meningitidis
atgaaagcctatttggacttgatgcgccacgtcctcgacaacggtacggacaaatcagaccgcaccggtacgggcacgcgctccgtattcggttatcagatgcgttttgacttgggcaaaggttttccgctgctgacgaccaaaaagctgcatttgcgctcgattatccacgagctgctttggtttctcaaaggcgataccaatatcaaatacctaaaggacaacaatgtttccatttgggacgagtgggcggacgaaaacggcgatttgggcccggtgtacggctaccaatggcgcagctggcccgcacccgacggcaggcatatcgatcaaatcgccaatgtggtggaacaaatcaagaaaaatcccgattcgcgccgcctgattgtgtcggcgtggaatccggctttggtcgatgaaatggcattgccgccctgccacgcgctgtttcagttttacgttgccgacggcaaactgtcctgccagctttaccaacgcagcgccgatattttccttggcgtaccgttcaacatcgccagctacgcattgttgaccatgatgatggcgcaagtgtgcggattggaagccggtgagtttatccatacgtttggcgacgcgcatttgtaccgcaaccatttcgagcaggcagagttgcaattggaacgcgaaccgcgcaccttgcctgtgatgaaaatcaatcctgaagtcaaagatttgttttccttcaagtttgaagatttcgagttggaaggctacgacccccatccgcacatcaaggcggcagtgtcggtctga

SEQ ID NO: 65005 - DNA, 528 bp, Neisseria meningitidis; identical to SEQ ID NO: 50358

SEQ ID NO: 65006 - DNA, 1101 bp, Neisseria meningitidis
atgacccgtatcgccatcctcggcggcggcctctcgggaaggctgaccgcactgcagcttgcagaacaaggttatcagattgcacttttcgataaaggctgccgccggggcgaacacgccgtcgcttatgttgccgccgccatgctcgcgcctgcggcggaagcggtcgaagccacgcctgaagtcatcaggctgggcaggcagagcattccgctttggcgcggcatccgatgccgtctgaacacgcacacgatgatgcaggaaaacggcagcctgattgtgtggcacgggcaggacaagccattatccagcgagttcgtccgccatctcaaacgcggcggcgtagcggatgacgaaatcgtccgttggcacgccgacgacatcgccgaacgcgaaccgcaactcggcggacgtttttcagacggcatctacctgccgaccgaaggccagctcgacgggcggcaaatattgtctgcacttgccgacgctttggacgaactgaacgtcccttgccattgggaacacgaatgtgcccccgaagacctgcaagcccaatacgactggctgatcgactgccgcggctacggcgcaaaaaccgcgtggaatgcttctgccgaacacggcagcaccctgcgcggcatacgcggcgaagtggcgcgggtttacacacccgaaatcacgctcaaccgccccgtgcgcctgctgcacccgcgttatccgctctacatcgccccgaaagaaaaccacgtcttcgtcatcggcgcgacccaaatcgaaagcgaaagccaagcccccgccagcgtgcgttcagggttggaactcttgtccgcactctatgccgtccaccccgccttcggcgaagccgacatcctcgaaatcgccaccggcctgcgccccacgctcaaccaccacaaccccgaaatccgctacagccgcaaacgccgcctcatcgaaatcaacggccttttccgccacggtttcatgatctcccccgccgtaaccgccgccgccgtcagattggcagtggcactgtttgacggaaaagacgcgcccgaacgtgatgaagaaagcggtttggcgtatatccgaagacaagattaa

SEQ ID NO: 65007 - DNA, 924 bp, Neisseria meningitidis
atgccgtccgaacacccgttttcagacggcatttccacacccaaccccaaagaaaccatgaacgacaccgcccaaattaccgccagctacggccgccgctacattgtccgcacgcccgacggcacaacctacgaagccagcacccgcaaaaaacgcgtcgatttcgcctgcggcgaccgcgtccgcatcagccccgtcaacgccgaacaagttgtgattgaagattttttaccgcgccaaagcctgctctaccgccaagacgcgtggaaaaccaaactcatcgccgccaacgttacccaactcctcatcgtaaccgccgccgtcccgagtccgagcatgcggctgctacaacgcgccctgcttgccgccgaagccgccggcatccgcgccgtcatcgtcctgaacaaagccgacctgcccgaaaccgccctttggcgcgaaaaactcaaattctacgaaacgctgggttatcccgtcatcgaaacccgcgcactggaaaacgccggcagcctgcgccccgccctgcaagggcacagcaacatcctgctcgggcagagcggtatgggcaaatccaccctgaccaacgcccttttgggcagccaaaccgcccgcaccggcgacatttccgccgcactcgactcgggaaaacacaccaccacccacgcccggctttatgatttgaacggcgaaacccaactcatcgactccccgggtttgcaagaatttggtttacaccacctccaagccgccgatttgccgcgctatttccccgatttccgccaccttgtcgggcaatgccgcttccacaactgcacccaccgcgccgaacccggctgcgccttcaaagccgccgcgcaaaccggtaaaatccgcaccgaacggctgaccttcctgcaacgcattaccgacgatctgctcaaataa

SEQ ID NO: 65008 - DNA, 312 bp, Neisseria meningitidis; identical to SEQ ID NO: 42205

SEQ ID NO: 65009 - DNA, 1218 bp, Neisseria meningitidis; identical to SEQ ID NO: 51714

SEQ ID NO: 65010 - DNA, 2301 bp, Neisseria meningitidis; identical to SEQ ID NO: 43098

SEQ ID NO: 65011 - DNA, 2178 bp, Neisseria meningitidis
atgacacgcttcaaatattccctgctgtttgccgccctgttgcccgtgtacgcgcaggccgatgtttctgtttcagacgaccccaaaccgcaggaaagcactgaattgccgaccatcaccgttaccgccgaccgcaccgcgagttccaacgacggctacactgtttccggcacgcacaccccgctcgggctgcccatgaccctgcgcgaaatcccgcagagcgtcagcgtcatcacatcgcaacaaatgcgcgaccaaaacatcaaaacgctcgaccgcgccctgttgcaggcgaccggcaccagccgccagatttacggctccgaccgcgcgggctacaactacctgttcgcgcgcggcagccgcatcgccaactaccaaatcaacggcatccccgttgccgacgcgctggccgatacgggcaatgccaacaccgccgcctatgagcgcgtagaagtcgtgcgcggcgtggcggggctgctggacggcacgggcgagccttccgccaccgtcaatctggtgcgcaaacgaccgacccgcaagccattgtttgaagtccgcgccgaagcgggcaaccgcaaacatttcgggctgggcgcggacgtatcgggcagcctgaacaccgaaggcacgctgcgcggccgcctggtttccaccttcggacgcggcgactcgtggcggcagcgcgaacgtagccgcaatgccgaactctacggcattttggaatacgacatcgcaccgcaaacccgcgtccacgcaggcatggactaccagcaggcgaaagaaaccgccgacgcgccgctcagctacgccgtgtacgacagccaaggttatgccaccgccttcggcccgaaagacaaccccgccacaaattgggcgaacagccgccaccgtgcgctcaacctgttcgccggcatcgaacaccgcttcaaccaagactggaaactcaaagccgaatacgactacacccgcagccgcttccgccagccctacggcgtagcaggcgtgctttccatcgaccacaacaccgccgccaccgacctgattcccggttattggcacgccgacccgcgcacccacagcgccagcgtgtcattgatcggcaaataccgcctgttcggccgcgaacacgatttaatcgcgggtatcaacggttacaaatacgccagcaacaaatacggcgaacgcagcatcatccccaacgccattcccaacgcctacgaattttcccgcacgggtgcctacccgcagcctgcatcgtttgcccaaaccatcccgcaatacggcaccaggcggcaaatcggcggctatctcgccacccgtttccgcgccgccgacaacctttcgctgatactcggcggcagatacagccgttaccgcaccggcagctacgacagccgcacacaaggcatgacctatgtgtccgccaaccgtttcaccccctacacaggcatcgtgttcgacctgaccggcaacctgtctctttacggctcgtacagcagcctgttcgtcccgcaatcgcaaaaagacgaacacggcagctacctgaaacccgtaaccggcaacaatctggaagccggcatcaaaggcgaatggcttgaaggccgtctgaacgcatccgccgccgtgtaccgcgcccgtaaaaacaacctcgccaccgcagcaggacgcgacccgagcggcaacacctactaccgcgccgccaaccaagccaaaacccacggctgggaaatcgaagtcggcggccgcatcacgcccgaatggcagatacaggcaggttacagccaaagcaaaacccgcgaccaagacggcagccgcctgaaccccgacagcgtacccgaacgcagcttcaaactcttcactgcctaccactttgcccccgaagcccccagcggctggaccatcggcgcaggcgtgcgctggcagagcgaaacccacaccgaccctgccacgctccgcatccccaaccccgccgccaaagcccgcgccgccgacaacagccgccaaaaagcctacgccgtcgccgacatcatggcgcgttaccgcttcaatccgcgcgccgaactgtcgctgaacgtggacaatctgttcaacaaacactaccgcacccagcccgaccgccacagctacggcgcactgcggacagtgaacgcggcgtttacctatcggtttaaataa

SEQ ID NO: 65012 - DNA, 252 bp, Neisseria meningitidis
atggcttcaagcaacgtaaacaacgaaatcaaaggcaaaaaactctccctgtgggccaagcgtcaagccggttcggtaaaatggttctgcggacagccggttacgcgcaacgccaaagccgccaacgccgacgacgtcgccgccgacgacaccaacaaaatcgacaccaagcacctgccgtcaacctgccgcgacgcttcatctgccgtttgcatagaaacaccacctacggctttctataaaaatacctaa

SEQ ID NO: 65013 - DNA, 204 bp, Neisseria meningitidis; identical to SEQ ID NO: 38071

SEQ ID NO: 65014 - DNA, 372 bp, Neisseria meningitidis; identical to SEQ ID NO: 40198

SEQ ID NO: 65015 - DNA, 708 bp, Neisseria meningitidis
atgaatgcagccatcgaacacgtccaagccgtcgccttcgatttggacggcacactgtgcgattccgtccccgaccttgccgccgccgcagaagcgatgttggaacaactcggtatgaaaccgctgcccgccaaagtggtcgaaagctatgtgggcgacggcatcggcaaactggttcaccgcgtcctctccaacgaccgcgaccgcgaagccgattccgaactgtgggaaaaaggtttcgtatcctatatgaaatactaccgcgaccatttgagcgtcttcacccgcccctatcccgaaaccgcaaccgggctggcattgctcaaatctttgggcatcccgctggcagtcattaccaataaaaacgaaatccttgccgtcgaactgttgaaacagctcggacttgccgactacttcagcctgatactcggcggcgacagcctgcccgagaaaaaacccagccccctgccgctgcggcacgccgccgaagttttgggtatcgatgttgcaaacatggttatggtcggcgactcgcgcaacgacatcatcgccgccaaagccgccggctgcctgagcgtcggcgttaccttcggttacggcgatatgacgctgctctcgcaagacgatgcgacccgccccgactggattatcggctcgctgcccgaaatttacgaaaacctgcaacctcagaaaaacaaagaagagtag

SEQ ID NO: 65016 - DNA, 1215 bp, Neisseria meningitidis; identical to SEQ ID NO: 50951

SEQ ID NO: 65017 - DNA, 987 bp, Neisseria meningitidis; identical to SEQ ID NO: 38696

SEQ ID NO: 65018 - DNA, 1281 bp, Neisseria meningitidis
atgaaatccctttttattcggctgctcctgttgggttcggcggcaggcgttttctatcatacccaaaaccaatccctgcccgcgggcgaacttgtctatccgtccgcaccgcaaatcagggacggcggcgatgcgctgcactacctcaaccgcatccgcgcccaaatcggtttgcacaagctggcacacgcgccggttttggaaaattccgcccgcaggcacgcacgctatctcacgctcaatcccgaagacggacacggcgaacaccatcccgacaatccgcactacaccgcacaaaagctgaccgaacgcacacgccttgccgggtatctctacaacggcgtgcatgaaaacatcagcacggaagaggaagccgccgaatcgtccgacagcgacatccgcacgcagcaacgccaagtggacggattaatgagcgcaatctaccaccgcctttccctacttgaccgccatacggatgaggcaggagcggcatttgtgcgcgaaaacggtaaaaccgttctcgtattcaatcagggcaacggcaggtttgagcggcattgcgcccaaggcagaaatcagccggaagcaggacggaaatattaccgcaacgcctgccataacggtgcggtcgtgtacaccgacgaagccatgcccgcacaggagctgctctatacagcctatcccgtcggcagcggcgcactgccttatttccacggcgagcgtccagaccccgtgccggaatatgaaatcacgggcaatcctgccagcattgatttttccgaggcggcaggcaaaattacgatgaaaagtttcaagctgtatcagggtaaaaacgaaatccgccccgtcagggttttaaccgccggcaacgaccccaacggcaggctgaccgcgtaccaattcgcgcttttcccgctcaagcctttggaatacggtacgctttatacggcggtattcgactatgtccgcaacggacggcgcgcgcaggcgaaatggcagtttagaacccgaaaacccgattacccttattttgaggtaaacggcggcgagacacttgcggttagaaaaggcgaaaaatatttcatccactggcgcggacgctggtgtttggaagcgtgtacccgttatacctaccggcagcgacccggcagccgcctgtccataggaaggcacgaggcgggcggcatcgtcttcagcgttggcggaatggcgggcagcagcatcacgcttgcaccggaagacagcccggaacgcggcgttaccctttatttacaggattga

SEQ ID NO: 65019 - DNA, 1011 bp, Neisseria meningitidis; identical to SEQ ID NO: 51601

SEQ ID NO: 65020 - DNA, 1272 bp, Neisseria meningitidis
atgaaactgctggttatcggtaatggcggtcgcgaacacgcgctggcttggaaattggcgcagtcgcctaaagtggaaacagtatttgttgcgcctggtaatgccggtacagcgattgaacccaagttgcaaaacatcgacttgactgcgcatcaggatttgattgaattctgtcgtaaagaaaatattgtttttaccgtcgtcggccctgaagcgcctttggcggcaggtgttgtggatgatttccgtgccgcaggactaaaaatattcggtccgacacaatatgcggcgcagttggaaagttccaaagatttcgccaaagcatttatggcgaaatacaacattccgaccgcgcaatatcaaacctttgaaaacgccgatgccgcacatgattacgtcaatcagaaaggtgcgcctatcgttatcaaagccgatggtttggcggcaggtaaaggcgtgattgtggcgatgactttggatgaagcgcatgctgcgattgatgatatgctgctggacaacaaaatgggcaatgccggcgcgcgtgttgtgattgaagatttcctgcaaggcgaagaagcgagttttatcgtcatggttgatggcaataatgtactgcctatggcaaccagccaagaccacaagcgtcttttagacggcgacaaaggtctgaatacgggcggtatgggtgcgtacagccctgcgcctgtggtaacgcctgttgtgtacgaacgcgcgatgaatgaaattattttgccgaccgtagcagggatgaaagcggaggggcatgagttcaccggtttcctgtacgcaggtttgatgattgatcaaagcggtgcaccctatacgattgagtttaactgccgtttcggcgatcctgaaacccagccgattatgagtcgtctgaacagcgacttggcggatttggttgaagcggcaatagacggtaaacttgatagtgttgctgccgaatggaatccacaaactgccgtaggtgtagtgttggcggcgcaaaactatcctgaaacgcctaaaaaaggcgatgttatttccggtctggatgctgccaaccaggtaggcaaagttttccatgcaggtacaacggcaaacgagaaaggtgacgtattgaccaacggcggacgcgtattgtgtgttgtgggattgggcgacaatgtggcgcaagcgaaagctaaggcatatggcgcgttggaaaaaatcagcttcgacgggatgcaataccgtaaagacattgccgataaagcgattaaccgttaa

SEQ ID NO: 65021 - DNA, 1209 bp, Neisseria meningitidis; identical to SEQ ID NO: 38616

SEQ ID NO: 65022 - DNA, 807 bp, Neisseria meningitidis; identical to SEQ ID NO: 45050

SEQ ID NO: 65023 - DNA, 1110 bp, Neisseria meningitidis
atgttttcggacacagatatatccatgatggaaaacgccctccgacttgccgctttggggcgtttttccacttcgcccaatccgcgcgtcggctgcgttatcgcacacggcagccaaattgtcgggcagggcttccacgtcaaagcgggcgaaccccatgccgaagtccacgccctgcgtcaggcgggcgaaatggcacaaggcgcgaccgcctttgttaccctcgaaccgtgcagccattacggacgcacaccgccttgcgccgaagctctgctccgttccggcgtaacacgcgtcgttgccgccatgcgcgaccccaacccgccggttgcaggcaaagggtttgccatgctcgaagcagcaggcatcaagacggaatgcggtttactcgaacatcaggcaagggaactcaaccgaggcttcctgtcgcgcatcgaacgccgccgcccctttgtccgcctcaaatgcgccgtttcgctggacggcaaaaccgccctttcagacggcagcagcttttggattaccggcgaagacgcgcgtgccgacgtacaggttttgcgtgccgaaagctgcgcggtgctgaccggcatcggcacggtgttggcggacaatccccggctcaacgtccgcgcttttccaactttgcgccaacccgcacgcatcgtgttagacagccgcctgcgcctgcccttggacagccaccttctgaccgacggacaatctccaacctacatcgccacactcgaacgcaacgaagacagactgcacccctatcgggaacacgcacacgtccgcatcctgatgccgtctgaaacggcagacagcaaaatcgacctgcaccacctgatgcgcctccttgctgacgaaggtttcggcgaaatcatggtcgaagcaggctccgaactcacatccgcatttctggcagaaaatctggcagacgaaatcgtcctgtaccgttcgcccaaaatcctcggcagcggcaaagacctgttttccctgctcgaaaaccgcgccgccctttccgcaccgcccttgtggacacccgtttcaagcgaaatcctcggacacgacatcaaaaccgtgttccgaaaaaacggcaacgccttttaa

SEQ ID NO: 65024 - DNA, 540 bp, Neisseria meningitidis
atgaagataacacactgcaaattaaagaaaaaagtacagaaagaactgctccgtttttttgtactcgaagttaccgcccgttctgctgccgatattttgggtatccatcccaattcggcagtcctgttctaccgcaaaatccgtatggtcatcagccattatctggccttggctgccaatgaggttttcgagggctctgtcgagttggacgaaagctatttcggcggacggcgtaaaggcaaacgtggtcgcggtgcggcaggaaaagtggttgtcttcggcattctgaaacgtaacggacgggtctataccgttgtcgtagataatgccaagtccgatactttaatgcctgttatcaaacagaaaatcatgccggacagcattgtttataccgacagcctgagcagttacgacaagttggacgtaagcggttttatccattaccgcatcaaccattccaaggaatttgcagaccgtcagaaccacataaacggcattgagaacttttggaatcaggcaaaacgcgtcttgcgcaaatag

SEQ ID NO: 65025 - DNA, 279 bp, Neisseria meningitidis; identical to SEQ ID NO: 62041

SEQ ID NO: 65026 - DNA, 369 bp, Neisseria meningitidis; identical to SEQ ID NO: 36261

SEQ ID NO: 65027 - DNA, 546 bp, Neisseria meningitidis
atgagcaaaattatttgtctgactgccggacacagtaacaccgacccgggcgcagtcaacggcagcgaccgtgaggcggacttggcgcaggatatgcgcaacattgtggcttcaatcctgcgtaacgattacggcctgaccgtacgcaccgacggcgaaggcaaaggcaatatgcccttgcgcgatgcggtcaagctgattcgcggctcggatgtggcgattgagttccacaccaatgcggcggcgaacaaaacggcgacaggcatcgaagccttgtccacgccgaaaaataaacgctggtgtcaggtgctgggcaaagccgttgccaagaaaaccggctggaaactgcgcggcgaagacggctttaaacccgacaatgcgggccggcattcgcgcctggcttatgcgcaagccggcggcattgtgtttgagccttttttcatcagcaacgacactgatttggccttgtttaagacgaccaaatggggcatctgccgcgcgattgcggacgcgattgcgatggaattgggagcggcgaaggtatga

SEQ ID NO: 65028 - DNA, 519 bp, Neisseria meningitidis; identical to SEQ ID NO: 42795

SEQ ID NO: 65029 - DNA, 627 bp, Neisseria meningitidis; identical to SEQ ID NO: 54372

SEQ ID NO: 65030 - DNA, 360 bp, Neisseria meningitidis
atgctttccaacatcatccccctttccatcggtgcggcactcggtgcaacggcgcgttggctgctcaacctcgccgttcccgcatcaatacctcccgccacaggcaacctgtttgccaactggataggcgcttttcttatcggaatctttgccgaaaccgtcaaccacccgcaatggaagctgctgctgattaccggttttctcggcagcctgaccacgctttccggattttcactggaaaccgtaaccctgctccaatcgaatcgtcccgcttcagcactttccaatattttcctacacacggcaggttcgctgctgctgacttggctcgggctgaagataggggcggcagtcaaataa

SEQ ID NO: 65031 - DNA, 1065 bp, Neisseria meningitidis; identical to SEQ ID NO: 42477

SEQ ID NO: 65032 - DNA, 498 bp, Neisseria meningitidis; identical to SEQ ID NO: 50377

SEQ ID NO: 65033 - DNA, 477 bp, Neisseria meningitidis
atgccgatagaaatcgaacgccgttttttgattggaaacgacaactggcggcaatacgccgacgaaccgctgctgttgaggcagggttatctgtctgttgaaaaagaacgcaccgtccgtgtccgtattgccggacaacgggcgtggctgacgctgaaaggctatatttcggaactcagccgcagtgagtttgaatacgaaatcccgcttgccgatgcggaaaagatgatggaaacgatgtgtccgtttaagatggaaaaatggcgttatccggtcagatggggcggcagcctgtttgaaatcgatgtttttcttggcgataatgcgcctttggtcgtcgcggaaatcgagttgcccgacgagaatgccgattttgaccgtccggactggctgggacgggaaatcactgccgacggtatgtttaccaatgcttatttgagcaggcatccgttctcaagctggaaaaatgccgtctga

SEQ ID NO: 65034 - DNA, 1557 bp, Neisseria meningitidis
atggatttcagttggttggcagaaccgcatacctggataggttttgccacgcttttggtgttggaagtcgtattggggatagacaatcttgtctttgtggcgattttggcaaacaaggtccagcccgcacggcgcgaccgcgcacggattatcgggctggggctggcagtcgtcatccgcatcattatgcttgcttttatggcgcacatcatcacgctgaccgagccgctgttccaaatcggcggcctcgccgtttccggcaaggacatgattatgctcgcgggcggtattttcctgctttacaaagccaccaccgaactgcatgaacgcctcgaagggcacaaccgttttactgttgccgacaaccaaaaaaaacacgcgccgttttggggcgtggtcgcgcaaatcctgatactggatgccgtgttttccatcgattcggtcattactgcggtggcgatggtcgatcatatcgtcgtggcgatgggtgcggtcgtcgtcgcaatggctgtaatgatttctgccagcaaactcttgaccgaatttgtcgacagacaccctaccgtcgtgatgctctgccttggttttttgttgatgatcggtttcagcctgattgccgaagccttccatttccacattcccaaaggctacctctacgccgccatcggcttctcgattttaatcgaactgtttaaccagatttcccagcgcaacagccgcaaaaacgactacatcggcagctcgtggcgcaaacggactgctgaaaatgtcttgggtatgatgggcatacgcgaaagcgtgcttgccgacgcgggcggcgaatccggggacgacgcgcattttgaagaaaacgaaaaatcgatgatacgcagcgtgctgacgcttgccgaacgcccgattatgggggtgatgatcccacgccgcgacatcgaacggctggacatttcccaaagccgcgaagaacagtgtgcccaactgcaaaacacgccttacagccgcctgctcgttgtcggtaaggcgggcgtggacgaacctttgggctacatcaacaaaaaagacctgctgtcccaactgctggaaacaggcggtctcgacattcagacggcattgcgccagccgctcgttttgcccgacagcactaccgcgctgggcgcaatcgaactcttccgccaaagcagcgcggattatgctttggtggtggacgagttcggcgcggtattgggcatggtaaccatgaaagacctgctcgaaaccatcgcaggcgagttccccgaagaatttgagcgcgaagaagaaccagccgttcaggggaatcccgatgaaagcctgacggtggaaggcgcgttggaatatgtggagctggcatcccaactcaatctgccgcagcaggaggaagatgccgatttccatacggttgccgggctgattatggaagaattgcaaaccatccccgatgtcggcgattttgccgatttccacggctggcggtttgaagtggtcgaaaaagaagggcagcgcatcgagagggtcaaaatcaccaaattgcccgaagaataa

SEQ ID NO: 65035 - DNA, 747 bp, Neisseria meningitidis
atggattttcgttttgacattatttacgaataccgctggatgtttctttacggcgcactgacgaccttggggctgacggtcgtggcgacggcgggcggttcggtattgggtctgttgttggcgttggcgcgcctgattcacttggaaaaagccggtgcgccgatgcgcgtgctggcgtgggcgttgcgtaaggtttcgctgctgtatgttacgctgttccggggtacgccgctgtttgtgcagattgtgatttgggcgtatgtgtggtttccgtttttcgtccatccttcagacggcattttggttagcggcgaggcggcaatcgcgctgcgtcgcggatacgggccgctgattgccggttctttggcactgatcgccaactcgggggcgtatatctgtgagattttccgcgcgggcatccagtctatagacaaaggacagatggaggcggcgcgttctttggggctgacctatccgcaggcgatgcgctatgtgattctgccgcaggcattgcgccgcatgctgccgcctttggcgagcgagttcatcacgctcttgaaagacagctcgctgctgtcggtcattgctgtggcggagttggcgtatgttcagaatacgattacgggccggtattcggtttatgaagaaccgctttacaccgtcgccctgatttatctgttgatgacgactttcttaggctggatattcctgcgtttggaaaaacgttacaatccgcaacaccgctga

SEQ ID NO: 65036 - DNA, 327 bp, Neisseria meningitidis
atgaaacagacagtcaaatggcttgccgccgccctgattgccttgggcttgaaccaagcggtgtgggcggatgacgtatcggattttcgggaaaacttgcaggcggcagagcagggaaatgcagcagcccaatacaatttgggcgcaatgtattacaaaggacaaggcgtgcgccgggatgatgctgaagcggtcagatggtatcggcaggcggcggaacaggggttagcccaagcccaaaacaatttgggcgtgatgtatgccgaaagacgcggcgtgcgccaagaccgcgcccttgcacaagaatggcttggcaaggcttgttaa

SEQ ID NO: 65037 - DNA, 486 bp, Neisseria meningitidis; identical to SEQ ID NO: 42873

SEQ ID NO: 65038 - DNA, 1254 bp, Neisseria meningitidis; identical to SEQ ID NO: 58366

SEQ ID NO: 65039 - DNA, 1935 bp, Neisseria meningitidis
atgagcttgatcgaatgtaaaaacatcaaccgctatttcggcagcggcgagaaccgcgtccatattttgaaagacatcagcctgtcgatagagaagggcgattttgtcgccatcatcgggcagtccggttcgggcaagtccacgctgatgaacatactcggttgtttggataccgccggttccggttcgtaccgaatcgacggcatcgaaactgccaaaatgcagcctgacgaactggcggcattgcgccgcgaacgcttcggctttatcttccaacgctacaacctcttaagctcgctgaccgcaagggataacgtcgcgctgccagccgtctatatgggcgcgggcggcaaagagcgttccgcgcgggcggacaaactcttgcaggatttgggtttggcaagcaaagagggcaacaagcccggcgaactctcgggcggacagcagcagcgcgtctccatcgcccgcgccctgatgaacggcggagaaatcatcttcgccgacgagccgaccggcgcgctcgataccgccagcggcaaaaacgtgatggaaatcatccataagctgcacgaagccgggcataccgtcattatggtcacgcacgaccccggcatcgccgccaatgccaaccgcgtcatcgaaatccgggacggcgaaatcatttccgacacctcgaaaaatccagaaatccccgcaagcaatgtcgggaggattcaggaaaaagcctcgtggtcgttttattacgaccagtttgtcgaagccttcagaatgtcggtgcaagcagtattggcgcacaaaatgcgttcgcttctgacgatgctcggcatcatcatcggtatcgcttcggttgtctccgtcgtcgcattgggcaatggttcgcagaaaaaaatccttgaagacatcagttcgatagggacgaacaccatcagcatcttcccggggcgcggcttcggcgacaggcgcagcggcaggattaaaaccctgaccatagacgacgcaaaaatcatcgccaaacaaagctacgttgcttccgccacgcccatgacttcgagcggcggcacgctgacttaccgcaataccgacctgaccgcttctttgtacggcgtgggcgaacaatatttcgacgtgcgcggactgaagctggaaacggggcggctgtttgacgaaaacgatgtgaaagaagacgcgcaggtcgtcgtcatcgaccaaaatgtcaaagacaaactctttgcggactcggatccgttgggtaaaaccattttgttcaggaaacgccccttgaccgtcatcggcgtgatgaaaaaagacgaaaacgctttcggcaattccgacgtgctgatgctttggtcgccctatacgacggtgatgcaccaaatcacaggcgagagccacaccaactccatcaccgtcaaaatcaaagacaatgccaatacccaggttgccgaaaaagggctgaccgatctgctcaaagcgcggcacggcacggaagatttcttcatgaacaacagcgacagcatcaggcagatagtcgaaagcaccaccggtacgatgaagctgctgatttcctccatcgccctgatttcattggtagtcggcggcatcggcgtgatgaacatcatgctggtgtccgttaccgagcgcaccaaagaaatcggcatacggatggcaatcggcgcgcggcgcggcaatatcttgcagcagtttttgattgaggcggtgttaatctgcgtcatcggcggtttggtcggcgtgggtttgtccgccgccgtcagcctcgtgttcaatcattttgtaaccgacttcccgatggacatttcggcggcatccgttatcggggcggtcgcctgttcgaccggaatcggcatcgcgttcggctttatgcctgccaataaagcagccaaactcaatccgatagacgcattggcgcaggattga

SEQ ID NO: 65040 - DNA, 1263 bp, Neisseria meningitidis
atgtcaaacacacaaaaacagcttgcccttgccaaagcggcaaaaaaatccgtcaacacggcggatacggaagaaaaaaaccgcgcgctgcttgctatggcggacagtctggaagcggcggcggcagatattttggcggcaaaccgtcaagacttggaagccgcggcaggcaacattcccgaaagcatgaccgaccgccttttgttggacggcaaacgcatttgcgcgatggcggacggcattagggcggttaccgcactgcccgaccccgtgggcgaaatactggaaacctcgactctgcccaacggcttggaaatcgtcaaaaagcgtgtggcgatgggcgttatcggcattatttacgaaagccgcccgaacgttacgtccgatgcggcggctttggcactgaaaagcggcagcgcggtcgtactccgcagcggcaaagatgcattccaatccgcacgcgccatcgttgccgccctgaaaacggggttggcacaaacccgcatcgaccccgacgcgctccagttgattgaagacaccgggcgcgaaagcagttacgaaatgatgagggcgaaagattatctagacctgctgattccgcgcggcggggcggggctgatacgggcggtggttgaaaatgccgtcgtgccggtcattgaaacgggaacgggcatcgtccacatttatatcgacaaggacgcggattgggacaaggcgctccgtatcgtgtacaacgccaaaaccagccgcccgtccgtgtgcaactcgatggaagtgctgctggtgcatgaagacattgctgccgacttcctgcccaagctcgaacggctgttggttcgcaaccgtatagaagccggactgccgcccgtccgcttccgtttggatccgcaggcggcgcggcatatcggcggcgaagcggcgggtgcagacaatttcgataccgagtttttagactacatcctcgccgtgaaaaccgtcgcttcggtcgaagaggcggtcgggcacatcgaaacccacggcacgcaccattcagacggcatcgttaccgaaaaccgccacgctgcggactatttcacgacccatatcgattctgccgccgtgtatgtcaacgcgtccacgcgctttaccgacggtggcgaattcggcttgggttgcgaaatgggcatctccacgcaaaaactccacgcgcgcggccctatgggtttgaaagagctgacaagttacaaatacatcgtacaaggcacgggacaggttagggaataa

SEQ ID NO: 65041 - DNA, 630 bp, Neisseria meningitidis; identical to SEQ ID NO: 40769

SEQ ID NO: 65042 - DNA, 864 bp, Neisseria meningitidis
atgaaaaccttactgccctttttcggcgtggtgcgcgtcagcggcgaagaccgccaaaccttcctgcacggacagctttccaacgacatcaaccaccttcagaccgggcaggcgtgttatgcgacttacaacacgcccaaaggccgcgtcatcgccaatatgattgtcgtcaaccgaggcggcgatttgctgctgattatggcgcaagacttgcttgaagcaacggtcaaacgtttgcggatgtttgtgttacgcgccaaagccgtttttgaaatccttgaagattacgccgtcggcgcggaattagaagcatccgccgaaccgcttgccgcgcaagaacccagcctcgcctttaccgccgaatgcggttcagacggcatctgttccgtcgtcctgccacatcggggcattttgcacatcgcccccaaaaacgccttgccgccttatgatgccgccgccgaaaacgcgtggcggctgcacgaaatccgtagcggttatccgtggatatgcgcggctaccaaagaaaccgccgtcgcccaaatgctcaaccagcacatcatcggcggcgtacacttcaaaaaaggctgctatccgggacaggaaatcattgcccgtgcccagtatcgggggcaggtcaaacgcggcttggcggtattgtcgggaaattcggccgtcgaagcaggaaccctgctgacggcggacggcgaagaggccggcatcgtactcgacagcgttcaagattcggaaaactttaccgcccttaccgtgattaaattctccgccgcacaaaaaacactgaccgtcccaaacggcggtatcttcaaagcggttcatctcttctttaaaaccgaaaatgcagaataa

SEQ ID NO: 65043 - DNA, 684 bp, Neisseria meningitidis; identical to SEQ ID NO: 51432

SEQ ID NO: 65044 - DNA, 1170 bp, Neisseria meningitidis
atgacagcacataaaatcctgcccgtcctgctttccatcatcttaggcgtttctcacgcaacggccgcatcgcccgcgcccaacaaaccggcggtacacgccgcccccacgttccaaacacccgaaaccctcacagcggcacacatcgttatcgaccttcaaagcagacagactttatccgccaaaaacatcaatacccctgtcgaaccggcggcactaacccaactgatgaccgcatatttggttttcaaaaacatgaaatcgggaaatatccaatctgaagaaaacttaaaaatacccgaatccgcatgggcttcagaaggaagcagaatgtttgtacgtcccggcgatacggtcagcaccgacaaactcttaaaaggcatgattgcactatccgcaaacgatgccgccctaacccttgccggccggctgggcaacggctcgattgaaaattttgtgcaacaaatgaacaaagaagcccgacgcttgggcatgaagaacactgtattcaaaaacccgacaggcttgagtagagaaggacaggtttccaccgccaaagacctcgcccagctgtctgaagcattgatgcgcgactttccggaatattacccgctgttttccatcaaatctttcaaattcaaaaatatagagcaaaacaaccgcaatatccttttatatagggacaacaatgtaaacggtctgaaagccggacacacagaaagcggcggctacaaccttgccgtgtcatactccggcaacggcaggcacatccttgtcatcacattgggttcggaatcggcggaaacacgcgcatcagacaacagcaagctgctgaactgggcattgcaggccttcgatacgcccaaaatatatccgaaaggcaaaaccgttgcccaaatccaaatttccggaggcagcaaaaaaaccgtccgcgcaggcttcctcaaagaagcctacatcactctgccacataaggaagcgaaaatggcagaacaaattctagaaaccatacagccgattcccgccccagtaaaaaaagggcaaattttaggaaaaatcaaaatcagacaaaacggatacaccattgccgaaaaagaaatcgtcgcactggaaaatgtaaaaaaaagaagccggtggcaaaggctttgggcgtgtctgacagggcagtaa

SEQ ID NO: 65045 - DNA, 519 bp, Neisseria meningitidis; identical to SEQ ID NO: 37817

SEQ ID NO: 65046 - DNA, 1170 bp, Neisseria meningitidis; identical to SEQ ID NO: 56149

SEQ ID NO: 65047 - DNA, 309 bp, Neisseria meningitidis; identical to SEQ ID NO: 50770

SEQ ID NO: 65048 - DNA, 1839 bp, Neisseria meningitidis
atgtgcggtatcgtcggcgccatccgcgcccatcacaacgtcgtcgattttctgaccgacggtctcaaacgcctcgaataccggggttatgactcatcaggcattgccgtcaacaccgacggcaaaatcaaacgtgtgcgccgcgtcggacgcgtgcagcttatggaggacgcggcacgcgaaaaaggcatcagcggcggcatcggcatcggacatacgcgttgggcgacacacggcggcgttactgagccgaacgcccacccgcacatcagcggcggtatgattgcggtcgtacacaacggcatcatcgaaaactttgaaagcgaacgcaaacgtttggaaggtttgggataccgttttgaatcgcaaacggataccgaagtcatcgcacacagcatcaatcacgaatacgcgcaaaacggcggcaggctgtttgaagcggtacaagaagcggtcaaacgtttccacggcgcatacgccatcgcggttattgcccaagacaagcctgatgaattagttgtggcgcgtatgggctgcccgcttttggtcgctttgggcgacgatgaaacctttatcgcttcggacgtatccgccgtcatcgcctttacgcgccgcgtggcgtacctcgaagacggcgacatcgcgctgctggcttcagacggcatcaaaaggctgaccgataaaaacggcctgcctgccgaacgcaaagtcaaggtatccgaactctcgctcgcctctttggaactgggaccgtacagccactttatgcaaaaggaaatccatgagcagccgcgcgcgattgcagacacggcggaggttttcctcgacggcggcttcatccccgaaaacttcggcaaaaacgccaaaagcgtgtttgaaagcatccgcagcgtcaaaatccttgcctgcggcacgtcctattacgccgcgctgaccgccaaatattggttggaatccatcgccaaaatcccggccgatgtcgaaatcgccagcgaataccgataccgcagcgtgattgccgatccggaccaactggtcattaccatttcccaatccggcgaaacgctggacacgatggaggcgttgaaatacgccaaatctttgggacaccgccacagcctctccatctgcaacgtgatggaatccgccctgccgcgcgaaagcagcctcgtgctttatacccgtgccggtgcggaaatcggcgtcgcctcaaccaaagcatttaccacgcagctggttgcgctgttcggtttggcggtaacgctggcgaaagtgcgcggtttggtttccgaagaagacgaagcacgttacaccgaagaactccgccagcttcccggcagcgtgcagcacgctttgaacctcgaaccgcaaattgccgcttgggcgcaacagtttgccaagaaaaccagcgcgctgtttttagggcgcggcatccattacccgattgccctcgaaggtgcgttaaagctgaaggaaatcacctacatccacgccgaagcctatcctgccggcgaactgaagcacgggccgcttgccttagtggacgaaaacatgcccgtcgtcgtcatcgcgcccaacgacagcctattggacaaagtcaaagccaatatgcaggaagtcggcgtgcgcggcggcaaacttttcgtctttgccgacctcgacagcaattttaatgccaccgaaggcgtgcacgttatccgtgcgccgcgccatgtcggcgaactgtcccccgtcgtgcatactatccccgtgcagcttctcgcctaccacaccgccctcgcccgaggcacggatgtggacaaaccgcgaaatctggcaaaatccgtaaccgtcgaataa

SEQ ID NO: 65049 - DNA, 919 bp, Neisseria meningitidis
ttggcagccgatcgaacaatacctgaaccgtcaaagaacccgttacctccgagaccaccgcggccgtcccgcctacccgctgttgtccatgttcaaagccgtcctgctcggacaatggcacagcctctccgatcccgaactcgaacacagcctcatcacccgcatcgatttcaacctgttttgccgttttgacgaactgagcatccctgattacagcaccttatgccgctaccgcaattggctggcgcaagacgacaccctgtccgaattgctcaaactgatcaaccgacaactgaccgaaaaaggcctaaaagtagagaaagcatccgccgccgtcgttgacgccaccattattcagaccgccggcagcaaacagcgtcaggccatagaagtcgatgaagaaggacaaatcagcggccaaaccacaccgagtaaggacaaagatgcccgttggataaagaaaaacggcctctacaaactcggttacaaacaacatacccgtaccgatgcggaaggctatatcgagaaactgcacattatccccgccaatgcccatgagtgcaaacacctgtcgccgttgttggaaggtctgcccaaaggtacgaccgtctatgccgataaaggctacgacagtgcggaaaaccggcaacatctggaagagcgtcagttgttggacggcattatgcgcaaagcctgccgcaaccgtccgctggcggaaacgcaaaccaaacgtaaccgatatttgtcgaagccccgttatgtggtcgaacaaagcttcggtacgctgcaccgtaaattccgctacgctcgggcagcctatttcggactgattaaagtgagtgcgcaaagccacctgaaggcgatgtgtttgaacctgttgaaagcggccaacaggctaagtgcgcccgctgccgcctaa

SEQ ID NO: 65050 - DNA, 1167 bp, Neisseria meningitidis
atgagaaaattcaatttgaccgcattgtccgtgatgcttgccttaggtttgaccgcgtgccagccgccggaggcggagaaagctgcgccggccgcgtccggtgagacccaatccgccaacgagggcggttcggtcagtatcgccgtcaacgacaatgcctgcgaaccgatggaactgaccgtgccgagcggacaggttgtgttcaatattaaaaacaacagcggccgcaagctcgaatgggaaatcctgaaaggcgtgatggtggtggacgagcgcgaaaacatcgcccccggactttccgataaaatgaccgtcaccctgttgccgggcgaatacgaaatgacttgcggtcttttgaccaatccgcgcggcaagctggtggtaaccgacagcggctttaaagacaccgccaacgaagcggatttggaaaaactgtcccaaccgctcgccgactataaagcctacgttcaaggcgaggttaaagagctggtggcgaaaaccaaaacctttaccgaagccgtcaaagcaggcgacattgaaaaggcgaaatccctgtttgccgacacccgcgtccattacgaacgcatcgaaccgattgccgagcttttcagcgaactcgaccccgtcatcgatgcgcgtgaagacgacttcaaagacggcgcgaaagatgccggatttaccggcttccaccgtatcgaatacgccctttgggtggaaaaagacgtgtccggcgtgaaggaaattgcagcgaaactgatgaccgatgtcgaagccctgcaaaaagaaatcgacgcattggcgtttcctccgggcaaggtggtcggtggtgcatccgaactgattgaagaagtggcgggcagtaaaatcagcggcgaagaagaccggtacagccacactgatttgagcgacttccaagccaatgtggacggttcgaaaaaaatcgtcgatttgttccgtccgttgatcgagaccaaaaacaaagccttgttggaaaaaaccgataccaacttcaaacaggtcaacgaaattctggcgaaataccggactaaagacggttttgaaacctacgacaagctgggcgaagccgaccgcaaagcgttacaggcctctattaacgcgcttgccgaagaccttgcccaacttcgcggcatactcggcttgaaataa

SEQ ID NO: 65051 - DNA, 132 bp, Neisseria meningitidis; identical to SEQ ID NO: 45341

SEQ ID NO: 65052 - DNA, 318 bp, Neisseria meningitidis
atgcaaaaacgtattgatgaaatccaaagcaaataccgcgaatggtgtcatttactaccgcaactggaagaagacatccgccgttggaaatatgtcgtcactttaattcgcgacatggacaatttctatacccacgagtatcaggcgtgtcatcaggctattgaagacggggtagaactggatttgagtacggaaggcgaatacagcattatgagtgaagatgcactatggaacgcgctgggcgaattccatcaattggcttggttatatttgcgctccagcatcgatgccttagacaaatatacacaagaagattag

SEQ ID NO: 65053 - DNA, 2595 bp, Neisseria meningitidis
atgtccaaatccgccgtttccccaatgatgcagcaatacctcggcatcaaagcgcaacataccgacaaactggtgttttaccgtatgggcgatttttacgagatgtttttcgacgatgcggtagaagcggcaaaacttttggatattaccctgaccacgcgcggacaggtggatggcgagccggtcaaaatggcaggcgtgccgtttcacgccgccgaacaatatctggcgcgcctggtcaagttgggcaaaagcgtggcgatttgcgaacaggtcggcgaagtcggcgcgggcaaagggcctgtggagcgcaaagtcgtgcgcatcgtaacgcccggcacgctgaccgattccgcattgctggaagacaaggaaaccaaccgcatcgttgccgtgtcccccgacaaaaaatacatcggtttggcgtgggcatcgctgcaaagcggcgaattcaaaaccaagctgacaactgtggataaattggacgacgaactggcgcgcctgcaggcggcggaaattctgttgcctgacagtaaaaacgcaccgcaacttcagacggcatcgggtgttacgcgcctgaacgcgtggcagtttgccgccgacgcgggggaaaaactgctgacggaatatttcggctgccaggatttgcgcggcttcggtttggacggcaaagaacacgccgttgcgattggcgcggcaggtgcactgttgaactatatccgtctgacgcaaaacctgatgccgcaacatttggacggcctgtcgctcgaaaccgacagccaatatatcggtatggatgccgccacgcgccgcaatctcgaaatcacgcaaaccctctccggcaaaaaatcgccgaccctgatgtccacgctcgacctttgcgctacccatatgggcagccgcctcttggctctctggctgcaccaccctttacgcaaccgcgcccacatccgagcgcgccaagaagccgttgccgcgctggaaagccaatacaaacccctccaatgccgtctgaaaaacattgcggacattgaacgcattgctgcccgcatcgccgtcggcaacgcccgcccgcgcgatttggcatctttacgcgacagtctgttcgagttggcacaaatcgacttgtccgcaaacggcagcagcctgttggaaaccctcaaagccgttttcccggaaaacctatccacagccgaacagctccgccaagccattttgcccgaaccttccgtctggctgaaagacggcaatgtcatcaaccacggttttcatcccgaactggacgaattgcgccgcattcaaaaccatggcgacgaatttttgctggatttggaagccaaggaacgcgaacgtaccggtttgtccacactcaaagtcgagttcaaccgcgttcacggcttttacattgaattgtccaaaacccaagccgaacaagcacctgccgactaccaacgccggcaaaccctcaaaaacgccgaacgcttcatcacgccggagttgaaagcctttgaagacaaagtgctgactgctcaagagcaagccctcgccttagaaaaacaactctttgacggcgtattgaaaaaccttcagacggcattgccgcagcttcaaaaagctgccaaagccgccgccgcgctggacgtgttgtccacattttcagccttggcaaaagagcggaacttcgtccgccccgagtttgccgactatccggttatccacatcgaaaacggccgccatcccgttgtcgaacagcaggtacgccacttcaccgccaaccacaccgaccttgaccacaaacaccgcctcatgctgctcaccggccccaatatgggcggcaaatccacctacatgcgccaagtcgcgctgattgttttattggcacacaccggctgttttgtgcctgccgatgccgccacaatcgggcccatcgatcaaatcttcacccgcatcggcgcatcggacgacctcgcctccaaccgctccactttcatggtcgaaatgagcgaaaccgcctacatcctgcatcacgccaccgaacaaagccttgttttaatggacgaagtcggacgtggtacttccactttcgacggcctcgccctcgcgcacgccgttgccgaacacctgctgcaaaaaaacaaatccttcagcctgtttgctacccactatttcgagctgacctacctgcccgaagcccacgccgccgccgtcaatatgcacctttccgcgctcgaacagggacaggacatcgttttcctgcaccaaatccaaccgggtcccgccggtaaaagctacggcattgccgtcgccaaactcgccggcctgcctgtacgcgcattgaaatccgcccaaaagcatttgaacggactggaaaaccaagccgccgcgaaccgtccccaactggatattttcagtaccatgccgtctgaaaaaggagatgaaccgaatgtgggcaactttgtggataaatcagaggaaaaacattttgaaggtatattggcagcagccttggaaaaactcgatcccgacagcctgaccccgcgcgaagcattgtcagaactgtaccgtctgaaagatttgtgcaaatccgtatcttaa

SEQ ID NO: 65054 - DNA, 201 bp, Neisseria meningitidis; identical to SEQ ID NO: 36765

SEQ ID NO: 65055 - DNA, 1521 bp, Neisseria meningitidis; identical to SEQ ID NO: 51757

SEQ ID NO: 65056 - DNA, 621 bp, Neisseria meningitidis; identical to SEQ ID NO: 58375

SEQ ID NO: 65057 - DNA, 633 bp, Neisseria meningitidis; identical to SEQ ID NO: 41857

SEQ ID NO: 65058 - DNA, 924 bp, Neisseria meningitidis; identical to SEQ ID NO: 59676

SEQ ID NO: 65059 - DNA, 846 bp, Neisseria meningitidis
atgaatattgcggacggacggcaggcgtttcccgcacctgcaaaactgaatctcgatttgaggattaccggcaggcgggaagacggttatcacaatatcgaaagcatattctgcctgatagatttgcaggataccgtatatttgaaatcgagggatgacggcaaaatcatcctgcacaatccggttgatggcatgccgcaggaagcggatttaagctaccgtgccgcatcgttgctgcaaaaatatgcgcgcaaccccgccggcgtggaaatatggctggacaaaaaaatcccgacaggggcgggtttgggcggcggaagctcggatgcggcaaccgttttgctggtgttgaaccgttggtggcagtgcggtctgacgcagcggcagctcattgattcgggcgcggctctgggggcggacgtaccgttttttattttcggcaaaaatgcgtttgcgcggggtataggcgacaggctggacgaaatggatattccgaaacagtggtatgtcatcgtcaaaccgcccgtccacgtttccactgcaaaaattttcacacacgaaggcttgacacgaaattccgcctcaagcataatgccgactttccaaaacctgcaaccgtttagaaatgatatgcaggcagttgtatttaaagaataccctgaagtttggaaagcctattccgagttgtcccgatatggatttgccttaatgacaggttctggtgcgtgtgtattcacggcgtgtcaagataggaatagcgcatacaatatataccgacaagtttcagatttgtacgaggcatatttggcagagggtctttcaaaacatccttggttgtccgtataa

SEQ ID NO: 65060 - DNA, 663 bp, Neisseria meningitidis; identical to SEQ ID NO: 50838

SEQ ID NO: 65061 - DNA, 291 bp, Neisseria meningitidis; identical to SEQ ID NO: 42259

SEQ ID NO: 65062 - DNA, 3891 bp, Neisseria meningitidis; identical to SEQ ID NO: 51005

SEQ ID NO: 65063 - DNA, 969 bp, Neisseria meningitidis
atgaaactcaccctcgccctcccctcgctcaatttggatgaagacgaaatccgaatacctctatgcctgcccgccttcaacaaaatcctgcaatacggctcgctgcaccgccaaagctgcacggcttcggcattttacgcgcgttatttgtggtgcggcagactggcggaacgcgcggcgcaaagcctgaatatgccgtctgaaaccgtcgcgctcgccacgcccgtctggcaaaagatggggatgcatcaggcaaatgtgctgacggcggaatatttggatgtcggtacggatgaagcggaacggctctgccgcgatctgtcggcgttttacggcgatattccgtggcgtttcgttcccgtcctgcccgaattatggctggtttcccttccccgcgcgtaccgctggggcgcgaagcccgttttggacttgggcggattgttgggcgcggacgatcagccggacggagaagatgcgttggaatggctgcgcgtccaaaccgaaatccaaatgtggctggcggcgcaccccgtcaaccataaccgcaagaaacgcgggctgcccgagttgaacggcttatggctttggggcggcacaaacggcggcacgcaaggcggcacgcttttcgccgatacggtttggagccgtttccaccccgaccgccgcgcattgcccgacaacttccgcgcctatgaagaaacggcggcacacctgcccgacacgcaccatatcctgtttatggacgatttgcgcctgaccgccctgacaggggacagggagcggtatgcatcggttttacagcagtgggaagaacactggttcgcaccgatctacgaagccgtccgtaccggcaaaatcaaacggctggacatcaccacggacggacaacacggcggtacgctgaccttcaaacccgccgacaggtggaaattttggcgcggcgcgaaaacctttgacggaatctggtga

SEQ ID NO: 65064 - DNA, 483 bp, Neisseria meningitidis
atgacgaacatccgtatcggacagggctacgatgtccaccaactgatcgaaggcagaaagctgatacttggcggagttgaaatcccatttgaaaaagggctgctcggacactccgatgccgatgcgctgctgcacgccgttaccgacgcgctgctcggcgcggcaggtttgggcgatatcggcagccatttccccgacaccgccgcagagttcaaagatgcggacagccgcgtccttttgcgtgcggcgtatcaaagcgttcaggcgcagggttggcaggcggtcaatgtcgatacgaccgtgattgcacagaaacccaaactcgcgccgcatattccgcaaatgcgtgccaacatcgccgccgatttgggcatagacatttcgtgcgtcaacatcaaaggcaaaaccaacgaaaaactcggctatctcgggcgcatggaaggcatagaggcgcaggcggcggtattgctggtacggatttga

SEQ ID NO: 65065 - DNA, 465 bp, Neisseria meningitidis; identical to SEQ ID NO: 51230

SEQ ID NO: 65066 - DNA, 2016 bp, Neisseria meningitidis
atgagtaaatcccgtagatctcccccacttctttcccgtccgtggttcgcttttttcagctccatgcgctttgcagtcgctttgctcagtctgctgggtattgcatcggttatcggtacggtgttgcagcaaaaccagccgcagacggattatttggtcaaattcggacctttttgggcgcagatttttggttttctgggactgtatgacgtctatgcttcggcatggtttgtcgttatcatgatgtttttggtggtttctaccagtttgtgcctgattcgcaatgtgccgccgttctggcgcgaaatgaagtcttttcgggaaaaggttaaagaaaaatctctggcggcgatgcgccattcttcgctgttggatgtaaaaattgcgcccgaggttgccaaacgttatctggaagtacaaggttttcagggaaaaaccattaaccgtgaagacgggtcggttctgattgccgccaaaaaaggcacgatgaacaaatggggctatatctttgcccatgttgctttgattgtcatttgcctgggcgggttgatagacagtaacctgctgttgaaactgggtatgctgaccggtcggattgttccggacaatcaggcggtttatgccaaggatttcaagcccgaaagtattttgagtgcgtccaatctctcatttaggggcaacgtcaatatttccgaggggcagagtgcggatgtggttttcctgaatgccgacaacgggatattggttcaggacttgccttttgaagtcaaactgaaaaaattccatatcgatttttacaatacgggtatgccgcgcgattttgccagtgatattgaagtaacggataaggcaaccggtgagaaactcgagcgcaccatccgcgtgaaccatcctttgaccttgcacggcatcacgatttatcaggcgagttttgccgacggcggttcggatttgacattcaaggcgtggaatttgggtgatgcttcgcgcgagcctgtcgtgttgaaggcaacatccatacaccagtttccgttggaaattggcaaacacaaatatcgtcttgagttcgatcagttcacttctatgaatgtggaggacatgagcgagggcgcggaacgggaaaaaagcctgaaatccacgctgaacgatgtccgcgccgttactcaggaaggtaaaaaatacaccaatatcggcccttccattgtttaccgtatccgtgatgcggcagggcaggcggtcgaatataaaaactatatgctgccggttttgcaggaacaggattatttttggattaccggcacgcgcagcggcttgcagcagcaataccgctggctgcgtatccccttggacaagcagttgaaagcggacacctttatggcattgcgtgagtttttgaaagatggggaagggcgcaaacgtctggttgccgacgcaaccaaaggcgcacctgccgaaatccgcgaacaattcatgctggctgcggaaaacacgctgaacatctttgcacaaaaaggctatttgggattggacgaatttattacgtccaatatcccgaaagagcagcaggataagatgcagggttatttctacgaaatgctttacggcgtgatgaacgctgctttggatgaaaccatacgccggtacggcttgcccgaatggcagcaggatgaagcgcggaatcgtttcctgctgcacagtatggatgcgtacacgggtttgaccgaatatcccgcgcctatgctgctgcaacttgatgggttttccgaggtgcgttcgtcgggtttgcagatgacccgttccccgggtgcgcttttggtctatctcggctcggtgctgttggtattgggtacggtattgatgttttatgtgcgcgaaaaacgggcgtgggtattgttttcagacggcaaaatccgttttgccatgtcttcggcccgcagcgaacgggatttgcagaaggaatttccaaaacacgtcgagagtctgcaacggctcggcaaggacttgaatcatgactga

SEQ ID NO: 65067 - DNA, 1314 bp, Neisseria meningitidis; identical to SEQ ID NO: 51913

SEQ ID NO: 65068 - DNA, 879 bp, Neisseria meningitidis; identical to SEQ ID NO: 46918

SEQ ID NO: 65069 - DNA, 729 bp, Neisseria meningitidis; identical to SEQ ID NO: 58645

SEQ ID NO: 65070 - DNA, 900 bp, Neisseria meningitidis
atgaaaaccaattcagaagaactgaccgtatttgttcaagtggtggaaagcggcagcttcagccgtgcggcggagcagttggcgatggcaaattctgccgtaagccgcatcgtcaaacggctggaggaaaagttgggtgtgaacctgcttaaccgcaccacgcggcaactcagtctgacggaagaaggcgcgcaatatttccgccgcgcgcagagaatcctgcaagaaatggcagcggcggaaaccgaaatgctggcagtgcacgaaataccgcaaggcgtgttgcgcgtggattccgcgatgccgatggtgctgcatctgctggcgccgctggcaacaaaattcaacgaacgctatccgcatatccgactttcgctcgtttcttccgaaggctatatcaatctgattgaacgcaaagtcgatattgccttacgggccggagaattggacgattccgggctgcgtgcacgccatctgtttgacagccgcttccgcgtaatcgccagtcctgaatacctggcaaaacacggcacgccgcaatctacagaagagcttgccggtcaccaatgtttaggcttcaccgaacccggttctctaaatacatgggcggttttagatgcgcagggaaatccctataagatttcaccgcactttaccgccagcagcggtgaaatcttacgctcgttgtgcctttcaggttgcggtattgcttgcttatcagattttttggttgacaacgacatcgctgaaggaaagttaattcccctgctcgccgaacaaacctccaataaaacgcacccctttaatgctgtttattacagcgataaagccgtcaacctccgcttgcgcgtatttttggattttttagtggaggaactgggaaacaatctctgtggataa

SEQ ID NO: 65071 - DNA, 684 bp, Neisseria meningitidis; identical to SEQ ID NO: 51293

SEQ ID NO: 65072 - DNA, 372 bp, Neisseria meningitidis
ttggtcgaaggtcaaaaatcagccgtcaccgagtattacctgaatcacggcgaatggcccgccaacaacagttctgccggcgtggcatccgtctccaccgacatcaaaggcaaatatgttcaaagcgttacagtcgcaaacggcgtcattaccgcccaaatggcttcaagcggcgtaaacaaagaaatccaaggcaaaaaactctccctgtgggccaagcgtcaaaacggttcggtcaaatggttctgcggacagccggttacgcgcgccgacaacgccaaagacgacggcgttaccgccgacgccgccgccaagaagatcgacaccaagcacctgccgtcaacctgccgcgatgcgtcatctgccagctaa

SEQ ID NO: 65073 - DNA, 1005 bp, Neisseria meningitidis
atgcaacgacaaatcaaactgaaaaattggcttcagaccgtttatcccgaacgggacttcgatctgacttttgcggcggcggatgctgatttccgccgctatttccgtgcaacgttttcagacggcagcagtgtcgtctgcatggatgcaccgcccgacaagatgagtgtcgcaccttatttgaaagtgcagaaactgtttgacatggtcaatgtgccgcaggtattgcacgcggacacggatctggggtttgtggtattgaacgactttggcaatacgacgtttttgaccgcaatgcttcaggaacagggcgaaacggcgcacaaagccctgcttttggaggcaatcggcgagttggtcgaattgcagaaggcgagccgtgaaggggttttgcccgaatatgaccgtgaaacgatgttgcgcgaaatcaacctgttcccggaatggtttgtcgcaaaagaattggggcgcgaattaacattcaaacaacgccaactttggcagcaaaccgtcgatacgctgctgccgcccctgttggcgcagcccaaagtctatgtgcaccgcgactttatcgtccgcaacctgatgctgacgcgcggcaggccgggcgttttagacttccaagacgcgctttacggcccgatttcctacgatttggtgtcgctgttgcgcgatgcctttatcgaatgggaagaagaatttgtcttggacttggttatccgctactgggaaaaggcgcgggctgccggcttgcccgtccccgaagcgtttgacgagttttaccgctggttcgaatggatgggcgtgcagcggcacttgaaggttgcaggcatcttcgcacgcctgtactaccgcgacggcaaagacaaataccgtccggaaatcccgcgtttcttaaactatctgcgccgcgtatcgcgccgttatgccgaactcgccccgctctacgcgctcttggtcgaactggtcggcgatgaagaactggaaacgggctttacgttttaa

SEQ ID NO: 65074 - DNA, 1446 bp, Neisseria meningitidis; identical to SEQ ID NO: 60105

SEQ ID NO: 65075 - DNA, 453 bp, Neisseria meningitidis; identical to SEQ ID NO: 43802

SEQ ID NO: 65076 - DNA, 966 bp, Neisseria meningitidis
atgagctacacgcaactgacccagggcgaacgataccacatccaatacctgtcccgccactgcaccgtcaccgaaatcgccaaacagctgaaccgccacaaaagcaccatcagccgcgaaatcagacggcaccgcacccaagggcagcaatacagcgccgaaaaagcccagcggcaaagccggactatcaaacagcgtaagcgacaaccctataagctcgattcgcagctgattcagcacatcgacacccttatccgccgcaaactcagtcccgaacaagtatgcgcctacctgtgcaaacaccaccggatcacgctccaccacagcaccatttaccgctaccttcgccaagacaaaagcaacggcagcacgttgtggcaacatctcagaatatgcagcaaaccctaccgcaaacgctacggcagcacatggaccagaggcaaagtacccaaccgtgtcggcatagaaaaccgacccgctatcgtcgaccagaaatcccgtatcggcgattgggaagccgacaccattgtcggcaaaggacagaaaagcgcattattgaccttggtcgaacgcgttacccgctacaccatcatctgcaaattggatagcctcaaagccgaagacactgcccgggcagctgttagggcattaaaggcacataaagacagggtgcacaccattaccatggataacggcaaagagttctaccaacacaccaaaataaccaaagcattgaaagcggagacttatttttgtcgcccttaccattcttgggagaaagggctgaatgagaacaccaacggactcatccggcaatacttccccaaacaaaccgatttccgtaacatcagtgatcgggagatacgcagggttcaagatgagttgaaccaccgaccaagaaaaacacttggctacgaaacgccaagtgttttattcttgaatctgttccaaccactaatacactag

SEQ ID NO: 65077 - DNA, 933 bp, Neisseria meningitidis; identical to SEQ ID NO: 61709

SEQ ID NO: 65078 - DNA, 1635 bp, Neisseria meningitidis
atgataaaaccgaacctgaggccgaagctcggctcttccgcgctgattgccttcctttccctgtattcctcgctggtattgaattacgccttttttgccaaagttgtcgagcttcatccttttaacggcaccggggcggatatcttcctctatacgatgccggtggtgctgttttttttaagtaatttcgtttttcacgtcattgccctgcctttcgtgcataaggtattgattccgttgatattggttatcagtgcggcggtgtcttaccaagaaatatttttcaatatctatttcaacaagtcgatgttgaataatgtcttgcaaactacggctgccgaaagcgcgcgcctgattacgccgggctatgtgctgtggattgtatgtttgggcgtattgcccgcgctggcgtatatcgccgtcaaggttaaataccgcgtttggtataaggagtttttgacgcgccttgtgcttgccgccgtttcctttttgtgcgcgttgggcatcgcaatgttgcaatatcaggattacgcctcgtttttccgcaacaataaatcagtaacccatctgattgtgccgtctaatttcatcggcgcgggcgtgtcgaaatacaaagattggaagcgttccaatattccttatacgcaattggatatggcggtcgtgcaaaaccggccggccggcagcctgcgccgtttcgtggtgctggtcgtgggcgagaccacgcgtgccgccaactggggtttgaacggttacagccgccaaactacgccgctgcttgccgcgcgcggcgatgaaattgtcaatttcccgcaggtcagaagctgcggcacatcgaccgcgcactccctgccgtgtatgttctcaaccttcgaccgcacggattatgacgaaatcaaagccgaacaccaagacaacctgctggacatcgtgcagcgcgccggcgtggaagttacctggttggaaaacgattccggctgcaagggcgtgtgcggcaaagtgccgaataccgacgttacctcgctcaacctgcccgaatactgccgcaacggcgagtgtctcgacaatatcctgctgactaagttcgacgaagtcctcaacaaaaacgataaagacgcggttttaatcctgcataccatcggcagccacgggccgacgtattacgaacgctataccgaagccgaacgcaaattcacgccgacctgcgacaccaacgaaatcaacaaatgcacccgcgccacgctggtcaacacttacgacaatacggttttgtatgtggaccagtttatcgacaaggttatccgcaaacttgaaaaccgcgacgatttggaaagcgcggtgcattatgtttccgaccacggcgaaagtttgggcgaaaacgggatgtacctgcacgccgcgccttacgccatcgcgccttccgggcagacgcatatcccgatggttatgtggttttccaaagccttccgccaacacgggggcatagatttccaatgcctcaaacaaaaagcggcggaaaacgaatattcgcacgaccactatttcagcacggtattggggctgatggacatttccaatagccaaacctatcggaaggaaatggatatattggcagcctgccgccgtccgcgctga

SEQ ID NO: 65079 - DNA, 1311 bp, Neisseria meningitidis
atgtacgctaaaaaaggcggtttgggactggttaaaagccgccgtttcgcacctcttttcgctacgcagtttctcggcgcgttcaacgacaatgtgttcaaaaccgcgctgtttgtgatgattgggttttacggtttggggcaaaacggcttcctgcctgccggacagatgttgaacttgggcgcgttgctgtttattttgccgtatttcctgttttcctcgctgtcggggcagttgggtaacaaattcgacaaggccgttttggcgcgttgggtcaaggtgctggaaatgatcattatggcggtggcggcatacgggttttatatccggtctgccccgctgcttttggcgtgtctgttttgcatgggcgcgcaatcgacgctgttcgggccgctgaaatacgccatcctgcccgattatctcgacgacaaagagttgatgatgggcaacagcctgattgaatcgggtacgtttgtcgccatcctgttcggtcagattttgggaacggcggtggcaggtgtaccgccttatattgtcgggatactggttttgctggtcgccgtcggaggcacggtcggcagcctgtttatgccgtctgtacccgccaaggctgccgatacacaaattgagtggaatattgtccgtggcacaaaatccctgctgagtgaaatggtgcggcacaagcccgtttttaccgccattatcggtatttcgtggttttggtttgtcggcgcggtttataccacgcaactgccgacctttacccaaatccatctgggcggcaacgacaatgttttcaacctgatgcttgccctgttttccatcggtattgccgccggttcggtactgtgtgccaagttcagcagggaacggctgaggttggcttgggtaacggttggtgcgttgggtttgacggtttgcggcttggttttggtgtggctgacgcacggacaccgttttgaagggctgaacggcattttttggtttttatcgcaaggatgggcatatcccgtgatggcggtgatgacgctgatcggctttttcggcggatttttctccgttccgctctatacctggctgcaaaccgccagtagcgagactttccgcgcccgcgccgttgccgccaacaatatcgttaacggtatttttatggtttccgctgccgttttgagcgcggtgttgctgtttttgtttgacagcatttccttgttgtatctgattgtcgctttgggcaatattccgttgtcggtatttttgattaagcgcgaaaggcggtttttaggcgcggcggcaatcaggaaaaaaccttga

SEQ ID NO: 65080 - DNA, 510 bp, Neisseria meningitidis
atgacagacactcaaaaccgggtagccatgggctacatcaaaggcgtattcggcataaaaggctggttgaaaattgccgccaacaccgaatattccgacagccttttggactaccccgagtggcatttggtcaaggacggcaaaaccatcagcgttacccttgaagccggaaaagtcgtcaacagcgaactccaagtcaaattcgaaggcataaacgaccgcgacttggcattctcattgcgcggttacaccatcgaaataccccgtgaagcattcgccccgacagaagaagacgaatactactggacagacttggtcggcatgaccgtcgtcaacaaagaccataccgttttaggcaaggtaagcaacctgatggaaaccggcgcaaacgacgtattgatgattgacggagaacacgggcagattctgattccgttcgtttcccaatatatcgaaaccgtcgataccggcagcaagaccattactgccgactggggtttggactactga

SEQ ID NO: 65081 - DNA, 1032 bp, Neisseria meningitidis
atgggcatcaaagtcgccatcaacggctacggacgcatcggccgccaggttttgcgcgccatctacgactatcagattcaagaccaactccaaatcgtcgccgtcaacgccagcggcagccttgaaaccaacgcccatctgaccaaattcgacaccgtgcacggacgctttgaagccgacgtatcccacgacggcggcaacctcatcgtcaacggcgacaaaatccccttcttctcgacccgcaaccctgccgaactgccgtggaaagaactcggtgtcgatttggtcatggaatgcaccggcgcgttcaccagcaaagaaaaagccaaagttcatctggaaagcggcgcgaaaaaagtcctcatttccgcaccgggcggcgacgatgtcgatgcaaccgtcgtgtacggcgtgaacgacagcgtcctgaccgccgacatgaccgtcgtttccaacgcttcctgcaccaccaactgcctctcgccggttgccaaagtgttgagcgaaagcgtcggcatcgtcaaaggcgcgatgaccaccatccacgcgctgaccaacgaccaaaccgttaccgacgtgcgccacaaagacctgcgccgcgcccgcagcggcgtggaaaacatgattccgaccaaaaccggcgcggcaaaagccgtcggtttggtactgcccgaattgaaaggcaggctcgacgggcttgccatccgcgtgccgaccgtcaacgtatcattggtagatttgagcttccaagccgcgcgcgacacgacagtcgaagaaatcaacgcactgatgaaagccgcctcggaagcaggcgcactcaaaggcgttttgggctacaacaccctgcccttggtttccatggacttcaaccacaccaccgaagccagccacttcgacgcaacgctgaccaaagttgttgacggcaacatggtcaaagtgttcgcttggtatgacaacgaatggggcttcagctgccaaatgctgaacaccgcacgccgtatgttcggacttgaagtgcgcccgctcaaataa

SEQ ID NO: 65082 - DNA, 1251 bp, Neisseria meningitidis; identical to SEQ ID NO: 51622

SEQ ID NO: 65083 - DNA, 600 bp, Neisseria meningitidis; identical to SEQ ID NO: 38221

SEQ ID NO: 65084 - DNA, 966 bp, Neisseria meningitidis
atgagccacacgcaactgacccaaggcgaacgataccacatccaatacctgtcccgccactgcaccgtcaccgaaatcgccaaacagcttaaccgccacaaaagcaccatcagccgcgaaatcagacggcaccgcacccaagggcagcaatacagcgccgaaaaagcccagcggcaaagccagactatcaaacagcgtaagcgacaaccctataagctcgattcgcagctgattcagcacatcgacccccttatccgccgcaaactcagtcccgaacaagtatgcgcctacctgcgcaaacaccaccagatcacgctccaccacagcaccatttaccgctaccttcgccaagacaaaagcaacggcagcacgttgtggcaacatctcagaatatgcagcaaaccctaccgcaaacgctacggcagcacatggaccagaggcaaagtacccaaccgtgtcggcatagaaaaccgacccgctatcgtcgaccagaaatcccgtatcggcgattgggaagccgacaccattgtcggcaaaggacagaaaagcgcattattgaccttggtcgaacgcgttacccgctacaccatcatctgcaaattggatagcctcaaagccgaagacactgcccgggcagctgttaggacattaaaggcacataaagacagggtgcacaccattaccatggataacggcaaagagttctaccaacacaccaaaataaccaaagcattgaaagcggagacttatttttgtcgcccttaccattcttgggagaaagggctgaatgagaacaccaacggactcatccggcaatacttccccaaacaaaccgatttccgtaacatcagtgatcgggagatacgcagggttcaagatgagttgaaccaccgaccaagaaaaacacttggctacgaaacgccaagtgttttattcttgaatctgttccaaccactaatacactag

SEQ ID NO: 65085 - DNA, 1677 bp, Neisseria meningitidis; identical to SEQ ID NO: 50911

SEQ ID NO: 65086 - DNA, 1209 bp, Neisseria meningitidis
atgaccggcatcatacattcgctgcttgacaccgacctctacaaattcactatgctgcaagtagtcctgcaccagtttccgcagacgcacagcctttacgaattccgctgccgcaacgcctcgaccgtctatccgcttgccgacatcaaagaagacttggaagtcgaactcgacgcgctctgccggctgcgcttcacccacgacgaactcggctatctgcgctccctgcgtttcatcaaaagcgactttgtcgattatctcgaactcttccagctccaacgccgctttgtcgaagtcgggacagacgataaaggccgtctgaacatccgcatcgaaggtccgatgatacaggcgatgttctttgaaatcttcatcctcgccattgtcaacgaactttacttccgccacctggaaacccctgcagtcatagaagaaggcgaacgccgccttcaagccaaagccgcgcgcctcaaagaaatcgccgccgcacaaaaccccgacgaaccgcccttcctgatttccgacttcggcacgcgccgccgctacaagctcgcgtggcaggaacacgtcatccgcaccctgctcgaagccgccccaagcatcgtgcgcggcaccagcaatgtctttctcgccaaaaaactcggcattacccccatcggcaccatggcgcacgaattcctccaagccttccaggccctcgacgtacgcctgcggaatttccaaaaggccgcgctcgaaagctgggtgcacgaataccggggcgatttgggcgttgccctgaccgacgttgtcggtatggatgccttcctgcgcgatttcgacctctatttcgccaaacttttcgacgggctgcgccacgacagcggcgacccttacgtttggggcgacaaagcctacgcccactatcaaaagctcaaaatcgacagccgcaccaaaatgctgaccttctccgacgggctggacatcgaacgctcttgggcattgcaccaatatttcaaagaccgcttcaaaaccggcttcggcatcggcaccaacctcaccaacgatatggggcatacgcccttgaatatcgtcttgaaactggtcgaatgcaacgggcagtccgtcgccaagctgtccgactctccgggcaaaaccatgaccaacaacagcaccttcctcgcctacctgcgccaagtgttcgacgtacccgaacccgaaacgccgtaa

SEQ ID NO: 65087 - DNA, 1413 bp, Neisseria meningitidis; identical to SEQ ID NO: 58373

SEQ ID NO: 65088 - DNA, 1128 bp, Neisseria meningitidis
atgagcaactggaaacccgatattccctataacgatttaccacccctgccgccaaaacaggatattgaaagcaaaaccatcctgaaacgttgtatagccgcccgtgcatcccttgcccgtttaaagcaggcggcagaactgataccgaatcaagccatgctgattaacacccttcctgttatggaagcccgtgcaagttcagaaattgaaaacatcgtaaccacaacggataagctgtttcaatccctgcaaatggatacggaacggcaagaccctgccacgaaagaagccctgcaataccgcaccgccctgtttgcaggctatgaatcactgacgagccgccctttatgcacacaaaccgccatcatggtctgcaacgccatcaagcacccctacgaaatggccatccgcaaaacaggcggcacagccctaaaaggaggcaacagcggaaatgttgtctataccccgcccgaaggagaagaaaccatacgcggcaagctggcaaattgggagcggtttattcacgaaagcggcgatttagacccgcttatcatcatggcggcggcacattaccaatttgaagccatccatccgtttacggacggcaacgggcggacggggcgcatattgaacagcctgctattgattgaaaaagggcttttggatttgcctattttgtatttgagccgctatattatcgaaaacagggcggactattaccgcctgcttttaggcgtaaccgaacggcaggactgggaaagctggataatctacatcttagacggcgtagccgataccgccgattggacggtagcgaaaatagatgcgatacgccgcctgtttgagcagacacggcaacacatacggacacacgcacaaggaatctacacgcacgaactggtaaatcttctgtttgaacagccatatacacgcattgccaacctagaagcggcagggatagccaaacggcagacggcttctaagtatctgaaagagctctcagacataggtgtgctgcaagaaatcgccatcggcagggacaaactattcattcatccgcgcctaatggaactattgcggggagagggcaacagctttacctcattccaatccctcgttaaagcatag

SEQ ID NO: 65089 - DNA, 1371 bp, Neisseria meningitidis
atgccgcaaaacactttaaacatcgttatcctcgccgccggcaaaggcacgcgcatgtattccaaaatgcccaaagtgctgcactgcatcggcggcaagcccatgctcgggcgcgttatcgacaccgccgccgcgctgaatccgcaaaacatctgcgtcgtcgtcggccacggcaaagagcaagttttagacaccgtcaaacgcgatattttatgggtcgaacaaaccgaacaactcggcaccggccacgccgtcaaaaccgccctgccccacctttccgccgaaggtcgcacgctggtgttgtacggcgacgtccccctgattgacgttgaaaccctcaaaaccctgctcgaagccgcaggcaacgaagtcggactgctgaccgacgttcccgccgacccgacaggcttgggccgcatcatccgcgacagcaacggcagcgtaaccgccatcgtcgaagaaaaagacgccgataccgcccaaaaagccgtgaaagaaaccaacacaggcattctcgtcctgcccaacgccaaactggaaaactggctgaacagcctttccagcaacaatgcccaaggcgaatactatctgaccgacctcatcgccaaagccgttgccgacggtattaaagttcatcccgtccgagtgcgcgcctcccacctcgccgccggcgtgaacaacaaacgccagctcgccgaactcgaacgcatcttccaaaccggacaggcgcaagaattgctcaaagcaggcgtaaccctgcgcgatccggcacgtttcgatttacgaggccgtctgaaacacgggcaagatgtcgtaattgatgtgaactgtatctttgaaggcgaagtcgaaatcggcgacaacgtcgaaatcggcgcaaactgcgtcatcaaaaacgccaaaatcggtgcaaacagcaaaatcgcccccttctcccacctcgaagactgcgaagtcggcgaaaacaaccgaatcggcccgtacgcccgcctgcgtccgcaagcccgccttgcagacgacgtacacgtcggcaacttcgtcgaaatcaaaaacgccgccatcggcaaaggcaccaaagccaaccacctcacctacattggtgatgccgaagtcggcagcaaaaccaacttcggcgcaggtacgattattgccaactacgacggcgtgcacaaacacaaaaccgtcatcggcgacgaagtgcgcatcggttcaaactgcgtactggttgcccctgtaacactgggcaacaaagtaaccacaggcgcaggcagcacgattacccgcaatatcgaagacaacaaactcgccctcgcccgcgcccgccaaaccgtcatcgaaggctgggtgcgtcccgaaaaagacaaacaataa

SEQ ID NO: 65090 - DNA, 891 bp, Neisseria meningitidis
atgtttcccgttttccatctttcaggcgaaagccgccgccggatgcttcagacggcattgcgttttccctatgttttcaaagcccgtgcggaagattcgcacaaagggactttcggcacgctcgccgtagtcggcggatcggcagggatgagcggcgcgcccgtattggcggcatcggcggcgatgtatctcggctgcggcaaggtgtgggcgggtttcaatcaggatgcgcttccgtttgccgttattgccgtttttcccgaaattatgttggacacggcagacggtttgaccaagcgtcaagatataaacgcctgggttgtcggttgcggcttgggtacaggtagggcggaggtcggaacgcttgccggaattttggcggaacacacggacaagcccgtccttttggatgcggacgcgctgaacatattatcaaccgatgccgaaacccgaaatctggcgcgcgggtgtaaaaacctgattttaacgccacaccccgccgaagccgcgcgcctgcttggaacgacggttgcacaggttcaggcggatcggacggcggcagtgaggaagataggggcaattttcggcgcaaccgtggttttaaaggggcacaaaacattggttgctgcgtccgatacggaaatctatgtcaacgaaagcggcaacgcgggattggcaacggcgggcagtggcgacgtattgggcggcatcatcggcagtctgctcgcacagggcgtgccggtttttgaagccgcctgcgcgggcgtgtggctgcacggcgcggcggcggatgtcataaaagaatcggcaggcattgcggcagggctgttggcaggggaaatcgccccggcggcaaggtggttgcgcaactggataactgaaagtatgtaa

SEQ ID NO: 65091 - DNA, 606 bp, Neisseria meningitidis; identical to SEQ ID NO: 50131

SEQ ID NO: 65092 - DNA, 1260 bp, Neisseria meningitidis
atgaaacagaccgtcctcaaaaataacctgcaaaacctgctcgaaagcgcagaaaatatcctgctgcttcaaggtcctgtcggcgatttttttctgcgccttgccgactggctgactgaaaacggcaaaaccgtacataaattcaactttaatgcaggcgacgactatttttatccgcccactcaagcgcataccgttgtttttaacgacaactacgatgcctttcctgaatttttgcaagaatacatcgttcaacatcacatccaggctgttgtctgctttggcgacacacgcccttatcacgtcattgcaaaacgcattgcaaacgaaaaccaagccagtttctgggcgtttgaagaaggctatttccgcccctactacatcacattagaaaaagacggcgtcaacgcattttcaccgttgccgcgccgtgccgacttttttcttgaacaattccctaagcttgcccagcaagaatataaagcgccaacgccggtacacggcggttttacgcccatggcaaaaaacgctatccgttactatatcgagttgttccgcaatccacgcaaataccccgactacatccaccaccgcgcacccaatgccggccattacctcaaaccgtggtcgctctccatcctcaagcgtttgaactactatattgaagacatccaaatcgccaaacgtgtggaagcaggcaaatacggcaagttttttattgttcccttacaggtattcaacgacagccaagtccgtatccattgcgactttcccagcgtccgcagcttcctgctccatgttttgagttcatttgccgagcacgcgcctgccgataccaacatcatcatcaagcatcatcctatggaccgcggctttatcgactactggcgcgacattaaacgctttatcaaagaacaccccgaactcaaaggccgtgtgatttatgtccatgatgtccccctgcccgttttcctgcgccacggtctcggcatggttaccatcaacagcaccagcggcctgtccggactgattcacaatatgccagttaaggttctcggccgtgcctattatgatattcccggcattactgaccaaaataccttggcagaattttggaatcatccgacaccgcctgacaaagagctgttccatgcctaccgaatgtaccacctcaacgtgacccaaattaacggcaacttctacagtcaggtcttttttcccaacaaaaaaacctccaactcttccacaccagtaatctga

SEQ ID NO: 65093 - DNA, 966 bp, Neisseria meningitidis; identical to SEQ ID NO: 65076

SEQ ID NO: 65094 - DNA, 291 bp, Neisseria meningitidis
atgttgtgcttggcagtatttgcattggggttggcaacaccggcggtggcggcggattgggtgcaggtaggtattgacagtgacaataataccacgtttggtgatgcagacagccgtacggacgatagggcatggtttgaaataaggtatgccaagccggaaaagattggcgatggaaaattttataataaaattaaaaagttggaagaaatggattgcagtggtaaacgttctaggactttgacggcaacggggtatttcgaatcgggaaactctagggcgtgtccctaa

SEQ ID NO: 65095 - DNA, 567 bp, Neisseria meningitidis; identical to SEQ ID NO: 50934

SEQ ID NO: 65096 - DNA, 936 bp, Neisseria meningitidis; identical to SEQ ID NO: 61580

SEQ ID NO: 65097 - DNA, 402 bp, Neisseria meningitidis
atgcccatcactccacccttaaacatcatctctcctaaactctaccccaatgaacaatggaacgaaagcgaagcactcggtgccatcacttggctatggtatcagtcgcctacgcatcgccaagtacctattgtggagatgatgacgtatatattgcctgtgttaaaaaacgggcagttcgctttgttttgcaagggtacccaaccaatcggttatatctcatgggcttattttgatgaagtggcgcaggcgcattatttagaatctgaccgccatttgcgtgacaacagcgattggaactgtggcgacaatatttggctgattcaatggtttgcgccattgggacacagtcatcaaatgcgctcagctgtgcgccagttatttcctagggcgtgtccctaa

SEQ ID NO: 65098 - DNA, 225 bp, Neisseria meningitidis; identical to SEQ ID NO: 51807

SEQ ID NO: 65099 - DNA, 183 bp, Neisseria meningitidis; identical to SEQ ID NO: 43318

SEQ ID NO: 65100 - DNA, 1104 bp, Neisseria meningitidis
atgttgattttacaagccgagcgcgacagcctgctcaagccgttgcaagccgttaccggcattgtcgaacgccgccacaccctgcccatcctgtccaacgtcctgattgagggaaaaggcggtcagaccaaactcttggcaaccgatttggaaatccaaatcgacactgcgggtcccgagggcggcgcgggcgacttccgcatcaccaccaatgccaagaaatttcaggacattttgcgcgcgctgcctgccggtgcgctggtgtcgctggattgggacgacagccgtctgacgctgaaggcgggcaaatcgcgttttgccctgcagaccctgcctgccgccgattttccgatgatgaatgtcggcgaggacatcagcgcgactttctcgctggagcaggagcgtttcaaaaccatgctgtcgcaagtgcagtacagcatggcggtgcaggacatccgctattatctcaacggtctgctgatgcaggttgagggcagccagttgcgccttgtggcgaccgacggacaccgccttgcctatgcagcctgcgcgattgatgcggatttgccgcgcgccgaagtgattttgccgcgcaaaacggtgctggaactgttcaaactgttgaacaaccccgacgatccgattcaaatcgagctgctggacaaacaggtgcgtttccaatgcaacggcacgaccatcgtcagcaaggtcatcgacggcaaattccccgatttcaaccgcgtgattcctttggacaacgacaagattttcgtgttgtcgagggcagaattgttgggcgcgttggaacgtgcatcgattcttgccaatgaaaaattccgcggtgcgcgattgtttttgcaacccggcctgttgagcgttgtgtgcagcaacaacgagcaggaagaagcgcgcgaagaaatcgagattgcctatcagggcggcgaactcgaagtcggtttcaatatcggctatctgatggacgtgttgcgcaacatccattccgacgatatgcagcttgccttcggcgatgccaaccgctcgacgctgtttaccgtgccgaacaatccgaatttcaaatatattgtgatgccgatgcggatttga

SEQ ID NO: 65101 - DNA, 159 bp, Neisseria meningitidis; identical to SEQ ID NO: 43881

SEQ ID NO: 65102 - DNA, 1497 bp, Neisseria meningitidis
atgaaattgtctattcaaaaattcatgatgctgtttgcagcagcaatatcgttgctgcaaatccccattagtcatgcgaacggtttggatgcccgtttacgcgatgatatgcaggcaaaacactacgaaccgggtggtaaataccatctgtttggtaatgctcgcggcagtgttaaaaatcgggtttacgccgtccaaacatttgatgcaactgcggtcggccccatactgcctattacacacgaacggacaggatttgaaggtgttatcggctatgaaacccatttttcagggcacggacatgaagtacacagtccgttcgataatcatgattcaagaagcacttctgatttcagcggcggtgtagacggtggttttactgtttaccaacttcatcggacagggtcggaaatccatccggaggatggatatgacggaccgcaaggcagcgattatccgccccccggaggagcaagggatatatacagctactatgtcaaaggaacttctacaaaaacaaagataaacactgttccgcaagccccattttcagaccgttggctaaaagaaaatgccggtgccgcctctggttttctcagccgtgcggatgaagcaggaaaactgatatgggaaaacgaccccaatcaaaattggtggggtaaccgtatggatgatattcgcggcatcatccaaggtgcagccaatccttttctaacgggttttcagggattgggagttggggcaattacagacagtgcggtaaacccggtaacctatgcggcagcacggaaaactttacagggtattcacaatttaggaaatttaagtccggaagcacaacttgcggccgcaaccgcattacaagacagtgcttttgcggtaaaagacagtatcaactctgccagacaatgggctgatgcccatccgaatataactgcaacagcccaaactgccctttccgtagcagaggccgcaggtacggtttggggcggtaaaaaagtagaacttaacccgactaaatgggattgggttaaaaataccgattataaaacacctgctgcccgacctatgcagactttagatggggaaatggccggtgggaataaaccgcctaaatctataacgtctggaggaaaagccaatgctgcaacttatcctcaattagttaatcaattaactgggcaaaacttaaaaaacattgcggctcaagatccaagattgagtctagctcttcataagagtgaaaaaaattttccaataggaactgcaacttatgaagaggcagataggctaggtaaaatttgggttggtgagggtgcaagacaaactagtggaggcggatggttaagtatagatggcactcgacaatatcggccaccaacagaaaaaaattcacaatttgcaactacaggtattcaagcaaattttgaaacttatactattgattcaaatggaaaaaggaataaaattaaaaatggacatttaaatattaggtaa

SEQ ID NO: 65103 - DNA, 174 bp, Neisseria meningitidis; identical to SEQ ID NO: 38300

SEQ ID NO: 65104 - DNA, 1011 bp, Neisseria meningitidis
atgagcaaaaaacgagttctgaccggcgtaaccaccaccggcatcccgcatctgggcaactacgtcggtgctatccgccccgccgtccgcgcggcgcaaaaccctgataccgaatccttcctcttcctcgccgattaccacggtatcatcaaatgccacgagccggagatgattcaccaatccacccaagccgttgccgccacttggcttgcctgcggactcgaccccgagcgcaccaccttctaccgccaaagcgacattcccgaagtgatggaattgaactggattctgacctgcatcaccgccaagggtttgatgaaccgcgcccacgcctacaaagccgccgtgcaggcaaattcagaaaacaatcaggaagatcccgatttcggcgtggaaatgggtttgttcagctatccgattctgatgaccgccgatattctgatgttcaacgccaacgaagtgcccgtcgggcgcgaccaaatccaacacgtcgaaatggcgcgcgacatcgccggccgcttcaatcaccgctttaaagaaatctttaccctgcccgaagtgaaaatcgacgaaaacgtcgaactcttggtcggtttggacggacgcaaaatgtccaaatcctacggcaacaccattccgctttgggaaaacgacaaaaaaacccaaaaatcggtcaacaaaatcatcaccaatatgaaagagccgggcgagccgaaacagcccgacgaaagcccattgtttgaaatctacaaagccttctccacgccgtctgaaacggtggaatttacgaaaatgcttgccgacggcctggcttggggcgaggcaaaaaaacttttggcggcgaaaatcaacgccgaactcgccgaaccgcgcgaacgctacaacgagctgaccgccgacccttcgcaaatcgaagagattttacaggcaggtgcgcaaaaagcgcgtaaagaagcacgcgaattgttggacaaagtacgcgatgcggtcggcatccgcccgttgaaataa

SEQ ID NO: 65105 - DNA, 318 bp, Neisseria meningitidis; identical to SEQ ID NO: 43381

SEQ ID NO: 65106 - DNA, 996 bp, Neisseria meningitidis; identical to SEQ ID NO: 51261

SEQ ID NO: 65107 - DNA, 594 bp, Neisseria meningitidis; identical to SEQ ID NO: 50866

SEQ ID NO: 65108 - DNA, 549 bp, Neisseria meningitidis; identical to SEQ ID NO: 50906

SEQ ID NO: 65109 - DNA, 537 bp, Neisseria meningitidis
gtggatttgagggaagtaaaattaggcggcgaaaccatttacgagggcggtttcgtcagtatcagcagggataaggtcaggttgcccaacggcaatgaagggcagcgtatcgtcatccgccatccgggtgcggcatgcgtgttggcggttacggacgaggggaaagtggttttggtgcggcagtggcgttatgcggcaaatcaggcgacattggaacttcctgcgggcaagctggatgtggcgggcgaggatatggcagcgtgtgcgctgcgagaattggcggaggaaacaccttataccgccgacagcgtgcgcctgctttacagtttttatacggcggtcggtttttgcaacgaaaaaatgtatctgttcgaagcggaaggcgtgcgtttgggcagtacgcttgccaatgacgaagacgagattacggaaaccgtattgatgtcgaaagaagaagtccgtcaggcattggcaaacgatgaaattaaagatggtaaaacattaatcggtttacaatactggctgatgaaagattga

SEQ ID NO: 65110 - DNA, 933 bp, Neisseria meningitidis
atgtatgagataaaacagccttttcatagcggatacttgcaggtgtctgaaattcatcaaatttattgggaagagtcgggcaatcccgacggtgtgccggtcatttttttacatggcgggccgggcgcgggggcttcgcctgaatgtcggggtttttttaatcccgatgtgttccgcatcgtcatcatcgaccagcgcggttgcggacgttcgcgcccgtatgcttgtgcggaagacaatacgacttgggatttggtggcggatattgaaaaagtccgtgaaatgctgggtatcgggaaatggctggtgttcggcggttcgtggggcagcactttgtcgctggcttatgcccaaacccatccggaacgggtaaagggattggtgttgcgcgggatatttttgtgcaggccgtctgaaacggtgtggctgaacgaggcgggcggtgtgagccggatttatccggaacaatggcaaaaatttgtcgcgccgattgctgaaaatcggcggaaccggctgattgaggcgtatcacggattgctgtttcatcaagatgaagaagtgtgtctgtctgccgcgaaggcttgggcggattgggaaagctatctgatccgtttcgagccggaggaagtggatgaagatgcttatgcctcgctggcaatcgcgcgtttggaaaaccattattttgtcaacggcggctggttgcagggcgatagggcgattttgaacaatatcggcaaaatacggcatatcccgaccattatcgtgcaggggcggtatgatttgtgtacgccgatgcagagtgcgtgggcgctgtcgaaagcctttcccgaagcggaattgagggtggttcaggcagggcatcgtgcgttcgatccgcctttggcggatgcgttggttcaggcagttgaggatattttgccccatttgttgtaa

SEQ ID NO: 65111 - DNA, 600 bp, Neisseria meningitidis
atgagcgagttggataacatccttgcccataaccggcagtttgtcgagtcgggcgaatatgaaaaatactttaccgacaaataccccgaacgcgggctggcagttttgtcctgtatggatgcgcggattatcgggctgctgcccgacgcgttgggtttgaaaaacggcgatgccaagctgattaaaaatgccggcgcgctggttacgcacccgtggggttcggtgatgcggagccttttggttgccgtgtttgaattgaaggtcagagagattatggtcatcgcccatcacgattgcggtatgcaggggctgaatgccgaagaattcctcgggcgcgtccgggaaagccggattcccgaagaccgtatcgaaaccctgcgttatgcaggtgtcgacctcgacggctggctgaccggtttcgacaacgtcgaagacagcgtgcgccatactgtcgaactcatccgccgccatccgctgatgccgcgccatatcgccgttcacggattggtcatccatcccgttaccggcaaactgacgctggttgtggacggcagtgtttcagacggcatggacttatcggaaggaatggaaacatcatga

SEQ ID NO: 65112 - DNA, 906 bp, Neisseria meningitidis; identical to SEQ ID NO: 38587

SEQ ID NO: 65113 - DNA, 1251 bp, Neisseria meningitidis; identical to SEQ ID NO: 58383

SEQ ID NO: 65114 - DNA, 456 bp, Neisseria meningitidis
atgttcggcggcgcacacgaattaagcatcgacagtaaggggcggttggctgttcctgccaaattccgtgacattctgtcgcgcctctatacgcctgccgtagtggtaacgctcgagtcgaaacacaagctgttgatgtaccctgttgcggagtgggaaaaggttgcggcgcaacttttaaacttaaaagtggcggataaccctgttttgcggcggtttcaaaatcttttgctgcataacgcggaaattttggaatgggacagcgccggccgggtgctgcttcctgccggactgaggaagagggtggatttcgaccgtgaagtcgttttggtcggtcgtgccaaccgtttggagctttggggtcgcgagcagtgggaggctgagatggttcaggctttggatgacgatcctgacgaacttgccttccagttgagtcagacggatttgcaattgtga

SEQ ID NO: 65115 - DNA, 2073 bp, Neisseria meningitidis
atgaacaatccattggtaaatcaggctgctatggtgctgcctgtgtttttgttgagtgcttgtttgggcggcggcggcagtttcgatcttgattctgtcgataccgaagccccgcgtcccgcgccaaagtatcaagatgtttcttccgaaacaccgcaagcccaaaaagaccaaggcggatacggttttgcaatgcgcttcaagcggcggaattggcacccaaaaaataaagaagatcataaggcattatcagaagcggattgggagaagttaggtgcgggtaagccagatgagtttccccaaaagaatgagatttcagcgatggataagggtacgctgaacgaatccatcacgccgggcgacggcaaaagccgtgctgaaggctatacggatttccaatatgtccgctcgggctatatctaccgcaacggtgtcaataaaatcgattaccaaaacaatattgccctttccggtccggacggctaccttttctacaaaggcagcaatccttctcaagctctgccgacgggcaaggcgatttacaaaggtacttgggattatgtaaccgatgccaaggaaaaacagaagtttccccagttgggtagttttcaagcgggggataggtacggggctctgtctgccgaggaagaggatgtgttgcgcaacaaaagcgaggcgaaggaaggtcagaccgatttcgggctgaccagcgagtttgaggtggacttcgccgccaagaccatgaccggcaaactctaccgcaataaccggattaccaataacgaaaccgaaaatagagacaaacaaattaaacgttacgacattcaggctaacctgcacggcaaccgcttcaacggcaaggcaacggcaaccgacaaaccaaaagagaatgaaaccaaacaacatccctttgtttccgactcgtcttctttgagcggcggctttttcggcccgcagggtgaggaattgggtttccgctttttgagcaacgatcaaaaagttgccgttgtcggcagcgcgaaaacccaagacaaagccgcaaatggcaatactgcggcggcttcaggcgatgcaagcgtttccgcatcaaacggtgcggcaggcacgtcgtctgaaaacggtaagctgaccacggttttggatgcggttgaattgacactaaacgacaagaaaatcaaaaatctcgacaacttcagcaatgccgcccaactggttgtcgacggcattatgattccgctcctgcccgagacttccgaaagtgggaacaatcaggcagataaaggtaaaaacggcggaacagcctttacccgcaaatttgaccacacgccgaaaagcgatgaaaaagacacccaagcaggcacggcggcgaatggcgcgcaaaccgcttcgggtacggcaggcgacacaagtggcaaaacaaaaacctatcaagtcgaagtctgctgttccaacctcaattatctgaaatacggaatgttgacacgcaaaaacagcgaatccgcgatgcaggcaggcgaaagcagtagtcaaactcctgccgcccaaacggcacagggcgcacaaagtatgttcctccaaggcgagcgcaccgatgaaaacaagattccaaccgaccaaaacgtcgtttatcgggggtcttggtacgggcatattgccagcagcacaagctggagcggcaatgcttccaatgcaacgagtggcaacagggcggaatttactgtgaatttcgatacgaaaaaaattaccggcaagttaaccgctgaaaacaggcaggaggcaacctttaccattgatggtaagattgagggcaacggctttgaaggtacggcaaaaactgctgaattaggttttgatctcgatcaaagcaataccaccggcacgcctaaggcatatatcacaaacgccaaggtgcagggcggtttttacggacctaaagccgaagagttgggcggatggtttgcctatccgggcgataaacaaacggaaaatacaacagttgcatccggcaatggaaattcagcaagcagtgcaactgtcgtattcggtgcgaaacgccaaaagcctgtgcaataa

SEQ ID NO: 65116 - DNA, 657 bp, Neisseria meningitidis; identical to SEQ ID NO: 42090

SEQ ID NO: 65117 - DNA, 423 bp, Neisseria meningitidis; identical to SEQ ID NO: 37816

SEQ ID NO: 65118 - DNA, 864 bp, Neisseria meningitidis; identical to SEQ ID NO: 51352

SEQ ID NO: 65119 - DNA, 894 bp, Neisseria meningitidis; identical to SEQ ID NO: 58506

SEQ ID NO: 65120 - DNA, 345 bp, Neisseria meningitidis
atgctgccgaataaagttttgggtaaatatgattggaatgtggacggaaaaacaggaataggcgcagcatgggttgtcgctgcgtttatcctgcccatattggtgtgggcgatatttatgttgtcgcggatgcaaggctggcttgcgccgaccaaggcaaacccgacatgggagttggtgtggctgctgatctgcatgccctgcctgctgattgcgtccaaatgtttgggttggaaaggctggcggcgggtggtgaatatttttgcctgcctgaccgtctgcgccatattgagcgtacccgcttcgctgctcatcgcctttaccctccgggacctgctgaaatag

SEQ ID NO: 65121 - DNA, 651 bp, Neisseria meningitidis; identical to SEQ ID NO: 37550

SEQ ID NO: 65122 - DNA, 1098 bp, Neisseria meningitidis; identical to SEQ ID NO: 38023

SEQ ID NO: 65123 - DNA, 669 bp, Neisseria meningitidis
atgtgtacacgaaaacaacaaggtttcacgctaacagagctgctcatcgtgatggtcattgcagccattatggcgatgatagccctccccaatatgagccaatggattgcatcccgccgcattgccagtcatgcggagcggattgccaaccttttgcgtttctccaggggcgaagccgtccggctcaatctccctgtctatatctgtcctgttcaagttaaaaaagacggtgcgcccaacaataaatgtgactccggcaagaaggggcagggaatgttggcttttggcgataagaatggcaataagatatatgacaatgatacggcggatgttcttctccgcagtgtggtattgaatgatgatatcaataataagcggattaattatgccttcaaccatatcgctttcggtcagactcagccgaccgctgaccgtgtagtttggacattcaatcaaaacgggacgttcggttatacgaaagaccagcatcttacaagcaaatccagctttttttattccgacggttatatccaaatcgtgctgacagatgcgagagcagtttcagatgccgataagaaattccgttcggcggtggttttgattaacagcagcggcagggttgaggtttgtcctagaaacgataggcgtaccgtatgccaatataaatga

SEQ ID NO: 65124 - DNA, 375 bp, Neisseria meningitidis; identical to SEQ ID NO: 64134

SEQ ID NO: 65125 - DNA, 1125 bp, Neisseria meningitidis
atgcagaatacttcctttgataatgaatccgattatagcgatgattcagactttgtgtcagcttccgaaactgaaaaccgtatcggtctgaccgttccgctcgagcttgccggcgggcggttggatgcggtgttggcgaaacttctgcccgactactcgcgcagccgcctgacatcatggattaaagaaggcgcggttattgtaaacgataaaccttcgcaacccaaagacaaaatgataggcggcgagcaaatttgtgtaaccgtccgtccgagtgaggaaaatctggcgtttgttccagagcctatggctttggatattgtttacgaagacgataccgtcatcgtcgtcaacaaaccggccggactggtggtgcatccggcggcgggcaactggacggggacgctgctcaacggcctgttggcgcattgccccgagctgtcccaaattccgcgcgcgggcatcgtacaccgtttggacaaagaaaccagcgggctgatggtggttgccaaaaccctgtcggcgcaaaattccctcgtgaggcagcttcaagagcgcacggtcaaacgcatttaccgcgccgtcgccaacggcatcgttccctttgacggtaaaatcgaaacccaaatcggacgcgatccgcacaaccgcctgaaaatggcagtcgtcaaattcggcggcaaaccagccgttacccacgtcaaagtgttggaacgctatctggcgcacagctatatcgaatgctcgctcgaaacaggcaggacgcaccaaatccgcgtccatatgcgtgaggccaaccatccgcttgccgccgacccggtttacggcaacccgcgccatccgtgcggcgacacggtgaaagaagccgttaaaagtttgggtgcgcgtcaggcattgcacgcctaccgcttaagtttcactcatccgaaaaccggcgaaaccgtttcgtttgaagcaccgattccggacgacatatatcatttgttgtctgtcctccgtcttgaagccggtttggattcgtctttgagcaatgaagaggaatggcaggacaaattcggcgcggacgacgatgacgattggaacgaagacgactacgatgtcgaagtggtttatgtaagggagtag

SEQ ID NO: 65126 - DNA, 537 bp, Neisseria meningitidis; identical to SEQ ID NO: 37832

SEQ ID NO: 65127 - DNA, 936 bp, Neisseria meningitidis; identical to SEQ ID NO: 50208

SEQ ID NO: 65128 - DNA, 1389 bp, Neisseria meningitidis; identical to SEQ ID NO: 51243

SEQ ID NO: 65129 - DNA, 1176 bp, Neisseria meningitidis; identical to SEQ ID NO: 51635

SEQ ID NO: 65130 - DNA, 984 bp, Neisseria meningitidis; identical to SEQ ID NO: 42465

SEQ ID NO: 65131 - DNA, 720 bp, Neisseria meningitidis; identical to SEQ ID NO: 50970

SEQ ID NO: 65132 - DNA, 1404 bp, Neisseria meningitidis
atggatactacattgaaaaccaccttgacttctgttgcagcagccttcgcattatccgcctgcaccatgattccccaatacgagcagcccaaagtcgaagttgccgaaacgttcaaaaacgataccgccgacagcggcatccgtgcggtcgatttaggttggcatgactattttgccgacccgcgcctgcaaaagctgatcgacatcgcactcgagcgcaataccagtttgcgtaccgccgcattgaacagcgaaatctaccgcaaacaatacatgattgagcgcaacaacctcctgcccacgcttgccgccaatgcgaacgactcgcgccaaggcagcttgagcggcggcaatgtaagcagcagctacaaagtcggactgggtgcggcatcttacgaactcgatctgttcgggcgtgtacgcagcagcagcgaggcggcactgcaaggctatttcgccagcaccgccaaccgcgatgcggcacatttgagcctgattgccaccgttgccaaagcctatttcaacgaacgttacgccgaagaagcgatgtctttggcgcaacgtgttttgaaaacgcgcgaggaaacctacaagctgtccgaattacgttacaaggcaggcgtgatttccgccgtcgccctacgtcagcaggaagccctgatcgaatctgccaaagccgattatgcccatgccgcgcgcagccgcgaacaggcgcgcaatgccttggcaaccttgattaaccaaccgatacccgaagacctgcctgccggtttgccgctggacaagcagttttttgttgaaaaactgccggccggtttgagttccgaagtattgctcgaccgtcccgatatccgtgctgccgaacacgcgctcaaacaggcaaacgccaatatcggtgcggcacgcgccgcctttttcccatccatccgcctgaccggaaccgtcggtacgggttctgccgaattgggtgggttgttcaaaagcggcacgggcgtttggtcgttcgcgccgtctattaccctgccgatttttacctggggtacgaacaaggcgaaccttgatgtagccaagctgcgccaacaggcacaaatcgttgcctatgaatccgccgtccaatccgcatttcaagacgtggcaaacgcattggcggcgcgcgagcagctggataaagcctatgacgctttaagcaaacaaagccgcgcctctaaagaagcgttgcgcttggtcggcctgcgttacaagcacggcgtatccggcgcgctcgatttgctcgatgcggaacgcagcagctatgcggcggagggtgcggctttgtcggcacaactgacccgcgccgaaaaccttgccgatttgtacaaggcactcggcggcggattgaaacgggatacccaaaccgacaaataa

SEQ ID NO: 65133 - DNA, 1545 bp, Neisseria meningitidis; identical to SEQ ID NO: 50143

SEQ ID NO: 65134 - DNA, 1629 bp, Neisseria meningitidis
atgatttctaccaacggcatcaccatgcagttcggcgcgaagccgctgtttgaaaacgtatccgtaaaattcggagaaggcaaccgttacggcctgatcggcgcgaacggttcaggcaaatccaccttcatgaaaatcctcggcggcgatttggaacagacggccggcgaagtggcgattgaaaacggcgtgcgtttgggtaaattgcgccaagaccagtttgcctacgaagacatgcgcgtgctggacgtggtgatgatggggcataccgaaatgtgggcggcgatgaccgaacgtgatgcgatttacgccaatcccgaagccaccgaagacgactacatgaaagccgccgaactggaagccaagttcgccgaatacgacggctacaccgccgaagcgcgtgccgccgaactgttgagcggcgtgggcatttccgaagatttgcacaatgcgaaaatggcggaagtcgccccgggcttcaaactgcgcgtattgctggcgcaggcgctgttctccaagccggatgtattgctcttggacgaaccgaccaataacttggacattaataccatccgctggttggaaggcgtgttgaaccaatacgactccacgatgattatcatcagccacgaccgccactttttgaacgaagtctgcacgcatatggcggatttggactacaacaccatcaccatctatccgggcaactacgacgattacatgctcgcttctgcccaatcgcgtgagcgcgccctgaaagacaacgccaaagccaaagagaagctgcaagagctgcaagagtttgtcgcacgcttctctgccaacaaatccaaagcccgtcaggcaaccagccgtctgaaacaggccgacaaaatcaaatcggagatggtcgaagtcaaaccttccacccgtcaaaacccgtatatccgttttgaagccgatgaaaaagccaagctgcaccgtcaggctgtggaagttgaaaaactggcgaaacgctttgaaacccagttgtttaaaaacctgaacttcatccttgaagcgggacaacgcctcgccatcatcggcccgaacggcgcgggcaaatccaccctgctgaaactcttggccggcgcgtacaaccccgaatattcagacggtctgctgccggacgaaggcagcatcaaatgggcggaaaaagccagcgtcggctactatccgcaagatcacgaaaacgacttcgatgtcgatatggatttgagcgaatggatgcgccaatgggggcaggacggcgacgacgaacaagtcatccgcggcactttggggcgtttgctcttcggcagtaacgatgtcgtgaaaaaagtgaaggttctctccggtggtgaaaaaggccgtatgctttacggcaaactgttgctgttgaaacccaatgtcttggtcatggacgaaccgaccaaccacatggacatggaaagcatcgaatccttgaacatggcgctggaaaaatacaacggcacgctgattttcgtctcccacgaccgtcagttcgtttcttccctggctacccaaatcattgaattggacggcaaaggcggatatgaacactacttgggcgattacgaaagctatctcgagaaaaaaggcgtagcataa

SEQ ID NO: 65135 - DNA, 282 bp, Neisseria meningitidis
atgaacacaataccgctccacaccatactcaaacttatggcgcatcccgaacgtatggcgatactgatccaactgttggacagcgaacgcaatatcgccgaactggcaaaatccttatccctgccggccaccgccgtttccggccatttgaaccgcctgagggcgggcggtctggtggactttacgcgttaccaccgcattatcgaataccgcctgatttccgaagacacggcaacgattctgcggacaatccgcgatttggaaaacaaacgcgcggtatag

SEQ ID NO: 65136 - DNA, 591 bp, Neisseria meningitidis; identical to SEQ ID NO: 37325

SEQ ID NO: 65137 - DNA, 360 bp, Neisseria meningitidis; identical to SEQ ID NO: 43172

SEQ ID NO: 65138 - DNA, 1116 bp, Neisseria meningitidis
atgcttaaatttaccttacacaaaaaagacggatacgcccgacgcggcacgctggagttgaaccacggcaaaattgaaacgccggtatttatgcctgtcggtacttacggctcggttaaggcgatgaacccgcaaaacctgcacgacatcaaggcgcaaattattttgggcaacacttatcatttgtggctgcgtccgggcttggaggtcgtcgaacagtttggagggcttcacggctttatcggctgggacaaaccgattctgaccgactcgggcggttttcaggttttttctttgtcggatatgcgcaagctgacggaagaaggctgtacgttcaaaagcccgatcaacggcgacaagctgtttttatcgcctgaaatttccatgaaaatccaaacggttttgaactcggacatcgcgatgcagctggacgaatgcacgccgggcgaagcaacgcgcgaacaggcgaaaaaatcgctgcaaatgagcctgcgctgggcggaacggagcaaaaaagcctttgaagatttgaaaaacccgaacgcgctgttcggcatcgtgcaaggcgcgatgtatgaggatttgcgcgaagaatcgctgcgcggtttggaacagtttgattttcccggccttgccgtcggcggtttgtccgtcggcgaacccaagcccgaaatgtaccgtatgctgcgcgccgtcggtccgattctgccggaacacaagccgcattacctgatgggcgtaggcacgccggaagacctcgtgtacggcgtggcacacggcatcgatatgttcgactgcgtgatgcccacccgcaatgcacgcaacggctggctgtttacccgtttcggcgatttgaaaatcaaaaacgccaaacacaagctcgacaagcgtccgatagacgaaagctgcacctgctacgcctgccaaaacttcagccgcgcctacctgcaccatctgcaccgcaccggcgaaatcttgggcgcacagttgaacaccatccacaatctgcatttctaccaagtcattatggcggaaatgcgcgaagccgtcgaacaaggcaaatttgccgactggcaggcgcgattccacgaaaaccgcgcacgcggcatagactga

SEQ ID NO: 65139 - DNA, 309 bp, Neisseria meningitidis; identical to SEQ ID NO: 39572

SEQ ID NO: 65140 - DNA, 2127 bp, Neisseria meningitidis
atgggacagtttatgtcagttttccgcatcaatatgaccgccgccacggttttggcagcactctcgtcttcggtttttgccgcacaaacggaaggtttggaaaccgtccatattaagggtcagcgttcttacaacgcgattgccaccgagaaaaacggcgattacagctcgtttgccgccaccgtcggtacaaaaatccccgcttctttgcgcgaaattccgcaatccgtcagcatcattaccaaccagcaggtcaaagaccgcaatgttgatacgtttgaccagttggcacgcaaaacgcccggcctgcgcgtgttgagcaacgacgacggacgctcttcggtttacgcgcgcggttacgaatacagcgaatacaacatcgacggcctgcccgcgcagatgcagagtatcaacggcacgctgcccaacctgttcgccttcgaccgcgtggaagtgatgcgcgggccgagcggactgttcgacagcagcggcgagatgggcggcatcgtgaatctggtgcgcaaacgcccgaccaaagcgttccaaggtcatgcggcggcagggttcggtacgcacaaacaatataaagccgaggcggacgtatcgggcagcctcaattcagacggcagcgtgcgcggccgcgtgatggcgcagaccgtcggcgcgtctccgcgtcccgccgagaaaaacaaccggcgcgaaaccttctacgcggcggcggattgggacatcaaccccgatacggttttgggcgcgggctatctttaccagcaacgccgcctcgcgccgtacaacggcctgcctgccgatgccaataacaaattaccgtccctgccgcaacacgtatttgtcggcgcggattggaacaaatttaaaatgcacagccacgacgtgttcgccgatttgaaacattacttcggcaacggcggctacggcaaagtcggtatgcgctattccgatcggaaagccgattccaattatacgtttgcgggcagcaaactcaacaataccggacaagccgacgtagcgggtttgggtacggacattaaacaaaaagcctttgcggttgacgcaagttacagccgtccgtttgccttgggcaacaccgccaacgaatttgtgattggtgcagactacaaccgcttgcgcagtactaatgaacaagggcgttcgactttgtcaaaaagcgtcgctttagatggtttccgcgctttgccttataacggcatacttcagaacgcccgcgccggaaacaaaggtttcaatcactccgttaccgaagaaaacctcgacgaaaccggtttgtatgccaagacggtgttccgtcctctggaaggtttgtcgttgattgcaggcggacgtgtaggacatcacaaaatcgagtcgggcgacggcaaaaccctgcataaagcttcgaaaaccaaatttacaagctacgccggcgcggtttacgatatagacggcagcaacagcctgtacgcttccgcctcccaactctacacaccgcaaaccagcatcggcaccgacggcaagctgctcaaaccgcgcgaaggcaaccagtttgaaatcggctacaaaggcagctacatggacgaccgcctcaatacccgggtttcgttctaccgcatgaaggataaaaacgccgccgcaccgctggactcaaacaacaaaaaaacccgttacgccgcattgggcaaacgcgtgatggaaggtgttgagaccgaaatcagcggcgcgatgacaccgaaatggcaaatccatgcaggttacagctacctgcacagccaaatcaaaaccgcctccaattcgcgcgacgaaggcatcttcctgctgatgcccaaacacagcgcaaacctgtggacgacttaccaagttacgtccgggctgaccatcggcggcggcgtgaacgcgatgagcggcattacttcatctgcagggatacatgcaggcggttatgccacgttcgatgcgatggcggcataccgcttcacgcccaaactgaagctgcaaatcaacgccgacaacatcttcaaccgccattactacgcccgcgtcggcagcgagagcacctttaacattcccggttcggagcgcagcctgacggcaaacctgcgttacagtttttaa

SEQ ID NO: 65141 - DNA, 942 bp, Neisseria meningitidis; identical to SEQ ID NO: 51024

SEQ ID NO: 65142 - DNA, 678 bp, Neisseria meningitidis
atgcaagctgattttaaccgtcccgtcctggccatcgataccggtacttcccatttgtcgctcgcgctgcgtgccgacggcgaaacccgtctgttccatcaggaagtcggcagccgccagtccgaactgattctgccggaaatccgcaccctgttccgtgatgcgggcattaccgctgccgatttgggtgcggtcgtgtacgcacagggtcccggcgcgtttaccggactgcgtatcggcatcggtgtggctcagggtttggcaacgccgtttgatacccctttaatcggcgtaccctcgctcgataccgccgcctcgctgccgccgccgcaaagctgcatccttgccgctacggacgctcgtatgggcgaagtgttttatgcatggttcgatacgctgaactgccgccgtttgagcgattatcaggtcgggcgggcggcagacatccggctgccggaaggatgcgccttttcagacggcataggcagcgcgttcgcgctggaagaggccccgccgttctcaggcaggccggatatgccgactgccgccgactttctcgcattggcagccaagggcggctatcctgccgtccatgccgcgcacgccggtttgctctacgtccgcaacaaaatcgccctgactgccaaagaacaggccgaacggagggagcgcccgtga

SEQ ID NO: 65143 - DNA, 432 bp, Neisseria meningitidis; identical to SEQ ID NO: 42220

SEQ ID NO: 65144 - DNA, 618 bp, Neisseria meningitidis
atgtttacaggcattgttcaaggcttgggaaaactgacggcaatccaccgcccgtcggaggcatttcagacttatgtcgtcgagcttccgcaagaggcggcggacaatctgcaacgcggcgcatcggtcgccaacaacggctgctgcctgacgattaccgaaatcgaaggaaaccgcgtcagtttcgatttaatggcggaaactttggcaaaaaccaatttagggctgctgaaggaaggcgattgcgtcaacatcgaacgggcggcgcgtttcggagacgaaatcggcggacacgtcatgagcggacacattatggcaaccgtgcctattgtcgaaatcgaacgggacgggtacaaccgcacggtttggttttcgctcccgcacgaactcaaaccctatatcctgaccaaagggttcgtcggcttggacggttgcagcctgaccataggcaaagtcgaagacagccgtttcaatgtccatttgattcccgaaactttggaacggacgctgttcggcagcagaaaggtcggcgacagaatcaacatcgaaatcgatccgaatacgcaggcaatcgtcgataccgtcgaacggctgatggcgcaaagatatgcaaagtga

SEQ ID NO: 65145 - DNA, 693 bp, Neisseria meningitidis
atgaccgcctttgtccacaccctttcagacggcatggaactgaccgtcgaaatcaagcgccgtgccaagaaaaacctgattatccgccccgccggcacacataccgtccgcatcagcgtcccaccctgcttctccgtctccgctctaaaccgctggctgtatgaaaacgaagccgtcctgcggcaaacactggcgaaaacaccgccgccgcaaactgccgaaaaccggctgcccgaatccatcctcttccacggcagacagcttgccctcaccgcccatcaagacacgcaaatcctgctgatgccgtctgaaatccgtgttcccgaaggcgcacccgaaaaacagcttgcgctgctgcgggactttttggaacggcaggcgcacagttacctgattccccgcctcgaacgccacgcccgcaccacacaactgttccccgcctcctcctcgctgacctctgccaaaaccttctggggcgtgtgccgcaaaaccacaggcatacgcctcaactggcggctggtcggcgcaccggaatacgttgccgactatgtctgcatacacgaactctgccacctcgcccacgccgaccacagccgcgcgttctgggcactgacccgccgcttcgcaccctacacgcccgaagcgaaacagtggctcaaaatccacggcagggaacttttcgccttgggctga

SEQ ID NO: 65146 - DNA, 1020 bp, Neisseria meningitidis
atgaaaaaaattctcgttaccggcggcaccggttttatcggctcgcataccgttgtttctttgctgaaaagcggccatcaagtcgtgattttggataacctatgcaattccagcatcaatatcctgccacgcttgaaaacgattaccggccaagagattccgttttatcaaggcgatatccgcgatcgtgagattttgcgccgtatttttgcggaaaaccgcattgattcggtgattcattttgccggcttgaaagcggtgggtgaaagtgtggccgagccgatgaaatattatgataataatgtttccggcagcttggtgttggcggaagaaatggcgcgtgcgggcgtgtttagcattgtgttcagttcttcggcgacggtttatggcgatccgggcaaagtgccttataccgaggatatgccactgggcgataccaccagcccttacggcacatcgaaatcaatggttgagcgcattctcactgacattcaaaaagccgatccgcgctggagcatgattttgttgcgttatttcaatccaattggcgcgcatgaaagcggcttgattggcgagcagccaaacggtatcccaaataatttgttgccttatatctgccaagtggcggcaggcaaactgccgcaattagcggtattcggcgatgactaccctacccctgatggcacgggtatgcgcgactatattcatgtgatggacttggctgaaggccatgtcgccgccatgcaggcgaaaagcaatgtagcaggcacgcatttgttgaacttaggctccggccgcgcttcttcggtgttggaaatcatccgcgcatttgaagcagcttcgggtttgacgattccgtatgaagtcaaaccgcgccgtgccggtgatttggcgtgcttctatgccgacccttcctatacaaaggcgcaaatcggctggcaaacccagcgtgatttaacccaaatgatggaagactcatggcgctgggtgagtaataatccgaatggctacgacgattaa

SEQ ID NO: 65147 - DNA, 2157 bp, Neisseria meningitidis
atgcccgccccccaaccttccgccccttacgaccccctgaccgccgaagcgcgtgccctgcttttccataccgcctcctacctcaagcccgaggaacaggcggagcttgaaaaagctgtcgcctatgcgtttcgcgcccacgacgggcaaacccgcaaaagcggggagccctacatcacgcatccgattgccgttgcgacgcagctcgccctttggcatatggacatacagggtctttgtgcaggcgtgatgcacgacgtattggaagatacgggtgtgacaaaaggggaaatggcggcggtgttcggcaatacgattgccgagatggtggacggtctgtccaagcttgaaaaactcaaatttgaagatcatgcggagcatcaggcggagagtttccgcaaactgattttggcaatgaccaaagatgtgcgcgtgattgtcgtcaaacttgccgaccgcctgcacaatatgcggacgctcggttcgatgcgcccggacaaacgccgccggattgcaagggaaacccttgaaatctatgcacagattgccaaccgtataggtttgaataacgcatatcaagagcttcaggatttatcgttccaaaacctgcatcccaaccgctacgagactttaaaaaaagcgatggacaagagccggaagaaccggcaggacgttgtcggcaaagtcttgcgcgcattcggccagcggctggtaggcgcgaatatagaggccaaaatcaaaggcagggaaaaaaacctgtacggcatccatcagaaaatgatggcgaaaaagctgcgctttgccgaggttatggatatttacggtttccgcgtcattgtcaacagcattccagcctgttatgccgcactcggcgcattgcacaccctctatcagcccaagcccgggcggttcaaagactatatcgccattccgaaaagcaacgggtatcaaagtctgcatacgactttggtcggcccttacggcttgccgattgaagttcagatacgtaccaaggaaatggatgctgttgccgaaggtggaatcgccggacattggagctataaatcatattctaagacggtcgatcaggcggtgcttcacacaaaccggtggctgaaaaatatcttagatttgcaggcaagcagtgccaatgccattgagtttctcgaacacgtcaaagtcgatttgtttccgaacgaaatctacatccttacgccaaaaggaaaaatcctaactttgcccaaaggggcaacgcctgtcgattttgcttatgcggtgcataccgatatcgggcacaaaaccgttgccgcacgtatcaacaatatcatgatgccgttgcgtacgaagctcaaaaccggtgattctgttgaaattatcacatccgaacacgccaaacccaatcccgcgtggttgaatttcgccgtgtcaggcagggcgcgcagcgccatacgccaatatattaaaaaccttaaccggcacgatgcggtcgttttgggagagagcctcttacaaaaagccctgtccagtttgctgcccaaagatgtcctgctttcagacggcatcaaggaaaaatatcttgccgatctcaacgacaagcagacatcgtttgaagaagtgctgtacaacgtagggatggggcataccctgcctgtttatgtcgccatgcacattgccgagttggcaggggagcatttcggcagcgaggtcaggctcagttccattaaagtcgatgggcaggaaagcgggcatattcattttgcagagtgctgccaccctgttcccggcgattccatccgtttgctgttggttaagggaaaaggcatgattatccatagggatacctgcccgacgttgttgaagtccgatcccgaacagcagctggatgcagactgggaaaatatgaacgggcagaactaccgtgtcgggcttcaagtccaatcggaagacagccacggcctgttggcattaatggcgcaagcgatttccgattccggtgcagacattgagtcggtcgaaacaccgtctaaatcccagtcgggaacggaaggttttgtcgaattcaaattcttattgaaagtcaagaatctgaatcaattgaatcagattattcaaaatctgcatagtattccatatatccgcaaagtcatcagaagttga

SEQ ID NO: 65148 - DNA, 1302 bp, Neisseria meningitidis
atgccgtctgaaaccgcccgccccctttatgcggacacgtgcgccgcacacacgctcgtctggttccgccaaaacctccgcatccgcgacaacgccgccttatgcgccgccgttgccgaaggtttgcccattatcggcatttggattgacgatgccgaaacagacaaccctcgccgcgccgcgttctaccgccaatccgccgccgaactcgcccaagggcttgcagggcgcggcatcccgctctacacggcggcatcgcctgccgagctcgtccggctcgccgtccgcctcaatatccgcgccgtcatcgccgacgaatcccatacttttgccgacaaactcgccgacaacgccctttggcatgaattgaacaaacacggcatcgcgttaaccttcgtcaatgaccgcgccgttttcggcaaaaccgacctgatacccgacggcggcacggcacacaccgatttcgaccgctaccgcgaagtatggctcgaccgcttttccaagcagccccccgccggtccggacctattcgcggcataccgccaacccttccccgaaaacctttccgccccgccgcctgccgccctttcagacggcatcttcctgccgcaaaacagcggcgaaacggcggcttggcggcagtggcggcggtttctcgaacaggcggattcctactccgttttaaaggatttcccctcgcgcaaacacacttcgctgatgggcgcgtatttgagtgccggctgcatctcgccgcgcctgctcgcgcgggaaagcctcgaacgccgtctgaacgcgtgggcggacaacatcatccgccgcgattttttccttcaacttgccttgcagcacacggatgacgacccttcagacggcaatcctgaacacaccctgcgcctgacgctttggcagcagggccagaccggcattccgattatcgatgccgcgatgcgctgtttgcacaaaaccggcagcctccaccccgccctgagacgcttgagcgcggattttttctgccacgttttaaacctcccccgccgcgaaggcgagatatggtttgcccggcagctgaccgatttcgatgcggcaatcaaccaaggcaactggtggcttgccgcctcacggcacacctgccccgacattgccgccgccgcacacaagaccgaccccgacggcacctttgtcagacggcacattcccgagcttgcccacctgtccgccgacaccgtccacacgccttggcggtttgcctgttcggtcgatacccacggctatcccgcctatcctgtcgccggtattccctaa

SEQ ID NO: 65149 - DNA, 1113 bp, Neisseria meningitidis; identical to SEQ ID NO: 43907

SEQ ID NO: 65150 - DNA, 450 bp, Neisseria meningitidis; identical to SEQ ID NO: 44603

SEQ ID NO: 65151 - DNA, 255 bp, Neisseria meningitidis; identical to SEQ ID NO: 39349

SEQ ID NO: 65152 - DNA, 366 bp, Neisseria meningitidis; identical to SEQ ID NO: 50629

SEQ ID NO: 65153 - DNA, 480 bp, Neisseria meningitidis; identical to SEQ ID NO: 42783

SEQ ID NO: 65154 - DNA, 1968 bp, Neisseria meningitidis
gtggggaacacctttaaatcaatccttgtctgggtcgccttgggtatcggcctgatggctgcgttcaacgctttagacggtaaaaaagaagacaacgggcaaatcgaatattctcagttcatccaacaggtcaacaacggcgaagtatccggcgtcaacatcgaaggatccgtcgtcagcggctacctgattaagggcgagcgcaccgacaaaagcaccttcttcaccaacgcgcctttggacgacaacctgattaaaacactgctcgacaaaaacgtccgtgtaaaagtaacgccggaagaaaaaccgagcgcgctggctgccctgttttacagcctgctgcccgtcctgctgctgattggcgcgtggttctactttatgcgtatgcagacgggcggcggcggaaaaggcggcgcattctcattcggcaaaagccgcgcccgcctactggacaaagatgccaacaaagttacctttgccgatgtcgccggctgcgacgaagccaaagaagaagtgcaggaaatcgtcgattacctcaaagcgccgaaccgctatcaaagcctgggcgggcgcgtgccgcgcggcatcctgctggcgggcagcccgggtacgggtaagacgcttttggcgaaagcgattgcaggcgaagccggcgtgccgttcttcagcatttcaggttccgactttgtcgaaatgttcgtcggtgtcggtgcaagccgcgtccgcgatatgttcgagcaggcgaagaaaaacgccccctgcatcatctttatcgacgagattgacgcagtcggccgccaacgcggcgcaggtttgggcggcggtaatgatgagcgcgagcaaacattaaaccaattgttggttgaaatggacggttttgagagcaatcagactgtaattgtgattgcggcaaccaaccgccccgacgtactcgatcctgcgctgcaacgccccggccgtttcgaccgccaagtggttgtccccctgccggacatccgggggcgcgaacagattttgaacgtccactctaaaaaagtgcctttggacaaatctgtggatttattgtccctcgcgcgcggcacgccgggtttttccggcgcggatttggcgaacttggtcaacgaagccgccctgtttgccggccgccgcaataaagtcaaagtcgatcagagcgattttgaagacgccaaagacaaaatctatatgggtccggaacgccgcagtatggtgatgcacgaagacgaaaaacgtgcgacggcgtatcacgaatccggacacgcgattgttgccgaaagcctgccctttaccgaccccgtccacaaagtaaccattatgccgcgcggacgtgcgctgggtctgacttggcagcttccggagcgcgaccgcatcagtatgtataaagatcagatgttgagccagctctccatcctgttcggcggacggattgccgaagacatcttcgtcggacgcatctccaccggcgcatcaaacgactttgaacgcgcaacccaaatggcgcgcgaaatggtaacgcgctacggcatgagcgacaaaatgggcgtgatggtttatgcggaaaacgaaggcgaagtcttcttaggacgcagcgtaacccgttcgcaaaacatttccgagaaaacccagcaggacatcgatgcggaaatccgccggattttggacgagcagtatcaggttgcctacaaaatcctcgatgaaaaccgcgacaagatggaaaccatgtgcaaagccctgatggaatgggaaaccatcgaccgcgatcaggtactggaaatcatggcgggcaaacaacccagcccgcccaaagattacagccacaacctgcgcgagaatgcggacgcggcggaagataacgcgccgcacgctccgactcgggaagaaaccgaagcacctgccccggcagacaccgcttcgacagagtccgagcagcagcctgaaaacaaggcttaa

SEQ ID NO: 65155 - DNA, 195 bp, Neisseria meningitidis; identical to SEQ ID NO: 37083

SEQ ID NO: 65156 - DNA, 693 bp, Neisseria meningitidis; identical to SEQ ID NO: 40219

SEQ ID NO: 65157 - DNA, 192 bp, Neisseria meningitidis
ttgccgaaattcggagaattccatctccccagccctcccccacgggggagggggcaggttgcagcggattttgcggttgcaggcggtttgagaaagaatgcccgaaatatcaacagtgggaatttttcaggcagcctttatcgcaaggcagatgtaacaaacgccgcgagcgttttttcagacgacctttga

SEQ ID NO: 65158 - DNA, 324 bp, Neisseria meningitidis
atgataattgacgaaaaatctacttcagatgtactgaaacaatatcaagaactagggtttgatttgacaaaacctatgataatagagttttttataggaggttctcaaaaaaatctgcaatcaatagaaagccaactcatttcttatcggcaagattttcaaatcagtattgagcaaaatgaattcggagaaatgtggacttgctattgttccgtcaatatcgtcccttcccttgaaaacattttagctattgaaactacgttatttggtattgcacaaaaaaatgattgtaattatgaaggttttggttcgtatgggaactaa

SEQ ID NO: 65159 - DNA, 669 bp, Neisseria meningitidis; identical to SEQ ID NO: 43279

SEQ ID NO: 65160 - DNA, 255 bp, Neisseria meningitidis; identical to SEQ ID NO: 51837

SEQ ID NO: 65161 - DNA, 1179 bp, Neisseria meningitidis
atggcatttttaaaactgaccgaacaaaacgtgcagggcaaaaccgtcctcatccgcgccgatatgaacgtgccgttcaaagacggcaaaatcagcgacgacacccgtatccgcgcctcgctcgcgtccatccaatactgcatggacaacggcgcatccgttatcgtgatgatccacttgggtcgcccgactgaaggcgagttccaccccgaagacgacgttgcgcccgttgccgcgcatttgggcggtctgttgggcaaagacgtgaaagtattgaacgactggcgcgaaaacaaaccggctttgaacgcgggcgatgtcgtgatgctgcaaaacgtgcgtatcaacaaaggcgagaagaaaaacgatttggaactgggcaaagcctacgcttctttgtgcgacgtgttcgtcaatgacgcgttcggcaccgcgcaccgcgcccaagcctcgaccgaagccgtcgcccaagccgcccccgttgcctgcgccggcgtattgatggcgggcgaactcgacgctttgggcaaagccttgaaacagcccgcgcgcccgatggttgccatcgttgccggcagcaaagtgtccaccaagctgaccatcctcgaatcgctggcggacaaagtcgaccaactcatcgtcggcggcggtatcgccaacaccttcctgttggcagaaggcaaagccatcggcaaatctttggcggaacacgatttggtggaagaatccaaaaaaattatggcaaaaatggcggccaaaggcggttctgtgccgctgccgaccgatgtcgtcgttgccaaagcctttgccgctgatgaggaagcggtggtaaaagacattgccgacgttgccgaagacgagatgattttggacatcggcccgaaatctgccgccgcgcttgccgatttgcttaaagccgccggtacggtcgtttggaacgggccggtcggcgtgtttgagtttgaccagttcgcaggcggtacgaaagcccttgccgaagccattgcccaaagcaaagcgttctcgattgcgggcggcggcgacacgctggcggcgattgccaaattcggcgttaccgaccaaatcggctacatctccaccggcggcggcgcgttcctcgaattcttggaaggcaaagagctgcctgccgtagccgctttggaaaaacgcggcgagtaa

SEQ ID NO: 65162 - DNA, 1185 bp, Neisseria meningitidis; identical to SEQ ID NO: 56056

SEQ ID NO: 65163 - DNA, 570 bp, Neisseria meningitidis
atggtacggcgtttgataatcggcatcagtggggcgagcggtttccaatacggcgtgaaggctttggaacttttacgcgcgcaagatatcgaaacgcaccttgtggtatcgaaaggtgcggagatggcgcgcgcttcggaaacggcttatgcgagagacgaggtatatgccttggcggacttcgtgcatccgatcggcaatatcggggcgtgcattgccagcggtacgtttaaaacggacgggatgctggtcgccccctgttcgatgcggacgcttgcctcggtcgcgcacggcttcggcgacaacctcttgacgcgtgcggcggatgtggttttgaaggaaaggcggcggctggtgctgatggtgcgcgaaacgccgctgaaccttgcccatttggacaatatgaagcgggtaacggaaatgggcggcgtggtgtttccccctgttcctgcgatgtaccgcaaaccgcagacggcggacgacatagtggcgcacagtgttgcacacgctttgtcgctgttcggaatcgatacgccggattcggcggaatggcagggaatggcggattaa

SEQ ID NO: 65164 - DNA, 1017 bp, Neisseria meningitidis; identical to SEQ ID NO: 54397

SEQ ID NO: 65165 - DNA, 930 bp, Neisseria meningitidis; identical to SEQ ID NO: 58644

SEQ ID NO: 65166 - DNA, 813 bp, Neisseria meningitidis
atggaaaatatcggcaggcagcgacccatcggcgtttttgactcgggaatcggcggtttgaccaatgtgcgcgcgctgatggagcggctgccgatggagaacatcatttatttcggcgacacggcgcgcgtgccttacgggacgaaatctaaggcgaccatcgaaaatttctcgatgcagattgtcgattttctgctggaacacgatgtcaaggcgatggttatcgcgtgcaacacgattgcggcggtggcggggcagaaaatccgtcaaaagacgggcaatatgcctgtgttggacgtgatttccgccggcgcgaaagccgcgctggcaacgacgcgcaacaataaaatcggcattatcgccaccaataccacagttaacagcaatgcttatgcgcgcgccatccataggaacaaccctgatacgctcgtccgcacgcaggctgcaccgctgctcgtccctttggtggaggaaggttggttggaacatgaagttacccgcctgaccgtatgcgaatacctcaaaccattgcttgcagacggcatcgatacgctggtgttgggctgcacgcactttcccttgctcaagcccttaatcggcagggaggcgcacaatgtcgcgttggttgattctgcaattacgactgccgaagaaaccgcacgcgtccttgctcaggaaggattgctcaataccgacaacaacaatcccgactaccgtttttacgtcagcgatattcctttgaaattcagaaccatcggcgagcgttttctgggcaggacgatggagcagattgaaatggtgtctttggggtag

SEQ ID NO: 65167 - DNA, 636 bp, Neisseria meningitidis; identical to SEQ ID NO: 42737

SEQ ID NO: 65168 - DNA, 2256 bp, Neisseria meningitidis
atgggacagtacaagaagctgtggtacttgctgtttgccgttctggcggtatgctttaccattcttggctatatgggcagcgaggtttataagaaagccccgccttaccccgaacaggtcgtttccgcatcaggcaaagtgctgatgacgaaagacgatattttggcaggtcagtctgcgtggcagagtaccggcggtatggaagtcggttcgattctgggtcacggcgcatatcaggctccggactggacggcggactggctgcatcgtgagttgtccgcttggttggatttgaccgcgcaacagacttacggcaaaaaattcgatgaagtttcccctgaagaacaagccgttctgaaaacccgactggctgacgaataccgcaaccaaagccgtattaaagaagacggcagcgtcgtcatcagcgatacgcgcgtgaaagccatcgaaagcatcctgccttattaccacggtgtttacggcgatgatcccgcgctgcaaaccacccgcgaacactttgcaatgaaaaacaacacattgccaagccaagaagcgcgtgaaaaactgttcgacttcttcttctggacttcttggtctgcttcgaccaaccgtcctgacgagacgttcacttataccaacaactggccgcacgagcctttgatcaacaacgtaccgaccactgaaaactatatgtggtcattcaccagcgtggtattgttgctgatgggtatcggcttgctgatgtggggttactctttcttgaccaaacatgaagaggttgaagtacctactgaagatcctatctctaaagtacaactgactccttctcagaaagcgttgggcaaatatgtatttctgactgttgcactgtttgtcgtacaggtattgctgggcggtctgaccgcgcactacaccgtcgaaggccagggtttctacggcattgacgaggcgttgggctttgaaatgtccgactggttcccctacgccctgacccgtacttggcacatccaatccgccatcttctggattgcaaccggctttttgacggcaggtttgttcctcgcgccgattgtcaacggcggtaaagatcccaagttccaacgtgccggcgtaaacttcctctatatcgccctcttcatcgtggtcggcggttcttacgcgggcaacttcttcgcgttgacgcacatccttcccccggaatttaacttctggttcggacaccaaggttacgaatacctcgatttgggacgtttctggcaactccttttgatggtcggtctgctgttatggctgttcctgatgttgcgttgcacggtttccgcctttaaagaaaaaggcgtggacaaaaacctgttggctatcttcgtagcttctatggtcggcgtgggcgtgttctacgcgccgggtctgttctacggtgaaaaatccccgattgccgttatggaatactggcgttggtgggtggttcacctgtgggtagaaggcttcttcgaagtatttgccactgccgcctttgcctttgtcttctacaatatgggctttgtccgccgcagtaccgccactgcctccactttggccgctgccgccatctttatgttgggcggcgttccgggtacgctgcaccacctgtacttctccggctctacctccgcctctatggcaatcggtgcctgcttctccgctttggaagtcgtgccgctggtgttgctgggccgtgaagcatacgaacactggtcttaccaacacctgtccgactgggcgaaacgcctgcgttggccgctgatgtgcttcgtggcagtcgccttttggaatatgatcggtgccggcgtattcggcttcctgatcaatccgccgatttccctgttctatatccaaggtttgaacacttctgccgttcacgcgcacgccgccttgttcggtgtgtacggtttcttggcattgggcttcgtattgctggttgcccgttatttgaaaccgaacgcgcagtttgacgacaaactgatgacttggggcttctggctgctcaacggcggcttggtcggtatgattgccatcagcctgctgcctgtcggcgcgattcaggcatacgcctccatcacgcacggtctgtggtatgcccgcagcgaagaattcctgcaaatggaaatcctcgataccttgcgttgggtacgtacggcagctgacttgatctttatcggcggtgcagtatgcgttgctattcaagccactaaaatcgtattcggccgggacaaataa

SEQ ID NO: 65169 - DNA, 303 bp, Neisseria meningitidis; identical to SEQ ID NO: 64857

SEQ ID NO: 65170 - DNA, 1149 bp, Neisseria meningitidis; identical to SEQ ID NO: 60219

SEQ ID NO: 65171 - DNA, 423 bp, Neisseria meningitidis; identical to SEQ ID NO: 51460

SEQ ID NO: 65172 - DNA, 2766 bp, Neisseria meningitidis
atgagatcttctttccggttgaagccgatttgtttttatcttatgggtgttatgctatatcatcatagttatgccgaagatgcagggcgcgcgggcagcgaggcgcagatacaggttttggaagatgtgcacgtcaaggcgaagcgcgtaccgaaagacaaaaaagtgtttaccgatgcgcgtgccgtatcgactcgtcaggatatattcaaatccagcgaaaacctcgacaacatcgtacgcagcatccccggtgcgtttacacagcaagataaaagctcgggcattgtgtctttgaatattcgcggcgacagcgggttcgggcgggtcaatacgatggtggacggtatcacgcagaccttttattcgacttctaccgatgcgggcagggcaggcggttcatctcaattcggtgcatctgtcgacagcaattttattgccggactggatgtcgtcaaaggcagcttcagcggctcggcaggcatcaacagccttgccggttcggcgaatctgcggactttaggcgtggatgacgtcgttcagggcaataatacctacggcctgctgctaaaaggtctgaccggcaccaattcaaccaaaggtaatgcgatggcggcgataggtgcgcgcaaatggctggaaagcggagcatctgtcggtgtgctttacgggcacagcaggcgcagcgtggcgcaaaattaccgcgtgggcggcggcgggcagcacatcggaaattttggcgcggaatatctggaacggcgcaagcagcaatattttgtacaaacaggcgggttgaaattcaattccaacagcggaaaatgggaacgcgatttgcaaaggcaattctggaaaaccagttactataaacaatacaaagacccccagaaactgaaaaaatacatcgaagaccaagataaagactggcgggaaaacctggcgccgcaatacgacatcacccccatcgatccgtccagcctgaagcagcagtcggcaggcaatctgtttaaattggaatacgacggcgtattcaataaatacacggcgcaatttcgcgatttaaacaccaaaatcggcagccgcaaaatcatcaaccgcaattatcaattcaattacggtttgtctttgaactcgtataccaacctcaatctgaccgcagcctacaattcgggcaggcagaaatatccgaaagggtcgaagtttacaggctgggggcttttaaaggattttgaaacctacaacaacgcaaaaatcctcgacctcaacaacaccgccaccttccggctgccccgcgaaaccgagttgcaaaccactttgggcttcaattatttccacaacgaatacggcaaaaaccgctttcctgaagaattggggctgtttttcgacggtcctgatcaggacaacgggctttattcctatttggggcggtttaagggcgataaagggctgctgccccaaaaatcaaccattgtccaaccggccggcagccaatatttcaacacgttctacttcgatgccgcgctcaaaaaagacatttaccgcttaaactacagcaccaataccgtcggctaccgtttcggcggcgaatatacgggctattacagctcggaaggcgaatttaagcgggcattcggagaaaactcgccgacatacaagaaacattgcaacccgagctgcgggctttatgaacccgtattgaaaaaatacggcaaaaagcgcgccaacaaccattcggtcagcattagtgcggacttcggcgattatttcatgccgttcgccagctattcgcgcacacaccgtatgcccaacatccaagaaatgtatttttcccaaatcggcgactccggcgttcacaccgccttaaaaccagagcgcgcaaacacttggcaatttggcttcaatacctataaaaaaggattgttaaaacaagatgatacattaggattaaaactggtcggctaccgcagccgcatcgacaactacatccacaacgtttacgggaaatggtgggatttgaacggggatattccgagctgggtcagcagcaccgggcttgcctacaccatccaacatcgcaatttcaaagacaaagtgcacaaacacggttttgagttggagctgaattacgattatgggcgttttttcaccaacctttcttacgcctatcaaaaaagcacgcaaccgaccaacttcagcgatgcgagcgaatcgcccaacaatgcgtccaaagaagaccaactcaaacaaggttatgggttgagcagggtttccgccctgccgcgagattacggacgtttggaagtcggtacgcgctggttgggcaacaaactgactttgggcggcgcgatgcgctatttcggcaagagcatccgcgcgacggctgaagaacgctatatcgacggcaccaacgggggaaataccagcaatttccggcaactgggcaagcgttccatcaaacaaaccgaaactcttgcccgccagcctttgatttttgatttttacgccgcttacgagccgaagaaaaaccttattttccgcgccgaagtcaaaaatctgttcgacaggcgttatatcgatccgctcgatgcgggcaatgatgcggcaacgcagcgttattacagctcgttcgacccgaaagacaaggacgaagacgtaacgtgtaatgctgatggcttgtgcaacggcaaatacggcggcacaagcaaaagcgtattgaccaattttgcacgcggacgcacctttttgatgacgatgagctacaagttttaa

SEQ ID NO: 65173 - DNA, 306 bp, Neisseria meningitidis
atgattaccttgacgcattatctggtattgggtgcgctcctgttcggtatcagcgcaatgggtatcttcatgaaccgtaaaaacgtgctggtattgctgatgtccatcgagctgatgcttttggcggtgaacttcaactttatcgccttctcgcaacatttgggcgatactgccggacaaattttcgtattctttgtattgaccgttgccgctgccgaatccgccattggtttggcgattatggtgctggtgtaccgcaaccgacaaacgattaatgttgccgatttggacgagttgaaagggtaa

SEQ ID NO: 65174 - DNA, 660 bp, Neisseria meningitidis; identical to SEQ ID NO: 43147

SEQ ID NO: 65175 - DNA, 642 bp, Neisseria meningitidis; identical to SEQ ID NO: 42771

SEQ ID NO: 65176 - DNA, 150 bp, Neisseria meningitidis; identical to SEQ ID NO: 50548

SEQ ID NO: 65177 - DNA, 291 bp, Neisseria meningitidis
atgaccatccgtcctttacacgaccgcgttgtcgtcaaacgcttggaagctgaagagaaaaccgcatcgggcatcgttttgccgggtgcggccgccgaaaaacccgacatgggcgaagtgatcgccgtgggtgcgggcaaaatcggtaaagacggcgcgcgccgtccgctggatgtcaaagtcggcgacaaaatcattttcggcaaatacagcggccaaaccgtaaaagccgacggcgaagagctgttggtaatgcgcgaagaagatatcttcggcatcgttgaaaaataa

SEQ ID NO: 65178 - DNA, 1503 bp, Neisseria meningitidis
atgagtcgtgaaatgttacagctggcagaagcactggcaagcgaaaaaaacgttgatgcggaagtcgtcttccaagcactggaattcgccctgtctaccgccgccaagaaaaaggcagaccgcgaacacatggacgtgcgcgtccaaatcaaccgcgacaccggcgaataccaaaccttccgccgctggctgattgtcgccgatgaagactatacctatcccgatgtcgaaaaaaccatcgaggaaatccaagaggaaattcccggcactaccatccaaatcggcgaatactacgaagagcagctacccaacgaaggcttcggccgccaagccgcgcaaaccgccaaacaaatcatcctgcaacgcatccgcgatgcggagcgcgagcaaaatctgaacgagtttctcgccgtcaaagaagacatcgtgtccggtacggtcaaacgcgtcgaacgccacggcatcatcgtcgaagtcgttgccggcaaactggacgcgctgattccgcgcgaccaaatgattccgcgcgaaaacttccgcagcggcgaccgcatccgcgccctcttcctgcgcgtcgaagaaatcggcaacaccggccgcaaacaagtcattctgagccgtacttccggcgatttcctcgtcaaactgtacgccaatgaagtacctgaaattgcagacggcatgcttgaaatccgcgctgtcgcccgcgacccgggccagcgtgccaaagtcgccgtcaaagccaacgaccagcgcatcgatccgcaaggcacctgtatcggcgttcgcggttcgcgtgtcaatgccgtcagcaatgaattgtccggcgagcgcatcgacgttgtcctttggtcgcccgaacccgcgcaattcgtgatgagcgcgctctcacccgccgaagtcagccgcatcgtcatcgacgaagacaaacacgccgtcgatgtcatcgttgccgaagaccagctcgcgctcgccatcggacgcggcggtcaaaacgtccgcctcgcctccgaactgaccggctggcagctcaacatcatgacttccgccgaggcagacgaacgcaatgcggcagaagatgccgccatccgccgcctgtttatggatcacttgaacgtggacgaagaaaccgccgacgtactggttcaggaaggttttgcaaccttggaagaagtcgcctatgttcctgccgccgaactgcttgccattgaaggatttgacgaagaaatcgtcgatatgctccgcaaccgcgcccgcgatgccatcctgaccatggcgattgccgccgaagaaaaactgggcgaagtgtccgacgatatgcgcaacctcgaaggcgtagatgccgatatgctccgcagccttgccgaagcaggcattaccacccgcgacgacttggcagagcttgccgtggacgaactgattgaaatcaccggtgtaaacgaagaaaccgcaaaagccgtcatcctgaccgcacgcgaacactggtttaccgaagacaaataa

SEQ ID NO: 65179 - DNA, 327 bp, Neisseria meningitidis
atgaacttcaaacgccttctcttgaccgccgccgcaaccgcactgatgggcatttccgcccccgcactcgcccaccacgacggacacggcgatgacgaccacggacacgccgcacaccaacacaacaaacaagacaaaatcatcagccgcgcccaagccgaaaaagcagcgttggcgcgtgtcggcggcaaaatcaccgacatcgatctcgaacacgacaacggccgtccgcactatgatgtcgaaatcgtcaaaaacggacaggaatacaaagtcgttgtcgatgcccgtaccggccgcgtgatttcctcccgccgcgacgactga

SEQ ID NO: 65180 - DNA, 1356 bp, Neisseria meningitidis; identical to SEQ ID NO: 50730

SEQ ID NO: 65181 - DNA, 1593 bp, Neisseria meningitidis; identical to SEQ ID NO: 42823

SEQ ID NO: 65182 - DNA, 1569 bp, Neisseria meningitidis; identical to SEQ ID NO: 59639

SEQ ID NO: 65183 - DNA, 453 bp, Neisseria meningitidis; identical to SEQ ID NO: 45863

SEQ ID NO: 65184 - DNA, 2664 bp, Neisseria meningitidis
atgtccacccaattacacgatgttgaccctatcgaaacccaagagtggctggacgcgttaagctccgtcctcgaatatgaaggcggcgaacgtgcgcaatacctcttggaaaacctggtcaaatactgccgcgacaagggcgtacgtatgccacacggcacgaccaccccgtatttgaataccgtttcggttgaaaacgaaaaaggcattccgggcgaccaaaacatcgaacaccgcatccgcgcattcgtgcgctggaacgccgccgccatcgtattgcgcgccggcaagaaagatttggaactgggtgggcacatcgcatctttccaatctgccgccaccatgtacgaagtcggtttcaaccacttttggaaagccaaaggcgaaggcgaagaaggcgatttggtcttcttccaaggtcacgtcgccccgggcatctatgcacgcgcattcgtcgagggccgtctgaccgaagaccagctgaacaacttccgccaagaagtggacggacacggtctgccttcctatccgcacccccacctcttgcccgacttttggcagttcccgaccgtatccatgggcttggggcccatcatggcgatttatcaggcgcgtttcctgaaatacttggaatcgcgtggtttggcaaaaaccaaaggccgtaaagtatggtgtttctgcggcgacggcgaaatggacgaacccgaatctcaaggtgcaatcgcactggctgcacgcgaaggcttggacaacctgattttcgtcatcaactgcaacctgcaacgcttggacggtccggtacgcggcaacggcaaaatcatccaagaattggaaggcaactttgccggcgccggctggaatgtcgtcaaagtcatttggggccgccgctgggaccgcctcttggcgaaagacaaagacggtatcctgcgccaacgtatggaagaatgtttggacggcgactaccaaacttacaaatccaaagacggcgcgtatgtgcgcgaacacttcttcaatacgcccgaactgaaaacattggttgccgatatgaccgatgagcaactctgggcattgaaccgcggcggccacgacccgcaaaaagtgtacaacgcctacgaccgcgcagcgaaccatgccgacggcaaacctaccgtcatcttggcgaaaaccattaaaggttacggtatgggcgcatccggcgaaggtcagaacgttgcccaccaagccaaaaaaatggacaaagcgtccctgaaacaattccgcgaccgctttgacattccggttaccgacgaacaaatcgaaagcggcgatctgccttacctgacttttgcccccgatacggaagaatacaaatacctgcacgcacgccgcgatgctttgggtggctacctgccgcaacgcaaaccgacgcaggaagtattggaagtgcccgagctgtcagcattcgacgcacaactcaaatccagcggtgaacgcgagttctcgaccacgatggcattcgtccgcatcctgtccactttgctgaaagacaaaaaaatcggcaaacgcgtcgtacctatcgttcccgacgaaagccgtactttcggcatggaaggtatgttccgccaatacggtatttggaatccgaaaggtcagcaatatacccctcaagacaaagaccaactgatgttctataaagaatccgttgacggtcaaatcttgcaagaaggtattaacgaaccgggcgcgatggccgactggattgcggctgcaaccagctacgccaacagcaacttcgcgatgattccgttctacatttactattctatgttcggtttccaacgtgtcggcgacttggcatgggcagccggtgatatgcacgcgcgcggcttcctgctgggcggtactgccggccgtacgacgctgaacggcgaaggcctgcaacacgaagacggccacagccacatccaggccgacctgattccgaactgcgtatcttatgacccgactttccaatacgaagtcgccgtcatcgtacaagacggtctgcgccgtatgtatgccaataatgaagacgtgttctactacatcaccctgatgaacgagaactacacccatccggatatgcccgaaggtgcggaacaagacatcttgaaaggtatgtacctgctgaaagccggcggcaaaggcgacaagaaagtccaactgatgggttccggtacgattttgcaagaagtgattgccggtgccgagctgctgaaagccgacttcggcgtggaagcagacatttggtcttgcccatccttcaacctgctgcaccgcgacgctgtcgaggtagaacgcttcaaccgcctgcatccgctggaagccgaaaaagtacctttcgttacttcccaactgcaaggtcatgacggtccggttattgccgctaccgactatatccgcagctatgctgaccgtatccgcgcctacatcccgaacgactaccacgtcttgggtactgacggcttcggccgctccgacagccgcgccaacctgcgccgcttctttgaagtggatcgctacaacgttgccgtggccgcattggccgcattggcggaacaaggcaaagtcagcaaagaaaccgttcaacaagccattgagaaatacggcatcaaagccgattcagctcctagctggaaacgctga

SEQ ID NO: 65185 - DNA, 690 bp, Neisseria meningitidis
ttgccgggaagccggggcattcgggcaaacggcacgcagttcgcacgcgttttgcacggcacaccgaacccatcggccggcaggatggcatccgttaaggaaattctgatgaaacacaccgtatccgcatcggtcatcctgcttttgaccgcttgcgcgcaattgcctcaaaataacgaaaacctgtggcagccgtccgaacacacccgcagtttcacggcagaagggcggttggcagtgaaagcggaagggaaaggttcgtatgcaaatttcgattggacataccaaccgctcgtggaaaccatcaatatcaacacccctttgggcagtacgctcgggcagttgtgtcaagacagggacggcgcattggcagtggacggcaaaggaaatgtctatcaggcggaaagtgcggaagaattgagcaggcagctggtcggtttcaaactaccaatccaatatctgcatatctgggcagatggcaggcgtgtggcgggcgcgccttaccgcatcctgccggacggcatattggaacaatacggttggactgtcggcagaaccgccgacagtggggggcaagtccgaacgttgcaactgaataacggaaatttgaacatcaggctggttttcaccgaaatcggtatgccgtctgaaactgaaaccccggaacgctgtgcggcgcgcacgagataa

SEQ ID NO: 65186 - DNA, 285 bp, Neisseria meningitidis; identical to SEQ ID NO: 39838

SEQ ID NO: 65187 - DNA, 1467 bp, Neisseria meningitidis
atggttattttttatttttgtgggaagacatttatgcctgcacgaaacagatggatgctgctgctgcctttattggcaagcgcggcatatgccgaagaaacaccgcgcgaaccggatttgagaagccgtcccgagttcaggcttcatgaagcggaggtcaaaccaatcgacagggagaaggtaccggggcaggtgcgggaaaaaggaaaagttttgcagattgacggagaaaccctgctgaaaaatcccgaattgttgtcccgcgcgatgtattccgcagtggtctcaaacaatattgccggtatccgcgttattttgccgatttacctacaacaggcgcagcaggataagatgttggcactttatgcacaagggattttggcgcagacagacggtagggtgaaagaagcgatttcccattaccgggaattgattgccgcccaacccgacgcgcccgccgtccgtatgcgtttggcggcggcattgtttgacaacaggcagaacgaggcggcggcagaccagttcgaccgcctgaaggcggaaaacctgccgccgcagctgatggagcaggtcgagctgtaccgcaaggcattgcgcgaacgcgatgcgtggaaggtaaatggcggcttcagcgtcacccgcgaacacaatatcaaccaagccccgaaacggcagcagtacggcaaatggactttcccgaaacaggtggacggcacggcggtcaattaccggctcggcgcggagaaaaaatggtcgctgaaaaacggctggtacacgacggcgggcggcgacgtgtccggcagggtttatccggggaataagaaattcaacgatatgacggcaggcgtttccggcggcatcggttttgccgaccggcgcaaagatgccgggctggcagtgttccacgaacgccgcacctacggcaacgacgcttattcttacaccaacggcgcacgcctttatttcaaccgttggcaaaccccgaaatggcaaacgttgtcttcggcggagtgggggcgtttgaagaatacgcgccgggcgcgttccgacaatacccatttgcaaatttccaattcgctggtgttttaccggaatgcgcgccaatattggatgggcggtttggatttttaccgcgagcgcaaccccgccgaccggggcgacaatttcaaccgttacggcctgcgctttgcctgggggcaggaatggggcggcagcggcctgtcttcgctgttgcgcctcggcgcggcgaaacggcattatgaaaaacccggctttttcagcggttttaaaggggaaaggcgcagggataaagaattgaacacatccttgagcctttggcaccgggcattgcatttcaaaggcatcacgccgcgcctgacgttgtcgcaccgcgaaacgcggagtaacgatgtgttcaacgaatacgagaaaaatcgggcgtttgtcgagtttaataaaacgttctga

SEQ ID NO: 65188 - DNA, 648 bp, Neisseria meningitidis; identical to SEQ ID NO: 40909

SEQ ID NO: 65189 - DNA, 1185 bp, Neisseria meningitidis
atggctaaggaaaaatttgaacgtagcaaaccgcacgtaaatgttggcaccatcggtcacgttgaccatggtaaaaccactctgactgctgctttgactactattttgtctaaaaaattcggtggcgctgcaaaagcttatgaccaaatcgacaacgctcctgaagaaaaagctcgtggtattaccattaatacctcacacgtagaatacgaaactgaaacccgtcactacgcacacgtagactgcccggggcacgccgactacgttaaaaacatgattaccggcgccgcacaaatggacggtgcaatcctggtatgttccgcagccgacggccctatgccgcaaacccgcgaacacatcctgctggctcgccaagtaggcgtaccttacatcatcgtgttcatgaacaaatgcgacatggtcgacgatgccgagctgttggaactggttgaaatggaaatccgcgacctgctgtccagctacgacttccccggcgacgactgcccgattgtacaaggttccgcactgaaagccttggaaggcgatgccgcttacgaagaaaaaatcttcgaattggctgctgcattggacagctacatcccgactcccgagcgtgccgtggacaaacctttcttgttgcctatcgaagacgtattctctatttctggtcgtggtacagtagtaaccggtcgtgtagagcgcggtatcatccacgtcggtgacgagatcgaaatcgtcggtctgaaagaaactcaaaaaaccacttgtaccggtgttgaaatgttccgcaaactgctggacgaaggtcaagcaggcgacaacgtaggcgtattgctgcgcggtaccaaacgtgaagacgtagagcgtggtcaagtattggctaaaccgggtacaatcactcctcacaccaagttcaaagcagaagtatacgtactgagcaaagaagagggcggccgccataccccgttcttcgccaactaccgtccccaattctacttccgtaccaccgacgtaaccggcgcggttactttggaagaaggtgtggaaatggtaatgccgggcgagaacgtaaccatcaccgtagaactgattgcgcctatcgctatggaagaaggtttgcgctttgcgattcgcgaaggcggccgtaccgtgggtgccggcgtggtttcttctgttatcgcttaa

SEQ ID NO: 65190 - DNA, 393 bp, Neisseria meningitidis; identical to SEQ ID NO: 43975

SEQ ID NO: 65191 - DNA, 621 bp, Neisseria meningitidis
atggcacagtttttcgctattcatcccgacaatccccaagaacgcctcatcaagcaggcggttgaaatcgtcaataaaggcggcgtggtcgtttatccgaccgattcctgttatgccttgggctgcaaactcggcgataaggcggcgatggaacgcatactctccatccgcaaaatcgatttgaaacaccacctgaccctgatgtgcgcagatttgagcgagttgggcacatacgccaaagtcgacaacgtacagtttcgtcagcttaaagccgccacacccgggccttatacttttattttacaggcgacgaaggatgtgccggcgcgcacgctgcacccgaaacgcaaaaccatcgggctgcgtattcccgataatgccattgcacaagccctgctgggggaattgggcgagccgcttttaagctgcaccctgatgctgcccgaagacggcgaaccattgaccgatccttatgaaatccgcgagcgtttggaacacgccgtcgatttggtgattgacggcggctggtgcggaaccgagccgaccaccgtcgtcgatatgaccgacggcacggaactggtgcgccggggttgtggcgatacggcggtgttcggtttgtag

SEQ ID NO: 65192 - DNA, 1296 bp, Neisseria meningitidis; identical to SEQ ID NO: 51060

SEQ ID NO: 65193 - DNA, 285 bp, Neisseria meningitidis; identical to SEQ ID NO: 39839

SEQ ID NO: 65194 - DNA, 192 bp, Neisseria meningitidis; identical to SEQ ID NO: 37158

SEQ ID NO: 65195 - DNA, 753 bp, Neisseria meningitidis; identical to SEQ ID NO: 51737

SEQ ID NO: 65196 - DNA, 1173 bp, Neisseria meningitidis
atgaaacaaattaatcaagcattgcaacaaaaactggttgaatttaaagaaaaatcgggaatgaaccaaacccaactggcacgcggtatcgatacttcgccggcctccatcagtatgtatctgaacggcacttatgccgataaaggcggcaattatgaaaccatcgagacgaaaatcgaggcgtttttggagatggaggacagtaaggcgcgacgtgaagagctggtgttgggatttgtatcgactaagacgacacgccgaatcgcggaagtgatgcgcgatgcgcacgaaggcggcgaaacggtggtgatctacggtcaggcgggtttgggcaagacgcagtcggtcaaaaactactgcgagaaaaaccctgcggctatcttgattgaggctaatccgagctttacggctttggtactgatgcgcaagttggcgacggcggcgaaggtatcggcgatgggcagcctgaatgatttgtttgagtctgtatctgaccgcctgcgcgattcgggccgtctgattgtggtcgatgaagcggaaaacctgcccttgcgcgcccttgagattatccgccgactgcatgatgaaacgggctgcggtttggtgttgagcggtatgccccgactggttgcgaatttgcgcggtaagcatggcgaactggtacagctttacagccgcgtgtctgttgcgctgaatttgggcgaatctttgccggatgacgaactctttgagattgcgaaagcggctttgcctgatgcggtcaagcatctgctccctgatagtgtacaagcgttgattacggtcatcgggtttaatgaaacgctggagctggtgcgcctgatgggcggtacgacttatcctttgcggcagggttatacgaaaaacagtcaatcccgtgttgcatacttggaagagattatcggcagtgaggcggccggtcggctggtggaggcaatggctccgtgcaatctgtttataccccgttgcgagacggccttgtatgagttgcgaaaccgtaaaatccgcagtcagtttgaccggcagacggcaggcggtacccctgcttatgaggccgttaacgatttggccttggcacaccgcctaagcgaccgccatgtgtggcgaattttaaagcaggcggataaggaagcggagcaggagaatttgttttag

SEQ ID NO: 65197 - DNA, 276 bp, Neisseria meningitidis; identical to SEQ ID NO: 50119

SEQ ID NO: 65198 - DNA, 1251 bp, Neisseria meningitidis; identical to SEQ ID NO: 51358

SEQ ID NO: 65199 - DNA, 852 bp, Neisseria meningitidis
atgaacactttgaaatttaccaaaatgcacggtttgggcaacgattttatggtgattgatgcggtcagtcaggattttacccccgaggacgcgccgattgcggcatgggcggaccgtttccggggcgtgggcttcgaccagcttttggtggtcgggcgttcggaaaccgaaggcgtggatttccgttaccgtattttcaatgccgacggcagcgaggtcgggcaatgcggcaacggagcgcgttgttttgcccgttttgttgcagacaagggtttgaccgataagaaagaaatttgtgttgaaacggcaaatggcgttatttttccgaaattgtccgataacggtatggttacggtcaatatgggcaaaccgaagtttatgccgtctgaaataccgtttgtccccgaatcgggcgagggggatgatgcctgtatttacggggtgcatctcgaatccggcattcagcctgtcagctgcgtcaatatgggcaacccccatgcggtgattgtggtcgatgacgtagaatgcgcgccggtgcgcgaaaccggttcgcttatcgaaccgcacaggcagtttcccgaacgcgtcaacgtcggctttatgcagattgtcagccgaaccgcgattcgtttgcgcgtgttcgagcgcggcgtgggcgaaacccaagcgtgcggtacgggcgcgtgtgcggctgtggtggcgggtatccgtctggggttgttggatgaagggaaaacggtagaagtgattttgccgggcggaactttatatatcgaatgggcctgcggcggcgatgtgatgatgaccggccctgcggaaacggtgtttgaaggcgagttggcgtattcatga

SEQ ID NO: 65200 - DNA, 912 bp, Neisseria meningitidis; identical to SEQ ID NO: 58393

SEQ ID NO: 65201 - DNA, 474 bp, Neisseria meningitidis; identical to SEQ ID NO: 51534

SEQ ID NO: 65202 - DNA, 891 bp, Neisseria meningitidis; identical to SEQ ID NO: 43240

SEQ ID NO: 65203 - DNA, 465 bp, Neisseria meningitidis
atgtttaccatcgttttataccagccggaaatcccgccgaacacgggtaacatcatccgcctgtgcgccaataccggcgcggatttgcaccttgtcaaaccgctcggcttcccattggattccgccaaaatgaaacgcgccgggctcgactaccacgagttcgccagcctgacggtgcacgaaaacttcgacgactgcctcaaggcactcgcaggcaggcgcattttcgccctgaccaccaaaggcacagcgcgccccgatgaaaccgcgtttcagaaaggcgatgttttactgttcgggccggaaacgcgcggactgcctgccgacatcctcgacagcctgcccgccgcgcaaaaaatccgcctgcccatgcagcccggcagtcggagtatgaacctttccaataccgttgccgtgattctctttgaagcgtggcggcaacacggttacgcaggcggcgtttga

SEQ ID NO: 65204 - DNA, 855 bp, Neisseria meningitidis; identical to SEQ ID NO: 50372

SEQ ID NO: 65205 - DNA, 777 bp, Neisseria meningitidis; identical to SEQ ID NO: 42565

SEQ ID NO: 65206 - DNA, 1497 bp, Neisseria meningitidis; identical to SEQ ID NO: 50313

SEQ ID NO: 65207 - DNA, 273 bp, Neisseria meningitidis; identical to SEQ ID NO: 58721

SEQ ID NO: 65208 - DNA, 330 bp, Neisseria meningitidis; identical to SEQ ID NO: 37077

SEQ ID NO: 65209 - DNA, 1548 bp, Neisseria meningitidis; identical to SEQ ID NO: 38578

SEQ ID NO: 65210 - DNA, 2187 bp, Neisseria meningitidis
ttgccccgatgcctgaaacagactgtccgccacgtcatgccgtctgaaaccggcgcagatgccgccaagccttcagacggcattgcctgcccgctccgaccgaacaacaaccatctttgggagaaccttatgcccgaacaaaaccgcatcctctgccgcgaactaagcctgctggcattcaaccgccgcgtgttggcacaggcggaagacaaaaacgtcccccttttggaacgcctgcgcttcctgtgcatcgtgtcgtccaatcttgacgagtttttcgaagtccgcatggcgtggctcaagcgtgaaaacaagctgcacccccggcgcaggctggacaacggcaaaatgccgtctgaaaccatcgccgacgttaccgaagcggcgcgctccctgatacggcaccagtacgacctgttcaacaacgtccttcagcccgagttggcgcgggaaagcatccatttttaccgccgccgcaactggacgggcgcgcagaaaaaatggatcgaagactatttcgaccgcgaactgctgccgatcctgacccccatcggactcgacccgtcccaccccttcccgcgaccgctgaacaaatcgctcaacttcgccgtcgaactcgacggcacggacgcgttcggcaggccttcggggatggcgattgtgcaggcaccgcgcatcctgccgcgcgttgttcccctgccgtccgaactgtgtggcggcggacacggcttcgtcttcctctcctccatcctgcacgcccacgtcggcaaactcttcccgggcatgaacgtcaaaggctgccaccagttccgcctgacgcgcgacagcgacttgaccgttgacgaagaagacctgcaaaacctccgcgccgccattcaaaacgaactgcacgaccgcgaatacggcgacggcgtgcggctcgaagtcgccgacacctgtcccgcctacatccgcgactttctgctcgcgcaattcaaactgaccgccgccgaactctatcaggtcaaaggcccggtcaacctcgtgcgcctcaacgccgtccccgacctagtcaaccgccccgatttgaaatttcccacacacacgccgggcagactgaaagccttgggcaaaaccgcgtccatattcgatttggtgcgccaatcgcccatcctgctgcaccacccctaccaatcgttcgaccccgttgtcgaaatgatgcgcgaagctgccgccgaccccgacgtgcttgccgtcaaaatgacgatttaccgcaccggcacgcgctccgaactcgtccgcgccctgatgaaggcggcactcgccggcaaacaagtaaccgtcgtcgtcgaactgatggcgcgttttgacgaagccaacaacgtcaactgggcgaagcagctcgaagaggcgggcgcgcacgtcgtatacggcgtgttcggctacaaagtacacgccaaaatggcactcatcatccgccgcgaagacggcgtactcaagcgttacgcccacctcggcacgggtaactaccaccaaggcacatcgcgcatctacaccgacttcggcatcattaccgccgacgaacaaatcaccgccgatgtgaacacattgtttatggaaatcacaggcttgggcaaacccgggcggctgaacaaactctaccaaagcccgtttaccctgcacaaaatggttatcgaccgcatcgcacgcgaaaccgaacacgccaaagccggcaaacccgcccgaatcaccgccaagatgaattcgctcatcgaaccgaccgtcatcgaagccctgtatcgggcaagcgcggcaggcgtgcaaatcgatttgattgtgcgcggtatgtgcaccttgcgcccgggtgtaaaaggcttgtccgaaaacatccgcgtccgctccatcatcggcaggcagctcgaacacgcgcgcgtgtattgcttccacaacaacggcgcggacgatacctttatctccagcgcggattggatggggcgcaacttcttccgccgcatcgaaaccgccgcgccgattgccgcgcccgaactcaaaaaacgcgtcatccgcgaaggtttggaaatggcactggcagacaatacgcacgcgtggctgatgcagcccgacggcggctatatccgcgccgcgcctgccgagggcgaaagcgaagccgacctgcaaaacgatttgtggacactgctcggaggctga

SEQ ID NO: 65211 - DNA, 294 bp, Neisseria meningitidis; identical to SEQ ID NO: 37088

SEQ ID NO: 65212 - DNA, 1389 bp, Neisseria meningitidis; identical to SEQ ID NO: 45101

SEQ ID NO: 65213 - DNA, 261 bp, Neisseria meningitidis; identical to SEQ ID NO: 42390

SEQ ID NO: 65214 - DNA, 1035 bp, Neisseria meningitidis; identical to SEQ ID NO: 42242

SEQ ID NO: 65215 - DNA, 1188 bp, Neisseria meningitidis
atggcagagatctgtttgataaccggcacgcccggttcagggaaaacattaaaaatggtttccatgatggcaaacgatgaaatgtttaagcctgatgaaaacggcatacgccgtaaagtatttacgaacataaaaggcttgaaaataccgcacacctacatagaaacggacgcaaaaaagctgccgaaatcgacagatgagcagctatcggcgcatgatatgtacgaatggataaagaagcccgaaaatatcgggtctattgtcattgtagatgaagctcaagacgtatggccggcacgctcggcaggttcaaaaatccctgaaaatgtccaatggctgaatacgcacagacatcagggcattgatatatttgttttgactcaaggctctaagcttctagatcaaaatcttagaacgcttgtacggaaacattaccacatcgcttcaaacaagatgggtatgcgtacgcttttagaatggaaaatatgcgcggacgatcccgtaaaaatggcatcaagcgcattctccagtatctatacactggataaaaaagtttatgacttgtacgaatcagcggaagttcataccgtaaataaggtcaagcggtcaaaatggttttatactctgccagtaataatattgctgattcccgtttttgtcggcctgtcctataaaatgttaagtagttatggaaaaaaacaggaagaacccgcagcacaagaatcggcggcaacagaacatcaggcagtatttcaggataaaacagaaggcgagccggtaaacaacggtaaccttaccgcagatatgtttgttccgacattgtccgaaaaacccgaaagcaagccgatttataacggtgtaaggcaggtaagaacctttgaatatatagcaggctgtatagaaggcggaagaaccggatgcgcctgctattcgcatcaagggacggcattgaaagaagtgacggagttgatgtgcaaggactatgtaaaaaacggcttgccgtttaacccatacaaagaagaaagccaagggcgggatgtccagcaaagtgagcagcaccattcggacagaccgcaagttgccacgttgggcggaaagccgtggcaaaatcttatgtatgataattggcaggagcgcggaaaaccgtttgaaggaatcggcgggggcgtggtcggatcggcaaactga

SEQ ID NO: 65216 - DNA, 165 bp, Neisseria meningitidis; identical to SEQ ID NO: 64457

SEQ ID NO: 65217 - DNA, 702 bp, Neisseria meningitidis; identical to SEQ ID NO: 50807

SEQ ID NO: 65218 - DNA, 657 bp, Neisseria meningitidis; identical to SEQ ID NO: 51793

SEQ ID NO: 65219 - DNA, 1200 bp, Neisseria meningitidis
atgtccgaccaactcatcctcgttctgaactgcggcagttcatcgctcaaaggcgccgttatcgaccgaaaaagcggcagcgtcgtcctaagctgcctcggcgaacgcctgaccacgcccgaagccgtcattacgttcaacaaagacggcaacaaacgccaagttcccctgagcggccgaaattgccacgccggcgcggtgggtatgcttttgaacgaactggaaaaacacggtctgcacgaccgcatcaaagccatcggccaccgcatcgcccacggcggagaaaaatacagcgagtctgttttgatcgaccaggccgtaatggacgaactcaatgcctgcattccgcttgcgccgctgcacaaccccgccaacatcagcggcatccttgccgcacaggaacatttccccggtctgcccaatgtcggcgtgatggatacttcgttccaccaaaccatgccggagcgtgcctacacttatgccgtgccgcgcgagttgcgtaaaaaatacgctttccgccgctacggtttccacggcaccagtatgcgttacgttgcccctgaagccgcacgcatcttgggcaaacctctggaagacatccgcatgattattgcccacttaggcaacggcgcatccattaccgccatcaaaaacggcaaatccgtcgataccagtatgggtttcacgccgatcgaaggtttggtaatgggtacacgttgcggcgacatcgatccgggcgtatacagctatctgacttcccacgccgggatggatgttgcccaagtggatgaaatgctgaacaaaaaatcaggtttgctcggtatttccgaactttccaacgactgccgcaccctcgaaatcgccgccgacgaaggccacgaaggcgcgcgcctcgccctcgaagtcatgacctaccgcctcgccaaatacatcgcttcgatggctgtgggctgcggcggcgttgacgcactcgtgttcaccggcggtatcggcgaaaactcgcgtaatatccgtgccaaaaccgtttcctatcttgatttcttgggtctgcacatcgacaccaaagccaatatggaaaaacgctacggcaattcgggcattatcagcccgaccgattcttctccggctgttttggttgtcccgaccaatgaagaactgatgattgcctgcgacactgccgaacttgccggcatcttgtag

SEQ ID NO: 65220 - DNA, 126 bp, Neisseria meningitidis; identical to SEQ ID NO: 39360

SEQ ID NO: 65221 - DNA, 489 bp, Neisseria meningitidis
atgaagaaagatattttttattgtgagcagtggtcttatggttataagagacttcataagcctttttctgagaaacaagctgaggaaaaacatcttaaaggggagttatatactgccgtaataggttcggcgacacaacctgaatatgtaattaccttgcgagaggaagtaggttttttttcggtaaattttttcgataaatttggaagggattatttaacccatcaatttcgaaaatattctaattcgaattattattttctttctacggctgtatggagagattatataactttggaatctcatgacttagcagaaggatatacttatttcttcaatgaaaatacggatgattgctatgttttgaaacaagattttattaataatgagcgatatgaaaaaacagaattatatccccaaaaagataaggtaattctatttccaaagtttggcgaatatgatttggtgttaaatccggacattatttaa

SEQ ID NO: 65222 - DNA, 1407 bp, Neisseria meningitidis; identical to SEQ ID NO: 37873

SEQ ID NO: 65223 - DNA, 621 bp, Neisseria meningitidis
atgaccacacatcatgtcgaattgaggaatgtcaccaaacggttcggggcgcaaaaagccgtcaaccaagtcgatttggttttgaaggcaggagaaagcgtcgggcttgccggatacaacggcgcgggcaagtccaccattatgaagctgatactcgggctgattaccccgaccgaaggcgaagtgatgcttttgggcgaacgtaccggtagcaaagcgggggcgcggcttcgcagccaaatcggctacctgcccgaaaccgttgcgctgcacccttcgctgatcggcatcgaaacgctggatttttatgccaaacttaaaaaacagccgctcacgcagaaccgggggctgcttgagcgcgtcggcatttcacaggcggcacaccgccgcgtcggcacttattctaaagggatgcgccaacgccttgccttggcacaagccctgctgggcgagcccaaagtcctgctgtttgatgaaccgacaaccggtcttgaccctgcatcacgacaaatgttttacgaagtcgtgcgcgaactcaacgggcgcggcgcgaccgtattgctcagcacccacgcccttgccgagttggacgggcacgccgaccgcattatcgtggattaa

SEQ ID NO: 65224 - DNA, 423 bp, Neisseria meningitidis
atgagcgagcagacggcattggccgtgtgtgccgacggtgtggaaacggcattggcggaagcggcatcactgttggaagagggatgcgggtcggttttggttttggcggcggacgatccgctgccggaaggatatgccgtatcggcaacgcgcgcgccgtttgcttatgctttggcgatggttctgaccaaagggacgcgttacagcctgactttatctgcttcggacgatatgccgtctgaagccggtatgctgcccgaggcatattggagcggtttggaatgggtgcgctttctgctgaacggcagtcgggaatgccgccgggtatatcgcaatcgtgaatggttgtggcagcccgcaagctgcaggctgaagatttccgcaatatccgcaccgtcaacgacgtggtacaggcggtattga

SEQ ID NO: 65225 - DNA, 246 bp, Neisseria meningitidis; identical to SEQ ID NO: 42999

SEQ ID NO: 65226 - DNA, 495 bp, Neisseria meningitidis; identical to SEQ ID NO: 43579

SEQ ID NO: 65227 - DNA, 999 bp, Neisseria meningitidis; identical to SEQ ID NO: 50696

SEQ ID NO: 65228 - DNA, 588 bp, Neisseria meningitidis; identical to SEQ ID NO: 37602

SEQ ID NO: 65229 - DNA, 375 bp, Neisseria meningitidis; identical to SEQ ID NO: 51247

SEQ ID NO: 65230 - DNA, 453 bp, Neisseria meningitidis; identical to SEQ ID NO: 42167

SEQ ID NO: 65231 - DNA, 573 bp, Neisseria meningitidis
atgacttatgaaattcaagcctctgttcgtgaagcacaaggcactggtgcgagccgccgcctgcgtcgcgaaggccaaatccccggcattctgtacggtgaaggtcaagagcctgttgcaatcgctgtggatcacaaaaccgtattctacgcattggaaaaagaatctttccatactgcgttgattaagttgtctctgaacggtgaaaccaaagacgttatcgtccgcgatttccaaatgcacccgttccgccgcgaagttcaacacatcgacttccaagctgtgaaagccgatcaacttgtacgcatccgtgttcccctgcacatcgttaacgctgaaaattcccaagcggtcaaactgcaaggcggccgcgtatctctgttaaacacttctgttgaagtagttgctttgcctgccaacatccctgctttcttggatttggattgtgccgaagtggttgccggcgacattctgcacttgtcagacatcaaactgcctgaaggtgtagaaagcgtttccctgaaacgtaacgaaaatctggctgttgctaccgttaccggtaagaaacgctaa

SEQ ID NO: 65232 - DNA, 324 bp, Neisseria meningitidis; identical to SEQ ID NO: 38492

SEQ ID NO: 65233 - DNA, 702 bp, Neisseria meningitidis
atgttccgcatcgtcaaatggctgattgccctgcccgtcggcatctttatctttttcaatgcctatgtgtacggcaacatcattacctaccgcgccgtcgcgccccatcggactgcctttatgtcgatgcggatgaagcagtttgaacaggaaggtcgcgatgtcgcactggattaccgctggatgccctacaaccgcatctcggtcaacctgaaaaaagccctgattgcttccgaagatgcccgtttcgccgggcacggcggcttcgattggggtggcattcaaaacgccatcaggcgcaaccggaacagcggcaaagtgaaggcgggcggttcgaccatcagccagcagcttgccaaaaacctgtttttaaacgaaagccgcagctatatccgcaaaggcgaagaagcggcgattaccgcgatgatggaagccgttaccgataaagacaggattttcgaactgtatctgaattcaatcgagtggcactacggggtgtttggcgcggaagccgcgtcccggtatttttatcaaatacccgccgccaagctgaccaaacagcaggcggcaaaactgacggcgcgcgtccccgccccgctctactacgccgaccatccgaaaagcaaacggctgcgcaacaaaaccaatatcgtgctcagacgcatgggttcggcagaattgcctgaaagcgatacggactga

SEQ ID NO: 65234 - DNA, 1476 bp, Neisseria meningitidis; identical to SEQ ID NO: 50882

SEQ ID NO: 65235 - DNA, 396 bp, Neisseria meningitidis
gtgaaactgctggcgaataactggcaaccgattgccattatcgcgcttgtcggcacgggcttggctgtgtcgcaccatcaaggctacaagtcggcatttgcgaagcagcaggcggtcatcgacaagatggagcgcgacaaggcgcaagccctgctgttgtcggctcaaaactatgcgcgcgaactggaactggcacgcgcggaagctaaaaaatatgaagtcaaggcgcacgctgtcggcatggctttggcgaaaaaacaggcggaagtcagccgtctgaaaacggaaagagacctttgcaaaattcctttccctcccgacagccgaaacccaaacacaggttttcggctgttttcgccccaaataccgcctaattttacccaaatacccccttaa

SEQ ID NO: 65236 - DNA, 438 bp, Neisseria meningitidis; identical to SEQ ID NO: 39000

SEQ ID NO: 65237 - DNA, 747 bp, Neisseria meningitidis; identical to SEQ ID NO: 50910

SEQ ID NO: 65238 - DNA, 1215 bp, Neisseria meningitidis
atggataaatttcccaagtctgcaaagctcgatcacgtctgttacgacatacgcgggccggttcacaaaaaagcacttcagttggaagaggagggcaataaaatccttaaactcaatatcggcaaccctgcgccgttcggctttgaagcccctgatgaaatcttggtcgatgtcatccgcaacctgccgacttcgcaaggctattgcgattctaaagggctgtattccgcccgcaaagccattgttcactactatcagaccaaaggtttgcgcgatattacggtaaacgatgtctatatcggcaacggcgtgtccgagctgattacgatgtctatgcaggcattgctcaacgacggcgacgaaatcctgattcccgcgcccgactaccctttgtggacggcggcggcaacgcttgcgggcggtacggtacgccattatctgtgcgacgaagaaaacggctggttccccaaccttgccgatatggaagccaaaatcacgcccaaaaccaaagccatcgtcgtcatcaatcccaataatccgacaggcgcggtgtacagcagggaaatcctgttggaaatcgccgaactggcgcgcaagcacggtttgattattttcgccgacgagatttacgacaaaatcctttatgacggcgcggttcaccaccatattgccgcgcttgcccccgaccttttgacggtaacgttcaacggtttgtccaaatcctaccgcgtcgccggcttccgccaaggctggatggtgctcaacgggccgaaacatcacgcaaaaggttacatcgagggtttggatatgctctcgtctatgcgcctgtgtgccaatacgccgatgcagcacgcgattcagacggcattgggcggttatcagagcattaacgaattcattttgcccggcgggcggcttttggaacagcgcaacagggcgtgggaactggtcaaccagattcctggcgtgtcctgcgtcaaaccgatgggtgcgatgtatatgttcccgaaaatcgataccgaaatgtaccgcatccgcgatgacatgaaattcgtttacgatttgctggtgcgcgaaaaagtcttgctggtgcagggaacggggtttaattggatcaagcccgaccatttccgcattgttacgctgccttacgtctatcagattgaagaggcgatgggcaggctggcaagattcctgcaaacctaccgccaataa

SEQ ID NO: 65239 - DNA, 225 bp, Neisseria meningitidis; identical to SEQ ID NO: 59733

SEQ ID NO: 65240 - DNA, 144 bp, Neisseria meningitidis; identical to SEQ ID NO: 39918

SEQ ID NO: 65241 - DNA, 1050 bp, Neisseria meningitidis
atgcaaaacaacaacgaatttaaaattggtaatcgttcagtaggttacaaccacgaaccattgattatctgtgaaatcggcatcaatcatgaaggctctttaaaaacagcttttgaaatggttgatgctgcctataatgcaggcgctgaagttgttaaacatcaaacacacatcgttgaagacgaaatgtctgatgaggccaaacaagtcattccaggcaatgcagatgtctctatttatgaaattatggaacgttgcgccctgaatgaagaagatgagattaaattaaaagaatacgtagagagtaagggtatgatttttatcagtactcctttctctcgtgcagctgctttacgattacaacgtatggatattccagcatataaaatcggctctggcgaatgtaataactacccattaattaaactggtggcctcttttggtaagcctattattctctctaccggcatgaattctattgaaagcatcaaaaagtcggtagaaattattcgagaagcaggggtaccttatgctttgcttcactgtaccaacatctacccaaccccttacgaagatgttcgattgggtggtatgaacgatttatctgaagcctttccagacgcaatcattggcctgtctgaccataccttagataactatgcttgcttaggagcagtagctttaggcggttcgattttagagcgtcactttactgaccgcatggatcgcctaggtccggatattgtatgctctatgaatccggatacttttaaagagctcaagcaaggcgctcatgctttaaaattggcacgcggcggcaaaaaagacacgattatcgcgggagaaaagccaactaaagatttcgcctttgcatctgtcgtagcagataaagacattaaaaaaggagaactgttgtccggagataacctatgggttaaacgcccaggcaatggagacttcagcgtcaacgaatatgaaacattatttggtaaggtcgctgcttgcaatattcgcaaaggtgctcaaatcaaaaaaactgatattgaataa

SEQ ID NO: 65242 - DNA, 2439 bp, Neisseria meningitidis
atgatagaaaaatcccataaaaaaacagcaaaaggcagggcgggaagcccgtccccaacgtccgcacgcaacaagaaagccgacaacggcgcacggggcaataaagtttccgagcggctcaaggcggtcaaagagttgcagaaaaccgaaaccaaaaaggcgcgtcccgaacatgtcgtcaaccttatcggcgacgcactgtggctgatgggtttggcggcaaccctgtatttggcgatttccctgatcagtttcgatatgggcgatccgtcttggtcgcacagttcgccggttgtggaagatgtcgccaattggggcggactgttcggcgcgtatgttgccgatgtcggctattatcttttcggctggtcgttctggtggtggatagcggctgcctgcgtcgtgctgtataaaaatttccgcctgcacgcaaaacagacggaaaacgaggcatacaaccacaaaatcgctgccgccgcgctgtttgtcctgacggtcttcagccccgtcttggagtattttgtgctgggcggaaaatatgccgactccctgcctgtcggagcaggcggtatggtcggcatacgcgtcggcgcagtgtttgcgtggctgctggggaaatcgggcagcctgctgattatcttggttgttctgctgttgtcgttgtccctgctggtgcagatttcatggctggaatttttgaacggtgcgggcagggcggttcaaaaccgcctgagtgccttatccggcaaggtcatggctttaggaaaacgccggccgaataccaaaacagacggtgtcgatacccaaaatacacggcgcatggtaaaagaagccaagaatattacggccaaacccgttgccttgcccgaaggcagcagcagcaaccgcaaatccgtcgcggtttccgtcgcgccgccgcccaaaattcaggtttctctgtttgaagatgacgaacctcggcaggcgggcgaataccacaagcctacattgaacctattgcggattcctgacagcgaacccgtcagcatcaatcccgccgaattggagcgcactgccgaactgatcgaatccaaactggcagaattcggcatcggcgtacaagtcgtatccgccacatccggccccgtcatcacgcgctacgaaatcgaacccgcgcaaggtgttaaaggcagccaaattgttgccttgtcgaaagatttggcacgctctatgtcgctgcagtccgtgcgtatcgtcgaaaccatcgcaggtaaaaacacgatgggcatcgagttgcccaacgacaaacgccaagacgtgatgttgagtgaaatcttgtcctcgcccgtgtttgccgaagccaaatccaagctgaccgtcgcgctgggcaaagacattgccggtacccccgttgtcggcgacttggcgaaaatgccgcaccttttggtcgccggtatgactggttcgggcaagtccgtcggcgtgaacggcatgattatgtctatgcttttcaaagctacgcccgacgaagtccgcttcattatgatagacccgaaaatgctcgagttgagcatttacgacggtattccgcacctgctctgtcccgtcgtgaccgatatgcgcgaagcagggcaggcgttgaactggtgcgtcgccgaaatggaaaaacgctaccgcctgctttcccatgccggtgtgcgtaatttggagggcttcaaccaaaaagtcgaagccgcaaaagcggcaggcaagccgctgctcaatccgttcagcctgaaccccgacgagcccgagccgctggaaaaactgccgttgattgtggtcgttatcgacgaacttgccgacctgatgatgaccgaacgcaaagccgtcgagcagcaaatcgcccgtctcgcccaaaaagcgcgcgccgccggtatccatatgattgtcgccacccaacgtcccagtgtcgatgtcgttaccggcctgattaaagccaacatcccgacgcgtatggcgtttaccgtgcaaagcaaaatcgacagccgtaccatcctcgaccaaatgggcgcggacgaactgctcaaatatggcgattcgctgttcctccagcccggcagtgccgaaccgactcgcctgcaaggcgcgtttgtttcagacgacgaagtacatcaagtcgtcaactacgtcaaatcgcaagccccagccgactatattgaaggtctgctcagcggcgaggccgcgctggaaactgccaatatcgttaatccgaatgcagacagcgacgaattgttcgatcaggcagtcgcctatgttttggaaagcaaaaaaacctccatttcgtctttgcagcggcagctgcgcatcggctataaccgcgcggcaaacctgatggaggcactggaaaatgcgggtgtcgtttcttccaccgacctcaacggcagccgtaaaattttggcgcacaaggaccatttgtag

SEQ ID NO: 65243 - DNA, 1713 bp, Neisseria meningitidis
atgaaagccagccaattctttatctctactttaaaagaagcccctgccgaagccgcgcttgccagccacaagctgatgattcgcgccggtctgattaaagccaacgcgtccggcctttatacttggatgccgatggggctgcgcgtgttacgcaaagtcgaaaacgtcgtgcgcgaggaaatggcgcgcgcgggcagcgtggagctgctgatgccggtggtgcagcctgccgagctgtggcaggaatccggccgctgggaattttacggtaaagaactgctgcgcctgaaagaccgccacgaccgcgatttctgcatgggaccgacctgcgaggaagtcatcgccgacatcgtgcgtaaagagatcaacagctacaaacaactgccgaaaaacttttaccacatccaaaccaaattccgtgacgaagtgcgcccgcgcttcggtgtgatgcgtgcgcgcgagtttgtcatgaaagatgcttattccttccatgccgactacgcctcgcttcagacgacctatgatgccatgtatgacgcttactgccgcatcttcacccgtctgggcttggcattccgccccgtcgccgcagataccggcagcatcggcggtaccggctctcacgagtttcaagtgttggcggaaagcggcgaagatgtgattgcatacagcgacacttccgattacgccgccaatgtcgagctggcaccgaccttgccgcttaaaggcgaacgcaccgctgctcaggcagaactcgtcaaagtacatacaccaaacgtcaaaaccattgagtctttggttgaattcctgaatattccggttgaacaaaccctcaaatccatcgtggttgaaggcgaaaatgaaggcgaaatcgttttattgctgttgcgcggcgaccatgagttcaacgacatcaaggcagaaaaactggcgggcgtgaaatcgccattgacgatggcaagttctgccgcgattgtcgaacagttcggcgcaaacggcggctcgctgggtccggtcggctttgcaggtaaagtttatgccgatttcgccactgaaaaaggcgcggactgggtcatcggtgcgaacgaagacggctaccactataccggcttcaacttcgggcgcgatgccgccgagcctgaattcgtcgatttgcgtaatgtggtcgaaggcgacgaaagccccgacgggcaaggccgtctgaaactggcgcgcggcatcgaagtcggacacgttttccaattgcgcgacaaatacacccaagccatgaacgtaagcttccttgacaacaacggcaaatcgcaagttatggaaatgggctgctacggcatcggcatcacccgcgtcgttgccgccgccatcgagcagaataacgacgaaaaaggcatcatctggaccaaagcaatggcgccgtttgaagtcgttatcgtgccgatgaactacaaaaaatcagacaccgtacgcgaagccgccgacaaaatctatgccgaattgctggcggcaggcgcagacgtcctcctcgacgaccgcgacgaacgcgcaggcgtgttgctgaacgattccgagctgttgggtattccgcaccgcatcgtcatcggcgaccgcgctttgaaagaaggcaatgtcgaatacgccgaacgccgcaacaacgaagcgcaggcagttgcaatcggagaaattgttgcgcgtgtaacagcttcattaaatgggtaa

SEQ ID NO: 65244 - DNA, 564 bp, Neisseria meningitidis; identical to SEQ ID NO: 36962

SEQ ID NO: 65245 - DNA, 666 bp, Neisseria meningitidis
atgacggtattagacagagagcaggttctatccgcatttaaaaaccgcaaatcatgccggcattacgatgcggcacgcaaaatcagtgccgaggattttcagtttattttagaactcgggcgtttgtcgcccagttcggtcggttcggagccttggcagtttgttgtggttcaaaaccccgaaatccgacaggcaatcaagccgttttcttggggtatggcggatgctttggataccgccagtcatttggtggtgtttttggcaaagaaaaatgcccgcttcgacagcccgtttatgttggaaagcctcaaacggcgcggcgttaccgaaccggatgccgtggcaaaatctttggtgaagtatcaggcgtttcaagctgacgacatcaagattttggacgattcgcgcgccttgtttgactggtgttgccgccagacctatatcgcgttgggcaacatgatgacgggtgcggcgatggcaggtatcgattcctgcccggtggaaggtttcaactatgccgatatggaacgcgtattgtccgggcagttcggtttgttcgatgcggcagaatggggcgtgtccgtcgccgcgacattcggttaccgcgttcaggaaatcgccacgaaggcgcgcaggccgttggaagaaaccgttatttgggcataa

SEQ ID NO: 65246 - DNA, 1245 bp, Neisseria meningitidis
atggaacagcagcaaagatacatcagcgtactggatatcggtacgtctaaagtcctcgcactgatcggggaagttcaagatgacgacaaaatcaacatcgtcggtttggggcaggctccttcacggggcttgcgcgcgggcatggtaaccaatatcgatgccaccgtccaagccatcaggcaggcggtcaatgatgccgagctgatggcggataccaaaattactcacgttaccacaggtatcgcaggcaaccacatccgcagtctcaattcgcaaggtgtggttaaaattaaagatggggaagtcacgcaggcagacatcgatcgcgccattgaaacggcaaaggcaatcaatatcccgcccgatcaaaaaattctcgatgccgtggttcaagactacattattgacacccaacttggcgtgagggagcccatcggtatgagcggtgtgcgtctggatacgcgggtgcacatcattaccggtgcaagtacggcagtgcagaatgtccaaaaatgtatcgagcggtgcggtttgaaaagcgatcagatcatgcttcagccgttggcaagcgggcaggcggtgctgactgaagatgaaaaagacctcggcgtatgcgtcatcgacattggtggcggaacgaccgatattgccgtttatatgaacggtgccatccgccatacgtccgtcattccggccggtggtaatctgattaccaaagatttgtccaaatcgttgagaacacctctcgatgccgccgagtacattaaaatccattatggcgtggcatcatgcgatacggaaggcttgggtgagatgattgaagttccgggcgtgggtgaccggacatcgcgtcaggtttccagtaaggttctggcagcaatcatcagtgcacggattcaggagatttttggcgtagtgctgggcgagctgcaaaaatcgggtttccccaaagaagtgctgaatgcgggtatcgttctgaccggcggtgtgtccatgatgaccgggattgtggaatttgccgaaaaaatcttcgatttgcctgtacgcaccggtgcaccccaagaaatgggcggtttgtccgaccgcgtccgcacaccgcgtttttctaccgctatcgggctgcttcatgcagcatgcaagctggaaggaaacttgccgcagccggaaaacggtgcagtgcaagagagggaagtgggcggcggtttgttggcaagattgaaacggtggattgaaaacagcttctga

SEQ ID NO: 65247 - DNA, 207 bp, Neisseria meningitidis; identical to SEQ ID NO: 40222

SEQ ID NO: 65248 - DNA, 435 bp, Neisseria meningitidis; identical to SEQ ID NO: 40438

SEQ ID NO: 65249 - DNA, 612 bp, Neisseria meningitidis
atgaaattacaacaattggctgaagaaaaaatcggcgttctgattgtgttcacgctgcttgtagtcagtgtcggtctgttgattgaagttgtgcccttggcctttaccaaggcggcaacacagccggcgccgggcgtgaagccttacaatgccctgcaggttgccggacgcgatatttacatccgtgagggctgttacaactgccactcgcaaatgattcgtccgttccgtgcggaaaccgagcgttacggtcattactctgttgccggagagtcggtttacgaccatccgttccaatggggttccaaacgtaccggtcctgatttggcacgtgtgggcggtcgctattccgacgaatggcaccgtatccacctgctgaatccccgtgatgtcgtgcctgagtccaatatgccggcattcccgtggcttgcacgcaataaagtcgatgtcgatgcaaccgttgccaacatgaaggctttgcgtaaagtaggtactccttacagtgatgaggaaattgcgaaagcgcctgaggctttggcaaacaaatccgagctggatgctgtagtcgcctatctgcaaggattgggtctggctttgaaaaacgtaaggtaa

SEQ ID NO: 65250 - DNA, 1383 bp, Neisseria meningitidis
atggcaaatattgcccgcgacatcttcaaagcctacgacatccgaggcattgtcggcaaaaccctgaccgacgatgccgcctatctcatcggcagggccatcgccgccaaagccgccgaaaaaggcatgacccgcatcgcgctcggacgcgacggacgcttgagcggtcccgaactgatggagcacatccaacgcggctttaccgacagcggcatcgacgtcctcaacgtcggtatggtcgccacgcccatgctctattttgccgctatcaacgaatgcggcggcagcggcgtgatgattaccggcagccacaatccgcccgattacaatggtttcaaaatgatgctcggcggcgacacgctcgcaggcgaagccattcaagaacttttagccattattgaaaaagacggttttgttgccgccgacaaacaaggcaacgtaaccgaaaaagacatctccggcgaataccacaaccacatcgtcggccacatcaaactcaaacgccccatgaaaatcgccatcgacgcaggcaacggcgtaggcggcgcattcgcaggcaaactctacaaaggcttgggcaatgaagttaccgaacttttctgcgacgtggacggcactttccccaaccaccatcccgacccatccaaaccgaaaaacctgcaagatttgattgccgcgctgaaaaacggcgatgccgaaatcggcttggcgtttgacggcgatgccgaccgcttgggcgtagttaccaaagacggcaacatcatctatccagaccgccaactgatgcttttcgcgcaagacgtgttgagccgcaatcctaaagccaaagtaattttcgacgtcaaatccacccgtctgcttgcgccttggattaaagaacacggcggcgaacctgtgatggaaaaaaccggccacagctttatcaaatcctccatgaaaaaaaccggcgcgccggttgccggcgaaatgagcggacacatcttcttcaaagaacgctggttcggcttcgacgacggtctgtacgccggcgcacgcctcttggaaatcctgtctgcctccgataatccgtccgaagtgttaaacaacctgccgcaaagcatttccacgcccgaactcaacatcgccctgcccgaaggcagcaacggccatcaggttatcgacgaactcgccgccaaagccgaatttgaaggcgcaaccgaaatcatcaccatcgacggtctgcgcgttgaatttcccgacggcttcggtctgatgcgtgcttccaataccacgccgattctggtgttgcgttttgaggcggatacgcaagaagccatcgagcggattcaaaaccaattcaaagccgtcatcgaaagcaatccgaatctaatctggcctctgtaa

SEQ ID NO: 65251 - DNA, 1473 bp, Neisseria meningitidis
atgaaccagacaagccgcgatctgacccgcatcagccacaacactaaaatcgtcgccacccttgggccgggcagcaacaacgtcgaactgttggaagacatgatccgcgtcggcggtctgaacgtcgtccgcttcaacttcagccacggcacgcccgaattccatcaggaaaacgcccgcatcgtgcgcgaggcggcaaaacgcgccggacaggaaatcgccatcattgccgacctgcaagggccgaaaattcgcgtgggcaaaatcgccggcggcggcatcgaattaaacaaaggcgaaacgctggtactggatgccgcgcttgaaggcgaaggcacgcgcgaggcggtcggtttggactaccgcgacctgcccgacgacgttgccgcaggcgatgtcttgtggctggacgacggcctgctgaccctgaccgtggaatccgtcgaaggcagcaggattatcacaagggtggaaaacagccacgtcctgaaaagcaacaagggcatcaacaaacgcggcggcggtctgtccgcaggcgcgttgaccgaaaaagacttccgcgacctgaaaaccgcgattgccatcggttgcgactatctcgccatcagctttgtgaaatccgccgaagatttgcacatcgcgcgcgccaaagtcgaagaagaaatgaagggcagcactgccgtgcgccctggtttggtttccaaaatcgaacgcgtagaagcgattgaaaaccttgatgaaatcatcctcgccggcgacggcattatggttgcgcgcggcgacttggcggtcgaagtcggacacgccgccgtccccgccctgcaaaaacggatgatccgccgcgcccgcgagttgcgccgcttcagcattacggcgacgcaaatgatggaatcgatgattaccaaccccgtgccgacccgcgcggaagtcagcgatgtggcaaacgcggtattggacggcaccgatgcggtgatgtgttccgccgaaaccgccgtcggcgcgtatccgtttgaaaccgtcagccaaatggcgattatctgcgcggctgcggaaaaagagcaggattcgctcaacggcgttgccgaacaggtcgagtatcccgaagcggtcagcaccaacctggcggttgccggcggtgcggtcagcgtggcgcgcgcggttcacgccaaagccatcgtcgccctgaccgaaagcggttcgaccgcctttgaaatcagccgccacaacatcaccctgccgattttcgcgctgaccccgagcgtttccgcccaacgccgtatggcgatgtaccggggcgtgcgcccgctgattttggcaaccagcaccgaccacgacacggcgttaaacgaagtcgaaaccatgctggtggaacacaacatcctgcattccggcgaccagtacatcatcaccagcggctcgcaaatgcgcgaatccggttcgaccaatacgctggaagtgctgcgcgtcaaataa

SEQ ID NO: 65252 - DNA, 1455 bp, Neisseria meningitidis; identical to SEQ ID NO: 43531

SEQ ID NO: 65253 - DNA, 387 bp, Neisseria meningitidis
atgaaaaacgttcaaaaaggctttacgctgctcgagctgatgattgccgtcgccatcctcggcatcctgacgctcatcacctacccttcctataaaacctacatccggcgcgtccgcctgtcggaagtcaaatccaccctgctgatgaacgcgcaaaacttggagcgttactaccgccaaaaagggacgtttgaaaactacgaccaaaccaaactgaaacaaaacaaatatttcaagattaccttaagcaaaagccccgaccactttacccttcaggcagcccccgatccgacgaccaacgaaggcgaaacctgcatcgtcacgctcaacgacggcggcacgctttccgccgccggcaacggacagtcctgcccggacttcgactga

SEQ ID NO: 65254 - DNA, 1125 bp, Neisseria meningitidis; identical to SEQ ID NO: 53157

SEQ ID NO: 65255 - DNA, 264 bp, Neisseria meningitidis; identical to SEQ ID NO: 44436

SEQ ID NO: 65256 - DNA, 483 bp, Neisseria meningitidis; identical to SEQ ID NO: 38977

SEQ ID NO: 65257 - DNA, 396 bp, Neisseria meningitidis; identical to SEQ ID NO: 37459

SEQ ID NO: 65258 - DNA, 303 bp, Neisseria meningitidis; identical to SEQ ID NO: 40930

SEQ ID NO: 65259 - DNA, 1140 bp, Neisseria meningitidis
atgaaaaaaacactggtggcggcggcaatcctgagcctcgccttgactgcgtgcggcggcggaaacgataccgccgcccaagccccctccgccaagcctgaagccgaacaatcgggcaaactcaatatctacaactggtcggattatgtcgatcccgaaaccgtcgccgcctttgaaaaagaaaccggcatcaagacgcgttccgattattacgacagcaacgaaacactggaggcaaaagtcctgaccggcaaatccggctacgacctgaccgcgccgtccatcgccaacgtcggccggcaaatcaaagcgggcgcgtatcagaaaatcgacaaggcgcaaatcccccattacagcaacatcgataaagatttgctgaaaatgatggaagccgtcgatccgggcaacgaatacgccgtcccctatttctggggcatcaacaccttggcaatcaacacgcggcaggtgcaaaaggcattgggtacggacaagctgcccgaaaacgaatgggatttggtgttcaaccccgaatacaccgccaaactcaaatcctgcggcatcagctatttcgacagcgcaatcgaacagattcccttggcgttgcactatttgggcaaagaccccaacagtgaaaatcccgaagacatcaaagccgccgtcgatatgatgaaagccgtccgaggcgacgtgaaacgcttcagctcttccggctatatcgacgatatggcggcgggcaacctgtgtgccgccatcggttacggcggcgatttgaacattgccaaaacccgtgccgaagaagccgcaaacggcgtggaaatcaaagtattgaccccgaaaaccggcgtgggcgtgtgggtggattcctttatgattccgcgcgacgcgcaaaacgttgccaacgcccaccgctatatcgactacacgctcctgcccgaggtggcggcgaaaaacggcagcttcgttacctacgcacccgccagccgccccgcgcgcgagctgatggatgaaaaatacacctccgacgcatcgattttcccgaacaaagaactgatggaaaaaagtttcatcgtatcgcctaaatccgcagaatccgccaaactgggcgtgaagctgtggcaagggctcaaagcgggcaaataa

SEQ ID NO: 65260 - DNA, 1863 bp, Neisseria meningitidis; identical to SEQ ID NO: 59961

SEQ ID NO: 65261 - DNA, 1050 bp, Neisseria meningitidis; identical to SEQ ID NO: 36439

SEQ ID NO: 65262 - DNA, 780 bp, Neisseria meningitidis
atgaaagaacacaaagcccgcaagcgtttcgggcagaattttttgcaggacacgcggattatcagcgatattgtcaacgccgtgcgcccgcaggcggatgatgtcgtgattgaaatcggcccgggtttggcggcgattaccgaacctttggcgaaaaagctgaaccgcctgcacgttgtcgaaatcgaccgcgacatcgtatgccgtctgaaaacgctgccgtttgcggataaactcgtcattcatgaaggcgacgtgttgcagtttgatttcaacaacattgaaggcaaaaagaaaatcgtcggcaacctgccgtacaacatttccacaccgcttttgttcaagctggcggaggtggcggacgatgtcgtcgatatgcactttatgctgcaaaaagaagtggtcgagcgtatggttgccgcgccgaaaagcaacgactacggccgcttgggcgtgatgctgcaatattttttcgatatggaaatgctgattgacgtaccgcccgaatcgttcgaccctgcgccgaaagtggattccgccgtcgtccgtatgattccggtgaaacaccgcatcggcaaggcggacgatttcgagcatttcgccaaactggtgaaactcgccttccaccaacgccgcaaaaccatacgcaacaacctgaaagagcttgcaggcgacgatgatttgcaggctgtcggcatcaatccgcaagaccgtgccgaacacatcgcgccggaaaaatacgtagcgttgagcaattatctggcgggcaaggccgtctga

SEQ ID NO: 65263 - DNA, 810 bp, Neisseria meningitidis
atgagaccatatgctactaccatttatcaactttttattttgtttattgggagtgtttttactatgacctcatgtgaacctgtgaatgaaaagacagatcaaaaagcagtaagtgcgcaacaggctaaagaacaaaccagtttcaacaatcccgagccaatgacaggatttgaacatacggttacatttgattttcagggcaccaaaatggttatcccttatggctatcttgcacggtatacgcaagacaatgccacaaaatggctttccgacacgcccgggcaggatgcttactccattaatttgatagagattagcgtctattacaaaaaaaccgaccaaggctgggtgctcgaaccatacaaccagcaaaacaaagcacactttatccaatttctacgcgacggtttggatagcgtggacgatattgttatccgaaaagatgcgtgtagtttaagcacgactatgggagaaagattgcttacttacggggttaaaaaaatgccatctgcctatcctgaatatgaagcttatgaagataaaagacatattcctgaaaatccatattttcatgaattttactatattaaaaaaggagaaaatccggcgattattactcatcggaactatcataggtatggagagaacgattacagcactagcgtaggttcctgtattaacggtttcacggtacggtattacccgtttattcgggaaaagcagcagctcacacagcaggagttggtaggttatcaccaacaagtagagcaattggtacagagttttgtaaacaatccaagtaaaaaataa

SEQ ID NO: 65264 - DNA, 1677 bp, Neisseria meningitidis; identical to SEQ ID NO: 41006

SEQ ID NO: 65265 - DNA, 1008 bp, Neisseria meningitidis; identical to SEQ ID NO: 51523

SEQ ID NO: 65266 - DNA, 1272 bp, Neisseria meningitidis; identical to SEQ ID NO: 43272

SEQ ID NO: 65267 - DNA, 720 bp, Neisseria meningitidis
ttgactttaacccgaaaaacccttttccttctcaccgccgcattcggcacacactcccttcagacggcatccgccgacgcagtggtcaaggcagaaaaactgcacgcctccgccaaccgcagctacaaagtcgccggaaaacgctacacgccgaaaaaccaagtcgccgaattcacgcaaaccggcaacgcctcgtggtacggcggcaggtttcacgggcgcaaaacttccggcggagaacgatacgatatgaacgcctttaccgccgcccacaaaaccctgcccatccccagctatgtgcgcgtaaccaataccaaaaacggcaaaagcgtcatcgtccgcgtcaacgaccgcggccccttccacggcaaccgcatcatcgacgtatccaaagccgccgcgcaaaaattgggctttgtcagccaagggacggcgcacgtcaaaatcgaacaaatcgtcccgggcaaatccgcaccggttgccgaaaacaaagacatctttatcgacttgaaatctttcggtacggaacacgaagcacaagcctatctgaaccaagccgcccaaaacttcgccgcttcgacatcaagcccgaacctcgccattgaaaaacgccgttacgaatacgtcgtcaaaatgggtccgtttgcctcgcaggaacgcgccgccgaggccgaagctcaggcgcgcggtatgattcagacggtattgaccgccggttga

SEQ ID NO: 65268 - DNA, 279 bp, Neisseria meningitidis; identical to SEQ ID NO: 42381

SEQ ID NO: 65269 - DNA, 291 bp, Neisseria meningitidis; identical to SEQ ID NO: 43483

SEQ ID NO: 65270 - DNA, 270 bp, Neisseria meningitidis; identical to SEQ ID NO: 36672

SEQ ID NO: 65271 - DNA, 561 bp, Neisseria meningitidis; identical to SEQ ID NO: 37658

SEQ ID NO: 65272 - DNA, 774 bp, Neisseria meningitidis
atgagaccatatgctactaccatttatcaactttttattttgtttattgggagtgtttttactatgacctcatgtgaacctgttaaagaacaaaccagtttcaacaatcccgagccaatgacaggatttgaacatacggttacatttgattttcagggcatcaaaatggttatcccctatggctatcttgcacggtatacgcaagacaatgccacaaaatggctttccgacacgcccgggcaggatgcttactccattaatttgatagagattagcgtctattacaaaaaaaccgaccaaggctgggtgctcgaaccatacaaccagcaaaacaaagcacactttatccaatttctacgcgacggtttggatagcgtggacgatattgttatccgaaaagatgcgtgtagtttaagtacgactatgggagaaagattgcttacttacggggttaaaaaaatgccatctgcctatcctgaatatgaagcttatgaagataaaagacatattcctgaaaatccatattttcatgaattttactatattaaaaaaggagaaaatccggcgattattactcattggaataatcgagtaaaccaggctgaagaagataattatagcactagcgtaggttcctgtattaacggtttcacggtacagtattacccgtttattcgggaaaagcagcagctcacacagcaggagttggtaggttatcaccaacaagtagagcaattggtacagagttttgtaaacaattcaagtaaaaaataa

SEQ ID NO: 65273 - DNA, 1281 bp, Neisseria meningitidis; identical to SEQ ID NO: 52869

SEQ ID NO: 65274 - DNA, 1677 bp, Neisseria meningitidis
atgtcccaacaatacgtctattctatgctgcgcgtgagcaaggttgtgccgccgcagaaaaccatcattaaagatatttccctttctttcttccccggcgcgaaaatcggcctgctcggtttgaacggcgcgggcaagtccaccgtgctgcggattatggcgggcgtggataaggaatttgagggcgaagccgtgccgatgggcggcatcaaaatcggctacctgccgcaagagcctgagcttgatccggaaaaaaccgtgcgcgaggaagtggaaagcggtttgggcgaagtggctgccgcgcagaaacgtttggaagaagtgtatgccgagtacgccaatcctgatgcggattttgacgcgttggcagaagagcagggccgcttggaagcgattattgcggcaggttcgtccacgggcggcggtgcggaacacgaattggaaatcgccgccgacgcgctgcgcctgccggaatgggatgccaaaatcgataatttgtccggcggtgaaaaacgccgcgttgccttgtgcaaactcttgttgagcaagcccgatatgcttttgctggacgagccgaccaaccacttggatgcggaatcggtcgagtggctggagcaatttctcgtgcgcttccccggcacagtcgttgcggtaacgcacgaccgctacttcctcgacaacgccgccgaatggattttggaactcgaccgcggccatggtattccgtggaaaggcaattactcgtcttggctggagcagaaagaaaaacgcttggaaaacgaggcaaaatccgaagccgcacgcgtgaaggcgatgaagcaggaattggaatgggtgcgccaaaatgccaaaggccgccaagccaagtccaaagcgcatttggctcgttttgaagaaatgagcaactacgaataccaaaaacgcaatgaaacgcaggaaattttcattcccgtcgccgagcgtttgggtaacgaattgattgaatttgtgaacgtttccaaatcgttcggcgacaaagtgctgattgacgatttgagcttcaaagtgcctgcgggcgcgattgtcggcatcatcggtccgaacggcgcgggtaaatctacgctgtttaaaatgattgcgggcaaagagcagcccgattccggtgaagtgaaaatcgggcaaaccgtgaaaatgagcttgattgaccaaagccgcgaaggtttgcaaaacgacaaaaccgtgttcgacaacatcgccgaaggtcgcgacattttgcaggttggtcagtttgaaatccccgcccgccaatatttgggacgcttcaatttcaaaggcagcgaccaaagcaaaattgcaggtcaattgtctggcggcgaacgcggtcgtctgcacttggcgaaaaccttgttgggcggcggcaatgtattgctgttggacgaaccgtccaatgaccttgacgtagaaaccctgcgcgcgctggaagacgcattgctggaatttgccggtagcgtgatggtgatttcgcacgaccgttggttcctcgaccgtattgctacgcatatcttggcttgcgaaggcgactccaaatgggtgttcttcgacggcaactatcaggaatacgaagccgacaagaaacgccgactcggcgaagaaggcgcgaaaccgaaacgcatcaaatacaaaccggtaacgcgttaa

SEQ ID NO: 65275 - DNA, 915 bp, Neisseria meningitidis; identical to SEQ ID NO: 42445

SEQ ID NO: 65276 - DNA, 1110 bp, Neisseria meningitidis; identical to SEQ ID NO: 44734

SEQ ID NO: 65277 - DNA, 417 bp, Neisseria meningitidis; identical to SEQ ID NO: 39610

SEQ ID NO: 65278 - DNA, 924 bp, Neisseria meningitidis; identical to SEQ ID NO: 50886

SEQ ID NO: 65279 - DNA, 1284 bp, Neisseria meningitidis
atgaaccgtaacgaaattttattcgaccgcgccaaagccatcatccccggcggcgtgaattcccccgtccgcgcattcggcagcgtcggcggcgtaccgcgcttcatcaaaaaagccgaaggcgcgtatgtttgggatgaaaacggcacgcgctacaccgactatgtcggctcgtgggggcctgcgattgtcggccacgcgcaccccgaagtcatcgaagccgtgcgcgaagccgcgttgggcggtttgtcgttcggcgcgcctaccgaaggcgaaatcgtcattgccgaagaaatcgccaaaatcatgccgtccgtcgaacggctgcgcctcgtcagctccggtaccgaagcgaccatgaccgccatccgtctggcacgcggttttaccgggcgtgacaaaatcatcaagtttgaaggctgctaccacgggcattccgacagcctgctggtgaaagccggcagcggtctgctgacgtttggcaacccgtcttccgccggtgtgcctgccgactttaccaaacacactttggtactcgagtacaacaatatcgcccaactcgaagaagcctttgctcaaagcggcaatgaaatcgcctgcgtgattgtcgaacccttcgtcggcaatatgaacctcgtccgcccgaccgaagcctttgtcaaagccttgcgcggattgaccgaaaaatacggcgcggtgttgatttacgacgaagtgatgaccggcttccgcgtcgcgctcggcggcgcgcaatctttgcacggcatcacgcccgacctgaccacgatgggcaaagtcatcggcggcggtatgccgcttgccgcgtttggcgggcgcaaagacattatggaatgtatttccccgctgggcggcgtgtatcaggcaggcaccttgtcgggcaacccgattgctgtcgccgcaggcttgaaaacgctggaaatcatccagcgcgaaggcttctatgaaaacctgacggcgcgtaccgaacagttggttcaaggttttcggacggcagcggatgcggcgggcatcgagttcaccgccgacagcgtgggcggtatgttcggtctgtatttcgccgcacacgcgccgcgaaactatgccgatatggcgcgttccaatattgaaggcttcaaacagtttttccacgggatgctcgaccgcaatgtcgccttcggcccgtccgcttatgaagcaggtttcgtttccgccgcgcatacgcccgagctgattgacgaaacggttgcggttgcggttgaagtgttcaaggcgatggctgaatga

SEQ ID NO: 65280 - DNA, 1056 bp, Neisseria meningitidis; identical to SEQ ID NO: 59036

SEQ ID NO: 65281 - DNA, 348 bp, Neisseria meningitidis; identical to SEQ ID NO: 58991

SEQ ID NO: 65282 - DNA, 987 bp, Neisseria meningitidis; identical to SEQ ID NO: 42422

SEQ ID NO: 65283 - DNA, 564 bp, Neisseria meningitidis; identical to SEQ ID NO: 59880

SEQ ID NO: 65284 - DNA, 966 bp, Neisseria meningitidis
atgagctacacgcaactgacccagggcgaacgataccacatccaatacctgtcccgccactgcaccgtcaccgaaatcgccaaacagctgaaccgccacaaaagcaccatcagccgcgaaatcagacggcaccgcacccaagggcagcaatacagcgccgaaaaagcccagcggcaaagccggactatcaaacagcgtaagcgacaaccctataagctcgattcgcagctgattcagcacatcgacacccttatccgccgcaaactcagtcccgaacaagtatgcgcctacctgtgcaaacaccaccggatcacgctccaccacagcaccatttaccgctaccttcgccaagacaaaagcaacggcagcacgttgtggcaacatctcagaatatgcagcaaaccctaccgcaaacgctacggcagcacatggaccagaggcaaagtacccaaccgtgtcggcatagaaaaccgacccgctatcgtcgaccagaaatcccgtatcggcgattgggaagccgacaccattgtcggcaaaggacagaaaagcgcattattgaccttggtcgaacgcgttacccgctacaccatcatctgcaaattggatagcctcaaagccgaagacactgcccgggcagctgttagggcattaaaggcacataaagacagggtgcacaccattaccatggataacggcaaagagttctaccaacacaccaaaataaccaaagcattgaaagcggagacttatttttgtcgtccttaccattcttgggagaaagggctgaatgagaacaccaacggactcatccggcaatacttccccaaacaaaccgatttccgtaacatcagtgatcgggagatacgcagggttcaagatgagttgaaccaccgaccaagaaaaacacttggctacgaaacgccaagtgttttattcttgaatctgttccaaccactaatacactag

SEQ ID NO: 65285 - DNA, 867 bp, Neisseria meningitidis
atggcaggtgaaaccattaccgctgccgactacatcaagcaccacttgcagagcttgaccagtttgtcggatgttactcagggtcagggactgaaaaacattgctgatttttcgtttattaaccttgatgccgtcttttttgccgtcctgttgggcgtaatcggcagcttcctgttgtggcgcggtgcgaaaaaagcaacggcaggcgttcccggacgtttccaggccgcagtggaaatcttgtttgagtttgtggacgatatgtgtaagagcatcattcacaacgaaaagtctagaaaagccgtcgcgccgttgggtctgacgctgtttgtctggatttttctgatgaacgcgatggatatgctgccggtcgatttgctgccgatggtatggcagggcattaccggcaaccatcacgccctgctgcgcgtcgtaccgactgccgatttgaacaccactttggcactcgctgtcggcgtgttgctgatttgtatctattacaacatcaaaatcaaaggattgggtggctggtttcacgagttgttcagcgcgccgttcggtgcaaaactcgcacctgcgaacttcctgttgaatttggtcgagtttctttctaaaaccgtatcccacggtatgcggttgttcggcaatatgtatgcgggcgaattggtattcttgctgatagccttgcttggcggtgcttgggcggcttccggcagcgtcgaagtcatggatccgattctgtttgtattccacattattgccggtttggcatgggcgattttccatattttggtgattaccctgcaggcgtttattttcatggcgttggcgttcgtctatatcggacaggcacatgatgcgcactga

SEQ ID NO: 65286 - DNA, 2151 bp, Neisseria meningitidis
atgaaaaccccactcctcaagcctctgctcattacctcgcttcccgttttcgccagtgtttttaccgccgcctccatcgtctggcagctaggcgaacccaagctcgccatgcccttcgtactcggcatcatcgccggcggccttgtcgatttggacaaccgcctgaccggacggctgaaaaacatcatcgccaccgtcgccctgtttaccctctcctcgctcacggcacaaagcaccctcggcacagggctgcccttcatcctcgccatgaccctgatgaccttcggctttaccattttaggcgcggtcgggctgaaataccgcaccttcgccttcggcgcactcgccgtcgccacctacaccacacttacctacacccccgaaacctactggctgaccaaccccttcatgattttatgcggcaccgtactgtacagcaccgccatcatcctgttccaaatcatcctgccccaccgccccgtccaagaaagcgtcgccaacgcctacgacgcactcggcggctacctcgaagctaaagccgactttttcgatcccgacgaagccgaatggataggcaaccgccacatcgacctcgccatgagcaacaccggcgtcatcaccgccttcaaccaatgccgttccgccctgttttaccgccttcgcggcaaacaccgccacccgcgcaccgccaaaatgctgcgttactactttgccgcccaagacatacacgaacgcatcagctccgcccacgtcgattatcaggaaatgtccgaaaaattcaaaaacaccgacatcatcttccgcatccaccgcctgctcgaaatgcagggacaagcctgccgcaacaccgcccaagccctgcgcgcaagcaaagactacgtttacagcaaacgcctcggccgcgccatcgaaggctgccgccaatcgctgcgcctcctttcagacagcaacgacagtcccgacatccgccacctgcgccgccttctcgacaacctcggcagcgtcgaccagcagttccgccaactccagcacaacggcctgcaggcagaaaacgaccgcatgggcgacacccgcatcgccgccctcgaaaccggcagcctcaaaaacacctggcaggcaatccgtcctcagctaaacctcgaatcaggcgtattccgccatgccgtccgcctgtccctcgtcgttgccgccgcctgcaccatcgtcgaagccctcaacctcaacctcggctactggatactactgaccgcccttttcgtctgccaacccaactacaccgccaccaaaagccgcgtccgccagcgcatcgccggcaccgtactcggcgtaatcgtcggctcgctcgtcccctacttcaccccgtctgtcgaaaccaagctttggatcgtcatcgtcagtaccaccctctttttcatgacccgcacctacaaatacagtttctccaccttcttcattaccattcaagccctgaccagcctctccctcgcaggtttggacgtatacgccgccatgcccgtacgcatcatcgacaccattatcggcgcatcccttgcctgggcggcggtcagctacctatggccagactggaaatacctcacgctcgaacgcaccgccgcccttgccgtatgcagcaacggtgcctatctcgaaaaaatcaccgaacgcctcaaaagcggcgaaaccggcgacgacgtcgaataccgcgccacccgccgccgcgcccacgaacacaccgccgccctcagcagcaccctttccgacatgagcagcgaacccgcaaaattcgccgacagcctgcaacccggctttaccctgctcaaaaccggctacgccctgaccggctacatctccgccctcggcgcataccgcagcgaaatgcacgaagaatgcagccccgactttaccgcacagttccacctcgccgccgaacacaccgcccacatcttccaacacctgcccgaaaccgaacccgacgactttcagacagcactggatacactgcgcggcgaactcgacaccctccgcacccacagcagcggaacacaaagccacatcctcctccaacagctccaactcatcgcccggcagctcgaaccctactaccgcgcctaccgacaaattccgcacaggcagccccaaaacgcagcctga

SEQ ID NO: 65287 - DNA, 558 bp, Neisseria meningitidis; identical to SEQ ID NO: 60123

SEQ ID NO: 65288 - DNA, 315 bp, Neisseria meningitidis; identical to SEQ ID NO: 54641

SEQ ID NO: 65289 - DNA, 537 bp, Neisseria meningitidis
atgcaggcaatttctcccgaattacaggcgcgcgccgccaaaatcaaactgttgatcctggatgtggacggcgttttgaccgacgggcgcatctttatccgcgataacggcgaagaaatcaaatcgtttcacacactggacggacacggtctgaaaatgcttcaggtaagcggcgtgcagactgcgattatcacaggtcgggacgcgccctccgtcggcatccgcgtcaaacagttgggcataaattactacttcaaaggcatttcggacaaacgcgccgcgtatgaagagctgcgcgctcaggtcggcgtggaagaagccgagtgtgcctttgtcggcgacgacgtggtcgatttgccggtgatggtgcgttgcggattgccggttgccgtccccgacgcgcattggtttacgctgcaacacgccgcctatattgccaaacgcccctgcggtgcgggcgcggtgcgcgaagtgtgcgacctgattatgcaggcgcaagggactttgggcgcggctttgaacgagtacatcaaatga

SEQ ID NO: 65290 - DNA, 477 bp, Neisseria meningitidis
atgcaaaaaatccccctgaccgtacgcggtgcggaattgctgaaacaggaattgcagcagctcaaaagcgtggcgcgtcccgaagtgatcgaagcgattgccgaagcccgttcgcacggcgatttgtccgaaaacgccgaatacgaagccgccaaagaacgccaaggctttatcgagggccgcatttccgagctggaacacaaactttccgttgcccacatcatcaatccgaccgaaatccacgccgaaggcaaaatcgtgttcggtacgacggttacgctggaagatttggaaacggaagaacacgttacctaccaaattgtcggcgaagacgaagccgacatcaaacagggcaaaatctatgtcggctcacccatcgcccgcgccttaatcggcaaggaagagggggatacggcggaagtccaagccccgggcggcgtgcgcgaatacgacattatcgaagtccgatatatttga

SEQ ID NO: 65291 - DNA, 6822 bp, Neisseria meningitidis; identical to SEQ ID NO: 59998

SEQ ID NO: 65292 - DNA, 1644 bp, Neisseria meningitidis; identical to SEQ ID NO: 39802

SEQ ID NO: 65293 - DNA, 1218 bp, Neisseria meningitidis
atgacagcacccgtaccaacgtgtaatatgtcgggaaatccaataaatttacacaagctaacacttatcatgcccctccccctcccctctcccgaagcacggcaattctcgctcaaactgcaaaccctcattgccgaaaaaatcggcaaacacggcaactggattccattttcacgttttatggaattggttttatacgctccgcaatacggctactacaccggcggcagccataaaatcggcaataccggggattttattaccgcaccgaccctcacctctctgtttgcacagacactggcacgccaacttcaagaacttctatcccaaacggcgggcaatatctatgaattcggcgcgggaaccggacagcttgccgccgatttgttgggcagcatttcggacggcatcagccgttactatattattgaaatatcgccggagctggcagcacgtcagaaaaacctgattcaagcacgcgcaccggaagcatctcaaaaagttgtccacttgaccgcacttcccgaagcgtttgacggcatcatcatcggcaacgaagtactcgatgccatgcctgtcgaaatcgtccgtaaaaatgaaggcggctcattcgagcatgtcggcgtttgcctagataatgaccgttttacctattcggcacgaccgctgcacgacttacagctatctgccttggcttccctctattttcctcaaacagattatccctacaccagcgaactacatccgcaacaatatgcctttatccgcacccttgcctcaaggcttgaacgcggaggtatgatattcatcgactacggttttgatgcggcgcagtattaccaccctcaacgcaatcaaggtactctgatcggacactaccgacatcacgttatccacaatccttttgacttcatcgggttggccgacctgaccgcgcatgtcaactttaccgacattgcccaagccgggacggatgccggattagatttgataggttaccttccccaatcccatttcttattgaacttgggcattaccgagctattggcacagacggggaaaacggattcggcagcctacatccgtgaagctgctgccgttcagaaactgattgaccagcatgaaatgggcgaactgtttaaagtcatcgcattcggaaaaaatatcggcatcgactgggcaggattccgcttcggcgacatctgccacaaactctaa

SEQ ID NO: 65294 - DNA, 1254 bp, Neisseria meningitidis
atgcgtaaacccagaatcacctatttggatgtttgggcaaacgatgaaagaatcggtactttggaaaagggggccatgtatcggttcgcatacgacaatcccaattcttcgttgctgggcctgcattatcaagacagaagcaaggtatatatcagcaacaatatgccgcatatctttgcacagtattttccggaaggctttttggatgcacacatcacaagcaaatatgcttttcatgatgcgccttttgaagacaatgagatgctgcgcttggcaattctgtgcagagagactttgggtcggatacatgtgcgctgtaatgacccgctttttaatgaatggattgacgggttggagatgaaaaatccaagaatattgactgaacgggatttgctgggcataaatgcccgacaggtttttcagcaatatatggcagaaatcttccatcacggccgtttcgtcagtgtatccgggatacagcagaagatgtccttagaggccatccgcagaaataccaagcaaactgcctcatatattgccaaaggttttgatgcatccgaatatccttgcttggctgccaatgaatttttatgcatgcagaccatcaaacaagccggcattgccgttgcacagaccagcctgtcggaagattcatcagtcttattggtacgtcggtttgatgtcagtgaacagggttattttttagggatggaagactttaccagtctgcgccagtattcggtagaagataaatataaaggcagttatgcggctattgcacagattatccgacagatatccggcagaccagatgaagatttaatccatttctttaatcagcttgctgccagttgcatattgaaaaacggcgatgcacacctcaaaaatttttcagtactctatcatgacgaatacgatgttcgtcttgcacctgtctatgatgtattggatacatcaatatacagggttggaacacaaggaatttttgatgcttatgacgatacgctggcattaaacctgactaaccacggtaagaaaacatatccttccaagaatacattgttggattttgctgagaaatattgcgatttgggaagagaagatgcatcctttatgatagatacaatcgttcaagctaaagaacaggttcttgttaaatactcggatgtattgcgtgagaatgaatggttggcgcagaagtggcattttatcccggatgaaaatgaagaaggtctaccgtttacattccggtag

SEQ ID NO: 65295 - DNA, 1753 bp, Neisseria meningitidis
atgattcattataaaataaccccgtcccctctcgaccacgagtggcacatcctgctgacattcacacaagatgatgatcttcctatagaaataagcctgccaaactgggttccgggcagctatctgattcgggatttttcccgccacatcacttctatccatgcatcctgtaacggcacgtccatgccgctcgaacaaattgccaaaaaccgctggcatgccgccgccgtacgcggcgagtggcaaatccgctacaccgtatatgcattcgatttgtcggttcgaggttctttcctgacgacagaacgcggtttttttgacggatcgtgcctgtttttgaaagtcgaaggaacggaaacgctgccgcaccgcttggaattgacgggtattccgtccgaatggcgtattgccacaacgctgccggaaacagggaggtttgtctttcaggcggcatcttatgccgaattgattgaccgacctgtcgagatgggcttgattgaatttttagattttgaggcggcaggcattccgcacacaattgccttaagcggcatatatcccgatttcgaccgcaacaggctggtttcggatatcaaaaaaatctgcgaaacagaactggcggtgttttcctcccctgccccgtttcaaaaatatttgttcctgctccacgtcggcgaccatatttacggcggtttggaacacaccgacagcaccgccctgctcgccgaccgccacagccttccgccgtacggtatgaccgatgccgacgatacctacaccacattgctcggacttttctcccacgaatattttcacgcgtggaacgtcaaatccatcaaacctgccgcgttcgtcccttatgacctcgacaaagaaaactataccgaacaactatgggcattcgaaggtattacatcctattacgacgatttgtttttggcacgcagccgcaccatctcgcccgaatcttatttaaacctgctggcacaaggcattacgcgcgtacaacaaacccgcggccgtttgaggcagaccttggcggaatcgagttttaccgcgtggaacaaattttacaaaccggatgaaaacagccccaacgccatcgtcagctactaccagaaaggcgcgcttgccgcattgtgccttgatctgataatacgcaaccgaagcaacggcagacattctctcgatacgttaatggacaaactctatcgggagtggagggacacacactcgggtattccggaaaaacactggcaaatccgctgtcaggaaattaccggcttggatttggaagattttttccaaaaagcgttatacagtaccgaagatttgccgcttgccgaatgcctggcaaccgcaggcgtgggactgaccttcctgccgcttccccgacaacacggcggcggatacgcagaacacatctgccccgtcccgtcggcaggcgattttggcgcacgtttcaaacaaaacaccgaccacatcgtcctgacccatgtcttcaacggcggcagcgcggaatctgcggcactgtgcccgcaagacaaaatcattgctttagacggttatgcctgcaccgactttaccgcacaatgggcccgataccacgtcaatgcaaaaatcaatatccacttcttccgtgccggcatattgcgtcaaaccgtcttgacggttcaggcagcggcagcggatactgccatcctacatatcacagaccgaaacctgttggacaactggttgttcggttaaactt

SEQ ID NO: 65296 - DNA, 1722 bp, Neisseria meningitidis; identical to SEQ ID NO: 51265

SEQ ID NO: 65297 - DNA, 753 bp, Neisseria meningitidis
atgatgggcgattccgtcatttattatgtagaacaggcagacgaaccggtaaaccgtgccggcgaacgcgcccgtaaaacattcaaatatttttggcgcgagcttttttgggaacgccgccgcatcattcccgccttagattttgccatggtcaaagccccttttttccaagacggcgaaatttgcgaacatatgtggatcgacgatatttattttgacggtctttatatttacggtgtgctgaacaataaacccggcgaactgaccaatatcgaacaaggcgaaagcatttgcgttccggttgacgacatcagcgactggatgttcgtgtgcaacggcattccctacggcggctttaccatacaggcaatgcgtggacagatgacggaagaggagcgtaccgaacacgatgccgcatggggaatcgatttcggcgatcccgggcaggtattgctggtgtatgaagaaaaagaacatcccgaaaatctggaagagcatccgatgtgccggaactgtattgacgattttcggcaacagttgtcccaaaatccggattttctgcatgagcaggacgaagacggctatacgccgcttcatcatgaagccatcgcaggaaatgcacttatggttcaagccatgcttgaatacggcgcaaatcctgcctcaaagacatcggaaggctataccgccctcgattttgcccgcctgacgggctggcaaaatgttgccgacctgctcgaaccgcgacattag

SEQ ID NO: 65298 - DNA, 1065 bp, Neisseria meningitidis; identical to SEQ ID NO: 43710

SEQ ID NO: 65299 - DNA, 234 bp, Neisseria meningitidis; identical to SEQ ID NO: 36270

SEQ ID NO: 65300 - DNA, 396 bp, Neisseria meningitidis; identical to SEQ ID NO: 50854

SEQ ID NO: 65301 - DNA, 1149 bp, Neisseria meningitidis; identical to SEQ ID NO: 50366

SEQ ID NO: 65302 - DNA, 798 bp, Neisseria meningitidis
atgctgaaacaacgggtgataactgctatgtggctgctgccgctgatgctgggcatgctgttttacgcgccgcaatggttgtgggctgcattttgcggactgattgccctgattgccttgtgggaatatgcccgtatgagcggcttgtgcaaaatcaaaaccaaccattacctcgccgcaaccttggttttcggcgtggttgcctatgcgggcggctggatgctgcctaatttggtttggtatgttgttttggcattttggcttgccatcatgcctttatggttgagattcaaatggaggctcaacggcggttggcaggtttatgccgtcggctggcttttggttatgccgttttggttcgcgctcgtatccctgcgcccgcatcccgatgatgccctgccgctgctcgccgtgatgggtctggtctgggttgccgacgtttgcgcgtatttcagcggcaaggcgttcggcaaacacaaaatcgcgccggcaatcagccccggaaaaagctgggaaggcgcaatcggcggcgcggtttgcgtggccgtgtacatgacctccgtacgaagtgccggctggctggcattcgatacaggctggttcgataccgtgttaatcggtttggtgttgaccgttgtcagcgtatgcggcgaccttttggaaagctggctcaagcgcgcggcaggcatcaaagacagcagcaacctgctgcccggacacggcggcgtgttcgaccgtaccgacagcctgattgccgttatcagcgtctatgcggcgatgatgtcggttttaaattga

SEQ ID NO: 65303 - DNA, 681 bp, Neisseria meningitidis; identical to SEQ ID NO: 51452

SEQ ID NO: 65304 - DNA, 774 bp, Neisseria meningitidis
atgaacgccattgcagacgtgcaatccagccgcgatttacgcaacctgccgattaatcaggtcggcatcaaagacctgcgctttccaatctcccttaaaagcaaagaaggcgaacaatccaccgtcgcccacctgaccatgacggttttcctgcctgccgaccaaaaaggcacgcatatgtcgcgctttgtcgccctgatggaaaaacaaaccgaagccttggatttcgatacgctgcacaaactgaccgtcgatatggttgccctgttggattcgcattccggaaaaatcagcgtttgcttcccgtttttccgcaagaaaagtgcgcccgtctccggcatccaatcgctgcttgactatgatgttaccctgaccggcgaaatcaaaaacggtacatacagccacaatctgaaagtaatggttccggttacttcattgtgtccgtgttccaaagaaatttcccaatacggcgcacacaaccaacgttcgcatgtgactgtcagcctgattgcaaacgcggatgtaggtattgaagaaatcatcgattacgttgaagcgcaagcaagctgccaactctacggtttgctcaaacgccccgatgaaaaatatgttaccgaaaaagcctacgaaaacccgaaattcgtggaagatatggtgcgtgatgtcgctacttcgctgatcgccgacaaacgcatcaagagtttcgttgtcgagagcgagaatttcgagtctatccacaaccattcggcttatgcctatatcgcctacccgtag

SEQ ID NO: 65305 - DNA, 855 bp, Neisseria meningitidis
atgttttaccaaatccttgccctgattatctggagcagctcgtttattgccgccaaatatgtctatggcggcatcgatcccgcattgatggtcggcgtgcgcctgctgattgctgcgctgcctgcactgcccgcctgccgccgtcatgtcggcaagattccgcgtgaggaatggaagccgttgctgattgtgtcgttcgtcaactatgtgctgaccctgctgcttcagtttgtcgggttgaaatacacttccgccgccagcgcatcggtcattgtcggactcgagccactgctgatggtgtttgtcggacactttttcttcaacgacaaagcgcgtgcctaccactggatatgcggcgcggcggcatttgccggtgtcgcgctgctgatggcgggcggtgcggaagagggcggcgaagtcggctggttcggctgcctgctggtgttgttggcgggcgcgggcttttgtgccgctatgcgtccgacgcaaaggctgattgcacgcatcggcgcaccggcattcacatctgtttccattgccgccgcatcgttgatgtgcctgccgttttcgcttgctttggcgcaaagttataccgtggactggagcgtcggaatggtattgtcgctgctgtatttgggcgtggggtgcagctggtacgcctattggctgtggaacaaggggatgagccgtgttcctgccaacgtttcgggactgttgatttcgctcgaacccgtcgtcggcgtgctgctggcggttttgattttgggcgaacacctgtcgcccgtgtccgtcttgggcgtgtttgtcgtcatcgccgccaccttggttgccggccggctgtcgcatcaaaaataa

SEQ ID NO: 65306 - DNA, 531 bp, Neisseria meningitidis
atgatacaaaagatatgtaagctatttgttttaatagcatttttttcgtcgtcccccgcttttgcccttcaaagcgacagcagacagcctattcagattgaggccgaccaaggttcgctcgatcaagccaaccaaagcaccacattcagcggcaatgtcgtcatcaggcaaggtacgctcaatatttccgccgcccgcgtcaacgtaacgcgtaatggcaaaggcgaacagtttatgaaggccgacggctcgcccgtgcgcttcagccagacattggacgggggcaaagggacggtgcgcggtcaggcaaacaacgttgcttattcgtctgcaggcagcaccgtagtcttaaccggtaatgccaaagtacagcgcggcggcgatgtcgccgaaggtgcggtaattacatacaacaccaaaaccgaagtctataccatcagcggcagcacaaaatccggcgcaaaatccgcttccaaatccggcagggtcagcgtcatcatccagccttcgagtacgcaaaaatccgaataa

SEQ ID NO: 65307 - DNA, 561 bp, Neisseria meningitidis; identical to SEQ ID NO: 50732

SEQ ID NO: 65308 - DNA, 450 bp, Neisseria meningitidis; identical to SEQ ID NO: 42600

SEQ ID NO: 65309 - DNA, 363 bp, Neisseria meningitidis; identical to SEQ ID NO: 43023

SEQ ID NO: 65310 - DNA, 558 bp, Neisseria meningitidis; identical to SEQ ID NO: 43962

SEQ ID NO: 65311 - DNA, 855 bp, Neisseria meningitidis; identical to SEQ ID NO: 51015

SEQ ID NO: 65312 - DNA, 609 bp, Neisseria meningitidis
gtggcagaatttttttttgatctacgaaaagaaattgacaaagaatgggtattcatcgacggaagttatgtacggtgtcatcaacatgcaagtggagctcggcgtggtttcgatagagcaattggacaaagccgtggcggaaacacgacaaaaatacacctatgtgtggactcgcatggaaatccgctcgattttaaagtcactgggggtaacgtgcacgacggtcaagttgcaaacgacttgatagaagtcatacaagaagcccagtattttatcgctgacaaagggtatgactcgcaagaaatcagagataaagcgatagaacacggtatgaaagctattataccaaagcgtaaatatgactcgcaagaaatcagagataaagcgatagaacacggtatgaaagctattataccaaagcgtaaaaatgccaagaaacctaaccctgattttgatagctacctttataaattacgccacttagtcgagaatgcatttgcacgattaaagcagtttcgtagtattgctactcgctatgagaaattagctcgtaattttaaatcgatgctttacttggcttgctctattattcatgctaagttaaattga

SEQ ID NO: 65313 - DNA, 1224 bp, Neisseria meningitidis
atgtcgggcaatgcctcctctccttcatcttcctccgccatcgggctgatttggttcggcgcggcggtatcgattgccgaaatcagcacgggtacgctgcttgcgcctttgggctggcagcgcggtctggcggctctacttttgggtcatgccgtcggcggcgcgctgttttttgcggcggcgtatatcggcgcactgaccggacgcagctcgatggaaagcgtgcgcctgtcgttcggcaaacgcggttcagtgctgttttccgtggcgaatatgctgcaactggccggctggacggcggtgatgatttacgccggcgcaacggtcagctccgctttgggcaaagtgttgtgggacggcgaatcttttgtctggtgggcattggcaaacggcgcgctgattgtgctgtggctggttttcggcgcacgcaaaacaggcgggctgaaaaccgtttcgatgctgctgatgctgttggcggttctgtggctgagtgccgaagtcttttccacggcaggcagcaccgccgcacaggtttcagacggcatgagtttcggaacggcagtcgagctgtccgccgtgatgccgctttcctggctgccgcttgccgccgactacacgcgccacgcgcgccgcccgtttgcggcaaccctgacggcaacgctcgcctacacgctgaccggctgctggatgtatgccttgggtttggcagcggcgttgttcaccggagaaaccgacgtggcaaaaatcctgctgggcgcaggtttgggtgcggcaggcattttggcggtcgtcctctccaccgttaccacaacgtttctcgatgcctattccgccggcgcgagtgcgaacaacatttccgcgcgttttgcggaaacacccgtcgctgtcggcgttaccctgatcggcacggtgcttgccgtcatgctgcccgttaccgaatatgaaaacttcctactgcttatcggctcggtatttgcgccgatggcggcggttttgattgccgactttttcgtcttgaaacggcgtgaggagattgaaggctttgactttgccggactggttctgtggcttgcgggcttcatcctctaccgcttcctgctctcgtccggctgggaaagcagcatcggtctgaccgcccccgtaatgtctgccgttgccattgccaccgtatcggtacgccttttctttaaaaaaacccaatctttacaaaggaacccgtcatga

SEQ ID NO: 65314 - DNA, 4176 bp, Neisseria meningitidis; identical to SEQ ID NO: 50673

SEQ ID NO: 65315 - DNA, 2115 bp, Neisseria meningitidis
atgttcctcttttcagacggcctacaatctattaataacaataatcgacgaaaacgcattgtgaaaaacgcctacatcccctctcgtggcatccgcaaaatcccccatctcttcaccctattgcctgagtttcatatctgcaaggatgggaaaggagcagaggctgttatcggctggggtttgcgcccgacgacacacaaagcgcgtgcttttgccgctgaacaccagcttccctttattgctttggaagacggctttttacgctcgcttggcctaggcgttgccggctatcctccctattccatcgtctatgacgacatcggcatctactacgacaccacacgtccttcgcgtttggaacaactgattcttgccgccgataccatgccgtctgaaaccttggctcaggcgcaacaggcgatggatttcatcctgcaacaccacctgtccaaatacaaccacgcgcccgaactttcagacgatcatcctttacgctccccatccaaacctgaaaccgtcctcattatcgaccaaacattcggcgatatggccatccaatatggcggcgcagacgcctctacgtttgaactgatgtttcagacggccttaaatgaaaacccgcaagccgatatttgggtcaaaacccatcccgatgttttgtgcggcaaaaaacaaggctatctgacccagcttgtgcagcaacaccgcgtccatcttctggcagaagacatcaatccgatttctttgttgcaaaacatcgataaagtttattgcgttacctcgcaaatgggttttgaggcgcttttgtgcggcaagccgctgaccactttcggcctgccgtggtatgccggatggggcgtgagtgacgaccgccatcctaaaatcgacagccttgttcaaacccaacgccgcgccccccgcaacttgctgcagctcttcgctgcagcctatctgcaatacagccgctacctcaaccccaataccggcgaagcaggcagcctctttgatgtcatcgactatctggcgacggtcaaacgcaaaaacgacaaattgcgtggcgagttgtattgcgtcggtatgtctttgtggaaacgcgcggttgccaaaccgttctttaacgtaccctcttgccgtctgaaatttatctcttccacccaaaaactggcaggggtcaaactgtccgacgatgcacgcatccttgcctggggcaacggcaaagaggccatcgtccgctttgccgaacaacaccacatccccctgctgcgcatggaagacggctttatccgatcggtcggactcggctctaatttagtaccgccactgtcacttgttaccgacgatatgggcatttatttcaatgccgaagccccatcccgtcttgaacacatcctgcaaaaccaaaacttcgacgatcaagactttcagacggccttgaagctgcaaaaaatgctgaccgaaaaccacatcagtaaatacaacgtcggcagctcagacttcaccgccccgtcaaccgacaaaaccgtgatcctcgttcccggccaggttgaagatgatgcgtctatccgctacggttcgccccaaatctaccgcaatctggatttgctccgtaccgtacgcgaacgaaaccccaatgcctatatcatctacaaaccgcatcccgatgtagtcagcggtaaccgcatcggccatatttcccctgaagatgctgcacgatatgccgaccaaaccgccgaacaagccgacatcctgacctgtctccaatacgcagacgaaatacataccatgacttcgctgaccggttttgaagccttgttgcgcggcaaaaaagtcagctgctacggcctgcctttttacgcaggctgggggcttacccaagatctgctccccatcccgcgccgtagccgcagacttgagctttggcagctgattgccggcacgctcatccactatcccgactacatccaccccgaaacccatcaggccataaatgcagaaaccgcagcccaaatcctgatacgacaaaaaaatatgcaaaaaaacaacaacggattacatcgcgggtgctttgccaaaaaattaggtaaaatcaaacaactatatcgatctttcaaataa

SEQ ID NO: 65316 - DNA, 174 bp, Neisseria meningitidis; identical to SEQ ID NO: 50939

SEQ ID NO: 65317 - DNA, 528 bp, Neisseria meningitidis
ttggggaattttgcaaaggtctcaaattgtgaattctgggataaaattaattataatcgggctgcccaagccgccgagcagcgggcaaagcaggcgcaggaaacaccgaaagagccgccgaaacaggaagagcactttatcgccaagctgccgaacgacaagctaatgacgatatacaggctgtttcaaaaacaactggacgacatgcgcggcttggagcgcgatatagaacgcggagattggtacatcaatgcgcgataccgcatgaacgaaaaccgaaacaaaataagggcgctggaagacgacaacaaacggctgcatcacgactattgggcagtccaagaccaaggcgaaaaccgctttttcggcatgggtaaaatcggcgcaaaactggttaaggaaaacgagaagcagcaacacatcaacgaacggcatggagcgaacgtgcgagaaatccggcggctgaaaacagaaagagacctttgcaaaattccccaaaatcccctaaattcccaccaagacatttag

SEQ ID NO: 65318 - DNA, 1371 bp, Neisseria meningitidis
atgatcaaccccatcgcctcgctttcccctttagatggccgttatgcccaatccgttgaagcattgcgcccgattttttccgaatacggcctgatgaaagcgcgcgtcaaagtcgaattaaactggctcaaagccctcgccgccgagccgaagattgccgaagtgccgcccttcagtgccgaaacgcttgccgaaatcgacacggtgattgaaaacttttcattggaagacgcggccgccgtcaaagccatcgaagccacgaccaatcatgatgtcaaagccattgaatattggctgaaaaaacgttttgccgaagtgccggaagtcgccgccgtgagtgagttcatccacttcgcctgcaccagcgaagacatcaacaacctgtcccacgctttaatgctgcaagaagcgcgtgaggctgttttgctgccgaagctggccgaaatcatcgaaaaactgaccgctatggcgcacgaccttgccgccgtcccgatgatgagccgcacccacggccagcccgccacgccgaccactttgggcaaagaaaccgccaacgtcgtttaccgcctgcaacgccagtttaaaaacctgcaagtgcaagagttcctcggcaaaatcaacggcgcggtcggcaactacaacgcccatatggttgcttatcccgatgtggattgggaaacccactgccgcaactttgtcgaaatcagcctcggtctgaccttcaacccctacaccatccaaatcgaaccgcacgactatatggcggaattcttccaaaccctcagccgcatcaacacgattctcatcgactttaaccgcgacgtttggggttatatttcattgggttacttcaaacaaaaagtcaaagcgggcgaagtcggttcttccaccatgccgcacaaagtcaaccccatcgactttgaaaactccgaaggaaacctcggtatggcaaacgccgtattgggctttttgtccgaaaaactgccgatttcccgctggcagcgcgacctgaccgacagcaccgtcttacgcaatatgggcgtgggcgtgggctatgccgtgttgggtttcgccgcccacctgcgcggtctgaacaagctcgaacccaaccctgccgcgcttgccgccgatttggatgccacttgggaactgctcgccgagccgattcaaaccgtgatgcgccgttacggtgtcgccaatccttacgaaaaactgaaagacctgacgcgcggaaaaggcggcattacgcccgaagtgctgaaaggctttatcggatcgctggaaatccccgtcgaagccaaagcaaaattgcttgagctgacccccgcactgtatgtgggcaaggctgaagcgttggcgaaacggatttga

SEQ ID NO: 65319 - DNA, 504 bp, Neisseria meningitidis; identical to SEQ ID NO: 36815

SEQ ID NO: 65320 - DNA, 606 bp, Neisseria meningitidis; identical to SEQ ID NO: 39821

SEQ ID NO: 65321 - DNA, 1596 bp, Neisseria meningitidis
atgtcccaagaaatcctcgaccaagtgcgccgccgccgcacgtttgccatcatctcccaccctgacgcaggtaaaaccacgttgactgaaaaactcttgctgttttcaggtgcgattcaaagcgcgggtacggtaaaaggcaaaaaaaccggcaaattcgccacttccgactggatggaaatcgagaagcagcgcggcatttccgtggcatcaagcgtgatgcagttcgactacaaagaccacaccgtcaacctcttggacacgccgggacaccaagacttctccgaagacacctaccgcgttttaaccgccgtggacagcgcattaatggtcatcgacgcggcaaaaggcgtggaagcgcaaaccatcaagctcttaaacgtctgccgcctgcgcgatacgccgattgttacgtttatgaacaaatacgaccgcgaagtgcgcgattcgctggaactcttggacgaagtggaaaacatcctgcaaatccgctgcgcgcccgttacctggccgatcggtatgggcaaaaacttcaaaggcgtataccacatcctgaacgacgaaatctatctctttgaagcgggcggcgaacgcctgccgcacgagttcgacatcatcaaaggcatagaaaatcccgaattggaacaacgctttccattggaaatccaacagttgcgcgacgaaatcgaattggtgcaggcggcttccaacgagttcaatctcgacgaattcctcgccggcgaactcacgcccgtattcttcggctctgcgattaacaacttcggtattcaggaaatcctcaattcattgattgaatgggcgcccgcgccgaaaccacgcgatgcgaccgtgcgtatggtcgagccggacgagccgaagttttccggatttatcttcaaaatccaagccaatatggacccgaaacaccgcgaccgtattgccttcttgcgcgtctgctccggcaaattcgagcgcggcatgaaaatgaaacacctgcgtatcaaccgcgaaatcgccgcctccagcgtggtaaccttcatgtcccacgaccgcgagctggttgaagaagcctacgccggcgacattatcggtatcccaaaccacggcaacatccaaatcggcgacagcttctccgaaggcgaacaactgacgtttaccggcatcccattcttcgcgcccgaactgttccgcagcgttcgcatcaaaaacccgctgaaaatcaagcaactgcaaaaaggtttgcaacagcttggcgaagaaggtgcggtgcaggtgttcaaaccgatgagcggcgcggatttgattttgggcgcggtcggcgtgttgcaatttgaagtcgttacctcgcggctggccaacgaatacggcgtagaagccgtgttcgacagcgcatccatctggtcggcgcgctgggtatcgtgcgacgacaagaaaaaactggcggaatttgaaaaagccaatgcaggcaacctcgccatcgacgcgggcggcaacctcgcctacctcgcccccaaccgcgtgaatttgggactcacgcaagaacgttggccggacatcgtgttccacgaaacgcgcgagcattcggtcaaactttaa

SEQ ID NO: 65322 - DNA, 1974 bp, Neisseria meningitidis; identical to SEQ ID NO: 42119

SEQ ID NO: 65323 - DNA, 550 bp, Neisseria meningitidis
atgaaagcgtatctggctctgatttctgccgccgttatcggtttggctgcctgctctcaagaacctgccgcgcctgctgccgaggcaactcctgctgctgaagcacccgcttccgaagcgcctgccgccgaagctgctcctgcagatgctgccgaagcccctgctgccggcaattgtgcggcaactgtcgaatccaacgacaatatgcagttcaacaccaaagacatccaagtcagcaaagcatgtaaagagttcaccatcactctgaaacataccggtacgcaacccaaagccagcatgggtcacaaccttgtgattgccaaagctgaagacatggacggcgtatttaaagacggcgtaggtgctgccgataccgactatgtcaaacctgacgatgcgcgcgttgttgcccacaccaaactgatcggcggcggcgaagagtcttccctgactttggatcctgccaaactggctgacggcgaatacaaattcgcttgtaccttcccaggtcacggtgctttgatgaacggcaaagtgactttggtcgatt

SEQ ID NO: 65324 - DNA, 936 bp, Neisseria meningitidis
atggggcacaatatgatgaccacccaaaaatggtatgagcatattactaatgtaatcataggcaatactgctaatttcaatagcggttgccttgactctatagattatgtagatgaaagaaaaggcgttccgcttgcagctatgcaacatattttcatggacgttagagctgcagcttcccatgcctatctatttgaacatgatcttaagaaattcaagcaatatgcttatgttgcaggaaagctgggggttttgctgagtgtaaattctacagaccctgaacccttcttctttccctgtgacatgctcaacattcaaaatccgatgtttctgatgctgatgagcgacagcccacagctgcgtgagtttctggtgcgcaatatcgacaacatcgccaacgatacagaagcctttataaaccgctacgacctcaaccggcatatgatttacaatactctgctgatggtggagggtaagcagcttgatcggttgaaacaacgtagcgagaaagtcttggcgcatcccacccctagcaaatggctgcaaaagcggttgtacgattaccgcttcttcctcgctttcgccgaacaggatgccgaggcaatgaaagccgccttagagccgcttttcgataaaaaaaccgcgcgtatggctgccaaagaaacattgtcctatttcgatttctacctgcagccgcaaatcgttacctacgccaaaatcgcatccatgcacggtttcgatttgggcatagatcaagaaatctcaccgagggatttgattgtttacgatccgctgccggcagacgaatatcaagacatcttcgattttatgaaacagtatgacttgtcttacccgtatgaatatctgcaggattggatagattactatacgttcaaaaccgataagctggtatttggtaacgcgaagcgagagtga

SEQ ID NO: 65325 - DNA, 1002 bp, Neisseria meningitidis
atgaaacggaaaatttggctgctgccgctgctggcggtttcggcatacctgcaggcgcagacggaagtcaggctggcggtgcataagtcgttcagcctgcccaaagggttgattgcgcgcttcgagcgggcaaacgatgcgaaggtgtcgattattcaggcgggcggcgcgaacgaaatgctcaacaaactgattttgagccgcgccaacccgattgccgacgcggtgtatggtttggacaacgccaatatcggcaaggcgcgggaaatgggcattttggcggcggcgcaacccgaatccgcccccgtcgcggtcgggctgccttcggctttggcggtcgattacggctatgtgtccatcaattacgacaaaaaatggtttgaaggcaaaaagctgcccctgccgcaaaccctgcaggatttgacccgccccgaatataaaaacctattggtcgtgccgtcccccgccacgtcgtccccggggctgggcttcctgatggcgaacatcagcgggatgggcgaagaaggcgcgttcaaatggtgggcacagatgcggcagaacggcgtgaaggtcgccaaaggctggagcgaggcgtattacaccgacttttcgcacaacggcggcgcgtatccgctggtggtcggttatgccgccagtccggcggcggaagtgtatttttccaaaggcaaatacagcgagccgccgacgggcaacctgtttttaaaaggcggcgtattccgccaggtcgaaggcgcggcagtcttgaagggcgcgaaacagccgaagctggcggcaaaactggtgcaatggctgcaaagtcgggaagtgcagcaggcggttccgtccgaaatgtgggtttaccccgccgtcaaaaacacgcgcctgcccgacgtgttccgcttcgcccaagccccgacgcacaccaccgcccccgcgcagcgcgatattgatgcgaaccagcgcggatgggtttcccgttggattagaacggttttgaaataa

SEQ ID NO: 65326 - DNA, 474 bp, Neisseria meningitidis
atgtcccgcaacaacgaagagctgcaaggcatctctcttttgggcaatcaaaaaacccaatatccgaccggctacgcgcctgaaattctcgaagcattcgacaacaaacatcccgacaacgactatttcgtcaaattcgtctgcccagagttcaccagcctctgccccatgaccgggcagcccgacttcgccaccatctacatccgctacattccgcacatcaaaatggtggaaagcaaatccctgaaactctacctcttcagcttccgcaaccacggcgattttcatgaagactgcgtcaacatcatcatgaaagacctcattgccctgatggatccgaaatacatcgaagtattcggcgagttcacaccgcgcggcggcatcgccattcatcctttcgccaattacggcaaagcaggcaccgagtttgaagcattggcgcgtaaacgcctgtttgagcacgacgcacaataa

SEQ ID NO: 65327 - DNA, 2283 bp, Neisseria meningitidis; identical to SEQ ID NO: 51749

SEQ ID NO: 65328 - DNA, 231 bp, Neisseria meningitidis; identical to SEQ ID NO: 43676

SEQ ID NO: 65329 - DNA, 999 bp, Neisseria meningitidis; identical to SEQ ID NO: 38940

SEQ ID NO: 65330 - DNA, 1092 bp, Neisseria meningitidis; identical to SEQ ID NO: 61804

SEQ ID NO: 65331 - DNA, 1179 bp, Neisseria meningitidis
atgacaggcagaacaggcggcaacggcagtacccaagcgcaacccgaacgcgtcatgctggtgggcgtaatgttggacaaagacggtacgggcagcagcgccgcccgtctgaacggctttcagacggcattggcggaagccgtcgagctggtcaaggcggcgggcggcaatcccgtcatcgtggagaccgccaaacgcgaccgtccgcacaccgcgctgtttgtcggcacgggcaaggcggcggagctgtcggaagcagttgccgcagacggcatcgatttggtcgtattcaaccacgaacttacgcccacgcaggaacgcaatttggaaaaaatcctccaatgccgcgtattggacagggtagggttgattttggcgattttcgcccgccgcgcccgcacgcaggaaggcaggctgcaagtcgagttggcgcaattgagccatttggcgggacgcttgatacgcggttacggccatctgcagagccagcgcggcggtatcggcatgaaagggccgggcgaaaccaaactggaaaccgaccgccgattgatcgcccatcgaatcaacgccttgaaaaaacagcttgccaacctcaaaaaacagcgcgccctgcgccgcaagtcccgcgaatcgggcacaatcaaaacgtttgcgctggtcggctataccaatgtcggcaaatccagcctgttcaaccggctgaccaagtcgggcatatatgcgaaagaccagcttttcgccacactcgacaccacggcgcggcggctgtacatcagtcccgaatgcagcattatcctgaccgataccgtcggattcgtcagtgatttgccgcacaaactgatttcggcattttccgccacgctggaagaaaccgcgcaagccgatgtgctgctgcacgtcgtcgatgccgccgcctcgaacagcgggcagcagattgaagacgtggaaaacgtactgcaagaaatccatgccggcgatattccgtgcatcaaggtgtacaacaaaatcgacctgctgccgtctgaagaacaaaacacgggcatatggcgcgacgctgcgggaaaaattgccgccgtccgcatttccgttgctgaaaataccggtatagacgcactgcgcgaagccattgccgagtattgtgccaccgcaccaaacacagacgaaaccgaaatgccatga

SEQ ID NO: 65332 - DNA, 792 bp, Neisseria meningitidis
atgaatgtttattttctcggcggcggcaatatggcggctgccgttgcgggcggattggtcaaacaaggcggttaccgcatccatattgccaaccggggtgcggaaaagcgcgaacgtttgcaaaaagagttgggggtcgaaacttctgaaaccttgccggagcttcattccgacgatgttttaatccttgccgtcaagccgcaggatatggaagccgcgtgcaaaaatatccgcaccaacggcgcattggtgctttctgttgcagctggattgtcggttgatacgctcagccgttacctcgggggaacacgccgcattgtccgggttatgccgaatacacccggaaaaatcgggctgggcgtatccggtatgtttgccgaagcggaagtatcggaaacagaccgcaggattgccgatcgaatcatgaaatcagtcggtttgaccgtttggttggaagatgaagcgcaaatgcacagcattaccggtatcagcggcagcggaccggcttatgtgttttatctgctggacgcattgcaaaatgctgccatccgacaagggtttgatatggcagaagcacgcgcgctcagtctggcaacgtttaaaggagcggttgcccttgccgagcagacgggtgaagatttcgagaagcttcaaaaaaatgtaacgtcaaaaggcgggacaacccacgaagccgtggaagccttcaggcggcatcgtgtcgccgaagccataagtgagggcgtttgtgcctgtgtgcgccgttcgcaggaaatggaacggcaatatcaataa

SEQ ID NO: 65333 - DNA, 1929 bp, Neisseria meningitidis
atgtccagaaaccaaaatcacgaagaatatcaagacgacacccgtccgttaagcattgaagagcaacgcgcgcgcctgcgtcagctcatcatcatgggtaaagaacgcggctacatcacctactccgaaatcaacgacgccctgccagacgatatgtctgatgccgaccaaatagacaatatcgtcagcatgatttccggtttgggcatccaagttaccgaacacgcccccgatgcggaagacatattgttaagcgacaatgccgccgttaccgacgatgatgccgtcgaagaagccgaggccgccctttccagtgcagattccgagttcggcagaaccaccgaccccgtccgtatgtatatgcgcgaaatgggacaggtcgacctgctgacccgcgaagacgaaatcatcatcgccaaaaaaatcgaaaacgccctgaaaaatatggttcaggccatctccgcctgcccgggttccattgcggaaatcttagaactcatcgaaaaaatccgcaaagacgaaatccgcgtcgacgaagtcgtagaagccattatcgacccgaatgaagtattgctcaacgaattgggcttggggcacttggaaaccacagcacccgagaaaccttccaacgacaattcggacgaaaacgaagacgacgaagaatcggaagaagatgcggatgaaatctcggcagccaatctcgccgaattgaaacaaaaagtcatcggccactttgcccaaatcgaaaaagactacaaaaaaatgattggccgtttggaaaaacaccacagccggcacaaagactatctcgcctaccgcgacgcgattgccaacaaactgctggaagtccgtttcgccacccggcaaatcgacagcctcagcagcagcctgcgcgggaaagtagaaaacatccgcaaactcgaacgcgaaatccgcgacatctgcctcgaccgcgtccatatggaacgcgactacttcatccaaaacttcctgcccgaaatcaccaatctagaatggattgaagaagaaatcgccaaaggcagggtttggagcgacgcgctcgaccgcttccgccacgccatcctcgaaaaacaaaccgagttggcggatatggaaaaagaaacccgcatttccatcgaagagttgaaagaaatcaacaaaaatatggtgtcgagcgaaaaagaaaccgcagccgccaaacaggaaatgattcaggcaaacttgcgcctcgtgatttccatcgccaaaaaatataccaaccggggcttacaattccttgatctgattcaggaaggcaacatcggtttgatgaaagcggtcgataagttcgaataccgcagaggctataaattctccacctacgcaacctggtggatccgccaggcaattacacgctcgattgccgatcaggcgcgtaccatccgcattccggtacatatgattgaaaccatcaacaagatgaaccgcatctcgcgccaacaccttcaagaaaccggcgaagaacccgattccgccaaacttgccgaactgatgcagatgcccgaagacaaaatccgcaaaatcatgaaaatcgccaaagagccgatttcgatggaaacccccatcggcgacgacgacgattcgcacttgggcgacttcatcgaagatgccaacaatgttgcgccggccgatgcggcaatgtacaccagcctgcacgaagtaaccaaagaaatcctcgaaagcctgacaccgcgtgaggcaaaagtcctgcgtatgcgtttcggcatcgatatgaacaccgaccacacgctggaagaagtcggcagacagtttgacgtaacgcgcgaacgcatccgacaaatcgaggcaaaagcactccgcaagctgcggcatccgacaagaagcgaccgtttgagaagtttcttggacagcgaagacagcaagctgtaa

SEQ ID NO: 65334 - DNA, 1767 bp, Neisseria meningitidis
atgaacaaaatataccgcatcatttggaatagtgccctcaatgcctgggtcgccgtatccgagctcacacgcaaccacaccaaacgcgcctccgcaaccgtggcgaccgccgtattggcgacactgttgtttgcaacggttcaggcgagtactaccgatgaagatgaagaagaagagttagaacccgtagtacgctctgctctggtgttgcaattcatgatcgataaagaaggcaatggagaaaacgaatctacaggaaatataggttggagtatatattacgacaatcacaacactctacacggcgcaaccgttaccctcaaagccggcgacaacctgaaaatcaaacaaaacggcacaaacttcacctactcgctgaaaaaagccctcacaggtctgaccagtgttggaactgaagaattatcgtttggcgcaaacggcaagaaagtcaacatcacaagcgacaccaaaggcttgaattttgcgaaagaaacggctgggacgaacggcgacaccacggttcatctgaacggtattggttctactttaaccgatacgcttgcgggttcttctgcttctcacgttgatgcgggtaaccaaagtacacattacactcgtgcagcaagtattaaggatgtgttgaatgcgggttggaatattaagggtgttaaaactggctcaacaactggtcaatcagaaaatgtcgatttcgtccgcacttacgacacagtcgagttcttgagcgcagatacgaaaacaacgactgttaatgtggaaagcaaagacaacggcaagagaaccgaagttaaaatcggtgcgaagacttctgttatcaaagaaaaagacggtaagttggttactggtaaaggcaaaggcgagaatggttcttctacagacgaaggcgaaggcttagtgactgcaaaagaagtgattgatgcagtaaacaaggctggttggagaatgaaaacaacaaccgctaatggtcaaacaggtcaagctgacaagtttgaaaccgttacatcaggcacaaatgtaacctttgctagtggtaaaggtacaactgcgactgtaagtaaagatgctcaaggcaacatcactgttaagtatgatgtaaatgtcggcgatgccctaaacgtcaatcagctgcaaaacagcggttggaatttggattccaaagcggttgcaggttcttcgggcaaagtcatcagcggcaatgtttcgccgagcaagggaaagatggatgaaaccgtcaacattaatgccggcaacaacatcgagattacccgcaacggtaaaaatatcgacatcgccacttcgatgaccccgcagttttccagcgtttcgctcggcgcgggggcggatgcgcccactttgagcgtggatggggacgcattgaatgtcggcagcaagaaggacaacaaacccgtccgcattaccaatgtcgccccgggcgttaaagagggggatgttacaaacgtcgcacaacttaaaggcgtggcgcaaaacttgaacaaccgcatcgacaatgtggacggcaacgcgcgtgcgggcatcgcccaagcgattgcaaccgcaggtctggttcaggcgtatttgcccggcaagagtatgatggcgatcggcggcggcacttatcgcggcgaagccggttacgccatcggctactccagtatttccgacggcggaaattggattatcaaaggcacggcttccggcaattcgcgcggccatttcggtgcttccgcatctgtcggttatcagtggtaa

SEQ ID NO: 65335 - DNA, 1467 bp, Neisseria meningitidis; identical to SEQ ID NO: 59580

SEQ ID NO: 65336 - DNA, 1098 bp, Neisseria meningitidis
ttggataaatgggaaattaccataatggcgaaaatcattacgccgctgtcggcaaatcaggttaaaaatgcgaagccgcgcgataagctgtataagttgtcagacgggggcgggctggctttgtgggtctacccgacgggcgggcggagttggaagctgtcgtttgtgcaggatggaaggcagcagacaatttcgctggggcggtatcccgatttttcgctggccgatgcgcgggaatggcgggaggaggtgcgccgaaaacgggcgcacggggaaaatgtcgtcaataagaaggtgcgggcggattttgcttttgagaaggtggcgcgtgattggtttgtgcgttggtcgaaggggcggtctgaaaagtatgccggacaggttatgcggaattttgagcggtgggtttttccggctatcggcaatcttgatattcgtcaaatcaggacggcggatgtggtcggctgtctgcgtgtgatggaggcgcgcggtatcgttgatacgttgcgcaaaacgaaaaacagtctgaagatggtgtttgcgtttgcggtcggttcgggaatgatggaaatcaaccctgtcgcgcaaatcggttcgggtgtgtttgaacgggcgaaaacggggaatatggcagcgttgagtccgtctgaattgccgcgcctgattgattttttggagcagcgcaatgaatttgcggtttatgcgggcagggtgcgtatccatcctgtaacgcggctttgtatctattggctgctgttgacaatgacgcggattcaggaggcggcgttgatggagtggtcggagttggacggggaggtttggcgtatccccgccgaacggaaaaaggagcggcgggggcatgatgtgccgctgtcgcgggcgatgcagtgggtgttggatcaggcgcgggcgttgaatgtgaacgggcggtttgtgtttgaaagtgtgaattttcaagggcatatcaataaggaaagtccgcgcgtggcgatgcagcgggcggggctggatacgacggcgcacggtttgcgctcgcttgcgcgtacttatttgcgcgaggttctgaaggtggatagtattatgcggaaacgcaaataa

SEQ ID NO: 65337 - DNA, 756 bp, Neisseria meningitidis
atggggcgtttacttttgggcagtatccgcatgagcatcattgtcgaaaacctgaccgtcagctaccgccgccgacctgccgtgcaccatgtggacattacttttgaagaacatagtatgtgggcggttttcggtcccaacggcgcagggaaatccacctttctcaaatccttaatgggattgcagcctatcgatacgggcagcatccggctggacggattgacccgtcagaacattgcctaccttccccagcagtccgacatcgaccgctcgcagcctatgaccgttttcgacttggcggcaatggggctatggtatgaaatcggttttttcagaggaataaatgccgttcaaaaacaacgcgttcacgaatctttggaacgcgtcgggatgcggcagtttgccggccgccaaatcgcccacctctcaaacggacaattccagcgtgtcctttttgcccgaatgctggttcaaaacgccaaattcctacttctagacgaacctttcaacgctgttgatgcacggacgacctacgaacttctcgacgtattgcagaaatgccattgcggcggacacgccatcatcgccgtactgcacgattacgaacaagtccgtgcctactttcccaataccctgctgctcgcccgcgaaaaaattgcggcaggcgcaaccgagaccattctgacagaaccctacctcgcccaagccaacgccaaaatgcagcaacaggaaagccccgagtggtgcgcctcataa

SEQ ID NO: 65338 - DNA, 117 bp, Neisseria meningitidis; identical to SEQ ID NO: 51210

SEQ ID NO: 65339 - DNA, 924 bp, Neisseria meningitidis
atgaaaaaacgcaataatcctcttccgctgttgaacggtgtcaaacccagttatttggtgctgccgcatgaaaagcagttttacgggctgccgctgctgcattttctgtgcatccgctttccttttgtgggcgcggacgattggcgcaggcggttgaacagcggttttgtggtcggttcggatggtgcggcgttggacgaacatactttgttcgagccgggtaaggtgatgttttattatcgggaaaccagcagtgaggatgagccgcgtattccgtttgaagaaaagattttgcatattgatgagcatttgattgtggtggacaagccgcattttctgcccgtcatccccagcgggcgttttttaagggaaacgctgctcacacgtctgcgcctgcgtcccgaattgcagcatttgaatgttgaagacattacgccgctgcaccgcttggacaaggatacggcaggcgtgatgttgttgtcgcacaatcctgccacgcgcggggcttatcagacgatgtttcaaaacaaaacggtatggaaaacgtatgaggcgcttgcgctgacaaggacggatttgccgtatccgctcgatgtggtttcgcgtttggtaaggggtgaaaaattttttacaacgcaagaggtggaaggcgtgccaaacgcacatacgacggtcgaactgattgaaaacaggggggaattcagcctttaccgccttacgccgcataccggcaagaaacaccagttgcgcgtacacatgatgggcttgggtatgccgctgttgaatgacgcgctctatcccgtgccgtctgaagcgggaagcgaggattatcggaaacctttgaagctattggcaaaaaagattgcgtttgcagatcctttgtcgggtctggaaagggtgttttgcagtaggttttgcctataa

SEQ ID NO: 65340 - DNA, 727 bp, Neisseria meningitidis; identical to SEQ ID NO: 60005

SEQ ID NO: 65341 - DNA, 1326 bp, Neisseria meningitidis
atgaaaaaatacctattccgcgccgccctgtacggcatcgccgccgccatcctcgccgcctgccaaagcaagagcatccaaacctttccgcaacccgacacatccgtcatcaacggcccggaccggccggtcggcatccccgacctcgccggaacgacggtcggcggcggcggggccgtctataccgttgtaccgcacctgtccctgccccactgggcggcgcaggatttcgccaaaagcctgcaatccttccgcctcggctgcgccaatttgaaaaaccgccaaggctggcaggatgtgtgcgcccaagcctttcaaacccccgtccattcctttcaggcaaaacagttttttgaacgctatttcacgccgtggcaggttgcaggcaacggaagccttgccggtacggttaccggctattacgaaccggtgctgaagggcgacgacaggcggacggcacaagcccgcttcccgatttacggtattcccgacgattttatctccgtccccctgcctgccggtttgcggagcggaaaagcccttgtccgcatcaggcagacggggaaaaacagcggcacaatcgacaataccggcggcacacataccgccgacctctcccgattccccatcaccgcgcgcacaacagcaatcaaaggcaggtttgaaggaagccgcttcctcccctaccacacgcgcaaccaaatcaacggcggcgcgcttgacggcaaagccccgatactcggttacgccgaagaccctgtcgaacttttttttatgcacatccaaggctcgggccgtctgaaaaccccgtccggcaaatacatccgcatcggctatgccgacaaaaacgaacatccctacgtttccatcggacgctatatggcggataagggctacctcaaactcggacaaacctccatgcagggcattaagtcttatatgcggcaaaatccgcaacgcctcgccgaagttttgggtcaaaaccccagctatatctttttccgcgagcttgccggaagcagcaatgacggccctgtcggcgcactgggcacgccgctgatgggggaatatgccggcgcagtcgaccggcactacattaccttgggtgcgcccttatttgtcgccaccgcccatccggttacccgcaaagccctcaaccgcctgattatggcgcaggataccggcagcgcgattaaaggcgcggtgcgcgtggattatttttggggatacggcgacgaagccggcgaacttgccggcaaacagaaaaccacgggatatgtctggcagctcctacccaacggtatgaagcccgaataccgcccgtaa

SEQ ID NO: 65342 - DNA, 900 bp, Neisseria meningitidis; identical to SEQ ID NO: 50342

SEQ ID NO: 65343 - DNA, 752 bp, Neisseria meningitidis; identical to SEQ ID NO: 45857

SEQ ID NO: 65344 - DNA, 438 bp, Neisseria meningitidis; identical to SEQ ID NO: 42580

SEQ ID NO: 65345 - DNA, 942 bp, Neisseria meningitidis
atgaaaaccctgctcctcctcatccccctcgtcctaaccgcctgtggcacactgaccggcatacccgcccacggcggcggcaaacgctttgccgtcgaacaagaactcgtcgccgcatcgtcccgcgccgccgtcaaagaaatggatttgtccgccctgaaaggacgcaaagccgccctttacgtctccgttatgggcgaccaaggttcgggcaacataagcggcggacgctactctatcgacgcactgatacgcggcggctaccaaaacaatcccgaaagtgccacccaatacagctaccccgcctacgacactaccgccaccaccaaatccgacgcgctctccagcgtaaccacttccacatcgctcttaaacgcccccgccgccgccctgactagaaacagcggacgcaaaggcgaacgctccgccggactgtccgtcaacggcacgggcgactaccgcaacgaaaccctgctcgccaacccccgcgacgtttctttcctgaccaacctcatccaaaccgtcttctacctgcgcggcatcgaagtcgtaccgcccgaatacgccgacaccgacgtattcgtaaccgtcgacgtattcggcaccgtccgcagccgtaccgaactgcacctctacaacgccgaaacccttaaagcccaaaccaagctcgaatatttcgccgtcgaccgcgacagccggaaactgctgattgcccctaaaaccgccgcctacgaatcccaataccaagaacaatacgccctttggaccggcccttacaaagtcagcaaaaccgtcaaagcctcagaccgcctgatggtcgatttctccgacatcaccccctacggtgacacaaccgcccaaaaccgtcccgacttcaaacaaaacaacggtaaaaaacccgatgtcggcaacgaagtcatccgccgccgcaaaggaggataa

SEQ ID NO: 65346 - DNA, 594 bp, Neisseria meningitidis
atggcaagcattcaaaatttatacgagaccgtcatcggtgtgctgggtaatcaggcaggcaaagtcatttcagctttgggcgagattaccgtcgagtgtctgcccgaacactatatctcagccatgaccgcattgcgcgaccatgaagatttgcatttcgagcttctggtcgatttgtgcggtgtcgattacagcacttacaaaaacgaagtatggcagggcaaacgctttgccgtcgtcagccagctgctttccgttaaaaacaatcaacgcatccgcgtacgcgtctgggtttcagacgacgacttccccgtagtcgaatccgtagtcgatatttacaacagcgcggattggtacgaacgcgaagccttcgatatgtacggcatcatgttcaacaaccacccggacttgcgccgcatcctgaccgattacggctttgtcggacatccgttccgcaaagacttcccgatttccggctatgtggaaatgcgttacgacgaagagcaaaaacgcgtgatttaccaacctgttaccattgagccgcgcgagatcacgccgcgtatcgtccgtgaggagaactacggtggccaataa

SEQ ID NO: 65347 - DNA, 666 bp, Neisseria meningitidis; identical to SEQ ID NO: 51246

SEQ ID NO: 65348 - DNA, 1101 bp, Neisseria meningitidis; identical to SEQ ID NO: 42527

SEQ ID NO: 65349 - DNA, 618 bp, Neisseria meningitidis; identical to SEQ ID NO: 38819

SEQ ID NO: 65350 - DNA, 951 bp, Neisseria meningitidis
atgtcccaacaccgcaaactgattattttgggttccggccccgccggatacaccgccgccgtctatgccgcgcgcgccaatttaaaccccgtcattattacaggtatcgcgcaaggcgggcaactgatgacaacgaccgaagtggacaactggcctgccgatgccgacggcgtgcaagggccggaattgatggcgcggtttctcgcccacgccgaacgtttcggaacggaaattatttttgaccaaatcaacgccgtcgatctgcaaaaacgcccgttcacactcaaaggcgatatgggcgagtacacttgtgatgccctgattgtcgcaacaggcgcgtccgccaaatacctcggtttgccgagtgaagaagcgtttgcagggaaaggcgtttccgcttgtgccacctgcgacggtttcttctacaaaaaccaagatgttgccgtagtcggcggcggcaatacggcagttgaggaagcactctaccttgccaatatcgccaaaaccgttacgctgattcaccgccgcagcgagttccgcgccgaaaaaatcatgatcgacaaactgatgaaacgcgtagaagagggcaaaatcatcctcaagctggaaagcaacctgcaagaagtcttgggcgacgatcggggcgtaaatggcgcattattaaaaaacaacgacggttctgagcaacaaattgccgtcagcggcatttttatcgccatcgggcacaagccgaataccgatattttcaaaggtcagttggaaatggacgaagccggttacctgaaaaccaaaggcggcacggcggacaatgtcggcgcaaccaatatcgaaggcgtatgggcggcgggcgacgtaaaagaccatacctaccgtcaggcgattaccagcgcggcttccggctgtcaggcggctttggacgcggaacgctggctgggcagccaaaacatttga

SEQ ID NO: 65351 - DNA, 792 bp, Neisseria meningitidis
atggcaagacatccctaccgccgcctgcgtcctgcaaaatccagctttcccgaagtcggcatttccgaagaaggcaatatccgttcgcttcacttgggcagcgacaccgttcaaagctcgatgaacctcgaccacccgtccgagctggtgctctcttacagccgcgcgatgatgggctggctgctgtttaccgacgctcttccgcaacatatcacccaaatcggcttgggcggcggctcgtttgcacgctggatagacacctacctgcccgacacgcgccaaaccgccgtggacatcaatcctcaggtcatcgccattgcccgcaacctgtttgagttgcctttcgagggcgagaaatttgaaattattgaagcagacggtgcagaatatatcaaagtcttccgccacaacaccgatgtgattttggtggacgggttcgacggcgaacaaatcatcgatgcgctggttgaagaaccgtttttccgagactgccgaaacgcactctcttcagacggcatattcgtaaccaactggtggagcggcgacaaacgctaccaacgcttcatcgaacggttgttgagcgtttttgaagggcgcgtcttggaacttcctgccgaaagccacggcaatgtcgcggtaatggccttccaaagcagccccaaagagcaaaacatagacaaactcaagaaacgcgccgacaaactgagcaacgcatacggattggacttccaccgcatgctcgccggcctgaaagcatccaaccccaacaacggcaagcatttctacctttaa

SEQ ID NO: 65352 - DNA, 681 bp, Neisseria meningitidis; identical to SEQ ID NO: 43758

SEQ ID NO: 65353 - DNA, 321 bp, Neisseria meningitidis; identical to SEQ ID NO: 51943

SEQ ID NO: 65354 - DNA, 372 bp, Neisseria meningitidis
atgagattttatattgataacaaagagtgtgattatattttttttcggaaggctgttaatataagtgatgactttatacaaagtggttttattactccggaaggattaattactaaaaatagtaatccaaaattatttaatcaatattcaaaaatggtatctaaaaataaatgtcaatatgagatggttacatttctttcggatgaaatgaaaaatattattgaattattatcgaatgatgatgcatatatagagtttgcctattctgaggatttttatgtactccctgagattgaaattgataagagaactttaaaatcactaaatttctatattgacttcggggttaaatatataattaataaaatatag

SEQ ID NO: 65355 - DNA, 843 bp, Neisseria meningitidis
atgtgtcaactgctgggcatgaactgcaatacgccgaccgatattatgttttcctttgaaggcttccgccgcaggggcggcattaccgaccaccatgccgacggtttcggtatcggctttttcgaaggcaaaggcgtgcgcctgttccacgacgacaagccgagcgcaaattcccccgtcgccgacctcgtgcgtgcctaccaaatcaaatcggaaaacgtcatcgcacatatccgcaaagcatcgcaaggacaaacctcgctggcgaacacccatccctttatgcgcgaaatgtggggcggctactggctgtttgcccacaacggacatttgattgattttttccccgaacagggcgaatttttccaccccgtcggcacaaccgattccgaacgcgcgttctgccacatcctcaaccgcctgcgcacccgctttgccgcccgtcccgacgacgacacgctgtttgacgcgattgcggggctgacgcacgaaatccgcaagttcgggctgtttaactttatgctttcagacggcattgccctgtttgcccacgccagcacactgctgcactacatcgtccgccaagccccgttcggcaaggcgcgcctgctcgacgatgacgtgatggtcgattttgccgaagtaaccacgccctccgaccgcgtcgccgttatcgccaccctgccactgacccgcgacgaatcatggtcccaacttgccgtggacgaactggtgatgttccgcgaaggcaaaattattttgaacgaccgaccccggcaccccgtttatatgagtgtcgaagaaggtttggaaaccgcgcgcgccgccggcgtcgccgtctga

SEQ ID NO: 65356 - DNA, 795 bp, Neisseria meningitidis; identical to SEQ ID NO: 43823

SEQ ID NO: 65357 - DNA, 201 bp, Neisseria meningitidis; identical to SEQ ID NO: 64346

SEQ ID NO: 65358 - DNA, 1311 bp, Neisseria meningitidis; identical to SEQ ID NO: 43019

SEQ ID NO: 65359 - DNA, 726 bp, Neisseria meningitidis; identical to SEQ ID NO: 50615

SEQ ID NO: 65360 - DNA, 1386 bp, Neisseria meningitidis
atggacggctggacacagacgctgtccgcgcaaaccctgttgggcatttcggcggcggcaatcatcctcattctgattttaatcgtcaaattccgcatccacgcgctgctgacactggtcatcgtcagcctgctgacggctttggcaaccggtttgcccacaggcagcattgtcaacgacgtactggtcaaaaacttcggcggcacgctcggcggcgtggcgcttctggtcggcctgggcgcgatgctcggacgtctggtcgaaacatccggcggcgcacagtcgctggcggacgcgctgatccggatgttcggcgaaaaacgcgcaccgttcgcgctgggcgttgcctcgctgattttcggcttcccgattttcttcgatgccggactaatcgtcatgctgcccatcgtgttcgccaccgcacggcgcatgaaacaggacgtactgcccttcgcgcttgcctccatcggcgcattttccgtcatgcacgtcttcctgccgccccatccgggcccgattgccgcttccgaattttacggcgcgaacatcggccaagttttgattttgggtctgccgaccgccttcatcacatggtatttcagcggctatatgctcggcaaagtgttggggcgcaccatccatgttcccgttcccgaactgctcagcggcggcacgcaagacaacgacctgccgaaagaacctgccaaagcaggaacggtcgtcgccatcatgctgattcccatgctgctgattttcctgaataccggcgtatcggccctcatcagcgaaaaactcgtaagtgcggacgaaacctgggttcagacggcaaaaataatcggttcgacaccgatcgcccttctgatttccgtattggtcgcactgtttgtcttgggacgcaaacgcggcgaaagcggcagcgcgttggaaaaaaccgtggacggcgcactcgcccccgtctgttccgtgattctgattaccggcgcgggcggtatgttcggcggcgttttgcgcgcttccggcatcggcaaggcactcgccgacagcatggcggatttgggcattcccgtccttttgggctgtttccttgtcgccttggcactgcgtatcgcgcaaggttcggcaaccgtcgccctgaccaccaccgccgcgctgatggctcctgccgttgccgccgccggctttaccgactggcagctcgcctgtatcgtattggcaacggcggcaggttcggtcggttgcagccacttcaacgactccggcttctggctggtcggccgcctcttggacatggacgtaccgaccacgctgaaaacctggacggtcaaccaaaccctcatcgcactcatcggctttgccttgtccgcactgctgttctccatcgtctga

SEQ ID NO: 65361 - DNA, 876 bp, Neisseria meningitidis; identical to SEQ ID NO: 53703

SEQ ID NO: 65362 - DNA, 132 bp, Neisseria meningitidis; identical to SEQ ID NO: 39343

SEQ ID NO: 65363 - DNA, 750 bp, Neisseria meningitidis
atgaaagcactggtcgcagtaaagcgcgtagtggactacaacgtcaaagttcgtgtaaaagccgatggttcggatgtggatatcggcaatgtcaaaatgtcgatgaatccgtttgacgaaatcgctgtggaagaagccgtccgtttgaaagaagccggaaaagtaagcgagatcgtagcggtttctttgggtgagaaaaaatgcgaagaaaccttgcgtacagctttggcgatgggtgccgaccgtgccattcatgttgaaaccgatactaaactggagtctctggccgttgctaagttgctgaaagccgttgcggacaaagaaaatccgcaaattttctttttgggcaaacaagcgattgatgatgatgccaatcaagtggcgcaaatgctggcagctttgctgaatgcggcgcaaggtacgttcgcgtccaaagtacaaattgaaggcgacgaagtgcagattgtgcgggaaatcgatggcggcgaagaaaccatcgcattgaaactgcctgctgttatcagcgcggatttgcgtttgaacgagccgcgctttgtcaaactccccaatattatggcggcaaagaaaaaacctttggaaaaactgactcctgacgatttggttgccgacatttcacctcgtttgaaaacggtgaaatttgccgaacctaaggcgcgtcaggcaggcgtaaaagtagcaagcgttgccgaattggttgaaaaattgaaaaacgaagccaaagtgatttga

SEQ ID NO: 65364 - DNA, 216 bp, Neisseria meningitidis; identical to SEQ ID NO: 50612

SEQ ID NO: 65365 - DNA, 924 bp, Neisseria meningitidis
atgacgaaaaccgaaccgaacaacgcccaactcgactggttggaatccgaatccatccacatcatccgcgaagtggcggcggaatgcgaaaaccccgccctgctcttttccggcggcaaagattccgtggtcctgctcgccctcgcctgcaaagccttccggctgggcagccggccggtaaaactgcccttcccgctggtgcatatcgacacgggacacaattatcccgaagtgattgccttccgcgacgcgcaggcggcaaaactcaatgcccgcctgatagtggggcgcgtggaagactccatcgctaaaggcacagtagttttacgcaaagaaaccgattcgcgcaatgcggcgcaggcggttacgctgttggaaaccatcgaggcaaacggctttgacgcgctgatgggcggcgcgcggcgcgacgaagaaaaagcccgcgccaaagaacggattttctcgttccgagacgagttcggacaatgggatccgaaggcgcaacgccccgagctgtggtcgctgtacaacaccaggctgcacaaaggcgaaaatatgcgcgtcttcccgatttccaactggacggaactcgacatctggcaatacatcgcccgcgaaaacctcgagctgccgccgatttattacagccacaggcgcgaagtggtcagacgcagggggctgctggtccccgtaacgccgctcaccccgaaaatgccgtctgaaacctccgaaatccttgatgtccgcttccgcaccgtcggcgacatcagctgcacctgcccggtagaaagcaccgcgtccacgccgacggagattatcagagaaacagcggttgccgacatttccgaacgcagcgcgacccggctggacgatcaggcaagcgaggcggcaatggaaaaacgcaaaaaagaaggctatttctaa

SEQ ID NO: 65366 - DNA, 828 bp, Neisseria meningitidis
atgatgttgaaaaaattcgtactcggcggcattgccgcattggttttggcggcctgcggcggttcggaaggcggcagcggagcatcttccgcgcctgcacaatcggcagtttccggttctttaatcgagcgcatcaacaataaaggcacggttaccgtcggcacggaaggtacttacgcaccgtttacctaccacgacaaggacggcaaactgaccggttacgatgtggaagtaacccgcgccgtggcggaaaaactgggcgtgaaagtcgagtttaaagaaacgcaatgggattcgatgatggcgggtttgaaggcggggcgtttcgacgtggtggcaaaccaagtcggtctgaccagccccgaacgccaagcgacattcgacaaatccgatccttacagctggagcggtgccgtattggttgcccgtaacgacagcaacatcaaatctatcgacgacatcaaaggcgtgaaaaccgcacaatccctgaccagcaactacggcgaaaaagccaaagctgcaggcgcagatttggtggctgttgacggtttggcgcaatcgctgaccctgattgaacaaaaacgtgccgatgcaaccctgaacgacgaattggcggttttggactatctgaagaaaaacccgaatgcgggcgtgaaaatcgtttggtccgcacctgccgatgaaaaagtcggttccggcctgattgtcaacaagggcaatgacgaagccgtggcgaaattcagtacggcaatcaacgagctgaaagccgacggtacgctgaaaaaactgggcgaacaattcttcggaaaagacatcagtgttcaataa

SEQ ID NO: 65367 - DNA, 1497 bp, Neisseria meningitidis
atgtcgcttgccttggtttacagccgcgccttgagcggtatgaatgcgccgttggtcgaagtggaagcccaccttgccaacggcctgccacatttcaacatcgtcggactgcccgatacggaagtcaaagaaagtcgcgaccgcgtccgtgccgccattattcaaagcggttttgaattccccgccaaaaaaatcaccgtcaacctcgcccccgccgacctgcccaaagagtcggggcgtttcgatttgccgattgcaatcggcatccttgccgcatcggggcaggttgcgcccgaaaaactggcggaatacgagtttgcgggggaattggcactgtcggggctgttgcgccccgtgcgcggcgcgttggcgatggcgtggcagggtatgcaggcaaaacgtgcatttgttttgcctgaagaaaacgcaggacaagccgccgtgatgcgcggcattaccgtttacggcgcgcgctctttgggcgaagtcgccgcccatttgaacggcatcgaacctttggtgcaaaccgactgtcaagttcctcagatgccgtctgaaaacaccaaattgctcgacctcgtcgatgtcaagggtcagcacactgcccgccttgctttggaaatcgctgccgcaggcggacacagcctcttgatgatgggtccgccgggaacgggcaagtctatgctctcccaacggctgcccggcatcctgccgccgctgaccgaagacgaattggttgaagtttgggcattgcgttcgctcctgcccaaccaccagcaacaactcgacagcaaccgtcctttccgcagtccgcatcacagcgccagcgcggcggctatggtcggcggcggttcggatccgcgtccgggcgagatttcattggcgcatcacggtgttttgtttttggacgaattgcccgagttcgaccgcaaagttttggaagttttgcgcgaaccgttggaaaacggcgaaatccacatttcccgcgcggcgcgccaagccgtctatcctgccaaattccaacttgtcgccgccatgaacccgtgtccgtgcggttatctcgggcatcccgtcaaaccctgccgctgcacgcccgaaagcgtcgcgcgttaccgcagcaagatttccggcccgctgctcgaccgcatcgatttgaccatcgaagtccccagcctgtccgccgccgaactgatgcagcaggaagcgggcgaaagcagcgcgtccgttttggaacgcgttatcgccgcccgcgacaaacaatacgcacggcagggcaaagtcaacgccgctttgagcgtcagcgaactcgattcccaagcccgcatccaaaaagaagcgcaggaagcattgggcagcctgctggaaaaactctccctctccgcccgcagtttccaccgcatcatgcgcgtggcgcgtacattggcggatttggcgggcgacgaagaagtcggcagaagccacgtcatgaaagccataggtttccgccgcgctttatag

SEQ ID NO: 65368 - DNA, 492 bp, Neisseria meningitidis; identical to SEQ ID NO: 50414

SEQ ID NO: 65369 - DNA, 564 bp, Neisseria meningitidis; identical to SEQ ID NO: 54577

SEQ ID NO: 65370 - DNA, 318 bp, Neisseria meningitidis
atgggcaacaaattgaccccgcctgccaaactgcctgacgaacaggatttgcgggcggtattggcatacaatatgcggcttttccgcgtgaacaagggttggtcgcaagaagaattggcgcggcaatgcggtttggacaggacttatgtgtcggcagtcgagcgcaaacgctggaacatcgccctgtcgaatatcgaaaaaatggcggcggctttgggcgtggcggcgtatcagttgctgctgccgccgcaggaacggttgaagctgatgaccaattccgccgatacccgacaaatgccgtctgaaagcggtatttga

SEQ ID NO: 65371 - DNA, 1773 bp, Neisseria meningitidis
atgattccatccgacttcattgacgagcttttagccaaaaccgatattgtcgatattatcgacgagcaggttccgctgaaaaaaggcggggcgaactatatggcgtgttgcccgttccacaaggaaaaaacgccgtcgttttcggtcagtccgaccaaacagttttaccactgtttcagttgcggggcgcacggttcggcgattggttttgtgatggaacatcaggggctgtcgtttccggaggcggtgcagttccttgccgaccgcgtgggtatgattgtgcctaaagtgcgcgggcaaaacgataatcccgaagtccgtgccgagcgcaagaaaaaacagcagacgctggaggaaacgacggctgcggcagctgatttttatgcgcaacagctaaaattcaatccagcggcaaaagcctatttggacaagcgcggcttgagcgcggaagtcatcgcgcattatggtttgggctacgcgcccgacggctggcagcctttggcgcaagtgttccaactatatccgaataccgcgttggtggatacgggtatggtgattgacaatgaggggcggtattacgaccgattccgtcatcggattatgttccccatccgcaatccgcgcgggcaggtaattggtttcggcggcagggtgctggacgactccaaacccaaatatctaaactctcccgatacacctttgtttgacaaagggaaaaacctttacggcttgtatgaggggcgtgccgctgtcaaggaagcggagcggattctggtggtcgaaggctatatggacgtggtcgcgctggcacagttcggcgtgggctacggtgtggcggccttgggcacggcaacaacagctgaacacgtcaaaatcctaatgcgtcaggcggacagtatttatttctgtttcgacggtgacagcgcggggcgcaaagcggcttggcgcgcgctggaaaacgcgctgccgcaattgaaggacgacaaatcgctgcattttttgttcctgccggaagaacacgaccccgacagctacatccgcgcctacggcaaagcgcaatttgaagacgcgctgttgaatcaaagcaagcccttgtcggaatatttctgggaacacctttcagacggcattcatctcaatacgcaggaaggcaaggcggaattggtaaaaaccagttcgccgcttttggcgcagattaccgcgtcggcattggcttatttgttaaaacaacggcttagcgaactggtcggcatcgaccccgacaacctcgcgcaactgctgggacaggaagcaccgaagcggcacgtcaaacaaaaaaactacaaactgccgccgatttccgtcaaacagcccgttatgccgacattggtgcaacggcaaatccgcagcctcttgataaatccggattgggctgcatatatagacctgcccgattatctggcgttggacggcgatttcgcctgccttgccaacctcgccgaaaccattaaaaaccatccttccgtgccggcaaccgcacaggttttggaacatatgcgcggttcgccctacgaagaaacaatcaaccgcatcttccggtcggcccttcaatcggaagaaatggaaggcggcggcgaagaagattgcgaaaacttccaaatcggcatcaaaaaactgctcaatgagttaaaatacagccaaatcgaaacattaaaacaaaaaagcctgcaatccggcttaaatgaaagcgagaaaaaacttttgctgtcgctgctgaccgcaaaacaaaattga

SEQ ID NO: 65372 - DNA, 1428 bp, Neisseria meningitidis; identical to SEQ ID NO: 50933

SEQ ID NO: 65373 - DNA, 495 bp, Neisseria meningitidis; identical to SEQ ID NO: 50704

SEQ ID NO: 65374 - DNA, 408 bp, Neisseria meningitidis
atgactgtatggtttgttgccgctgttgccgtcttaatcatcgaattattgacgggaacggtttatcttttggttgtcagcgcggctttggcgggttcgggcattgcttacgggctgaccggcagcacgcctgccgccgtcttgaccgccgctctgctttccgcgctgggtatttggttcgtacacgccaaaaccgccgtgggaaaagttgaaacggattcatatcaggatttggatgccgggcaatatgccgaaatcctccggcacgcaggcggcaaccgttacgaagttttttatcgcggtacgcactggcaggctcaaaatacggggcaagaagagcttgaaccaggaacgcgcgccctaatcgtccgcaaggaaggcaaccttcttatcatcgcaaaaccttaa

SEQ ID NO: 65375 - DNA, 768 bp, Neisseria meningitidis
atgcaaacccgcatcctctccgccgtactgctgactttttcaaccgctgcctttgccgggggcgcattcacgctgcaattcgacaacccgtccgaagacggcggcttcacgcaaaaccagattttgagcgcgccttacggctttggctgttcgggcggcaatgctccgcccgcgctgtcgtggaaaaatccgcccgccgggacaaaaagtttcgtcctgaccgtttacgataaagacgcgccgaccggactgggctggatgcactgggtggtcgccgacattcccgccgatgtccgccgccgcaacgcggcctcgctgcaattaagccgctgcgccaacatcgccgaccggactgggctggatgcactgggtggtcgccgacattcccgccgatgtccgccgccgcaacgcggcctcgctgcaattaagccgctgcgccaacatcgccgacgaccagtccgcagccatatcggcggtaatcagtttgcggatttgccgcatcaggttgacgccttcgtacacggcaaaaccgatgccgtcatgctgcaaccacgccaacacgccgcaaagcgcggcctccgccacattgtgcggcactttttcatccgccagcaccgcagccgcataatcaaacgccgcgcccatccgcccggggtgcggcagcttcaccgcatcgcacactgcctgcgccgtcccgtattgtgcggcgaacctttctacggtttcctgttcgaaagcaatccattgcgcctgatagaggccgtctag

SEQ ID NO: 65376 - DNA, 270 bp, Neisseria meningitidis
atgctcaaacaatccatcgaaatcatcaacaaactcggacttcacgcccgtgcctccagcaaattcacccaaaccgcgtctcagtttcaaagcgaagtctgggtaacgaaaaacggcagccgagtcaacggcaaaagcatcatggggctgatgatgctcgccgccgccaagggtacggtcatcgagctggagacggacggcgcggacgaggcggaagcgatgcgcgccctgaccgacttaatcaacggctacttcggcgagggcgaataa

SEQ ID NO: 65377 - DNA, 198 bp, Neisseria meningitidis; identical to SEQ ID NO: 37567

SEQ ID NO: 65378 - DNA, 348 bp, Neisseria meningitidis; identical to SEQ ID NO: 39706

SEQ ID NO: 65379 - DNA, 786 bp, Neisseria meningitidis
atgggttttctgcaaggcaaaaaaattctgattaccggcatgatttccgagcgttccatcgcttatggcatcgccaaagcctgccgcgaacaaggcgcggaactggcgtttacctacgttgtggacaaactggaagagcgcgtccgcaaaatggcggcggaattgggttccgaactcgtattccgctgcgatgtcgccagcgacgacgaaatcaaccaagtgttcgccgacttgggcaaacattgggacggcttggacggtttggtgcattccatcggcttcgcgccgaaagaagccttgagcggcgacttcctcgacagcatcagccgcgaagcgttcaacaccgcacacgaaatttccgcatacagcctgcccgcattggcaaaagccgcccgtccgatgatgcgcggcagaaactccgccatcgttgccctgagctacttgggcgcggtgcgcgcgattccaaattacaacgtgatgggtatggcaaaagccagccttgaggcgggcatccgttttaccgccgcctgtctgggcaaagaaggcatccgctgcaacggcatttccgccggcccgattaaaacgcttgccgcctccggtatcgccgatttcggcaaacttttgggacacgtcgccgcccacaatccgctgcgccgcaacgttaccattgaagaagtcggcaataccgccgccttcctgctgtccgacctgtcgtccggcattaccggcgaaatcacttacgttgacggcggttacagcattaatgccttgagcaccgagggataa

SEQ ID NO: 65380 - DNA, 417 bp, Neisseria meningitidis; identical to SEQ ID NO: 36667

SEQ ID NO: 65381 - DNA, 510 bp, Neisseria meningitidis; identical to SEQ ID NO: 42435

SEQ ID NO: 65382 - DNA, 825 bp, Neisseria meningitidis; identical to SEQ ID NO: 59095

SEQ ID NO: 65383 - DNA, 957 bp, Neisseria meningitidis; identical to SEQ ID NO: 55310

SEQ ID NO: 65384 - DNA, 1269 bp, Neisseria meningitidis
gtgaaaccgctgcgcagactgacaaacctccttgccgcctgcgccgtagcggccgctgctttcggacagcccgccctcgcggcggacttggcgcaagatccgttcattaccgataacgcccaacggcagcactacgaacccggcggcaaataccacctcttcggcgacccgcgcggcagcgtttccgaccgcaccggcaaaatcaacgtcatccaagactatacccaccagatgggcaacctgctcatccaacaggcggcaatccaaggcaatcttggttacaccgtccgcttttccggacacggacacgaagaacacgcccccttcgacaaccacgccgccgacagcgcaagcaaagaacaaggcaacgttgacgaaggctttaccgtgtaccggctcaactgggaaggacacgagcaccatcccgccgatgcctacgacggcccgaagggcggcaattaccccaaacctacgggcgcacgcgacgaatacacctatcacgtcaacggcacagcccgcagtatcaaactcaatccgaccgacacccgcagcatccggcaacgcatatccgacaattacagcaacctcggcagcaatttctccgaccgcgccgatgaagccaacagaaaaatgttcgagcacaatgccaagctcgaccgctggggcaacagcatggagtttatcaacggcgtcgccgccggcgcgctcaacccctttatcagcgcgggcgaagccgttgaccagtggatgcaggaaaaccccaatgccgccgaaaccgtcgaagccctggtcaacgtcctgccgtttgccaaagtcaaaaacctgacaaaggcggcaaaaccggggaaggctgcggttagtggggatttctcagactcctacaagcataacactgcttcaagattatctcagtctgtagatggagaaatgtttcaaacccgcaatgttgattttaaagcaaaatctattgggactaaaattcatgatggagctcaagggaaacatatttcaggacatagaaactacattgaaggtaagagtactttaaatcaaaacattaatcctcaagaattgttgaacggaatacattcaggtgcttatccagttatttctaaaggagcaagaggaaatcctgttgttgattttgggtatcctataggcagcgatgggaaatcaggattaagtaccaattttggtacgattcattcaggtaaaaatggagttcacattgttccggctaaccctaaaaccattaaaaaggtgcaatag

SEQ ID NO: 65385 - DNA, 729 bp, Neisseria meningitidis; identical to SEQ ID NO: 45642

SEQ ID NO: 65386 - DNA, 324 bp, Neisseria meningitidis; identical to SEQ ID NO: 52086

SEQ ID NO: 65387 - DNA, 783 bp, Neisseria meningitidis
atggaatcactgactgccataaataaatcgcgcattcggcaggctttccaaaaagcattaaacgattatgaccggcacgccttaatccaacaaaaaatgacgattaatctaatggcgcatttgcaagattatttgccggatatgccattggaaaacgtgttggaattgggctgcggctcaggaatgttgagtgccttgctgcaaaaacagatttcagcgaattattggttatttaatgatttgtgcgatgtgcagccccaactggctgaaaaactgccgcaatcctttgatttttattgcggcgatgcggaaaactttccttttcaacgacaatttgacttaatcgcaagcgcatctgccgtgcaatggtttcatcaacccgacgcttttatcgctcattgcaaaacaggcttgaaagcaaacggattattggcggttgcaacctttggcaaagacaatttaaaagaagtccgccaaattacaaatataggcttaaattacccgactttatcccaatggcagacttggttagccaaagattttgagcttttatggtgtgaggattttaaggtaatactagactttgatacgccgttagatgtactcaaacaccttaaatatacaggcgtaacagccacgaaccaaaaaaattggacaagaaaaaatctcaatggatttattggcgattacttgtcggcgttcggtatgccgtcgggcaaagtgcacctgacttatcatccgttattttttatcgcgcgctactctgcggcgggcaggcaataa

SEQ ID NO: 65388 - DNA, 1203 bp, Neisseria meningitidis; identical to SEQ ID NO: 51550

SEQ ID NO: 65389 - DNA, 1746 bp, Neisseria meningitidis
atgttgattaagagcgaatataagccccggatgctgcccaaagaagagcaggtcaaaaagccgatgaccagtaacggacggatcagcttcgtcctgatggcaatagcggtcttgtttgccggtctgattgcccgcggactgtatctgcagacggtaacgtataactttttgaaagaacagggcgacaaccggattgtgcggactcaaacattgccggctacacgcggtacggtttcggaccggaacggtgcggttttggcgttgagtgcgccgacggagtccctgtttgccgtgcctaaagagatgaaggaaatgccgtctgccgcacaattggaacgcctgtccgagcttgtcgatgtgccggttgatgttttgaggaacaagctcgaacagaaaggcaagtcgtttatctggattaagcggcagctcgatcccaaggttgccgaagaggtcaaagccttgggtttggaaaactttgtatttgaaaaagaattaaaacgccattacccgatgggcaacctgtttgcacacgtcatcggatttaccgatattgacggcaaaggtcaggaaggtttggaactttcgcttgaagacagcctgcatggcgaagacggcgcggaagtcgttttgcgggaccggcagggcaatattgtggacagcttggactccccgcgcaataaagccccgaaaaacggcaaagacatcatcctttccctcgatcagaggattcagaccttggcctatgaagagttgaacaaggcggtcgaataccatcaggcaaaagccggaacggtggtggttttggatgcccgcacgggggaaatcctcgccttggccaatacgcccgcctacgatcccaacaggcccggccgggcagacagcgaacagcggcgcaaccgtgccgtaaccgatatgatcgaacccggttcggcaatcaaaccgtttgtgattgcgaaggcattggatgcgggcaaaaccgatttgaacgaacggctgaatacgcagccttataaaatcggaccgtctcccgtgcgcgatacccatgtttacccctctttggatgtgcgcggcatcatgcagaaatcgtccaacgtcggcacaagcaaactgtctgcgcgtttcggcgccgaagaaatgtatgacttctatcatgagttgggcatcggtgtgcgtatgcactcgggctttccgggcgaaactgcaggtttgttgagaaattggcgcaggtggcggcctatcgaacaggcgacgatgtctttcggttacggcctgcaattgagcctgctgcaattggcgcgcgcctataccgcactgacgcacgacggcgttttactgccggtcagctttgaaaaacaggcggttgcgccgcaaggcaaacgcatatttaaagaatcgaccgcgcgcgaggtacgcaatctgatggtttccgtaaccgagccgggcggcaccggtacggcgggtgcggtggacggtttcgatgtcggcgcgaaaaccggcacggcgcgcaagttcgtcaacgggcgttatgccgacaacaaacacatcgctacctttatcggttttgcccccgccaaaaacccccgtgtgattgtggcggtaaccattgacgaaccgactgcccacggttattacggcggcgtagtggcagggccgcccttcaaaaaaattatgggcggcagcctgaacatcttgggcatttccccgaccaagccactgaccgccgcagccgtcaaaacaccgtcttaa

SEQ ID NO: 65390 - DNA, 1242 bp, Neisseria meningitidis; identical to SEQ ID NO: 51555

SEQ ID NO: 65391 - DNA, 501 bp, Neisseria meningitidis; identical to SEQ ID NO: 37882

SEQ ID NO: 65392 - DNA, 300 bp, Neisseria meningitidis
atgaccgcatccatgtacatccttttggtcttggcactcatctttgccaacgtcccctttctcacgaccagactgttcggcgtggccgcgctcaagcgcaaacatttcggacaccacttgatcgagctggcggcaggtttcgcgctgaccgccgttcttgcctacatcctcgaatcccgtgtgggagcggtacataatcagggttgggagttctacgccaccgtagtctgcctgtacctgatttttgcgtttccctgtttcgtgtggcggtatttttggcacacgcgcaacagggaatag

SEQ ID NO: 65393 - DNA, 483 bp, Neisseria meningitidis
atgacacaacaacgccaactgccttcccacgaactcattatgtccgaactgatgatgccggacaccgccaatttcagcggcaacgtacacggcggcgaactcctgctcctgctcgaccaagtcgcctattcctgcgccagccgttacagcggcaattattgcgttaccctgtcggttgacaaagtcctgtttaaagaacccatccacatcggcgatttggttaccttttacgccgctgtcaactacacgggacgcacctcgatggaaatcggcatccgtgtcgaagcacaaaacatccgcacgggggaagtccgccataccaacagttgctacttcacgatggttgcggtcaaagacggcaaacccgtccccgtccccccgctggaaatcctgaccgaccgccaacgctgccgctacgaaaaagccaaaaaacgcagagacatcagcctgcaagcctctgaagacatgtcctgcggctgctga

SEQ ID NO: 65394 - DNA, 1152 bp, Neisseria meningitidis; identical to SEQ ID NO: 51485

SEQ ID NO: 65395 - DNA, 372 bp, Neisseria meningitidis; identical to SEQ ID NO: 39100

SEQ ID NO: 65396 - DNA, 804 bp, Neisseria meningitidis; identical to SEQ ID NO: 50495

SEQ ID NO: 65397 - DNA, 945 bp, Neisseria meningitidis; identical to SEQ ID NO: 51716

SEQ ID NO: 65398 - DNA, 2082 bp, Neisseria meningitidis
atgatttacggctcaatgccgtctgaaaagctcacaatttttcagacggcatttgttatgcaagtaaatattcagattccctgtatgctgtacagacgcgggagtgttaagccccccttgtttgaagctccgcggctcctgccgagcttcaccgaccccgttgtgcccaagctctctgctcccggcggctacattgtcgacatccccaaaggcaatctgaaaaccgaaatcgaaaagctggccaaacagcccgaatacgcctacctgaaacagcttcagacggccaagaacgtcgattggaaacaggtgcagctggcctacgacaaatgggactataaacaggaaggcttgaccggagccggtgcagcgattgtggtgattattgtaaccgctctaacttatggatacggagcggctgcagcgggtagcgtaactgccgcaggaagtagtacagccgcagctgcaacaacgacagcggcagcaactaccactgtttctactgcagctgccatgcaaaccgcagctttagcctccttgtatagccaagcagctgtagccatcatcaataataaaggcgatgtaggcaaagcattaaaagatctcggcaccagtgatacggtcaagcagattgttacttccgcactgacggcgggtgcattaaaccagatgggcgcagatattgcccaattgaacagcaaggtaagaaccgaactgttcagcagtacgggcaatcaaaccattgccaaccttggaggcagattggccaccaacctcagcaatgcaggtatctcagctggtatcaataccgccgttaacggcggcagcttgaaagacaacttaggcaatgccgcattgggagcattggttaatagcttccaaggggaagccgccagcaaaatcaaaacaaccttcagcgacgattatgttgccaaacagttcgcccacgctttggcgggttgtgttagcggactggtacagggaaaatgtaaagatggggcaattggcgcagcagttggggaaatcgtagctgaatccatacttggcggcagaaaccctgctacactcagcgatgcagaaaagcataaagttatcagttactcgaagattattgcgggcagcgtggcggcactcaacggcggcgatgtgaatactgcggcgaatgcggctgaggtagctgtggtgaataatgctttgaattttgacagtacccctaccaatgcgaaaaagcatcaaccgcagaagcccgacaaaaccgcactggaaaaaatcatccaaagtattatgcctgcacatgcggcaggtgcgatgactaatccgcaggataaggatgctgccatttggataagcaatatccgtaatggcatcacaggcccgattgtgattaccagctatggagtttatgcagcaggttggacagctccgctgatcggtacagctggtaaagcagctatcagcacctgtatggctaatccttctggttgtactgtcatggttacgcaggctgctgaagcgggcgcgggaatcgtcacgggtgcggtaacggtaggcaacgcttgggaagctccagtaggagcgttgtcgaaagcgaaggcggctaagcaagctgctcctaaagaaacaataaacaatttggcaaatttagccaaagcagaacagcagattttattccgtattgcccaacgcgatacgcaactggatgcatggaagacgggatttaacaatagagtaaggaaaggagcaggcttgcttgatgcaagtaatattccgataaccattaacggaaaaaccatcaaacctgtacaagccataagcttaaagggagcacccgtttacagcggcgtaagcgaacaggagatttttgcgctttatcggcagatgactggccagaatccgaattttagagttttgcctgacggaagattagcaaatggcattatcagtactggagaatgggcaggaacaaaaattgcattaagaaatttttcaaaaacagagaattcaactcaagcacgatggacattagatttgcagaatcctccatcatttattaaaggtactaaattggagcttaaattccaataa

SEQ ID NO: 65399 - DNA, 291 bp, Neisseria meningitidis; identical to SEQ ID NO: 41644

SEQ ID NO: 65400 - DNA, 582 bp, Neisseria meningitidis; identical to SEQ ID NO: 37778

SEQ ID NO: 65401 - DNA, 420 bp, Neisseria meningitidis
atgaaaaaacctctaatgataaccctcaccggtatgcttgcagcttgtgcaacaggtgtcaatgtcggccggttgatggttgaaatgccgcagggagaacgttctgtcgttgtgcaggttcccgcgacaaataacccgctttccgatacggtagctgtcggaatgattaaaacatccggttcgccttcggcatcaaatatgattgaaatgctcggcgcggacaatatcaacgtcggcgtggtgggaagcagccaaatgcttaataaggcgaccgcactttattccttaaaccatgcaaagaaagtcggaaataatgtcagtgtttatatgatgggcgacagcgaaagtgacaaggccgatttggaaaacgcggcaaatgccaaaaatatcaaattgcattatttctttaaccaaaaataa

SEQ ID NO: 65402 - DNA, 639 bp, Neisseria meningitidis; identical to SEQ ID NO: 50363

SEQ ID NO: 65403 - DNA, 1551 bp, Neisseria meningitidis; identical to SEQ ID NO: 60057

SEQ ID NO: 65404 - DNA, 2817 bp, Neisseria meningitidis
atgtccaacagacctacactcctcctcgttgacggatcgtcctacctctaccgtgcgtatcacgcgatggggcaaaacctgaccgcacccgacggcgcgccgacgggtgcgctgtatggcgtattgaatatgttgcgccgtttgcggtcggaatatccgcacgattattgcgcggtggtttttgatgcgaaaggcaaaaatttccgccatcaaatgtttgaagaatacaaggcgacgcgcccgccgatgcccgacgatttgcgcccgcaggcggaagcactgccggatttagtgcgcctgacgggctggccggtattggtgattgggcaagtggaggcggacgatgtgatcggcacgctggcgaaacagggggcggaacatggtttgcgagtcattgtttcgaccggcgataaggacatggcgcagttggtggatgagcgcgttacgctggtgaacacgatgagcagcgaaacgctggacattgaaggcgtgaaggcaaaattcggcgtgcgccccgaccaaatccgcgattatctcgcgctgatgggcgacaaggtggacaacgtgccgggcgtggaaaaatgcggcccgaaaacggcggtgaaatggctggaagcctacggttcgctggctggtgtgatggaacacgcttcggaaatcaagggcaaagtgggcgaaaacctgcaagccgcactgccccaactgccgctgtcgtatgatttggtcacgattaaaaccgatgtggacttgcacgccgagctttcagacggcatcgaaagcctgcgccgtactacgccgaaatgggcgcagctggttgtcgatttcaaacgctggggcttccgcacctggctgaaagaagcggaatcaaacatgaataccggctcgaccgatgatttgttcggcagcgacagcatcggcgagcaggcggctttgaatgcggaaatgccgtttgaaaaacaagccgaaaaagccaccgcccccgaaaaactggattatcaagccgttaccaccgaagcgcagtttgccgctttgttggacaaactgtcgcgggcggacacaatcggcatcgatacggaaaccacgtcattagacgcgatgaacgcctcgctggtcggcatcagcatcgctttccaagcaggcgaagcggtttacatccccgtaggacacagcctgaccgccgcacccgaacagcttgatttgcaagacgtgttaggccgtctgaaaccgcatttggaaaaccccgccctgaaaaaaatcgggcaaaacctcaaatacgaccaacacgttttcgccaactacggcatcgccctgaacggcattgccggcgattccatgctcgcttcctacatcatcgagagccatctcggacacggcttggacgaattgtccggacgctggctcggcttggaaaccattacctacgaatcgctgtgcggcaaaggcgcgaagcaaatcggttttgccgatgtcgccatcgggcaggcgaccgaatacgccgcccaagacgccgatttcgccctgcgcctcgaagcgcacctgcgcgcgcaaatggacgaaaaacagcttgaaatgtatgaaaaaatggagctgcccgtcgcgcaggtattgtttgaaatggaacgcaacggcgtgcaaatcgaccgcgccgaactcgcccgccaaagcgcggaactcggcgccgagctgatgaagctcgaacaggaagcctatgccgccgcaggccagccgttcaacctcaattcgcccaaacagctgcaagaaatcctgttcgacaaaatgggcatccccaccaaaggcctgaaaaaaaccgccaaaggcggcatttccaccaacgaagccgtgctcgaacagctcgcgcccgactaccccctgcctaaaatcatcctgcaaaaccgcagcctggcgaagctcaaatccacctacaccgacaaactacccgaaatgatttcccccaaggacggccgcgtgcataccacctacgcccaagccgtcgccattaccggccgcctcgccagcaacaaccccaacctgcaaaatatccccatccgtaccgaagaagggcgtaaagtccgccgcgcctttaccgcaccgcaaggcagcgtcatcgtttccgccgactattcccaaatcgagctgcgcattatggcgcacctctccggcgacaaaaccctgattgccgcgttccaaaacggcgaagacgtacaccgccgcaccgccgccgaagtgttcggcactgcgcccgaaaacgtctcgtccgagcaacgccgctatgccaaaaccatcaacttcggcttaatttacggtatggggcaatacggtttggcaaaatcattgggcatcgacaacctttccgccaaaaactttatcgaccgctacttcgaccgctaccccggcgtcgccgaatacatgcagcgcaccaaagaacaagccgccgcccaaggctacgtcgaaaccctgttcggcagaaggctctacctgcccgacatccgcaacaaaaacgccaacgcccgcgccggagccgaacgcgctgccatcaacgcccccatgcagggcaccgcctccgacctcatcaaacgcgccatgatagacgtgtcccgctggctttcagagtgcgaagcctccccgtgggacgaactcttacaaagcaaactgattatgcaggtgcatgacgaactggtgctggaagtcgttgaaaccgaactggattttgtcaaagaaaaactgccgcagattatggcgaaagtggacggcggattattggatgtaccgctggtggctgaggttggcgtaggggagaattgggaagaggcacattga

SEQ ID NO: 65405 - DNA, 957 bp, Neisseria meningitidis
atgaatataatcgggctggacatctcaaaggataccatagacgcaacattgcataaaacaaacggaagtatccattacattaaatttaagaataatgatgatggattaaaacagtttagattgtggataaagggaaacagaatcagaaaagtctatatcggcatggaggcaacaggcatctattacgaaaaggcagcagatatgctttcttcctactatactgtttacgttattaatcccttaaaaatcaaggactacggaaaaagcaggtttaaccgtaccaaaaccgacaaagcagattcaaacctgatagcagactacataaaaaggcatcaagatacattgataccgtatcagatacccaaaaacaaagcactgcaaaaactgattaatcttaaaaaccaattacagcaacagcagaagcaaattaaaaaccgtcttcatagcactgaagaagacttcataaggaacatacatcaagacttgatagataccatacaggacaagatggaacaggtaaaaatagccatatccgaacaaatcaaaaaacaaacggactataaccattaccgcaatcttcaaaccatcccgagcataggcaaagacaccgcatcagttctttatgcgcaactgacagaaaaacattttaaaaccgcaaaccagtttgtatcctatgccggattaagtcccgccatcatacaatcagggacaagcgtaagaggtcggggcagattgagccgatacggaaacagacgattaaaaagtacgctgtatatgcccgccctttgtgcttaccgttttaacgcatttccgaaattaataaataatctgaaaaaagcgggtaagccaaagatggtaattatcgttgccatcatgcgcaaactggcgaagctcgcctattatattgttaaaaccggccagccttacgatgcggaaagacaccgattgaatcaataa

SEQ ID NO: 65406 - DNA, 564 bp, Neisseria meningitidis; identical to SEQ ID NO: 53570

SEQ ID NO: 65407 - DNA, 1743 bp, Neisseria meningitidis
atgaaattttttcctgctccatgtctgttggttatcctggctgtcataccccttaaaaccttagctgccgatgaaaacgatgcagaacttatccgttccatgcagcgtcagcagcacatagatgctgaattgttaactgatgcaaatgtccgtttcgagcaaccattggagaagaacaattatgtcctgagtgaagatgaaacaccgtgtactcgggtaaattacattagtttagatgataagacggcgcgcaaattttcttttcttccttctgtgctcatgaaagaaacagcttttaaaactgggatgtgtttaggttccaataatttgagcaggctacaaaaagccgcgcaacagatactgatcgtgcgtggctacctcacttcccaagctattatccaaccacagaatatggattcgggaattctgaaattacgggtatcagcaggcgaaataggggatatccgctatgaagaaaaacgggatgggaagtctgccgaaggcagtattagtacattcaataacaaatttcccttatataggaacaaaattctcaatcttcgcgatgtagagcagggcttggaaaacctgcgtcgtttgtcgagtgttaaaacagatattcagattataccgtccgaagaagaaggcaaaagcgatttacagatcaaatggcagcagaataaacccatacggttcagtatcggtatagatgatgcgggtggcaaaacgaccggcaaatatcaaggaaatgtcgctttatcgttcgataaccctttgggcttaagcgatttgttttatgtttcatatggacgcggtttggtgcacaaaacggacttgactgatgccaccggtacggaaactgaaagcggatccagaagttacagcgtgcattattcggtgcccgtaaaaaaatggctgttttcttttaatcacaatggacatcgttaccacgaagcaaccgaaggctattccgtcaattacgattacaacggcaaacaatatcagagcagcctggccgccgagcgcatgctttggcgtaacagacttcataaaacttcagtcggaatgaaattatggacacgccaaacctataaatacatcgacgatgccgaaatcgaagtgcaacgccgccgctctgcaggctgggaagccgaattgcgccaccgtgcttacctcaaccgttggcagcttgacggcaagttgtcttacaaacgcgggaccggcatgcgccaaagtatgcctgcaccggaagaaaacggcggcgatattcttccaggtacatctcgtatgaaaatcattactgccggtttggacgcagccgccccatttattttaggcaaacagcagtttttctacgcaaccgccattcaagctcaatggaacaaaacgccgttggttgcccaagataaattgtcaatcggcagccgctacaccgttcgcggatttgatggggagcagagtcttttcggagagcgaggtttctactggcagaatactttaacttggtattttcatccgaaccatcagttctatctcggtgcggactatggccgcgtatctggcgaaagtgcacaatatgtatcgggcaagcagctgatgggtgcagtggtcggcttcagaggagggcataaagtaggcggtatgtttgcttatgatctgtttgccggcaagccgcttcataaacccaaaggctttcagacgaccaacaccgtttacggcttcaacttgaattacagtttctaa

SEQ ID NO: 65408 - DNA, 462 bp, Neisseria meningitidis; identical to SEQ ID NO: 50783

SEQ ID NO: 65409 - DNA, 738 bp, Neisseria meningitidis
atgggcggacaaaaaacgcatttcgggttcagtacggtcaacgaagatgaaaaagccggcaaagtggcggaagtgttccactccgtcgccaaaaactacgacattatgaacgatgtgatgtcggcagggctgcacagggtgtggaagcatttcaccatcaacacggcgcacctgaaaaaaggcgataaagtgttggacattgcgggcggtacgggcgatttgtcgcgcggttgggcgaaacgggtcggcaaggaaggcgaggtttggctgaccgatattaattcctctatgctgaccgtcgggcgcgaccgtctgttgaacgaaggcatgattttgcccgtatcgcttgccgatgcggaaaaactgcctttccccgacaattatttcaacttggtttccgtggcgttcggcttgcggaacatgacgcataaagatgccgcgctgaaagagatgtaccgtgttttgaaaccgggcggcacgttgctggtgttggagttttccaaaatctacaaacctttggaaggcgcgtatgatttctattcgttcaagctgctgccggtcatgggcaggctgattgcgaaagatgcggagagttaccagtatcttgccgaatccatccgtatgcaccccgatcaggaaactttgaaacagatgatgctggatgcgggcttcgacagcgtggattatcacaatatgagtgcgggcatcgtcgcgctgcataagggcgtgaaattttaa

SEQ ID NO: 65410 - DNA, 999 bp, Neisseria meningitidis
atgagcagacccgtacccgccgtattcggcagcgtttttcacagtcaaatgcccgtcctcgcctaccgcgaaggcaaatggcagccgaccgaatggcaatcttcccaagacctctccctcgcaccaggggcgcacgccctgcactacggcagcgaatgctttgaaggcttgaaagccttccgtcaggcagacggcaaaatcgtgctgttccgtccgactgccaatatcgcgcgtatgcggcaaagtgcggacattttgcacctgccgcgccccgaaaccgaagcttatcttgacgcgctaatcaaattggtcaaacgtgccgccgatgaaattcccgatgcgcctgccgccctgtacctgcgtccgaccttaatcggtaccgatcccgtcatcggcaaggccggttctccttccgaaaccgccctgctgtatattttggcttcccccgtcggcgactatttcaaagtcggctcgcccgtcaaaattttagtggaaaccgaacacatccgctgcgccccgcatatgggccgcgtcaaatgcggcggcaactacgcttccgccatgcactgggtgctgaaggcgaaagccgaatacggcgcaaaccaagtcctcttctgcccgaacggcgacgtgcaggaaaccggcgcgtccaactttatcctgattaacggcgatgaaatcattaccaaaccgctgaccgacgaatttttgcacggcgtaacccgcgattccgtactgacggttgccaaagatttgggctataccgtcagcgaacgcaatttcacggttgacgaactcaaagctgcggtggaaaacggtgcggaggcgattctgaccggtacggcagccgtcatctcgcccgttacttccttcgtcatcggcggcaaagaaatcgaagtgaaaagccaagaacgcggctatgccatccgtaaggcgattaccgacatccagtatggtttggcggaagacaaatacggctggctggttgaagtgtgctga

SEQ ID NO: 65411 - DNA, 435 bp, Neisseria meningitidis; identical to SEQ ID NO: 42997

SEQ ID NO: 65412 - DNA, 135 bp, Neisseria meningitidis; identical to SEQ ID NO: 53509

SEQ ID NO: 65413 - DNA, 1023 bp, Neisseria meningitidis
ttggcagccgatcgaaccatacctgaaccgtcaaaaacccgttacctcagagattaccgcggccgtcccgcctatcccctgttgtccatgttcaaagccgtcctgctcggacaatggcacagtctctccgatcccgaactcgaacacagcctcattacccgcatcgatttcaacctgttttgccgtttcgacgaactgagcatccccgattacagcaccttatgccgctaccgcaaccggctggcgcaagacaataccctgtctgaactgttggaactgattaaccgccaactgaccgaaaaaggtttaaaaatagagaaagcatccgctgccgtcgttgacgccaccattattcagaccgccggcagcaaacagcgtcaggccatagaagttgacgaagaaggacaaatcagcggtcaaaccacaccgagtaaggacaaagatgcccgttggatcaagaaaaacggcctctacaaactcggttacaaacaacatacccgtaccgatgaggaaggctatatcaagaaactgcacattacccccgccaatgcccatgagtgcaaacacctgtcgccgttgttggaaggactgcccaaaggtacgaccgtctatgccgacaaaggctacgacagtgcggaaaaccggcaacatctggaagaacatcagttgctggacggcattatgcgcaaagcctgccgcaaccgtccgctgacggaaacgcaaaccaaacgcaaccggtatttgtcgaagacccgttatagtggattaaatttaaatcaggacaaggcgacgaagcagcagacagtacaaatagtacggcaaggcgaggcaacgccgtactggtttaaatttaatccactatatgtggtcgaacagagcttcggtacgctgcaccgtaaattccgctatgcgcgggcagcctatttcggactgattaaagtgagtgcgcaaagccacctgaaggcgatgtgtttgaacctgttgaaagccgccaacaggctaagtgcgcccgctgccgcctaa

SEQ ID NO: 65414 - DNA, 1092 bp, Neisseria meningitidis; identical to SEQ ID NO: 51545

SEQ ID NO: 65415 - DNA, 939 bp, Neisseria meningitidis; identical to SEQ ID NO: 51801

SEQ ID NO: 65416 - DNA, 1017 bp, Neisseria meningitidis
atgaacacacgtcccttttatttcggacttatatttatcgcgattattgctatacttgctaactatttaggaaacactgatttttcccatcattatcatatcagtgctttaattattgctatcttgctgggaatggcaatcggcaataccatttatccgcaattttcaacacaagtggaaaaaggcgttttgtttgccaaaggcgcgcttcttcgcactggcattgtgctgtatggtttccgcctcacttttggcgatattgccgatgtaggattaaatgctgtcgtcactgatgcaatcatgctaatttcaaccttcttttttaccgtacttttaggcattcgttatctaaaaatggataaacaattggtttatctcactggggcaggttgcagcatttgcggtgcggcagcagtgatggcggcagagtctgttaccaaagcagaatcccataaagcttcagtggcgattgccatagtggtcattttcgggacgcttgctatttttacttaccccttgttctacacgtggtcacaagatttaattaacgcccatcaattcggtatttatgttggttctagtgtacacgaagtggctcaagtttatgcgattggggaaaatattgatcctatcgtggcgaatactgccgtcatttccaaaatgatccgagtgatgatgctcgccccctttttattaatgctttcttggttattaacacgtagtaatggagtatcagaaaatacatcacacaaaattacaattccttggtttgctgtactttttattggtgttgccatttttaattcttttgatttattaccaaaagaactcgtgaaattattcgttgaaatcgattctttcttattaatttcatcaatggctgcgcttggcttaacgacgcaagcaagcgcaatcaaaaaggcaggattaaaaccgtttgttttaggaatactaacttatttatggctagtggttggtggatttttagtgaactatggaatatcaaaattaatataa

SEQ ID NO: 65417 - DNA, 264 bp, Neisseria meningitidis; identical to SEQ ID NO: 47915

SEQ ID NO: 65418 - DNA, 627 bp, Neisseria meningitidis
atgacgcaagaacgtttacccgaatttttcgaccgcgccccgacgctgaccgtacaagacccgcttgccgcattcctcggcgcggccgaaaacggcatcctcacttaccgctacgccgatgccgtgcgcctgtgcggacattcctgcccgaccgtcgcgggcgcgtacctgatggttatcaaaggtctgaaagccctttacggcgaagagctgcccgaacgcggcggcatcgaagccgccatgcagggagcgcgcgacgaaggcacggtcggcgtaaccgcatccgtcgtccaactcctcaccggcgcagcccccgaaaccggcttcggaggcatcggaatacagggacgcttcgcccgccgcaacctcttatcctttggtgcaggcgaaatcaacggcacactcgcgctccgccgccgcgacaccggcaaaaccgtcgccgtcagcctcaacgccgccctgcaacccttcgcaccgcaaatgcgcgacatcatgcccaaagccgtcagcggcagcgcaagtaccgacgaactcaaacacttcggacaactctggcaggcacgcgttaaagcatttttgaccgaatcggcggacgacccgcagttcgtcatcgtccgcgaagtgtga

SEQ ID NO: 65419 - DNA, 1164 bp, Neisseria meningitidis
atgcgaaaaaaacttaccgccctcgtattgtccgcactgccgcttgcggccgttgccgatgtcagcctgtacggcgaaatcaaagccggcgtggaaggcaggaacttccagctgcagttgaccgaaccgccctcaaagagtcaatctcaggtaaaagttactaaggccaaaagccgcatcaggacgaaaatcagtgatttcggctcgtttatcggctttaaggggagtgaggatttgggcgaagggctgaaggctgtttggcagcttgagcaagacgtatccgttgccggcggcggcgcgacccagtggggcaacagggaatcctttgtcggcttggcaggcgaattcggtacgctgcgcgccggtcgcgttgcgaatcagtttgacgatgccagccaagccattgatccttgggacagcaacaatgatgtggcttcgcaattgggtattttcaaacgccacgacgatatgccggtttccgtacgctacgactctccggacttttccggtttcagcggcagcgtccaattcgttccgatccaaaacagcaagtccgcctatacgccggctcattatactaggcagaacaatattgatgttttcgttccggctgttgtcggcaagcccggatcggatgtgtattatgccggtctgaattacaaaaatggcggttttgccgggagctatgcctttaaatatgcgagacacgccaatgtcggacgtgatgcttttgagttgttcttgctcggcagcacgagtgatgaagccaaaggtaccgatcccttgaaaaaccatcaggtacaccgcctgacgggcggctatgaggaaggcggcttgaatctcgccttggcggcccagttggatttgtctgaaaatggcgacaaagccaaaaccaaaaacagtacgaccgaaattgccgcgactgcttcctaccgcttcggtaatgcagttccacgcatcagctatgcccatggtttcgacttgatcgaacgcggtaaaaaaggcgaaaataccagctacgatcaaatcatcgccggcgttgattatgatttttccaaacgcacttccgccatcgtgtctggcgcttggctgaaacgcaataccggcatcggcaactacactcaaattaatgccgcctccgtcggtttgcgccacaaattctaa

SEQ ID NO: 65420 - DNA, 273 bp, Neisseria meningitidis; identical to SEQ ID NO: 41774

SEQ ID NO: 65421 - DNA, 1152 bp, Neisseria meningitidis
atgagtaatagagaccaactttttaaagccccgccgtttgaaaatcacagcccgctgacttggtatcaggctgcctcacaactgcccaacttcatccgcgacgacgcgcaggcagccgccatcgaacacctcgatcggctttggaccgaattgatgatgttcaaacgcaaaagaaaccgttttttaggcaggagtttgcgttccccgcaagtccccaaagggctttatttctatggcggggtcggacgcggcaaaagctttctgatggacgcttttttcggctgcctcccttaccgccgcaaacgccgcgtccactttcatgcctttatggcagaaatccaccagaggctgaaaaccctgaaaagcgaaagcaacccgttgaaatccgttgccgccgagattgccaaagaaacccgcgtattatgttttgacgaatttcatgtcagcgatattgcggatgcaatgattttaggccgtctgctggaaaacctgcttaacgagggcgttgttttggtggcgacttcaaactacgcgccttccgaactctacccgcaaggtcaaaaccggagcagttttcttcccacaatcgcgctcatcgagtccagcctgaccgtcttaaacgttgacggcggtgaagactaccgactgcgtaccctccgccccgccgagattttctttacgcctgccaatgaagaaaatgaggcaaaactggcaaaactgttcaaagaaatgacaggcattaccgatttgaaccccggcatcagcaccatccacggtcgggagattccccacaaagccgagtccggccgtgccatatggtttgatttccgcgcactgtgcttcggcccccgctcacagtccgactatctgtatttgaccgaacattatgaaatggtttttatttcaggtttggaacaactctcaccgcaagaaaaggcggaggcgcggcggctgacttggctgattgacgtactctacgatttccgggtcaaactgtgtgccaccggcgcggtagatgtcaaccatatctatacggaaggcgattttgccgaagaatttacccgcaccgccagccggatggtcgaaatgcagtctgaagtttatttggaacagccgcacctgaccctatctcccaaggcttcaggcggataa

SEQ ID NO: 65422 - DNA, 240 bp, Neisseria meningitidis
atgattctcaacatacgcaaaatgggaaactcgcaaggagtgattctgcccaaatcattattgagtcaaataggggcagtggacagcttggctgttacagttgaaaagggcaatattattttaagctgtcctaccgttcgcaggggatgggcagaagctgccgcaatgcttgtcgaaaccgagcaggagcattttttttccgaaattgaaaacgaagcggataaagaatggatatggtag

SEQ ID NO: 65423 - DNA, 780 bp, Neisseria meningitidis; identical to SEQ ID NO: 36766

SEQ ID NO: 65424 - DNA, 192 bp, Neisseria meningitidis; identical to SEQ ID NO: 43532

SEQ ID NO: 65425 - DNA, 336 bp, Neisseria meningitidis; identical to SEQ ID NO: 43327

SEQ ID NO: 65426 - DNA, 2850 bp, Neisseria meningitidis; identical to SEQ ID NO: 53436

SEQ ID NO: 65427 - DNA, 306 bp, Neisseria meningitidis
atgaacatcgaacaagtccacatcgaagtcatgcacgcccggctgaccgttaacacgccggcagaagaaaaagacacactgttgcaggcagtcggaatgctcaacggcaaagccgaagccatccgcgaaggcggacgcgtcgcggacagcgaaaaaatcgtcattatggccgcgctcaacgtcgtccacgacctgttgaaaacctccctgaacggcggcgatttggcaatcggcgattttgcgcgtaaaatagccgatatggacaacgcctgccaaaaagcactatcccgcttggcgcaggaataa

SEQ ID NO: 65428 - DNA, 900 bp, Neisseria meningitidis; identical to SEQ ID NO: 51131

SEQ ID NO: 65429 - DNA, 648 bp, Neisseria meningitidis
atgaaaggcgtttacttcgtcagcggcatagacacggacatcggcaaaaccgtcgccaccggcgtgttggcaaaacaattgttgcagcagggcaaaagcgtgattacgcaaaagcccgtgcaaaccggttgccaaaacattgccgacgacatcgccgtccatcgtaaaatcatgggtaaacccatgcaggaagccgacaaacaagggctgaccatgcctgaaatcttcagttatccagcttcgcctcatctcgctgcccgtcttgacggcagggctttggacttggacaaaatccgcaccgccacacaagaattggcggcgcagtacgaagtcgttttggtcgaaggcgcgggcggattgatggttccgctgacggaaaacctgttaaccattgattatatccgtcagcaaggctatcccgtcatccttgttaccagcggacggcttggcagtatcaaccacactttactcagtttcgccgcgctcaaacaatacggcattcgcttgtacagcctcgtgttcaaccacatccacgacagccgcgacgcacacatcgcccaatacagcctgagctacttgaaatgccgtctgaaagccgatttttccgaagcggaatggatggagttggcaaaaacagacgcggtataa

SEQ ID NO: 65430 - DNA, 873 bp, Neisseria meningitidis; identical to SEQ ID NO: 49768

SEQ ID NO: 65431 - DNA, 423 bp, Neisseria meningitidis; identical to SEQ ID NO: 40586

SEQ ID NO: 65432 - DNA, 1443 bp, Neisseria meningitidis
atgcatccgacctattccgccgtacaggcgcggctgctcgaagccaaccgcctttcccccgaactgctcgccaaaagcctgtgcatcatcggcgcgcaccacgtcgattacgccgacatctactgccagcgcaccgcttatgaaagctggcatttggaagagggcatcgtcaaatcgggcagcttccaaatcaatcagggcgtgggcgtgcgcgccgtttcgggcgacaaaaccgcctttgcctacgccgacagcctgtgcatcgattcgataaaccgttccgcccgcgccgtccgcgcgattggggcggcaggcggcaaggtgtccgccaaaatgccgtctgaaacgcgcggcaagccggtttgttccgcgtccgaccccattgccggcctcgattccgccgccaaagtcgcgctgttgaacaaagtggaagcaatcgccaaagccgccgatccgcgcatcgtgcaagtgatggccggtttgacctgcgaatacgatatggtttacctcgcccgtctggacggcaaacacgccgccgacatccgcccgatggtgcgcctgaacgttaccgttatcgccaaacagggcgaacgccgcgaacagggcagcgcgggcggcggcggacgttatgatttggcttatttcgatgaaaacttggtgcggcagtttgtcgatgccgccgtcaaacaggcactcaccaacctcgaatcccgccccgcgcccgccggcgaaatgaccgtcgttttgggcaacggctggccgggcgtgttgctgcacgaagcggtcggacacggtttggaaggcgatttcaaccgcaaggggacaagcgtcttttccggcagaataggcgagcgcgtcgccgccaaaggcgttaccgtcgtcgatcagggcgatattgccggccggcgcggttcgctcaacatcgacgacgaaggcaacgaaacccgccgcaccgtattgattgaagacggtattttgaccggctatatgcaggacgaaaccaacgcccgcctgacgggtacgcaatcgaccggcaacggccgccgcgaaagctacgcctccgtcccgatgccccgcatgaccaatacctttatggaaaacggcagctatgagccggaagaaatcatcgcgtccatcgacaaaggcatttacgccgtcaacttcggcggcggacaggtggacattaccagcggcaaatttgtgttcagcgcgtccgaagcatggtgggtggaaggcggcaggctgcaatatcccgtcaaaggcgcgaccattatcggcaacggtcccgaagtgctgaaacacgtttcgatgataggtaacgataccgcgctcgacagcggtgtcggcgtgtgcggcaaagaagggcagagcgtccccgtcggcgtggggcaaccgactttgcggattgatgccggactgaccgtcggcggcagcgcaatctga

SEQ ID NO: 65433 - DNA, 402 bp, Neisseria meningitidis; identical to SEQ ID NO: 36186

SEQ ID NO: 65434 - DNA, 567 bp, Neisseria meningitidis; identical to SEQ ID NO: 42257

SEQ ID NO: 65435 - DNA, 411 bp, Neisseria meningitidis; identical to SEQ ID NO: 54015

SEQ ID NO: 65436 - DNA, 666 bp, Neisseria meningitidis; identical to SEQ ID NO: 39840

SEQ ID NO: 65437 - DNA, 279 bp, Neisseria meningitidis; identical to SEQ ID NO: 36778

SEQ ID NO: 65438 - DNA, 1428 bp, Neisseria meningitidis; identical to SEQ ID NO: 51278

SEQ ID NO: 65439 - DNA, 183 bp, Neisseria meningitidis; identical to SEQ ID NO: 40813

SEQ ID NO: 65440 - DNA, 1146 bp, Neisseria meningitidis; identical to SEQ ID NO: 51752

SEQ ID NO: 65441 - DNA, 999 bp, Neisseria meningitidis
gtgattgcaagccgtctctctggaaatatatcttcagctattcaggagcataaagatggtaaagttaatatcaaccgttttcaaaatattttagcggatttatattcattgggagggttaggaagtacattaatagagaagaatggaaatatgcagagttgggggattccattagcaattgctggagatataattgcagcaacggctattgccacaggagatactggtacgatatctacagaggaattttataattttgacaactggaaaggttttgggtatgagctatttgaagactggtctcgttgggtatacgactggctgcccgacggctggaatctgtggaaagaattggacagaaaccgttcaggccaataccacatctacgaccccctcgccctagacctagacggcgacggcatagaaacagtcgccgccaaaggcttttcaggcagcctcttcgaccataacggcaacggcatccgcaccgccactggctgggtttctgccgatgacggtttactcgtccgcgatttgaacggcaacggcatcatcgacaacggcgcggaactcttcggcgacaacaccaaactggcagacggttcttttgccaaacacggctacgcggctttggccgaattggattcaaacggcgacaacatcatcaacgcggcagacgccgcattccaatccctgcgtgtatggcaggatctcaatcaggacggcatttcccaaaccaacgaactccgcacccttgaagaattgggtattcaatctttggatctcgcctataaagatgtaaataaaaatctcggtaacggtaacactttggctcagcaaggcagctataccaaaacagacggtacaaccgcaaaaatgggggatttacttttagcagccgacaatctgcacagccgcttcacgaacaaaatgctatccattagccatgttcgggaaaacacgatttccccgtttgttttaggctgtctaaacaaataa

SEQ ID NO: 65442 - DNA, 1113 bp, Neisseria meningitidis; identical to SEQ ID NO: 43071

SEQ ID NO: 65443 - DNA, 156 bp, Neisseria meningitidis; identical to SEQ ID NO: 37714

SEQ ID NO: 65444 - DNA, 591 bp, Neisseria meningitidis; identical to SEQ ID NO: 43038

SEQ ID NO: 65445 - DNA, 768 bp, Neisseria meningitidis; identical to SEQ ID NO: 60018

SEQ ID NO: 65446 - DNA, 969 bp, Neisseria meningitidis; identical to SEQ ID NO: 43206

SEQ ID NO: 65447 - DNA, 333 bp, Neisseria meningitidis; identical to SEQ ID NO: 43845

SEQ ID NO: 65448 - DNA, 438 bp, Neisseria meningitidis; identical to SEQ ID NO: 59753

SEQ ID NO: 65449 - DNA, 540 bp, Neisseria meningitidis; identical to SEQ ID NO: 36581

SEQ ID NO: 65450 - DNA, 3099 bp, Neisseria meningitidis
atgaacctcgaaactaaacccatcgccgaaacgccgaatttcatcgtgctcgaccaatatgaaaaaatcgaacagtcgggcagctaccaatcggaaaaccggttggaagcggagttaatcgccgatttgcagaatcagggttacgaataccgcaaggatttgaacagccaaagcaggctgctggaaaacctgcgcgcgcagttgcagcggctgaacaatgtggcgttttcagacggcgaatgggcgcgttttttgacggaatatctggacaggccgtctgaaaacattaccgataaaacccgcaaaatccacgacgaccatatttacgatttcgcttttgatgacggccgtctgaaaaacatttatctgctggacaagaaaaaccttgcccgcaaccatgtgcaggttatcaaccagtttgagcagacgggcacgcatgcaaaccgctatgacgttaccgtgttggtaaacggcctgccgctggtgcagattgaattgaaaaagcgcggtgtggcggtgcgcgaggcattcaatcaggtgcaccgttacagcaaagagagcttcaacagcgaaaattcgctgttcaaattcctgcaaatcttcgtgatttccaacggcacggacacgcgctatttcgccaacaccaccaagcgcgacaaaaacagcttcgatttcacgatgaattgggcgcggtcggacaatcatctgattaaggatttgaaagactttaccgccacgttcctgcaaaaaagcgtattgctgagcgttttgctgcattacagcgtgttcgatgcgaatgatacgctgctgattatgcggccgtaccagattgccgccgccgaacgcattctgtggaaaatcaacagctcggcgcaggcgaagaattggagcaagccggagagcggcggctatgtttggcacaccacgggcagcggcaaaacgctgaccagctttaaggcggcgcgtctggcgacggaatcggcatttatcgacaaggttttcttcgtggtggacaggaaggatttggactatcagacgatgaaggaataccaacgtttttcgaccgacagcgtgaacggttcggaaagcacggcgggcttgaaacgcaatttggaaaaagacgacaacaaaatcatcgttaccaccatccaaaagctgaacaacctgatgaaaagtgaagataatctgccggtttaccatcagcgggttgtctttattttcgacgaatgccaccgctcgcaattcggcgaagcgcaaaaaaacctgaaaaagaaatttaaaaaattctgccagttcggttttaccggcacgccgatttttcccgaaaacgctttgggcgcggaaaccacggcgggcgtgttcgggcgggagctgcattcttatgtgattaccgatgccatccgcgatgaaaaagtattgaaattcaaagtggattacaacgatgtgcgcccgcagttcaaagccgtggaagcggaacaggacgagaagaaactgagtgccgccgaaaaccgccaagctctgttgcaccccgaacgtatccgcgaaatcacgcaatatatcctgaatcagttcaggcagaaaacgcaccggctgaatgcgggcggcaaaggctttaacgcgatgtttgccgtcagcagcgtggatgcggcgaagtgctattacgaagcgttcaaaacacaacaggcaggcagcttgcacccgctgaaagtggccactattttttcctttgcggccaacgaagagcaaaacgccgtcggtgaaattgtcgatgagacttttgaaccggaagcgatggacagcagcgcgaaagaatttttgcaggctgccatcaacgattacaacgcctgtttcaaaaccaatttcggcacggacagcaaatcctttcagaactactaccgcgatttggcaaaacgggtgaaaaatcaggaagtggatttgctgattgtggtcggcatgtttttgacgggttttgacgcgccgacgctgaacacgctgtttgtcgataaaaacctgcgctatcacggcctgatgcaggcgttttctcgcaccaaccgcatttacgatgccaccaaaaccttcggcaatattgtctgcttccgcgatttggagcaggcaaccattgatgcgattaccctgtttggcgataaaaacaccaaaaacgtggtgctggaaaaaagctacgaagaatacatgaacggctatatcgatgatcggacgggcgaagtgcggcgcggttatttggatgtggcaaaagagttgcgcgaacgtttccccgatcccgacgaaatcgaaacggaaaaagacaaaaaagattttgccaaactcttcggcgaatacctgcgggcggaaaacgtattgcagaactacgatgaatttgccgcattgcgcgagttgcagaatgtggatgcggcggacgaagatgcgatgaaggcgtttcaggaaaaatactacctgagcgatgaagacgtgcaggaaatgcggcaagtgccgatgccgtctgaaagggcggtgcaggactaccgttccgcctacaacgacatccgagactggctgagccgccaaaaagcaggcgaacagaaagaacagtcaaaaatcgattgggacgatgtggtttttgaggtggatttgctcaaatcgcaggaaatcaatttggattacatcttgcaactggttttcgagcatcacaaaaaaatcaaaggaaaagcggagctggtggaagaaatccgccgcatcatccgcgccagcatcggccaccgcgccaaagagggtctgattgtggatttcatcaacgatacggatttggacaaagtacccgacgttcccgccatactggaaaccttctacacctacgcgcaagaggtgatgcggcacgaagcggcaggattgattgccgccgaaggcctgaacgaaaccgccgccaaacgctatttaatcagctcgctcaaacgcggctatgccagcgaaaacggcacggaactgaccgaaaccctgccgaaaatgagtccgctcaacccgcaatatctgacgaagaaacaaagtgtttttcaaaagattgcggcgtttgtggagaagtttgccggaatagggaccgatatttga

SEQ ID NO: 65451 - DNA, 1584 bp, Neisseria meningitidis; identical to SEQ ID NO: 50376

SEQ ID NO: 65452 - DNA, 2172 bp, Neisseria meningitidis
atgaataccccattgttccgtctcagcctgctctcgctcacacttgcggcaggttttgcccacgcggcagaaaataatgccaaggtcgtactggataccgttactgtaaaaggcgaccgccaaggcagcaaaatccgtaccaacatcgttacgctgcaacaaaaagacgaaagcaccgcaaccgatatgcgcgaactcttaaaagaagagccttccatcgatttcggcggcggcaacggcacgtcccaattcctgacgctgcgcggcatgggtcagaactctgtcgacatcaaggtggacaacgcctattccgacagccaaatcctttaccaccaaggcagatttattgtcgatcccgctttggttaaagtcgtttccgtacaaaaaggcgcgggttctgcctctgccggtatcggcgcaaccaacggcgcgattatcgccaaaaccgtcgatgcccaagacctgctcaaaggcttggataaaaactggggcgtgcgcctcaacagcggctttgccagcaacgaaggcgtaagctacggcgccagcgtattcggaaaagagggcaacttcgacggtttgttctcttacaaccgcaacgatgaaaaagaatatgaagccggcaaaggcttccgtaatttcaacggcggcaaaaccgtaccgtacagcgcactggacaaacgcagctacctggccaaaatcggaacaaccttcggcgacggcgaccaccgcatcgtattgagccacatgaaagaccagcaccgaggcatccgtaccgtccgtgaagaatttaccgttggcgacgcaagttcacggacaaatattacacgccaagccccatcctaccgcgaaaccacacaatccaacaccaacttggcgtacaccggcaaagatttgggctttgtcgaaaaactggatgccaacgcctatgtgttggaaaagaaacgctattccgccgatgacaaagataacggctacgcaggcaatgtggtcggccctaaccacacccgaatcaccactcggggtatgaacttcaactttgacagccgccttgccgaacaaaccctgttgaaatacggtatcaactaccgccatcaggaaatcaaaccgcaagcgtttttgaacggcgaatttgagatctccggtaagaagaaagatccgaaagatcccaaaaaagaaatagataagaccgatgaagaaaaagcgaaagacaagaaagatatggatcttgtccattcctacaaactgtccaacccgaccaaaaccgataccggcgcgtatatcgaagccattcacgagattgacggctttaccctgaccggcgggctgcgttacgaccgcttcaaggtgaaaacccacgacggcaaaaccgtttcaagcagcaaccttaacccgagtttcggcgtgatttggcagccgcacgaacactggagcttcagctcaagccacaactacgccagccgcagcccgcgcctgtatgacgcgctgcaaacccacggcaaacgcggcatcatctcgattgccgacggcaccaaagccgaacgcgcgcgcaataccgaaatcggcttcaactacaacgacggcacgtttgccgccaacggcagctacttctggcagaccatcaaagacgcgcttgccaatccgcaaaaccgccacgtctctgccgccgtccgtgaagccgtcaatgccggttacatcaaaaaccacggttacgaattgggcgcgtcctaccgcaccggcggcctgactgccaaagtcggcgtaagccacagcaaaccgcgcttttacgatacccatcctaaaaaactgttgagcgcgaatcctgaatttggcgcacaagtcggccgcacttggacggcttcccttgcctaccgcttccaaaacccgaatctggaaatcggctggcgcggccgttatgttcaaaaagccgtgggttcgatattggtggcaggtcaaaaagaccgcaacggcaaattggaaaacgttgtacgcaaaggtttcggtgtgaacgatgtcttcgccaactggaaaccgctgggcaaagacacgctcaatgttaatctttcggttaacaacgtgttcaacacgttctactatccgcacagccaacgctggaccaataccctgccgggcgtgggccgcgatgtacgcttgggcgtgaactacaagttctaa

SEQ ID NO: 65453 - DNA, 3606 bp, Neisseria meningitidis
atgtttcattttgcatttccggcacaaactgccctgcgccaagcgataaccgatgcctaccgccgtaatgaaatcgaagccgtacaggatatgttgcaacgtgcacagatgagcgacgaagagcgcaacgccgcctccgagcttgcccgccgtttggttacccaagtccgcgccggccgcaccaaagccggcggcgtggatgcgctgatgcacgagttttcactctccagcgaagaaggcatcgcgctgatgtgtctggcagaagccctgctgcgtatccccgacaacgccacgcgcgaccgcctgattgccgacaagatttcagacggcaactggaaaagccatttgaacaacagcccttccctcttcgtcaacgccgccgcctggggcctgctgattaccggcaaactgaccgccacaaacgacagacaaatgagttccgcactcagccgcctgatcagcaaaggcggcgcaccgctcatccgccaaggcgtaaattacgccatgcgcctgttgggcaaacagttcgtaaccggacagaccattgaagaagccctgcaaaacggcaaagaacgcgaaaaaatgggctaccgcttctccttcgatatgttgggcgaagccgcctacacccaagccgatgccgaccgctactaccgcgactatgtcgaagccatccacgccatcggcaaagatgcggcaggacaaggcgtttacgaaggcaacggcatttccgtcaaactttccgccatccatccgcgctactcgcgcgcccaacacggccgtgtgatgggcgaactgttgccgcgcctgaaagagctgttccttttgggtaaaaaatacgatatcggtatcaacatcgatgccgaagaagccaaccgtctggagctgtctttggatttgatggaggctttggtttcagaccctgacttggctggctacaaaggtatcggtttcgttgtccaagcctaccaaaaacgttgtccgttcgttatcgactacctgattgacctagcccgccgcaacaaccaaaaactgatgatccgtttggttaaaggtgcatactgggacagcgaaatcaaatgggcgcaagtggacggcttgaacggctatccgacctacacccgcaaagtccacaccgacatctcctacctcgcctgcgcgcgcaaactgctttccgcgcaagacgcggtattcccgcaatttgccacccacaacgcctacactttgggcgcaatctaccaaatgggtaaaggcaaagattttgaacaccaatgcctgcacggtatgggcgaaaccctgtacgaccaagtcgtcggcccgcaaaacttaggccgccgcgtgcgcgtgtacgccccggtcggcacacacgaaaccctgctcgcctacttggtgcgccgcctgttggaaaacggcgcgaactcgtctttcgtcaaccaaatcgtcgatgaaaacatcagcatcgacacgctcatccgcagcccgttcgacaccatcgccgaacaaggcatccacctgcacaacgccctgccgctgccgcgtgatttgtacggaaaaggccgtctgaattcccaaggcgtcgatttcagcaacgaaaccgtgttacaacagcttcaagaacagatgaacaaagccgccgcgcaagacttccacgccgcctccatcgtcaacggcaaagcccgcgatgtcggcgaagcgcaaccgattaaaaaccctgccgaccacggagatgttgtcggtacggtcagctttgccgatgccgcgcttgcccaagaagcggttggtgcagccgttgccgcgttccccgaatggagtgcgacacctgccgccgaacgcgccgcctgcctgcgccgtttcgccgacctgctcgaacagcacacccccgcgctgatgatgcttgccgtgcgcgaagcgggcaaaacgctgaacaacgccattgccgaagtgcgcgaagccgtcgatttctgccgctactacgcaaacgaagccgaacacaccctgcctcaagacgcaaaagccgtcggcgcgattgtcgccatcagcccgtggaacttcccgctcgccatctttaccggcgaagtcgtgtccgcattggcggcaggcaacaccgttattgccaaacccgccgaacaaaccagcctgattgccggttatgccgtttccctcatgcacgaagccggcatcccgacttccgccctgcaactcgtcctcggcgcaggcgacgtgggtgcggcattgaccaacgatgcccgcatcggcggcgtgattttcacaggctcgaccgaagtggcgcgcctgatcaacaaagcccttgccaaacgcaacgacaatcccgtcctgattgccgaaaccggcggacaaaacgccatgattgtcgattccaccgcacttgccgaacaagtctgcgccgacgtattgaactccgccttcgacagcgcgggacaacgctgctccgccctgcgtatcttgtgcgtccaagaagacgttgccgaccgtatgctcgacatgatcaaaggcgcgatggacgaactcgtcgtcggcaaaccgattcagctcactaccgatgtcggccccgtcatcgatgccgaagcgcagcaaaacctgttgaaccacatcaacaaaatgaaaggcgttgccaagtcttaccacgaagtcaaaaccgccgccgatgtcgattccgaaaaatccacgttcgtccgccccatcctgtttgaattgaacaacctcaacgaactgcaacgcgaagtcttcggccccgtcctgcacgtcgtccgctaccgcgccgacgaactcgacagcgtcatcgaccaaatcaacagcaaaggctacgccctgacccacggcgtacacagccgcatcgaaggcacggtacgccacatccgcagccgcatcgaagccggcaacgtttacgtcaaccgcaacatcgtcggcgcagtcgtcggcgtacagcccttcggcggacacggtctgtccggcacaggtcccaaagcaggcggttcgttctacctgcaaaaactgacccgcatccccgaatgggttgccccgaccctgagccaaatcggacaagccgacgaagccgcgctcaaacgcctcgaagcactggttcacaaactaccgttcaacgccgaagagaaaaaagccgcagcggccgctttgggacacgcccgcatccgcaccctgcgccgtgccgaaaccgtccttaccggaccgaccggcgagcgcaacagcatctcatggcacgcgccaaaacgagtttggatacacggcggcagcacggttcaagcctttgccgcactgaccgaacttgccgcctccggcgtacaggcagtggtcgaacccgacagcccgctggcttcctacaccgccgacttggaaggtctgctgctggtcaacggcaaacccgaaaccgtcggcatcagccacgttgccgccctgtcgcctttggacagcgcgcgcaaacaggaacttgccgcccacgacggcgcactcatccgcatcctcccttcggaaaacggactcgacatcctgcaagtgtttgaagaaatctcttgcagcgtcaacaccacagccgccggcggcaacgccagcctgatggcggtcgccgactga

SEQ ID NO: 65454 - DNA, 1362 bp, Neisseria meningitidis; identical to SEQ ID NO: 50434

SEQ ID NO: 65455 - DNA, 1248 bp, Neisseria meningitidis
atgttgaaacaaacgacacttttggcagcttgtaccgccgttgccgctctgttgggcggttgcgccacccaacagcctgctcctgtcattgcaggcaattcaggtatgcaggacgcgccgtcttcggcagtttacaacaacccctatggagcaacgccgtacagcccggctcctgccggcgatgcgccttatgtgccgccggtgcaaagcgcgccggtttatacgcctcctgcttatgttccgccgtctgcacctgccgtttcgggtacatacgttccttcttacgcacccgtcgacatcaacgcggcgacgcatactattgtgcgcggcgacacggtgtacaacatttccaaacgctaccatatctctcaagacgatttccgtgcgtggaacggcatgaccgacaatacgttgagcatcggtcagattgttaaagtcaaaccggcaggatatgccgcaccgaaagccgcagccgtaaaaagcaggcccgccgtaccggctgccgcgcaaccgctcgtacagtccgcacccgtcgacatcaacgcggcgacgcatactattgtgcgcggcgacacggtgtacaacatttccaaacgctaccatatctctcaagacgatttccgtgcgtggaacggcatgaccgacaatatgttgagcatcggtcagattgttaaagtcaaaccggcaggatatgccgcaccgaaaaccgcagccgtagaaagcaggcccgccgtaccggctgccgtgcaaacccctgtgaaacccgccgcgcaaccgcctgtgcagtccgcgccgcaacctgccgcgcccgctgcggaaaataaagcggttcccgcgcccgccccgcaatctcctgccgcttcgccttccggcacgcgttcggtcggcggcattgtttggcagcgtccgacgcaaggtaaagtggttgccgatttcggcggcaacaacaagggtgtcgatattgccggtaatgcgggacagcccgttttggcggcggctgacggcaaagtggtttatgcaggttccggtttgaggggatacggcaatctggtcatcatccagcataattcttccttcctgaccgcatacgggcacaaccaaaaattgctggtcggcgaaggccagcaggtcaaacgcgggcagcaggtcgctttgatgggcaataccgacgcttccagaacgcagcttcatttcgaggtgcggcaaaacggcaaaccggttaacccgaacagctatatcgcgttctga

SEQ ID NO: 65456 - DNA, 1008 bp, Neisseria meningitidis; identical to SEQ ID NO: 50789

SEQ ID NO: 65457 - DNA, 705 bp, Neisseria meningitidis
atgacggtgttgcaagaacgttattgtgaggtgtccgaccgtatcggaaaattggttctgcaggtgggcagggatccgcattccgtcagcctgattgccgtcggtaagactttcccttcagacggcatccgcgaagtttacgccgccggacagcgtgatttcggcgagaactatattcaggagtggtacggcaaaacggaagagttggcggatttgaccgacatcgtgtggcacgtcatcggcgatgtgcagtccaacaaaaccaagtttgtcgccgaacgcgcgcattgggtgcataccatatgccgtctgaaaaccgctgtccggctgagcgggcaacgtccttcctcaatgccgcctttgcaggtgtgtatcgaggtgaacattgcgggcgaggcggcgaaacacggtgtcgcgcccgaagaagcggtcgtgcttgcggtcgaagtggcgaagttgccgaatatcgtcgtacgcggactgatgtgtgttgccaaagccaacagcagtgaaacggagttgaaggtgcaatttcaaacgatgcggaaactgcttgccgacctcaatacggctggcgttaaggcggatgtgctgtctatggggatgtcggacgatatgcctgccgccattgcgtgcggtgcaacacatgtccgtatcggcagtgcgattttcgggaaaaggagcagattggaatgcgtacaataa

SEQ ID NO: 65458 - DNA, 966 bp, Neisseria meningitidis; identical to SEQ ID NO: 43159

SEQ ID NO: 65459 - DNA, 882 bp, Neisseria meningitidis
atgccgtctgaaaacaccctcttcccactgcccgacaccctgttgcgccccatggtggaacaagccttgagcgaagatttgggcaggcgcggcgatattacgtccgccgccgtcatcgcccccgacaaaaccgccaaactcttcctcgtcagccgcgaagacggtgttatcgccggtatggacttggcgcgcctcgcctttcagacgatggatccgtccgtccgcttccaagccgaaatccgagacgggcaagtcgtccgcgcaggtcagacgcttgccgccgtcgaaggcaacgcccgcgcgctgctcgccgccgaacgcaccgcgctcaactacctcacgcacttgagcggcatctccaccgccaccgcgcgtgccgttgccgaagtcgccaaatacggtacagacatcgtgtgcagccgcaaaaccatccccctgctgcgcgtcctgcaaaaatacgccgtcagggcgggcggcggcgtgaaccaccgcatgggtttggacgatgccgtactcatcaaagacaaccacctcgcctattgcgacagcatcgcccaagccgttcggcaggcaaaacaggcggtcggaccgttgacctgcgtggaaatcgaagtggatacgttggcacaactggacgaagccatcgcagcgggcgcggaacggattttgctggacaacatggacgacgaaaccctgaaagaagcggcaaaccgctgccacacgcaaaccgcccacccccacaccgtctattgcgaagcatcgggcggcatcggcttcgaccgcctgaagcgcgtggcgcaaaccggcgtggacggcatcgccctcggctatctgacccacagcagccgctcgttggacataggtttggatttcttggcatga

SEQ ID NO: 65460 - DNA, 435 bp, Neisseria meningitidis; identical to SEQ ID NO: 45690

SEQ ID NO: 65461 - DNA, 1332 bp, Neisseria meningitidis
atgaacacaacatcccaatttaccagtaatttctggaatatatatattgcagttattgtcttactgagctttatcgctttggcttggctgctgctgtctcaaaatgttgtcaaacgtccgaagaagggcgaagaagtacaaactacgggtcatgagtgggacggcattgccgaatacgacaatccgctgccccgctggtggttttggctgtgtgttttgacgtggctgttcggtatcggttatctggttatgtatccgggtgtcggcgactacaaaggtctgctgaaatggaccagccataaccaatatgaaaaagaggtcaaaaaagccgatgagcaatacggcaaactgtatgccaagtttgcggatatgccgattgaaaaagtggcaaaagaccctcaagccaagcaaatcgcccaaaacctgtttaacacttattgtatccagtgccacggctctgatgctaaaggctctaaaggttttccgaatctgaccgatagcgattggttgtggggcggtgatcccgataaaatccacgagaccatcgaaaaaggccgtgttgcgactatgcctgcctggggtcctgctttgggcgaagaaggcgtgaaagacgttgcccattatgtgatgtccctttcaaaacccgaaggtcagtatgatgaggaacgtgccgcgcgcggacaagccttgttcagcggtccgcctgccaactgtttcacttgccacggcgataagggacaaggtatccaaggtttgggtccgaacctgactgatgacgtgtggttgtggggcggtacgcaaaaatccattatcgaaaccattaccaacggtcgcagcagccaaatgcccgcttggggacatttcttggataaagacaaactgcatattatgactgcttatgtatggggtctttccgataaagacggtaaagctccggtgaaaaaagccgagcctgcaccgactcccgcaccggcggcagaacccgcagcctctgctcctgcagaagcagcacaagccgcgtccgaagccaaacctgccgcagcagaacctaaagccgaggaaacagccgcacctgctgccaaagcggacggcaaataggtttatgaaaccgtttgtgccgcctgccatggcaatgcgattccgggtattccccatgtaggcatcaaagccgattgggccgaccgcatcaaaaaaggcaaggacacgttgcacaaacacgcgatcgaaggtttcaatacgatgcccgcaaaaggcggtcgcggcgatttgagcgatgatgaggttaaagctgcggttgactatatggtcaaccagtcaggcggcaaattctaa

SEQ ID NO: 65462 - DNA, 576 bp, Neisseria meningitidis
ttgctatgcactcaaacagatggggataacgcgcaaaaaaagaccaccacttacaaagaacaagacccggccaaagtaacgcattatttgacacagccggccgaattttccgactaccaacgtgtttatttggatgaaacaggatttgaccgctacctgttccgtccctatacccgcagcctgaaagggcaaatagtaaaagcgcagataagtggaaaaagataccaacgcttatctttggtgtccgcacaagtcggcaaccggctgattgctccgatggtttatcaaaatacgatgatcggagtcttttttgaagcgtggtttcagcaatgcctactgcccgcattgactcaaaaatcggtgattattttagataatgcgcgatttcaccgtatgggtgtcttacgggaaatggcggaaaaattgggacataaggtattgcctcttgcaccttatttacctgagctcaacccgattgagaaagtgtgggcgaatattaagcggtatctgagaaccgttttgtctgattacgcccgatttgacgatgcactactgtcctattttgattttaattga

SEQ ID NO: 65463 - DNA, 816 bp, Neisseria meningitidis; identical to SEQ ID NO: 38138

SEQ ID NO: 65464 - DNA, 1158 bp, Neisseria meningitidis
atgaaattcgccacgaaagccattcattccagctacgattgcgacgaacacaaccgcgcgctgatgccgccgatttatcaaaacagtatgttcgcgttgcacgagattggcgaaaatgtgccttaccgctattcgcgcctgagcaacccgacccgtcaggtattggaagataccgttgccgatttggaacacggtgcggccggctttgcgttttccagcggtatggcggggattgatgccgtgtggcgtactttcctgcgcccgggcgatactattgttgccgtcgccgatatttacggcggcgcgtatgatttattggtcgatgtttatcaaaaatggggggtgaacgttgtttttgccgatttgggcaatccggataatctggacgaactgctcaaagcgcacaatgtcaaattggtttggctggaaacgccgtccaatccgcttttacgcttggtagacatcaaagcgcttgccgcgaaagccaaagcagctggtgcgctggtcggtattgacaacacctttgccacgccgtatctgcaacagccgttggatatgggttgcgattttgtgttccattccgctaccaaatatttgtgcggccattccgacgtactgatgggcgtagtcgttgccaaaaccaaagagctggctcagcctttgcacgacatgatggtgcataccggcgcgattgcaggcccgatggactgctggctggtgctgcgcggtatcaaaacgctggctctgcgcatgaacgcccattgccaaaacgcactcgaaatcgcacgccgtttggaagcccatcccgccattgaaaaagtgttctatcccggcctgccgtcgcacgaacattacgaactcgcccaagcacaaatgcccaaaggcatcggcggcgtggttacggtttatctcaaaaacgacacgcgtgaagcagccaatagtgtgattaaaaacatgaaactggtcaaaatggcttccagcctcggcggcgtggaaagcttggtcaaccattgctattcccagtcccacagcggcgtgccgcatgatgtgaaaatggaaatgggcatcagggttggcctgctgcgtttctctgtcggtatcgaagatgtagatgatatttggaatgatatttccgccgcactggatacgactgtataa

SEQ ID NO: 65465 - DNA, 459 bp, Neisseria meningitidis
atggaaaccccgaaactcagtgtcgaagccattgaaaaaggtacggttatcgaccatattcccgccggcagggggctgaccatcctgcgccagttcaaacttttgcactacggcaacgcggtaaccgtgggcttcaacctgcccagcaaaacccaaggcagcaaagacatcatcaaaatcaaaggcgtgtgcttggacgacaaagccgccgaccgcctcgccctgttcgcccccgaagcggtggtcaataccatcgacaatttcaaggtcgtgcagaagcggcatttgaacctgcccgacgaaatcgccgaagtgttccgctgtccgaacacgaattgcgccggccacggcgagccggtcaaaagccggttttatgttaaaaaacacaacgggcagacgcggctgaaatgccattactgcgaaaaaacctacagccgggattcggtggcggaagcctga

SEQ ID NO: 65466 - DNA, 807 bp, Neisseria meningitidis
atgccgacagttttcatctttttgacggcggtttacgcaggattgggtgcatttgcatggcactgccaacagcaggggcgcggtcgggattacccgtggaagagggaattgccggttttgggcgcggcattgaccgtccacggcgcggcactgctgatgccggtcattcaagacaaaatcatcattatgggcttcgggtattccggcagcctgattgtttggatgatgctgtttatttattttgccggcagcttcttttatccgctgcgcggagtgcagttgctgctgtatccttgcgccgcactgatgctgctgtcaggtttggtttttcctggaaaattctcgggatatgaaattaccgactttccctttatgctgcatatcggaacttcgctgctcgcatacgggctgttcggcatcgcaacattattgtccgttttgaccctgctgctgaatcggagtctgcaccgcaggagcttctccaagctcgcaggattcctgccgtcgctgctcagtttggaaaaactcatgttccaggccatgtgggcaggtttcatcctgctgacctattccgtcgtcagcggaacattttttgccgaagccgtattcggcaaacccatgacctttacccataaaaccgtattcggcatattgtcatggctgatttacggcggactgctgctcaagcacagcatgaccgcatggcgcggcaaaaaagccgccgtgtggaccatcatcggatttgtcagccttatgattgcctatatgggcagcaagttcgtattggaaatcattctgaaaagataa

SEQ ID NO: 65467 - DNA, 780 bp, Neisseria meningitidis; identical to SEQ ID NO: 54674

SEQ ID NO: 65468 - DNA, 552 bp, Neisseria meningitidis; identical to SEQ ID NO: 37494

SEQ ID NO: 65469 - DNA, 114 bp, Neisseria meningitidis; identical to SEQ ID NO: 42949

SEQ ID NO: 65470 - DNA, 486 bp, Neisseria meningitidis; identical to SEQ ID NO: 50357

SEQ ID NO: 65471 - DNA, 1227 bp, Neisseria meningitidis; identical to SEQ ID NO: 42287

SEQ ID NO: 65472 - DNA, 558 bp, Neisseria meningitidis; identical to SEQ ID NO: 43551

SEQ ID NO: 65473 - DNA, 1290 bp, Neisseria meningitidis; identical to SEQ ID NO: 50425

SEQ ID NO: 65474 - DNA, 276 bp, Neisseria meningitidis; identical to SEQ ID NO: 45473

SEQ ID NO: 65475 - DNA, 1194 bp, Neisseria meningitidis
atgttcttcaagcacatcgaagccgcccccgccgatccgattctcggtttaggcgaagcgttcaaagccgaaacccgccccgaaaaagtcaacctcggcatcggcgtttataaagacgcatccggcgcgacacccctcgtcaaagccgtcaaagaagccgaaaaacgcctgttggaaagcgaaaccaccaaaaactacctcaccatcgacggcgttgccgactacaacgcgcaaacccaaatcctgctgttcggcaaagaccacgaaatcatcgccagccgtcgcgccaaaacagcgcaaagcctcggcggtacgggcgcattgcgtattgcggccgagtttgccaaacgccagttgaacgcgcaaaccatctggatttccaatccgacttggcccaaccacaacgccatcgccaaagcggtcggtatccaagacaaaccttatcgttactatgatgccgccaaacacggtttggattgggacggcatgattgaggacttgagccaagcgcaaaaaggcgacatcgtcctgctgcacggctgctgccacaaccctaccggcatcgaccctacgcccgaacaatgggaaactttggcaaaactttctgccgaaaaaggctggttgccgctgtttgactttgcctaccaaggcttcggcaacggtctggaagaagatgcctacggcttgcgcgtgttcttgaaacacaatacagaattgctgattgccagctcttattccaaaaacttcggtatgtacaacgagcgcgtcggcgcgttcactttggtggccgaagacgaagaaacagcagcccgcgcccacagccaagtcaaaaccatcatccgtaccttgtattccaacccggcttcacacggtgcgaacaccattgcgctggtgttgaaaaatgatgatttgaaagcacaatggattgccgaactcgatgaaatgcgcggccgcatcaaagccatgcgccaaaaatttgtcgagttgctcaaagccaaaggtgcaagccaaaactttgatttcattatcgaacaaaacggtatgttctctttcagcggcttgactcccgaacaagtcgaccgcctgaaaaacgagtttgccatttatgccgtccgttccggccgcatcaacgtcgccggcattaccgacaacaacatcgattatctgtgcgaaagcatcgtgaaagtactgtaa

SEQ ID NO: 65476 - DNA, 789 bp, Neisseria meningitidis
atggaagatttatatataatactcgctttgggtttggttgcgatgattgccggatttatcgatgcgattgcgggcgggggtggtttgattacgctgcccgcactcttgttggcaggtattcctcccgtgtcggcaattgccaccaacaagctgcaagcagccgctgctacgttttcagctacggtttcttttgcacgcaaaggtttgattgattggaagaaaggtctcccgattgccgcagcatcgtttgtaggcggcgtggccggtgcattatcggtcagcttggtttccaaagatattctgctggcggtcgtgccggttttgttgatatttgtcgcactgtattttgtgttttcgcccaagctcgacggcagtaaggaaggcaaagccagaatgtctttttttctgttcgggctgacggtcgcatcgcttttgggtttttacgacggtgtgttcggaccgggtgtcggctcgttttttctgattgcctttattgttttgctcggctgcaagctgttgaacgcgatgtcttacaccaaattggcgaacgttgcctgcaatcttggttcgctatcggtattcctgctgcacggttcgattattttcccgattgcggcaacgatggcggtcggtgcgtttgtcggtgcgaatttaggtgcgagatttgccgtctgcttcggttcgaagctgattaagccgctgctgattgtcatcagcatttcgatggctgtgaaattgttgatagacgagagaaatccgctgtatcagatgattgtttcgatgttttaa

SEQ ID NO: 65477 - DNA, 654 bp, Neisseria meningitidis
atgaagataacgcactgcaaattaaagaaaaaagtacagaaagaactgctccgtttttttgtactcgaagttaccgcccattctgccgccgatattttgggtatccatcccaattcggcagcactgttctaccgtaaaatccgcacggttatcaaccatcatttggccttggctgccgatgaggtttttgagggccctgtcgagccggacgaaagcgatttcggcggacggcgtaaaggcagacgtggtcgcggtgcggcaggaaaagtggttgtcttcggcattctgaaacgcaacggacggggctataccgttgtcgtagataatgccaagtctgaaacgttactccctgtcatcaagaagaaaatcatgccggacagtattgtttataccgatagtctgagcagctgcgacaagttggacgtgagcggttttatccattaccgcatcaaccattccaaggaatttgcagaccgtcagaaccacattaacggcattgagaacttttggaatcaggcaaaacgcgtcttgcgaaaatacaacggaatcgatcgtaaatctttcccgctgttcttgaaagaatgcgaatttcgatttaacttcggcacaccgtctcaacagcttaaaatcctgcgggattggtgtgggatttag

SEQ ID NO: 65478 - DNA, 1122 bp, Neisseria meningitidis; identical to SEQ ID NO: 59052

SEQ ID NO: 65479 - DNA, 534 bp, Neisseria meningitidis
atgtttccccccgacaaaccccttttcctctgtctcagcgcactactcctcgcctcatgcggcacgacctccggcaaacaccgtcaaccgaaacccaaacagacagtccggcaaatccaagccgtccgcatcagccacatcgaccgcacacaaggttcgcaggaactcatgctccacagcctcggactcatcggcacgccctacaaatggggcggcagcagcaccgcaaccggcttcgattgcagcggcatgattcaattcgtttacaaaaacgccctcaacgtcaagctgccgcgcaccgcccgcgacatggcggcggcaagccgcaaaattcccgacagccgcctcaaggccggcgacctcgtattcttcaacaccggcggcgcacaccgctactcacacgtcggactctacatcggcaacggcgaattcatccatgcccccagcagcggcaaaaccatcaaaaccgaaaaactctccacaccgttttacgccaaaaactacctcggcgcacatactttttttacagaatga

SEQ ID NO: 65480 - DNA, 984 bp, Neisseria meningitidis
gtgctgctgacgctgcatggaacggataagttctgcatcgttaataatttccataccaaccgtaatacggcgtataaggctttgaaagatgcctgtaacaacctttttgaacgccaattcagttttatcgaaaaaacaccaaaaggggaaaaggtagtacggacaaggtgggtatctcaagtcgcctatattgaacaacaggcaacggtagagttagtttttgcaccaaatgttgcccctttgattacgatgctagaaaaaaacttcacaagctacgagcttgatcaggtctcatcgttgagcagtaaatacgcggtgcggctctacgaaattattatttcatggcgtgcagccggtaagacaccgatgttcagtacaatggagttgcgcgaacgtttgggtatgatgcctgacgagtatcaaaaaatggagctattcaaacgtaaggttttggatttcgccgtcaagcagatcaatgataaaacggatatttccattacctacgagcagcataaagaaggacgaaaaattgtaggttttacattctcaatcctacataaaatagggtcgaaagacatccctcttgaaaatcaatcggaactttttgccggaatgactgatttggaagccggaacgatacgggtcagggcggaagcatatatcgcttcgctcattgcaaaaggtcagaacgtgactaaagcccataggctgaatattctgaaaaaagccgtagaggaacgttggggatttgaagatgtggctaaagataatggggccaaaaatcctgaaaacaaaaatgcaaaagtcgttttaaacgaatgggaaaagatttctaatggcacacgttttaaggacaaggatggaacaatttgggttaaagattcaggtatgcttaggactgaagggacaaacaggtggatagccgattctcagattgccaaattatttcctatgttaactgtgatggttgaggaaggtatttaa

SEQ ID NO: 65481 - DNA, 1134 bp, Neisseria meningitidis
atgagcacccccgccctcctcgtcctcgctgacggcagcgtatttcacggcacatcaatcggttacgaaggttcgacttccggcgaagtcgtgttcaacacttcgatgaccggctatcaggaaatcctgaccgacccgtcctactgcaaacaaatcgttaccctcacctacccacacatcggcaacaccggcaccaacgccgaagatgaagaaagccgcagcgtttatgccgccggcctgattatccgcgacctgccgctcttgcacagcaacttccgcgcctccgaaagcctgcacgactatctggtacgcaacaaaaccgtcgccatcgccgacatcgatacccgccgcctgaccacgctgttgcgcgaaaaaggcgcgcaaggcggcgcgattctgaccggcgcggatgccacaatcgaaaaagcgcaagaactcatcgccgcgttcggcagtatggtcggcaaagacttggcaaaagaagtttcctgcacggaaacttacgaatggacggaaggcgaatgggcattgggcaagggtttcgttacccctgacgaacagccttaccacgtcgtcgcctacgatttcggcgtgaaaaccaacatcctgcgtatgctcgcctcgcgcggctgccgcctgaccgtcgtccccgcccaaacgagcgcacaagacgtgttggcactcaatcccgacggcgtgttcctgtccaacggccccggcgaccccgaaccttgcacttacgccatcgaagccgtgcaaaaactgatggaaagcggcaaaccgattttcggcatctgcttgggacaccagctcatcagcctcgctatcggcgcgaaaaccctgaaaatgcgcttcagccaccacggtgcgaaccaccctgtgcaagatttggacagcggcaaagtcgtcatcaccagccaaaaccacggttttgccgttgatgccgacaccctgcccgctaacgcacgcattacccacaaatccttgtttgacaacactttgcaaggcatcgagctgaccgacaaacctgtgttctgcttccaaggccaccccgaagccagccccggtccgcaagatgtcggctatttgtttgacaaattcattggcaatatgaaagcggcaaaacgggcataa

SEQ ID NO: 65482 - DNA, 258 bp, Neisseria meningitidis; identical to SEQ ID NO: 39854

SEQ ID NO: 65483 - DNA, 561 bp, Neisseria meningitidis; identical to SEQ ID NO: 43439

SEQ ID NO: 65484 - DNA, 342 bp, Neisseria meningitidis; identical to SEQ ID NO: 43005

SEQ ID NO: 65485 - DNA, 441 bp, Neisseria meningitidis; identical to SEQ ID NO: 42705

SEQ ID NO: 65486 - DNA, 1407 bp, Neisseria meningitidis; identical to SEQ ID NO: 59380

SEQ ID NO: 65487 - DNA, 1857 bp, Neisseria meningitidis
atgttgaacaaaatcttttcctggttcgaatcccgaatcgacccctatcccgaagccgccccgaaaacgccagaaaaaggcttgtggcggtttgtctggagcagcatggccggagtgcggaaatggatagccgccctggctgcgctgaccgccggcatcggcattatggaagccctggtttttcaatttatgggcaaaatcgtggagtggctcggcaaatacgcgcccgccgaactgtttgccgaaaaaggttgggaactggcggcaatggcggcgatgatggtattttcggttgcgtgggcgtttgccgcgtccaacgtgcgcctgcaaacccttcagggcgtgttccctatgcgcctgcgctggaacttccaccgcctgatgctgaaccaaagcctcggtttttatcaggacgaatttgccggacgcgtgtccgccaaagtcatgcagaccgcgctggcgttgcgcgacgcggtgatgacggttgccgatatggtcgtttatgtgtcggtgtatttcattacctccggcgtgattctcgcctcgctcgactcatggctgctgctgccctttatcggctggattgtcggtttcgcttcggtgatgcgcctgctgattcccaaattggggcaaaccgccgcatggcaggcggatgcccgctcgatgatgaccggccgcattaccgatgcctattccaatatcgccaccgtcaaactcttctcccacggcgcgcgtgaagccgcctatgccaagcagtcgatggaagaatttatggttacggtgcgcgcccaaatgcggctggcgacgctgctgcattcgtgcagcttcatcgtcaacacctccctgaccctctccaccgccgcactgggcatctggctttggcacaacggacaggtcggcgtgggcgcggtcgccaccgccaccgcgatggcgttgcgcgtcaacgggctgtcgcaatacattatgtgggaatccgcgcggctgtttgaaaacatcggcaccgtcggcgacggcatggcaaccctgtccaaaccgcacaccatcctcgacaagccgaacgccctgccgctgaaagtgtcgcaaggcgaaatcaagttcgaacacgtcgatttctcctacgaagcgggcaaaccgctgctcaacggcttcaacctcaccatccgcccgggcgaaaaagtcggcttgatcggacgcagcggcgcgggcaaatccaccatcgtcaacctgcttttgcgcttctacgaaccgcaaagcggcacggtttcgatcgacgggcaggacataagcggcgttacccaagaatctttacgcgcccaaatcggtttggtcacgcaagatacctcgctgctgcaccgttccgtgcgcgacaacattatttacggccgccccgacgcgaccgatgccgaaatggtttccgccgccgaacgcgccgaagccgccggcttcatccccgaactttccgatgccaaagggcggcgcggctatgacgcgcacgtcggcgaacgcggcgtgaaactctccggcgggcaacgccagcgcatcgccattgcccgcgtgatgctcaaagacgcgcccatcctgctgctcgacgaagccaccagcgcgctcgattccgaagtcgaagccgccatccaggaaagcctcgacaaaatgatggacggcaaaaccgtcatcgccatcgcccaccgcctctccaccatcgccgcaatggacaggctcgtcgtcctcgacaaaggccgcatcatcgaagaaggcacacacgccgaactcctcgaaaaacgcgggctttacgccaaactctgggcgcaccagagcggcggcttcctcaacgaacacgtcgagtggcagcacgactga

SEQ ID NO: 65488 - DNA, 957 bp, Neisseria meningitidis
atgattttaacaccgccggacacgccctttttcctccgcaacggcaatgccgacacgattgccgccaaattcctgcaacgccccgcacccacataccgccgcgagctgcttcccgacagcacgggtaaaaccaaagtcgcctacgatttttcagacggcatttcgcccgatgcgccgctggtcgtgctgtttcacggtttggaaggaagcagccgcagccattacgcggtcgaactgatgctcgcggtacgcagccgcggttggcacggcgcagtcgtccatttccgcagctgcggcggcattgccaacaccgctccggtgttctaccacttgggcgataccgccgaaatcgcctttactttggacacgcttgccgcgcgttaccgtgaaatatacgccgtcggcgtatcgctgggcggcaacgcgctggcaaaatatttgggcgaacggggcgaaaacgcgctgccgcaagccgctgccgccgtatccgcccccgtcgatgcagaggcggcaggcagacgcttcgacagcggcatcacgcggctgctctacacgcgctacttcctccgcaccctgatacccaaagcacggtcgctccacggttttcagacggcatttgccgcagggtgcaaaacactgggcgagtttgacgaccgcttcaccgcaccgctgcacggctttgccgaccggcacgactactaccgccaaacttcctgcaaaccgctgctcaaacacgttgccaaaccgctgctcctgctcaatgccgccaacgaccccttcctgccgcccgaagcgctgccgacaccggacgaagtgtccgaagccgttaccctgttccagccggcacacggcggacacgccggctttgtcggcagcaccggcggcaggctgcacctgcaatggctgccgcagaccgtcctgtcctatttcgacagcttccgcacaaacaggcggtaa

SEQ ID NO: 65489 - DNA, 921 bp, Neisseria meningitidis; identical to SEQ ID NO: 51551

SEQ ID NO: 65490 - DNA, 2940 bp, Neisseria meningitidis; identical to SEQ ID NO: 43390

SEQ ID NO: 65491 - DNA, 1059 bp, Neisseria meningitidis; identical to SEQ ID NO: 52049

SEQ ID NO: 65492 - DNA, 510 bp, Neisseria meningitidis; identical to SEQ ID NO: 40753

SEQ ID NO: 65493 - DNA, 303 bp, Neisseria meningitidis; identical to SEQ ID NO: 37201

SEQ ID NO: 65494 - DNA, 2064 bp, Neisseria meningitidis
atgatgacccaaacccttttaatcgaacttctcactgaagaactcccgccaaaagccctgaataatctgggcaaccattttgccgcttccgttgccgaaggcttggaaaaagcgcaactgatagccggcgcggcagaatttaccgcctacgcttctccgcgccgtttggcggttcaagtcaaaaacgtcaaagccgttcaggcagatcagaaaatcgtgaaaaaaggccctgccgtggcgaatgccgtaaaagacggtgcgccgaccaaggctttggaaggtttcgcacgcggtgcaggggcgaaaatcgaagacttgaccatcgtccacgacggcaagcaggacgtgtacgcctacgaatacgtccaaaccggcaaaccgttgggcgagcttttggaagacattatcaatgccgcagtgaaaaaactgccgattccgaaagtgatgcgttggggcagcagcacgtttaccttcgtgcgccccgtccacgggctgattgtgctgcacggcggcgacatcgtaaacgtcagcgttttgggtctgcaaagcggcaatcaaaccttgggacaccgcttcttgtccgacggagaaatcaccattgaaaacgccgacagctacgccgaacaaatgcgcgggcaaggcaaagtcgtcgcttcgtttgccgagcgcaaagccgcgattcagacggcattggaagggcaggcgcgccgtctgaacgcgaccgttgccgccgatgaagcattgttggacaaagtaaccgcgctggtcgaataccccgttgttttggaagccggttttgaggaacacttcctcgccgtgccgcaggaatgcctgattctgacgatgcagcaaaaccaaaaatacttcccgctgctcgatcaaaacggcaagctgatgaaccgcttcctgctggtctccaacctgcaaaccgcagacccgtcgcacatcatccaaggcaacgaacgcgttttgcgcgcgcgcctgtctgatgccgagttcttctacaaacaagaccaaaaggcgactttggaaagccgcctgcccaagctggcaaacgtggtttatcacaacaaaatcggttcgcaagccgaacgcatcgaacgcctgcaaagcattgccgcccacatcgctaaagcgttgggcgcagatgccgccgccgccgaacgcgccgcgcgtctggcaaaagccgacttggtaaccgaaatggtcggcgagttccctgaattgcaaggcaccatgggcaaatactatgcccgtttggacggcgaaaccgaagaaatcgccgaagccatcgagcaacactaccaaccgcgtttcgccggcgacaatctgccgaatggcaaagttgccaccgccgtggcactggcggacaaactagaaaccttggtcggcatttggggcattggtctgattccgaccggcgacaaagacccctacgccctgcgccgcgccgccttgggtattttgcggatgctgatgcagtacggtttggacgtgaacgaactgattcagacggcattcgacagcttccccaaaggtttgctcaacgaaaaaacgccgtctgaaaccgccgactttatgcaggcgcgccttgccgtgttgctgcaaaacgattatccgcaagacatcgttgccgccgtattggcgaaacagccgcgccgtttggacgacgtagtggcgaaactgcaagccgttgccgcgttcaaacaactgcccgaagccgccgcgctcgccgccgccaacaaacgcgtgcaaaatctgctgaaaaaagccgatgccgagttgggcgcggttaacgaaagcctgctgcaacaggacgaagaaaaagccctctttgccgccgcgcaaggcttgcagccgaaaatcgccgccgccgtcgccgaaggcaatttccaaaccgccttgtccgaactggcttccgtcaagccgcaagtcgatgccttctttgacggcgtgatggtgatggcggaagatgccgccgtaaaacaaaaccgtttgaacctgttgaaccgtttggcagagcagatgaacgcggtagccgacatcgcgcttttgggcgagtaa

SEQ ID NO: 65495 - DNA, 411 bp, Neisseria meningitidis
atgcctgtctatttccgcatcccaagcaggaaacgcctgcacaaaatgaaccgccgtcagcataaaaagctgcatttgggcgagtttcaaacattgattttcggcgttcaaggcagtttgcaccaagctgaggacgatgccgaagcgttcggccgctttatggacgagctgattgcgtatcttgcggcaaacggcttggaaatggcgggcgggggcgattgcggcgatttttcgtgcctgtttcaaaaatccggtgcccgaagcttgggcgaaaccgagaaaaaagccattatctcttggctggcaggtcgcgaagatgtcgccactttgcacgccaccccgctggttgacggtttttacggggatgacggctgggaaagttacagcgaaacctataaacaggcagattaa

SEQ ID NO: 65496 - DNA, 1143 bp, Neisseria meningitidis
atgataaaacttactgcacaacaaatatttgataagttgctggatgaagaaaaaatcttatcggccaatggtcaaattagatttttcttaggcgatgtggatattatcgtcaaacaaaaagatgttgtcggcaacatcattcaggaatggctcggcggatgattgagaaaaagggaaattgaatttgatgtttcaaccaatacccaaatgcctcccgatttctttttaaataaaaaagaccgcagcagagaattgttggaagtaaaggcgttcaaccgaaatgccggcccgggttttgatattgcagattttaaaatgtattctgataaaatcattcataagccctatatgctggatgtagactatttaatattcggttacgatatggacgacaacggcaatgtaaccatcaaggatttatggcttaaaaaagtatggcaaattacgagaagcatggatgggtgggcaattaatcttcaagtcaaaaaaggcgtggtgcataaaatccgcctgggtgtttggtacagcataaataaaaagaatatgcctatgtttgaatgcttggaagattttgtttccgcaagggaaattgaatttgatgtttcaaccaatacccaaatgcctcccgatttctttttaaataaaaaagaccgcagcagagaattgttggaagtaaaggcgttcaaccgaaatgccggcccgggttttgatattgcagattttaaaatgtattctgataaaatcattcataagccctatatgctggatgtagactatttaatattcggttacgatatggacgacaacggcaatgtaaccatcaaggatttatggcttaaaaaagtatggcaaattacgagaagcatggatgggtgggcaattaatcttcaagtcaaaaaaggcgtggtgcataaaatccgcctgggtgtttggtacagcataaataaaaagaatatgcctatgtttgaatgcttggaagattttgtttccgcaattgaagaaaccgtttatcaaaacccggcaacacggcataacgcatccttatggaaaaagaaatttgaggaagcctataaaaaacactacaaccgatcgatttccatacctcgttggcacgaaattgcacacaaatacaaaaagaaataa

SEQ ID NO: 65497 - DNA, 882 bp, Neisseria meningitidis; identical to SEQ ID NO: 60099

SEQ ID NO: 65498 - DNA, 1218 bp, Neisseria meningitidis; identical to SEQ ID NO: 44261

SEQ ID NO: 65499 - DNA, 864 bp, Neisseria meningitidis; identical to SEQ ID NO: 50664

SEQ ID NO: 65500 - DNA, 912 bp, Neisseria meningitidis; identical to SEQ ID NO: 62675

SEQ ID NO: 65501 - DNA, 2586 bp, Neisseria meningitidis; identical to SEQ ID NO: 43570

SEQ ID NO: 65502 - DNA, 201 bp, Neisseria meningitidis; identical to SEQ ID NO: 50893

SEQ ID NO: 65503 - DNA, 534 bp, Neisseria meningitidis
atgggtatttacgattttcaaatgaaagatgcagaaggcaatgcggttgatttgtcaggctatcgcgacaaggttctgctgattgtcaacacggcaacgcgttgcggtctgaccccgcaatacgaggctttgcagaagctgtatgcacaatataccgcagaaggcttggagattttggattttccgtgcaaccagttccgcgaacaggctcccgaaagcagcggagaaattgcccaagtgtgtatgatgaagtttggcacgaagtttaagattttcgacaaaatcgaagtcaatggagcaaataccgcgcccttgtatgcctacctgaaatccgtcaaaccgcaagataaaggcaatcatctgtttaaagatttcgtgttgaagctcgcagctttgggagagaagcgcgacgaaggcgacatcaaatggaactttaccaaattcctcgtcaaccgcgacggcgaagtggtcgagcgttttgcgcctagtgttacgcccgaagaaatcgaagccgatattcgagcattgctgtaa

SEQ ID NO: 65504 - DNA, 342 bp, Neisseria meningitidis; identical to SEQ ID NO: 37907

SEQ ID NO: 65505 - DNA, 1596 bp, Neisseria meningitidis; identical to SEQ ID NO: 42222

SEQ ID NO: 65506 - DNA, 1005 bp, Neisseria meningitidis
atgagcattaaagtagcgattaacggtttcggccgcatcggccgcctcgcattgcgtcaaattgaaaaagcccacgacatcgaagtcgtcgccgtcaacgacctgacccctgccgaaatgctgctgcaccttttcaaatacgacagcacacaaggccgtttccaaggtactgccgaattaaaagacgatgccatcgtggtaaacggcaaagagatcaaagttttcgccaatccgaatcccgaagaattgccttggggcgagttgggtgtggatgtcgtcctcgaatgtaccggcttctttaccaataaaaccaaagccgaagcacacatcagggccggcgcgcgcaaagtcgtgatttccgcacccggcggcaatgatgtgaaaaccgtcgtatatggcgtaaaccaagacattttggacggcagcgaaaccgttatctccgccgcttcctgcaccaccaactgccttgccccgatggcggcagtcctgcaaaaagagttcggcgtagtcgaaggtctgatgaccaccatccacgcctacaccggcgaccaaaacacccttgacacgccgcaccgcaaaggcgatttgcgccgcgcccgagccgccgcgctcaacatcgtgcccaacagcaccggtgccgccaaggccatcggtctggttatccccgaattgaacggcaaactcgacggctccgcccaacgcgtccctgttgccaccggctcgctgaccgaattggtttccatcctcgaacgccctgtaaccaaagaagaaatcaacgccgcgatgaaagcagccgccagcgaatcttacggctacaacgaagatcaaatcgtttcttccgacgttgtcggcatcgaatacggttcgctcttcgatgcgacccaaacccgcgtgatgaccgtgggcggcaaacaattggtgaaaaccgttgcctggtacgacaacgaaatgtcctacacctgccaactcgtccgcactttggaatacttcgcaggcaaaatctaa

SEQ ID NO: 65507 - DNA, 366 bp, Neisseria meningitidis; identical to SEQ ID NO: 42810

SEQ ID NO: 65508 - DNA, 492 bp, Neisseria meningitidis
atgaaataccgtcgtttttaccgcaatggcggcacttacttttttacggttgtaaccaataaacggcagaagattttgaccgatgatgcggtgcgtttggctttgcggcaggcggtaatggcggtgcgcgaacggtatccgtttgaaattttggcatgggtgttgatgcccgaccatctgcataccatatggcggctgccggacaatgattctgcttattcggaacgctggcggcaaatcaagcggcacagcaaatatttaatcggcggcaatctcaggctttggcaaaaacgcttttgggaacatactatccgcgatgaggccgatttttcctgccattttgattatctgcatttcaatccggtcaaacatggctatgtaggacaaatttctgattggcggttttctacgtttcaccgttatgtcaaacagggtatgtatccgcataattggggtggcggcaatgcggacttttctattggatacgattga

SEQ ID NO: 65509 - DNA, 849 bp, Neisseria meningitidis
gtgaaccgaactaccttctgctgcctttctctgaccgccgccctgattctgaccgcctgcagcagcggaggcggcggaagcggaggcggcggtgtcgccgccgacatcggcgcggggcttgccgatgcactaaccgcaccgctcgaccataaagacaaaggtttgaaatccctgacattggaagactccatttcccaaaacggaacactgaccctgtcggcacaaggtgcggaaagaactttcaaagccggcgacaaagacaacagtctcaacacaggcaaactgaagaacgacaaaatcagccgcttcgactttatccgtcaaatcgaagtggacgggcagctcattaccttggagagcggagagttccaagtgtacaaacaaagccattccgccttaaccgcccttcagaccgagcaagtacaagactcggagcattccgggaagatggttgcgaaacgccagttcagaatcggcgacatagtgggcgaacatacatcttttggcaagcttcccaaagacgtcatggcgacatatcgcgggacggcgttcggttcagacgatgccggcggaaaactgacctacaccatagatttcgccgccaagcagggacacggcaaaatcgaacatttgaaatcgccagaactcaatgttgacctggccgccgccgatatcaagccggatgaaaaacaccatgccgtcatcagcggttccgtcctttacaaccaagccgagaaaggcagttactctctaggcatctttggcgggcaagcccaggaagttgccggcagcgcggaagtggaaaccgcaaacggcatacgccatatcggtcttgccgccaagcaataa

SEQ ID NO: 65510 - DNA, 651 bp, Neisseria meningitidis
atgatccgtttcgaacaagtttccaaaacctatcccggcggttttgaagccctgaaaaacgtcagcttccaaatcaacaaaggcgagatgatttttatcgcaggacactccggttcaggcaaatccaccgtcctcaagctgatttcgggcatcaccaagccgagcaggggcaaaatcctgtttaacgggcaggatctcggcacattgtccgacaaccaaatcggctttatgcgccaacatatcggcatcgtgttccaagaccacaaaatcctctacgaccgcaacgtcctgcaaaacgtcatcctgccgcttcggattatcggctatccgccgcgcaaagccgaagaacgcgcccgcatcgccatcgaaaaagtcggcctgaaaggacgagaattggacgatcccgtaaccctctccggcggtgaacaacaacgcctgtgcatcgcccgcgccgtcgttcaccagcccagcctgctgattgccgacgaaccctccgccaacctcgaccgcgcctacgcgctcgatattatggaattgttcaaaaccttccacgaagcgggaacaaccgtcatcgtcgccgcacatgacgaaaccctgatggcggactacggacaccgcatcctgcgcctctcgaaaggacgactcgcatga

SEQ ID NO: 65511 - DNA, 1281 bp, Neisseria meningitidis
atgtcaatttctattttcttgaaacgggtaatattccgacaccacgaaaggcaaatcatgtctgcgcaatcacaaaacaatcatacgtccccattggtcgtcttgaccacgctgttcttcatgatgggttttattacctgcatgaacgacatccttatccctcatttgaaagaaattttcgacctgtcttacgttcaggcgatgctgatccaattctgtttctttaccgcctatgcggtgatgtccatcccgatgggggcttttgtcggcaaagtcggctacaaaaacggcgttatcggcggctttctgctgacggcggtcggatgcctgctgttttatcctgctgcgggtagccattcttacgcggtatttttgggcgcgttgtttattttggcttccggcgtaacgctgcttcaggtcgccggtaatccttatgttaccctgctggcgaaacccggcaaggaatcggcaacactgacgctggttcaggcgtttaacgctttgggtacgaccattgcgccgcaaatcggcgcgttcctgattctggcggacgcaacccaaaccgtcagcaaggcggaacagatttcttccgtacagattccctatttgggactggcggggctgctgattatccttgccgttttcgtgaaaatgatccggctgcccgacgcgcgcaaaattgccgccgaggaaagcgcgcacaaccacgacggcaaaaccagcgtatggcaatacaaacatctcgtgttcggtacggcaggcattttctgctatgtcggcgcggaggtgtctatcggttcgttgatggtcaacgtattgggttatctgaaagggctggatcatgcttctgccgcgcattacctgtcgttctattggggcggcgcgatggtcggacgtttcctcggttcggcggtgatggcgaaattcgcgcccaaccgttatttggcgtttaacgcatcggctgcggtcgtactgcttgccgtcgcgatggcgacgggcagcggcaatgcggatgtggcgatgtggtcgctgcttgccatcggttttttcaactcgattatgttcccgacgattttctctttggcaaccaaaggattgggaaaatttaccaacgcggcttccggtgtactgtgtaccgcgattgtcggcggtgcggtcgttcctgtcgtgcagggctgggtggcagatacttacaccctgatgtcttcgtttgtcgtttccgtcatctgttatctgtatatcgtgttttttgcggtgtacggatatagggcggacaaataa

SEQ ID NO: 65512 - DNA, 2202 bp, Neisseria meningitidis; identical to SEQ ID NO: 42438

SEQ ID NO: 65513 - DNA, 1344 bp, Neisseria meningitidis
atgagccaaaaccataccattctgcaatccctccccgtcggtcagaaagtcggcatcgccttctccggcggtcttgatacctctgccgcgctgttgtggatgaaactcaaaggcgcgctgccttatgcctacactgccaacctcggccagcccgacgaagacgactacaacgccattcccaaaaaagcgatggaatacggtgcggaaaacgcccgcttaatcgactgccgcgcgcagttggcacatgaaggcatcgccgccatccaatgcggcgcgttccacgtttccaccggcggcatcgcctatttcaacaccacgcctctgggccgcgccgtgaccggcaccatgctcgtttccgcaatgaaagaagacgacgtaaacatctggggcgacggcagcacctacaaaggcaacgacatcgagcgtttctaccgctacggcctgttgaccaatcccgcgctgaaaatctacaaaccttggctcgaccaacaatttatcgacgaactcggcggccgccacgaaatgagtgaatttctgattgccaacggcttcaactacaaaatgtcggttgaaaaagcctactccaccgactccaacatgctcggcgcgacgcatgaagccaaagatttggaattcctcaacagcggcatcaaaatcgtcaaacccatcatgggcgttgccttctgggacgaaaacgtcgaagtcaaacccgaagaagtcagcgtgcgctttgaagaaggcgtgccggttgcactgaacggcaaagaatacgccgatcccgtcgaactcttcctcgaagccaaccgcatcggcggccgccacggcttaggcatgagcgaccaaatcgaaaaccgcatcatcgaagccaaatcgcgcggcatctacgaagccccgggaatggcgttgttccacatcgcctacgaacgcttggtgaccggcatccacaacgaagacaccatcgaacaataccgcatcaacggcctgcgcctcggccgtttgctctaccaaggccgctggttcgacagccaagccttgatgttgcgcgaaaccgcccaacgctgggtcgccaaagccgttaccggcgaagtcaccctcgaactgcggcgcggcaacgactactcgattctgaacaccgaatcgcccaacctgacctaccaacccgaacgcctgagtatggaaaaagtcgaaggtgcggcgtttaccccgctcgaccgcatcggacagctcacgatgcgcaacctcgacatcaccgacacccgcgccaaactgggcatctactcgcaaagcggtttgctgtcgctgggcgaaggctcggtattaccgcagttgggcaataagaaataa

SEQ ID NO: 65514 - DNA, 390 bp, Neisseria meningitidis; identical to SEQ ID NO: 50088

SEQ ID NO: 65515 - DNA, 741 bp, Neisseria meningitidis; identical to SEQ ID NO: 39703

SEQ ID NO: 65516 - DNA, 1443 bp, Neisseria meningitidis
atgaattggtctgatttgaatttgatgcccgcactgcccgaagtcgcgctgctgtcgctgctggtgttattgttgctggcagacttgtgggtcagtgatgacaaacgccgttggacgcattacggcgcgttggcaacggtggcggttacggcggcggtgcagcttgccgtgtgggaacagggcagcacgtcttcgttcaacgggatgtatattgcggacggtatgtcgcgtttggcaaaaatggttttatatgccttgatgtttaccctgtttgtctatgccaagccctacaaccaagtgcgcggtatttttaaaggcgagttttacaccctgtcgctgtttgccctcttgggcatgagcgtgatggtgagcgcggggcattttttaactgcctatatcggtttggaactcttgtcgcttgccctttacgccctgattgccctgcgccgcgattccggctttgccgccgaagccgccttgaaatattttgttctgggcgcgctggcatccggtctgctactctacggtatttctatggtttacggcgcaaccggttcgctggaatttgccggcgtgctcgcctcttccttcaatgaagaagcaaacgaatggctgttgaaactgggtctggtgtttatcgtcgtcgccgttgcgttcaaactcggcgcggtgccgttccatatgtgggtgcccgacgtgtatcacggcgcgcccacttctgttaccgccctggtcggcactgccccgaaaatcgccgccgtcgttttcgctttccgcatcctcgttaccgggttgggaaccgtgcatcatgactggtctctgatgtttgccctgcttgccgccgcctcgctgctggtcggcaaccttgccgccatcatgcagaccaatatcaaacgtatgctcgcctattccaccgtatcgcatatggggtttatcctgctggcgtttatggcgggcgcggtcggctttgcggcggggctgtattacgccattacctacgcgctgatggcggcggcagggttcggcgtgttgatggtgttgtcggacggggacaacgagtgcgaaaacatcagcgatttggcagggttgaaccaacaccgcgtatggcttgcctttttgatgctgctggttatgttctctatggcgggcattccgccgctgatgggtttttacgccaaattcggcgtgattatggcactcttgaaacaaggccatgtttggttgtctgtatttgccgtcatcatgtcgctgattggtgcgttctactacctgcgcgtggtcaaagtcatctacttcgatgtgcctgatcatgaccagccggtcggcagcaactatgccgccaaatttgttctgacggtcaatgccttcttgctgctcctgtggggcatcatgccgcaaaccgttatcgactggtgcgccaaggcgttggagaacacgctgtaa

SEQ ID NO: 65517 - DNA, 288 bp, Neisseria meningitidis; identical to SEQ ID NO: 59859

SEQ ID NO: 65518 - DNA, 216 bp, Neisseria meningitidis; identical to SEQ ID NO: 37181

SEQ ID NO: 65519 - DNA, 684 bp, Neisseria meningitidis; identical to SEQ ID NO: 50144

SEQ ID NO: 65520 - DNA, 387 bp, Neisseria meningitidis; identical to SEQ ID NO: 45699

SEQ ID NO: 65521 - DNA, 1377 bp, Neisseria meningitidis; identical to SEQ ID NO: 58410

SEQ ID NO: 65522 - DNA, 987 bp, Neisseria meningitidis
atgaaaaactttctttcccttttcgcctccatactgatgtctgccctgattgccgtgtggttcagccaaaaccccatcaacgcctactggcagcagacctaccaccgcaacagtccgctcgaaccgcttgccgcctacggatggtggcggagcggtgcggcgttgcaagaaaacgcctacaccctttcagacggcatcaaagccttcctgtccggcgaaacgccgccgacgccccaagacggcggttcggcagatatgccgcctgaagccgccgcatccgaagccgcccctcaaaccggcgaaatccaagaatggaaacaggacaccgacaccgccgccgtccgcagcggcgacaaagtcttttttgtcggcgactcgctgatgcagggcgttgcccccttcgtgcaaaaaagcctgaaacagcaatacggcatcgaatccgtcaacctcagcaaacaaagcacggggctgtcctacccctcattctttgactggccgaaaacgattgaagaaaccctgcaaaaacatcccgaaatcagcgtgctcgccgtcttcctcggcccgaacgacccgtgggatttccccgtcggcaaacgctacctcaaattcgcttccgacgaatgggcgcaagaatacctgaaacgcgtcgaccgcatccttgaagccgcacacacgcaccgcgtccaagtcgtctggctcggcatcccctacatgaaaaaagccaagctcgacgggcagatgcgctacctcgacaaactgctttcggaacatttgaaaggcaaaatcatcctgattcccaccgcgcacaccctgagcggcgggaaagaccgctacacggactccgtcaacgtcaacggcaaacccgtccgctaccgcagcaaggacggcatacactttaccgccgaaggacaaaaactgctggcggcaaaaataatggaaaaaatcgtttttgaaccaagtacgcaaccatcaagtacacagccatga

SEQ ID NO: 65523 - DNA, 876 bp, Neisseria meningitidis; identical to SEQ ID NO: 40452

SEQ ID NO: 65524 - DNA, 1311 bp, Neisseria meningitidis
atgaacacgccgcatccgcgcccgaaaatcgccgtcatcggcgcaggctgggccggcttgtccgccgccgtcaccttgacgcggcacgccgacgttaccctgtttgaagccggccggcaggcgggcggcagggcgcgcacactggccggaaataccgacggtttcggttttttggacaacgggcagcacattttgctcggcgcataccggggcgtgttgcgcctgatgaaaaccatcggttcggatccccgtgccgcctttttgcgcgtaccgctgcactggcatatgcacggcggtttgcagttccgcgccctccccctgcccgcaccgctgcatattttgggcggcgtgctgcttgcccggcgcgtaccgtccgcattcaaagccaaactgcttgccgatatgtccgatttgcagaagtccgcacgcctcggacagcccgacacgacagttgcacaatggctgaaacagcggaacgtgccgcgtgccgccgtgatgcagttttggcagccgctggtgtggggcgcgctcaacacgcctttggaaaccgcaagcctgcgcgtgttgtgcaacgttttgtccgacggcgtgctgacgaaaaaatccggcagcgactatctcctacccaagcaggatttgggcgcaatcgtcgccgaacccgccttggcggagcttcaacggctcggcgcggacatccgcctcgaaacgcgcgtatgccgtctgaaccccctcccggacgggaaagtgctcgtcaacggcgaagctttcgatgccgccgtccccgccaccgcgccctaccacgccgccgcgctcctgcccgaaggcacgcccgaacacgttcagacggcatatcaaaaccttcgctatcacgccatcaccaccgtctatctgcgctacgccgaacccgtccgcctgcccgccccgctgaccggccttgccgacggcacggtgcaatggctgctttgccggggcaggctcggactgcctgaaaacgaagtgtccgccgtcatcagcgtttccgaccgcgtcggcgcgtttgcaaaccgggcgtgggcggacaaagcccacgccgacctcaaacgcatccttccgcatttgggcgaacccgaagccgtgcgcgtcatcaccgaaaaacgcgccacaaccgcagccgatgccccaccaccggatttgtcgtggctgcaccggcaccgcatcttccccgccggcgactacctccacccatactaccccgccacgctcgaagccgccgtacaatcaggtttcgcttccgcggaagcctgcctgcaaagcctgaacgatgccgtctga

SEQ ID NO: 65525 - DNA, 1350 bp, Neisseria meningitidis; identical to SEQ ID NO: 44843

SEQ ID NO: 65526 - DNA, 1416 bp, Neisseria meningitidis; identical to SEQ ID NO: 55862

SEQ ID NO: 65527 - DNA, 1146 bp, Neisseria meningitidis
atgaccgaaacccaatccctagaactcgccaaagaattgatttcccgcccatccgttacccccgacgaccaaaattgccaaaaactccttgccgaacgcctgcacaaaatcggttttgcggctgaagaactccatttcggcgacaccaaaaacatctggttgcgacgcggcacgaaagctcccgtcgtctgttttgcagggcataccgacgttgtaccgacaggccctgtcgaaaaatgggattcgcccccgttcgagccggccgagcgcgacggaagattatacgggcgcggtgcggcggacatgaaaaccagcatcgcctgtttcgttaccgcctgcgaacgctttgttgccgaacaccccgatcatcaaggcagcatcgcgctcctgattacttccgacgaagagggcgacgcgctggacggcacgaccaaagtcgtcgatgtgttgaaagcgcgcgacgagcttatcgactactgcatcgtcggcgaaccgacagccgtggacaaattgggcgatatgattaaaaacggccggcgcggctcgctgtcgggcaacctgaccgtcaaaggcaagcaaggccatattgcctatccgcatttggcaatcaatcccgtgcatacttttgccccggccttgttagagctgacgcaggaagtctgggacgaaggcaacaaatacttcccgccgaccagctttcaaatttccaatatcaacggcggtacaggcgcgaccaatgtcattccgggcgagctgagcgtcaaattcaatttccgcttctccaccgagtccaccgaagcagggctgaaacaacgcgtccacgccattttggacaaacacggtgtgcaatacgatttgcagtggtcgtgttcggggcagcccttcctgacccacgcgggcaaactgaccgacgtggcacgcgccgccattgccgaaatctgcggcgtagagaccgaattgtccaccaccggcggcacttcggacggacgcttcatcaaagccattgcaaaagaactcatcgaattaggcccgtccaatgcgaccatccaccaaatcaatgaaaacgtgcggctaaacgacattccgaagctgtctgcggtgtatgaggggatattggcgcggttgttggctggaaatgccgtctga

SEQ ID NO: 65528 - DNA, 1647 bp, Neisseria meningitidis; identical to SEQ ID NO: 50819

SEQ ID NO: 65529 - DNA, 1284 bp, Neisseria meningitidis
atgactgtatcgaaatcaggttttatcgggcaaatcttttcccgaaatatgcttgtctgtatttttacggggtttacctcggggctgccgctgtactttctgattaacctgattccggcatggttgcgcagcgagcaggtggatttgaagagcatcgggctgatggcgctgatcggtctgccgtttacttggaaatttttgtggtctccgctgatggacgcggtcagggttcccattttgggccggcggcgcgggtggatgctgttgacgcaggcagggttgctggcggctttggcggcctatgcctttttaaacccccggaatcatctgccgttgattgccggcttgtcggtgcttgtcgcttttttttccgccagtcaggatattgtattggatgcgttcaggcgcgagattttgtcggacgaggaattgggtttgggcaactcagtccatgtgaacgcctaccggattgccgccctgattcccggttcattgagtttggtgttggcagacaggatgccgtggtcagaagtatttgttatcacttcattatttatgctgcccggccttctgatgacgctgtttctcgcgcgcgaacccgtgttgccgccttccgttcctaaaacgttgaagcagacagtggtagagccgtttaaagaattttttacacgcaagggcatcgcttcggctgtatgcgtgctgctgtttatcttcctttacaaactcggcgacagtatggcaaccgcgttggcaacgccgttttatctggatatgggtttcagcaagaccgacatcggtttgattgccaaaaacgcaggactgtggccggcagtggcggcaggtatcttgggcggcgtgtggatgctgaaaatcggcgtaaacaaagccttgtggatatttggcgcggtgcaggctgtaaccgttttggggtttgtatggctggcagggttcggacatttcgacacggtcggcacaggcgagaggctgatgctggcggcagttatcggcgcagaggcagtcggcgtgggtttggggacggcggcgttcgtatcgtatatggcgcgtgaaaccaatcccgcatttaccgcaacgcagcttgcgctgtttaccagcctgtccgccgtcccgcgcacggtcatcaattcctttgccggttatctgattgaatggctcggttatgtaccgtttttccaactgtgtttcgcactcgccctaccgggtatgctgctgctgctgaaagttgcgccttggaacggggagaaaactcaggatgcaggcagatga

SEQ ID NO: 65530 - DNA, 489 bp, Neisseria meningitidis; identical to SEQ ID NO: 44020

SEQ ID NO: 65531 - DNA, 681 bp, Neisseria meningitidis
atgattttccaaacagtctggttttcagatgtggtactgtcggtttcgtggattgtccttatcctgatactggcagcttccgcgccgtccgcattccgctcgcttgcccgctaccgttccgcccttccactgtgtaccgtaattttttccgcagcatggtgtctgaacgcctctgccggcggcggacagcttgcacagatgaactaccacctgctcgccgtcaatctggttgcactgatggtgggcacttccgccgccttttggcttgccgcgctgctgatgctgccctactgcctgctgtttgccggttctgccggcgcatatccgccgaacgctttagtgctgattctgcccgcgcttgccgtcaaccgcctgtcgcgtatgctggtcaaccgcctgccgcccaatattttcatctttattttcgtcaacggctttctcgcttccgccgccggcattctgttgaccgggctggtgctgaccggtattttggatgctgcaaacgcttttccgtccgaaatattgtggacgaccgccctgcccgtctttattttgctggcgtgggcggaagccttcctcagcggcatttcaactgccatatttgttgcactgaagccccattggattaacactttcgacgacaaccgctatcttaagtccgaccgcggcatatggcggtag

SEQ ID NO: 65532 - DNA, 324 bp, Neisseria meningitidis; identical to SEQ ID NO: 51379

SEQ ID NO: 65533 - DNA, 1776 bp, Neisseria meningitidis; identical to SEQ ID NO: 58709

SEQ ID NO: 65534 - DNA, 1419 bp, Neisseria meningitidis; identical to SEQ ID NO: 52158

SEQ ID NO: 65535 - DNA, 294 bp, Neisseria meningitidis; identical to SEQ ID NO: 52089

SEQ ID NO: 65536 - DNA, 852 bp, Neisseria meningitidis
atgcacatcctgttgaccgccctgctcaaatgcctctccctgctgccgctttcctgtctgcacacgctgggaaaccggctcggacatctggcgttttaccttttaaaggaagaccgcgcgcgcatcgtcgccaatatgcgtcaggcaggcatgaatcccgaccccaaaacggtcaaagccgtttttgcggaaacggcaaaaggcggtttggaacttgcccccgcgtttttcagaaaaccggaagacatagaaacaatgttcaaagcggtacacggctgggagcacgtgcagcaggctttggacaaacacgaagggctgctgttcatcacgccgcacatcggcagctacgatttgggcggacgctacatcagccaacggctgccattccccttaaccgccatgtataaaccgccgaaaatcaaagcgatagacaaaatcatgcaggcgggcagggttcgcggcaaaggaaaaaccgcgcctaccagcatacaaggggtcaaacaaatcatcaaagccctgcgttcgggcgaagcaaccatcgtcctgcccgaccacgtcccctcccctcaagaaggtggggaaggcgtatgggtggatttcttcggcaaacctgcctataccatgacactggcggcaaaactggcaaacgtcaaaggcgtgaaaaccctgtttttctgctgcgaacgcctgcctgacgggcagggtttcgatttgcacatccgccccgtccaaggggaattgaacggcgacaaagcccatgatgccgccgtgttcaaccgcaatgccgaatattggatacgccgttttccgacgcagtatctgtttatgtacaaccgctacaaaatgccgtaa

SEQ ID NO: 65537 - DNA, 525 bp, Neisseria meningitidis; identical to SEQ ID NO: 50604

SEQ ID NO: 65538 - DNA, 2604 bp, Neisseria meningitidis; identical to SEQ ID NO: 58878

SEQ ID NO: 65539 - DNA, 1077 bp, Neisseria meningitidis; identical to SEQ ID NO: 59740

SEQ ID NO: 65540 - DNA, 1254 bp, Neisseria meningitidis
gtggacaaactgaaaatctccgcaaacggcccgctcaacggggaaataacggtctcgggcgcgaaaaacgcggcattgccgctgatgtgcgcgggtttgctgacatcgggtacgttgcgcctgaaaaacgtccctatgctggcagatgtcaaaaccacacaaaagctgcttcaggggatgggcgcgcgcgtcctgaccgacaatatcagtgaatttgaaatcaacggtggtacggtaaacaacacctgcgccccttacgaattggtccggacgatgcgcgcctcgattttggtgcttggcccgacgctggcgcgtttcggcgaggcgcaagtcagcctgccgggcggctgcgccatcggttcgcgccctgtcgaccagcatttgaaaggcttagaagcgatgggtgctgagattgttatcgaacacggttacgtcaaagccaagggtaagcttaaaggcacgcgtgtggcaatggatgtcgttaccgtcggcggcacggaaaacctgctgatggcggcgacgctggcggaaggtacgacggttttggaaaactgcgccatcgagcctgaagtggtcgatttggcggaatgcctggtcaaaatgggcgcgaaaatcagcggcatcggtacgtccacaatgattgtggaaggtgtggacgagctgcacggctgcgaacacagcgtcgtccccgaccggattgaggcggggacgttcctgtgcgcggtggcgataaccggcggcagggtggttttgcggaatgccgcgccgaaaacgatggaagtggtgttggacaaactggttgaggcaggtgcggtgattgaggcgggcgacgattggatcgccatcgatatgcggcagcgtccgaaggcggtggacatccgtacggtcgtccaccccggcttccccacggatatgcaggcgcagtttatggcattgaatgccgtggcggagggaagctgccgcgtggtggaaacgatttttgaaaaccgctttatgcacgtccccgagttgaaccggatgggggcgaacatcacaaccgagggcaatacggcatttgtgcagggtgtggaacagctttccggcgcggtcgtcaaggcgacggatttgcgtgcgtccgcaagcctcgttatcgccggtttggcggcgcgaggcgaaaccgtggtcgaacagatttaccacttggatcgcggttatgaacatattgaaaaaaaactcggcagcgtcggcgcgaaaatcgagcgcgtatccggctga

SEQ ID NO: 65541 - DNA, 465 bp, Neisseria meningitidis; identical to SEQ ID NO: 46412

SEQ ID NO: 65542 - DNA, 1812 bp, Neisseria meningitidis
atgaaacaaatccgcaacatcgccattatcgcccacgtcgaccacggcaaaaccacattagtcgaccaactgctgcgccaatccggcacattccgcgccaaccagcaggttgacgagcgcgtgatggacagcaacgaccttgaaaaagaacgcggcatcaccatcctcgccaaaaacaccgccatcgattacgaaggctaccacatcaatatcgtcgacacgccgggacacgccgactttggcggcgaagtggagcgcgttttggggatggtggactgcgtcgtcttgttggtggatgcgcaagaaggtccgatgccgcaaacccgtttcgtgaccaaaaaagccttggctttggggctgaaaccgattgtcgtcatcaacaaaatcgataaaccgtccgcccgtccgagctgggtcatcgaccaaactttcgaactcttcgacaacttgggcgcaactgacgaacagttggacttcccgattgtttacgcttcaggtttgagcggctttgccaagctggaagaaaccgacgagagcaacgacatgcgtccgctgttcgacaccatcctaaaatacacgcccgcaccgagcggcagcgcggacgaaacgctgcaactgcaaatctcccaactcgactacgataactacaccggccgcctcggcatcggtcgtatcttgaacggacgtatcaagcccggtcaagttgttgccgtgatgaaccacgagcagcaaatcgcccaaggccgcatcaaccagcttttgggtttcaaaggcttggaacgcgtgccgcttgaagaagccgaagcaggcgacatcgtgattatttccggtatcgaagacatcggtatcggcgtaaccatcaccgacaaggaaaatcccaaaggtctgccgatgttgagcgtagacgaaccgacgctgaccatggactttatggtgaacaccagcccactcgcgggtactgaaggcaaattcgtaaccagccgccaaatccgcgaccgcctgcaaaaagaattgctgaccaacgttgccctgcgcgtggaagataccgccgatgccgacgtgttccgcgtatccgggcgcggcgaactgcacctgaccattttgttggaaaatatgcgccgcgaaggctacgaactcgccgtcggcaagccgcgcgtcgtgtaccgcgacatcgacggtcaaaaatgcgaaccttatgaaaacctgaccgtggacgtacccgacgacaaccaaggcgcggtaatggaagaactcggccgccgccgtggcgaactgaccaatatggaaagcgatggcaacggacgcacccgcctcgaataccatattccagcgcgcggcttgatcggtttccaaggcgaatttatgaccctgacgcgcggggtcgggctgatgagccacgtgttcgacgattacgcgcccgtcaaacccgatatgcccggccgccacaacggcgtgctggtgtcccaagagcagggcgaggcagtcgcttacgccttgtggaatctggaagaccgcggccgtatgttcgtatcgcccaacgacaaaatctacgaaggtatgattatcggtatccacagtcgcgacaacgatttggtggtcaacccgctcaaaggcaaaaaacttaccaacgtccgtgccagcggtaccgacgaagccgttcgcctgaccacgccgattaaactgacgctggaaggtgcggttgagtttatcgacgatgacgaactcgttgaaatcacgccgcaatccatccgtctgcgcaagcgttacttgagcgaattggaacgccgccgccactttaaaaagctggattga

SEQ ID NO: 65543 - DNA, 1359 bp, Neisseria meningitidis
atgaaaccactggacctaaatttcatctgccaagccctcaagcttccgatgccgtctgaaagcaaacccgtgtcgcgcatcgtaaccgacagccgcgacatccgcgcgggcgatgtgtttttcgcattggcgggcgggcggtttgatgcgcatgattttgttgaagacgtattggctgctggtgcggcggcggttgtggtttcgcgcgaagattgcgttgcaatggatggcgcgttgaaagtcgatgacacgcttaccgcgttgcaaatgttggcgaaggcgtggcgcgagaatgtgaacccgtttgtgttcggtattaccggttcgggcggtaagacgacggtgaaggaaatgttggctgcggtattgcgccgccgtttcggcgataatgccgttttggcgacggcaggcaacttcaacaaccacatcggattgccgttgactttgttgaaattaaacgaaaaacaccgctatgccgtgattgaaatgggtatgaaccattttggcgaactggcggttttgacacaaatcgccaaacccgatgccgctttgatcaacaacgccctgcgtgcccatgtcggctgcggtttcgacggagtgggcgatattgccaaagcgaaaagcgagatttatcaaggcttatgttcagacggcatggcactgattcctcaagaagatgccaatatggctgtcttcaaaacggcaacgcttaatttgaatacgcgcactttcggcgtcgatagcggcgatgtccacgcggaaaatatcgtgctgaaaccgttgtcgtgcgaatttgatttggtgtgcggcgatgagcgcgccgccgtggtgctgcctgttcccggccgccacaatgtccacaacgccgccgctgccgccgcgctggctttggctgcgggtttgagtttgaacgatgtggcggaaggtttgcaaggcttcagcaacatcaaaggccgtctgaacgtcaaatccggcatcaaaggcgcaaccctgattgacgatacctacaacgcgaaccccgacagtatgaaagccgcgattgacgtgttggcgcgtatgcctgcgccgcgtattttcgtgatgggcgatatgggcgaactgggtgaggacgaagccgccgccatgcacgccgaagtcggcgcgtatgctcgcgaccaaggcatcgaagcggcttattttgtcggcgacaacagcgtcgaagcggcggaaaaatttggcgcggacggtttgtggttcgccgccaaagacccgttgattcaagtgttgcgccacgatttgcccgaacgcgccaccgtgttggtgaaaggttcgcgctttatgcagatggaagaagtggtcgaggcattggaggataagtga

SEQ ID NO: 65544 - DNA, 687 bp, Neisseria meningitidis; identical to SEQ ID NO: 50296

SEQ ID NO: 65545 - DNA, 1404 bp, Neisseria meningitidis
atgaacaatcccgacttaccctatcggcaggccttagaatgcctgtctcaaaaacaatataactttaccgaagtccgccgactgctgacagaagcgttctcggcaggtcatcccgccgccgcattcgagttggcaaaacacctgatggacgcggacagcccctaccaagaccgcgaacaaggtatggaaatgctccgcatcgccgccgaacaggggcatccctatgcgcgttacaatctggcatatatccaagaattggaaggcgcgcccccggaaaccctgataccgctttacagaccgttggcagaagaaagactgcctgaagcacaagtccgcctgatgtacctgctgtatgcgtcccgacattttgaagaagccttggaatgggcaaaaacaagcacaaaaaacaacaatccccacgggcaatacctgctcgcccaatactgccggtacggcacgccgccggattttgaaacggcgcacctgctctaccgcaaagcggcggcacaaggcttgccggaagcacattggcagctcgggctgcaatatcgtttcgggcaagggacgaaagccgacacggcacaggccgtcaatcatttgcgcgccgccgcacaacaaggatacattcccgcctacaccccgcttgccgaactcatcctacctacggctcccgatgaagccgtttaccggttccaacaggcggcacaggaaaatgaccccgatgcccatgccgcactggccgacatctacctacaaggcaaatatcaggaaagaaaccacaaacttgccctgcatcatgccgaagcagccgcagcagaacgccatcccgaaggtttgcggatactgggcgacatctgccgctacggtttgggcatagcccccgatacggaaaaagcccggcattattaccggcaggcagccgaagccggcagcctttccgcctatcagaaactcatatccgacagcgcgttaaaccatcccgaccaatacggcggcatcaaagattccgccatcaggcggcaaagggcagaacagctttatcaaaaagcccaagccctgcattacggattacaatgtgcgcccgaatacgcagccgcgctcaaactctacacagaagccgcagaactcggacacagcaaagcccaaaccaatctgggcagtatgtactacttcggacagggcatagccgccgactacggcaaagcccgcaaatggtttgaacaagccgccgcgcaaaaagacagtatggcgttctacaacctcgcctgcatccattacagcggacacggtgtcgggccggacaaagaaaaagcctgccgctacctgcaagaagccataaacaacggatacgggcaaaaaagcgtcctgcaagaactgctgcaacaatggcaaaatgccgtctga

SEQ ID NO: 65546 - DNA, 501 bp, Neisseria meningitidis; identical to SEQ ID NO: 42982

SEQ ID NO: 65547 - DNA, 279 bp, Neisseria meningitidis; identical to SEQ ID NO: 36778

SEQ ID NO: 65548 - DNA, 570 bp, Neisseria meningitidis; identical to SEQ ID NO: 45138

SEQ ID NO: 65549 - DNA, 1296 bp, Neisseria meningitidis; identical to SEQ ID NO: 51215

SEQ ID NO: 65550 - DNA, 339 bp, Neisseria meningitidis; identical to SEQ ID NO: 39659

SEQ ID NO: 65551 - DNA, 2133 bp, Neisseria meningitidis
atgtctatcgtatccgcaccgctccccgccctttccgccctcatcatcctcgcccattaccacggcattgccgccaatcctgccgatatacagcatgaattttgtacttccgcacagagcgatttaaatgaaacgcaatggcttttggccgccaaatctttgggattgaaggcaaaggtagtccgccagcctattaaacgtttggctatggcgactttacccgcattggtatggtgtgatgacggcaaccattttattttggccaaaacagacggtgagggtgagcatgcccaatttttgatacaggatttggttacgaataagtctgcggtattgtcttttgccgaattttctaacagatattcgggcaaactgatattggttgcttcccgcgcttcggtattgggcagtttggcaaagtttgactttacctggtttattccggcggtaatcaaataccgccggttgttttttgaagtattggtggtgtcggtggtgttgcagctgtttgcgctgattacgcctctgtttttccaagtggtgatggacaaggtgctggtacatcggggattctctactttggatgtggtgtcggtggctttgttggtggtgtcgctgtttgagattgtgttgggcggtttgcggacgtatctgtttgcacatacgacttcacgtattgatgtggaattgggcgcgcgtttgttccggcatctgctttccctgcctttatcctatttcgagcacagacgagtgggtgatacggtggctcgggtgcgggaattggagcagattcgcaatttcttgaccggtcaggcgctgacttcggtgttggatttggcgttttcgtttatctttctggcggtgatgtggtattacagctccactctgacttgggtggtattggcttcgttgcctgcctatgcgttttggtcggcatttatcagtccgatactgcggacgcgtctgaacgataagttcgcgcgcaatgcagacaaccagtcgtttttagtagaaagcatcactgcggtgggtacggtaaaggcgatggcggtggagccgcagatgacgcagcgttgggacaatcagttggcggcttatgtggcttcgggatttcgggtaacgaagttggcggtggtcggccagcagggggtgcagctgattcagaagctggtgacggtggcgacgttgtggattggcgcacggctggtaattgagggcaagctgacggtggggcagctgattgcgtttaatatgctctcgggacaggtggcggcgcctgttatccgtttggcgcagttgtggcaggatttccagcaggtggggatttcggtggcgcgtttgggggatattctgaatgcgccgaccgagaatgcgtcttcgcatttggctttgcccgatatccggggggagattacgttcgaacatgtcgatttccgctataaggcggacggcaggctgattttgcaggatttgaacctgcggattcgggcgggggaagtgctggggattgtgggacgttcggggtcgggcaaatccacactcaccaaattggtgcagcgtctgtatgtaccggagcagggacgggtgttggtggacggcaacgatttggctttggccgctcctgcctggctgcggcggcaggtcggcgtggtcttgcaggagaatgtgctgctcaaccgcagcatacgcgacaatatcgcgctgacggatacgggtatgccgctggaacgcattatcgaagcagccaaactggcgggcgcacacgagtttattatggagctgccggaaggctacggcaccgtggtgggcgaacaaggggccggcttgtcgggcggacagcggcagcgtattgcgattgcccgcgcgttaatcaccaatccgcgcattctgatttttgacgaagccaccagcgcgctggattatgaaagtgaacgagcgattatgcagaacatgcaggccatttgcgccaaccggacggtgctgattatcgcccaccgtctgtccaccgttaaaacggcacaccggatcattgccatggataaaggcaggattgtggaagcgggaacacagcaggaattgctggcgaagccgaacggatattaccgctatctgtatgatttacagaacgggtag

SEQ ID NO: 65552 - DNA, 1227 bp, Neisseria meningitidis; identical to SEQ ID NO: 43663

SEQ ID NO: 65553 - DNA, 252 bp, Neisseria meningitidis; identical to SEQ ID NO: 37103

SEQ ID NO: 65554 - DNA, 582 bp, Neisseria meningitidis; identical to SEQ ID NO: 50960

SEQ ID NO: 65555 - DNA, 1587 bp, Neisseria meningitidis; identical to SEQ ID NO: 40211

SEQ ID NO: 65556 - DNA, 1074 bp, Neisseria meningitidis
atgagtatcaccatccaaaacttaaacaaacacttcggcaattttcacgcgctgaaaaacatcaacctcaacgtccccaccggcaaactcgtttccctgctcggcccgtccggctgcggcaaaaccacacttttacgcattatcgccggactggaaaacgccgacggcggccaaatcctctttgacgggcaagacgtaaccgccaaacacgtccgcgagcgcaaagtcggcttcgtgttccaacactacgccctcttccgccacatgaacgtgtttgacaacgttgccttcggtttgaccgtattgcccaagtccgaacgcccgtccaaagaacaaatctgcactaaagtcgaagaattgctgaaactcgtacaactctcgcatttggcaaaatcctatccgcaccaactctccggcgggcaacgccagcgcatcgccctcgcccgtgcgcttgcggtcgaaccgaaactcctgcttttggacgaacccttcggcgcgttggacgccaaagtacgcaaagaattacgcacctggctgcgcgacatccatcacaacctgggtgtaaccagcattctggttacgcacgaccaagaagaagccctcgaagtttccgacgaaatcgtcgtgatgaaccacggcaaaatcgaacaaaccggcagcgccgaagctatttaccgcaaacccgaaaatgccttcgttaccgagttcctcggcgaaaccgacgcttttgaaggacgtatcgaaaaaggcttctggcattataacggcttcgcgtggaaattggacgcacaatacaaatggcaggaacaaaccgccaccggctatatccgcccgcacgaatggcagatcgccgccgaacacgaaacaccgatgatttgtgccgaaatcgaaaaagtccacgccgtcggggcattgacgcatattttggtgaaacacggcaaacaagacgtgcatatcacgctggctggcagcgatgccgcgcgttacccaatcgccgaaggcaaagaattgaagctgattccgaaacaggtttatgttttttctcaaaacgagctgattgaatattcgatttaa

SEQ ID NO: 65557 - DNA, 1512 bp, Neisseria meningitidis; identical to SEQ ID NO: 58408

SEQ ID NO: 65558 - DNA, 1167 bp, Neisseria meningitidis; identical to SEQ ID NO: 51878

SEQ ID NO: 65559 - DNA, 966 bp, Neisseria meningitidis; identical to SEQ ID NO: 39688

SEQ ID NO: 65560 - DNA, 486 bp, Neisseria meningitidis; identical to SEQ ID NO: 43447

SEQ ID NO: 65561 - DNA, 291 bp, Neisseria meningitidis
atggatgatctaatactatattttttatcaggtatattcggaaatcaagttgctgaatatattataaaaaacaaccgtgatataaaagttccctttattgtgctttacacaatattttttacgttgatttatactgtggctttgttgtttctcagtctgatctattgggtcaatggtgcggagattgcatggaaggggataggtattttcagtatgtcggtcagtttttgtatagtcttctgtctttatttgattgacaaggcaggaagatgtaaggataagaaacaatag

SEQ ID NO: 65562 - DNA, 876 bp, Neisseria meningitidis
atgaacccctacgacctgcttatcacaccctttgcagaattcgactttatgcgctacgccctcgcatccgtcttctgcctgtccctcagtgccgcacccgtcggcgtattcctcgtcatgcgccgtatgagcctgataggcgacgcattgagccacgccgtcctgcccggtgccgccgtcggctacatgtttgccggcttaagcctgcccgccatgggtttgggcggcgtagccgcaggtatgctgatggcactgcttgccggactcgtcagccgcttcaccaccctgaaagaagatgccaactttgccgccttttatctcagcagcctcgccatcggtgtagtcctcgtcagcaaaaacggcagcagcgtcgatttgctccacctccttttcggctccgtacttgccgtcgatattcctgccctgcaactcatcgccgccgtatccaccctcacactgcttacccttgccgtcatctaccgcccgctcgtactcgaaagcatcgaccccctgtttctcaaatctgtcggcggcaaaggcgggctttggcacgtcctctttctcgtcctggtcgtcatgaacctcgtatccggctttcaagccctcggcacactcatgtccgtcggacttatgatgctgccagccattaccgcccgcctatgggcgaagcacatgggcgcactcatcctcctatccgttctgacagccctgctgtgcggcttgagcggactgctcatttcctaccacatcgaaattccttccggtcccgccatcatcctctgttgcagcgtcctttatctcttttccgtcatactcggcaaagaaggcggcattctgaccaaatggctcaaaaaccaccgccaccacaccacctga

SEQ ID NO: 65563 - DNA, 864 bp, Neisseria meningitidis; identical to SEQ ID NO: 52029

SEQ ID NO: 65564 - DNA, 786 bp, Neisseria meningitidis; identical to SEQ ID NO: 51588

SEQ ID NO: 65565 - DNA, 420 bp, Neisseria meningitidis
atggcacaattaccgctatatctgacttctgaaatcaaagactttactgtcggcacgcccgaagttttacaatcatttttcgaacatgtcccttatggtgtcgtctttgaagacgacggcgacacaggctacttctatgccgcttcgcaagacgggattttagatgccttgcacatctacaatgtcgaagatgtatccgacaaacatatccccaatcatgtcttgattttatgggatgatgcctgcaccatagccgcattgtgtatcaacgactacattcatgccgtctatgattttgtcgaacaggcaggatattgccgcaacggcttccctgaagcaggcggcgaatgggtgaaagtcgaaaaccgcatcttggacgatgaattgctggacaaaatcctatcccgaaaatctacataa

SEQ ID NO: 65566 - DNA, 1224 bp, Neisseria meningitidis
atgaaaacggtagtctggattgtcgtcctgtttgccgccgccgtcggactggcgctggcttcgggcatttacaccggcgacgtgtatatcgtactcggacagaccatgctcagaatcaacctgcacgcttttgtgttaggttcgctgattgccgtcgtggtgtggtatttcctgtttaaattcattatcggcgtattcaatatccccgaaaagatgcagcgtttcggttcggcgcgtaaaggccgcaaggccgcgcttgccttgaacaaggcgggtttggcgtattttgaagggcgttttgaaaaggcggaacttgaagcctcgcgcgtgttgggcaacaaagaagccggagacaaccgtactttggcattgatgctgggcgcgcacgccgccgggcagatggaaaacatcgagctgcgcgaccgctaccttgccgaaatcgccaaactgccggaaaaacagcagctttcccgttatcttctgctggcggaatcggcgttgaaccggcgcgattacgaagcggcggaagccaatcttcatgcggcggcgaagatgaatgccaaccttacgcgcctcgtgcgtctgcaacttcgttacgctttcgacaggggcgacgcgttgcaggttctggcaaaaaccgaaaaactttccaaggcgggcgcgttgggcaaatcggaaatggaacggtatcaaaattgggcataccgccgccagctggcggatgctgccgatgccgccgctttgaaaacctgcctgaagcggattcccgacagcctcaaaaacggggaattgagcgtatcggttgcggaaaagtacgaacgtttggggctgtatgccgatgcggtcaaatgggtcaaacagcattatccgcaaagccgccgacccgaacttttggaagcctttgtcgaaagcgtgcgctttttgggcgaacgcgatcagcagaaagccatcgattttgccgatgcttggctgaaagaacagcccgataacgcgcttctgctgatgtatctcggtcggctcgcctacggccgcaaactttggggcaaggcaaaaggctaccttgaagcgagcattgcattaaagccgagtatttccgcgcgtttggttttggcaaaggtttttgacgaaaccggagaaccgcagaaggcggaggcgcagcgcaacttggttttggaagccgtctccgatgacgaacgtcacgcagcgttagagcagcatagctga

SEQ ID NO: 65567 - DNA, 486 bp, Neisseria meningitidis
atgccaatcgaaaagcaaaaggagaagagcatggtcgacacggtcgttaaaactcccgaatttttaccttttacttctgtaggaatattccgttttggtgcggatataacagagtacaaaaacatactggaaacttttatgtatgaacctcctgatgagtttagaacagaatattatgaatctcccgactcaaatttactcattgccgtcaaaaaaaacaaaattatttcgatattttgttatcaggagctatattttatgggcgttaatttaataggtctaaattttgaagattttaaacaacttttccatcaccctaaatcatacggtgttgatgaatattatttatcaaatgaatcttatccgacatatgtctatgagtttgatgaaataggggtacaagcatgggaagcaaaagggaaagttgttactatcattgccgggggtaaagacaattattcaacagaaccttactacgatgaataa

SEQ ID NO: 65568 - DNA, 1134 bp, Neisseria meningitidis
atgtttaaaaaattcaaactggtattgttgtcattttttgcccttgtatttgccttttggctggggacgggtattgcctatgagattaatccgcgttggtttttgagcgatacggcaactgaagtacctgaaaatccgaatgcttttgtggcgaaacttgcccgcctgttccgaaatgccgacagggcggttgtcatcgtgaaggaatcgatgaggacggaggaaagtcttgccggagctgtggatgacggtccgttgcagtcggagaaggattatctcgcgctcgctgtccggctcagtcgtttgaaagaaaaggcgaaatggtttcacgtaacggagcaggaacatggggaagaggtttggctggattaccatatcggcgagggcggtttggttgcggtttcgctttcgcaacgctcgccggaagcgtttgttaatgccgaatatctgtatcggaacgatcgtccgttttctgtaaatgtgtacggcggaacggctcacggggaaaattatgaaacgacaggagaatatcgggttgtttggcaaccggacggttcggtatttgatgcggcagggcgcgggaaaatcggggaagatgtttatgagcattgcctcgggtgttatcagatggcccaggtatatttggcgaaataccgggatgtcgcgaatgatgagcagaaggtttgggacttccgcgaagagagcaaccggattgcatcggactcgcgcgattatgtgttttatcagaatatgcgggaattgatgccccgagggatgaaggcaaacagtcttgtggtcggctatgatgcggatggtctgccgcagaaagtctattggagtttcgacaatggaaaaaaacgccagagtttcgaatattatttgaaaaacggaaatctttttattgcacaatcttcgacggtagcattgaaagcggatggcgtaacggcggatatacagacctatcatgcgcaacagacgtggtatttggatggcgggcggattatccgcgaagagaaacagggagacagactgcctgattttcctttgaacttggaaaatttggaaaaagaggtgcgccgttatgcagaggctgcggcgagacgttcgggcggcaggcgcgacctttctcactga

SEQ ID NO: 65569 - DNA, 627 bp, Neisseria meningitidis; identical to SEQ ID NO: 45676

SEQ ID NO: 65570 - DNA, 1068 bp, Neisseria meningitidis; identical to SEQ ID NO: 42520

SEQ ID NO: 65571 - DNA, 1569 bp, Neisseria meningitidis; identical to SEQ ID NO: 37146

SEQ ID NO: 65572 - DNA, 1779 bp, Neisseria meningitidis; identical to SEQ ID NO: 50636

SEQ ID NO: 65573 - DNA, 1386 bp, Neisseria meningitidis; identical to SEQ ID NO: 43882

SEQ ID NO: 65574 - DNA, 4179 bp, Neisseria meningitidis; identical to SEQ ID NO: 50195

SEQ ID NO: 65575 - DNA, 918 bp, Neisseria meningitidis
atggaaaaagcagaacatttgaacagcagccggttcgtcaatctagtcaaaagcggcggcggcagctatgtggagggcagctaccgtttcgatactttgtccaacggcatttccatccacggcggcacagtaacggcacggtgtgatttttgcagcagccgcctcgccgaaccttatgtgtcgttcgtacttttgctggaaggctctttgagcttcggcatcaaccggagccgcttccaaatcgatgcggacggcggcaaggtcatcctgatttcagtcggggaagaagtcctgttcagccgctatctttatcgcggcggcaaaacggtcaaaatgacaattaaaggtatggaacaatggctgctgcgtccggaatacgcgcgtttcgcacccctgctttaccgcgaaccggtcaggatataggatttgcccccgaacctgcgcggcttggcggcatcctgcctgcaagccgtcccaaaggggcatttgggcaaaacattacgccgcgaggcagacgtgttgcggctgctgtcggacttgtgggacacggtttcagacggcatcgggccggcggtggggcaaacggcggaagcagacgctatgccgtctgaagacttcagccgcaccctaaatgccgcgttcgacggcggcgcacaccaagtcaaccgactgacagatgcgctgaacatcagcgaaaggacgctgcaacgccgtatgcgcgaccatttcggcattaccgcaagcgagtggctgcaccacaaacaaatgcagcacgcgctctatctgttgcaaaacggggggaaaagcataggcgaaaccgcatatttatgcggctaccgccacgtttccagctttactcaggcattcaggcaatatttcggcagcacgcctgcggaaaccaaaaaagaaaaccggtaa

SEQ ID NO: 65576 - DNA, 1047 bp, Neisseria meningitidis
atgaaaatgcaggcagttgttgtgaataaaaatgtagcgggcgatgtggaaatagtcgaacgcgaggttcgcccgttggaatacggcgaggcgttggtcgaagtcgaatattgcggcgtgtgccacaccgacctgcacgttgcggcaggcgactacggcgaaaaaccgggccgcgtgctgggacacgagggcatcggtttggttaaagaagttgccgacggtgtgaaaaatctgaaagtcggcgaccgcgtcagcatcgcctggctgttccaaagctgcggctcgtgcgaatactgcaataccggccgcgaaaccctgtgccgctctgtattgaacgcgggctacaccgccgacggcggcatggcgacccactgtatcgtgagtgccgattacgcggtcaaagtcccagaaggcttggatcctgcgcaagcttcgagcattacttgtgccggtgtaaccacttataaagccattaaagtttccagtgttcgtccgggacagtggattgccatctacggcgcgggcggtttgggcaacttgggggtccaatacgcgaaaaaagtattcggcgcgcacgttgtcgccatcgacatcaacgatgaaaaactggcgtttgccaaagaaaccggcgcggatttggttgtcaacgccgccaaagaagacgctgccaaagtgattcaggaaaaaaccggcggcgcacacgctgcggtcgtaaccgccgtatctgctgccgcattcaactctgccgtgaattgcgtccgcgcgggcggacgtgtggttgccatcgggctgccgccggaatcgatggatttgtccatcccgcgtttggttttggacggcatcgaagtggtcggctctttggtcggcacgcgcaaagatttggaagaagccttccaattcggcgcggaaggtttggttgtgcccaaagtccaactgcgtgctttggatgaagcacccgccattttccaagaaatgcgcgaaggcaaaatcaccggtcgtatggtgatcgatatgaaaaaagaatgcggctgcggccatcaccactga

SEQ ID NO: 65577 - DNA, 1527 bp, Neisseria meningitidis
atgaatcccatgtacattacttttgcaatctatctggttgcagtccttctcatcgggcttgccgcctatttttctacgcgcaatttcgacgattacattttgggcgggcgcagcctgggcccgtttgttaccgcgatgtcggcaggcgcgtccgatatgtccggctggctgctgatgggtctgccgggcgcgatttacctgagcggtttgaatgaggcttggattgccatcggcctcttggtcggcgcgtatttcaactggctcttggtggcgggccgcctgcgcgtgcataccgaatacgccaacaatgcgctgacgctgccggattatttcttccaccgcttcggcgcgggcggacacttgatgaaagtggtttccgcactgattatcctgttcttcttcacgatttattgcgcctcgggcattgtggcgggcgcaaccctgttccaaagcctgtttgaaggtatgacttacaatcaggcaatgtggctgggcgcgggcgcgaccatcgcctataccttcttgggcggtttcttggcggtcagctggacggatacgctgcaggcttctttgatgattttcgccctgattttaacgccggtgatggtctatctgggcttgggcggcgcggaacagatgtctgccgcgattcaaagcgtcgccgcaggcacgggcaaagaatacggcagcctgtttgccggtacgaccgtcatcggcatcatttccaccgccgcatggggcttgggctatttcggacagccgcacattttggcgcgctttatggcggccgaaagcgcgaaatcgctggtatccgcacgccgcatcggcatgacttggatggcgttgtgccttgcgggcgcggtggcggtcggttatttcggcattgcgtatttcggtgcaaatcccgacaaagtttcttctatgagcggcaaccacgaacgcatcttcatcgcgctttccaccctgctgttcaacccttggattgccggcattattttgagcgcgattttggcggcggtgatgtccaccctgtcctgccagcttttggtttgctccagcgcgattaccgaagacttctacaaaggctttttgcgtaaaaacgcgcaacagtcggaattggtatgggtcggccgcctgatggtcttggcgattgccgtgatttccatcctgattgcttccgatccgaacagcaaagtattgggactggtttcttacgcgtgggcaggtttcggtgcggcgttcggcccgattgtgattctgtccgtattgtggaaacgcatcactgcctacggcgcgttgtcgggtatggttgcaggtgccttaaccgtagtcgtatgggcggaatgggtgaaaaaaccggctcaagcggcaggagaaagcggcttgttgacgatgtacgaaatcgtcccgggctttattgtttgcttaatcattgccgtgttggtttccctgttcaacaaagaaccttcgcgcgaaatccaagaacgctttgaaaaagccgacgcagattaccgcgccgcccgataa

SEQ ID NO: 65578 - DNA, 390 bp, Neisseria meningitidis; identical to SEQ ID NO: 51624

SEQ ID NO: 65579 - DNA, 1194 bp, Neisseria meningitidis; identical to SEQ ID NO: 51180

SEQ ID NO: 65580 - DNA, 1194 bp, Neisseria meningitidis; identical to SEQ ID NO: 50210

SEQ ID NO: 65581 - DNA, 603 bp, Neisseria meningitidis; identical to SEQ ID NO: 59629

SEQ ID NO: 65582 - DNA, 963 bp, Neisseria meningitidis; identical to SEQ ID NO: 59992

SEQ ID NO: 65583 - DNA, 120 bp, Neisseria meningitidis; identical to SEQ ID NO: 43584

SEQ ID NO: 65584 - DNA, 291 bp, Neisseria meningitidis; identical to SEQ ID NO: 42924

SEQ ID NO: 65585 - DNA, 1008 bp, Neisseria meningitidis; identical to SEQ ID NO: 64484

SEQ ID NO: 65586 - DNA, 1098 bp, Neisseria meningitidis
atgaaccagacatttaccttgcccgatacgcgcccgtatccccaaaatccgattaagaaccacctgctgctcaatgcctaccagttggcgcacaattcttcccaggcttcgcgcaaactctcgtccggccaacttcaaaccgaaatcagggggatgcttgagcaaaaccactatatcaacctttccctcgcgctgacgatgtcgcccgatgccggaacttatgccgcgctgctttccagtgtgaacgcggtactcgattgcgagaaagaaggcgaagtgcagtggttcgccctgccggtcgtgctggtgtccggctgcaagaaagaacgggcaatcgagatgaagctgccgacggagggattgtttgcctgtttgcaaaactatccgcacctgcgcgcgttgacgcaagagacgcaatggctgccttatcttgtacattcctccgatttgagtgcggtcgcgccggatgagtggtggcgtgccaaacaaaataccgaagcggcggcgcaacacttacgccgtttcgccccgcgccctttgcttttgcccgaagggcagtccgtccacgtcgtttacgcgctgggtttcggcagcggcaaagttcagacggcattgggtcagaaccttcttcaggcaggtctgcccttgatgcaggtatggcaggaaaatcttgcatcggaaggcgttacgctgtttgccaatccgctttccccggattctccggtacgcgcgctttccgacggcagccacacgcgccagcgcatggcgatggatgtgtttgcggcaaacgcgatacgcgccgtccgtatgcagagtccgcgcgtcggcgtggtcgcagcggcaaaggcgggcggacagattttattcgggtttaatgcgaccgacggcgcgtttgaagtcgtgccgcaggtgttttcgtggcagctttcctttaccgacaatattggcgttattcagcaaaattttttggatttaatggcagaatgccgtgtagaacacgtttacctgttgcacaatcccttgggcgaacaggaaagcatcccgagctatgcggaagcattgaaacgggaagggcacaatccgtttttcagcgcatag

SEQ ID NO: 65587 - DNA, 126 bp, Neisseria meningitidis; identical to SEQ ID NO: 42488

SEQ ID NO: 65588 - DNA, 369 bp, Neisseria meningitidis; identical to SEQ ID NO: 37026

SEQ ID NO: 65589 - DNA, 465 bp, Neisseria meningitidis
atgaaatgcccgttttgcacccaccccgacacccgcgttgccgattcgcgtctgatggaagaacgcaacgccgtgcgccgccgccgccactgccccaactgcggcaaacgcttcggcacgctcgaaaccgccgaactcaaaatgcccgccgtcatcggtccggacaaaaaacgttcgcccttcaatgcacaacgcctccgcaacgacctgaccgccgccgcccgaaaatccgccctgacacccgaacagattgacgaaaccgtccgcctgacggaacacaggctctacacttcgggtcttcgcgacatcccctctgccgaacttgccgacatggtgctaaaagagctgcttgagcacaacacggaagccgccgtccgtttcgccgccctgcacaaacgcttcgacaatccggcagactttgcctcgtggctggcgcaagccgtcaaaacaggcggcaaagcctga

SEQ ID NO: 65590 - DNA, 363 bp, Neisseria meningitidis; identical to SEQ ID NO: 43221

SEQ ID NO: 65591 - DNA, 1554 bp, Neisseria meningitidis
atgacacaggccaaccgcgttatcattttcgacaccaccctgcgcgacggcgaacaatcgcccggcgccgctatgaccaaagaggaaaaaatccgcgtcgcccgccagctggaaaaattgggtgtggacatcatcgaagcgggttttgccgctgccagcccgggcgatttcgaggcggtcaatgcgattgcgaaaaccattaccaaatcaacggtctgttcattgtcccgcgccatcgagcgggacatccgtcaggcgggtgaggccgttgcgcccgcgccgaaaaaactcatccacaccttcatcgccaccagccccatccatatggagtacaaattgaagatgaagccgaagcaggtgattgaggcggcggtcaaagcggtgaaaatcgctcgtgaatacaccgacgatgtggaattttcctgcgaagacgcgttgcgttcggaaatcgatttccttgccgaaatctgcggcgcggtgattgaagcgggcgcgaccaccatcaatattcccgataccgtcggctattccatcccgtataaaaccgaagaatttttccgcgaactgattgccaaaacgcccaacggcggcaaagtcgtttggtcggcacactgccacaacgatttgggcttggcggttgccaattcgcttgccgcattaaaaggcggcgcgcgtcaggtggaatgtactgtcaacggcttgggcgaacgtgcaggcaatgcttcggttgaagaaatcgtgatggcgttgaaagtgcgccacgacttgttcggcttggaaaccggcatcgataccacgcaaatcgtgccttcgtccaaactggtgtccaccattacgggctatcccgtgcagcccaataaagccattgtcggtgccaatgccttttcgcatgaatcgggcatccatcaggatggggtgctgaaacaccgcgaaacttacgagattatgtccgccgaatcggtcggctgggcaacaaaccgtttgagcttgggcaaattgtccggccgcaacgccttcaaaaccaagctggcggatttgggcatcgagttggaaagcgaagaggcactgaacgccgcgtttgcccgcttcaaagaactcgccgacaaaaaacgcgaaatcttcgatgaagacctgcacgcactggtatccgacgaaatgggcagcatgaatgccgagagctacaaattcatctcccaaaaaatcagcaccgaaaccggcgaagagccgcgcgccgacatcgtgttcagcatcaaaggcgaagaaaaacgcgcttccgcaaccggttccggtccggttgatgcaattttcaaagcgattgaaagcgtggcgcaaagcggcgcgactttgcagatttattccgtcaacgccgtcacgcaaggtacggaaagccaaggcgaaaccagcgtccgtctggcacgcggcaaccgtgtcgtcaacggtcagggcgcggataccgacgttttggttgccactgccaaagcctacctttccgctttgagcaaactggaatttagtgccgccaaaccgaaagcgcaaggcagcggtacgatttga

SEQ ID NO: 65592 - DNA, 186 bp, Neisseria meningitidis; identical to SEQ ID NO: 37143

SEQ ID NO: 65593 - DNA, 1293 bp, Neisseria meningitidis
atgcagttctcagcattcggcgaaaaattcacgcaacacagcggcatcctccaactgatggacgacctcggcgacgcgctcaaaagcgacaagcccgtcaacatgctcggcggcggcaacccggcgcgcattccggaaatcgatcaggcgttcgccgacatattctccaaactggcggcagaacacgccgtcgaaaacatcggcaactactccaatccccaaggcgatgccgtgctgattgacgcgctgaccgccttcctcaaccgcgaatacagctggaatctgaccgccgacaatatcgcgctgaccaacggttcgcaaaacgcgtttttctatcttttcaacctcttcggcggcaaattcaacctttcagacggcacatccgcagaaaaagccattttgttgccgctcgcgcccgaatacatcggctatgccgacgtgcatgtcgaagggcagcacttcgtttccgtcaagcccaaaatcgaaaacgtcgaacacgaaggcgaagcaggcttcttcaaataccgcgtggactttgacgcactggaaaacctgcccgaactcaaagcgggcaaaatcggcgcgatttgctgttcgcgcccgaccaacccgaccggcaatgtgttgaccgacggcgaaatggcgcgtttggacgctttggcgcgtgaacacgggattccgctgattatcgacaacgcctacggaatgccgttccccaacatcatttacagcgacgtaacgctgaattggcatgaaaacatcatcctctgcttcagcctttccaaagtcggcctgccgggcgttcgcaccggcatcatcgtcgccgcgccggaagtggtcaaagccgtcagcagcctgaacgcgattgtgaaccttgcccccacgcgcttcggcgcggccatcgccgccccgctactggaaagcggcgagatgaaacggcttgccgaccaagtcatccggccgttttaccgcaatcaggcgcaaaccgccgtctcgctgctcaagcgcgagctgggcgcgtacccgatgaaaatccacaaacccgaaggcgcgattttcctgtggctctggtttgaaaacctgcccgtttcttcgcaaaccctgtacgaaatgctcaaagccgaaggtacgctgattattccgggcgagcatttcttcgtcggcatcgacacgcaggattacccgcacgcgggcgagtgcatccgcatgagcatcgcgcaggacgctcaaacgctgggaaaaggcattgccgccatcggtaaaaccgtccgaaaactgtacgacaacgtttaa

SEQ ID NO: 65594 - DNA, 339 bp, Neisseria meningitidis; identical to SEQ ID NO: 43914

SEQ ID NO: 65595 - DNA, 129 bp, Neisseria meningitidis; identical to SEQ ID NO: 45231

SEQ ID NO: 65596 - DNA, 291 bp, Neisseria meningitidis; identical to SEQ ID NO: 42317

SEQ ID NO: 65597 - DNA, 1539 bp, Neisseria meningitidis
atgaatatgctgggagctttggcaaaagtcggcagcctgacgatggtgtcgcgcgttttgggatttgtgcgcgatacggtcattgcgcgcgcattcggcgcgggcatggcgacggatgcgttttttgtcgcgttcaaactgcccaacctgcttcgccgcgtgtttgcggagggggcgtttgcccaagcgtttgtgccgattttggcggaatataaggaaacgcgttctaaagaggcgacggaggcttttatccgccatgtggcggggatgctgtcgtttgtgctggtcatcgttaccgcgctgggcatacttgccgcgccttgggtgatttatgtttccgcacccggttttgccaaagatgccgacaaatttcagctctccatcgatttgctgcggattacgttcccctatatcttattgatttcactttcctcttttgtcggctcggtactcaattcctatcataaattcagcattccggcgtttacgcccacgttcctgaacgtgtcgtttatcgtattcgcgctgtttttcgtgccgtatttcgatcctcccgttaccgcgctggcttgggcggtttttgtcggcggtattttgcagctcggcttccaactgccctggctggcgaaactgggttttttgaaactgcccaaactgaatttcaaagatgcggcggtcaaccgcgtcatgaaacaaatggcacctgcgattttgggcgtgagcgtggcgcaggtttctttggtgatcaacacgattttcgcgtcttatctgcaatcgggcagcgtttcatggatgtattacgccgaccgcatgatggagctgcccagcggcgtgctgggggcggcactcggtacgattttgctgccgactttgtccaaacactcggcaaaccaagatacggaacagttttccgccctgctcgactggggtttgcgcctgtgcatgctgctgacgctgccggcggcggtcggactggcggtgttgtcgttcccgctggtggcgacgctgtttatgtaccgcgaatttacgctgtttgacgcgcagatgacgcaacacgcgctgattgcctattctttcggtttaatcggcttaatcatgattaaagtgttggcacccggcttctatgcgcggcaaaacatcaaaacgcccgtcaaaatcgccatcttcacgctcatctgcacgcagttgatgaaccttgcctttatcggcccactgaaacacgtcggactttcgcttgccatcggtctgggcgcgtgtatcaatgccggattgttgttttacctgttgcgcagacacggtatttaccaacctggcaagggttgggcggcgttcttggcgaaaatgctgctctcgctcgccgtgatgggcggcggactgtgggcggcgcaggcttgcctgccgtttgaatgggtacgcgccggcggaatgcggaaagcggggcagctctgcatcctgattgccgtcggcggcggactgtatttcgcatcactggcggctttgggcttccgtccgcgccatttcaaacgcgtggaaaactga

SEQ ID NO: 65598 - DNA, 801 bp, Neisseria meningitidis; identical to SEQ ID NO: 51109

SEQ ID NO: 65599 - DNA, 1914 bp, Neisseria meningitidis; identical to SEQ ID NO: 51302

SEQ ID NO: 65600 - DNA, 348 bp, Neisseria meningitidis; identical to SEQ ID NO: 51281

SEQ ID NO: 65601 - DNA, 837 bp, Neisseria meningitidis
atgcaaatcatacataccattcaagaactgcgcgcgtggcgtaaaaatgcgggaaaggtggcatttgtgccgaccatgggcaacctgcacgaagggcatcttgccctcgttcgcgaagccaaaaaacgcgccgacaacgttgttgtcagcatattcgtcaaccgcctgcaattcggtcagggcgaggatttcgacaaatatccgcgtactttgcaacaggatgcggacaagctggaagccgagggtgttgccgttgttttcgcgcccgatgagaaagaactctatccgaacgtggagcaacggtataacgtcgaaccgcccaacctgcaaaatgagttgtgcggcaagtttcgtccgggacatttccgcggggtggcaacggtagtgtccaagctgttcaatattgtcgcgccggatgttgcctgtttcggcaaaaaagactatcagcagcttgccgtgattaaaggtttgaccgaggatttgaattttgatgttgaaatagtgcctgtcgatacggggcgcgcggaagacggtttggcactctccagccgcaaccagtatttgagtgcggcggaacgcgacgaagcaccgcgcctgtaccgcgaattaaaggctgttgccgaatccttggcgcagggcagtttggattatgcaggtttggaaaaacgtgccgtccaatccctgacagaatacggctgggtggtcgattatgtcgaaatccgccgcgccgatacgctcgaagtggcgcgggcgggagataagaaactggtggtcttggccgccgcccgtctggggacgacgcgcctgattgacaatttggaaataaaactcccttaa

SEQ ID NO: 65602 - DNA, 1287 bp, Neisseria meningitidis
atgacggcacaacaccaaaccccgctccgcttcattaccgccggcagcgtcgatgacggcaaaagcaccctaatcggacgactgctctacgacagcaaagccctgctgtccgaccaaatcaaaaccttggaatccggcaaaagcaaaggtttgaaagaaaccatagacttctccatcctgaccgacggactggaagccgaacgcgaacagggcattacgatcgatgtggcataccgctatttttccacggcgaaacggaaattcatcatcgccgacacgccggggcacgaacaatacacgcgcaatatggttacgggcgcaagcaccgcttcggcggcagtcgtgctggttgacgcatcccaactggatttcggcgcgcagcccttgcagcttctgccgcagaccaaacgccattccgccatcctccgccaactcaactgcccgcatattgtggtggcggtcaacaaaatggacctgctggattacagcgaagacaaattcaacgccattgtggaggcataccgccgacttgccgaacagctcggtttgaaagacgtgcatttcgtaccggtgtccgcactcttgggcgacaacctcgtttaccccggcggcaatatgccgtggtatcggggcgaaccgctgctggtcatcttggaaaacctgccgggggcggacgaaaccggtcgttccgctgccgatttttatttccccgtgcaactggtcgtccgccaagatgccgacaaggccgatgatttccgaggctatcaggggcgcatcgaacgcggttcggtcgccgtcgggcaaaccgtccgcatcgaaccgaacgggctgaccgccgaagtgtccgaaatcatcacgccgaaaggggaagtggcgcaggcttttgccggcgaggcggcaaccctccggctggaccgcgacatcgatgtttcgcgcggcgacctttttgtcgataaaaattccccgctcgccccgcaaaaacatctggaagccacgctttgctggtttgacgaacgtccgctcaacaccgcgcgcaaatacctgctcaagcacggcacgcaaaccgtgccggcaaaagtcggggaaattgaaagcgttttagatgtccgcacgctggaacaagaggccggcgcggaatccttgaagatgaacgacatcgccaaagtccgcatcaaccttcaaaaacccgttacggcaacgccttatgcggaaaacaccgccgccggttcgtttatcctgatagacgaagcgacatacggcactgttgcggcaggtatgattttatga

SEQ ID NO: 65603 - DNA, 729 bp, Neisseria meningitidis; identical to SEQ ID NO: 50903

SEQ ID NO: 65604 - DNA, 1266 bp, Neisseria meningitidis
atgagcaaaaaccaacccgcacaaccgaccaagcgcactctttttaaaaccgcgatcgcagccggagcagtcggcgcaatcggaggttatctcggcggcaaaaaacggggcgaaaccgccgaacgcaccgccgaaagccaacactcgccccaagcctatccctgctacggcgaacatcaggcaggcatcgttacgccgcagcaggcgttttcgattatgtgcgccttcgacgtaaccgcgcaaagtgccaagcagctggaaaacctgttccgcacgctgaccgcccgcatcgagtttctcacccaaggcggcgaataccaagacggcgacgacaaacttccgccagccggcagcggcattttgggcaaagccttcaaccccgacgggttgaccgttaccgtgggggtgggcagcagcctgtttgacggccggttcggactcaaagacaaaaaaccgattcatttgcaggaaatgcgcgacttctccaacgataagctgcaaaaaagctggtgcgacggcgatttgagcctgcaaatctgtgccttcacccccgaaacctgccaagccgccctgcgcgacatcatcaaacacaccgtccaaaccgccgttatccgctggagtatcgacgggtggcagcctaaatccgaacccggcgcgatggcggcgcgcaacctgttgggcttcagggacggcacgggcaaccccaaagtttccgaccccaaaaccgccgacgaggttttgtggacgggtgtggccgccaacagcctcgacgaaccggagtgggcgaaaaacggcagctatcaggcagtccgccttatccgccactttgtcgagttttgggacaggacgccgcttcaagagcaaaccgacattttcgggcggcgcaaatacagcggtgcgccgatggacggcaaaaaagaagccgaccaaccggattttgccaaagaccccgaggggaataccacgcccaaagacagccatatacgcctggcgaatccgcgcgatcccgaattcctcaaaaaacaccgcctcttccgccgcgcctacagctattcgcgcggactcgcctcaagcggacagcttgatgtcgggctggtgttcgtctgctatcaggcaaaccttgccgacggattcatcttcgtgcaaaacctcctcaacggcgaaccgctggaagaatacatcagccccttcggcggcggctatttcttcgtcttgcccggcgtggaaaaaggcggctttttggggcaagggctgctgggcgtataa

SEQ ID NO: 65605 - DNA, 822 bp, Neisseria meningitidis; identical to SEQ ID NO: 50445

SEQ ID NO: 65606 - DNA, 1368 bp, Neisseria meningitidis; identical to SEQ ID NO: 51642

SEQ ID NO: 65607 - DNA, 657 bp, Neisseria meningitidis; identical to SEQ ID NO: 58943

SEQ ID NO: 65608 - DNA, 849 bp, Neisseria meningitidis; identical to SEQ ID NO: 37501

SEQ ID NO: 65609 - DNA, 3615 bp, Neisseria meningitidis
atgtctgcaagcatccaagcattcgacccgctaaccgtccccattgccggcaccaacctgattgaggcctctgccggcaccggcaaaacctacggcatcgccgccctgtttacgcgcctgatcgtattagaacaaaaaaacgtcgagcgcgtattggtcgttaccttcaccaaagccgccaccgccgagttgaaaacacgcctgcgcgcacgtttggacgatgtgttgcaggttttagaaagtaaagaaattgccaaacttggagacggcgcgctttcagacggcatcgccgcctactgcgccgaacaccacaaaggcgacaccttcctgcccgcactcttaaaacaggctttgcaaaaagagggccggacgcgtctgattgtccgcctcaaggccgccatcgggcaattcgacaacgccgccatctataccatccacggcttctgccaacgtatcctgcgcgactacgccttcttgtgccaagcaccgttcgatgtcgaactgaccgaagaagacggcgaccgcctgcttatcccggcgcaagatttttggcgggaacgcgtcagcaatgatccggtgcttgccgcattggcgtttaaacgcaaagctgtgccgcaaaccgtccttgcccaaatttcgcgctatctttcccgcccgtacctgaatttccgccgtccgcaggcggatttgaaacaggcgcagcgcaacgccgaaacctcatggcaaaccatctgccgcctgctgcccgagctggaagccggcttttggcgcatccatcccgacctcaacggcaacagttaccgcaaaaacagcttcggcaacctttttaaagaactggcacaaaaatccgccgccggacaactgccctttctggacaaagacacgcacgacagactcttgaaacttgcgtccgacaaactcgaagccgcccttaaaaaaggcaaaacgcccgatgcggcagcatttgccgaattgcagaaactggcagacttcgggcgcgatttgaacgcactcgaagaagcggaagaagcaacaatgatccggctgcaactggatttaatcggatacctcaaccgcagccttgccgagatgaaaaaatcgcgccgcgaacgcggtttcgacgacctgctgctcgatgtccacaccgcgctgaccgacaatccgcacgccgaaaccctcgcccgcgccgttgccgaaaactgggaaaccgcgctgatcgacgagttccaagacaccgacccgctgcaatatgaaatcttccaaaagattttcattgcccaaaaccgcccactgtttctcgtcggcgatcccaaacaggcgatttacagctttcgcggagcggacatttacgcctacctgcaagccgccggagacgcgcggcaccgctacacgctcgccaccaactaccgcagccacgccgcgcttatcggcagcataggcgcgctgttccgcctcaaagaacgcccgttcgttttggaaaacatcggctattcggaagtcggtgcggcgcgtgccgaaagcaggttgtcccccgaacgtcctgccgtacaggttcgttggctgcacgaaaacgacaatgaaaaagccaacaaagacgttttgcgccgccgtgccgccgactattgcgccgacgaaatcgcccacgcgctcaacgaagccgccggaggccgtctgaatttcaaaggctgcccgttgcagtcgggcgatattgccgtgctggtacgcacgcacaacgaggcggtgatggtttccgccgccctgaaaaaacggcaggtgcaaagcgtcctgctttcgcgcgaatctgtgttcgcctcgcccgaagccgccgccctgtccgcactcatcggcttctggctcgaaccgcgccgcgccggaacgctgcgctttgtcctgacaagcggcatattcggttatgacgcgcagcaattgcacgacttcaaccaaaacgaaagcgagattttgcattgggcggaatctgcccgaaccgcactcgacaactggaatcaatacggcattttcgccgctatgcagcaattttcccaaacacacggcatcgaaacgcgcctcttaagccggaacaacgggcgcagcctgaccaactatttccaactgctcgaactgcttgccgccgaagacgcgcaaaaccgcaacccagccgcgctgcacaaatggttgcgcgaccaaatcagcctggccggcaacaacagcggcgacaaccgcgccatccgtctggaaagcgacgaagatttggtcaaaatcgttaccatgcacgcctcgaaaggtttgcagtatccgctggtgtactgcccgtttgcgtgggacgcgcaagataccgggccgtccgactggcaaatcctccaccaaagcgcaaaccgaaccgaactgttggcaaaggcgcaactgtcggaagacgaacagaaacaatacgccgatgaagaaatggcggaacgcctgcgcctgctttatgtcgcactgacgcgtgccgaggaacagctcaacatctacgccgcgtactccaccaatactgccgacaaccccctcgcctacctgattgaaggctcgccccaagacagccgtgaaaccgtccgccgtgcctatgcgtgtgaaaaagacggcatcgcgatgctcaaacgcaactggcggcgcgtggcggacaacgccccttccggcacaaatttcgccttcaccgaaaatgcgccgccccctgccgcctatcgcagcaacgccggtcaaaccgccgaatttgccgcaaacagcattcccgaacgcggattccgatttgtccgccacactagctttaccgccttaagccgccatacccaaacgcccgacggcggcgaagaagatgcctgcccgtccttggatgccgccgaaacctcggtgccggcgatgccgtctgaaacgccgacggcttcagacggcatatcgatacacgattttccgaaaggcacgcaggcggggctgtgcctgcacgaaattcttgaagatttcaaattcggacaagcagccgccggacaggaaaccctcattgccgacaagctgaaaaaatacggttttgaagaaatatggctgcccgccgttgccgaaatggcggaagcctgccgcaaaacgccgctgacgggggcatacgacctgtccgacatctcacccgagtgccgctgtcccgaaatgggctttaccctccacaccgaagacttcagcctcaaacgcctgcgcgactggtttgcccgcgacgacatcaggctgcccgaagtctgccgtgccgctgccgaaacgctcgacttccacaccgtcaacggctttttaaacggctttgtcgatatggtctgccaagaccccgacggcaatatctgcgtcatcgactacaaatcaaaccacctcggtacggacgcatccgcctacacgcaacaggcaatggacgaagccgtcgcacaccaccactattaccttcaggcactgatttacgccgttgccgccgcacgctacttcaagctgcgcggacaaccgcccgccgccgtttccgtccgctacctgtttttgcgcggattggatggcaaaggcggcggcgtttggcgttgggacatagatgccgccgctttggaacagataaaataa

SEQ ID NO: 65610 - DNA, 687 bp, Neisseria meningitidis
atgtacgcatttaccgacgcacagcaacagaaggcactcttctggctggtgctttttcatatcctcatcatcgccgccagcaactatctggtgcagttccccttccaaattttcggcatccacaccacttggggcgcattttcctttcccttcatcttccttgccaccgacctgaccgtccgcattttcggttcgcacttggcacggcggattatcttttgggtgatgttccccgcccttttgctttcctacatcttttccgttttgttccacaacggcagttggacaggcttgggcgcgctgtccgaattcaacacctttgtcggacgcatcgccttagccagctttgccgcctatgcgctcggacaaatccttgatatttttgtattcaacaaattacgccgtctgaaagcgtggtggattgccccaaccgcatcaaccgtcatcggcaacgccttggatacgttggtatttttcgccgttgccttctatgcaagcagcgatgaatttatggcggcaaactggcagggcatcgcttttgtcgattacctgttcaaactcaccgtctgcggtctgtttttcctgcccgcctacggcgtgattctgaatctgctgacgaaaaaactgacgaccctgcaaaccaaacaggcgcaagaccgccccgcgccctcgctgcaaaatccgtaa

SEQ ID NO: 65611 - DNA, 420 bp, Neisseria meningitidis; identical to SEQ ID NO: 38709

SEQ ID NO: 65612 - DNA, 1239 bp, Neisseria meningitidis; identical to SEQ ID NO: 38584

SEQ ID NO: 65613 - DNA, 2664 bp, Neisseria meningitidis; identical to SEQ ID NO: 51573

SEQ ID NO: 65614 - DNA, 285 bp, Neisseria meningitidis; identical to SEQ ID NO: 52145

SEQ ID NO: 65615 - DNA, 621 bp, Neisseria meningitidis
atgaagaataatgattgcttccgcctgaaaaacccccagtccggtatggcgctgatagaagtcttggttgctatgctcgttctgaccatcggtattttggcgttactgtctgtgcagttgcggacagtcgcttccgtcagggaggcggagacacaaaccatcgtcagccaaatcacgcaaaacctgatggagggaatgttgatgaatccgaccattgattcggacagcaacaagaaaaactatagtctttacatgggaaaccatacactaccgcatacactatcagctgtggatggcgattttgcgattgatgccatgaaaactaagacgcagttggcagaggcacaattgaagagatttagttatgagctgaaaaatgccttgccggatgcggcagccatccattacgccgtctgcaaggattcgtcgggtaacgcgccgacattgtccggcaatgctttttcttcaaattgcgacaataaggcaaacggggatactttaattaaagtattgtgggtaaatgattcggcaggggattcggatatcgcccgtacgaatcttgagacgaacggcaacaatatcgtatatacctatcaggcaagggtcggaggtcgggaatga

SEQ ID NO: 65616 - DNA, 567 bp, Neisseria meningitidis; identical to SEQ ID NO: 51596

SEQ ID NO: 65617 - DNA, 726 bp, Neisseria meningitidis
atggattttctctcttgttggcggcgcatcgcagacgcgcccactatcaggcgttgcgtattatgccacggttcgtccggcgtttcagacggcatctgcgccggctgcaataccgatttggcaagtttccgcaccgacgcggcaaacagctgccccctgtgtttcatgcacgttcaaggcggcgcggtatgcggcggctgtcagaaaaaaccgcccgcattcgaccggatgtgggcatcgctgcattacgaaccgcccgtcagcaatatgatacgcgcgctgaagcacttggctgatttgggcatggtgcagccgctggcagacctgatgatgcagaatccgcccgaccggcttgcagacgaatgtttcgatttcgtcctgcccgttccgctaagcagggagcggctgctgcaacgcgggttcaaccaaagcgagggcatcgtcgggttgttggcgcaacgctacggctggcggatactgccccgacacaccgtattccgacaccaccgcccgccgcaaagcacgctcaaaggcagcgaacggcggcgaaacatcaaaaacgcctttgaaatccgcacaccgataccggaaaactgtaatattctgttaatcgacgatgtctttaccaccggcgcgacgctggacgaactggcaaagacgctgaaaaaatcgggcgcaaaccgaatctgctgctggacgctggcacgcacgccaatgaaaaaataa

SEQ ID NO: 65618 - DNA, 846 bp, Neisseria meningitidis
atgctcagttacagacacgcattccacgccggcaaccacgccgatatactcaaacatttcaccttgtttttagtgctgcaatatttcaaccgcaaagacaagccctactggtacatcgacacgcacggcggcgcgggtgtgtacaatctcgaaggcagcgaggcgcagaaagtcggcgaataccgacaaggcatcgccctgctccgacaggcgcaaaacctgcctgccgaactctctgactttgccgcgcacatacaaaaaatcctgccctcgcccgaactttactgcggttctccgtggctggcgcaatcgctgacccgcgtcggcgacaaattacgcctgtttgagctgcaccccaccgactttgtccatctgcaaaacaatatgggcgaagcaggattgggcaaacgcggacaagtgttgcgcgaagacggttacaaagagctgatttccctgctgccgcccccgccgcgccgcgccaccgtcctcatcgacccgccctatgaggaaaaacaggactaccggcgtgtaacggaaacgctgaaagccgctttaaaacggtttgagtccggctgttatctcatttggtatccctgcctcagccgcgaagaaagccgcaagctgcccgaagaattgaaaaaactcctgcccgacaactaccttcacgccgaacttcacgtccacgcgccgaaagccgacggtttcggtatgcacggcagcggaatgttcgtcatcaatccgccctatctgttggcggaacaattggcggcaaacctccccgccctgacgcggctgctggcgcaagacgaaggcgcgcgctaccttttggacagcaaaatccgctga

SEQ ID NO: 65619 - DNA, 510 bp, Neisseria meningitidis; identical to SEQ ID NO: 54807

SEQ ID NO: 65620 - DNA, 1056 bp, Neisseria meningitidis
atgactattttatcggacgttaaagcattaggacaacaaatctggctggacaacctttcccgctcgctcgtgcaaagcggcgaattggcgcaaatgctgaaacaaggcgtgtgcggcgtaacttccaatcccgccatctttcaaaaagccttcgcaggcgacgcgctttacgccgacgaggttgccgccctcaagcagcaagacctgacccccaaacaacgctacgaaacgatggcggttgccgatgtgcgtgccgcctgcggcgtctgtcttgccgaacacgaatccaccggcggcaaaaccggcttcgtcagcctcgaagtttcgcccgaattgtccaaagacgcgcaaggcacggttgaagaagcgcgccgcctctacgccgccatcgggtgcaaaaacgcgatgattaaagtgcctgccaccgacgcaggcatcgatgcgctcgaaaccctcgtttcggacggcatcagcgtgaacctcacgctgctgttctcacgcgcccaaaccctcaaagcctacgccgcctacgcgcgcggcattgccaaacgcttggcagctggacaaagcgttgcccatatccacgtcgtcgccagcttcttcatctcccgcgtggacggcgcgctggacacaacactgcccgaccacctcaaaggcaaaatcgccatcgcccttgccaaagccgcctatcaagattgggaacaatatttcaccgcccccgaatttgccgcactggaagcccaaggcgcaaaccgcgtgcagcttttatgggcatctaccggcgtgaaaaacccagcctatcccgacacgctctacgttgacagcctgatcggcgcgcacaccgtcaacaccgttcccgatgccacgctcaaagcctttatcgaccacggcacagccaaagccacgctgaccgaaggcgtagaagaagcacaagcgcagctcgccgaaaccgccgcgctcggcatcgatgtcgaaaccttggcaacgcgtttgcaggaagacggtttgaaacagtttgaagaagcgtttgaaaaactgctcgcaccgttggtttaa

SEQ ID NO: 65621 - DNA, 939 bp, Neisseria meningitidis; identical to SEQ ID NO: 43137

SEQ ID NO: 65622 - DNA, 1098 bp, Neisseria meningitidis; identical to SEQ ID NO: 50675

SEQ ID NO: 65623 - DNA, 2106 bp, Neisseria meningitidis; identical to SEQ ID NO: 51912

SEQ ID NO: 65624 - DNA, 627 bp, Neisseria meningitidis; identical to SEQ ID NO: 53660

SEQ ID NO: 65625 - DNA, 240 bp, Neisseria meningitidis; identical to SEQ ID NO: 50892

SEQ ID NO: 65626 - DNA, 582 bp, Neisseria meningitidis; identical to SEQ ID NO: 50944

SEQ ID NO: 65627 - DNA, 714 bp, Neisseria meningitidis; identical to SEQ ID NO: 63969

SEQ ID NO: 65628 - DNA, 1911 bp, Neisseria meningitidis; identical to SEQ ID NO: 51665

SEQ ID NO: 65629 - DNA, 936 bp, Neisseria meningitidis; identical to SEQ ID NO: 42109

SEQ ID NO: 65630 - DNA, 1662 bp, Neisseria meningitidis
atgctgacctacactccgcccgatgcccgcccgcccgccaaaacccacgaaaagccgtggctgctgctgttgatggcgtttgcctggttgtggcccggcgtgttttcccacgatttgtggaatcctgccgaacctgccgtctataccgccgtcgaagcactggcaggcagccccacccctttggttgcccatctgttcggtcaaaccgatttcggcataccgcccgtgtatctttgggttgccgccgcgttcaaacatttgctgtcgccgtgggcagccgacccgtatgatgccgcacgctttgccggcgtgtttttcgccgttgtcggactgacttcctgcggctttgccggtttcaactttttgggcagtcaccacgggcgcagcgtcgtcctgattctcatcggctgtatcgggctgattccagttgcccatttcctcaaccccactgccgccgcctttgccgccgccggactggtgctgcacggttattctttggctcgccggcgcgtgattgccgcctcttttctgctcggtacgggctggacgctgatgtcgttggcagcagcttatccggcagcatttgccctgatgctgcccttgcccgtactgatgtttttccgtccgtggcaaagcaggcgtttgatgttgacggcagtcgcctcacttgcctttgccctgccgcttatgaccgtttacccgctgctcttggcaaaaacgcagcccgcgctgttcgcgcaatggctcgacgatcacgttttcggtacgttcggcggcgtgcggcacgttcagacggcattcagtttgttttactatctgaaaaacctgctttggtttgcactgcccgcgctgccgctggcggtttggacggtttgccgcacgcgcctgttttcgaccgactgggggattttgggcgtcgtctggatgcttgccgttttggtgctgcttgccgtcaatccgcagcgttttcaggataacctcgtctggctgcttccgccgcttgccctgttcggcgcggcgcaactggacagcctgaggcgcggcgcggcggcgtttgtcaactggttcggcattatggcgttcggactgtttgccgtgttcctgtggacgggctttttcgccatgaattacggctggcccgccaagcttgccgaacgcgccgcctacttcagcccgtattacgttcccgacatcgatcccattccgatggcggttgccgtactgttcacacccttgtggctgtgggcgattacccgcaaaaacatacgcggcaggcaggcggttaccaactgggcggcaggcgttaccctgacctgggctttgctgatgacgctgttcctgccgtggctggacgcggcgaaaagccacgcgccggtcgtccggagtatggaggcatcgctttccccggaattaaaacgggagctttcagacggcatcgagtgtatcgacataggcggcggcgacctgcacacgcggattgtttggacgcagtacggcacattgccgcaccgcgtcggcgatgtacaatgccgctaccgtatcgtccgcttgccccaaaatgcggatgcgtcgcaaggctggcagacggtttggcagggtgcgcgcccgcgcaacaaagacagtaagttcgcactgatacggaaaatcggggaaaatatataa

SEQ ID NO: 65631 - DNA, 1284 bp, Neisseria meningitidis
atgtttgaacgcagtgtgattgcaatggcttgtatttttgccctttcagcctgtgggggcggcggtggcggatcgcccgatgttaaatcggcggacacgctgtcaaaaccggccgctcctgttgttgctgaaaaagagacagaggtaaaagaagatgcgccacaggcaggttctcaaggacagggtgcgccatccacacaaggcagccaagatatggcggcagtttcggcagaaaatacaggcaatggcggtgcggcaacaacggacaaacccaaaaatgaagacgagggaccgcaaaatgatatgctgcaaaattccgccgaatccgcaaatcaaacagggaacaaccaacccgccgattcttcagattccgcccccgcgtcaaaccctgcacctgcgaatggcggtagcaattttggaagggttgatttggctaatggcgttttgattgatgggccgtcgcaaaatataacgttgacccactgtaaaggcgattcttgtaatggtgataatttattggatgaagaagcaccgtcaaaatcagaatttgaaaatttaaatgagtctgaacgaattgagaaatataagaaagatgggaaaagcgataaatttactaatttggttgcgacagcagttcaagctaatggaactaacaaatatgtcatcatttataaagacaagtccgcttcatcttcatttgcgcgattcaggcgttctgcacggtcgaggaggtcgcttcctgccgagatgccgctaatccccgtcaatcaggcggatacgctgattgtcgatggggaagcggtcagcctgacggggcattccggcaatatcttcgcgcccgaagggaattaccggtatctgacttacggggcggaaaaattgcccggcggatcgtatgccctccgtgtgcaaggcgaaccggcaaaaggcgaaatgcttgctggcacggccgtgtacaacggcgaagtgctgcattttcatacggaaaacggccgtccgtacccgactagaggcaggtttgccgcaaaagtcgatttcggcagcaaatctgtggacggcattatcgacagcggcgatgatttgcatatgggtacgcaaaaattcaaagccgccatcgatggaaacggctttaaggggacttggacggaaaatggcggcggggatgtttccggaaggttttatggcccggccggcgaggaagtggcggggaaatacagctatcgcccgacagatgcggaaaagggcggattcggcgtgtttgccggcaaaaaagagcaggattga

SEQ ID NO: 65632 - DNA, 1209 bp, Neisseria meningitidis; identical to SEQ ID NO: 38616

SEQ ID NO: 65633 - DNA, 846 bp, Neisseria meningitidis; identical to SEQ ID NO: 39946

SEQ ID NO: 65634 - DNA, 705 bp, Neisseria meningitidis; identical to SEQ ID NO: 59466

SEQ ID NO: 65635 - DNA, 783 bp, Neisseria meningitidis
atgaccgacatcctcaataaaatccttaccgccaaggcacaggaagttgccgctcaaaaagccgccgtcaacgccgaacacatccgcgcacttgccgcagaagccgcgcccgtccgcagcttcatcggttcgatacgcggcaaacaccgcctaaacctgcccgccgtcattgccgaaatcaaaaaggcaagcccgagcaaggggttaatccgtccggacttccgaccggccgagattgcacgcgcctatgaaaacgccggagtggcgtgtttgtcggtactgaccgacgaaccctatttccaaggttcgcccgaatacctcaaacaggcgcgcgaagccgtatcgctgcccgtgctgcgcaaagacttcatcatcgacgaatatcaggtttatcaggcgcgcgcatggggggcggatgccgtcctgctgattgccgcagcactggaacaggaacaattggaacgctttgaagcggtggcgcacgaattgggcatgaccgtcctgctcgagctgcacgatgaaaccgaattggaaaaatgccgcaatctgaccacgccgttgtggggcgtaaacaaccgcaacctgaggacttttgaagtctccctcgaccaaaccctgtcgctgctgcccgcgctggaaggcaaaaccgtcgttaccgaaagcggcattacaggcaaggcggatgtggaatttatgcaatcgcgcggcgtgcataccttcctgatcggcgaaacgtttatgcgtgccgacgatattgaagcagaagtgggcaaactattctaa

SEQ ID NO: 65636 - DNA, 138 bp, Neisseria meningitidis; identical to SEQ ID NO: 43740

SEQ ID NO: 65637 - DNA, 948 bp, Neisseria meningitidis
atgaatatcctcagtaaaatcagcagctttatcggaaaaacattttccctctgggccgcgctctttgccgccgccgcttttttcgcgcccgacaccttcaaatgggcggggccttatattccttggctgttgggcattattatgttcggtatgggtttgacgctcaaaccttccgacttcgatattttgttcaaacatcccaaagccgtcattatcggcgtgattgcccaattcgccatcatgccggcaaccgcctggctgctgtccaaactgttgaacctgcctgccgaaatcgcggtcggcgtgattttggtcggctgctgcccgggcggtacggcttccaatgtgatgacctatctggcgcgcggcaatgtggctttgtcggttgccgttacgtctgtttccaccctgatttccccattgctgactcccgccatcttcctgatgcttgccggtgaaatgctggaaatccaagcggccggtatgttgatgtccatcgtcaaaatggttttgctccccattgttttgggtttgattgtccataaggttttgggcagtaaaaccgaaaagctgaccgatgcgctgccgctggtttccgttgccgccatcgtgctgattatcggcgcggttgttggggcaagcaaaggcaagattatggaaagcggtctgctgatttttgcggttgtcgtactccacaacggcatcggctacctgctcggcttctttgccgccaaatggaccggcctgccttatgatgcacaaaaaacgctggccatcgaagtcggtatgcaaaactcgggtctggccgccgcgctggccgccgcacactttgccgctgcgccggtcgttgccgttccgggcgcattgttcagcgtgtggcacaatatctccggctcgctgctggcaacttattgggcggccaaagccggtaaacataaaaaaccctaa

SEQ ID NO: 65638 - DNA, 1539 bp, Neisseria meningitidis; identical to SEQ ID NO: 51762

SEQ ID NO: 65639 - DNA, 984 bp, Neisseria meningitidis
atggctgcgtacgacagtttgatggtatttacaggcaatgccaatcccgaattggcacaacgtgttgtcaggcatttggacatttctttgggcaatgcttccgtatccaagttttcagacggcgaagttgccgtcgaactgttggaaaacgtacgcgggcgcgatgttttcatccttcagccgacctgtgcgccgaccaatgacaacctgatggaaatcctgacgatggcggatgcactgaagcgtgcttcggcaggtcgtattaccacagccattccgtatttcggctatgcgcgccaagaccgccgtccgcgttccgtccgcgttccgatttctgccaaactggtggcaaatatgctgtattcggcagggatcgaccgtgttttgactgtcgatttgcatgccgaccagattcaaggtttcttcgatattccggtggacaatatttatgccaccccgattctgttgaacgacatcaaacaacagcggattgaaaatctgaccgtcgtcagcccggacatcggcggtgtcgtccgcgcccgcgccgtggcaaaatccttgaatgccgacttggcaatcatcgataaacgccgcccgaaagccaatgtggcagaagtcatgaacatcatcggcgatattcaaggcagaacctgtctgattgtggacgatatgattgacactgcaaatacgctgtgcaaagccgccgtcgctctgaaagagcggggggcggaacgtgtcttggcatatgccagccacgccgtattctccggagaggcggtcagccgtatcgcctcatccgaaatcgaccaggtggtcgtaaccgataccattcctttgtctgaagcggctaaaaactgcgaccgtatccgtcaggtaacgattgccggtctgttggccgaaaccgtccgccgcatcagcaatgaagaatccgtttcatatctctttaatgaagaagtgatgacaggcagtatgttgctgccataa

SEQ ID NO: 65640 - DNA, 330 bp, Neisseria meningitidis; identical to SEQ ID NO: 42940

SEQ ID NO: 65641 - DNA, 405 bp, Neisseria meningitidis; identical to SEQ ID NO: 59187

SEQ ID NO: 65642 - DNA, 918 bp, Neisseria meningitidis
atgaacgtatctgttctcaattttggtaacacccctgtatctttccgtcaagacggttttttaaatgcaaccgccattgcatctcactttggcaagttacctaaagactacctaaaaagtgaacaaactcaacaatatatctctgcacttgctgagaatttaagcgttaggagaaaaatcctaacggaagcaaatcaaatagttatcgtgaagcgtggtggcagtgagcaaggcacatggctgcatcccaaactcgctattcactttgcccgttggcttaatccgaaatttgcggtttggtgcgatgagcagattgaaattttacttaacggcaaaatttcagacggcataaaaacagttacccccaaacccacccgcgcccttccggacggcttgaccggcgaacaaatcgaagccgtcaaaaaactgcacaacgccctgaccaaatccgcacccaaagaagcgcaggcgcgtatcgccattaccctttggtctgccgtcaaaagcaagttcggatgcagctacaaagaagtacctgccgaacagttccccgaagttttaagcgtgatgagccgcgtggcagttgaaaacggcgtgctgtacggcgaagtcctcgaccgcgaaccattgcccgcaccgcaacctgccctgcccatcagcggcaacgccctgtacgacctcgccgttgccgtcagatacggcgcgtgggccatccaaatgggcagagacgtttccctgccgctgaagcagctcggctgcaaacaggcggtaacgatgtggacggtctgggcggaaacacgcagccgcctcaaagccgccgcaaacgccctcgaagccttaaacgcacacgccgacgcggaacacgcggcaaaaatccgcccgatgctgcccgaaatccgcaacctgtcgtcggtttga

SEQ ID NO: 65643 - DNA, 603 bp, Neisseria meningitidis; identical to SEQ ID NO: 43408

SEQ ID NO: 65644 - DNA, 444 bp, Neisseria meningitidis
atgaaaaaacaaatcaccgcagccgtaatgatgctgtctatgattgcccccgcaatggcaaacggcttggacaatcaggcatttgaagaccaagtgttccacacgcgggcagatgcaccgatgcagttggcggagctttctcaaaaggagatgaaagaaactgaaggggctgcggcaccgttggtggcaataggaattttgcatgcgggcagattccttgcgcagcgttgggttacgcagcgtgttgcagcacaagctttatcaagaggagctaatgtctatgcacgaacatctcaacaagcaagagcggtagcaaaccaagcttggggaagacaaaatgttattagacatggacagaaggaaatccattcaaattattctcatttccagaactcaagtcaaaaaattcgagggcatgctttttatggaaataagcatagataa

SEQ ID NO: 65645 - DNA, 615 bp, Neisseria meningitidis; identical to SEQ ID NO: 49632

SEQ ID NO: 65646 - DNA, 1434 bp, Neisseria meningitidis; identical to SEQ ID NO: 58612

SEQ ID NO: 65647 - DNA, 504 bp, Neisseria meningitidis
atgcacgcgcttcatttttcggcttcggacaaggccgcgctttatcgggaggtgttgccgcagattgagtctgtggtggcggacgagacggattgggtggcgaatttggcgaacacggcggcggttttgaaggaggcgttcggttggttttgggtgggtttttatttggtcgatacgcgttcggacgaattggttttggcaccgtttcaggggcctttggcgtgtacgcggattccgttcggtcgcggggtgtgcggtcaggcttgggcgaagggcgggacggtggtcgtcggggatgtggacgcgcatcccgaccatattgcctgttcgtctttgtcgcgttcggagattgtcgtgccgctgttttcagacggccgctgtatcggcgtgttggacgcggacagcgaatatttggcgcagtttgatgagacagatgctttgtatttgggcgaactggcgaagattttggagaagcggtttgaggcttcgcgccaggcggcttga

SEQ ID NO: 65648 - DNA, 966 bp, Neisseria meningitidis
atgagctacacgcaactgacccaaggcgaacgataccacatccaatacctgtcccgccactgcaccgtcaccgaaatcgccaaacagctgaaccgccacaaaagcaccatcagccgcgaaatcagacggcaccgcacccaagggcagcaatacagcgccgaaaaagcccagcggcaaagccggactatcaaacagcgtaagcgacaaccctataagctcgattcgcagctgattcagcacatcgacacccttatccgccgcaaactcagtcccgaacaagtatgcgcctacctgtgcaaacaccaccagatcacgctccaccacagcaccatttaccgctaccttcgccaagacaaaagcaacggcagcacgttgtggcaacatctcagaatatgcagcaaaccctaccgcaaacgctacggcagcacatggaccagaggcaaagtacccaaccgtgtcggcatagaaaaccgacccgctatcgtcgaccagaaatcccgtatcggcgattgggaagccgacaccattgtcggcaaaggacagaaaagcgcattattgaccttggtcgaacgcgttacccgctacaccatcatctgcaaattggatagcctcaaagccgaagacactgcccgggcagctgttaggacattaaaggcacataaagacagggtgcacaccatcaccatggataacggcaaagagttctaccaacacaccaaaataaccaaagcattgaaagcggagacttatttttgtcgcccttaccattcttgggagaaagggctgaatgagaacaccaacggactcatccggcaatacttccccaaacaaaccgatttccgtaacatcagtgatcgggagatacgcagggttcaagatgagttgaaccaccgaccaagaaaaacacttggctacgaaacgccaagtgttttattcttgaatctgttccaacctctaatacactag

SEQ ID NO: 65649 - DNA, 2526 bp, Neisseria meningitidis; identical to SEQ ID NO: 50779

SEQ ID NO: 65650 - DNA, 654 bp, Neisseria meningitidis; identical to SEQ ID NO: 51501

SEQ ID NO: 65651 - DNA, 915 bp, Neisseria meningitidis; identical to SEQ ID NO: 51855

SEQ ID NO: 65652 - DNA, 1350 bp, Neisseria meningitidis; identical to SEQ ID NO: 42880

SEQ ID NO: 65653 - DNA, 543 bp, Neisseria meningitidis
gtgcagagttggaaagcgcggcgggatttcaatattgtaaagcaggatttggatttttcctgcggggcggcttcggtggcgacgcttttgaacaatttttacgggcaaacgctaacggaagaagaagtgttgaaaaagctggataaggagcagatgcgcgcgtcgtttgaggatatgcggcgcattatgccagatttgggttttgaagcgaaaggctatgccctgtctttcgagcagctcgcgcagttgaaaatccccgtcatcgtgtatctgaaataccgtaaggatgatcatttctcggtattgcgcggtatagacggcaatacggttttgcttgccgacccgtcgctgggtcatgtttcgatgagcagggcgcagtttttggatgcttggcaaacccgtgagggaaatttggcaggtaagattttggcggtcgtgccgaaaaaagccgagacaatttcaaataaattgtttttcacacatcatcccaagcggcagacagagtttgcagtccgacaaatcaggcaagcacgtgcagagtaa

SEQ ID NO: 65654 - DNA, 249 bp, Neisseria meningitidis; identical to SEQ ID NO: 38516

SEQ ID NO: 65655 - DNA, 945 bp, Neisseria meningitidis; identical to SEQ ID NO: 58272

SEQ ID NO: 65656 - DNA, 873 bp, Neisseria meningitidis; identical to SEQ ID NO: 52883

SEQ ID NO: 65657 - DNA, 648 bp, Neisseria meningitidis
atgaaacctttgattttagggcttgccgccgtgttggcgctgtctgcctgccaagttcaaaaagctcccgatttcgactacacgtcattcaaggaaagcaaaccggcttcaattttggtggttccgccgctgaacgaatcgcccgatgtcaacggaacatggggtgtactggcttcgaccgccgcgccgctttccgaagccggctattacgtcttccccgccgcagtcgtggaggaaaccttcaaacaaaacggcttgaccaatgccgccgatattcacgccgtccggccggaaaaactgcatcagattttcggcaatgatgcggttttgtacattacggttaccgaatacggcacttcatatcaaattttagacagcgtgacgaccgtatccgccaaagcacggctggtcgattcccgcaacggaaaagagttgtggtcgggttcggccagcatccgcgaaggcagcaacaacagcaacagcggcctgttgggggctttggtcagcgcagtggtcaatcagattgccaacagcctgaccgaccgcggttatcaggtttccaaaaccgccgcatacaacctgctgtcgccctattctcacaacggcatcttgaaaggtccgagattcgtcgaagagcagcccaaataa

SEQ ID NO: 65658 - DNA, 516 bp, Neisseria meningitidis
atgtacacttgcacttcctgcggcgaaaaacatgaagatatgcccgcaatcggctttaccgccccctatccctataatcaactcagtgaagaagaacgcattgcttaccaagctgaatgcggcggcgatttctgcatcatccgctatcccgaccaaaccgaccgttttatccgcgcggtgctgcttattccgattatcgggcatgaggaaacgctggaatatggggtgtgggtatctgtcagcgaaaagagttttaacgactatcaaagccactttcacgacaatccggaaaatgtcgtttatttcgggatgatctgcaaccggctgcccccttacgaatccgacaccttcggtttgcattgcaatgtcgttacccaacccgatggtcaacgccctttgctgcaacttcatcaaagcggcggacatccgctggtacgcgacttttatcacggcatagaatatgccgaggcacaggcaaggataggagcggtatccgaatcggattgttcaggataa

SEQ ID NO: 65659 - DNA, 402 bp, Neisseria meningitidis; identical to SEQ ID NO: 51684

SEQ ID NO: 65660 - DNA, 579 bp, Neisseria meningitidis; identical to SEQ ID NO: 61148

SEQ ID NO: 65661 - DNA, 1866 bp, Neisseria meningitidis; identical to SEQ ID NO: 51393

SEQ ID NO: 65662 - DNA, 345 bp, Neisseria meningitidis; identical to SEQ ID NO: 42331

SEQ ID NO: 65663 - DNA, 669 bp, Neisseria meningitidis; identical to SEQ ID NO: 50388

SEQ ID NO: 65664 - DNA, 438 bp, Neisseria meningitidis; identical to SEQ ID NO: 43498

SEQ ID NO: 65665 - DNA, 645 bp, Neisseria meningitidis
atgaagctcaaacatctgttgccgctgctgctgtcggcagtgttgtccgcgcaggcatatgccctgacggaaagggaagactatcttgtgttggataaacccattcctcaagaacagtcgggtaaaattgaggttttggaatttttcggctatttctgcgtacattgccatcatttcgatcctttgttattgaaattgggcaaggcattgccgtctgatgcctatttgaggacggagcacgtggtctggcagcctgaaatgctcggtctggccaggatggcggctgccgtcaatttgtcgggtttgaaatatcaggcaaaccctgctgtgtttaaagcagtttacgaacaaaaaatccgcttggaaaacagggctgttgccggaaaatgggctttgtctcaaaaaggctttgacggcaaaaaactgatgcgcgcctatgattcccccgaagctgccgccgccgcattaaaaatgcagaaactgacggaacaatacggtattgacagcacgccgaccgttattgtcggcggaaaataccgcgttatcttcaataatggctttgacggcggcgttcatacgattaaagaattggttgccaaagtcagggaagaacgcaagcgtcagacccctgctgtacagaaatag

SEQ ID NO: 65666 - DNA, 1035 bp, Neisseria meningitidis; identical to SEQ ID NO: 42242

SEQ ID NO: 65667 - DNA, 1002 bp, Neisseria meningitidis; identical to SEQ ID NO: 50863

SEQ ID NO: 65668 - DNA, 597 bp, Neisseria meningitidis
atgaagataacacactgcaaattaaagaaaaaagtacagaaagaactgctccgtttttttgtactcgaagttaccgcccattctgccgccgatattttgggtatccatcccaattcggcagcactgttctaccgtaaaatccgcacggttatcaaccatcatttggccttggctgccgatgaggtttttgagggccctgtcgagccggacgaaagcgatttcggcggacggcgtaaaggtagacgtggtcgcggtgcagcaggaaaagtggttgtcttcggcattctgaaacgcaacggacgggtctataccgttgtggtggataatgccaagtctgaaacgttactccctgtcatcaagaagaaaatcatgccggacagcattgtttataccgatagtctgagcagctgcgacaagttggacgtgagcggttttatccattaccgcatcaaccattccaaggagtttgcagaccgtcagaaccacattaacggcattgagaatttttggaatcaggcaaaacgcgtcttgcgaaaatatagtggattggcacgaacgtttccccgaattggaagcgcaactgggtgcgccgattga

SEQ ID NO: 65669 - DNA, 426 bp, Neisseria meningitidis; identical to SEQ ID NO: 42184

SEQ ID NO: 65670 - DNA, 1893 bp, Neisseria meningitidis; identical to SEQ ID NO: 50804

SEQ ID NO: 65671 - DNA, 1170 bp, Neisseria meningitidis
atgccgcaaattaaaattcccgccgtttactaccgtggcggtacatcaaaaggcgtgtttttcaaacgttccgacctgcccgaggcggcgcgggaagcgggaagcgcacgcgacaaaatcctcttgcgcgtactcggcagcccggatccctacggcaagcagatagacggtttgggcaacgccagctcgtccaccagcaaggcggtgattttggacaagtccgaacgcgccgatcacgatgtcgattaccttttcgggcaagtttccatcgacaaaccttttgtcgattggagtggcaactgcggcaacctcaccgccgccgtgggcgcatttgccatcgagcaaggcttggtcgataaaggcaagattccttcagacggcatctgcacagtcaaaatctggcagaaaaacatcggcaaaaccattattgcccatgtaccgatgcaaaacggcgcagttttggaaacaggcgattttgagctcgacggcgtaacgttcccggcagccgaagtacaaatcgaatttcttgatccagccgacggcgaaggcagtatgttcccaaccggcaatttggtcgatgaaattgatgtgccgaatataggccgtttgaaagccacgctcatcaacgcgggcattccgaccgttttcctgaatgccgccgacttgggctacacgggcaaagagttgcaagacgacatcaacaacgatgccgcagctttggaaaaattcgagaaaatccgcgcttacggtgcgctgaaaatgggtctaatcagcgacgtatccgaagctgccgcccgcgcgcacacgccgaaagtcgccttcgtcgcgtccgccgccgattacaccgcctccagtggcaaaaccgtgaatgccgccgacatcgatttgctggtacgcgccctgagcatgggcaaattgcaccacgcgatgatgggtaccgcctctgttgccattgcgaccgccgccgccgtgcccggtacgctggtcaaccttgccgcaggcggcggaacgcgtaaagaagtgcgcttcgggcatccttccggcacattgcgcgtcggtgcagccgccgaatgtcaggacggacaatggacggccaccaaagcggttatgagccgcagcgcacgcgtgatgatggaaggttgggtcagggtgccggaagattgtttttaa

SEQ ID NO: 65672 - DNA, 309 bp, Neisseria meningitidis; identical to SEQ ID NO: 58887

SEQ ID NO: 65673 - DNA, 276 bp, Neisseria meningitidis; identical to SEQ ID NO: 42734

SEQ ID NO: 65674 - DNA, 780 bp, Neisseria meningitidis; identical to SEQ ID NO: 38358

SEQ ID NO: 65675 - DNA, 828 bp, Neisseria meningitidis
atggatggagaaggtatgtcggttgggcattatgaaaattttcccgtcggttcgctgattttgccgcgcaggttgaggaagccggttcatgcggtgtatgcgtttgcacggacggcggacgatatggcggacgagggcagtatgccgtctgaagccaggttggcggggttggagggtttgcggcgcgagttggacgtgttggcatcgggcggccggtcggcgcatcctttgattgcacgattggatgccgaggcggttgtgccgttcggtttggatttgcagccgttttatgatttgctttctgcattttctcaggatgtggttaaaacaaggtatggaaatttcggcgagctggccgattattgccgacgttctgccaatcctgtcggacgcattatgctggctttgtacgggaaaacggatgcggtgtgcgtggcgcaaagcgacggcatctgtacggctttgcaactggtgaatttttggcaggatgtggctgtggattggcaaaagggcagggtttatattccgcaggacgatttgttgaaattcggtgtttccgaaggacagattgcggagggtagggcggatgcggcgtttcagcggctgatggcgtatgagtgccggtgcgcatttcgtatgctgaaggcgggttcgcctttagcgcgcgaattgaaagggcgtatcggtttggaactccgtatgattgtgttgggggcgcagttgattttgcagaaactggacgcgtgccgatacgatgtgtttgcacaacgccccgttttggataagaaggattggttgattatgctgaaacgcgcgttgtggaaatga

SEQ ID NO: 65676 - DNA, 1407 bp, Neisseria meningitidis; identical to SEQ ID NO: 59236

SEQ ID NO: 65677 - DNA, 1404 bp, Neisseria meningitidis; identical to SEQ ID NO: 36865

SEQ ID NO: 65678 - DNA, 1116 bp, Neisseria meningitidis
atgaagattgtaattgcaccggattcgtttaaggaaagcttgacagctcaacaggtagctgaagcaataaaaagaggcttccaacaatcgatagcagatgtggaatgtctcctctgtcctgtcggtgatgggggagaaggcactgtagatgctatccgacattctcttgacctagaagaaaaatgtctccaagtgacaggaccttttggacaaaaagaagtcatgcgctattttcaaaaagaacaactagccctattcgaagttgctgatttggttggtcttggaaaaatcccgctagagaaacgaaatccattacaaatccaaactcgtggtattggagaattgattcgccacctcattagtcaagaaattaaagaaatctatattggcgttggcggtacggccagtaatgatggaggtattgggattgctgctggtttaggttatcaattttatgatgaggatggaaatgccttacccgcttgcggtcaatccttactaaacctagcttctgtttcaacagaaaatcgctataaaattcctgaagatgttcacattcgtattttagcagatgttgtgagtcccttatgtggacaccaaggtgcgacctatacgtttggcaagcaaaaagggttggattctactatgtttgaggtcgtagatcaggcaatacaagatttttatgaaaaagtctcccctgcaacattaaaacttaaaggagcaggagctggtggaggcatcgctggtggtttgtgcgcctttgctcaggcaagtatcgtatctggaattgacacctgcctggacttgattgactttgataagaaagtgtcagatgttgacttggttatcgttggtgaaggaagactagatcgtcaaagtttagcagggaaagcgcctattggtgtagcaaaaagaacccctgtcggagttcctgttgtcgctatttgtggcagtctcgttgaagatttgccttccctgccatttgaaaatatccaagctgccttttctattttggagaaaagtgaacctttagaagatagtttgaaaaatgccagtctctatttggagcatacggcttctaatattggacacttattaaatatgcctaagatttag

SEQ ID NO: 65679 - DNA, 501 bp, Neisseria meningitidis; identical to SEQ ID NO: 50501

SEQ ID NO: 65680 - DNA, 1785 bp, Neisseria meningitidis; identical to SEQ ID NO: 51097

SEQ ID NO: 65681 - DNA, 759 bp, Neisseria meningitidis
atgaaacagaaaaaaaccgctgccgcagttattgctgcaatgttggcaggttttgcggcagccaaagcacccgaaatcgacccggctttggtggatacgctggtggcgcagatcatgcagcaggcagaccggcatgcggagcagtcccaaaaaccggacgggcaggcaatccgaaacgatgccgtccgtcggctgcaaactttggaagttttgaaaaacagggcattgaaggaaggtttggataaggataaggatgtccaaaaccgctttaaaatcgccgaagcgtctttttatgccgaggagtacgtccgttttctggaacgttcggaaacggtttccgaaagcgcactgcgtcagttttatgagcggcaaatccgcatgatcaaattgcagcaggtcagcttcgcaaccgaagaggaggcgcgtcaggcgcagcagctcctgctcaaagggctgtcttttgaagggctgatgaagcgttatccgaacgacgagcaggcttttgacggtttcattatggcgcagcagcttcccgagccgctggcttcgcagtttgcagcgatgaatcggggcgacgttacccgcgatccggtcaaattgggcgaacgctattatctgttcaaactcagcgaggtcgggaaaaaccccgacgcgcagcctttcgagttggtcagaaaccagttggaacaaggtttgagacaggaaaaagcccgcttgaaaatcgatgccattttggaagaaaacggtgtcaaaccgtaa

SEQ ID NO: 65682 - DNA, 2259 bp, Neisseria meningitidis
atgtacacaagaattatggaaatcagcccttggacgctgcgttcggcaaaactggaaaaagaacacaaacggctgcaagagagcctgaccagtttgggcaacggctatatgggtatgcgcggcagctttgaggaaacctactccgccgacagccacttgggcacctacatcgccggcgtgtggttccccgacaaaacccgcgtcggctggtggaaaaacggctatcccaaatatttcggcaaagccatcaacgcgctcaatttcagcaaagtcaaaatctttgtcgatggtcaagaggtggacttggcgaaaaacgatgttgccggcttctccgtcgaactcgatatgcagcacggcgtgttgcgccgcttgttcaccgtattcggcgtgcgtttcgatgtgtgcaaattcctgtccgtcgcgcaaaaagagctggcggttatccgctgggaagccgtatccgttgacggcaaaacccaccaagtccgcatcgattccatcatcgatgccgacgtgaaaaacgaagactccaactacgaagaaaaattctggcaggtattggacaaaggcgtttcagacggcctctcctacattgccgcccaaaccgttgccaacccttttggtgtggaacaatttatcgtcaacgccgagcaaactttcgccggcagcttcaaagccctcggcggcagccaaaccgactggcaggtctccaattctttcgaggccgaagtcggcggcacgcccaaaacctttgaaaaacgggttattgttaccaccagccgcgattatcagggcttggaagcagtgaaagccgcaggccgcgccttgtcggaaaaagtcgcaggcgttgcgtttgaaaccttgctggacgcgcacaaagcaggctggctgcaccgttgggaaatcgccgacgtggtcatcgaaggcagcgacgaagcacagcagggcatccgcttcaacctgttccaactgttctccacctactacggcgaagacgcgcgactgaacatcggcccgaaaggctttaccggcgaaaaatacggcggcgcgacctattgggacaccgaagcctacgccgtgccgctttacctcgcactggcggaacccgaagttacccgcaacctgctgcaataccgccgcaaccaactgccgcaggcacaacacaacgcgcgcgaacagggcttggcgggcgcactctatccgatggtaacgtttacgggcatcgagtgccacaacgaatgggaaatcaccttcgaggaaatccaccgcaacggcgcgattccttacgccatctatgactacaccaactacaccggcgacgagggctatcttgctaaagaaggcttggaagtcttggtcgaagtgtcccgcttctgggcggaccgcgtccacttctccaaacgcaacggcaaatacatgattcacggcgtaaccggtccgaacgaatacgaaaacaacatcaacaacaactggtacaccaacaccctcgccgcatgggtattggactacacccgcgaagccttggcgaaatacccgcgtccggatttgaacgtgcgtgccgccgagttggaaaaatgggcggacatcagcgcgaatatgtaccgtccgcatgacgaagaactcggcgtattcgtccaacacgacggcttcctcgataaagacatccgcccagtgtccgcgctttcgcccgacgatttgccgctcaaccagaaatggtcgtgggacaaaatcctgcgttcgcccttcatcaaacaggcggacgtcttgcaaggcatctacttcttcggcgaccgtttcaatatcgacgaaaaacgccgcaacttcgacttctacgaaccgatgaccgtgcatgaaagctcgttgtcgccgtgtatccactctattctcgccgccgaactgggcaaagaagaaaaagccgtggaaatgtaccggcgcaccgcccgcctggacttggacaactacaacaacgacaccgaagacggcctgcacatcacctccatgaccggctcgtggctcgccatcgtccaaggtttcgcccaaatgaaaacctggggcggcaaactcagctttgcaccgttcctgccgggcgcatggacaggctacgccttccatatcaactaccgaggccgtctgattaaagtcgccgtcggcaaagaaaacgtcgtcttcaccctgctcaaaggcgagccgctcgatttgcaggtgtatggcaaagacatcacgctcgacggcagccacgccgccgcgttggaaaaataa

SEQ ID NO: 65683 - DNA, 678 bp, Neisseria meningitidis; identical to SEQ ID NO: 42526

SEQ ID NO: 65684 - DNA, 1545 bp, Neisseria meningitidis; identical to SEQ ID NO: 60131

SEQ ID NO: 65685 - DNA, 3957 bp, Neisseria meningitidis
atgtctgtcgttttgcccttgcgcggcgttaccgccctttccgatttccgtgtcgaaaaactcttgcaaaaagccgccgcactcggactgcccgaagtcaaattaagcagcgaattttggtatttcgccggcagcgagaaagcattggatgccgcgactgtcgaaaaactgcaagccttgttggcggcgcaaagcgttgaacaaacgccaaaagcgcgcgagggcttgcatttgtttttggtaacgccccgtttgggtacgatttcgccgtgggcttccaaggcgaccaatatcgcggaaaactgcggtttggcaggcatcgagcgcatcgagcgcggcatggcggtgtggctggaaggtgcgcttaccgatgaacagaaacagcaatgggcggcgttgctgcacgaccgcatgaccgaatcggtgctgcccgattttcagacggcatccaaattattccaccatctcgaatccgaaactttctccagcgtcgatattttaggcggcggtaaagaggctttggtcaaagccaataccgaaatgggtttggcactctccgccgacgaaatcgattatctggttgaaaactatcaggctttgcaacgcaatccgtccgatgtggagctgatgatgttcgcgcaggcaaacagcgaacactgccgccacaaaatcttcaacgccgacttcatcctcaacggcgaaaaacaaccgaaatcccttttcggcatgatacgcgacacgcacaacgcgcatcccgaaggcacggtcgtcgcttataaagacaattcgtccgtgatcgaaggcgcgaaaatcgagcgtttctatccgaatgcggcggaaaaccaaggctaccgtttccacgaggaagacacgcatatcatcatgaaagtggaaacgcacaaccacccgaccgccatcgcgccgtttgcaggcgcggcaacgggcgcgggcggcgaaatccgcgacgaaggcgcaacgggcaaaggttcgcgtccgaaagcaggcttgaccggctttaccgtgtccaacctcaacatccccggcctcaaacagccgtgggaacaagattacggcaagccggaacatatttcctcgccgctggacatcatgatcgaaggtccgatcggcggcgcggcgttcaacaacgaattcggccgccccaacctcttgggctacttccgcacttttgaagagaagtttgacggtcaggttcgcggctaccacaaaccgattatgattgccggcggcttgggcagcattcaggcgcagcagacgcataaagacgaaatccccgaaggcgcgttgctgatccaactgggcggcccgggcatgcttatcggcttgggcggcggcgcggcttcttcgatggataccggcacgaacgacgcttctttagacttcaactccgtacaacgcggcaaccccgaaatcgaacgccgcgcgcaggaagtcatcgaccgctgctggcagctcggcgacaaaaacccgattatctccatccacgacgtgggcgcaggaggtttgtccaacgccttccccgaactggtcaacgatgccggacgcggcgcggtattcgagctgcgcgaagtgccgttggaagaacacggtttaacgcctttgcaaatctggtgcaacgaatcgcaagagcgttatgtcttgtcgattttggaaaaagatttggacaccttccgcgccatctgcgaacgcgaacgctgcccgtttgccgtagtcggcacggcgaccgacgacggtcatttgaaagtgcgcgacgatttgttcgccaacaaccccgtcgatttgccgctgaacgtcttgctcggtaaaccgcccaaaaccacgcgtaccgacaaaacggttgcgccatccaaaaaaccgtttcacgccggcgatatcgacattaccaaagccgcctaccgcgttttgcgcctgcctaccgtagcggccaaaaacttcctgattaccatcggcgaccgcagcgtcggcggcatgacccaccgcgaccaaatggtcggcaaataccaaacccccgtagccgattgcgccgtaactatgatgggcttcaacacctatcgcggcgaagcgatgtctatgggcgaaaaaccggccgccgccctgtttgacgcgcctgcctcgggcagaatgtgcgtcggagaagccatcaccaacatcgcggcagccaatatcggcgacatcggcaacatcaaactttccgccaactggatggcggcgtgcggcaacgaaggcgaagacgaaaaactctaccgcaccgttgaagccgtttccaaagcctgtcaggcactggatttgagcattcccgtgggcaaagacagcctgtcgatgaaaaccgtatggcaggacggagaagagaaaaaatccgtcgtctcgccgttgagcctgattatctctgcgttcgcgcctgttaaagacgtgcgaaaaaccgttacgcccgaattgaaaaacgtcgaagacagcgtattgctgtttgtcgatttgggcttcggcaaagcgcgtatgggcggctccgcgttcggtcaggtgtacaacaatatgaccggcgacgcgcccgatttggacgatacaggccgtctgaaagcgttttacaacgtaattcaacagcttgtcgccgaagacaaactcttggcgtatcacgaccgcagcgacggcggcttgtttgccacgttggcggaaatggcgtttgcggcacgttgcggtatcagtgccgatatagattgcctgatggataaattcctgccgattcattatccggatttccaaggcgacccggccgaagacttatctgacgaactttataatcatgccgccattaaaatcttatttaatgaagaattaggtgcggttatccaaatccgccaacaagatagggattatgttgatgcggcatttaaagcggccgacttaaccgatgcggtcagccggattggctctcctgattttgacaatgagtttatttctttctttggttacggctatttcttggaacaaaaccgcgccgacctgcaacgcgcatggcaggaaaccagccacgccatccaaaaactgcgcgacaaccctgcctgcgccgacagcgagttcgccctgattggcgacaacgaccgcagcgcattgtttgccgacgtgaagtttgacgtaaacgaagacatcgccgcgccgtttatcaacagtggcgcgaaacccaaaatcgccatcctgcgcgaacagggcgtgaacgggcaaatcgaaatggccgccgccttcacccgcgccggattcgatgcttacgacgtgcatatgtccgacctgatggcaggccgcttccgccttgccgacttcaaaatgctggcggcgtgcggcggcttcagctacggcgacgtactcggcgcgggcgaaggctgggcgaaatccatcctgttccaccctgctctgcgcgaccagtttgccgccttcttcgccgacccggacacgctgacattgggcgtgtgcaacggctgccagatggtcagcaacctcgccgaaatcatccccggcacggcaggctggtctaaattcaaacgcaacctgagcgaacagtttgaagcacgcctgagcatggttcacgtccccaaatccgcgtcgctgattctgaacgaaatgcaaggctccagcctgcctgtcgtggtcagccacggcgaaggccgcgccgacttcgcgcttcacggcggcaatatttccgccgatttgggcatcgcgctgcaatatgtggacggtcaaaaccaggttacccaaacctatccgctcaaccccaacggctcgccgcaaggcatcgccggcattaccaacgccgacggccgcgtgaccatcatgatgccccaccccgaacgcgtgtaccgcgccgcacaaatgagctggaaaccggaaggctggacggaactgtccggctggtaccgcctctttgccggcgcacgtaaagccttgggctaa

SEQ ID NO: 65686 - DNA, 498 bp, Neisseria meningitidis; identical to SEQ ID NO: 45177

SEQ ID NO: 65687 - DNA, 249 bp, Neisseria meningitidis; identical to SEQ ID NO: 43952

SEQ ID NO: 65688 - DNA, 1083 bp, Neisseria meningitidis; identical to SEQ ID NO: 43486

SEQ ID NO: 65689 - DNA, 219 bp, Neisseria meningitidis; identical to SEQ ID NO: 36291

SEQ ID NO: 65690 - DNA, 933 bp, Neisseria meningitidis
atgaagcagaaccgcacctttaccttccccgattttcgcaccgtttacagctatgcgcctttatatcggctgcaacatttaaaatacacattgcgaaaatttttcggaaaaaaagaaatttacgccttcgagcagtttgtcaacgcctcccctatccgtcaggggctgttcctccactgcccgcaaaatgcctatccgctgctgcgcgaatttgttgacaggcgttttaactgcaaacgccgtttagatgcgatgacggcagattttctcatggcggaaaaactgttcggcacagacatcctgcaccaaatggaagactaccgcttccatttggtcttggcgcacctttcagacggcatcagcttgtggctcaaccgcaacgacaactgcgtcgaagaaggcgcgtggtctttatctttgcgcgacgaagcaggcaaccggctgtatatggcgactttcgcctttgtcggcacacacctgctgacagcctccgtacaagggcctgcgggtgaagaagccaaagacaccgtccgccgcataaccaaacaacttcacggcttgcgtccccaacaactgatggtaaccgccctgcaatatttcgccgccgtactcggcttggacggcgcaatgggcattgcacaaaaacatcaggtcaaactgcgctggaaacttaaaaagcgtgtcaaaatgaattacgacgcattctggcaggaatacggcgcaagtttggaacgggacggctactggcatctcccccaaacccccgcccgcaaagaccttaccgacatcgaaagcaaaaaacgctcgatgtaccgcaagcgttatgaaatgctggacaacatggttgcagagatgaaggacggtctgaaaacagaagcacgcggcatttcagacggcatccaaacggaaaaaccgctccgccagacagcctga

SEQ ID NO: 65691 - DNA, 2790 bp, Neisseria meningitidis; identical to SEQ ID NO: 59540

SEQ ID NO: 65692 - DNA, 765 bp, Neisseria meningitidis
atgtgttcctgccttgttgtcaaaaataccgttatcggaagcggacgcaccaaaatcgccgtgccgcttgtcgcccgcgatgccgccgaactttccgccgtacttgaccaaatcaaaaacctgcccttcgacatcgtcgagttccgcgccgattttttggaatgcgcgggcagcatcggcgaagtattgcgccacacgcagaccgtccgcgacgcgctgcccgacaagccgctgctgtttacgttcagacggcatggcgaaggcggcgcgttcccgtgttcggacgattattatttcaaactgctcgacgcgctgatcgaaagccgcctgcccgacatcatcgacatcgagctgtttgccggcgaaaccgccgtccggcgcgccgtggcggatgctcaaaaaaacggcatcgccgccctgctctgcaatcatgagtttcaccgcacgccgccgcaagaagaaatcgtatgccgtctgaaacagatggaggactgcggcgcggacatctgcaaaattgcggtgatgccgcaaagcgcggaagatgtgctgactttgctttccgccacgctcgaagcgaaacggcttgccgccaaaccggttgttacgatgtcgatggggcagacgggtgcggtcagccgccttgccggacaggtgttcggctcaagcatcacgttcggttcgggaacgcaaaactccgcgccggggcaaatcggcgtatccgccctccgtgcggcactcgactgtctcgaaagcggcgcagactga

SEQ ID NO: 65693 - DNA, 1395 bp, Neisseria meningitidis
atgaacaaacaacccctttccctcgccgtcgtcggacacaccaacaccggcaaaacctcgctcctgcgtacccttttgcgcgacagcggtttcggcgaagtcagaaacgccccatcgaccacgcgtcatgtcgaagaagccgccatcagcgacggcgcagacacgctggttttcctgtacgacacgcccggactcgaagacgcgggcggcgtgctggaatggctggaaaaccatacggacaatcgttcagacggcatcgaacggctgcaacagtttctcggcagccacggcgcgcaccatgatttcaatcaggaagccaaagtcttacggcaagtcttgcaaagcgatatggcaatgtacgtcatcgacgcgcgcgaacccgtcctcgacaaatatcgggatgaattgattatcctttcatggtgcgccaaaccggttatgcccgtgttcaactttaccggcggacagcctcccgaatcgtggacaaccatgctggcgaggagaaacctgcacgttttcgcagggttcgacaccgtcgcctttgattttgaaggcgaactgcgcctgtgggaaaacctcgccaccatgttgcccgaacgcagcacactcgaccgcctgacagccatgcgccggcgcgaatggcagcggctggacggcgaagcgcgccgcgaaatcgccgatttcctgctcgatgccgccgccttcaggcaggaagtggacgaaaacgaggataccgccaccgtgctacaaaccatgcaggcggaaatacgccaactcgaacggcagatgcagcagcggctgtttgccctctaccgtttctaccacagcgaaatcgacggcggcgactggatgccgcaagccttccgccaagacccgttcgacagcgaattgctcaaacaatacggcatccgcaccggcacgggcgcggcaaccggcgcactcatcggcttggggctggacatcgccacactcggcggctcgctcggattgggtacggcaatcggcggctttttgggcggcatcctgcccaatacccgcaccatttccgacaaactctccggccgccaaaccttgcacaccgaccctgaaaccctgaccctgctcgccgcccgcgccctcgatttgctccacgtcctgcaaacgcgcggacacgcggcacagtcggatatcgagctgcacagccgcaaagccccgtgggacgccaccagactcccgcccgaactcaacaaagcccgcagtcattggaaatggtcgtcgctcaatacgcaccgccccgaaaccagccgcgccgaacgcgccggatatgtggagaaacttcaaatccgcctgtcgggaaaatatagtgaattaaatttaaatcaggacaaggcggcgagccgcagacagtacaaatag

SEQ ID NO: 65694 - DNA, 411 bp, Neisseria meningitidis; identical to SEQ ID NO: 50279

SEQ ID NO: 65695 - DNA, 633 bp, Neisseria meningitidis
atgagaaaaaccaaaaccgaagccttaaaaaccaaagaacacctgatgcttgccgccttggaaaccttttaccgcaaagggattgcgcgcacctcgctcaacgaaatcgcccaagccgccggcgtaacgcgcggcgcgctctattggcatttcaaaaataaggaagacttgttcgacgcgctgttccaacgtatctgcgacgacatcgaaaactgcatcgcgcaagatgccaaagatgccgaaggagaatcttggacggtattccgccacacgctgctgcactttttcgagcggctgcaaagcaacgacatctactacaaattccacaacatcctgtttttaaaatgcgaacacacggagcaaaacgccgccgttatcgccattgcccgcaagcatcaggcaatctggcgcgagaaaattaccgccgttttgaccgaagcggtggaaaatcaggatttggctgacgatttggacaaggaaacggcagttatcttcatcaaatcaaccttggacgggctgatttggcggtggttctcttcctgcgaacgtttcgatttgggcaaaaccgccccgcgcatcatcgggataatgatggacaacttggaaaaccatcccgacctgcgccggaaataa

SEQ ID NO: 65696 - DNA, 1908 bp, Neisseria meningitidis; identical to SEQ ID NO: 60082

SEQ ID NO: 65697 - DNA, 312 bp, Neisseria meningitidis
atgaaatacaaaagcgaggcattagccgccattcatgaaatgatggaaggggcttacaacatcggcgcaatcgacaaaaagactatgcgcggctttgacaagtcatgcctgaccgaaatcaaaccgttgagcggcggagacatcaaggcaatcagggagaaggaggcactatcgcaagccgctttcgccatctatctcaacgtgggaaaaaatcacgtttcggcttgggagcggggcgttaaaaagccgagcggcgcggcgttgaagctgctgaccatcgtcaaaaacaagggtatcgaagccattgcgtag

SEQ ID NO: 65698 - DNA, 1410 bp, Neisseria meningitidis; identical to SEQ ID NO: 42274

SEQ ID NO: 65699 - DNA, 210 bp, Neisseria meningitidis; identical to SEQ ID NO: 40404

SEQ ID NO: 65700 - DNA, 1842 bp, Neisseria meningitidis
atgcagacaaattatttgtctgaaacggattcgattatgaaaaaactgatttgcctgttcgccgtatttttgatgttgtgcggacgagctttcgcgctggatgcgaacgatctgctgccgccggaaaaggcattcgtgccggagcttgccgttgccgacgacggtgtgaacgtccgtttcaggattgccgacggatactatatgtatcaggcgaaaatcgtcggcaagaccgatccggcggatttgttgggacagccttctttcagcaagggtgaagagaaggaagacgagtttttcggcaggcagacggtttaccatcacgaagcgcaggttgcctttccttatgcaaaggctgtcggcgaaccgtataaattggttttgacctatcagggctgtgccgaagccggcgtgtgctatccgcccgtggataccgagtttgatatttccggcaacggcacttaccatccgcaaaccgacgaaccggcatccgccaaagaccgctttttgcagccttcctctcaaaacggcagcggggtgctgccgcccccgaagggggatgagggcggcgacagccgtttcaagctgtcttgggatacgctcaacgccaatcttttggcgttttttctcgccggtttgggtctgagttttaccgcctgtatgtatcccctgttgccgattgtttccagtattgtggtcggcgacaaaaaggcgggcaaggcgcgggcgtttgtgctgtccgtcgtttatgttcagggtttggctctgacttatacgctggtcggcattgttgccggactgacgggcgcactgctgaccgtatggttgcagcaggcttgggtggtgttggcggcatcggctttaatggtcgtcttggcactgtctatgttcgggctgttcaacatccagcttcccaacgccgtgcagtcgtattttcagaatcaaagcagcaggctttcaggcggtaaaatcgtttccgtctttattatgggcatattgtccgcgctgattgtcgggccgtgcgtcgccccgccgctggcatttgctttgggctacatcggtcagacgggcgatgcggttttaggcggtttggcactttacactttggcgttgggcaccggcgttccgctgattgccatcggcacgttcggcgggcatatcctgcctaaggcaggcgattggatgaatgccgtcaaatacgctttcggctttatcctgcttgccgtcgccgtttacctcgccacgccgcacttgccctattatctcgtcgtcgcgctgtacacgctgctgatgctggttcctgcctgtatgctgctggtcaacggacgcaggcagaaacgccgtccgaaagctgtggcattcgtattgggcggcatattgctgataggcggcgcgtggttcggctggcagggcgcaaacggcaaaacgaccgcgctgcaccatttcctgaccctcaatccgccggctgaagcaggcaaatcttcggaacacggaaaaatgtttgccgatactgccgcgctgaaggcagcgatggatacggcgttgaaagaacatcccgacaaacccgtcgttttggatttttatgccgactggtgcatttcctgcaaagaaatggcggcttacacgctcaatcagccggaagtgcatcaggcagtcgatatggaacgctttttccaaatcgatgtaaccgccaacatgcccgaacatcaggcgttgttgaaagaatacggtctgttcgggccgccgggcgtgtttgtcgtccgctccgacggcagccgcagcgagccgctgctgggttttgtcaaagcagacaagtttatcgagtggtatgaacaaaaccgctga

SEQ ID NO: 65701 - DNA, 1305 bp, Neisseria meningitidis; identical to SEQ ID NO: 44037

SEQ ID NO: 65702 - DNA, 825 bp, Neisseria meningitidis; identical to SEQ ID NO: 50603

SEQ ID NO: 65703 - DNA, 426 bp, Neisseria meningitidis; identical to SEQ ID NO: 43259

SEQ ID NO: 65704 - DNA, 369 bp, Neisseria meningitidis; identical to SEQ ID NO: 54842

SEQ ID NO: 65705 - DNA, 657 bp, Neisseria meningitidis
atggaaaagtcaggcattgtctatctgatgaaaaccgtcatcaagggcgtatataaaatcggcatttcggaggtaagcaattttgaaggcagaatgcgccatttggaaaacaacggctatgcgaacgttgccgggttggaacgcatcctcgctgtcaaaaccgacaattacaaagaaaaagaaaacctgctccatgaaattttcagcaaaagcaggataggcgataccgaattgttcgccgtggacgaaaaccttgtgaaacgtttgtttttatcgcttcgcggcgaaatcgtgttcccgaaaaacgaaacggcggaatcggaatttgaaaaaagcgtccacgaacgcaggcaggaagggaatgccgggtcaggccgcaaacaactgcttgatttggtacggcgcggacaccgggaatacccttacgcgctgccccggcttttggcgggcgcggcatcctacaagccgagaaaatcgaaaatccgcctttttaaagaagcatatttcggcaaaagcggcacgaggctgaccgacgaaattgcagacggcatccatatttacacctgtttttcgcgggcggatttggaaaaagcctattccgaatatttggaacttttcaaatccgaatcggatgccgaaggcagaaaaccacggtaa

SEQ ID NO: 65706 - DNA, 966 bp, Neisseria meningitidis
atgagctacacgcaactgacccaaggcgaacgataccacatccaatacctgtcccgccactgcaccgtcaccgaaatcgccaaacagctgaaccgccacaaaagcaccatcagccgcgaaatcagacggcaccgcacccaagggcagcaatacagcgccgaaaaagcccagcggcaaagccagactatcaaacagcgtaagcgacaaccctataagctcgattcgcagctgattcagcacatcgacacccttatccgccgcaaactcagtcccgaacaagtatgcgcctacctgtgcaaacaccaccagatcacgctccaccacagcaccatttaccgctaccttcgccaagacaaaagcaacggcagcacgttgtggcaacatctcagaatatgcagcaaaccctaccgcaaacgctacggcagcacatggaccagaggcaaagtacccaaccgtgtcggcatagaaaaccgacccgctatcgtcgaccagaaatcccgtatcggcgattgggaagccgacaccattgtcggcaaaggacagaaaagcgcattattgaccttggtcgaacgcgttacccgctacaccatcatctgcaaattggatagcctcaaagccgaagacactgcccgggcagctgttagggcattaaaggcacataaagacagggtgcacaccattaccatggataacggcaaagagttctaccaacacaccaaaataaccaaagcattgaaagcggagacttatttttgtcgtccttaccattcttgggagaaagggctgaatgagaacaccaacggactcatccggcaatacttccccaaacaaaccgatttccgtaacatcagtgatcgggagatacgcagggttcaagatgagttgaaccaccgaccaagaaaaacacttggctacgaaacgccaagtgttttattcttgaatctgttccaaccactaatacactag

SEQ ID NO: 65707 - DNA, 3033 bp, Neisseria meningitidis
atgttttggatagttttgatcgttattttgttgcttgcgcttgccggcctgttttttgtccgcgcacaatccgaacgcgagtggatgcgcgaggtttctgcgtggcaggaaaagaaaggggaaaaacaggcggagctgcctgaaatcaaagacggtatgcccgattttcccgaacttgccctgatgcttttccatgccgtcaaaacggcagtgtattggctgttcgtcggtgtcgtccgtttctgccgaaactatctggcgcacgaatccgaaccggataggcctgttccgcctgcttctgcaaaccgtgcggatgttccgaacgcatccgacggatattcagacagtggaaacgggacggaagaagcggaaacggaagcagcagaagctgcggaggaagaggctgccgatacggaagacattgcaactgccgtaatcgacaaccgccgcatcccattcgaccggagtattgctgaagggttgatgccgtctgaaagcgaaatttcgcccgtccgtccggtttttaaggaaatcactttggaagaagcaacgcgtgccttaaacggcgcggctttaagggaaacgaaaaaacgctatatcgatgcatttgagaaaaacgaaacagcggtccccaaagtccgcgtgtccgataccccgatggaagggctgcagattatcggtttggacgaccctgtgcttcaacgcacgtattcccgtatgttcgatgcggacaaagaagcgttttccgagtctgcggattacggatttgagccgtattttgagaagcagcatccgtctgccttttctgcagtcaaagccgaaaatgcacggaatgcgccgttccgccgtcatgcagggcaggcggaggcaaaatccccggatgtttcccaaggacagtccgtttcagacggcacagccgtccgcgatgcccgccgccgcgtttccgtcaatttgaaagaaccgaacaaggcaacggtttctgcggaggcgcggatttcgcgcctgattccggaaagtcggacggttgtcgggaaacgggatgtcgaaatgccgtctgaaaccgaaaatgttttcacggaaaccgtttcgtctgtgggatacggcggtccggtttatgatgaaactgccgatatccatattgaagaacctgccgcgcccgatgcttgggtggtcgaaccacccgaagtgccgaaagttcccatgcccgcaatcgatattccgccgccgcctcccgtatcggaaatctacaaccgtacctatgaaccgccgtcaggattcgagcaggcgcaacgcagccgcattgccgaaaccgaccatcttgccgatgatgttttgaatggaggttggcaggaggaaaccgccgctattgcggatgacggcagtgagggtgcggcagagcggtcaagcgggcaatatctgtcggaaaccgaagcgttcgggcatgacagtcgggcggtttgtccgtttgaagatgtgccgtctgaacgcccgtcctgccgggtatcggatacggaagcggatgaaggggcgttccaatcggaagaaaccgatgcggtatacgaacacctgccgacaaccgacctgcttctgccgccgctgttcaatcccggggcgacgcaaaccgaagaagaactgttggaaaacagcatcaccatcgaagaaaaattggcggagttcaaagtcaaggtcaaggttgtcgattcttattccggccccgtgattacgcgttatgaaatcgaacccgatgtcggcgtgcgcggcaattccgttctgaatctggaaaaagacttggcgcgttcgctcggcgtggcttccatccgcgttgtcgaaaccatccccggcaaaacctgtatgggtttggaacttccgaacccgaaacgccaaatgatacgcctgagcgaaatcttcaattcacccgagtttgccgaatccaaatccaagctgacgctcgcgctcggtcaggacatcaccggacagcccgtcgtaaccgacttgggaaaagcgccgcatttgttggttgccggcacgaccggttcgggcaaatcggtgggtgtcaacgcgatgattctgtctatgcttttcaaagccgcgccggaagacgtgcgtatgattatgatcgatccgaaaatgctggaattgagcatttacgaaggcatcccgcacctgctcgcccctgtcgttaccgatatgaagctggcggcaaacgcgctgaactggtgtgttaacgaaatggaaaaacgctaccgcctgatgagctttatgggcgtgcgcaatcttgcgggtttcaatcaaaaaatcgccgaagccgcagcaaggggggagaaaatcggcaacccgttcagcctcacgcccgacaatcccgaacctttggaaaaattgccgtttatcgtggtcgtggttgatgagtttgccgacctgatgatgacggcaggcaagaaaatcgaagaactgattgcccgcctcgcccaaaaagcccgcgcggcaggcatccatcttatccttgccacacaacgccccagtgtcgatgtcatcacgggtctgattaaggcgaacatcccgacgcgtatcgcgttccaagtgtccagcaaaatcgacagccgcacgattctcgaccaaatgggcgcggaaaacctgctcggtcagggcgatatgctgttcctgccgccgggtactgcctatccgcagcgcgttcacggcgcgtttgcctcggatgaagaggtgcaccgcgtggtcgaatatttgaaacagtttggcgagccggactatgttgacgatattttgagcggcggcggcagcgaagagctgcccggcatcgggcgcagcggcgacggcgaaaccgatccgatgtatgatgaagccgtatccgttgtcctgaaaacgcgcaaagccagtatttcgggcgtacagcgcaccttgcgcatcggctacaaccgcgccgcgcgtctgattgaccagatggaggcggaaggcattgtgtccgcaccggaacacaacggcaaccgtacgattctcgtccccttggacaatgcttga

SEQ ID NO: 65708 - DNA, 669 bp, Neisseria meningitidis; identical to SEQ ID NO: 50129

SEQ ID NO: 65709 - DNA, 504 bp, Neisseria meningitidis; identical to SEQ ID NO: 50936

SEQ ID NO: 65710 - DNA, 696 bp, Neisseria meningitidis; identical to SEQ ID NO: 50512

SEQ ID NO: 65711 - DNA, 285 bp, Neisseria meningitidis; identical to SEQ ID NO: 42876

SEQ ID NO: 65712 - DNA, 516 bp, Neisseria meningitidis; identical to SEQ ID NO: 51357

SEQ ID NO: 65713 - DNA, 1374 bp, Neisseria meningitidis; identical to SEQ ID NO: 51498

SEQ ID NO: 65714 - DNA, 324 bp, Neisseria meningitidis; identical to SEQ ID NO: 59444

SEQ ID NO: 65715 - DNA, 447 bp, Neisseria meningitidis; identical to SEQ ID NO: 50902

SEQ ID NO: 65716 - DNA, 759 bp, Neisseria meningitidis
atgattaccatccgcaacgtcagctaccgcatcggcacacgccccatcctcgacaacgtcagcctcgacatccccgaaggcggcattaccgccctcgtcggccccaacggtgtgggcaaatccaccctgttttcctttatggcgcggctgcgcccgcttgaaagcggcagcatcgcctaccgaggcaaaaaccttgccggcacccccaccgccgaactcgccaaaaccctgtctatcctcacccaagaaaacagcatcatgagccgcatcaccgtgcgcgacctgctgatgttcggccgttacccctaccatcaaggcagaccgactgccgaatgccgccgtatcgttaacggtgcaatcgaagaattccacctgcaagacctctccgaccgctacctgaccgagctttccggcggacaacgccaacgcgccatgattgcgatggtgttctgccaaagcaccgactacgtccttttggacgaaccgctgaacaacctcgacatgtatcatgcccgctccctcatgcaaatcctgcgccggctgaccgacgaacacaagcgcaccaccgtcgtcgtattgcacgacatcaaccaggccgccgcctacgccgattacgtcgtcgccatgaaaaacggcaaagccgtcctgaccggcacgcccgaagaagtgttcaccgtacacaacatcaaagaactgttcgacatggacgtggacgtactcgactacgaaggcaaaaaactcatcgtccaccatatctga

SEQ ID NO: 65717 - DNA, 618 bp, Neisseria meningitidis; identical to SEQ ID NO: 38231

SEQ ID NO: 65718 - DNA, 300 bp, Neisseria meningitidis
atgcattatttcagtattcatgaccaatcgggacggcatataggctttttcatcctgcttgccgacgacgaatcggaagcacggccgcaaagcgggcgttttgccgtcaaacttgaaggcggaatggaaaatcatgtcctgtcgccgttcggtcagacggaaattccccaatattggcgcgtggtcaaagaccgtatcgagctgttttttgacgaagctcccgtcggaactttgcgtaacgaatatctgaccgtgtcggggcagacttttgttttgaacgatttgacagggaatatgtga

SEQ ID NO: 65719 - DNA, 888 bp, Neisseria meningitidis; identical to SEQ ID NO: 50765

SEQ ID NO: 65720 - DNA, 840 bp, Neisseria meningitidis; identical to SEQ ID NO: 59829

SEQ ID NO: 65721 - DNA, 966 bp, Neisseria meningitidis
atgagctacacgcaactgacccaaggcgaacgataccacatccaatacctgtcccgccactgcaccgtcaccgaaatcgccaaacagcttaaccgccacaaaagcaccatcagccgcgaaatcagacggcaccgcacccaagggcagcaatacagcgccgaaaaagcccagcggcaaagccggactatcaaacagcgtaagcgacaaccctataagctcgattcgcagctgattcagcacatcgacacccttatccgccgcaaactcagtcccgaacaagtatgcgcctacctgtgcaaacaccaccggatcacgctccaccacagcaccatttaccgctaccttcgccaagacaaaagcaacggcagcacgttgtggcaacatctcagaatatgcagcaaaccctaccgcaaacgctacggcagcacatggaccagaggcaaagtacccaaccgtgtcggcatagaaaaccgacccgctatcgtcgaccagaaatcccgtatcggcgattgggaagccgacaccattgtcggcaaaggacagaaaagcgcattattgaccttggtcgaacgcgttacccgctacaccatcatctgcaaattggatagcctcaaagccgaagacactgcccgggcagctgttagggcattaaaggcacataaagacagggtgcacaccattaccatggataacggcaaagagttctaccaacacaccaaaataaccaaagcattgaaagcggagacttatttttgtcgcccttaccattcttgggagaaagggctgaatgagaacaccaacggactcatccggcaatacttccccaaacaaaccgatttccgtaacatcagtgatcgggagatacgcagggttcaagatgagttgaaccaccgaccaagaaaaacacttggctacgaaacgccaagtgttttattcttgaatctgttccaaccactggtaccttag

SEQ ID NO: 65722 - DNA, 189 bp, Neisseria meningitidis; identical to SEQ ID NO: 42129

SEQ ID NO: 65723 - DNA, 603 bp, Neisseria meningitidis; identical to SEQ ID NO: 43475

SEQ ID NO: 65724 - DNA, 624 bp, Neisseria meningitidis
atgatgaaaccgcacaacctgttccaattcctcgccgtttgctccctgaccgtctccgtcgcttccgcacaggcgggcgcggtggacgcgctcaagcaattcaacaacgatgccgacggtatcagcggcagcttcacccaaaccgtccaaagcaaaaagaaaacccaaaccgcgcacggcacgttcaaaatcctgcgcccggccctcttcaaatgggaatacacttcgccctacaaacagactattgtcggcgacggtcaaaccgtttggctctacgatgtcgatttggcacaagtgaccaagtcgtcccaagaccaggccataggcggcagccccgccgccatcctgtcgaacaaaaccgccctcgaaagcagctacacgctgaaagaggacggttcgtccaacggcatcgattatgtgctggcaacgcccaaacgcaacaatgccggctaccaatacatccgcatcggcttcaaaggcggcaacctcgccgccatgcagctgaaagacagcttcggcaaccaaacctccatcagtttcggcggtttgaataccaatccccaactctcgcgcggcgcgttcaagtttaccccgcccaaaggcgtggacgtgttgagcaactga

SEQ ID NO: 65725 - DNA, 414 bp, Neisseria meningitidis; identical to SEQ ID NO: 50853

SEQ ID NO: 65726 - DNA, 3948 bp, Neisseria meningitidis
atgacatctgcaaattttaatattaacggttttggagatgtgaaattaacaccctattcaccactcttgggatataaagcttgggattcatttattggttctattcaatccttatctgatttaatctataatgtggataacaatagaaataaaatggaaattactgttaataatgctatccaagctgcagatagctttttaagcagtattggaagagataacaaaataacaaatactgcttctttacttgcatccctcgataacatttttttaaatttaagaaatgtatctcgagatatacgagaaacaggaaaatttaaacctaatgatattcaacaagcaattggtgatatattcattgctgctggtgatggattacaatatataaaacaacaaacagaggcgatggctcaaagcaaattcttaccaactaaattaaaaactggtttaaatgatgtccttaattctagaatgctaaaatcctctactgttttacagcatgaattgaattatttgggatttaaaataaaggattatggaaacgagaggcttggcgaatctataatgaatatagatgattttacaccaagtaagatagcaaacttttttgcggatcctgatacatacagcaatgtattagaagaagtatctaggtttatatattccttagttcctgatgatgcaaacccttggaaagggggcgaagattatattggacgagggataagtgaatggggagagttactggaaaaatggtataaacaagattttctcccttatcttgaaaaagaatgggaccaatttccgaaatttgaagattggctgcctgaattccctgaatgggcaagagagtggttgaaattagatcccaaacgttcaggcaaatatcatgtctacgaccccctcgccctagatctagacggcgacggtatagaaaccgttgccaccaaaggctttgcaggcagcttatttgatcacaccaacaacggtatccgcaccgccaccggttgggtttctgccgatgacggtttactcgtccgcgatttgaacggcaacggcatcatcgacaacggtgcggaactcttcggcgacaacaccaaactggcagacggttcttttgccaaacacggctatgcagctttggccgaattggattcaaacggcgacaacatcatcaacgcggcagacgccgcattccaaaccctgcgtgtatggcaggatctcaatcaggacggcatttcccaaaccaacgaactccgcacccttgaagaattgggtattcaatctttggatctcgcctataaagatgtaaataaaaatctcggtaacggtaacactttggctcagcaaggtagctacaccaaaacaaacggtacaaccgcaaaaatgggggatttacttttagcagccgacaatctgcacagccgcttcaaagacaaagtggaactcactgccaaacaggcaaaagccgccaatcttgcgggcattggtcgtctgcgcgatttgcgcgaagctgccgcattgtccggcgatttggccaatatgctgaaagcttattctgccgccgaaactaaagaagcacagttggcattgttagataatttgattcacaaatgggcggaaaccgattcgaactggggcaaaaaatcgccaatgcgactttcaaccgattggacgcaaacggctaatgaaggtattgcactgacaccatcccaagtagcacaactaaaaaagaacgctttagtttccctttctgataaagctaaagcagctattgacgccgcccgcgaccgcattgccgtgcttgatgcctacacggggcaggattccagcacactctattacatgagcgaagaagacgcgcttaatatcgtcaaagtaaccaacgatacatacgaccatctcgccaaaaacatctaccaaaacctgttgttccaaacccgtttgcagccatatttgaatcaaatcagtttcaaaatggaaaatgatacgttcactttggattttagtggtcttgttcaagcatttaaccatgtcaaagaaactaatccgcaaaaagcttttgtggatttggccgagatgcttgcatatggcgaacttcgttcttggtatgaaggccgaagactaatggccgattatgtggaggaggcaaaaaaagcaggtaaatttgaagattaccagaaagtgttgggtcaggagaccgttgcattattagctaaaacatcgggtacgcaagcagatgatatcctgcaaaatgtaggctttggtcataataaaaatgtttctttatatggtaatgacggcaacgacactctgatcggcggtgccggtaatgattacttggagggcggcagcggttcggatacttatgtcttcggcaaaggcttcggtcaggatacggtctataattacgactacgctaccggacgcaaagacatcatccgctttaccgacggtattacagccgatatgctgacttttacccgagagggcaaccatcttcttatcaaggcaaaagacggcagtggacaagtgactgttcagtactatttccagaacgatggctcaggagcttaccgtatcgacgagattcatttcgataacggcaaagtactggatgttgccactgtcaaagaactggtacagcaatccaccgacggctcggacagattgtatgcctaccaatccggaaataccttaaatggcggattgggcgatgactatctgtacggtgccgacggggatgacctgctgaatggtgatgcaggcaacgacagtatctacagtggcaatggcaatgatacgctcgatggaggagaaggcaacgacgccctgtacggctataatggtaacgatgtactgaatggtggcgaaggcaatgatcatttgaacggcgaagacggtaacgacactctgatcggcggtgcaggcaatgattacttggagggcggcagcggttcggatacttatgtcttcggcgaaggcttcggtcaggatacggtctataattacgactacgctaccggacgcaaagacatcatccgctttaccgacggtattacagccgatatgctgacttttacccgagagggcaaccatcttcttatcaaggcaaaagacggcagtggacaagtgactgttcagtcctatttccagaacgatggctcaggtgcttaccgtatcgatgagattcatttcgataacggcaaagtactggatgttgccactgtcaaagaactggtacagcaatccaccgacggctcggacagattgtatgcctaccaatccggaaataccttaaatggcggattgggcgatgactatctgtacggtgccgacggggatgacctgctgaatggtgatgcaggcaacgacagtatctacagtggcaatggcaatgatacgctcgatggaggagaaggcaacgacgccctgtacggctataatggtaacgatgtactgaatggtggcgaaggcaatgatcatttgaacggcgaagacggtaacgacactctgatcggcggtgccggtaatgattacttggagggcggcagcggttcggatacttatgtcttcggcaaaggcttcggtcaggatacggtctataattaccatgtggataaaaactctgacactatgcactttaaaggatttaaagcagcagatgttcattttatccgttccggaagtgatttggtgcttagcgcttctgaacaagacaacgtacgtatttccggattcttctatggtgaaaaccatcgtgtagatacatttgtctttgatgatgcagctatcagtaatccagattttgccaagtatattaatgctggcaataatttggtacagtctatgtctgtgttcggttctaatactgctgcgacaggaggaaatgtggatgccaatacacaatccgtacagcagccgttattggtaacgccatctgcataa

SEQ ID NO: 65727 - DNA, 438 bp, Neisseria meningitidis; identical to SEQ ID NO: 58671

SEQ ID NO: 65728 - DNA, 624 bp, Neisseria meningitidis; identical to SEQ ID NO: 51954

SEQ ID NO: 65729 - DNA, 591 bp, Neisseria meningitidis; identical to SEQ ID NO: 36437

SEQ ID NO: 65730 - DNA, 360 bp, Neisseria meningitidis; identical to SEQ ID NO: 50468

SEQ ID NO: 65731 - DNA, 273 bp, Neisseria meningitidis; identical to SEQ ID NO: 43828

SEQ ID NO: 65732 - DNA, 615 bp, Neisseria meningitidis; identical to SEQ ID NO: 43050

SEQ ID NO: 65733 - DNA, 879 bp, Neisseria meningitidis
gtggtcggtaacggcaaaaaatatgccgcaccattgctggtgctgggttgcgtggtgttcggtctgggcagtctgattgtcagatccgtccccgtcggttcgtatgcaatcgcattttggcggttgctgatttcggtgttcgtattttggtttttagcacggtttttcgggcaaaaattcccaaaaaacaggaaaaccgtccgatatgccctgacggcgggcgtgtttctcgctttcgatttggcgttgtggcacgaaagcatacacgcggtcgggccgggtatttccaccctgctcaacagcctgcaaatctttttcttgtcggcaatcggtgttttctttttcggcgagcgtttgagcgggctgaaaaaggcaggcttaatatcggcagttgccggtgtggcgatgattgccggtgcggaattcggctacaacggtaatgcggtttggggattcgtcagcggtttggtgtccgggctgatgcttgccctgtcgatggtgttcgtccgcaagactcatgaagtcgagccggtggcgcttttcccttcaatgatgattttgagtttgggcggcgcggtatcgctggttgttccggcattgctgatggatggcggcgtgctttatccgacgacttggaaagatgcgggtttggtgcttgtgtacggcgtggtgatgcagtgcttcgcgtgggcgatggttgcctatgcgattccgctgctttcgctgtcgctgacggggctgctgcttttgtccgaaccggttgccgccctgttcatcgattatttcgggttgggcaaaccgattgaaggcgtgcagtgggcaggggtggcgctgacgctttcggcaatttacctcggttcgctgaaacagcagtcttaa

SEQ ID NO: 65734 - DNA, 597 bp, Neisseria meningitidis; identical to SEQ ID NO: 38176

SEQ ID NO: 65735 - DNA, 735 bp, Neisseria meningitidis; identical to SEQ ID NO: 55585

SEQ ID NO: 65736 - DNA, 972 bp, Neisseria meningitidis
atgacagaatatcccggcatcgggtcgccgttgttttacggcgttttttttgcggcagtgctggtcatgattgccttggatatgttttcgctgaagaaaaacagcagccataaagtcggcgtcaaagaagccttggcatggagcggcttgtgggttgccgtatcctgcctgttcgcaggctggctgtatttcaaactcgccggcaatcccggctacggcgcggcagtcgcaaaagaaaaagtattggaattctttaccggctacattttggaaaaatcgttggcagtcgacaatattttcgtgttcctgatgatattcggctacttcaaagtcgcaccgcagtttcagcaccgcgtgctgctgtacggcgtgttgggcgcattggtattgcgcactgtcatgattttcgtcggcgcggcactggttcagcagtttgagtggattctgtatctgtttggcgcgttcctgctctatactggtatacacatgatgaagcccgaaggcgatgaggaaggggatttggcaaacagcaggctgctgaatgccgtcaagaaagtcgttccggtcggcacggaatttcacggcgagaaattttttaccgtcgaaaacggcaaaaaaatcgccacgccgctgtttttggtgctggtcatgattgaattgagcgatgtcgtgtttgccgtggacagcatccccgccgtctttgccgttaccaccgatccgtttatcgtgctgacttccaatattttcgctattttgggcttgcgggcgatgtatttcctgctggcggatgtggcggaacgcttcgtattcctgaaatatggattggcattcgtgttgagttttatcggtgtgaaaatgctggtaatgcattgggtgcatatcccgatttccgtttcgttgtcggtcgtcttcggcgcgttgggcgcatcggtattgacttctttggtttatacgaaaaaaacaggccgataa

SEQ ID NO: 65737 - DNA, 621 bp, Neisseria meningitidis
ttgctgggtgtggttccgggtatcggtgaatcgatacaggcctataaagtagcgaaagcggcaaaaaatttacaaggcatgaaaaaagccttggacaaggcagcaaccgttgccactgcacagggctatgtcagtaaaaccaaaatcaaaatcggtcaaactgaattaagggttactgcagcaactgacaaacaattgctgaaagctattggcgaaggaagggacacgacaggtaaaatgaccgagcagttatttgactctttagctaaacaaaatggcttcagagtgctttcgggcggcaaatacggcggaaataacggttttgatcatgtatggcaggctgccgatggtagtgtcgttttgattgtagaaagtaagcagattaggaacggtacggtacagctgaatccgaatggtgcgggtggatatacgcaaatgagtgaggattggattagacaagttttagatcaattacccgatggtagtcccgctaaagctgctgtcttcaaagcaaataagaacggcacattaaaaacagcaatagcaggcgttgatcgtcaaacaggtaaggccgttattcttcctgtcaaagttccttctaaaaccaatataaggagataa

SEQ ID NO: 65738 - DNA, 435 bp, Neisseria meningitidis; identical to SEQ ID NO: 36184

SEQ ID NO: 65739 - DNA, 678 bp, Neisseria meningitidis; identical to SEQ ID NO: 37180

SEQ ID NO: 65740 - DNA, 624 bp, Neisseria meningitidis
atgaacagaagaaccttcctcctcggcgcaggcgcgttgctgcttaccgcctgcggcagaaaatccgcccgaacccacgccaaaattcccgaaggaagcaccgtacttgccttgggcgattcgcttaccttcggctacggcgcaaaccctggcgaatcctaccccgcgcaactgcaaaaactgacgggttggaatattgtcaacggcggcgtatcgggcgatacatctgcccaagccctgtcgcgcctgcccgcgctgttggcacgcaaacccaagcttgtgattgtcggcataggcggcaacgactttctgcgcaaagttcccaaggagcagacccgcgccaatatcgcgaaaatcatcgaaaccgtgcagaaggaaaacatccccgccgtcctcgtcggcgtgccgcacatcacactgggtgcgttgttcgggcatttgagcgatcatccgctgtatgaggatttgtccgaggaatacggcattccgctgttcggcggcgcgtgggcggaaattttgggcgataataatctgaaatccgaccaaatccacgccaacggcaaaggctatcggaaatttgccgaagatttgaatcaatttttgagaaaacaggggtttagataa

SEQ ID NO: 65741 - DNA, 948 bp, Neisseria meningitidis; identical to SEQ ID NO: 44385

SEQ ID NO: 65742 - DNA, 531 bp, Neisseria meningitidis
atgcagggttttgaactcgaagatttgacgctttggctgatacgcgatgccggagaggatcagatgtggatagaccgttgggcgatcagttatcccgtcgtgcagatgtccgaagcgtcggccggtcaaagcataggggaatggcaggcagggcttcggacggcatttgaacgcatacgcggcaaatacgtcgccgttgtcgcacacggtgcgggcgcggccgcatttttggcgtggctgtatcaggcagacatcctgacacggaagaaaattgccaacatcatccttgtaccgcagcgtcccgatatttttcccgacgatgcggaacacactttccaacgcgtccgctgtccctgccgtgccgcattggtggtgtccgaacacggggatgtgccgcgagattgggcgcaaaaacaggcggatacgtggaacgcgcgcctgttggtttccccgcattcgggcagtttgaacggtatgctcggcggctggcagtggggtatgaagctgatgcaggaaatgttgctggcgtga

SEQ ID NO: 65743 - DNA, 942 bp, Neisseria meningitidis; identical to SEQ ID NO: 60224

SEQ ID NO: 65744 - DNA, 774 bp, Neisseria meningitidis
atgaaaccgaaaatccaaaggcatggagagattttaagccttgtccgccggcatcagtttatgtcggtggacgagcttgccgccgcattggacgttaccccgcagacgatacgccgcgacatccgcgagttggaggaggtcggcagcctgaaacgccatcacggcggcgcatcttcgggcggaaacttgccggagggcctgcccgccgaccgccaaacccggtgtcaaaacgaaaaaaacgccattgcccggctgattgcggaacatattcccgacgagtcatcgctgtttgtcagtatcggcacgacgatggaagccgtggcatcggagctggtgagacggcgcggcagcctgcggattattaccaacaatatccacgtcgcctccatcgtttcggcgcggacggattacacggtcatcatcacttccggagtcgtccgccctttggacggcggtattaccggcgtggcaaccgtcgattttatcaaccagttcaaagtcgattatgccgtgatgagtacgcacggcgtggaaagcgacggttcgcttttggacgacgactacaaagaagtcagcgtgatgcaggcgatgattgccaacgcgcgtgtccgcttcctcggcgtggaccacagtaaattccgcagcaacgcgctggtcaggctcggcgacattacggcgtttgacaaagtatttaccgaccggctgcccgataccgcgatgcagaagatgctgaaagaggcgggggtggaatgcctgattgccgatgccgtctga

SEQ ID NO: 65745 - DNA, 231 bp, Neisseria meningitidis; identical to SEQ ID NO: 64473

SEQ ID NO: 65746 - DNA, 1035 bp, Neisseria meningitidis; identical to SEQ ID NO: 43693

SEQ ID NO: 65747 - DNA, 603 bp, Neisseria meningitidis
atgactgatatgcttcagacggcattttatattatgttatttccgagaattatcgctgcatcagcgcaacgtaagttaagcgtttatttaaaaaaaggcggtttggtcgcttatccgaccgaatcttgttatggcttggggtgtcttccgacattagccaaagcactcggtaagttggcgcatttgaaaaaaagaccgcaacacaagggtatgattgtcatcgggaatcaatttgagcaattgcagcctttacttcaaatgccgtctgaaaatcttcaggatatgcttagaaaagaatggcccgcccctaaaacgttcctattatccgccaaatcctgtgtcttacccgagttacgcgggaaacagcgcagcaagttggcggtcagggttcccgcccatgtaggtgcgcgccgcttgtgtcaggctttgcaaacgcctttggtctcgacttcgtgcaaccgcgcaggcaaacgcgcgtgtcggacggagagggaagtcagaaggcaattcggacgcgatgtgtggattgttggtgggagaatcggcaggcagaaatcgccgagtcagattattgacggggaaacaggtaaacgtttgcgttag

SEQ ID NO: 65748 - DNA, 387 bp, Neisseria meningitidis; identical to SEQ ID NO: 50648

SEQ ID NO: 65749 - DNA, 855 bp, Neisseria meningitidis; identical to SEQ ID NO: 51138

SEQ ID NO: 65750 - DNA, 279 bp, Neisseria meningitidis; identical to SEQ ID NO: 36778

SEQ ID NO: 65751 - DNA, 384 bp, Neisseria meningitidis; identical to SEQ ID NO: 51805

SEQ ID NO: 65752 - DNA, 1041 bp, Neisseria meningitidis; identical to SEQ ID NO: 38687

SEQ ID NO: 65753 - DNA, 288 bp, Neisseria meningitidis; identical to SEQ ID NO: 36916

SEQ ID NO: 65754 - DNA, 864 bp, Neisseria meningitidis; identical to SEQ ID NO: 51099

SEQ ID NO: 65755 - DNA, 1008 bp, Neisseria meningitidis
atgagtaccttcttccagcaaaccgcccaagccatgattgccagacacatcgaccgtttcccgctattgaagttggaccaggtgattgattggcagccgatcgagcagtacctgaaccgtcaaaaaacccgttaccttagagaccaccgcggccgtcccgcctatcccctgctgtccatgttcaaagccgtcctgctcggacaatggcacagcctctccgatcccgaactcgaacacagcctcattacccgcatcgatttcaacctgttttgccgttttgacgaactgagcatccccgattacagcaccttatgccgctaccgcaaccggctggcgcaagacgacaccctgtccgaactgttggaactgattaaccgccaactgaccgaaaaaggcttaaaagtagagaaagcatccgccgccgtcgttgacgccaccattattcagaccgtcggcagcaaacagcgtcaggccatagaagttgacgaagaaggacaaatcagcggccaaaccacaccgagtaaggacagcgatgcccgttggatcaagaaaaacggcctctacaaactcggttacaaacaacatacccgtaccgatgcggaaggctatatcgagaaactgcacatcacccccgccaatgcccatgagtgcaaacacctgtcgccgttgttggaagggttacccgaaggtacgaccgtctatgccgataaaggctatgacagtgcggaaaaccggcaacatctggaagaacatcagttgttggacggcattatgagcaaagcctgccgcaaccgtccgctggcggaaacgcaaaccaaacgtaaccgatatttgtcgaagccccgttatgtggtcgaacaaagcttcggtacgctgcaccgtaaattccgctatgcgcgggcagcctatttcgggctgctcaaagtgagtgcgcaaagccatctgaaagcgatgtgtttgaaccttttgaaagcggccaacaggctaagtgcgcccgctaccgcctaa

SEQ ID NO: 65756 - DNA, 1422 bp, Neisseria meningitidis
atgaaaatcattcagatacagaacaatcacaatgtaaacgatgaccgccccgagtttgaccgcgcgctgattgccagcctgcccgccagcggtccgcgctacacttcctaccctaccgccgaccgtttccatgacggtttccgcgaaggcgaatatatcaaagctttacatttgcgcggtatgggcgcgttaaacaaaccgctttccctttacattcacattccgttctgcaacaccatctgctactactgcggctgtaacaaaatcatcaccaaagacaaaagccgcgccgatgcctacatcgaatatcttgaaaaagaaatggaactgctcgctccacatctgaacggacggcaccagcttgcccaactgcacttcggcggcggcacgccgacctttttgagcgacgaacagatcgaacgtgtcttccgcatgatacgcaaacatttcgagttaatccccaccggcgaatactccatcgaaatcgacccgcgcaaagtcagccgcgacaccgtcctcatgctcggcagactcggcttcaaccgcatgagcatcggcattcaggatttcgaccccaaagtacaggcggcggtcaaccgcatccaaagttacgaagaaaccaaagaagtcatcgatgccgcccgtgaggcagggttcaaatccgtcagcgtcgatttgatttacggcctgccgcaccagacttcggaaagcatcaaaaccaccatcgataccgttttgtcgctcgatcccgaccgcctcgccctttaccactacgcccacctgccgcacgtgttcaaaccgcaacgacgcatcgataccgccgccgtccccgacagcgaagagaagctcgatatgctgcaatactgcgtccaaaccctgacagagcgcggctacgtcttcatcggcatggatcatttcgccaaacctgacgacgaactctccatcgccctcaaagaaggcttcctccagcgcaacttccaaggctattcgacctacgcggattgcgatttggtcgccatcggcgtgtcgtccatcggcaaaatcggcagcacctattcccaaaacgaacgcgacatcgatgcctactatgccgccatcgacgaaggcagactgcccatcatgcgcggttatcagctcaatcaggacgacatcctgcgccgcaacatcattcaggatttgatgtgccgtttcgcgctcgactaccggatttacgaaagtatgttcggcatcccgttcgaccgctacttcaaagacgaactggcggatttggaaaaactcgccggtttgggattggtgcgcctgaacagccacgggctgaccgttaccccgaaaggacgcttcctcatccgcaacatcgccatggtcttcgattaccacctgcaccataaagaaaccaaggcgaaatattcgcaaacggtgtga

SEQ ID NO: 65757 - DNA, 1422 bp, Neisseria meningitidis; identical to SEQ ID NO: 43087

SEQ ID NO: 65758 - DNA, 696 bp, Neisseria meningitidis; identical to SEQ ID NO: 51832

SEQ ID NO: 65759 - DNA, 726 bp, Neisseria meningitidis
atgcgtattccgctgcttgcccctgacaattatgcctttcccgatcctacctatgctttggcccggtgcgacgggctggtcggcgtgagcggcgatttggatgcggggcggctgctcgaggcgtatcggaacggcgtgtttccgtggttttctcgggacgggtggtttttttggtatgcggtcgggccccgtgcggtggtgtttcccgacaggctgcatattccgcgctcgctggcgaaaacgctgcgcaacggcagctatcgggttgcggtcaacggctgttttgcggaagtggtcgcgcattgtgcggcagcggcgcgcccgaatcaggacggaacttggattgcgcccgagtttcagacggcatatttgaagctgcacgaaatgggacacgcgcattctttcgagtgccattatcccgatgaaagcggtgaaacgaggttggcgggcggcttttacggcgtgcagatcggcagcgtgttttatggcgaatcgatgtttgcgttgcaaccggatgcgtcgaaaatcgcgtttgcctgcgccgtgccgtttttggcggatttgggcgtggaactgatagactgccagcaggacacggaacatatgcgccgtttcggttcggagctgctgccgtttgctgattttgccgaacgtctgcggatgttgaacgccgtgctgttgaaagaggaaatcgggcggcgcgaagtggcgtgcaaggggctttga

SEQ ID NO: 65760 - DNA, 573 bp, Neisseria meningitidis; identical to SEQ ID NO: 51089

SEQ ID NO: 65761 - DNA, 1155 bp, Neisseria meningitidis; identical to SEQ ID NO: 60090

SEQ ID NO: 65762 - DNA, 687 bp, Neisseria meningitidis; identical to SEQ ID NO: 36558

SEQ ID NO: 65763 - DNA, 162 bp, Neisseria meningitidis; identical to SEQ ID NO: 50967

SEQ ID NO: 65764 - DNA, 456 bp, Neisseria meningitidis; identical to SEQ ID NO: 50446

SEQ ID NO: 65765 - DNA, 645 bp, Neisseria meningitidis; identical to SEQ ID NO: 43086

SEQ ID NO: 65766 - DNA, 729 bp, Neisseria meningitidis; identical to SEQ ID NO: 45317

SEQ ID NO: 65767 - DNA, 639 bp, Neisseria meningitidis; identical to SEQ ID NO: 50306

SEQ ID NO: 65768 - DNA, 789 bp, Neisseria meningitidis; identical to SEQ ID NO: 36434

SEQ ID NO: 65769 - DNA, 2472 bp, Neisseria meningitidis
atgaaaaaaacctgtttccactgcggtctggatgttcccgaacacctccacctgactgtccgttacgaaaacgaagaccgcgaaacctgctgcgccggctgtcaggcggtcgcacaaagcattattgacgcgggcttgggcagttattacaaacaacgcaccgccgacgcgcaaaaaaccgagctgccgccccaagaaatcctcgaccaaatccgcctgtacgacctgcccgaagtccagtccgactttgtggaaacccacggcggcacgcgcgaggcggttttaatgctcggcggcatcacctgcgccgcctgcgtctggctgatcgaacagcagcttttgcgtacagacggcatcgtccgcatcgacctcaattacagcacgcaccgctgccgcgtcgtctgggacgacggcaaaatccgcctttccgacattctgttgaaaatcaggcagataggatacaccgccgcaccctatgacgcgcaaaaaatcgaagccgccaaccaaaaagaacgaaaacaatacatcgtccgcctcgccgttgccgggctggggatgatgcagacgatgatgttcgcgctgccgacctacctttacggcggcgacatcgaacccgatttcctgcaaatcctccattggggcggctttttaatggtgctgcccgtcgtattctattgcgccgtcccgttttatcaaggcgcgttgcgcgacctgaaaaaccgccgcgccggcatggatacgccgattgccgtcgccatcatcatgacctttatcgccggcgtttacagccttgcgacaaatgcggggcaggggatgtatttcgaatccatcgcgatgctgctgtttttcctgctgggcggacgctttatggaacacattgcctgccgtaaggcaggcgatgccgccgagaggctggtgaagctgattcctgcgttttgccatcatatgcccgattaccccgatacgcaggaaacctgcgaggcagctgtcgtcaaattgaaggcgggcgatatcgtgctggtcaaaccgggcgaaaccatccccgttgacggcacggtgctggaaggaagcagtgccgtcaacgaatctatgctgaccggcgagagcctgcccgtcgccaaaatgccgtctgaaaaagtaaccgccggcacactcaacacgcaaagccccctgattatacgcaccgaccgcaccggcggcggcacgcgactgtcgcacatcgtccgcctgctcgaccgcgccttagcgcaaaaaccgcgcactgccgagttggcggaacaatacgcctcgtctttcatattcggcgaactcctgcttgccgtccccgtcttcatcggctggacgctgtacgccgacgcgcacaccgcattgtggattaccgtcgccctgctggtcattacctgcccctgcgccttatcgcttgccacgccgaccgcgctggcagcttctaccggtacgctggcgcgcgaaggcattttaatcggcggaaagcaggcaatcgaaaccctcgcccaaaccaccgacatcatcttcgacaaaaccggcacgctgacccaaggcaaacccgccgtccgccgtatctcattgttgagaggcacagacgaagcctttgttctcgcggtggcgcaggctttagaacaacagtccgaacatccccttgcccgcgccatcctcaactgccgtgtttcaagcggcagcgtccccgacatcgctattaaacaacgcctcaaccgcatcggcgaaggcgtgggcgcgcaactgaccgtcaacggcgaaacacaggtttgggcattgggcagggcatcctatgtcgccgaaatttcaggtaaagaaccgcaaacagaaggcggcggcagcgcggtttacctcggcagtcaaagcggtttccaagccgtgttctacctgaccgaccccttgaaagacagcgcggcggaggcggtgcggcagttggcaggcaaaaacctgaccctgcacatcctcagcggcgaccgcgaaaccgccgttgccgaaaccgcacgcgccctgggtgtcgcgcactaccgcgcccaagccatgcccgaggacaaactggaatacgtcaaagccttgcaaaaagaagggaaaaaagtgctgatgataggcgacggcatcaacgacgcgcccgttttggcgcaggcagacgtatccgccgccgcagcgggcgggacggatattgcgagggacggcgcggacattgtgttattgaacgaagatttgcgtaccgtcgcccacctgctcgatcaggcgcggcgcacccgccatattatccggcaaaacctgatatgggcgggcgcgtacaatatcattgccgtaccgcttgccgttttgggctatgtccaaccgtggattgccgcactgggtatgagcttcagttcgctggtcgtattgggcaatgctatgcggcttcacaagcaggtggacatgccgtctgaaaaaatgccgtccgaacaatga

SEQ ID NO: 65770 - DNA, 4374 bp, Neisseria meningitidis
atgaaaacaaccgacaaacggacaaccgaaacacaccgcaaagccccgaaaaccggccgcatccgcttctcgcctgcttacttagccatatgcctgtcgttcggcattcttccccaagcctgggcgggacacacttatttcggcatcaactaccaatactatcgcgactttgccgaaaataaaggcaagtttgcagtcggggcgaaagatattgaggtttacaacaaaaaaggggagttggtcggcaaatcaatgacaaaagccccgatgattgatttttctgtggtgtcgcgtaacggcgtggcggcattggtgggcgatcaatatattgtgagcgtggcacataacggcggctataacaacgttgattttggtgcggaaggaagaaatcccgatcaacatcgttttacttataaaattgtgaaacggaataattataaagcagggactaaaggccatccttatggcggcgattatcatatgccgcgtttgcataaatttgtcacagatgcagaacctgttgaaatgaccagttatatggatgggcggaaatatatcgatcaaaataattaccctgaccgtgttcgtattggggcaggcaggcaatattggcgatctgatgaagatgagcccaataaccgcgaaagttcatatcatattgcaagtgcgtattcttggctcgttggtggcaatacctttgcacaaaatggatcaggtggtggcacagtcaacttaggtagtgaaaaaattaaacatagcccatatggttttttaccaacaggaggctcatttggcgacagtggctcaccaatgtttatctatgatgcccaaaagcaaaagtggttaattaatggggtattgcaaacgggcaacccctatataggaaaaagcaatggcttccagctggttcgtaaagattggttctatgatgaaatctttgctggagatacccattcagtattctacgaaccacgtcaaaatgggaaatactcttttaacgacgataataatggcacaggaaaaatcaatgccaaacatgaacacaattctctgcctaatagattaaaaacacgaaccgttcaattgtttaatgtttctttatccgagacagcaagagaacctgtttatcatgctgcaggtggtgtcaacagttatcgacccagactgaataatggagaaaatatttcctttattgacgaaggaaaaggcgaattgatacttaccagcaacatcaatcaaggtgctggaggattatatttccaaggagattttacggtctcgcctgaaaataacgaaacttggcaaggcgcgggcgttcatatcagtgaagacagtaccgttacttggaaagtaaacggcgtggcaaacgaccgcctgtccaaaatcggcaaaggcacgctgcacgttcaagccaaaggggaaaaccaaggctcgatcagcgtgggcgacggtacagtcattttggatcagcaggcagacgataaaggcaaaaaacaagcctttagtgaaatcggcttggtcagcggcaggggtacggtgcaactgaatgccgataatcagttcaaccccgacaaactctatttcggctttcgcggcggacgtttggatttaaacgggcattcgctttcgttccaccgtattcaaaataccgatgaaggggcgatgattgtcaaccacaatcaagacaaagaatccaccgttaccattacaggcaataaagatattgctacaaccggcaataacaacagcttggatagcaaaaaagaaattgcctacaacggttggtttggcgagaaagatacgaccaaaacgaacgggcggctcaaccttgtttaccagcccgccgcagaagaccgcaccctgctgctttccggcggaacaaatttaaacggcaacatcacgcaaacaaacggcaaactgtttttcagcggcagaccaacaccgcacgcctacaatcatttaaacgaccattggtcgcaaaaagagggcattcctcgcggggaaatcgtgtgggacaacgactggatcaaccgcacatttaaagcggaaaacttccaaattaaaggcggacaggcggtggtttcccgcaatgttgccaaagtgaaaggcgattggcatttgagcaatcacgcccaagcagtttttggtgtcgcaccgcatcaaagccacacaatctgtacacgttcggactggacgggtctgacaaattgtgtcgaaaaaaccattaccgacgataaagtgattgcttcattgactaagaccgacatcagcggcaatgtcgatcttgccgatcacgctcatttaaatctcacagggcttgccacactcaacggcaatcttagtgcaaatggcgatacacgttatacagtcagccacaacgccacccaaaacggcaaccttagcctcgtgggcaatgcccaagcaacatttaatcaagccacattaaacggcaacacatcggcttcgggcaatgcttcatttaatctaagcgaccacgccgtacaaaacggcagtctgacgctttccggcaacgctaaggcaaacgtaagccattccgcactcaacggtaatgtctccctagccgataaggcagtattccattttgaaagcagccgctttaccggacaaatcagcggcggcaaggatacggcattacacttaaaagacagcgaatggacgctgccgtcaggcacggaattaggcaatttaaaccttgacaacgccaccattacactcaattccgcctatcgccacgatgcggcaggggcgcaaaccggcagtgcgacagatgcgccgcgccgccgttcgcgccgttcgcgccgttccctattatccgttacaccgccaacttcggtagaatcccgtttcaacacgctgacggtaaacggcaaattgaacggtcagggaacattccgctttatgtcggaactcttcggctaccgcagcgacaaattgaagctggcggaaagttccgaaggcacttacaccttggcggtcaacaataccggcaacgaacctgcaagcctcgaacaattgacggtagtggaaggaaaagacaacaaaccgctgtccgaaaaccttaatttcaccctgcaaaacgaacacgtcgatgccggcgcgtggcgttaccaactcatccgcaaagacggcgagttccgcctgcataatccggtcaaagaacaagagctttccgacaaactcggcaaggcagaagccaaaaaacaggcggaaaaagacaacgcgcaaagccttgacgcgctgattgcggccgggcgcgatgccgtcgaaaagacagaaagcgttgccgaaccggcccggcaggcaggcggggaaaatgtcggcattatgcaggcggaggaagagaaaaaacgggtgcaggcggataaagacaccgccttggcgaaacagcgcgaagcggaaacccggccggctaccaccgccttcccccgcgcccgccgcgcccgccgggatttgccgcaactgcaaccccaaccgcagccccaaccgcagcgcgacctgatcagccgttatgccaatagcggtttgagtgaattttccgccacgctcaacagcgttttcgccgtacaagacgaattagaccgcgtatttgccgaagaccgccgcaacgccgtttggacaagcggcatccgggacaccaaacactaccgttcgcaagatttccgcgcctaccgccaacaaaccgacctgcgccaaatcggtatgcagaaaaacctcggcagcgggcgcgtcggcatcctgttttcgcacaaccggaccgaaaacaccttcgacgacggcatcggcaactcggcacggcttgcccacggcgccgttttcgggcaatacggcatcggcaggttcgacatcggcatcagcacgggcgcgggttttagcagcggcagtctttcagacggcatcggaagcaaaatccgccgccgcgtgctgcattacggcattcaggcacgataccgcgccggtttcggcggattcggcatcgaaccgcacatcggcgcaacgcgctatttcgtccaaaaagcggattaccgctacgaaaacgtcaatatcgccacccccggccttgcattcaaccgctaccgcgcgggcattaaggcagattattcattcaaaccggcgcaacacatttccatcacgccttatttgagcctgtcctataccgatgccgcttcgggcaaagtccgaacgcgcgtcaataccgccgtattggctcaggatttcggcaaaacccgcagtgcggaatggggcgtaaacgccgaaatcaaaggtttcacgctgtccctccacgctgccgccgccaaaggcccgcaactggaagcgcaacacagcgcgggcatcaaattaggctaccgctggtaa

SEQ ID NO: 65771 - DNA, 1260 bp, Neisseria meningitidis; identical to SEQ ID NO: 42957

SEQ ID NO: 65772 - DNA, 474 bp, Neisseria meningitidis; identical to SEQ ID NO: 49535

SEQ ID NO: 65773 - DNA, 1248 bp, Neisseria meningitidis; identical to SEQ ID NO: 41324

SEQ ID NO: 65774 - DNA, 993 bp, Neisseria meningitidis
atgaaaacgcacgaaataagcaaagattcggtcagcttgataggggttgccgaacatgaggcgggtcaacgccttgataactatctgataaaaatcctcaagggtgttcccaagagccatatccaccgcattatccgcgccggcgaggtgcggttgaacaagaaacgctgcaaacccgacagccgtattgcggagggggatacggtgcggattccgcctgtgcgcgtggcggagaaggaaatgccgtctgaaaggcgtgccgccgtaccggcgcgtgcgtttgacgttgtttacgaagacgatgcgcttttggtcatcgacaaaccgtccggcgttgccgtccacggcggcagcggcgtgagtttcggcgttatcgaacagttgcgccgcgcccgtccggaggcgcgttatctcgaactcgtccaccgtttggacaaggatacgagcggcttgttgatggtggcgaagaaacgcagcgcgctcgtcaaacttcacgaagccatccgtaacgaccaccccaaaaaaatctaccttgcgctgggggtgggcaaactgccggacgacaatttccatgtcaaactgcccctgttcaaatataccggcgcacaaggcgaaaagatggtgcgcgtcagtgcggacgggcagtcggcgcatacggtgttccgtgcgctaaatcggttttcagacggcattttgcacggtgtcgggctgtcgcacctgactttggtgcgggcgacgttgaaaacggggcgcacgcaccaaatccgcgtccacctgcaatctcaaggctgtccgattgcgggcgacgaacgctacggcgattatcaggcgaaccgtcgtttgcagaagttgggtttgaagcggatgtttttgcacgcgtccgagctgcacttgaaccatccgctcacgggcgagccgctggtgttgaaggcggagctgccgccggacttggcacagtttgcggtgatgttggaaaacgggacgaaaatgtga

SEQ ID NO: 65775 - DNA, 1050 bp, Neisseria meningitidis; identical to SEQ ID NO: 51651

SEQ ID NO: 65776 - DNA, 1179 bp, Neisseria meningitidis; identical to SEQ ID NO: 43689

SEQ ID NO: 65777 - DNA, 1764 bp, Neisseria meningitidis; identical to SEQ ID NO: 50856

SEQ ID NO: 65778 - DNA, 489 bp, Neisseria meningitidis; identical to SEQ ID NO: 39373

SEQ ID NO: 65779 - DNA, 1527 bp, Neisseria meningitidis
atgaacacgccccttccttattccaattacctcatccgcatcctgacggcatctgtctatgatgtcgcggtcgaaacgcctttggaaccggcacgcagcctttctgtacgtttgaaaaacaacatccttttgaaacgcgaagatttgcagccggttttttcgttcaaaatacgcggcgcgtacaacaaaatgtccaagttgccgaaagatgcgctcgcttgcggcgtgattgcggcaagcgcgggcaatcatgctcaaggcgtggcattgtccgcacagcgtttgggttgccgtgccgttatcgttatgccggaaactacgccgaaaatcaaagtggatgcggttaaaagccatggcggcgaggtggttttgcggggcgtttcatacaacgatgcctacgattatgcgatggagttggcggaaaaagaagggttaacctatatcgcgccgtttgatgatcctgatgtgattgcgggacaggggacggtggggatggaaattgtcagccagcatcccgatccaatccgcgccgtattcgtaccgataggcggtggcggtttggcggcgggcgtggcggcatttatcaagcaggtccgccccgaaatcaaagttatcggcgttcagaccaacgattcctgctgtatgaagcagtcggtcgaagcgggtgaaatcgtccatttgaaagatgtcgggctgttttcagacggcactgcggtcaaagtcgtcggaaacgaaaccttccgcctctgcaaagaacttttggatgaaatcattacagtcgataccgatgcggtttgcggcgcggtcaaggatattttcgatgacacgcgcagcattaccgagccggcgggtgcattggcattggcaggtctgaaagcctatatcgcccgagaaggcgcggaaaaccaaaccctgattgccgttaccagcggcgcgaatatgaattttcaccgtttgcgccacgtttcggaacggagcgaattgggcgagggcaacgaaggtatttttgccgttaccatccccgaagagcgcggcagcttccttaagtttgtcaatatattgggaaataggaatattaccgagttcaactaccgctacggggacgatgaaaaagcgcatatctttgtcggacttcaagcggcaggcccgcaggatttggcggttatcggcagccggttggatgaggcgggattgcccaatgtcgacctgaccgatgatgagattgccaaaatccatatccgctatatggtcggagggcggacggacaaagtagaaaacgagcgtctggtcagttttgagtttccggagcgtccgggggcgttggcgcgttttttgaaccatatgcagggcggttggaacattacgctcttccattaccgcaaccacggtgcggattacgggcggattttggtcggtatcgatgtgccgccgcacgatgccgccgcatttgacggtttcttggaaagtctgggatacagctatcacgaggaaacgcaaaatgccgcgtacaagctgtttcttgcctga

SEQ ID NO: 65780 - DNA, 510 bp, Neisseria meningitidis
atgaaaaagaaactgctttcgggcatcaaatttgccgttcagacggcattggtgtttttattggtgtcgctgtttttggattgggtacgcaagcccgacgaacctgccggcgcggcagggcggcctttgaccctgctgtcggggcagcggctgactttgggacagtttagccgggataggacggtgctggtgtatttttggggaagctggtgcggcgtgtgccgttatcagtcgccgataatcgatgatttggcggcggacggcgtgccggtcgtcggcgtggcggtacgttccggcagttcggcggaagtggcggcgtatatggcaaaacgcggcttgggctttccgactgtcaacgatgaggacgggggtttggcaaggtcttggcggattgtcgcaacgcctgccgtcgttttggtcaaaaatgggaaaatggtccattatacgacgggaatcagcagttattggggcttgcgcgcacgaatttttcaggcggatgttttcggttaa

SEQ ID NO: 65781 - DNA, 4473 bp, Neisseria meningitidis
atgcgcttcacacataccatcccattttattccgtattgtccaccctcggtctttttgccgtttcccctgcttactcatccattgtccgcagcgatgtcgattaccaatattttcgcgactttgccgaaaataaaggcgcgttcgccgtaggtgcaagcaatatttccatccaagacaagcaaggcaaaatattaggcagggttctcagcggcatccccatgcccgacttccgcgtcagcaaccggcaaaccgctatcgccaccctggttcacccccaatacgtcaacagtgtcaaacacaacgtcggctacggttccatacaattcggcaacgacacccaaaaccctgaagaacaagcctatacctaccgcctcgtatcacgcaacccgcacccggactacgactaccaccttccccgcctcaacaaactggttaccgaaatctcacctgccgcactcagcagcgtacccttgcttggaaacggccagccaaaggccaatgcctacctcgataccgaccgcttcccatactttgtacgactcggctcaggcacgcaacaagtccgcaaagcagacggcacgcgcacacaaaccgccccggcataccaatacctgaccggcggcacgccgctgaaagtattgggtttccaaaaccacggcttactcgtcggcgacagcctgaccgaccaaccccttaacacctacgcagtcgccggagacagcggttcccccctgttcgccttcgacaagcatgaaaaccgctgggtgcttgcgggcgtactcagcacctacgccggcttcgacagcttcttcaacaaatacatcgtcacgcaacccgaattcatccgttccaccatccgccaatacgaaacccggctggatgtcgggctgaccaccaacgaactcatatggcgcgacaacggtaatggcgacagcaccctgcaagggctcaacgaacgcatcaccctgcccattgcaaacccttcgcttgccccacaaaacgacagcaggcacatgccgtctgaagatgccggcaaaacgctcatcctatccagcaggttcgacaacaaaacactgatgctggcagacaatatcaaccaaggcgcaggcgcattgcagttcgacagcaacttcaccgtcgtcggtaaaaaccacacatggcaaggtgcaggcgttatcgtagccgacggcaaacgcgtcttctggcaagtcagcaaccccaaaggcgaccggctctccaaactgggcgcaggcacgcttatcgccaacggacaaggcatcaaccagggcgacatcagcatcggggaaggcactgtcgtactcgcccaaaaagctgcttcagacggcagcaaacaagtattcaaccaagtcggcatcaccagcggcaggggcacggccgtcctcgccgacagccagcaaatcaaatccgaaaacctctatttcggcttcaggggcggacggctcgacctcaacggcaacaaccttgcctttacccatatccgccatgcggacggcggcgcgcaaatcgtcaatcacaaccctgaccaagccgcgacactgacgctgaccggcaaccccgtcctcagtcccgagcatgtcgagtgggtgcaatggggcaaccgtccgcaaggcaacgcggcggtttacgaatacatcaacccgcaccgcaaccgtcggaccgactacttcatactcaaacccggcggcaacccgcgcgaatttttcccgttaaatatggaaaactcaacaagctggcaatttatcggcaacaacaggcaacaggccgccaaacaagtcgcccaagccgaaaatgcccgccccgacctgattaccttcggcggatacttgggtgagaacgcgcaaacgggtaaagccgcaccgagttacagcaaaaccaatatcgaatgggtgaatagtccaaacaccccacacaagccctcgccctatacgaatacgccaacccgcacaggggcaggcgtaccgacgattaccgcctcaaagaaggcggcaaccccagcgcctacttcccatgggatgcctacagcacccaagactgggaatttctcggacataaccggcgaagcagccatagaaaaaacccgccatatcgcaaatgccgccgtatacggccggcccgaataccgttacaacggcgcactcaacctgcactatcgtcccaaacgcaccgacagcacgctgttgctcaacggcggcatgaaccttaacggggaagtcttgattgagggcggcaatatgattgtgtcaggcaggcccgtaccccatgcctacgaccaccaggccaaacgcgaacccgttcttgaaaacgaatggaccgacggcagcttcaaggctgcacggttcaccctgcgaaaccatgcccgactgacggcagggcgcaataccgcgcatctggacggcgacataaccgcatacaatctgtccggcatcgacctcggctttatccaaggcaaaacaccggaatgctaccgctcctaccatagcggcagcacccactgcacacccaacgccgttttaaaagccgaaaactatcgtgcactacctgcaacgcaagtacgcggcgacattacccttaacgaccgttcagagctccgcctgggcaaagcacacctgtacggcagcatccgtgccggcaaagacaccgcagtccgcatggaagcagacagcaactggacactttcccagtccagccacaccggcgcactgacgcttgacggcgcacaaattaccctgaaccccgatttcgccaataatacacacaacaaccgcttcaacacactgaccgtcaacggcacacttgacgggttcggcacattccgattcctgaccggcatcgtccgaaaacaaaatgcccccctcaaactggaaagggacagccgcggcgcattccaaatccacgtcaaaaacaccggacaagaacctcaaacaaccgaatcgcttgcacttgtgagcctcaatccgaaacacagccaccaagcccgattcaccctccaaaacggctatgccgatttgggtgcctaccgctacatcctccgcaaaaacaacaacggatacagcctgtacaacccgctcaaagaggccgaacttcaaattgaagccacgcgtgcggaacatgagcgcaaccaacaggcatacaaccaattacaggcaaccgacatcagcagacaggttcaacatgactctgacgcgaccaggcaggcactacaggcctggcagaacagtcaaaccgaacttgcccgcatcgacagccaagtccaatatctgtccgcccaattgaaacagacagacccgctaaccggcattctgacgcgtgcccaaaacctgtgtgccgcacaaggatacagtgtcgatatctgccgtcaggttgccaaagccgccgacacgaacgacctgacactcttcgaaaccgaactggatacgtatatagaacgtgtagaaatggccgaatccgaacttgacaaagcacggcaaggcggcgatgcgcaagccgtcgaaacagcccggcacgcctacctgaacgcactcaaccgtctgtcccgacaaatccacagtttgaaaaccggcgttgccggcatccgtatgccgaacctggccgaactgatcagccggtcggccaacaccgccgtttccgaacaggccgcctacaataccggccggcaacaggcgggacgccgcatcgaccgccaccttaccgatccgcagcagcaaaacatctggctggaaaccggtacgcaacaaaccgactaccatagcggcacacaccgtccctaccaacaaactaccaactatgcacatatcggcatccaaaccggcatcaccgaccgtctcagtgtcggtacgattttaaccgatgagcgcacaaacaaccgttttgatgaaggcgtatccgcccgaaaccgcagcaacggcgcacatctgttcgtcaaaggggaaaacggcgcactctttgccgcggcagatttaggctacagcaacagccgtacccgatttaccgattatgacggggctgccgtccgccgccacgcatgggatgcaggcatcaacaccggcatcaaaatcgataccggcatcaacctcagaccctatgccggcatccgtataaaccgcagcaacggcaaccggtacgtactcgacggcgcagagataaacagcccggcgcaaatccaaaccacatggcatgccggcatccgtctcgataaaaccgtcgaactgggtcaagccaagctgacccccgctttcagcagcgattactaccatacccgccaaaacagcggttccgccctcagcgtcaacgaccgtaccttactgcagcaagccgcccacggcacactgcataccctgcaaatcgacgccggatacaaaggctggaacgccaaacttcatgccgcttacggcaaagacagcaacaccgcccgccacaaacaggcaggaatcaaaataggctacaactggtaa

SEQ ID NO: 65782 - DNA, 345 bp, Neisseria meningitidis; identical to SEQ ID NO: 36580

SEQ ID NO: 65783 - DNA, 561 bp, Neisseria meningitidis; identical to SEQ ID NO: 60017

SEQ ID NO: 65784 - DNA, 483 bp, Neisseria meningitidis
atggctatcgtgaagaattccgtggtttcgctgcattatgagatgtatgatgccaacaatcagcttttggacaaaaccgaagaaccgattgcgtatctgcacggcggttacgacggcattttccctttggtggaagaggcgttgcacggtaaggatgccggcgatacggtcgatgtggcgctttcgcccgacgatgcgttcggcgagcaggattcggagttggttcgtattgaagatgtgggcgtgttccctgttgaagtcgaagtcggcatgatgtttgaagccgacgatcctgaaaccggcgatgttgtcgtctatcgtgtaaccgatgttgccgacggcaaggcggtggtggacggcaaccatcctttggcaggcatgaaaatccgttttaaggctacggttgaaagcgtgcgcgatgcatccgatgaggaaatcgcacacggtcatgtccacggcccgcacggtcatcaccaccactga

SEQ ID NO: 65785 - DNA, 1059 bp, Neisseria meningitidis; identical to SEQ ID NO: 50773

SEQ ID NO: 65786 - DNA, 855 bp, Neisseria meningitidis; identical to SEQ ID NO: 52164

SEQ ID NO: 65787 - DNA, 552 bp, Neisseria meningitidis; identical to SEQ ID NO: 37351

SEQ ID NO: 65788 - DNA, 810 bp, Neisseria meningitidis
atgacaccgctcaaaatcgccatcgccggcgcaaacggccgtatgggacgcgtattggttgaagccgtcaacaaccatcccgacaccgtcctttccggcgcgctcgaacactcgggctcagaagccctcgggctggacgcaggctacgccgtcggactcaaaaccggcatcgccatttcagacgacgttgacgccgttctcgcacaaagcgacgtactcatcgacttcacccgccccgagcccaccctcaaacacctgcaaaaatgcgttgaaaaacaagtcaacatcatcatcggcacaacaggcttcgacgatgcgggcaaagccgctatccacactgccgccgaacaaacaggcatcgttttcgccgccaacttcagcgtcggcgtcaacctcaccttccacatcctcgacaccgtcgcacgcgtattaaacgaaggctacgacatcgaaatcattgaaggccaccaccgccacaaagtcgatgcccccagcggcaccgcgttacgcatgggtgaagtcatcgccggcgcgctcggccgcgacctcaaacaatgcgccgtttacggccgtgaaggccacaccggtccgcgcgatccgtccaccatcggctttgccaccgtccgcgcaggcgacatcgtcggcgaccacaccgccctcttcgccaccgacggcgaacgcgtggaaatcacccacaaagccagcagccgcatgacctttgccgccggtgccgtccgcgccgcagtttgggtaaacggcaaaacgggtttgtacgatatgcaggatgtactcgggctgaacaaccgttaa

SEQ ID NO: 65789 - DNA, 369 bp, Neisseria meningitidis; identical to SEQ ID NO: 39308

SEQ ID NO: 65790 - DNA, 594 bp, Neisseria meningitidis; identical to SEQ ID NO: 58368

SEQ ID NO: 65791 - DNA, 132 bp, Neisseria meningitidis
atgcgtaatttcgacaaattggctgaagaagctgccgaacacgccgctgaaggcgcggtgaaattcatagacggcaagcctgccaagaaaatcatcgccgtaccgggcagactggcgaacatcgtggtgtaa

SEQ ID NO: 65792 - DNA, 1134 bp, Neisseria meningitidis; identical to SEQ ID NO: 43834

SEQ ID NO: 65793 - DNA, 330 bp, Neisseria meningitidis; identical to SEQ ID NO: 40782

SEQ ID NO: 65794 - DNA, 390 bp, Neisseria meningitidis; identical to SEQ ID NO: 50278

SEQ ID NO: 65795 - DNA, 777 bp, Neisseria meningitidis; identical to SEQ ID NO: 51731

SEQ ID NO: 65796 - DNA, 1977 bp, Neisseria meningitidis
atgaacgaattttcgcttgcccctattgtgattgttttgctggtgtcggtcattacggtgatcctgtgccgcaagttcaacattccctccatgctgggctacctgctggtgggctttttggcggggcccggtatgctcagcctgattccgaaaagtcatgcaacggattatttgggcgaaatcgggattgtgttcctgatgttcagtataggcttggagttttcgctgcccaagctgagggcaatgaggcggctggtgttcgggctgggtggtttgcaggtcggcgttacgatgctgtcggtaatgggcatactgatgctgacgggcgtgccgttcaattgggcgtttgccgtgtcgggcgcgttggcgatgtcgtccacggcgattgtgagccggattttgtcggaaaagacggaattggggcagccgcacggtcagatggcgatgggcgtgctgctgatgcaggacatcgccgtcgtgccgctgatgattctgattcccgcgctggcgggcggaggggacggaaatatttgggcggccttgggtttggcgtttgcaaaaatgctgctgacgctggggctgctgtttttcgtcggcagcaaaattatgtcgcgatggttcaggatggtggcaaaacgcaaatcgtccgaactctttatgatcaatgtgctgctggtaaccttgggtgtggcttatctgactgagctggaaggtttgtctatggcgttgggcgcattcgttgccggcatgctgctttcggaaacggaataccgtttccaagtcgaagacgacatccgcccgttccgcgatattttgctcggctttttctttatcacggtcggcatgaagctggacattcaggcattgatcggcggctggcggcaggtattgatgctgttggcaatgctgctggtgttgaaggcactggttgtgtttgccattgccttcaaaatgaaacattcggtcggcgacagcctcaaaacggctttgtatctcgcgcagggcggcgagttcggcttcgtgatgctggccattgccgggcagcttgatatggtttcgccagaatgggaacaggcggcgacggcggcggttctgctgtcgatgattatcgcgcccttcctcttgggcggcagcgatgcgctggtcgggcgtttggtcaagtcaagctgggacatgaagtcgctcgatctgcacagtatgctggtagaaaccatgagcaagtccgaccatgtgctgattgtcggcttcggcaggggcgggcagacggtcggacgcgtccttgcccaagaggatattccgtatttcgcgctcgacttggacattgcgcgggtgcaggttgccagaagtgcgggcgaaccggtgtcgttcggcgatgcgaaacgcagggaagtattggaagccgccggtctgggacgggcgaaaatggtggtggttacgctcaacaatatgcacgaaacgcaacacgttttagacaatgtgctgtccatgtatcccaatatgcccgtatatgtgcgcgccaccaacgacgattatgtgaaaacgtttaccgatataggtgcggaagaagccgtgtcggacaccaaagaaaccggactcgtgctggcaggctatgcaatgttaggcaacggcgcgtcgtatcggcacgtctatcagacgatggcaaatatccgccacagccgttatgccgcgttggagggactgtttgtcggtagtgatgatgaggcaggattcggcgaaaacggcgaaaccgtccgtcacgcctttcctttggctgcagaagcatacgccgtcggcaaaacagtcggcacgcttccgatggcggcttacggcatcaaactcttgttcgtccgccgccgcaccggccggattgaaaacccggatgcctcgtttacattggaaggcggtgacgtgttggtggtcgcaggcaaaaaagaagaaattatctcttttgaaaactggagtttgcagggaatataa

SEQ ID NO: 65797 - DNA, 585 bp, Neisseria meningitidis
atgatcagcagactgaccggcaaactggttgaaaaaaaccctccgcaaatcgtcatcgatgtcaacggtgtcggctatgaggccgacgtatcgatgcagaccttctacaacctgccgcccgtgggtgaaagcgtacaactgtttacccagcttatcattcgggaagacgcacatcttttatttggttttgccactgcggaagagcgcaaaacattccgccaactgatcaaggtcagcggcatcggggcaaaaaccgctttgggcattttgtcggcgatgacggcagacgagctggcgcaggcggttgcagaagaagatgtcaaacgcctgtcttccgcgccgggaatcggcaaaaaaaccgccgaacgtatggtcttggaactgcgcggcaagctggtcgcgcatacggtaacggacgggctgtttgccgccgcacccgccgccgacgaaacggaagacatcgtcagcacgctgcttgcactgggttacagcgaacgcgaagcaaaagcggcggtcaaaggcgttccgaaagggacggacgtgggcgaaggcgtgcgccttgctttgaaaaacctgctgaaataa

SEQ ID NO: 65798 - DNA, 915 bp, Neisseria meningitidis
atgaaacaccccaaactcacccttatcgccgcattgctaaccaccgccgcaactgccgcccccctgccagttgtaaccagcttcagcattttaggcgacgtagccaaacaaatcggcggagagcgcgtatccatacaaagtttggtcggagccaaccaagatacgcacgcctatcatatgaccagtggcgacattaaaaaaatccgcagtgcaaaactcgtcctgctcaacggcttaggacttgaagctgccgatgtacaacgtgccgtcaaacagagcaaagtatcctatgccgaagcgaccaaaggcatccaacccctcaaagccgaagaagaaggcggacaccatcacgaccacgatcatgaccacgaaggacaccaccatgaccacggcgaatatgacccccacgtctggaacgaccccgtccttatgtccgcctatgcccaaaacgttgccgaagccctgataaaggccgatcccgaaggcaaagtttattatcaacaacgcttgggcaactaccaaatgcagctcaaaaaactgcacagcgacgcacaagccgcatttaatgccgtccctgctgccaaacgcaaagtcctgaccgggcacgatgccttttcctatatgggcaaacgttaccatatcgaattcatcgccccgcaaggcgtgagcagcgaagccgagccttcggccaaacaagtcgccgccatcatccgccaaatcaaacgcgaaggcatcaaagccgtatttaccgaaaacatcaaagacacccgtatggttgaccgcatcgccaaagaaaccggcgtcaacgtcagcggcaaactgtattccgacgcactcggcaacgcgcccgcagacacctacatcggaatgtaccgccacaacatcaaagccttgaccaacgcgatgaagcaataa

SEQ ID NO: 65799 - DNA, 279 bp, Neisseria meningitidis; identical to SEQ ID NO: 37465

SEQ ID NO: 65800 - DNA, 495 bp, Neisseria meningitidis; identical to SEQ ID NO: 43908

SEQ ID NO: 65801 - DNA, 888 bp, Neisseria meningitidis; identical to SEQ ID NO: 42424

SEQ ID NO: 65802 - DNA, 1413 bp, Neisseria meningitidis; identical to SEQ ID NO: 50239

SEQ ID NO: 65803 - DNA, 3909 bp, Neisseria meningitidis
atgaatgagggtgaagttgttttaacaccagaacaaatccaaaccttgcgtggttatgctttccgtggcgatacctatggcggttggcgttatttggctaatttgggtgaccgttatgcggatgatgctgctgcaattgtcggtaaggatgcaaacttaaatggtttgaatttatggatgaaaaaaggtgtggaaaacctatgggatgatacggtcggtaaaaagacccgtttagagaaatttgatcgggttgcattgcaacatttcagccaatatgtagatctaattaatgaaaataatggtagattacctaacactagtgaaattgagagaagttactataaagccgttaccgaaaatggtgtttcttctagtgcagctattgatttagttattaatcgctcacttccggatatggcagatggttattgggcattaggtttggggatagaagccgaacgtatccacaatgcgcaagcagtaaataatccgaacggtagcgaatgggataatagaaagcagttaatatctgctttagataaaggatttgatggatcttttaaagagaagcattttacttttttacaatctgtgataatggatgtaacaaagttaggtgttgaatatacaatagatggttggcaaaaaattggaggttggggtaatgggataatcaatgatttatataaaagtgttgcaaaaagagagtggactggaatatttgagatcgttaataataacatcaagcaatttagagatctgttcccaaatccggaaggctggatcgatgatggtcaccaatgtttcgctccttgggttaaagaaactaaaaaacgcaatggcaaatatcatgtctacgaccccctcgccctagatttggacggagacggtatagaaaccgttgccaccaaaggctttgcaggcagcttatttgatcacaccaacaacggtatccgcaccgccaccggttgggtttctgccgatgacggtttactcgtccgcgatttgaacggcaacggcatcatcgacaacggtgcggaactcttcggcgacaacaccaaactggcagacggttcttttgccaaacacggctatgcagctttggccgaattggattcaaacggcgacaacatcatcaacgcggcagacgccgcattccaaaccctgcgtgtatggcaggatctcaatcaggacggcatttcccaaaccaacgaactccgcacccttgaagaattgggtattcaatctttggatctcgcctataaagatgtaaataaaaatctcggtaacggtaacactttggctcagcaaggtagctacaccaaaacaaacggtacaaccgcaaaaatgggggatttacttttagcagccgacaatctgcacagccgcttcaaagacaaagtggaactcactgccaaacaggcaaaagccgccaatcttgcgggcattggtcgtctgcgcgatttgcgcgaagctgccgcattgtccggcgatttggccaatatgctgaaagcttattctgccgccgaaactaaagaagcacagttggcattgttagataatttgattcacaaatgggcggaaaccgattcgaactggggcaaaaaatcgccaatgcgactttcaaccgattggacgcaaacggctaatgaaggtattgcactgacaccatcccaagtagcacaactaaaaaagaacgctttagtttccctttctgataaagctaaagcagctattgacgccgcccgcgaccgcattgccgtgcttgatgcctacacggggcaggattccagcacactctattacatgagcgaagaagacgcgcttaatatcgtcaaagtaaccaacgatacatacgaccatctcgccaaaaacatctaccaaaacctgttgttccaaacccgtttgcagccatatttgaatcaaatcagtttcaaaatggaaaatgatacgttcactttggattttagtggtcttgttcaagcatttaaccatgtcaaagaaactaatccgcaaaaagcttttgtggatttggccgagatgcttgcatatggcgaacttcgttcttggtatgaaggccgaagactaatggccgattatgtggaggaggcaaaaaaagcaggtaaatttgaagattaccagaaagtgttgggtcaggagaccgttgcattattagctaaaacatcgggtacgcaagcagatgatatcctgcaaaatgtaggctttggtcataataaaaatgtttctttatatggtaatgacggcaacgacactctgatcggcggtgccggtaatgattacttggagggcggcagcggttcggatacttatgtcttcggcaaaggcttcggtcaggatacggtctataattacgactacgctaccggacgcaaagacatcatccgctttaccgacggtattacagccgatatgctgacttttacccgagagggcaaccatcttcttatcaaggcaaaagacggcagtggacaagtgactgttcagtactatttccagaacgatggctcaggagcttaccgtatcgacgagattcatttcgataacggcaaagtactggatgttgccactgtcaaagaactggtacagcaatccaccgacggctcggacagattgtatgcctaccaatccggaaataccttaaatggcggattgggcgatgactatctgtacggtgccgacggggatgacctgctgaatggtgatgcaggcaacgacagtatctacagtggcaatggcaatgatacgctcgatggaggagaaggcaacgacgccctgtacggctataatggtaacgatgtactgaatggtggcgaaggcaatgatcatttgaacggcgaagacggtaacgacactctgatcggcggtgccggtaatgattacttggagggcggcagcggttcggatacttatgtcttcggcaaaggcttcggtcaggatacggtctataattacgactacgctaccggacgcaaagacatcatccgctttaccgacggtattacagccgatatgctgacttttacccgagagggcaaccatcttcttatcaaggcaaaagacggcagtggacaagtgactgttcagtcctatttccagaacgatggctcaggtgcttaccgtatcgatgagattcatttcgataacggcaaagtactggatgttgccactgtcaaagaactggtacagcaatccaccgacggctcggacagattgtatgcctaccaatccggaaataccttaaatggcggattgggcgatgactatctgtacggtgccgacggggatgacctgctgaatggtgatgcaggcaacgacagtatctacagtggcaatggcaatgatacgctcgatggaggagaaggcaacgacgccctgtacggctataatggtaacgatgtactgaatggtggcgaaggcaatgatcatttgaacggcgaagacggtaacgacactctgatcggcggtgccggtaatgattacttggagggcggcagcggttcggatacttatgtcttcggcaaaggcttcggtcaggatacggtctataattaccatgtggataaaaactctgacactatgcactttaaaggatttaaagcagcagatgttcattttatccgttccggaagtgatttggtgcttagcgcttctgaacaagacaacgtacgtatttccggatttttctatggtgaaaaccatcgtgtagatacatttgtctttgatgatgcagctatcagtaatccagattttgccaagtatattaatgctggcaataatttggtacagtctatgtctgtgttcggttctaatactgctgcgacaggaggaaatgtggatgccaatatacaatccgtacagcagccgttattggtaacgccatctgcataa

SEQ ID NO: 65804 - DNA, 333 bp, Neisseria meningitidis; identical to SEQ ID NO: 50786

SEQ ID NO: 65805 - DNA, 258 bp, Neisseria meningitidis; identical to SEQ ID NO: 51697

SEQ ID NO: 65806 - DNA, 957 bp, Neisseria meningitidis; identical to SEQ ID NO: 51828

SEQ ID NO: 65807 - DNA, 297 bp, Neisseria meningitidis
atgaaaaaatccctgtttgccgctgctttgttgtctttggtcctggcagcctgcggcggtgaaaaagccgctgaagctcccgctaccgaagcacctgccgccgaagctcccgctactgaagcacctgccgccgaagctcccgctgctgaagcacctgccgccgaagctcctgctactgaagcacctgccgccgaagctcccgctgctgaagctgccgctaccgaagcacctgccgctgaagctgccgcttctgaggctcctgccgctgaagctcctgctgccgaagctgcaaaataa

SEQ ID NO: 65808 - DNA, 261 bp, Neisseria meningitidis; identical to SEQ ID NO: 59801

SEQ ID NO: 65809 - DNA, 1470 bp, Neisseria meningitidis
ttgaaagcggttatcctgcataccggaggacacgaaatgaacgaatattcccaattaatcaagcatcccgatatttccctttccccgatttcagacagcatcgggatcggcaatccggcgacgggtgaaattttggcgtatgtccgcaacacgggttcggacaaactgaaaaacctgattcaaaaggcggcggcagcgcaaaaattatgggcggcgaaaactgctttggaacgcgccgacatattgtggcgttggtattttttagttaaagaaaacaaggaagcactggcgcgcctgatgacgatggagcagggcaaaagcctgaccgagtcgcgcggcgaaatcgattatgcggcttcgtttgtgcgctggtttgcggaagaggcgcggcggattgacggcgatgtgctgacaagtgtgaaagcgtcgcaaaaactggtcgtgttgaaacagcctgtcggcgttaccgccgcgattacgccgtggaacttcccatctgcaatgattgcgcgcaaggctgcgcctgctttggcggtgggctgcgcgatgatcgtcaaacccgcatcgctcacgcctttgagtgcgtatgcgttggtcgtgctggcttatgaagcgggcgtaccacaggatttgttgcccgtcgtcagcggtcgcgcatcggaaatcggccgtgaatttgccacgaacccgattatccgcaaaatcagcttcaccggctctaccgaagtcggtgcgaaaatttttgccgacagcgcggcggacattaaaaaactcagtttggagctgggcggcaacgcgccgtttatcgtgtttgacgatgccgatttggacaaagccgtcgaaggtgcgctcgccagcaagttccgcaacagcggtcagacctgcgtctgcaccaaccgcgtttacgcccaatccggcatttacgacgaattttgtcgcaaattgagtgaaaaagtagccgagctcaaattgggcaacggcttggaggatggcgtcaaccaagggccgctgattgaggaaaaagcggtagaaaaagtcgagcagcacattgctgacgcgctcgctaaaggcgcggtctgtctgaccggcggcaaacgcagcgcattgggcggaacgttttttgagccgaccgtcttaagcggcgtaacggcgcaaatggcggtggctcgcgaagaaaccttcgggcctttgtgtccggtattccgttttgaaaccgaagtcgaggtcatcgaggctgcgaacaatacggaatacggtttggcggcctaccttttcaccgccgacaccgcccgccaatggcgcgtcggcgaagccttggaatacggtatggtcggcatcaatacgggcttaatcagcaatgaagcggcaccgttcggcggcgtgaaacgcagcggtttgggacgtgaaggcagcaaatacggtgcggacgaatatctggaattgaaatatctgtgtatggatgtcgggtga

SEQ ID NO: 65810 - DNA, 360 bp, Neisseria meningitidis; identical to SEQ ID NO: 38354

SEQ ID NO: 65811 - DNA, 1104 bp, Neisseria meningitidis; identical to SEQ ID NO: 51666

SEQ ID NO: 65812 - DNA, 672 bp, Neisseria meningitidis
atgacgacacaagacgaactcaagcgcatcgctgccgaaaaagcagtcgaattcgtacccgaaaacgaatacatcggcatcggtaccggctcgaccatcaactttttcatcgaagccttgggcaagagcggcaaaaaaatcaaaggcgcggtttcaacctccaaaaaatccagcgaactgcttgcccagtacgacattcccgtcgtttccctgaacgaagtatcgggtttggcggtctatatcgacggtgcggacgaagtcaaccacaccctgcaaatgattaagggcggcggcggcgcacacctcaacgaaaaaatcgtcgccagcgcatcagaaaaattcgtctgcattgcggacgaaagcaaatatgtttcacgtttgggcaaattccctctgcccgtggaagtcgtcgaaagcgcgcgttcccttgtttcgcgcaaactgctcgctatgggcggacagcccgaactgcgtatcggctacaccacgttttacggcaaccaaatcgtcgatgtccacggcttgaatatcgacaaaccgctgacgatggaagacgaaatcaacaaaatcaccggcgtactcgaaaacggaatattcgcccgcgatgccgccgatgtgttgattttggggacggaagagggtgcgaaagtcatctatccctgccaagggtaa

SEQ ID NO: 65813 - DNA, 612 bp, Neisseria meningitidis; identical to SEQ ID NO: 49549

SEQ ID NO: 65814 - DNA, 2607 bp, Neisseria meningitidis
atggctgccaaccaacgttaccgcaaaccgctgcccggtacggatttggaatactacgacgcgcgtgcggcgtgtgaggacatcaagcccggctcttacgacaagctgccttacacgagccgcattttggcggagaatttggtcaaccgcgcggacaaagtcgatttgccgacgctgcaaagctggctggggcagttgatagaagggaagcaggaaatcgactttccgtggtatccggcgcgggtggtgtgccacgatattctggggcagaccgcgttggtggatttggcaggcctgcgcgatgcgattgccgaaaaaggcggcgatcctgccaaagtgaatccggtggtgcaaacccagctcatcgtcgaccactctctggcggtggagtgcggcggttacgatcctgatgccttccgcaaaaaccgcgaaatcgaagaccgccgtaacgaagaccgtttccacttcatcaactggacaaaaaccgcgtttgaaaatgtggacgtgattccggcgggcaacggcatcatgcaccaaatcaatctagaaaaaatgtcgcccgtcgtccaagtcaaaaacggcgtggctttccccgatacctgcgtcggtactgactcacatacgccgcacgtcgattcattgggcgtgatttccgtgggcgtgggcggattggaagcggaaaccgtaatgctgggacgcgcgtccatgatgcgcctgcccgatattgtcggcgttgagctgaacggcaaacggcaggcgggcattacggcgacggatattgtgttggcactgaccgagtttctgcgcaaagaacgcgtggtcggggcgtttgtcgaattcttcggcgagggcgcgagaagcctgtctatcggcgaccgcgcgaccatttccaacatgacgccggagttcggcgcgactgccgcgatgttcgctattgatgagcaaaccattgattatttgaaactgaccggacgcgacgacgcgcaggtgaaattggtggaaacctacgccaaaaccgcaggcttgtgggcagatgccttgaaaaccgccgtttatcctcgcgttttgaaatttgatttgagcagcgtaacgcgcaatatggcaggcccaagtaacccgcatgcccgttttgcgaccgccgatttggcggcgaaagggctggcgaagccttacgaagagccttcggacggccaaatgcccgacggctcggtcatcatcgccgcgattaccagttgcaccaacacttccaacccgcgcaacgttgttgccgccgcgctcttggcacgcaatgccaaccgtctcggcttgaaacgcaaaccttgggtgaaatcttcgtttgccccgggttcaaaagtagccgaaatctatttgaaagaagcgggcctgttgcccgaaatggaaaaactcggcttcggtatcgtcgccttcgcctgcaccacctgcaacggcatgagtggcgcgctggatccgaaaatccagaaagaaatcatcgaccgcgatttgtacgccaccgccgtattatcaggcaaccgcaacttcgacggccgtatccacccgtatgcgaaacaggctttcctcgcttcgcctccgttggtcgttgcctacgcgctggcaggcagtatccgtttcgatattgaaaacgacgtactcggcgttgcagacggcaaggaaatccgcctgaaagacatttggcctgccgatgaagaaatcgatgccgtcgttgccgaatatgtgaaaccgcagcagttccgcgatgtgtatgtaccgatgttcgacaccggcacagcgcaaaaagcacccagtccgctgtacgattggcgtccgatgtccacctatatccgccgtccgccttactgggaaggcgcgctggcaggggaacgcacattaagaggtatgcgtccgctggcgattttgcccgacaacatcaccaccgaccacctctcgccgtccaatgcgattttggccgtcagtgccgcaggcgagtatttggcgaaaatgggtttgcctgaagaagacttcaactcttacgcaacccaccgcggcgaccacttgaccgcccaacgcgctaccttcgccaatccgaaactgtttaacgaaatggtgaaaaacgaagacggcagcgtgcgccaaggctcgttcgcccgcgtcgaacccgaaggcgaaaccatgcgcatgtgggaagccatcgaaacctatatgaaccgcaaacagccgctcatcatcattgccggtgcggactatggtcaaggctcaagccgcgactgggctgcaaaaggcgtacgcctcgccggcgtagaagcgattgttgccgaaggcttcgagcgtatccaccgcaccaaccttatcggcatgggcgtgttgccgctgcagttcaaacccgacaccaaccgccataccctgcaactggacggtacggaaacctacgacgtggtcggcgaacgcacaccgcgctgcgacctgaccctcgtgattcaccgtaaaaacggcgaaaccgttgaagttcccgttacctgccgcctcgatactgcagaagaagtattggtatatgaagccggcggcgtgttgcaacggtttgcacaggattttttggaagggaacgcggcttag

SEQ ID NO: 65815 - DNA, 780 bp, Neisseria meningitidis
atgcttaaaatcatttccgccaacgtcaacggcatccgctccgcctacaaaaaaggtttttacgaatacatcgccgcatcgggcgcggacattgtctgcgtgcaggaactcaaagcgcaggaggctgatttgtctgccgatatgaaaaatccgcatgggatgcacggccattggcattgcgccgagaagcgcggttacagcggcgtggcggtgtacagcaaacgcaaacccgacaatgtgcaaatcggtatgggcattgaagaattcgacagggaagggcgatttgtgcgttgcgatttcgacaggttgagcgttatttcgctttacttgcccagcggcagcagcgcggaagaacgccagcaggtgaaataccgtttccttgatgcgttttaccctatgctcgaagcgatgaaaaacgaaggacgcgacattgtcgtttgcggcgactggaacatcgcccaccaaaacatcgacctgaaaaactggaaaggcaatcagaaaaattcaggtttcctgccggaagaacgcgagtggataggcaaggttatccacaagctcggttggacggatatgtggcgcacgctttatcccgatgtgccgggctacacgtggtggagcaaccgcgggcaggcgtatgcgaaagatgtcgggtggcgcatcgattatcagatggttacgcccgaacttgccgccaaagccgtgtccgcacacgtttataaagatgaaaaattttccgaccatgcgccgctggtcatggagtatgactatgctgccgaataa

SEQ ID NO: 65816 - DNA, 318 bp, Neisseria meningitidis
atggtagtacgcggcggaatctatctggtctccttagacccgaccgtaggaagcgaaatcaaaaagacacgtccttgtgtcgtagtatctcctcctgaaatacacaactatctcaagactgtgctgatcgttcctatgacgagcggaagccgtcctgccccgttccgcgtcaatgtccgctttcaggataaagacggtttgcttttgcccgaacagattagggctgtggataaagccggattggtcaaacatcttggaaatttagacaacagtacggctgaaaaactgtttgcagtattgcaggagatgtttgcctga

SEQ ID NO: 65817 - DNA, 1236 bp, Neisseria meningitidis; identical to SEQ ID NO: 42263

SEQ ID NO: 65818 - DNA, 840 bp, Neisseria meningitidis
atgaccgccacagccgccgccatagaccgcctgcttccccaaacccaatgccgcgaatgcggctacgacggctgcctgccctacgcacaggcagtcgcaacaggcgaagcgtacaacctctgcgccccgggcggcgcaaccgtcgtccgcgaccttgccgccctgctcggcaaaccccttgtcgcacctgccaaaacccaagccaaagcactcgcccggatagacgaaaccgcctgtatcggctgcaccgcctgcatccgcgcctgccctgccgatgctattatgggcgcgggcaaacttatgcacaccgtcatcgccgacgaatgcaccggctgcggactctgcgtcgccccctgccccgtcgactgcatccatatgcagcccgttgccgacaccgtcctgccccgcgcgcgccgcttcagcctgtccgccgacagccgttttgccgccgccgaacacgcgcgcacgcgctacctcaaacgcaacgaacgcaaacagcgcgaagccgacgaacgcaaggccatgcttgccgaacgcgaagccgccgtccgcaacgcgcgtccgcaaacgcccgacacaccgaaaaaaccggcgtttaaccctgccgacctcatcgccaaagccatggcaaaagcgcaaacccaacaagaccgcctcgccgccgccgacaaccgcaaagactatcaggcgaaacagatagccgaagcccgcgaacgcgccgagttgcgccgcgcccaacgcgatatgaaatacggcagcgacagcgaaaaagccgccgccctcgaatacctcaaacaatacaaagccaaacaggaagccgcacaaaacaccgcctcctga

SEQ ID NO: 65819 - DNA, 1578 bp, Neisseria meningitidis; identical to SEQ ID NO: 50137

SEQ ID NO: 65820 - DNA, 2151 bp, Neisseria meningitidis; identical to SEQ ID NO: 50138

SEQ ID NO: 65821 - DNA, 837 bp, Neisseria meningitidis
atgttaccgctcaaaacgcccggcgtactgcccggcttcaaactcagccttggtctgaccgtattgtgcctgtcgctgcttgtggtcttgccgtttgcgatgatggcggcgaaggcggcggaaatcggctggggcggcttttggaacacgattgccgagccgaacgtgttggcggcggtgtggctgagtttgcggatgtcgttttatgcgatgctgaccaatgtcgtgttcggcacgctggtggcgtgggtattggtgcgttatgaattcccgggcaagggtctggcgaacgcgctggtcgatttgccgtttgcgctgccgacggcggttacgggtatcgcgttggcaaccctgtatgcgcccaacggttggataggccgttttttcgagcctttgggcatcaaaatcgcgtttacgcccgtcggcatttggattgcgctggtcgtcgtcagcctgccctttatcgtccgcgccgtgcagccggtgttggaggaattatcgggcgaatatgaggaagcggcggcgactttgggcgcaaaccgctttacgacgttccgccgcgtgctgctgccggaaatcacgccggcactcttgaccggcgcgggaatgatgttcgcgcgggcaacgggggaatacggctcggtgatttttatcgcgggcaacattccgatggtttccgaaatcctaccgctgattattacgggcaagctggaacagttcgacgtgcagggcgcgtcggcggtggcgttgtttatgctgctggtttcgtttgtgattctgtttgcgctgaacgtgatgcagtgggcgttgggcaggcgttcgggcgcgaagggttga

SEQ ID NO: 65822 - DNA, 960 bp, Neisseria meningitidis; identical to SEQ ID NO: 42649

SEQ ID NO: 65823 - DNA, 720 bp, Neisseria meningitidis
atggcgacactgaccgacaaaaccatcttagttaccggcgcatcgcaagggctgggcgaacaggttgccaaagcctatgcggcagcaggcgcgactgtgattttggttgcccgtcatcagaaaaaactggaaaaagtgtatgacgcgattgtcgaagccggataccccgaaccattcgccatctgctttgaccttattagcgcggaagaaaaagaattcaatcagttcgccgccaccattgccgaagccacgcaaggcaaactggacggcatcgtccactgcgccggctatttttacgccctctcgccgctggatttccaaaccgtcgccgaatgggtcaaccaataccgcatcaacaccgtcgcacctatggggctgacccgcgccctgttcccgctgctgaagcagtcgcccgacgcgtccgtcatcttcgtcggcgaaagccacggcgaaacacccaaagcctactggggcggcttcggcgcgtccaaagccgcgttgaactacctgtgcaaagtcgccgccgacgaatgggaacgcttcggcaacctgcgcgccaacgtcctcgtccccggccccatcaattccccgcaacgcatcaaatcccatccgggcgaagccaaaagcgaacgcaaaagctacggggacgtgctgcccgcatttgtctggtgggcaagtgccgaaagcaaagggcggagtggcgaaatcgtttacctctaa

SEQ ID NO: 65824 - DNA, 669 bp, Neisseria meningitidis; identical to SEQ ID NO: 51481

SEQ ID NO: 65825 - DNA, 1116 bp, Neisseria meningitidis
atgaaagtaggtttcgtcggctggcgcggtatggtcggttcggttttgatgcagcgtatgaaagaagaaaacgacttcgcccacattcctgaagcgtttttctttaccacttccaacgtcggcggcgcagcccctgatttcggtcaggcagccaaaacattgttggatgccaacgatgttgccgaattggcaaaaatggacatcatcgttacctgtcagggcggcgattacaccaaatccgtcttccaacccctgcgcgacagcggctggaacggctactgggttgacgcggcgtcatccctgcgcatgaaagacgatgcgattatcgtcctcgacccggtcaaccgcaacgtcatcgacaacggcctcaaaaacggcgtgaaaaactacatcggcggcaactgtaccgtttccctgatgctgatggctttgggcggtctgttccaaaacgatttggtcgaatgggcaaccagcatgacctaccaagccgcttccggtgcgggtgcgaaaaacatgcgcgaactcatcagcggcatgggcgcgattcacgccaaagtagcggacgagcttgccgatccttccagcgcgattctcgacatcgaccgcaaagtgtccgatttcctgcgcagcgaagactatccgaaagccaacttcggcgtaccgctcgccggcagcctgattccgtggattgacgtggatttgggcaacggtcaatctaaagaagaatggaaaggcggtgtggaaaccaacaaaatcctcggccgcagcgacaatccgaccgtaatcgacggcttatgcgtacgcatcggctctatgcgctgccacagccaagccctcaccctgaagctgaaaaaagacctgcctgtttccgaaatcgaagcgattttggcaggtgcaaacgactgggtgaaagtcatccctaacgaaaaagaagccagcatacacgagctgactcctgccaaagttaccggcacactgtctgttcctgtcggccgtatccgcaaactggagatgggcggcgaatacatcagcgcgttcactgtcggcgaccaactcttgtggggggctgccgagccgttgcgccgcgtgctgcgtatcgtgttgggcagcctgtaa

SEQ ID NO: 65826 - DNA, 534 bp, Neisseria meningitidis; identical to SEQ ID NO: 41750

SEQ ID NO: 65827 - DNA, 954 bp, Neisseria meningitidis; identical to SEQ ID NO: 51970

SEQ ID NO: 65828 - DNA, 729 bp, Neisseria meningitidis; identical to SEQ ID NO: 37361

SEQ ID NO: 65829 - DNA, 492 bp, Neisseria meningitidis
atgaaataccgtcgtttttaccgcaatggcggcacttacttttttacggttgtaaccaataaacggcagaagattttgaccgatgatgcggtgcgtttggctttacggcaggcggtaatggcggtgcgcgaacggtatccgtttgaaattttggcatgggtgttgatgcccgaccatctgcataccatatggcggctgccggacaatgattctgcttattcggaacgctggcggcaaatcaagcggcacagcaaatatttaatcggcggcaatctcaggctttggcaaaaacgcttttgggaacatactatccgcgatgaggccgatttttcctgccattttgattatctgcatttcaatccggtcaaacatggctatgtaggacaaatttctgattggcggttttctacgtttcaccgttatgtcaaacagggtatgtatccgcataattggggtggcggcaatgcggacttttctattggatacgattga

SEQ ID NO: 65830 - DNA, 525 bp, Neisseria meningitidis
atgtcattgaacaaagtcatcctcatcggccgcctcggacgcgatcccgaagtgcgctatatgcccaacggcgaggcggtttgtaatttcagcgtcgccaccagcgaaacttggaacgaccgcaacggccaacgtgtagagcgtactgagtggcacaacatcaccatgtaccgcaaactggcggaaattgccgggcaatacctcaaaaaaggcgggctggtttatctggaaggcagaatccaaagccgcaaataccaaggcaaagacggcatcgaacgcaccgcttacgatattgtcgccaacgaaatgaaaatgttgggcgggcgcaatgaaaacagcggcggtgcgccttacgaggaaggttacggtcagagtcaggaggcttaccaacgccccgcgcagcaaagccggcagcccgcctccgacgcgccgtcccatccccaagaagcaccagccgcgccgcgccgccaacccgtgcctgccgccgctccggtcgaggacattgacgacgatatcccgttctga

SEQ ID NO: 65831 - DNA, 405 bp, Neisseria meningitidis; identical to SEQ ID NO: 43748

SEQ ID NO: 65832 - DNA, 828 bp, Neisseria meningitidis; identical to SEQ ID NO: 38675

SEQ ID NO: 65833 - DNA, 1164 bp, Neisseria meningitidis; identical to SEQ ID NO: 38788

SEQ ID NO: 65834 - DNA, 1173 bp, Neisseria meningitidis; identical to SEQ ID NO: 60013

SEQ ID NO: 65835 - DNA, 324 bp, Neisseria meningitidis; identical to SEQ ID NO: 43824

SEQ ID NO: 65836 - DNA, 1269 bp, Neisseria meningitidis
atgtcgtctgaagcccttgcaaaagaaaccctcaatccgtttgaaatcgcgcgcaaacaggtcaaaaccgcctgcgaccggctgaaaaccgatccggccgtttatgaaatcctgaagagtccgacccgcgtgttggaagtcaatttccccgtcaaactcgacgacggcacggtcaaaaccttcacgggctaccgttcgcaacacaacaacgccgtcggcccctataaaggcggcgtgcgcttccatcccggagtgaatctggacgaagtcaaagccctgtcgatttggatgaccatcaaatgctgcgttgcgggtattccttacggcggcggcaaaggcggtattaccttggatccgcgcgattattccgaggcggaactggaacgcatcgctcgcgcttattccgaagccatttctccgctgattggcgagaaaatcgatattcccgcccccgatgtgaataccaacggcaaaatcatgtcttggatggttgatgcctatgaaaacgtggtgaaacattccgcgccgggcgtatttaccggaaaaccggttgagttcggcggctctttggcgcgtaccgaggctaccggttacggcgtgaacctcgccgccgtccaagccttggaaaaactgggcaaggacgtgaaaggcgcgacttacgccatccaaggcttcggtaatgtcggttaccacacaggttattacgcgcatcaatccggcgcgaaagttgttgcggtttctactgtcgatgttgccatttacaacgaaaacggtttggatatggaagccctgttcaaagagttccaagaaaaaggcttcatcaccaacgaagccggttacggcaaggaaattaccaacgccgaacttttggctttggatgtggacgtactcgccccttgcgcgctggaaaatcaactgacttctgaaaacgccggtaaagtccgcgcgaaaatcgtggtcgaaggcgcgaacggcccgactacgcccgaagccgacgttatcctgcgtcaaaacggcgtattggtcgtgcctgatattctggcgaactgcggcggcgtggtcgtttcctatttcgagtgggtgcaaaacctgcaaggctattattgggagtttgacgaagttcaagagaaagaaaccgtcgtcctgcgacgcgcgttccgcgatatatggaacttggctcaagaatacgatgtcgatttgcgaaccgcgtcttacatgatgagtatccgccgtgttgaaaaagcgatgaagctgcgcggttggtattga

SEQ ID NO: 65837 - DNA, 1446 bp, Neisseria meningitidis
atgacccaatacacattgaaacaggcaagcgtcctgttgcagtccaaacagatttccgccgtcgaactggcaagcgcataccttgccgccatcgccgaaaaaaatcccgccctcaacggctatatcaccatcgaccaagataaaacccttgcagaagcccgtgccgccgacgaacgtatcgcgcagggcaacgcctccgcgcttaccggcgtacccgtcgcctacaaggatattttctgccaaaccggctggcgcagcgcgtgcgcttccaaaatgctcgacaacttcatctccccctacaccgccaccgtcgtccaaaacctgctcgacgaaggtatggtaacgctcggccgcaccaatatggatgagttcgctatgggttcgaccaatgaaaactcattctacggtgcagccaaaaacccatggaatcttgagcacgtccccggcggttcgtcaggcggttccgccgccgtcgttgccgcgcgcctcgcccctgccgcgctcggttcggacaccggcggctctatccgccagcctgcatcgcactgcggcattaccggcatcaaacccacatacggcacggtttcccgcttcggtatggtcgcctacgcctccagcttcgaccaggccggtccgatggcgcaaaccgccgaagactgcgcgattctgttgaacgcgatggcaggtttcgaccccaaagactccaccagcctcgaacgcgaaaaagaagactacacccgcgatttgaaccaaccgctcaaaggcgtgaaaatcggcctgcccaaagaatacttcggcgaaggcaacagcgccgatgttcagacggcattgcaaaatactatcaacctcctcaaaacccaaggcgcggaattggtcgaagtttccctgccgcaaaccaagctgtccatccccgcctactacgtcctcgcctccgcagaagccagtaccaacctttcacgttacgacggcgtacgttacggacaccgtgccgcccaattcggcgatttggaagaaatgtacggcaaaacccgcgccgaaggtttcggcagcgaagttaaacgccgcatcatgatcggcacttatgtactgtcacacggctactacgatgcctactatctcaaagcccaaaaactgcgccgcctcgttgccgatgattttcagacggcatttgcacggtgcgacctcatcctcgcgccgaccgcacccactgcagccccaaaaatcggagcggatgcttcgccggttgaaacctacttgagcgatatctacaccatcgccgtcaacctcgccggactgcccgcattgaccctgcccgcaggcttcagcggcggcggactgcccgtcggcgttcagcttgtcggcaactacttcgccgaagccaaaatcctcggtgcggcgcatcaaatccaactcaacagcgattggcacggcaaacgacccgaatga

SEQ ID NO: 65838 - DNA, 1410 bp, Neisseria meningitidis
atggatacacaaatcaaaactgaagccgacaatcagagcaaccggcgttatctgaccgtttggcggtggcatttttatgccggtctgctggttatgccttttcttaccctgcttgccgttacgggtttgggtatgctgctgtttgccaatattaccggtaaggagggcgagcggattcatgttgtgccgcaggcaacggtacaacctctgtctgttcaggcggaagcggcacgcagtgccgttaatccggaaacttcgtccgtcgttcagtatattgcgccgcgtgccgatgatatggttgccgtgttccgtgtcaacaatgagggcaaggcaacgatggtcgcggtcgatccttatacggcaaaagtggtcagtaccatgccgcgcaatcagggttggtattacgcgatggatgaaatccacagcgatatgatgctcggttcgacaggtgattatcttttggaaacggctgcatcgctgacgattatcatgataatcagcggtttgtacctttggtgggtgaaacggcgcggcatcaaggcgatgctgctgccgccaaaaggcagggcgcgttcttggtggcggaatctgcacggcgcgtttggaacttgggtgtcgttgattttactgttgttctgcctgtcgggtattgcttgggcaggtatttggggcggcaagttcgtgcaggcttggagtcagttcccggcaggcaaatggggtgtcgaaccgaaccctgtttcagtcgtgccgacccatggcgaggtattgaacgacggcaaggttaaggaagtgccgtggattttggagcttacgcctatgcctgtttcagggacgactgtgggcaaagacggcattaaccccgacgagccgatgacattggaaaccgtcgaccgttttgcgcgggaaatcggtttcaaagggcgttatcagttgaatttgcccaaaggcgaggacggcgtatggactttgtcgcaagactctatgagttacgatatgattagtccgtttgccgaccgcacggtgcatatcgaccagtacagcggcaagattcttgccgatatccgttttgatgattacaacccgttcggcaaatttatggcggcgagcattgcgctgcatatggggactttgggctggtggagcgtgttggcgaacgtcgtgttctgccttgccgtcatttttatcggtatcagcggctgcgtgatgtggtggaaacgccgtccgtccggcgcggtgggcatggttccgccggcgcaaaaaatcaagctgcccgtctggtgggcaatggcggtgccgctgctgctgattgcattgcttttcccgaccgcgctgcttgccattgccgtgatttggctgttggatacgctgctgttgtcgcggattcctgttttgaggagatggtttaaatga

SEQ ID NO: 65839 - DNA, 1485 bp, Neisseria meningitidis
atgtcgaaacctgtttttaagaaaatcgcactttatactttgggtgcaatcagcggcgtggccgtcagtctggcggtgcagggttttgccgccgagaaggacaggcgggataacgaagtcctgccggtgcaatccatccgcacaatggcggaggtttacggtcaaatcaaggcaaactactatcaggacaaacccgatgccgatttgtttgaaggtgcgatgaagggtatggtggccggtttggatccgcattccgaatatatggataaaaaaggttatgccgagataaaggagtccaccagcggcgaatttggcggcttggggatggaaatcgggcaggaagacggatttgtcaaagtggtttcgccgattgaggacacgcctgcggaacgggcgggggtgaaaagcggcgatttcattgtgaaaatcgataatgtttcgacacgcggcatgacggtcagcgaagcggtgaagaaaatgcggggcaagccgggtacgaagattactttgacgctgtcgcgcaaaaatgccgacaagccgatagtcgtcaacctgacccgtgccattattaaagtgaaaagcgtccgccatcacctgatcgaacccgattacggctatatccgcgtgtcgcagttccaagagcggacggtcgaaagcgtcaataccgccgcaaaagagctgctaaaggaaaataaaggaaaaccgctcaaggggctggtgttggatttgcgcgacgaccccggcgggcttttgactggcgcggtcggcgtgtcggcggcatttctgccgtctgaagcggtcgtcgtcagtacgaaagggcgggaaggtatggaaggctttgtgttaaaggcgcgtcccgaagattatatttttaaagccggcgcggatcctttggcgggcattcctgccgagttgaaaaccataccgatgacggtattggtcaattccggttcggcttccgcgtcggagattgtcgcaggtgcattgcaggatcataaacgcgcggtcatcgtcggtacgcagagcttcggcaaaggttcggttcagactttgattcctttgtccaacggcagcgcggtcaagctgacaacggcactgtattatacgccgaacgaccgttctattcaggcgcaggggattgttcccgatgtcgaagtaaaagataaggaacgcatttttgaaagccgcgaggcggatttggtcggacacatcggcaatcctttgggcggcgaggatgtgaacagtgaaacccttgccgtgccgcttgaaaaagatgcggataagcccgctgtaaaagaaaaaggtaaaaagaaaaaggacgaggatttgtcttcaaggcggattcccaaccctgccaaagacgaccagttgcggaaagctttggatttagtcaagtcgcccgagcagtggcagaagtctttggggctggcggcgaaaaagccggtttcaaataaagataagaaagataaaaaagataagaagtag

SEQ ID NO: 65840 - DNA, 591 bp, Neisseria meningitidis; identical to SEQ ID NO: 48758

SEQ ID NO: 65841 - DNA, 858 bp, Neisseria meningitidis
atgaattacgccctagacgcattatggtggaaacttaccagccaacccgtccgcgaccttgcctcgctgctgactgcgccgcctttgtggcaaagcggctgcgaattgagcgtgcgagaactactgggagaacacggtttccgttaccttttggcattggatgccgatcccacgcggctgacggattacctcacccgacgcgccccgttcggacaccgcttgggcatttacgctgaagaactgctggcattttggtttgccaacgcgccacacgccgaactgctcgcgcacaacctcacggtttccggttcggacggcaatacgcaaggcgcggcggattttgtggcaaggcttaacggcaaaccctaccatatcgagctgacctgcaaatattacggcggcggcacgggcagacccgaagacatgcgcggactcgaccccaaagacacgctgttgggaaaagccgccaaactgaccgcccaactcggtctgccgcacacttcagacggcatccgaaccttgcggcaacacggtctgccgcttgacgtaaaacccgtttccatcgtgcgcggcatcggattttttccacaaagtttccatgcttttgagccgccgcttaacccatacggctggcgcggcatctatattcaagactgggcggaatacgggtttgaacgccaagaagtccgctaccatctgctcgaccgcatggcctacctcgcacctgcgcgtgccgccgaaaccgaaacattgaacgaaaccgaaatccgccgtatcgaccaaggcttgattgccgttttggaatgtcggccggacggcttttggcacgaaatcgaacgcattatgaaggccgtctga

SEQ ID NO: 65842 - DNA, 354 bp, Neisseria meningitidis; identical to SEQ ID NO: 42253

SEQ ID NO: 65843 - DNA, 999 bp, Neisseria meningitidis; identical to SEQ ID NO: 43774

SEQ ID NO: 65844 - DNA, 1059 bp, Neisseria meningitidis; identical to SEQ ID NO: 42377

SEQ ID NO: 65845 - DNA, 1218 bp, Neisseria meningitidis
atgcaacgtcgtattataaccctgctctgcgcggcaggtatggcattctcaacacaaactttggcggcaaatttggaggtgcgcccgaacgcgccggaacgctacacggtcaaacagggcgacaccctgtggggcatttcgggcaaatacctgtacagcccgtggcaatggggccgcctgtgggacgcgaaccgggatcaaatccacaatcccgacctgatttatccggaccaggtattggtgttgcgccacgttgacggcgaaccgcgcctcggcttggaacagacagacggcatccccgtcgtcaaaatgagtccggataaggaagtgtccggatacggtattcccgccatcgatgtcaacttctaccgcatctttatgcggcacccgcaaatcgtttcccgcaaagaaaccgctgccgcgccgcgcctgctctcgggcccggaaggcaggctgctgtacaccaaaggcaccagggtttacaccaaaggcctgaaagagccgggccgctacctgacctaccgaatcaataaaaacatcaccgatccggatacgggtaaattcctcgggcaggaagtcgcattcagcggcatcgtgcactccctcgactataccgactctgtcctcgaacaacgctcgaaacaggctggagaacggccgaaagacaacgaataccatacccgcacccatcctttgattaccccgctgcgcaccccttcgatacagccgctggtggtcgaaaccgccatttccgaaatacagcagggcgactacctgatgaaaatgccggaagacaccgaccgcttcaacatgatgccgcacgaaccgtcccgcccggttcaggctaaaatcgtttccgtgtttgaaggcacaaggattgccggccagtttcaaaccatcaccatcgacaaaggcgaggcggacggtttggacaaaggcacggttttgagcctctacaaacgcaagaaaacgatgcaggtcgacctctccaacaatttcaaaagcagggataccgtcgagctgatttccactcctgccgaagaagtgggcttggcaatggtttaccgcacctccgaacacctgtcgtccgccatcattttggaaaacatctccgatatttccgtaggcgacaccgccgccaatccgggacgcgatttggacaatataccggatcagggccgcagccgcgtgaagtttggcttcaaccgctccgaataa

SEQ ID NO: 65846 - DNA, 1794 bp, Neisseria meningitidis; identical to SEQ ID NO: 58299

SEQ ID NO: 65847 - DNA, 783 bp, Neisseria meningitidis
atgaaaaccaagttaatcaaaatcttgaccccctttaccgtcctcccactgctggcttgcgggcaaacgcccgtttccaatgccaacgccgaacccgccgtcaaagccgagtccgccggcaaatccgttgccgcctctttgaaagcgcgtttggaaaaaacctattccgcccaagatttgaaagtgttgagcgtcagcgaaacaccggtcaaaggcatttacgaagtcgtcgtcagcggcaggcagattatctacaccgatgccgaaggcggctatatgttcgtcggcgaactcatcaacatcgacacgcgcaaaaacctgaccgaagaacgcgccgccgatttgaacaaaatcgacttcgcctccctgcctttggacaaagccatcaaagaagtgcgcggcaacggcaagctgaaagtcgccgtcttctccgaccccgattgtccgttctgcaaacgcttggaacacgagtttgaaaaaatgaccgacgtgacggtttacagctttatgatgcccattgccggcctgcaccccgatgccgcgcgcaaggcgcaaatcttatggtgtcagcccgaccgcgccaaagcgtggacggattggatgcgtaaaggcaaattcccggtcggcggcagcatctgcgacaatcccgtcgcggaaaccacttccttgggcgaacaattcggcttcaacggcacgccgaccctcgtcttccccaacgggcgcagccaaagcggctacagcccgatgccccaactggaggaaatcatccgcaaaaatcaataa

SEQ ID NO: 65848 - DNA, 201 bp, Neisseria meningitidis; identical to SEQ ID NO: 43708

SEQ ID NO: 65849 - DNA, 1410 bp, Neisseria meningitidis; identical to SEQ ID NO: 52058

SEQ ID NO: 65850 - DNA, 1053 bp, Neisseria meningitidis; identical to SEQ ID NO: 44860

SEQ ID NO: 65851 - DNA, 843 bp, Neisseria meningitidis; identical to SEQ ID NO: 42369

SEQ ID NO: 65852 - DNA, 207 bp, Neisseria meningitidis; identical to SEQ ID NO: 51405

SEQ ID NO: 65853 - DNA, 1254 bp, Neisseria meningitidis
atgtccgaacaacatatttcgacttggaaaagtaaaatcaacgcattggggccggggattatgatggcttcggcggcggtcggcggttcgcacctgattgcctcgacgcaggcgggcgcgctttacggctggcagatcgcgctcatcatcatcctgaccaacctcttcaaatacccgtttttccgcttcagcgcgcattacacgctggacacgggcaagagcctgattgaaggttatgccgagaaaagccgcgtttatttgtgggtattcctgattttgtgcatcctctccgccacgattaacgcgggcgcggtcgccattgtaaccgccgccatcgtcaaaatggcgattccctcgctgatgtttgatgccggcacggttgccgccttgattatggcatcctgcctgattattttggtgagcggacgttaccgcgctttggatcgcgtttccaaaatcatcatcgttactttgagtatcgccacgcttgccgccgccggcatcgctatgtcgcgcggtatgcagatgcagcccgattttatcgagccgacaccgtggacgcttgccggtttgggcttcctgatcgcgctgatgggctggatgcccgcgccgattgaaatttccgccatcaattctttgtgggtaaccgaaaaacaacgcatcaatccttccgaataccgcgacgggatttttgatttcaacgtcggttatatcgccagtgcggttttggctttggttttccttgcactgggcgcgtttgtgcaatacggcaacggcgaagcagtgcagatggcgggcggcaaatatatcgggcaattgatcaatatgtacgccgttaccatcggcggctggtcgcgcccgctggtggcgtttatcgcctttgcctgtatgtacggcacgacgattaccgtcgtggacggctatgcccgtgccattgccgaacccgtgcgcctgctgcgcggaaaagacaaaacgggcaacgccgaattctttgcctggaatatttgggtggcgggcagcggtttggcggtgattttttggtttgacggcgtaatggcgaatctgctcaaatttgcgatgattgctgcttttgtgtccgcccctgtgtttgcctggctgaattaccgtttggtcaaaggtgatgaaaaacacaaactcacatcaggtatgaatgcccttgcattggcaggcttgatttatctgaccggttttaccgttttgttcttattgaatttggcgggaatgttcaaatga

SEQ ID NO: 65854 - DNA, 324 bp, Neisseria meningitidis; identical to SEQ ID NO: 38645

SEQ ID NO: 65855 - DNA, 147 bp, Neisseria meningitidis; identical to SEQ ID NO: 42194

SEQ ID NO: 65856 - DNA, 1518 bp, Neisseria meningitidis
atgttgtatttcagatacggctttttggttgtttggtgtgcggcaggtgtttctgccgcctatggggcggatgcgcccgcgattttggatgacaaggcattgttgcaggtgcagcggtcggtgtcggataagtgggcggaatcagattggaaagttgaaaatgatgccccgcgcgtggttgacggggattttttgttggcgcatccgaaaatgttggaacatagtttgcgcgacgcgctcaacggcaatcaggcggatttaatcgcttcgttggcggatttgtatgccaagctgccggattatgacgcggttttgtacggcagggcgcgggctttgctggcgaaattggcgggaaggccggcggaggcggtggcgcggtatcgggaactgcacggggaaaatgcggcagacgagcggattttgctggatttggcggcggcggagtttgacgatttccggctgaagtcggcagaaaggcattttgcggaggcggcaaaattggatttgccggcaccggttttggaaaatgtggggcgttttcggaaaaaaacggaggggctgacgggctggcgtttttcgggcggcatcagcccggcggtcaatagaaatgccaataatgccgcgccgcagtattgccggcaaaacggaggccggcagatatgcagtgtcagccgggcggagcgggcggcagggttgaattatgaaatcgaggcggaaaaactgacggcgttggcagataatcattatttgttgttccgttccaatatcggcggcacgagctattatttcagtaaaaaatcagcttatgatgacgggttcggcagggcgtatttgggttggcagtataaaaatgcgcggcagacggcggggattttgccgttttatcaggtgcagttgtcgggcagcgacggctttgatgcgaaaacaaaacgggtaaacaaccgccgcctgccgccgtatatgctggcgcacggagtcggcgtgcagctgtcccatacttaccgcccaaacccgggatggcaattttcggtcgcgctggaacattaccgccaacgctaccgcgaacaggatagggcggaatacaataacggccggcaggacgggttttatgtttcgttggcaaaacgtttgggtgaatcggcaactgtgttcggcggctggcagtttgtgcggtttgtgccgaaacgcgaaacggtgggcggcgcggtcaataatgccgcctaccagcgcaacggtgtttatgccggttgggcgcaggagtggcggcagttgggcggtttgaacagtcgggtttccgcgtcttatgcccgccgcaactataagggcgttgcggctttctcgacagaggcgcaacgcaaccgcgaatggaatgtctcgctggctttgagccacgacaagttgtcgtacaaaggtatcgtgccggcgttaaattatcgtttcggcaggacggaaagtaatgtgccgtatgcgaaacgccgcaacagcgaggtgtttgtgtcggcggattggcggttttga

SEQ ID NO: 65857 - DNA, 642 bp, Neisseria meningitidis; identical to SEQ ID NO: 53928

SEQ ID NO: 65858 - DNA, 786 bp, Neisseria meningitidis; identical to SEQ ID NO: 53158

SEQ ID NO: 65859 - DNA, 834 bp, Neisseria meningitidis; identical to SEQ ID NO: 51053

SEQ ID NO: 65860 - DNA, 258 bp, Neisseria meningitidis
atgcagaccgttaccatgtacacaggtccgttttgcccctactgcgcgatggcgaaaaggctgctgcacgcggcaggtgtcggacatatcgacgaaatccgtgtcgatgcaagccccgaagcctttgccgaaatgcagcagctttcgggacagcgcagcgtgccgcagattttcatcggcgaaacgcacgtcggcggatttaccgacctctaccgcctccagcaggaaggcgggctagacggactgctgaacccttaa

SEQ ID NO: 65861 - DNA, 621 bp, Neisseria meningitidis; identical to SEQ ID NO: 52500

SEQ ID NO: 65862 - DNA, 846 bp, Neisseria meningitidis; identical to SEQ ID NO: 44327

SEQ ID NO: 65863 - DNA, 282 bp, Neisseria meningitidis; identical to SEQ ID NO: 38303

SEQ ID NO: 65864 - DNA, 807 bp, Neisseria meningitidis
atgtggcattgggacattatcttaatcctgcttgccgtaggcagtgcggcaggttttattgccggcctgttcggcgtaggcggcggcacgctgattgtccctgtcgttttatgggtgcttgatttgcagggtttggcacaacatccttacgcgcaacacctcgccgtcggcacatccttcgccgtcatggtcttcaccgccttttccagtatgctggggcagcacaaaaaacaggcggtcgactggaaaaccgtatttacgatgatgccaggcatggtattcggcgtattcgctggcgcactctccgcaaaatatatcccagcgttcgggcttcaaattttcttcatcctgtttttaaccgccgtcgcattcaaaacactgcataccgaccctcagacggcatcccgcccgctgcccggactgcccggactgactgcggtttccacactgttcggcacaatgtcgagctgggtcggcataggcggcggttcactttccgtccccttcttaatccactgcggcttccccgcccataaagccatcggcacatcatccggccttgcctggccgattgcactctccggcgcaatatcgtatctgctcaacggcctgaatattgcaggattgcccgaagggtcactgggcttcctttacctgcccgccgtcgccgtcctcagcgcggcaaccattgcctttgccccgctcggtgtcaaaaccgcccacaaactttcttctgccaaactcaaaaaatccttcggcattatgttgcttttgattgccggaaaaatgctgtacaacctgctttaa

SEQ ID NO: 65865 - DNA, 1620 bp, Neisseria meningitidis; identical to SEQ ID NO: 51835

SEQ ID NO: 65866 - DNA, 1338 bp, Neisseria meningitidis
atgagtaaccatacttcttggtcgtccaaaatcggtttcgtgcttgctgcggcaggttcggccatcggtttgggcgcgatttggaaatttccttatacggcgggcaccaacggcggcgcggtgtttttcctgctgtttttgatatttactatcttggtcgccctgcccgtccagcttgccgagttttatatcgggcgcacaggcggtaaaaatgccgtcgattccttcagggctctgcgtccgagtacgcaatggctttgggtcgggcgcatgggcgtttccgcctgctttattttgctgtcgttttacagcgtggtcggcggatgggtattaaattatgtcgtccacagtttcacgggggcggttcataccggcgcggactttgaagccttgttcggcgcgacgatttccaatccggcaggttcgctgtcctatcaggcactgtttatgctgattacggtttgggtggtcaaaggcggcatttcagacggcattgaaaaggcaaaccgttatctgatgccggggctgtttatcctctttattgcactggctgtccgttcgctgacgctgccgggtgcaatggagggcgtgtctttcctgctcaaaccgaattggtcgtactttaaagccgatacgatgattacggctttgggacaggcgttttttgccttgagcatcggcgtttccgctatgattacctatgcttcgtatttgggaaaagatcaggatatgttccgttccggccatacgattatgtggatgaacctcttggtttcgctgcttgccggcctagtgatttttccggcggtgttcgccttcggttttgaaccgagccaggggccgggattgatttttatcgtattgcccgcagtgttcatgaaaatgccgttcggtacggttttgtttgcggtatttatgctgctggtcgttttcgccacgctgacttcggcattttcgatgttggaaacggtcatcgccgcaaccatccgccaagacgagcgcaaacgcaaaaaacacacttggcttatcggcacggccattttcattgtcggcatcccatccgcgctgtctttcggcgtatggggtgagtttaaggttttcggcaaaaccatttttgatttgtgggactatgttatttccgccgtcattatgcctgtcggcgcgttgggcgttgccgtatttaccgcctggattcaggacaagcagtctgtgttaaaagatgccggcgcgggcagcaccgtaccacgggcagtgttgctgctgtggctgaataccttgcgctacctcgccccgattgccattattattgttttcatcaattctttggacatcctttaa

SEQ ID NO: 65867 - DNA, 1056 bp, Neisseria meningitidis
atgattacacttgccgtagatgccatgggcggcgaccaaggacttgccgttaccgtacccggcgcaaccgcattcctccaagcacaccccgatgtccgcctgattatgaccggcgacgaaacgcaactgcgccaagccctgaccgcggcaggcgcaccgatggaacgcatcgacatctgccataccacccaagttgtcggcatggatgaatcccctcagtccgccctaaagaacaaaaaagactcctccatgcgcgttgccatcaaccaagttaaagaaggcaaagcccaagccgccgtatccgcaggcaacacgggcgcactcatggcaaccgcacgtttcgtcctcaaaaccattcccggcatcgaacgccccgccatcgccaaattccttccttccgacaccgaccacgttaccctcgccctcgaccttggcgcgaacgtcgactgcacgcccgaacagctcgcccaatttgccgttatcggcagcgaactcgtccacgcactccatcctcaaaaaggacagccgcgtgtcgggctggtcaacgtcggcacggaagacatcaaaggtacggacaccgtcaaacaaacctacaaactgctgcaaaacagcaaactcaactttatcggcaacatcgaaagcaacggcatcctgtacggcgaagcagatgtcgtcgtcgccgacggctttgtcggcaacgtcatgctcaaaaccatcgaaggcgcggtcaaattcatgagcggagccatccgccgcgaattccaaagcaacctgttcaacaaacttgccgccgttgccgccctacccgccctcaaagggctgaaaaacaaactcgatccgcgcaaattcaacggggccatcctgctcgggctgcgcggcatcgtcatcaaaagccacggcggcacagacgaaaccggtttccgctacgcactcgaagaagcctaccacgaagccaagtccgccggcctttccaaaatcgaacaaggcgttgccgaacaactcgccgcactcgaaactgccaaagccgtccaaaacgaaaatgccgacggtctgtaa

SEQ ID NO: 65868 - DNA, 1008 bp, Neisseria meningitidis
atgtatccacttgcccgccgcatcctgtttgcactcgatgccgagaaagcccaccacttcacgctcgacgcgctcaacatggtttataaattgggtctgattcccgtaaccggcaaccgtaccaaacctgtaaaactgatgggtttggatttgcccaaccctgtcgggcttgccgccggactcgataaaaacggcgaatacatcgacgcattgggcgcgctcggctttggtttcatcgaaatcggcacggtaacgcccaaaccgcagcccggcaacccgcagccgcgcctcttccgcgttcccgaacaccaaggcatcatcaaccgcatgggtttcaacaaccacggtatcgacaccatgatacgcaacatcgaaaaaagtaaattcagtggcgtattgggcatcaacatcggtaaaaacgcggttacacccatcgaaaacgctgccgatgattatttaatctgccttgaaaaagcctacgcgcacgcaagctacattaccgtcaatatttcctcgcccaacaccaaaaacctccgcgcgctgcaaggtggcgacgagttgagcgcattgcttgaggctttgaaaaacaaacaggcacagcttgcctctgtacacgggaaatacgttccgctcgccgtcaaaatcgcccccgatttggatgaagcacaaatcgaagacatcgcccacgttgtcaaatccgtcgaaatggacggcatcatcgctaccaataccaccatcgacaaatcaagtctcggcagccatccgctcgcaggcgagcagggcggtttgagcgggctgcccgttcatgaaaaaagtaatcgggtgttgaagctgttggcagaccacatcgacggcaagctgccgattatcggcgtaggcggcattatggaaggcggggacgcggcagagaaaatccgcttgggcgcgaccgccgtccaggtgtacagcggattgatatacaaaggtccggcattggtcaaagaatgtttgaaggctttggcgcgatga

SEQ ID NO: 65869 - DNA, 396 bp, Neisseria meningitidis; identical to SEQ ID NO: 45813

SEQ ID NO: 65870 - DNA, 429 bp, Neisseria meningitidis; identical to SEQ ID NO: 54930

SEQ ID NO: 65871 - DNA, 1818 bp, Neisseria meningitidis
gtgaaaccgctgcgcagactgacaaacctccttgccgcctgcgccgtagcggccgctgctttcggacagcccgccctcgcggcggacttggcgcaagatccgttcattaccgataacgcccaacggcagcactacgaacccggcggcaaataccacctcttcggcgacccgcgcggcagcgtttccgaccgcaccggcaaaatcaacgtcatccaagactatacccaccagatgggcaacctgctcatccaacaggcggcaatccaaggcaatcttggttacaccgtccgcttttccggacacggatacgaagaacacgcccccttcgacaaccacgccgccgacagcgcaagcaaagaacaaggcaacgtcaacgaaggctttaccgtgtatcggctcaactgggaaggacacgaacatcatcccgccgatgcctacgacggcccgaagggcggcaattaccccaaacctacgggcgcacgagacgaatacacctatcacgtcaacggcacagcccgcagtatcaaactcaatccgaccgacacccgcagcatccggcaacgcatatccgacaactacaacaacctcggcagcaatttctccgaccgcgccgatgaagccaacagaaaaatgttcgagcacaatgccaagctcgaccgctggggcaacagcatggagtttgtcaacggcgtcgccgccggcgcgctcaacccctttatcagcgcgggcgaagccttgggcataggcgacatactgtacggaacgcgctatgccatagacaaagccgcaatgcgcaacatcgcccccttacccgccgagggcaaattcgccgtcatcggcggcttgggcagtgtggcgggctttgaaaagaatacgcgcgaagccgttgaccggtggatacaggaaaaccccaatgccgccgaaaccgtcgaagccctggtcaacgtcctgccgtttgccaaagtcaaaaacctgacaaaggcggcaaaaccggggaaggctgcggttagtggggatttttctaaatcctacacctgctccttccacggcagcaccttggtcagaacggcagacggctacaaagccatcgcccatattcaagccggagaccgcgtcctttccaaggacgaggcaagcggagaaacgggatacaaacctgttaccgcccaatacggcaatccgtatcgggaaaccgtttacattgaaatttcagacggcatcggtaacagccaaaccctgatttccaaccgcatccatccgttttattcgggcggcaaatggattaaagcggaagatttgaaagcgggaagcaggctgtttgccgaaagcggcaaaacccaaaccgtccgcaacatcgttgtcaaaccaaaaccgctcaaagcctacaatctgaccgttgccgactggcatacttactttgtcaaaggcgataaggcggaaacggaaggggtttgggttcataatgattgtccaaccaaactaaaaccgacagaacgttataatcgtcaaacgcattatggaggttctcaaacagatggagcaagggctcaggcagcaagacaggcaggagaaggtaaaccttgtccaacttgtggtagaattcagatatttggtacgaaaaccgcaccaagtccgcaacatgaacccccattagtaaaacattactatgaacatggtggtcactctatgagcaatgctgatcgagcgaaacatgccagggaaagcataaaaggaactcaatgtttaacatgtcaaaggaaagagggtgcgatgatgtcaagatattcgagagaacaggctaaaaagcatggactataa

SEQ ID NO: 65872 - DNA, 1095 bp, Neisseria meningitidis
atgaaaaccaatctgctcaactacgaccttcaagggctgacccgacattttgccgatatgggcgaaaaacctttccgtgccaaacaggttatgcgttggatgcaccaatccggcgcgcaaaattttgacgaaatgaccgatttggcaaaatcgttgcgccataaactgaacgaacaggcaggaatcgaaattcccaagctgatgatgtctcaaaaatcttcagacggcactcgaaaatggctactagatgtcgggacggggaacggggtggaaaccgtcttcatccccgaatcggatcgcggcacgctctgcatttcctcgcaagtcggctgcgctttggaatgtacattttgctcaaccggccggcagggcttcaaccgcaacctgactgctgccgaaatcatcggacagttgtggtgggcaaacaaagcgatgggtgttacaccgaaaaacgaacgcgtaatttccaatgtagtgatgatgggtatgggcgagccgatggcgaacttcgacaatgtcgttaccgccttaagcattatgctggacgaccacggctacggtttgagccgccgccgtgtaaccgtttccacttcgggtatggttccccaaatggacaggttgcgcgatgtcatgccggtggctttggcggtttcccttcacgcttccaatgacgaagtccgcaaccaaatcgtaccgttgaacaaaaaatatcccttgaaagaattgatggctgcatgccaacgctatctggtcaaagcacccagggatttcatcactttcgaatacgtcatgttggacggaataaacgataaggcgcaacatgcgcgcgaactgatcgaactggtcaaagatgttccctgcaagttcaatctgattccgttcaatccctttccaaactccggatacgaacgctccagcaatgagaacatccgtgtgttccgcgatattttgcagcaggcaggatttgtcgttaccgtacgaaaaacgcgcggcgacgacatcgatgccgcctgcggacagttggcggggcaggttcaggataaaacgcgccgccaacaaaaatggcagcagattttaatcggacaacaggggtaa

SEQ ID NO: 65873 - DNA, 450 bp, Neisseria meningitidis
atgagtatttatgccgtcgcgcacatcgtccacctgtattgcgccattgcctttgtcggcggcgtgttttttgaagtgctggttttgtccgtcctgcatacgggacgggtgtcgcgcgaggtgcggcgcgaagtggaaaaagccatgtcttaccgcgccgtcagggtgatgccgtttgtggtcggactgctgttcgccagcggcatcgtaatggcggcaaaccgctaccttcctatattgggcgaaccgtttgccacttccttcggtacgatgctgactctgaaaatcctgttggcgttcagcgtgttggcgcacttcgccatcgccgtcgtcaaaatggcgcattccacgctgaccgtcggctggtcgaaatacatacacgccgtcgtctttacccatatgctgctgattgtctttttggcaaaagcgatgttttatatcagctggtaa

SEQ ID NO: 65874 - DNA, 150 bp, Neisseria meningitidis; identical to SEQ ID NO: 41322

SEQ ID NO: 65875 - DNA, 264 bp, Neisseria meningitidis; identical to SEQ ID NO: 40271

SEQ ID NO: 65876 - DNA, 501 bp, Neisseria meningitidis; identical to SEQ ID NO: 37418

SEQ ID NO: 65877 - DNA, 438 bp, Neisseria meningitidis; identical to SEQ ID NO: 59505

SEQ ID NO: 65878 - DNA, 1194 bp, Neisseria meningitidis
atgtaccgacacatcgaatactatcccggcgacccgattttgagtttggtcgaaaccttcaaaaacgacccgcgccccgaaaaagtcaatttgagcataggcatttatttcgacgacgaaggcaaaatgcccgtgttggaatccgtgagccgcgccgaaaccgcccgtgccgccgcgcctgcgccgtcgccctacctgccgatggaaggcttggacacttaccgcagcgcggtacagcatttattgttcggcaaagacaaccgcgcgcttgtgcaaggacgcatcgttaccgtgcaaaccttgggcggctcgggcgcactcaaagtcggggcggacttcctgcaccgctggtttcccgaagcgcgcgcctacgtcagcgacccgacttgggacaaccatcgcggcatttttgaaggcgcaggtttcgaggtcggcacttacccatattacgaccctgccactgtcggcgtgaaattcgacgaaatgaccgcgtttttcaacaccctgcccgaaaacagcgtcctgatcctccatccctgctgccacaacccgaccggcgtggatatgtcggaacaacaatgggacgaagtgttgcacatcatcaaaacgcgcaaactgattccgtttatggacattgcctaccaaggcttcggcggcgatttggacagcgatgcctacgccgtccgcaaagcggtggaaatggaattgcccttgttcgtcagcaattccttctcaaaaaacctgtcgctctacggcgagcgcgtcggcggcttaagcgtggtttgcccgaataaggaagaagcggatttggtgttcggacagctcaaattcaccgtccgccgcatctactccagcccgcccgcgcacggcgcgtatatcgccgccgacgtgatgaacagccccgaactttacgccttgtggcaaaacgaggtttatatgatgcgcgaccgcatccgtgcgatgcggcagaaactttatgatgtcttaactgcgcaaatccccgatcgcgatttcacttatttcatcaaacagcgcggcatgttcggctacacaggattgagcgtggaacaagtccgcaggctgcgcgacgaatttgccgtttacctgctggattccggcaggatgtgcgtcgccggactgaatacgtcgaataccgactatgttgcccgcgcatttgcggaagtcttgaaataa

SEQ ID NO: 65879 - DNA, 2625 bp, Neisseria meningitidis; identical to SEQ ID NO: 59502

SEQ ID NO: 65880 - DNA, 924 bp, Neisseria meningitidis
atggaaaaccaaaggccgctcctaggcttcgcgttggcacttttggcggcgatgacgtggggaacgctgccgattgccgtgcggcaggtattgaagtttgtcgatgcgccgacgctggtgtgggtgcgttttaccgtggcggcggcggtattgtttgttttgctggcattgggcgggcggctgccgaagtggcgggatttttcttggtgctcattcaggctgctgctgctcggcgtggcgggcatttcggcaaactttgtgctgattgcccaagggctgcattatatttcgccgaccacgacgcaggttttgtggcagatttcgccgtttacgatgattgttgtcggtgtgttggtgtttaaagaccggatgactgccgctcagaaaatcggcttggttttgctgcttgccggtttgcttatgttttttaacgataaattcggcgagttgtcgggtttgggcgcgtatgcgaagggcgtgttgctgtgtgcggcaggcagtatggcatgggtgtgttatgccgtggcgcaaaagctgctgtcggcgcaattcggaccgcaacagattctgctgttgatttatgcggcaagtgccgccgtgttcctgccgtttgccgaaccggcacacatcggaagtttggacggtacgttggcgtgggtttgttttgcgtattgctgcttgaatacgttaatcggttacggctcgttcggcgaggcgttgaaacattgggaggcttccaaagtcagcgcggtaacaaccttgctccccgtgtttaccgtaatattttctttgctcgggcattatgtgatgcctgatacttttgccgcgccggatatgaacggtttgggttatgttggcgcactggtcgtggtcgggggtgcggttacggcggcggtgggggacaggctgttcaaacgccgctag

SEQ ID NO: 65881 - DNA, 1332 bp, Neisseria meningitidis; identical to SEQ ID NO: 51574

SEQ ID NO: 65882 - DNA, 621 bp, Neisseria meningitidis; identical to SEQ ID NO: 39955

SEQ ID NO: 65883 - DNA, 444 bp, Neisseria meningitidis
atgtatttgacacaacatacggactacgggctgcgcgtccttatctacactgccatcaacgacgatgcgctggtcaacatcagtaccatcgccgtaacctacggcatttccaaaagccatctgatgaaggtcgttaccgcgctggtcaaaggcggcttcctccacagtgtgcgcggaaaaggcggcggtctgcggcttgccgcaccgcccgaccgcatcaacatcggctcggttgtccgccacctcgaaccgatgcagctggtcgagtgcatgggcgagaacaacgaatgcctgattacaccgtcctgccggctgacgggcatactcggcggcgcgatgaagtcatttttcacgtatctggacggtttcacgctccaagacctgctcaacaagccgacctacgacctgctctacgaaccgagaattccgattgcggtgcagtaa

SEQ ID NO: 65884 - DNA, 279 bp, Neisseria meningitidis; identical to SEQ ID NO: 36930

SEQ ID NO: 65885 - DNA, 1044 bp, Neisseria meningitidis
atgcagattaccgacttactcgccttcggcgctaaaaacaaagcatccgaccttcacctgagttcgggcatatcccctatgattcgggttcacggcgatatgcggcgcatcaaccttcccgaaatgagcgcggaagaggtcggtaatatggtaacttcggtgatgaacgaccaccagcggaaaatctaccagcaaaacttggaagtcgacttctcgttcgaactgcccaacgtcgcccgattccgcgtcaacgccttcaacatcggccgcggtcccgccgccgtattccgcaccattcccagcaccgtcttatcgctggaagaattgaaagccccgagcattttccaaaaaatcgcagaatcgccgcgcggcatggttttggttaccggccctaccggttcgggcaaatcgaccacgcttgccgcaatgatcaactacatcaacgaaacccagccggcacacatcctgaccatcgaagacccgatcgaattcgtccaccaaagcaaaaaatccctgattaaccagcgcgagctgcaccagcacaccctcagcttcgccaacgcgctgcgttccgcattgcgcgaagaccccgacgttatccttgtcggcgagatgcgcgacccagaaaccatcggcttggcgctgaccgccgccgaaaccggacacttggttttcggcacgctgcacacgaccggcgcagcaaaaaccgtcgaccgtatcgtggacgtattcccggcgggagaaaaagaaatggtgcgctctatgctgtccgaatcgctgaccgccgtcatctcccaaaacctgctgaaaacgcacgacggcaacggccgtgtcgcctcgcacgaaatcctgattgccaaccccgccgtccgcaacctcatccgcgaaaacaaaatcacgcagattaactccgtcctgcaaaccgggcaggcgagcggtatgcagacaatggaccaatcgctgcaatcgctggtgcgccaagggctgatcgcaccggaagtcgcacgcagacgcgcgcaaaacagcgaaagtatgagtttctga

SEQ ID NO: 65886 - DNA, 1278 bp, Neisseria meningitidis
atgcgtagcagcgatattttaattgtagatgacgaaatcggcatccgcgacctgctgtcggaaatcctgcaggacgaaggttattcggtcgcattggcggaaaacgccgaagaggcgcgcaagctgcgccatcaggcgcgtccggcgatggtgctgctggatatttggatgcccgattgcgacggcatcacccttttgaaggagtgggcgaaaaatgggcagctcaatatgccggtggtgatgatgagcgggcacgccagcatcgataccgccgtggaagcaaccaaaatcggcgcgatcgattttttggaaaaaccgatttccctgcaaaagctgctgtctgccgtcgaaaacgcgttgaagtacggtgcggcgcaaaccgaaacggggcctgtattcgacaagctgggcaacagtgcggcgattcaggaaatgaaccgtgaggtaggggctgcggtgaaatgtgcctctcccgtacttttgacgggcgaggcgggttcgccgtttgaaacggtggcacgctatttccataaaaacggtacgccgtgggtcagcccggcaagggtcgaatatctgatcgatatgccgatggaactgttgcagaaggcggagggcggcgttttgtatgtcggcgacatcgcccagtacagccgcaacatccaagccggtattgcctttattgtcggaaaggcggaacaccgccgcgtcagggtggtcgcatcgggcagcagggcggcaggttcagacggcatagcctgcgaggaaaagctggcggaactgctgtcggagtcggtcgtccgcattccgccgctgcgtatgcagcatgaagatattcccttcctgatacaggggattgcctgcaatgtggcggaaagtcaaaagattgcgcccgccgcattcagtgaagaggcacttgccgcattgacccgttacgactggccgggaaatttcgaccaactgcaaagcgtcgttgcaacgctgttgttggaggcggacggacaggaaatcggcgcggcggcggtttcttcccttttggggcagaatgtgcctgccgagggagcggaagatatggtgggcgggtttaatttcaacctgcccctgcgcgaattgagggaggaggtggagcggcgttatttcgagtaccacatcgcccaagaaggtcagaatatgagcaaagtggcgcagaaagtcggtttggaacgcacgcacctttaccgcaaactcaaacagctcggcatcggcgtttcgcgccgggcgggggaaaaaaccgaagaatag

SEQ ID NO: 65887 - DNA, 852 bp, Neisseria meningitidis; identical to SEQ ID NO: 50271

SEQ ID NO: 65888 - DNA, 627 bp, Neisseria meningitidis; identical to SEQ ID NO: 51310

SEQ ID NO: 65889 - DNA, 789 bp, Neisseria meningitidis; identical to SEQ ID NO: 43877

SEQ ID NO: 65890 - DNA, 876 bp, Neisseria meningitidis; identical to SEQ ID NO: 50678

SEQ ID NO: 65891 - DNA, 417 bp, Neisseria meningitidis; identical to SEQ ID NO: 37115

SEQ ID NO: 65892 - DNA, 474 bp, Neisseria meningitidis; identical to SEQ ID NO: 59947

SEQ ID NO: 65893 - DNA, 411 bp, Neisseria meningitidis; identical to SEQ ID NO: 42958

SEQ ID NO: 65894 - DNA, 2121 bp, Neisseria meningitidis
atgcgccgttttctaccgatcgcagccatatgcgccgtcgtcctgttgtacggactgacggcggcaaccggcagcaccagttcgctggcggattatttctggtggatagttgcgttcagcgcaatgctgctgctggtgttgtccgccgttttggcacgttatgtcatattgctgttgaaagacaggcgcgacggcgtattcggttcgcagattgccaaacgcctttctgggatgtttacgctggttgccgtactgcccggcgtgtttctgttcggcgtttccgcacagttcatcaacggtacgattaattcgtggttcggcaacgacacccacgaggcgcttgaacgcagcctcaatttgagcaagtccgcattgaatctggcggcagacaacgcccttggcaacgccatccccgtgcagatagacctcatcggcgcggcttccctgcccggggatatgggcagggtgctggaacattacgccggcagcggttttgcccagcttgccctgtacaatgccgcaagcggcaaaatcgaaaaaagcatcaacccgcacaagctcgatcagccgtttccggataaggcgcgttgggaaaaaatccaacaggcgggttcggtcagggatttggaaagcataggcggcgtattgtacgcgcagggctggctgtcggcgggtacgcacaacggacgcgattacgccttgtttttccgccagccgattcccaaaggcgtggcagaggatgccgtcttaatcgaaaaggcaagggcgaaatatgctgagttgagttacagcaaaaaaggtttgcagacctttttcctggcaaccctgctgattgcctcgctgttgtcgatttttcttgcactggtcatggcattgtattttgcccaccgtttcgtcgaacccgtcctatcgcttgccgagggggcgaaggcggtggcgcaaggcgatttcagccaaacccgtcctgttttacgtaatgatgagttcgggcgtttgaccaagttgttcaaccacatgaccgagcagctttccatcgccaaagaagcagacgagtgcaacaggaggcgcgaagaagccgccagacattatctcgaatgcgtgctggaggggctgaccacgggcgtggtggtgtttgacgaacaaggccgtctgaaaaccttcaacaaagcggcggaacagattttggggatgccgcttacccccctgtggggcagcagccggcacggttggcacggcgtttcggcgcagcagtccctgcttgccgaagtgtttgccgccatcggcgcggcggcaggtacggacaaaccggtccatgtgaaatatgccgcgccggacgatgccaaaatcctgctgggcaaggcaaccgtcctgcccgaagacaacggcaacggcgtggtaatggtgattgacgacatcaccgttttgatacacgcgcaaaaagaagccgcgtggggcgaagtggcgaagcggctggcacacgaaatccgcaatccgctcacgcccatccagctttccgccgaacggctggcgtggaaattgggcgggaagctggatgagcaggatgcgcaaatcctgacgcgttcgaccgacaccatcgtcaaacaggtggcggcattgaaggaaatggtcgaagcattccgcaattatgcgcgttccccttcgctcaaattggaaaatcaggatttgaacgccttaatcggcgatgtgttggcattgtatgaagccggtccgtgccggtttgcggcggagcttgccggcgaaccgctgatggtggcggcggatacgaccgccatgcggcaggtgctgcacaatattttcaaaaatgccgccgaagcggcggaagaagccgatgtacccgaagtcagggtaaaatcggaagcggggcaggacggtcggattgtcctgacggtttgcgacaacggcaaagggttcggcagggaaatgctgcacaacgccttcgagccgtatgtaacggacaaaccggcgggaacgggattgggtctgcctgtggtgaaaaaaatcattgaagaacacggcggccgcatcagcctgagcaatcaggatgcgggtggcgcgtgtgtcagaatcatcttgccaaaaacggtaaaaacttatgcgtag

SEQ ID NO: 65895 - DNA, 738 bp, Neisseria meningitidis; identical to SEQ ID NO: 47068

SEQ ID NO: 65896 - DNA, 903 bp, Neisseria meningitidis
atggacagcctgatgacattgctttcggtattgataccgatgtttgccggattttttatccgtgtgcccaagccttacctgcccgctttggataaggtgctatcggtcttggtgtatgccgtgctgctgctgatcggcgtatcgttgtcgcgcgtggaggatttgggttcgcggttggacgatatggcgttgacggttctgtggctgtttgtttgtacggtcggggcgaacctgcttgctttggcagtgttgggaaagttattcccgtggcggataaaggggaaagggaagggcgtttcggtcggcgtgtcgggcagtgtggggcagctcggatgcgtgctgctcggatttgcatccggcaaactgatgcgcgatatttggatgccgtctgaaagcgcgggtatgtattgtctgatgctgctggtgttcctcatcggcgtacagctcaaaagcagcggcgtatcgttgcggcaggttttggtcaaccgcaggggtattcggttgtcggtctggtttatgctttcatctctttcgggcgggctgctgtttgccgcatcgacagacggtgtgtcgtggacgaaaggtttggcgatggcttccggcttcggttggtattccctctcgggtttggtcatgaccgaggcttacggcgcggtatggggcagcatcatgctgctgaacgatttggcacgagagctgtttgcactggcatttatcccgctgctgatgaagcgttttccggatgcggcggtgggggttggtggtgcgaccagtatggatttcacattgcccgtgattcagggtgcgggcggtttggaagtcgtgccggtagcggtcagcttcggcgtggtggtcaatatcgccgccccgtttctgatggtggtgttttccgctttgggttga

SEQ ID NO: 65897 - DNA, 1680 bp, Neisseria meningitidis
atggaaattattaacgatgcagaacttatccgttccatgcagcgtcagcagcacatagatgctgaattgttaactgatgcaaatgtccgtttcgagcaaccattggagaagaacaattatgtcctgagtgaagatgaaacaccgtgtactcgggtaaattacattagtttagatgataagacggcgcgcaaattttcttttcttccttctgtgctcatgaaagaaacagcttttaaaactgggatgtgtttaggttccaataatttgagcaggctacaaaaagccgcgcaacagatactgatcgtgcgtggctacctcacttcccaagctattatccaaccacagaatatggattcgggaattctgaaattacgggtatcagcaggcgaaataggggatatccgctatgaagaaaaacgggatgggaagtctgccgaaggcagtattagtacattcaataacaaatttcccttatataggaacaaaattctcaatcttcgcgatgtagagcagggcttggaaaacctgcgtcgtttgtcgagtgttaaaacagatattcagattataccgtccgaagaagaaggcaaaagcgatttacagatcaaatggcagcagaataaacccatacggttcagtatcggtatagatgatgcgggtggcaaaacgaccggcaaatatcaaggaaatgtcgctttatcgttcgataaccctttgggcttaagcgatttgttttatgtttcatatggacgcggtttggtgcacaaaacggacttgactgatgccaccggtacggaaactgaaagcggatccagaagttacagcgtgcattattcggtgcccgtaaaaaaatggctgttttcttttaatcacaatggacatcgttaccacgaagcaaccgaaggctattccgtcaattacgattacaacggcaaacaatatcagagcagcctggccgccgagcgcatgctttggcgtaacagacttcataaaacttcagtcggaatgaaattatggacacgccaaacctataaatacatcgacgatgccgaaatcgaagtgcaacgccgccgctctgcaggctgggaagccgaattgcgccaccgtgcttacctcaaccgttggcagcttgacggcaagttgtcttacaaacgcgggaccggcatgcgccaaagtatgcctgcaccggaagaaaacggcggcgatattcttccaggtacatctcgtatgaaaatcattactgccggtttggacgcagccgccccatttattttaggcaaacagcagtttttctacgcaaccgccattcaagctcaatggaacaaaacgccgttggttgcccaagataaattgtcaatcggcagccgctacaccgttcgcggatttgatggggagcagagtcttttcggagagcgaggtttctactggcagaatactttaacttggtattttcatccgaaccatcagttctatctcggtgcggactatggccgcgtatctggcgaaagtgcacaatatgtatcgggcaagcagctgatgggtgcagtggtcggcttcagaggagggcataaagtaggcggtatgtttgcttatgatctgtttgccggcaagccgcttcataaacccaaaggctttcagacgaccaacaccgtttacggcttcaacttgaattacagtttctaa

SEQ ID NO: 65898 - DNA, 1827 bp, Neisseria meningitidis
ttgggcatttcccgcaaaatatcccttattctgtccatactggcagtgtgcctgccgatgcatgcacacgcctcagatttggcaaacgattcttttatccggcaggttctcgaccgtcagcatttcgaacccgacgggaaataccacctattcggcagcaggggggaacttgccgagcgcagcggccatatcggattgggaaaaatacaaagccatcagttgggcaacctgatgattcaacaggcggccattaaaggaaatatcggctacattgtccgcttttccgatcacgggcacgaagtccattcccccttcgacaaccatgcctcacattccgattctgatgaagccggtagtcccgttgacggatttagcctttaccgcatccattgggacggatacgaacaccatcccgccgacggctatgacgggccacagggcggcggctatcccgctcccaaaggcgcgagggatatatacagctacgacataaaaggcgttgcccaaaatatccgcctcaacctgaccgacaaccgcagcaccggacaacggcttgccgaccgtttccacaatgccggtagtatgctgacgcaaggagtaggcgacggattcaaacgcgccacccgatacagccccgagctggacagatcgggcaatgccgccgaagccttcaacggcactgcagatatcgttaaaaacatcatcggcgcggcaggagaaattgtcggcgcaggcgatgccgtgcagggcataagcgaaggctcaaacattgctgtcatgcacggcttgggtctgctttccaccgaaaacaagatggcgcgcatcaacgatttggcagatatggcgcaactcaaagactatgccgcagcagccatccgcgattgggcagtccaaaaccccaatgccgcacaaggcatagaagccgtcagcaatatctttatggcagccatccccatcaaagggattggagctgttcggggaaaatacggcttgggcggcatcacggcacatcctatcaagcggtcgcagatgggcgcgatcgcattgccgaaagggaaatccgccgtcagcgacaattttgccgatgcggcatacgccaaatacccgtccccttaccattcccgaaatatccgttcaaacttggagcagcgttacggcaaagaaaacatcacctcctcaaccgtgccgccgtcaaacggcaaaaatgtcaaactggcagaccaacgccacccgaagacaggcgtaccgtttgacggtaaagggtttccgaattttgagaagcacgtgaaatatgatacgaagctcgatattcaagaattatcggggggcggtatacctaaggctaagcctgtgtttgatgcgaaaccgagatgggaggttgataggaagcttaataaattgacaactcgtgagcaggtggagaaaaatgttcaggaaataaggaacggtaatataaacagtaactttagccaacatgctcaactagagagggaaattaataaactaaaatctgccgatgaaattaattttgcagatggaatgggaaaatttaccgatagcatgaatgacaaggcttttagtaggcttgtgaaatcagttaaagagaatggcttcacaaatccagttgtggagtacgttgaaataaatggaaaagcatatatcgtaagaggaaataatagggtttttgctgcagaataccttggcaggatacatgaattaaaatttaaaaaagttgactttcctgttcctaatactagttggaaaaatcctactgatgtcttgaatgaatcaggtaatgttaagagacctcgttataggagtaaataa

SEQ ID NO: 65899 - DNA, 726 bp, Neisseria meningitidis
atggaaacacaaaacaaacctaccgttaccgacattgaccgccccatactcgtcccgcccggcggacataaaaaagtcttgctgcattcctgctgcgccccgtgcagcggcgaagtgatggaggcgatgcttgcctccggcatcgactacaccatttatttttacaatcccaatatccatccgcacaaagagtatatgctccgaaaagaggaaaacgtgcgctttgcggaaaagttcggcattcctttcatcgataaagacgacgactacgaaaacgaccgcaaagaatggtttgccaaagccaaaggtatggagtttgagccggaacgcggcatccgctgcaccatgtgtttcgatatgcgttttgaaaaggcggcgcaatacgcgcatgaacacgggttccccgtctttaccagttcgctgggcatttcacgctggaaaaatatggcgcaaatcaacgactgcggccgccgtgccgccgcgccttacgatgatgtggtgtattgggatttcaactggcgcaaaggcggcggcagcgcgcgcatgattgaaatcagcaaacgtgaaaacttctaccagcaggaatattgcggttgtgcctattccctgagggattccaatgcccaccgcaaatcacagggcagaatccccatcaaactcggcgtgctgtattacggcgacgaatcgacacaatacgaacctgcacccatccgggtggacaaataa

SEQ ID NO: 65900 - DNA, 624 bp, Neisseria meningitidis
atgaaaatcatacacaaaggtttggtcgaatatctgccgacttttgaagcgatgaaaacctttaatgccggacggaatgccgacaccgaagacgaactgtgggtcgtcgaacacccgcccgtgttcacacaaggactggcgggaaaacccgaacacctgctgattcgcgacgacattcccgtcgtccaaatcgaccggggcgggcagattacctatcacgggcccgggcaattggtcgtttatacgatgattgatttcaaacggcgcaaaaccagcgtccgcaacatcgtttccgcgcttgaaaacagcatcatcgccacattggcagaatacggcatcgaagcggcggcagaccccaaacgccccggcgtttatgtcggagaacgcaaaatcgcctcactggggctgcgtatcaaaaacggctccgtctatcacgggcttgcgctcaacgtcaatatggatttaagcccgtttacccacatcaacccctgcggctacgccggtatggaaatgacgcaaatcgcggattttgtccaaccctgccccacgccggacgaagtcgccgccaaactcaccgcacaccttgaaacacaattcacaccgaaagcagacaacaatgagtga

SEQ ID NO: 65901 - DNA, 1023 bp, Neisseria meningitidis; identical to SEQ ID NO: 50683

SEQ ID NO: 65902 - DNA, 2286 bp, Neisseria meningitidis; identical to SEQ ID NO: 59128

SEQ ID NO: 65903 - DNA, 213 bp, Neisseria meningitidis; identical to SEQ ID NO: 36410

SEQ ID NO: 65904 - DNA, 1101 bp, Neisseria meningitidis
atggaaacacagctttacatcggcatcatgtcgggaaccagtatggatggggcggatgccgtgctggtacggatggacggcggcaaatggctgggcgcggaagggcacgcctttaccccctatcccgacaggctgcgccgccaattgctggatttgcaggacacaggcacagacgaactgcaccgcagcaggattttgtcgcaagaactcagccgcctatatgcgcaaaccgccgccgaactgctgtgcagtcaaaacctcgcgccgtccgacattaccgccctcggctgccacgggcaaaccgtccgacacgcgccggaacacggttacagcatacagcttgccgatttgccgctgctggcagaacggacgcggatttttaccgtcggcgacttccgcagccgcgaccttgcggccggcggacaaggtgcgccgctcgtccccgcctttcacaaagccctgttccgcgacgacagggaaacacgcgcggtactgaacatcggcgggattgccaacatcagcgtactcccccccgacgcacccgccttcggcttcgacacagggccgggcaatatgctgatggacgcgtggacgcaggcacactggcagctgccttacgacaaaaacggtgaaaaagcggcacaaggcaacatattgccgcaactgctcgacaggctgctcgcccacccgtatttcgcacaaccccaccctaaaagcacggggcgcgaactgtttgccctaaattggctcgaaacctaccttgacggcggcgaaaaccgatacgacgtattgcggacgctttcccgattcaccgcgcaaaccgttttcgacgccgtctcacacgcagcggcagatgcccgtcaaatgtacatttgcggcggcggcatccgcaatcctgttttaatggcggatttggcagaatgtttcggcacacgcgtttccctgcacagcaccgccgaactgaacctcgatccgcaatgggtagaagccgccgcatttgcgtggttggcggcgtgttggattaaccgcatccccggtagtccgcacaaagcaaccggcgcatccaaaccgtgtattctgggcgcgggatattattattga

SEQ ID NO: 65905 - DNA, 234 bp, Neisseria meningitidis; identical to SEQ ID NO: 55428

SEQ ID NO: 65906 - DNA, 441 bp, Neisseria meningitidis; identical to SEQ ID NO: 47081

SEQ ID NO: 65907 - DNA, 702 bp, Neisseria meningitidis; identical to SEQ ID NO: 59634

SEQ ID NO: 65908 - DNA, 1977 bp, Neisseria meningitidis; identical to SEQ ID NO: 43804

SEQ ID NO: 65909 - DNA, 933 bp, Neisseria meningitidis; identical to SEQ ID NO: 36892

SEQ ID NO: 65910 - DNA, 1308 bp, Neisseria meningitidis; identical to SEQ ID NO: 45413

SEQ ID NO: 65911 - DNA, 609 bp, Neisseria meningitidis; identical to SEQ ID NO: 39049

SEQ ID NO: 65912 - DNA, 594 bp, Neisseria meningitidis; identical to SEQ ID NO: 38781

SEQ ID NO: 65913 - DNA, 285 bp, Neisseria meningitidis; identical to SEQ ID NO: 60069

SEQ ID NO: 65914 - DNA, 837 bp, Neisseria meningitidis; identical to SEQ ID NO: 51426

SEQ ID NO: 65915 - DNA, 372 bp, Neisseria meningitidis; identical to SEQ ID NO: 38879

SEQ ID NO: 65916 - DNA, 120 bp, Neisseria meningitidis; identical to SEQ ID NO: 58938

SEQ ID NO: 65917 - DNA, 3210 bp, Neisseria meningitidis
atgttttatctgtatcaatccaaccgtcttgaaacgctggcggcattgtttgcccgcattcaaaaagtcaaaccgctgaaatcggctttacagcccgaacagattattgtgcagagtcaggggatgcgccgctatctcaatacctgcctcgcccgcgatttgggcgtggcggcgaatttgtcgttcagcctgcccgccggcctgacgtggaagctgatgaaaaaactgattcccggtattccggaactcagcccgtttgcacccgaagtcatgcgctggcggctgctggatttgttccgcagtgaagcattccggaatacggcagaatttgaagatgtgaggaatgtgctgcaagactatctgggcagcggcgaatcggcagattaccagcttgcgggacagcttgcggacatattcgaccaatacctcgtgtaccgtcctcagtggatagacgcttggcagcagggcaggcggctcggtttgggcgacgacgaaatctggcagtccaaactgtggcgttacctcgacgatggcaggcagagcgcgccgcaccgtgtcgcgttgtgggaaaagctgcttgccgcgttggacaaggataagctgcccgagcgttatttcgtgttcggcatttccacgatggcgccgatgtatcttcagcttttgcacaagctgtccgaacattgcgatgtgttcgtgttcgcactcaatccgagcgggatgtattggggcaacgtcatcgaagcggcgcaaatcctcaaaggcggcggcgatcccgatttaactcaggcagggcatccgctgctcgcctcattgggcaagcaggggcgcgactttttcgactttttgaacgaaatggaaatagaaggcgaaacgccggtatttgaagaaggcggacgcgatacgcttttgcacgccctgcaaaccgatattcaaaacctgaaaatgccgtctgaaaatgtgggaagcgtcggtacggatgacggttcgatacgtatcgtctccgcgcacagccctttgcgcgaattgcagatactcaaagacaagctgttgaaaattctacatgaacatcccgattggcagccgcacgatatcgccgtattaaccccgaatatcgaatcctatacgccttttatcgaagccgtgttcggacaggcgcagcccggcgcgcaggcattgccgtattccgtttcggatgtgaaaatcagccgccgacaaccgctgtttcatgctttgtcatgcctgttcgacttgttggaaagccgatttgaagtcgataaagtgcttgtgcttttagaaaccgcgcccgtgttgcgccatttcggactgactgaggacgatttgccgcttttgcacgacatggttgccgatttgaacgtccgctggggtttggacggagaaatgcgcggcggcacggatcagctgttcacctggaagcaggcggtagaacgcatgatattgggctggatgctgcccgaaggcggcaatccgatgtggcagggggtcagcgcgtggtatgccgacgtgaaccaaaccgccctgttcggacgttttgccgccttcctcgaaaccctgacggatattgtacggatatggcggcagcccgcaacgatcggcgaatgggtggcgcgttgccgaggtttgcttaaaacattgttccaagccgaagccgatgaccaaaaggcagtccaaaacctcgaaaacgaatgggtcaaatggcaggcggaaaccgaattggcgcaattttccggacagttgccgccgcacaccgttatccgccacatccgccgctttctcgacagcgaaagcgaggcaggctttttacgcggcggcatcaccttttgcagtatggtgccgatgcggagcctgccctttaaagtcatctgtctgttgggtttgaacgacggagattttccccgcaataccaaagccgccgtattcgacctgattgctaaacatcccgccaaaggcgaccgcgcccgccgcgacgacgaccgctacctcttcctcgaagccctcatcagcgcgcgtgaaatcctgtacctgtcctacatcgggcgcgacatccgcaaagacgaagaactggctccgtcttctttgttgggcgaactcatcgataccgttgccgctatggcgggcatcggtagccgccaacttgcacaaaactggatagaacagcatccgctgcaagccttctcgcgccgatatttccaagaaggcggacgttcagacggcatattcggcacgcgtaccgactacgccgccgcgctcggacaaacgcccgaaccgccgcaaccctttttcgaccaatccgtagaaaacgccgaacctgttgccgaaatcggacaggacgaatttatccgtttctggcgcaatcccgtcaaagtatggcttcagcagcagcttgcgtggagcgaaccccatatcggcgaagcctgggagcctgccgaacccttcgagccgcaacacgccgatcaaatcgccgaaatctacatcgaagcacggcgcgaaggacgggattttgcccaaaccgccgcccgcatcggggcggaaagcctcctgccgtcgggagagttgggcagactttggcagcaggacttccaaaccgctgccaaacaaatcgacacggcggttttaaacagccccaaactgccaccgctttcatatgccataccgtcggacgggcaaatcctgaaaggcagcttgggcaatctgtaccgctgcggacaagtgttttacgcctacggcaaacccaacgcgccgcaacgtatcgcttttctgctggaacacctgatattttgcgccgttatgccgtctgaagccgaaacgcggcaaacctttatcgtccaatccggagaaaccgaaatattggcggaaatcgcgcaagacagggcattgcagctattgtcggaatggatggcgtttttcaatatcgggcaaaaccgcccgctgccgttttttgccaagacctcgcttgccgctgccgaagcgtttgcccaaaaacaagattgggaagccgccctgaaaaaagcccaaaccgcctattacggcaacaaagtcagcaaagggcagaaagactataccgaagtcgccctcgtgttcggcaacgcaagccaaaacccactcgaacaacccctgtttgaaaacctcgcccgcctgcttgccgacacgtttgccgcagcggaaaaaaaggaagaggccggagcagcctga

SEQ ID NO: 65918 - DNA, 423 bp, Neisseria meningitidis; identical to SEQ ID NO: 45387

SEQ ID NO: 65919 - DNA, 990 bp, Neisseria meningitidis
atgaaacagcctgtttttgccgttacttccggcgagcctgccggcatcggccccgatatttgtttggacttggcgtttgcacgcctgccctgccgctgcgcggtattgggcgacaaaaacctattgcgcgcgcgcgccgaagccttgggcaaaagcgtcgtcctgcgcgacttcgatccagaatcaggcggcgcggcatacggcgagctggaagtgctgcacatccctgccgtcgaagcggttgaggcgggcaaactcaatcccgccaacgccgcctatgtgctgcaacttttggacaccgcgctcgcaggcatttcagacggcattttcgacggcatcgttaccgcgccgctgcacaaaggcatcatcaacgacgcgcgcgcaagcacaggttttttcagcggacacaccgaatatctggcggaaaaaagcggcacggggcaggttgtgatgatgcttgccggcaaaggcctgcgcgtcgccctcgtaacgacccacctgccgctgaaagacgttgccgccgccatcacgcaaccgctgattgaaagcgtcgcacgcattttgcatcacgacttaaaacacaaattcggcatcaaaaatcccaaaatcctagtcgccggactcaacccccacgccggcgaaggcggacacctcggacacgaagaaaccgacaccattatccccgcgctcgaaaacctgcgccgcgaagggataaacctcgccggcccgtatccggcggataccttgttccaaccgtttatgctcgaaggtgcggatgccgtattggcgatgtaccacgaccaagggctgcccgtgttgaaataccacagcttcggacagggcgtgaacatcacgctcggcctgccctttatccgcacctccgtcgatcacggcaccgcgcttgatttggcggcaaccggcagggcggattccggcagcctgataactgccgtggagaccgccgtcgagatggcgcgcggcagcctttaa

SEQ ID NO: 65920 - DNA, 1077 bp, Neisseria meningitidis; identical to SEQ ID NO: 53214

SEQ ID NO: 65921 - DNA, 303 bp, Neisseria meningitidis; identical to SEQ ID NO: 37654

SEQ ID NO: 65922 - DNA, 1458 bp, Neisseria meningitidis; identical to SEQ ID NO: 42683

SEQ ID NO: 65923 - DNA, 177 bp, Neisseria meningitidis; identical to SEQ ID NO: 38772

SEQ ID NO: 65924 - DNA, 477 bp, Neisseria meningitidis; identical to SEQ ID NO: 51448

SEQ ID NO: 65925 - DNA, 549 bp, Neisseria meningitidis; identical to SEQ ID NO: 36303

SEQ ID NO: 65926 - DNA, 1542 bp, Neisseria meningitidis
atgaagtttttagaccgtgaggcaagcattgccaagccgggtttcaaccgttggctcgtaccgcccgcagcattggcggtacaccttgccatcgggcagatttacgcctattccgtattcaacgcgccgctgaccaaacttatcggcataaccgaatcggcggccggagattggaagctgacgaccgtaggttggattttcagtatcgcactcgcgatgctgggcgcgtcggccgccctgttcggtacgtggatggaacgggtagggccgcgcaaagccatatttgccgccgcctgctgcttcagcctgggcttcttcgtatccgcattcggcgtgcgtacgcacaacctcttcctgctctatttgggcaacggcgtcatcggcggcgtaggcttaggcttaggctacatcgggccggtttccacactgatgaaatggtttcccgacaagccgggtatggcgaccggtttggcgattatgggtttcggcggcggcgcaatgcttgcctcgccgctttccgtatcactgatgaacgccttttcaaacgctgcttcggttggggttgccgaaaccttcgccgtattgggtctgctttacctcgcactgatgatgtttggcgcgtttaccatccgcgtacctgccgacggctggaaacctgaaggctataccgcgccgaaaacgcaaaacaagctggtcagcagcaatcatgtcaacgtgtcccaagccatgaaaacgccgcagttttggctgttgttctgggtattgtgcctgaacgtaactgccggcatcggcgtattgggtcaggcatcagtgatgattcaggaactcttttccgaaacctccgtaggcaggcaggcggcagtcggcgcaggtgcggcggcaggcttcgtcagcctcctgagcctgtttaatatgggtgggcgctttttgtggtcgagcgtttccgacaaaatcggacgcaaaaacacctacaccatcttcttcgtactcggttcgctgctgtatttcgccgttccctccatcggcgagggcggcagcaaagccctgttcatcatcggcttttgcgtgattatttccatgtacggcggcggatttgccgccattcccgcctacctgaaagacctgttcggcacctatcaggtcggcgcgattcacgggcgcatcctgctggcctggtcaaccgccgccgtcatcggcccggtactggtcaattacatacgccaaagccaaatcgacagcggcataccggcggcacaggcatacagcgtaaccatgtacatcatggcgggtctgctgattatcggtttgttgtgcaacctcgccgtcaaatccgtacacgaaaaacaccacgaaaaagacatcaaaaccgccgcacacagcggcaaccccgatgacgaaaccgccatatccgacgcttaccttgtgggcgaaaaagtttccggcggcggcatatcggtctggtggcgttgggcattggccgtcataccgctcgcctacggcgtggtgatgatctttgtcaaagcactcgaccttttctcctga

SEQ ID NO: 65927 - DNA, 713 bp, Neisseria meningitidis; identical to SEQ ID NO: 52081

SEQ ID NO: 65928 - DNA, 1188 bp, Neisseria meningitidis; identical to SEQ ID NO: 65215

SEQ ID NO: 65929 - DNA, 1488 bp, Neisseria meningitidis; identical to SEQ ID NO: 39015

SEQ ID NO: 65930 - DNA, 1332 bp, Neisseria meningitidis
atgctgttcaaccacaccgcttccgaactcctcgacctctgccgccgcacgctcgacttggcaaaagcgacgggcgcaaccgccgccgaagccgatttcagcgaatcattgggacaaagcgtcagcgtgcggctgggcgaaatcgaacaaatcgagttccagcaggacaagtcgctggacattaccgtttacgtcggcaaacgcaaaggccgcgccagtactgccgacttctccgaaaaagccctgcaagacaccgtcaaagccgccatcgacatcgcccgccacaccgccgaagacggttgcgccggacttgccgatgcctgtctgatggcaaaacacatcggcgaccccgacctttaccacgaatgggatttggatacggaagccgccgtcggcttggcaaaacaatgcgaacaagccgccctgaacgaggatgagcgcatcgaaaactccgaaggcgcggcggtgcaaaccggccattaccaatacgtttacggcaacacccacggttttgccgcacaccggcaaggcacgcaccacagcatttcctgcagcgtcgttgccgccgacgaaaacgggatgcagcgcgactactggtacgattccgcctgccgccatccggatatggacagccccgaaaccatcggtcaaaccgccgcccgccgcactttgcgccgactcggcagccgcagcatcccgacaggcagctaccccgtcctcttcgataccaccgtttcgggcggtcttatcggacacctcgtcggcgcactctccggcggcgcgctctaccgccaaagcagtttcctgatcgacagcatcggcaaaaaagtcctgcccgatttcctcaacctgcgcgaagaaccgcacatcccccgctctttccgcagcagctattttgatgcggaaggcgttgccaccgcaccgcgcttcgtgattcaaaacggcattgtcgaaggctatttcctcagcagttacagcgcgcgcaaactcggtatgcagaccacgggcaacgccggcggcgcgcacaacctgtatttgaaccatacgcacgaaacgcaatccgacctgctgaaagaaatggggacgggattattggttaccgaactgatgggacagggcgcgaacaccattaccggtgactactcgcgcggcgcggcgggtttttgggtggaaaacggcgtgattgcctaccccgtccacgagattaccgtagccggacgcttgcaggatatgtaccgcgacattgtcggcgtggcggatgacgctttgcggcgttcgtccaacaaaatcggctcgattctgattgcggggatgacggttgccggaagctga

SEQ ID NO: 65931 - DNA, 246 bp, Neisseria meningitidis; identical to SEQ ID NO: 43892

SEQ ID NO: 65932 - DNA, 699 bp, Neisseria meningitidis
atgaaatccagacacctcgccctcggcgttgccgccctgttcgcccttgccgcgtgcgacagcaaagtccaaaccagcgtccccgccgacagcgcgcctgccgcttcggcagccgccgccccggcagggctggtcgaagggcaaaactataccgtccttgccaacccgattccccaacagcaggcaggcaaagtcgaagtccttgagtttttcggctatttctgtccgcactgcgcccacctcgaacctgttttaagcaaacacgccaagtcttttaaagacgatatgtacctgcgtaccgaacacgtcgtctggcagaaagaaatgctgacgctggcacgcctcgccgccgccgtcgatatggctgccgccgacagcaaaaatgtggcgaacagccatattttcgatgcgatggtcaaccaaaaaatcaagctgcaaaatccggaagtcctcaaaaaatggctgggcgaacaaaccgcctttgacggcaaaaaagtccttgccgcttacgaatctcccgaaagccaggcgcgcgccgacaaaatgcaggagctgaccgaaaccttccaaatcgacggtacgcccacggttatcgtcggcggcaaatataaagtcgaatttgccgactgggagtccggtatgaacaccatcgaccttttggcggacaaagtacgcgaagaacaaaaagccgcgcagtaa

SEQ ID NO: 65933 - DNA, 1329 bp, Neisseria meningitidis; identical to SEQ ID NO: 55368

SEQ ID NO: 65934 - DNA, 1608 bp, Neisseria meningitidis; identical to SEQ ID NO: 59790

SEQ ID NO: 65935 - DNA, 1377 bp, Neisseria meningitidis; identical to SEQ ID NO: 36747

SEQ ID NO: 65936 - DNA, 693 bp, Neisseria meningitidis; identical to SEQ ID NO: 51823

SEQ ID NO: 65937 - DNA, 1284 bp, Neisseria meningitidis
atgtccaaatcaattaaactcaacgtaccgggtcaggcaggtttggagctgccggtattggaagccagcatcgggcacgatgtggttgacattcgggggctgacaaaaaatacaggtttgttttccttcgaccccggatttgtttcaaccgcaagctgtgagtctaaaattacttacatcgacggcgatcaaggcttgctttattatcgcggataccccatcgagcagctggccgaaaagtccgattatttggaagtctgctacctgttgatttacggcgaactgccgactcccgagcaaaaggcagaatttgacaataccgtccgccgccacacgatggtgcatgaacagctgacttggttcttccgggggttccgccgcgacgcgcatccgatggcgatgatggtcggcgtggtcggcgcgctgtctgcgttctaccaagacagcttggacattagcaatcccgaacaccgcaaaatcgcgatttaccgcctgatttccaaaatcccgaccattgcggcaatgtgctaccgctattcaaacggtctgccattcaattatccgaagaataatctttcttattccgaaaacttccttcatatgatgttcgccacgccgtgtgaagactacaaacccaatcccgttttggcacgcgcgctcgaccgcatctttattttgcatgccgaccacgagcaaaacgcctcaacttcaaccgtccgtctggcaggctcttcgggtgcgaatccgtttgcctgtattgctgccggtatcgcctgcctgtggggtgcttcgcacggcggtgcgaacgaagccgtgttgaaaatgttggacgaaatcggcgatgtgtctaatgttgccgcatacatggaaggtgtgaaacaacgcaaataccgtctgatgggcttcggtcaccgcgtgtaccgcaatatggatccgcgtgccagcattatgcgcgaaacctgctatgaagttttgaaggaattgggcttggaagacagtccgaaattcaaactggcgatggaattggaacagattgcgctgaaagacccgttctttatcgaacgcaaactgtatccaaacgtcgatttctattccggcatcgtcctgtccgcgctgggcatcccgaccgaaatgtttaccgtcatcttcgccctgtcgcgcagcgtgggctggatttcgcactggcacgagatgattagcgatccttcgctgaaaatcggccgcccgcgccagctttataccggttcggaacgccgcgattatgtgccgccaggcgagaggtaa

SEQ ID NO: 65938 - DNA, 630 bp, Neisseria meningitidis; identical to SEQ ID NO: 49579

SEQ ID NO: 65939 - DNA, 2385 bp, Neisseria meningitidis
atggccgacaactacgtaatctggtttgaaaacctgcgtatgacagatgttgaacgcgtgggcggtaaaaacgcctcgctgggcgaaatgatcagtcagctgaccgaaaaaggcgttcgcgtccccggcggctttgccaccacggccgaagcctaccgcgcattcctcgcacacaacggtctgagcgaacgcatttccgccgcactggcaaaattggatgtcgaagacgttgccgaactggcacgcgtcggcaaagaaatccgccaatggattttggatacgcctttccccgaacagctcgatgccgaaatcgaagcggcatggaacaaaatggttgccgatgccggcggcgcggacatttccgttgccgtacgctcttccgcaaccgccgaagacctgcccgacgcatcatttgccggccaacaggaaaccttcttgaacatcaacggattggaaaacgttaaagaagcgatgcaccatgtattcgcctccctgtacaacgaccgtgccatttcttaccgcgtccacaaaggcttcgaacacgacatcgtcgccctttccgccggcgttcaacgcatggtgcgttccgacagcggcgcatcaggtgtgatgttcaccctcgacaccgaatccggctacgatcaagtcgtctttgttacctcctcttacggtctgggcgaaaacgtcgtacaaggtgcggtcaacccggacgaattttatgtgttcaaacccacgctcaaagcgggcaagcccgccatcctgcgtaaaaccatgggttcaaaacacatcaaaatgatttttaccgacaaagcagaagccggtaaatccgtaaccaacgtcgatgtccccgaggaagaccgcaaccgcttctccattaccgacgaagaaattactgagttggcgcattacgcactgaccatcgaaaaacactacggccgcccgatggatatcgaatggggacgcgacggcttggacggcaaactctacatcctgcaagcccgtcccgaaaccgtaaaatcccaagaagagggcaaccgcaacctgcgccgcttcgccatcaacggcgacaaaaccgtattatgcgaaggccgcgccatcggtcagaaagtcggtcagggcaaggtgcgcctgattaaagatgcttccgagatggattccgtcgaagccggcgacgtactcgttaccgacatgaccgatccggattgggaacccgtgatgaaacgtgcttctgccatcgttaccaaccgcggcggccgtacctgccacgccgccatcatcgcgcgtgaattgggcattcctgccgttgtcggctgcggcaatgcaaccgaattgctgaaaaacggtcaagaagttaccgtatcctgtgccgaaggcgataccggctttatctatgccggtctgttggacgtacagattaccgatgtcgccttagacaatatgcctaaagcacctgtaaaagtcatgatgaacgtcggcaatcccgaactcgcattcagcttcgccaacctgcccagcgaaggcatcggcttggcgcgtatggaatttatcatcaaccgccaaatcggtatccaccccaaagccttgttggaatttgacaaacaagacgacgaattaaaagcggaaattacccgccgtatcgccggttacgcgtcccctgtcgacttctacgtcgataaaatcgccgaaggcgtggcgacattggccgcatcggtttatccgcgtaaaaccatcgtccgtatgtccgacttcaaatccaacgaatacgccaacctggtcggcggcaacgtatacgaaccgcatgaagaaaacccgatgttgggcttccgtggtgcggcgcgttatgtcgccgacaacttcaaagactgtttcgccttggaatgcaaagccttgaaacgcgtccgcgatgaaatggggttgaccaacgttgaaatcatgattccgttcgtccgcactttgggcgaagccgaagccgttgtcaaagccctgaaagaaaacggcttggaacgcggcaaaaacggcctgcgcctgattatgatgtgcgagctgccgagcaacgcggtattggcggaacaattcctgcaatacttcgacggcttctccatcggctcgaacgacatgacccaactgaccctcggtctcgaccgcgacagcggcttggtatccgaatcgtttgacgaacgcaaccctgccgtcaaagtgatgctgcaccttgccatctccgcctgccgcaagcagaacaaatatgtcggcatctgcggtcaaggcccgtccgaccatccggacttcgccaaatggctggttgaggaaggcattgaaagcgtttccctgaacccggataccgtcatcgaaacttggctatatttggcgaatgaattgaacaaataa

SEQ ID NO: 65940 - DNA, 477 bp, Neisseria meningitidis
atgaacaccatcgcccccaacctcgacggcaaacacctccgcatcggcatcgtacaggcacgcttcaccaacgaaatcggcagcgaaatgctcaaagtctgctgccgcaccctccaagaattgggcgtggcagacgaaaacattaccgtcgccaccgtacccggcgcgcttgaaatccccatcgcgctgatgaactttgcctcttccgaaaagtttgacgcactgattgccatcggcgtcgtcatccgtggcgaaacctaccatttcgagctggtttccaacgaatccggagcaggcgtcagccgcgtcgcactcgactacaatatcccgattgccaatgccgtcctaaccaccgaaaacgacgcgcaggcaatcgaacggattgaagaaaaagcctcggatgccgccaaagtcgccgtcgaatgcgccaacctcgtcaacctgctgatcgaagaacagtttgaagacgaagaataa

SEQ ID NO: 65941 - DNA, 2100 bp, Neisseria meningitidis
atgccgtctgaaagacgtttccgacccatccctactgcacgctttgtccgcaaacgcatcacaggcaagattatggaagttatccaatacccaaattcccccttcaaactccaccaacccttcccgcccgcaggcgaccagcccaccgccattgcaggcctgctcgaagggctttcagacggccttgcctatcaaaccctgctcggcgtaaccggttcgggcaaaacctacaccatggcgaacgtcatcgcccaaagcggccgccccgccatcatcatggcgcacaacaaaacccttgccgcccagctttacgccgaaatgcgcgaatttttccccgaaaacgcagtggaatatttcgtctcctactacgactattaccagcccgaagcctatgtgcccagccgcgatttgttcatcgaaaaagacagcgcgatcaacgaacacatcgagcagatgcgcctttccgccaccaaaaacctaatgacgcgcaacgacgtgattatcgtcgccaccgtgtccgccatttacggtatcggcgacccgaccgagtatcaacaaatggtgttgtccgtcaaagaaggcgataccatcgagcagcgcgacatcatcgccacgctcgtttccatgcaatacgaacgcggcgatttggacttcaaacgcggcagcttccgcgtgcgcggcgacgtgattgacgtgtaccccgccgaaagctccgaaaacgccttacgcatcagcctgtttgatgacgaaatcgaccgcctcgatatgttcgacccgctttcaggcagccttatccagcgcgtcggccgctacaccgtcttcccgtccagccactacgttaccccgcgcgacaccgtcttgcgcgcctgcgagtccatcaaagaagaattacgcgaacgcatcgaatttttcgcccgcgaacaacgccccgtcgaacaacaacgcatcgaacagcgcacccgtttcgacctcgaaatgctctacgaaatgggcttctgcaaaggaatcgaaaactactcccgccacttttccggcaaaaaagaaggcgaaccgccgcctacgctgatggactacctgcccgacaacgccatcatgttcatcgacgaaagccacgttaccgtaacccaaatcggcggcatgtacaaaggcgacgcatcgcgcaagcaaaacctcgtcgactacggcttccgcctgccttcagcccgcgacaaccgcccgctcaaattccacgaatttgaaaaagtcatgccgcaaaccatcttcgtttccgctacccccgccaaatacgaagaagaacacgccggacaagtggtcgaacaagtcgtccgccccacagggctggttgatccccaaatcatcatccgccccgttgccacccaagtcgacgacttaatgagcgaaatcaacgaccgcattgaaaaaggcgaacgcgtactcgttactaccctcaccaaacgcatggcggagcaactcaccgactattacagcgaactcggtatcaaagtgcgctacctgcacagcgacatcgacaccgtcgagcgcgttgaaatcattagagatttacggctcggcctgtttgacgtactcgtcggcatcaacctcttacgcgaaggcctcgacatccccgaagtctctctcgtcgccatcctcgacgcagataaagaaggcttcctgcgctcccaccgcagcctgattcaaaccataggccgcgccgcgcgcaacgtgaacggcgtcgccatcctgtacgccgacaaaattaccgactccatgaaagccgctatcgacgaaaccgaacgccgccgtgaaaaacagattaaattcaacgaagaacagggcatcgtgccgcagcagattaaaaaacaggtcaaagacatcatcgacggcgtgtaccacgaagaagacggcagtaaaggccgtctgaaaggtaaaaacaaggttaaagtgggcgagattcacaacgaagaagatgcgattaaagaaatcgccaaactcgaaaaagccatgcagcaggcggctagggatttgcagtttgaagaggcggctgtgttgcgggataggattagggatattaaagagaatttgttgtttggggcggagtga

SEQ ID NO: 65942 - DNA, 504 bp, Neisseria meningitidis; identical to SEQ ID NO: 36367

SEQ ID NO: 65943 - DNA, 822 bp, Neisseria meningitidis
atggattttctgattgtcctgaaagccctgatgatgggcttggtagaaggttttaccgaatttttaccgatttccagcaccggacatttgattgtgttcggcaatctgattgattttcacagcaatcacaaggtttttgaaattgccatccagctcggtgcagttttggcggtagtgtttgaataccggcagcgtttcagcaatgtgttgcatggcgtgggaaaagaccggaaagccaaccgcttcgtcctcaatcttgccattgcttttatacctgccgccgtgatggggctgttgttcggcaaacagattaaagaacatctgttcaatcctttgagtgtggcggtcatgctggttttgggcggtttttttattttgtgggtggagaaacgccaaagccgggcagagcctaaaattgccgatgttgatgcattgcgtccgattgatgcgttgatgatcggcgttgcccaagtgtttgcactggttccgggtacgtcccgttcgggtagtacgattatgggcgggatgctttggggaatcgagcggaaaacggcaacggagttttcatttttcttggccgttccgatgatggttgccgcaacggcttatgatgtcctgaaacattaccggtttttcaccctgcatgatgtcggtttgattctgataggctttattgccgcttttgtttccggtttagtagcggtcaaagcactgctgaagtttgtttccaagaaaaactatatcccgtttgcctattaccgcattgttttcggcatcgtcatcataatattgtggttgtcgggctggataagttgggaatga

SEQ ID NO: 65944 - DNA, 510 bp, Neisseria meningitidis; identical to SEQ ID NO: 50158

SEQ ID NO: 65945 - DNA, 456 bp, Neisseria meningitidis
atgaaaaaaccgaaaatcctttttgtctgcctcggcaacatctgccgttcgccgatggcggaatacattttgcgccgccgcgccgccgaagcgggcattccccttgaagcggacagcgcggggacatcgggctggcacgacggcgaagatatgcaccgcgagacggcaaagatattgaaaaaacacggtatcgatgcttcaggctttaccagccgcaaaatccgccaaagcgatgcggtggcgtttgactgcatcatcgcgatggacggcaagaatttgtccgaattggaaagaaccttcggcaggcggtcggaaaaaatattcaagctgaccgacctgatacccgaaagcggttacgaccatgtccccgatccgtggtacacgggcgattttgaagaaaccttcaggcttgcggatgcgggctgtcgggcattgttggaaaagatttccaaataa

SEQ ID NO: 65946 - DNA, 663 bp, Neisseria meningitidis; identical to SEQ ID NO: 38761

SEQ ID NO: 65947 - DNA, 2325 bp, Neisseria meningitidis
gtgctgaagacaccccctatgcttgctgcagaactttcgggtaaaaccggtgtgagcattagcgcaccgtatgccaatgagaacagccgcatcattttgagtgccgccgatatagccgcagaaaacggcaaaatcaaactgcaatcctacggcgaccaatcctattacgccggacagggcgaactctatacctttgaacgccgcagctacaaaaccggcaaatggtacaaccgcaaacacattaccgaagtcaaagaacacaaaaacgccaagcccgacgcagtaaacctcagcgcatcccaaggcatcgacatcaaatctggtggcagcatcgacgcctacgccaccgcattcgatgcccccaaaggcagcattaacatcgaagccgggcggaaattgacactctatgccgtagaagagctcaactacgacaaactagacagccaaaaaaggcgcagatttctcggcatcagctacagcaaagcacacgacaccaccacccaagtcatgaaaaccgcgctgccctcaagggtagttgcagaatcagccaatctgcaatcaggttgggataccaaactgcaaggcacacagtttgaaaccacactgggtggcgcaaccatacgcgcaggcgtaggcgagcaggcacgggcagatgccaagattatcctcgaagggatcaaaagcagcatccacacagaaaccgtgagcagcagcaaatctactctatggcaaaaacaggcaggacggggcagtaacatcgaaaccttgcaattgccgagtttcaccggtcccgttgcgcccgtactgtccgcacccggcggttacattgtcgatattccccaaggcaatctgaaaacccaaatcgaaaccctcaccaaacagcccgagtatgcttatttgaaacaacttcaagttgcgaaaaacatcaactggaatcaggtgcagcttgcttacgataaatgggactacaaacaggagggcttaaccgaagcaggtgcggcgattatcgcactggccgttaccgtggtcacctcaggcgcaggaaccggagccgtattgggattaaacggtgcggccgccgccgcaaccgatgcagcatttgcctctttggccagccaggcttccgtatcgttcatcaacaacaaaggcaatatcggtaacaccctgaaagagctgggcagaagcagcacggtgaaaaatctggtggttgccgccgctaccgcaggcgtatccaacaaaatcggtgcttcctcccttgccacttggagcgaaaccccttgggtaaacaacctcaacgtcaacttggccaatgcgggcagtgccgcactgattaataccgctgtcaacggcggcagcctgaaagacaatctggaagcgaatatccttgcggctttggtcaataccgcgcatggagaagcagccagtaaaatcaaacagttggatcagcactacatagtccacaagattgcccatgccatagcgggctgtgcggcagcggcggcgaataagggcaagtgtcaggatggtgcgataggcgctgcagtcggtgagattgttggtgaggctttggttaagaataccgatttcagcggtatgactgcttctgaaattgaaaaagctaaagcgaatattactgcgtatgcaaaattggtagccggagcgactgtaggtgttacaggaggcaatgttgatgtggcggcaaatgcttccgaaacagctgttaaaaataatgcattagatattatttgggatatcggcaacctcgtatgggacggcggtaaatggatttacgccaaatctattggcgataagcagatggctcgagaagcggcgattgattttggtgtggatgccgccgcagctgccgttccctttgttccggcaggtgcgactaaaatcagccgaggcggggcttatgttctgaaggcgggagacgaagcagttgatacggctaaagccatacaggaaattcagaagcagaccggaatcaagcttacttatgataaggttaataaggtttggacaacaccggcggggttagattatgggttagatgctaagcatggtaataggattaaacatgttttagcccatacaattccaaatccaaacaaacctgttcattctgtttttaatgtgtcccgtaaagaagttttgcctttggttgatgaagcttggagaatgaaaggaaatcctttgccaaatgattcatccgtatatcttgtagatatgaagaaacctattggaacaaaaggagaaacaaaagtgcggattgttgtgcaaaaaggaacaaataaaatcatttctgcatatcctcagaaataa

SEQ ID NO: 65948 - DNA, 282 bp, Neisseria meningitidis; identical to SEQ ID NO: 43821

SEQ ID NO: 65949 - DNA, 1047 bp, Neisseria meningitidis; identical to SEQ ID NO: 46617

SEQ ID NO: 65950 - DNA, 1335 bp, Neisseria meningitidis
atgactgacctgaacaccctttttgccaacctcaaacaacgcaatcccaatcaggagccgttccatcaggcggttgaagaagtcttcatgagtctcgatccgtttttggcaaaaaatccgaaatacacccagcaaagcctgctggaacgcatcgtcgaacccgaacgcgtcgtcatgttccgcgtaacctggcaggacgataaagggcaagtccaagtcaaccggggctaccgcgtgcaaatgagttccgccatcggtccttacaaaggcggcctgcgcttccatccgaccgtcgatttgggcgtattgaaattcctcgcttttgaacaagtgttcaaaaacgccttgaccaccctgcctatgggcggcggcaaaggcggttccgacttcgaccccaaaggcaaatccgatgccgaagtaatgcgcttctgccaagcctttatgaccgaactctaccgccacatcggcgcggacaccgatgttccggccggcgacatcggtgtaggcgggcgcgaaatcggctacctgttcggacaatacaaaaaaatccgcaacgagttttcttccgtcctgaccggcaaaggtttggaatggggcggcagcctcatccgtcccgaagcgaccggctacggctgcgtctatttcgcccaagcgatgctgcaaacccgcaacgatagttttgaaggcaaacgcgtcctgatttccggctccggcaacgtggcgcaatacgccgccgaaaaagccatccaactgggcgcgaaagtgctgaccgtttccgactccaacggcttcgtcctcttccccgacagcggtatgaccgaagcgcaactcgccgccttgatcgaattgaaagaagtccgccgcgaacgcgttgccacctacgccaaagagcaaggtctgcaatactttgaaaaacaaaaaccgtggggcgtcgccgccgaaatcgccctgccctgcgcgacccagaacgaattggacgaagaagccgccaaaaccctgttggcaaacggctgctacgtcgttgccgaaggtgcgaatatgccgtcgactttgggcgcggtcgagcaatttatcaaagccggcatcctctacgccccgggaaaagcctccaatgccggcggcgtagcaacttcaggtttggaaatgagccaaaacgccatccgcctgtcttggactcgtgaagaagtcgaccaacgcctgttcggcatcatgcaaagcatccacgaatcctgtctgaaatacggcaaagtcggcgacacagtaaactacgtcaatggtgcgaacattgccggtttcgtcaaagttgccgatgccatgctggcgcaaggcttctaa

SEQ ID NO: 65951 - DNA, 1155 bp, Neisseria meningitidis
atgaaattcatcgacgaagcaaaaatcgaagtcgccgcaggcaaaggcggtaatggcgcaaccagtttccgccgcgaaaaattcgtaccgcgcggcggcccggacggcggcgacggcggcaaaggcggcagcgtctgggcagaagccgacgaaaacaccaacaccctcgtcgaataccgcttcgttaaacgctaccaagccaaaaacggcgaaaaaggccacggttccgaccgttacggcgcaggtgcggacgacatcgtcctcaaaatgcccgtcggcacccttatccgcgacctcgacaccggcgaaaccgttgccgacctcacttatcacggacagcgcgtctgcctcgccaaaggcggcaaaggcggcttgggcaacatccacttcaaatcgtccgtcaaccgcgccccgaaacaatccacccccggcgaagaaggcgaagcccgttccctgcaactcgaacttaaagtcctcgccgatgtcggcttattgggtatgcccaacgccggcaaatccaccctgattaccgccgtatccgccgcacgccccaaaatcgccaactaccccttcaccaccctgcatccaaacttaggcgtggtacgcatcgacgaaaaccacagcttcgtgatggccgacatccccggcctgattgaaggcgcggcagaaggcgcaggcctcggccatcgtttcctcaaacacttatcgcgcaccggattattgctgcacgtcgtcgatttggcgcccttcgacgaaaccgtcaaccccgccgaagaagcactcgccatcatcaacgaattacgcaaatacgacgaagaactctacggcaaaccgcgctggctggtactgaacaaactcgatatgcttgacgaagaagaagcccaaacgcgcactgccgccttcctcgaagccgtcggctgggactaccccaaacccgacgaccgtttccaatttgacatggaaaccccgcgcctcttccaaatcagtgcgctgacccaccaaggcacgcaggaattggtacaccaaatcaaccaatacctgaccgagaaaaaacgtatcgaagctgaaaaagccgaagcggagaaagcagcggcaaatgttgaaattatcgaacagcagcctaaaacggatacaggcgtgtttaagccggagtga

SEQ ID NO: 65952 - DNA, 468 bp, Neisseria meningitidis; identical to SEQ ID NO: 51208

SEQ ID NO: 65953 - DNA, 708 bp, Neisseria meningitidis; identical to SEQ ID NO: 42117

SEQ ID NO: 65954 - DNA, 267 bp, Neisseria meningitidis; identical to SEQ ID NO: 43047

SEQ ID NO: 65955 - DNA, 792 bp, Neisseria meningitidis; identical to SEQ ID NO: 60465

SEQ ID NO: 65956 - DNA, 300 bp, Neisseria meningitidis; identical to SEQ ID NO: 58767

SEQ ID NO: 65957 - DNA, 1407 bp, Neisseria meningitidis
atgaacgattacacagctatgccgtctgaagaccgtgaggtcggcgcattgtcgctgcctccacattcgatggaggcggaacaatccgttttgggcgggttgatgctggaaaatccggcttgggacaggattgccgatgtggtttcgggagaggatttctaccgccacgaacaccgcctgattttccgatccattgccaaattgattaatgagagccgtcccgccgatgtgattacggttcaggaagatttgcagcggaacgaagaattggaagcggcaggcggattcgaatatctgattacgctggcgcaaaacaccccgtctgccgccaacatccgccgctacgccgaaatcgtgcgcgagcgttccatcatgcgccaactcgccgaagtggggacggaaatcgcccgcagcgcatacaatccgcaaggcagggacgcggggcagcttttggacgaggcggaaaacaaagtattccaaatcgccgaaagcaccgccaaatccaagcagggctttttggagatgcccgatttgctgaaagaagtcgtacagcgcatcgatatgctctactcgcgcgacaatcccgatgaagttaccggcgtgccgacagggttcatcgacctcgacaaaaaaacctcgggtctgcaacccggcgacctgattatcgttgccggtcgtccgtctatgggtaagaccgccttttctatcaatatcgccgaacacgttgccgtagaaggcaagctgccggttgccgtcttctcaatggaaatgggcggggcgcaactggtcatgcgtatgctcggctcggtcggacgcttggatcaaagcgttttgaaaaccggcaggctcgaagacgaacactggggtcgcctgaacgaagcagtcgtcaaactctccgacgcgcccgtgtacatcgacgagaccccgggtctgaccgcgctcgaactgcgcgcccgtgcccgccgtctcgcccgtcaatttaacaataagcttggattgattgtcatcgactacctgcaactgatggcaggatccggccgttccgacaaccgagcttcagagctgggcgaaatttcacgttcgctcaaagcgttggcgaaagaattgcaagtccccatcatcgccctgtcgcaactgagccgcacggtcgaatcgcgtaccgacaaacgcccgatgatgtccgaccttcgcgaatccggtgctatcgagcaggatgccgacctgattatgtttatgtaccgcgacgaatactacaaccaagactcgcccatgaaaggccttgccgaatgtatcatcggcaaacaccgcaacggtcccgtcggtaaaatcttcctcacatggacggggcaattcaccaaattcgacaatgctgcctatattcccgaggaggcaaagatagaagattaa

SEQ ID NO: 65958 - DNA, 507 bp, Neisseria meningitidis; identical to SEQ ID NO: 44054

SEQ ID NO: 65959 - DNA, 234 bp, Neisseria meningitidis; identical to SEQ ID NO: 50280

SEQ ID NO: 65960 - DNA, 963 bp, Neisseria meningitidis
atgcagtatgcaaaaatttccggcacgggcagctatcttcccgccaaccgcgtcagcaatgacgaccttgcccaaaaggtagatacctctgacgagtggattaccgcgcgtacgggcatcaaattccgccatattgcagccgaaaatgagaaaaccagcgatcttgccgccgaagcagcccgccgcgcactggatgcaaccggattagacagcggcgaaatcgatttaattattgtggcgacggcaacgccagatatgcagtttccttctaccgccaccatcgtccaacaaaaattgggcatcaccaacggctgccccgcgtttgacgtacaggcggtgtgtgcgggctttatgtacgcgctgaccacggcaaacgcctacattaaaagtggcatggcgaaaaacgcgctggtcatcggcgcggaaaccttcagccgcatcgtcgattggaacgaccgcacaacctgcgtattgttcggcgacggcgcgggcgcggtggttttgagcgcggcggacaaaccgggcatcatccacagcaaactcaaagccgacggcaattatctgaaactcttaaacgtccccgggcaaatcgcctgcggcaaagtttccggttcgccgtacatttcgatggacggtcccggcgtgttcaagtttgccgtcaaaatgctgtccaaaatcgccgatgacgttatcgaagaagccggttataccgccgctcaaatcgactggatcgtgccgcatcaggcaaaccgccgcattatcgaatcgaccgcgaaacatttaggtttgagtatggacaaagtcgtcctgaccgtccaagaccacggcaacacatccgccgcatcgattccgctggctttggatacgggcatccgcagcggacaaatcaaacgcggtcaaaacctgctgctcgaaggcatcggcggcggtttcgcgtggggcgcggtgctgttgcaatattga

SEQ ID NO: 65961 - DNA, 1911 bp, Neisseria meningitidis; identical to SEQ ID NO: 43610

SEQ ID NO: 65962 - DNA, 819 bp, Neisseria meningitidis; identical to SEQ ID NO: 51623

SEQ ID NO: 65963 - DNA, 861 bp, Neisseria meningitidis
atggcaaaagtaaaaggtggattggggcgcggtttgaattcgctgctcgccaacggcgcagacaacagcagcggcgaccgattgaccacggttgcggttaaagatatccggcccggccgctatcaggcgcgtgttcaaatcgatgacgaagccttgcaggagctggcggattcgattaaggcgcaaggcgtgatacagcccgtcatcgtgcgcgaacacggactgtcccgatacgaactgattgcgggggagcggcgttggcgtgccgcacagattgccggcctgaccgaaatccctgccgttatcaaaaccatcagcgacgaaaccgcgttggcaatgggtttgatcgaaaacctccagcgcgaaaacctcaaccccatcgaagaagcacaaggcttgaaacgccttgccgacgagttcggactgacccacgaaaccatcgcccaagccgtcggtaaaagccgaagcgcgatttccaacagcctgcgccttttaagcctgcccgaacccgtgcaggaaatgctttaccaacgccgcctcgaaatggggcacgcccgcgcactgctgaccctgcccgtcgtcgaacagctcgaattggcgcaaaaggctgtcaaaaacggctggtcggtgcgcgaagtcgaacgccgcagccaagccgcccttcaaaacaaacgtcccgagcccaaaaaaactgccgccgccgacatcggccgcctgaatgatttgctgactgaaaaactgggtgtcaacgccgaaatcaaaaccgccaaccataaaaaaggcagaatcatcctgcatttcgacacgcccgaaaccttcgaccatatcttgaagcaattgggcatagattaccgaccttaa

SEQ ID NO: 65964 - DNA, 1371 bp, Neisseria meningitidis
atgttagacaatttaaccggccgcttcagcaatgttctcaaaaacatccgcgggcaggccaaactgaccgaagacaatattaaagaagccttgcgcgaagtccgcctcgccctgcttgaggcggatgtcgccctgcctgtcgtcaaagagttcgtcaacaacgtcaaagaaaaggccctcggtcaggaagtggtgggcagcctgacgccggatcaggcatttatcggcgtggtcaacaaagccctgaccgaactgatgggcagggaaaacaaaacgctggatttgtcggttgcgccgcccgccgtcgtgttgatggcaggtttgcagggcgcaggcaagacgacgaccgtcggcaaactcgcccgcctgctgaaaaacgatcagaagaaaaaagttttggtggtatccgccgacgtttaccgccctgccgcgattgaacagctgcgcctgttggccgaacaggtcggcgtggattttttcccgtccgataccaaccaaaaaccggttgagattgcaactgccgccgtcgattacgccaaaaaacatttttacgatgtcttgatggtcgataccgccggtcgtttggcaatcgatgaagagatgatgaatgaaatcaaagcccttcatgctgcggtcaacccggttgaaaccttgtttgttatcgatgccatgttgggtcaggatgcggtgaacactgctcaggcatttaatgaagccctgccgctgaccggtgtcgtattgaccaagatggacggcgactcgcgcggcggtgcggcattgtccgtacgccatgtaaccggcaaaccgattaaatttatcggtgtcggcgagaaaatcaacggcctcgaacctttccaccccgaccgtcttgccagccgtatcctcggcatgggcgacgtattgaccctgattgaagacgttcaaaaaggtattgatgaagccgccgccgccaaaatggcgaaaaagctgcaaaaaggcaaaggcttcgatctcaatgactttaaagaacaaatccagcagatgcgcaatatgggcggcttggaaaacctgatgtcaaaaatgccgggcgaactgggtcaaatatcgaaacaaatccccgaaggtacggctgaaaaagcgatgggcaaagtggaagccatcatcaactcgatgacccctaaagaacgcgccaaccctgccctgctcaaagccagccgcaaacgccgtattgcaatgggtgcgggcacaaccgtgcaggaagtgaacaaattgctcaaacagtttgaacaaatgcaacagatgatgaagatgttcagcggcaacggcttgggcaaactgatgcgtatggcgaaaggaatgagggggataaaagggatgttcccgggtttgtaa

SEQ ID NO: 65965 - DNA, 972 bp, Neisseria meningitidis; identical to SEQ ID NO: 39558

SEQ ID NO: 65966 - DNA, 639 bp, Neisseria meningitidis; identical to SEQ ID NO: 51920

SEQ ID NO: 65967 - DNA, 330 bp, Neisseria meningitidis
atgtcattacccccatgcccgcaatgtgcctccgaatacacctatgaagacggcggacaatacatctgccccgaatgcgcccacgaatggaatgaaaccgaatccgccgccgaccttgcggctcaagtgctcgatgccaacggcgcagtgctgcaaaacggcgacaccgtcatcctcatcaaagacctcaaggtaaaaggcagctcgatgacgatcaaacaaggtacaaaagtcaaaggcatacgcctgcaagaaggcgatcacaacatcggctgcaaaatcgacggcagcgcgatgaatttaaaatccgaattcgtcaaaaaagcctga

SEQ ID NO: 65968 - DNA, 558 bp, Neisseria meningitidis; identical to SEQ ID NO: 43644

SEQ ID NO: 65969 - DNA, 2427 bp, Neisseria meningitidis
atgtcggcacaaaccgatccgggctactttttcatgcccaaccacattatcctgataggcgcgagcgaacgtccgtacagcctgggtgaacgcgtactcagcaacctgctgagtacgccctttcaaggaaaaatcacccccgtaaacccgcgccaccacaccatagctgggcttcccgcctacaccagcctcaacaaaatccccggcaatgcagacctgattattgccgttaccctacccgacagttacgacaccctcttcaaaacctgccgcaaaaagcagctccgacacatcatcctcatacaggactgggacagcctgtctgccgcagaactgcacaccgccgaaactaccatccgcaaacaccacggcaacggactcaacatcaccgcctgcaccaccgcaggcatccaactgccctcactcggactcaacatcagtacccaagacggatacgccgcaggccataccgccatactgaccggcaatgccgccgtcagccgccaaatcgacaacatcctgaacaaactccgtcaaggcacatcccgccacatcagcctgcatcccggcatcagccccatcacttccgccgattggctcaaccgcttcggccacagcctgcacaccaaaaccgccgtcctacactacaaccctgaagaggatcagcgcaaactgttcagcgcaatccgccaatttacccgccatacgccgctgattctccacatcacctgccgcacgacagaaaccgaccgtgccgtactgcactgcctcgcccgacactgcaacttcctcatcagtttcaacgccgacgacctcgaagccgcactgcgcgcccaactgtccgaccttcctcccctgtcccgactcgacatcctgtccgacacgcctgccgaatggctgaacgcgcacgcgccaaaaaccctcgccctccactttcccaaccttccccatcacatccgcaacggacacctgaccggcacacccacaccctcaatctgccacgacatcgcctcacgtcagcttgcccgccccgacacccaagccgtcctaaccatcctcagtccctccggacacgaggattacaaaaaaacagcacgcgcccttatccgcctgtccgaacagaccgccaaacccctgctcgtcagcagccccttttcagacggcataacacatttcgacacccccactcaggcaatccgcaccctttcctaccgcaacaccgccgccgccctgaaacaggcacagctcgacattgcaccgccgcagccatgccgtctgaaaacaccgcaaccccaaaacatcaaaaaagcccttgcagcggcaaacccctccctgctcgccgaagccctgcacctccccccctaccggcacaccacccataacgccgtacaattccaattcgacagccaccccctctatggcgacatcctgaccgcacgctgcaacggacaaaccactgccgtactcccgccgtttaccacgctcgacagccgccaccttgcccgctttgccgaactcgacggcacacaaaccctcgaccagttcctgcacacactgaccgtcattcccgaataccgccaacacattctcggcatcaccctcaacctcaacggcggacaatacagcagcgatttcctcttaaagacacccgaaacacacgacacgcccaaacgcaagaacacaggcaaagccgcccaaaccctcgaacatgccgccgcaaaaatgcagagtgccgccgcatacctgaaacacaaaaacccgacagccgccgaatttctccgccacacaagcgaagccgccgcagaactgctcggcagcaaaaccgaaaccggagcagccgtacccaacgtacttgccccctatcccgcagcacacctcaaaacactgtccctaaaaaacaacacgaccgttaccattaccccccttttgcccgaagacgcagaagccaaacagcagttcgtccgcagcctcagccccgaagcacggtacacacgcttcatgacccacaccaacgaactgcccgcagccacgttggcacgcctgtgcaaccccgactaccactgtgaagccgcatggacggcaagggatgccgacagcaacatcgtcgccgtcgtccgccacagccgcctgaaccgcaacgaatgcgaattcggcatcacactggcggaacatatgcgcggcagcggactggcacagaaaatgatggaactcatcatccaaaccgccgcacagcaaggctaccggactatgagtgccgacattctcaaaaccaatactcccatgatcaaacttgctgaaaaatcaggatttaccctcaaggaatcggacaccgaaaaaaacctgtaccgcgcatatctgaaccttgcggcagacaaaacaacagaaaaaacaaataaaaacttgcacaccgaccacaaaataacctaa

SEQ ID NO: 65970 - DNA, 1728 bp, Neisseria meningitidis; identical to SEQ ID NO: 51117

SEQ ID NO: 65971 - DNA, 1428 bp, Neisseria meningitidis; identical to SEQ ID NO: 54904

SEQ ID NO: 65972 - DNA, 252 bp, Neisseria meningitidis
atgggcagcatcgaacagcgtttggaatatctggaagaggcgaacgacgtgctgcgtatgcagaaccacgtcctgtccaccgccttcaaagccctaatccgcgcccttcccgccgaaaccgccgaagtcgcggtcgagtcgattcagcttgcttttgaagacgcactggcggaattgagctatgaggacagcccgcatacggatttgttccatgacgttacttatgcgtttttccgtgaaaaagaacgttaa

SEQ ID NO: 65973 - DNA, 1422 bp, Neisseria meningitidis
atgttcagacggcatttttgttttcagatgcagggaaaaccgatggcaaaaacgcttaaaaccctttaccaatgcaccgaatgcggcggcacttcgccgaaatggcagggcaaatgcccgcattgcggcgagtggaacacgcttcaggaaagccttgccgcgcccgagccgaaaaacgcccgtttccaatcttgggcggcggatacctcgaccgtccaatccctctccgccgttactgcgaccgaagtgccgcgcaatccgaccggtatgggcgaactcgaccgcgtattgggcggcggtttggtcgacggtgcggtcatcctgctcggcggcgatcccggcatcggcaaatccacgctgctgttgcaaaccatcgccaaaatggcgcaaagccgcaaagtgctgtacgtttccggcgaggaatccgcccaacaggtcgccctgcgtgcgcaacgtttggaactgcccacagaaggtgtgaacctgcttgccgaaatccgtatggaggcgattcagacggcgttgaaacagcatcagcccgaagttgtcgtcatcgactctatccaaaccatgtattccgaccaaatcacgtccgcccctggctccgtgtcgcaggtgcgcgagtgtgccgcccaactgacgcgcatggcgaaacagatgggcatcgccatgatattggtcggacacgttaccaaagacggcgcgattgccggcccgcgcgtgctggaacacatggttgataccgtgctgtatttcgagggcgaccaacattccaactaccgcatgatacgcgccatcaaaaaccgcttcggcgcggcaaacgaactgggcgtgttcgcgatgacggaaaacggtttgaaaggtgtgtccaacccgtccgccatcttcctcgccagctaccgcgacgatacgcccggctcgtgcgttttggttacacaggaaggcagccgcccgcttttggtcgaaattcaggcattggtcgatgacgcgcacggcttcacgcccaaacgcctcaccgtcggactggaacaaaaccgtcttgcgatgctgcttgccgtgttaaaccgccacggcggcatcgcctgtttcgatcaggatgtgtttttaaacgccgtcggcggcgtaaaaatcggcgaaccggcggcggatttggcagtcatcctcgcgatgctttccagcttccgcaaccgccctatgcctgaaaaaaccgtggttttcggcgaaatcggactaagcggcgaagtccgccccgtcgcgcgcggacaagagcggctcaaagaagcggaaaaactcggcttcaaacgcgccatcgtccccaaagccaatatgccgcgcaatgccaaagagtttccgaacctgaaaatctacggcgtttcgagtttgcaggaagccatcgatatttgccgcgacagcagggaataa

SEQ ID NO: 65974 - DNA, 1050 bp, Neisseria meningitidis
atgtccaagcaacccaccagcaaacgccaatggcgcgacggtgcagccccgtctgccaagaaaaccgccaaacctttcaaaagcaaagcccgtcccaaaggcgaaacgcgcaaaaccgccacccaagcttacggacaaaaagcttcagacggcatcaagccgcaaaacgcccccaaacagcgcgccgccaaagccaaaaaactcgtcgtccgcaatcccaaccaaaaaattatggaacacgcgcgcgatttgaaagaacgccgcagcgacctgtcgcgcatggaacccgaacgcctgcaaaaagtgcttgccgcgtccggcgtcggctcgcgccgcgaaatggaagaatggattaccaacggctggataacggtcaacggcaaaaccgcgcaactgggcgacaaagttacccccgacgaccacgttaccgtcaaaggcagcatcatcaagctcaaatgggcggaccgcctgccgcgcatcatcctgtattacaaacaagaaggcgaaatcgtttcccgtgacgacccgcaaggccgcgtcagcatattcgaccgcctgccgcaggccgccagcagccgctgggtcgccatcggacgcttggacatcaacaccagcggacttctgattcttaccacctccggcgaactcgtccaacgtttcgcccaccccagcttcgaagtcgaacgcgaatacgccgtgcgcgtcttgggcgggctgaccggcgaacaaatgcgcgtcctcaccgaagaaggcgtgatgctcgaagacggcttggcaaaagtcgaacgcatccgcgaacaaggcggcgaaggcgcgaacaaatggtacaacgtcgtgattaaagaaggccgcaaccgcgaagtgcgccgcatttttgaaagccaaggactcaccgtcagccgcctcgtgcgcgtcggcttcggccccatcggactgcccaaccgcctcaaacgcgggcagttctacgaactcaaccccgccgaagtcgccaacatcatcaaatgggcggacatgctgctgccgggcgaacgccgccgcaaaaaagcctaa

SEQ ID NO: 65975 - DNA, 564 bp, Neisseria meningitidis; identical to SEQ ID NO: 50461

SEQ ID NO: 65976 - DNA, 1296 bp, Neisseria meningitidis; identical to SEQ ID NO: 50700

SEQ ID NO: 65977 - DNA, 1647 bp, Neisseria meningitidis; identical to SEQ ID NO: 47913

SEQ ID NO: 65978 - DNA, 1221 bp, Neisseria meningitidis; identical to SEQ ID NO: 44162

SEQ ID NO: 65979 - DNA, 471 bp, Neisseria meningitidis; identical to SEQ ID NO: 50223

SEQ ID NO: 65980 - DNA, 684 bp, Neisseria meningitidis; identical to SEQ ID NO: 38600

SEQ ID NO: 65981 - DNA, 2745 bp, Neisseria meningitidis
atgcaacagcaacatttgttccgattaaatattttatgcctgtcgctgatgaccgcgctgcccgtttatgcagaaaatgtgcaagccgaacaagcacaggaaaaacagttggataccatacaggtaaaagccaaaaaacagaaaacccgccgcgataacgaagtaaccgggctgggcaagttggtcaaaaccgccgacaccctcagcaaggaacaggtactcgatatccgcgacctgacgcgttacgaccccggcatcgccgtcgtcgaacaggggcgcggcgcaagctctggctactcgatacgcggtatggacaaaaaccgcgtttccttgacggtggacggcttggcgcaaatacagtcctacaccgcgcaggcggcattgggcgggacgaggacggcgggcagcagcggcgcaatcaatgaaatcgagtatgaaaacgtcaaagctgtcgaaatcagcaaaggctcaaactcggtcgaacaaggcagcggcgcattggcgggctcggtcgcatttcaaaccaaaaccgccgacgatgttatcggggaaggcaggcagtgggggattcagagtaaaaccgcctattccggcaaaaaccgggggcttacccaatccatcgcgctggcggggcgcatcggcggtgcggaggctttgctgatccacacgggtcggcgcgcgggggaaatccgcgcccacgaagatgcaggacgcggcgttcagagctttaacaggctggtgccggttgaagacggcagcagcgactacgtctattttgtggtcgaagaagaatgcaaaagcgggagttatgaaacgtgtaaaagcaaaccgaaaaaagatattgtcggcaaagacgaacgtcaaacggtttccacccgagactacacgggtcccaaccgctttctcgccgatccgctttcatacgaaagccgatcgtggctgttccgcccgggttttcgttttgaaaacaaacggcactacatcggcggcatactcgaacacacgcaacaaactttcgacacgcgcgatatgacggttccggcattcctgaccaaggcggtttttgatgaaaatagaaaatacggatcgataagaggccacggcaaatacgcgggcgaccacaaatacagcgggctgattaccaacggcgaaaacggtgcgctggtgggcgcggaatacggtacgggcgtgttttacgacgagacgcacaccaaaagccgctacggtttggaatatgtctataccaatgccgataaagacacttgggcggattatgcccgcctctcttacgaccggcagggcatcggtttggacaatcattttcagcagacgcactgttctgccgacggttcggacaaatattgccgtccgagtgccgacaagccgttttcctattacaaatccgaccgcgtgatttacggggaaagccacaggctcttgcaggcggcattcaaaaaatccttcgataccgccaaaatccgccacaacctgagcgtgaatctcgggtttgaccgctttggctctaatctccgccatcaggattattattttcaaaatgccaaacgcgcctattcgttgaaaacgccccctaaaaacggcaatcaaaacagccccaacggcgacaagagcaaaccctattgggtcagcataggcgggggaaatgtggttacggggcaaatctgccgcttgggcaacaatacttatacggactgcacgccgcgcagcatcaacggcaaaagctattacgcggcagttcgggacaatgtccgtttgggcaggtgggcggatgtcggcgcgggcttgcgctacgactaccgcagcacgcattcggacgacagcagcgtttccaccggcacgcaccgcaccctgtcctggaacgcaggcatcgtcctcaaacctgccgactggctggatttgacttaccgcacttcaaccggcttccgcctgccctcgtttgcggaaatgtacggctggcgggcgggtgttcaaagcaaggcggtcaaaatcgatccggaaaaatcgttcaacaaagaagccggcatcgtgtttaaaggcgatttcggcaacttggaggcaagttggttcaacaatgcctaccgcgatttgattgtccggggttatgaagcgcaaattcaaaacggcaaagaaacagccaaaggcgacccggcttacctcaatgcccaaagcgcgcggattaccggcatcaatattttgggcaaaatcgattggaacggcgtatgggataaattgcccgaaggttggtattctacatttgcctataatcgtgtccatgtccgcgacatcaaaaaacgcgcagaccgcaccgatattcaatcacatctgtttgatgccatccaaccctcgcgctatgtcgtcggcttgggctatgaccaaccggaaggcaaatggggtgtgaacggtatgctgacttattccaaagccaaggaaatcacagagttgttgggcagccgtgctttgctcaacggcaacagccgcaatacaaaagccaccgcgcgccgtacccgcccttggtatattgtggatgtgtccggttattacacgattaaaaaacacttcaccctccgtgcgggcgtgtacaacctcctcaactaccgctatgttacttgggaaaatgtgcggcaaactgccggcggcgcagtcaaccaacacaaaaatgtcggcgtttacaaccgatatgccgcccccggtcgcaactacacatttagcttggaaatgaagttttaa

SEQ ID NO: 65982 - DNA, 648 bp, Neisseria meningitidis; identical to SEQ ID NO: 42354

SEQ ID NO: 65983 - DNA, 1401 bp, Neisseria meningitidis
atgaccccttccgcactgaaaaaaaccgtcctgctgctcggcactgcctttgccgccgcatccgtccacgcatccggctaccacttcggcacacagtcggtcaacgcgcaaagcacggcaaatgccgccgccgcagaagccgccgacgcatcgaccatcttctacaaccctgccggcctgaccaaactcgacagcagccagatttccgtcaacgccaacatcgtgctgcccagcattcattatgaggcggattccgccaccgactttaccgggcttcccgtccaaggttcgaaaagcggcaaaatcaccaaaaccacggtcgcgccccacatctacggcgcatacaaagtcaacgacaatctgaccgtgggcttgggcgtgtacgtccccttcggctctgccaccgaatacgaaaaagattccgtgttgcgccacaacatcaacaaactcggtctgaccagcatcgccgtcgaacctgtcgccgcgtggaaactcaacgaccgccattccttcggcgcaggcatcatcgcccaacatacttccgccgagctgcgcaaatatgccgactgggggattaagagtaaagcagagatattgacggcaaaaccgcccaaacctaacggtgtagccgaagctgcaaaaattcaggccgacggacacgccgatgtcaaaggcagcgattggggcttcggctaccaactggcgtggatgtgggacatcaacgaccgtgcgcgcgtgggcgtgaactaccgttccaaagtctcgcacacgctcaaaggcgatgccgaatgggcggcagacggcgcggcggcgaaagcaatgtggagtacgatgcttgcagcaaacggctacacggcgaatgaaaaagcccgcgttaaaatcgttacgcctgagtctttgtccgtacacggtatgtacaaagtgtccgataaagccgacctgttcggcgacgtaacttggacgcgccacagccgcttcgataaggcggaactggtttttgaaaaagaaaaaaccgtcgtcaaaggcaaatccgaccgcaccaccatcacccccaactggcgcaacacctacaaagtcggcttcggcggttcttatcaaatcagcgaaccgctgcaactgcgcgccggcatcgcttttgacaaatcgcccgtccgcaacgccgactaccgcatgaacagcctacccgacggcaaccgcatctggttctccgccggtatgaaataccatatcggtaaaaaccacgtcgtcgatgccgcctacacccacatccacatcaacgacaccagctaccgcacggcgaaggcaagcggcaacgatgtggacagcaaaggcgcgtcttccgcacgtttcaaaaaccacgccgacatcatcggtctgcaatacacctacaaattcaaataa

SEQ ID NO: 65984 - DNA, 1014 bp, Neisseria meningitidis; identical to SEQ ID NO: 36441

SEQ ID NO: 65985 - DNA, 1032 bp, Neisseria meningitidis; identical to SEQ ID NO: 36792

SEQ ID NO: 65986 - DNA, 1188 bp, Neisseria meningitidis; identical to SEQ ID NO: 37286

SEQ ID NO: 65987 - DNA, 372 bp, Neisseria meningitidis; identical to SEQ ID NO: 36308

SEQ ID NO: 65988 - DNA, 909 bp, Neisseria meningitidis; identical to SEQ ID NO: 37968

SEQ ID NO: 65989 - DNA, 1155 bp, Neisseria meningitidis
atggttgataaaaaaagccctttgattgccgtcagtgtcggcgaagcgtcgggcgacctgttgggggcgcacctgatacgcgccatccgcaagcgttgtccgcaggcgcgttttgtcggtatcggcggcgaactgatgaaggcggaaggtttcgagagcctttatgatcaggagcggctggcggtgcgcggctttgtcgaagtggtcaggcggctgccggaaattttacggatacgcagggggctggtacgggatttgctgtcgttgaaacctgatgtctttgtcggtatcgatgcgcccgattttaatttgggtgtggcggaaaagctgaaacggtcggggattccgaccgtgcattatgtcagcccgtcggtgtgggcgtggcggcgggaacgtgtgggcaaaatcgtgcatcaggtcaatcgcgtgttgtgcctgttcccgatggagccgcagctttatctcgatgcgggcggacgtgcggagtttgtcggtcatccgatggcgcagcttatgcccttggaagacgaccgtgaaacggcgcggcaaactttgggcgtggatgccggcatccccgtattcgccctgctgcccggcagccgcgtcagcgaaatcgactatatggcgccggtgttttttcagacggcattattgttgttggaacgctatcctgccgcatgcttcctgctgcctgccgcaacggaggcgacgaagcggcgtttggcggaaattttgcagcgttcggagtttgccggattaccgctgacggtaaccgacagacagtctgaaacggtgtgtagggcggcggatgcggtgctggtaacgagcggtacggcgactttggaagtggcgctgtgcaagcgtccgatggtcatcagctacaagatttcgccgctgacttatgcttatgtgaaacgcaaaatcaaagtgccgcatgttggcctgccgaatatcctgttgggtaaggaggctgtgccggagctgcttcaacatgatgccgtaccggaaaaactggcggcggcgttggcggactggtacgaacaccccgataaggttgccgcgctgcaacaggatttcagggtgttgcacctgctgttgaaaaaagatacggcggatttggccgcgcgcgcggttttggaagaggcgggatgttga

SEQ ID NO: 65990 - DNA, 957 bp, Neisseria meningitidis; identical to SEQ ID NO: 65405

SEQ ID NO: 65991 - DNA, 1182 bp, Neisseria meningitidis; identical to SEQ ID NO: 51584

SEQ ID NO: 65992 - DNA, 297 bp, Neisseria meningitidis; identical to SEQ ID NO: 45238

SEQ ID NO: 65993 - DNA, 1176 bp, Neisseria meningitidis; identical to SEQ ID NO: 42387

SEQ ID NO: 65994 - DNA, 1077 bp, Neisseria meningitidis; identical to SEQ ID NO: 43947

SEQ ID NO: 65995 - DNA, 1263 bp, Neisseria meningitidis; identical to SEQ ID NO: 45630

SEQ ID NO: 65996 - DNA, 774 bp, Neisseria meningitidis; identical to SEQ ID NO: 39194

SEQ ID NO: 65997 - DNA, 942 bp, Neisseria meningitidis
atgaaaaccctgctcctcctcatccccctcgtcctcacagcctgcggcacactgaccggcatacccgcccacggcggcggcaaacgctttgccgtcgaacaagaactcgtcgccgcatcgtcccgcgccgccgtcaaagaaatggatttgtccgccctgaaaggacgcaaagccgccctttacgtctccgttatgggcgaccaaggttcgggcaacataagcggcggacgctactctatcgacgcactgatacgcggcggctaccacaacaaccccgaaagtgccacccaatacagctaccccgcctacgacactaccgccaccaccaaagccgacgcgctctccagcgtaaccacttccacatcgcttttgaacgcccccgccgccgccctgacgaaaaacagcggacgcaaaggcgaacgctccgccggactgtccgtcaacggcacgggcgactaccgcaacgaaaccctgctcgccaacccccgcgacgtttctttcctgaccaacctcatccaaaccgtcttctacctgcgcggcatcgaagtcgtaccgcccgaatacgccgacaccgacgtattcgtaaccgtcgacgtattcggcaccgtccgcagccgtaccgaactgcacctctacaacgccgaaacccttaaagcccaaaccaagctcgaatatttcgccgtcgaccgcgacagccggaaactgctgattgcccctaaaaccgccgcctacgaatcccaataccaagaacaatacgccctttggaccggcccttacaaagtcagcaaaaccgtcaaagcctcagaccgcctgatggtcgatttctccgacatcaccccctacggtgacacaaccgcccaaaaccgtcccgacttcaaacaaaacaacggtaaaaaacccgatgtcggcaacgaagtcatccgccgccgcaaaggaggataa

SEQ ID NO: 65998 - DNA, 372 bp, Neisseria meningitidis; identical to SEQ ID NO: 43386

SEQ ID NO: 65999 - DNA, 861 bp, Neisseria meningitidis; identical to SEQ ID NO: 41500

SEQ ID NO: 66000 - DNA, 843 bp, Neisseria meningitidis; identical to SEQ ID NO: 42241

SEQ ID NO: 66001 - DNA, 1005 bp, Neisseria meningitidis
atgaaccacaccgttaccctgcccgaccaaaccacctttgccgccaacgacggtgaaaccgttttggccgctgccgcccgtcaaaacctcaacctgccccattcctgcaaaagcggtgtctgcggacaatgcaaagccgaactggtcagcggcgatattcaaatgggcggacactcggaacaggctttatccgaagcagaaaaagcgcaaggcaagattttgatgtgctgcaccactgcgcaaagcgatatcaacatccccggctacaaagccgatgccctacccgtccgcaccctgcccgcacgcatcgaaagtattattttcaaacacgatgtcgccctcctgaaacttgccctgcccaaagccccgccgtttgccttctacgccgggcaatacattgatttactgctgccgggcaacgtcagccgcagctactccatcgccaatttacccgaccaagaaggcattttggaactgcacatccgcaggcacgaaaacggtgtctgctcggaaatgattttcggcagcgaacccaaagtcaaagaaaaaggcatcgtccgcgttaaaggcccgctcggttcgtttaccttgcaggaagacagcggcaaacccgtcatcctgctggcaaccggcacaggctacgcccccatccgcagcatcctgctcgaccttatccgccaaggcagcaaccgcgccgtccatttctactggggcgcgcgtcatcaggatgatttgtatgccctcgaagaagcacaagggttggcatgccgtctgaaaaacgcctgcttcacccccgtattgtcccgccccggagagggctggcagggaagaaatggtcacgtacaagacatcgcggcacaagaccaccccgacctgtcggaatacgaagtatttgcctgcggttctccggccatgaccgaacaaacaaagaatctgtttgtgcaacagcataagctgccggaaaacttgtttttctccgacgcattcacgccgtccgcatcataa

SEQ ID NO: 66002 - DNA, 1059 bp, Neisseria meningitidis; identical to SEQ ID NO: 51373

SEQ ID NO: 66003 - DNA, 210 bp, Neisseria meningitidis; identical to SEQ ID NO: 39345

SEQ ID NO: 66004 - DNA, 1065 bp, Neisseria meningitidis
atggcactcgtatccatgcgccaactgcttgatcatgctgccgaaaacagctacggcctgcccgcgttcaacgtcaacaacctcgaacaaatgcgcgccattatggaagccgccgaccaagtcaacgcgcccgtcatcgtacaggcgagtgcaggtgcgcgcaaatatgcgggcgcgccgtttttgcgccacctgattctggcggctgtcgaagaatttccgcacatccccgtcgtcatgcaccaagaccacggcgcatcgcccgacgtgtgccaacgctccatccaactgggcttctcctccgtgatgatggacggctcgctgctcgaagacggcaaaaccccttcttcttacgaatacaacgtcaacgccacccgtaccgtggttaatttctcccacgcctgcggcgtatccgttgaaggcgaaatcggcgtattgggcaacctcgaaaccggcgaagcaggcgaagaagacggtgtaggcgcagtgggcaaactttcccacgaccaaatgctgaccagcgtcgaagatgccgtgcgcttcgtcaaagacaccggcgtggatgcgctcgccatcgccgtcggcaccagccatggcgcatacaaattcacccgtccgcccacaggcgacgtattacgtatcgaccgcatcaaagaaatccaccaagccctgcccaatacacacatcgtgatgcacggctccagctccgttccgcaagaatggctgaaagtcatcaacgaatacggcggcaatatcggcgaaacctacggcgtgccggttgaagaaatcgtcgaaggcatcaaacacggcgtgcgcaaagtcaacatcgataccgacttgcgccttgcttccaccggcgcggtacgccgctaccttgccgaaaacccgtccgactttgacccgcgcaaatacctgagcaaaaccattgaggccatgaagcaaatctgcctcgaccgctatcttgcgttcggctgcgaaggtcaggcaggcaaaatcaaaccggtttccttggaaaaaatggcaagccgttatgccaagggcgaattgaaccaaatcgtcaaataa

SEQ ID NO: 66005 - DNA, 561 bp, Neisseria meningitidis
atgaaaaacctcatcgccttcaacaaaccctatggcgttatctgccaattttcaccgcacgaaaaacacaaaagcctcaaagactttatcaattttcccggcttctaccccgccggacggctcgacaccgacagcgaggggctgctgctgctgaccgacgacggcaggcttcaggcacaaattaccgaccccaaattcaaacaccctaaaacctactgggcgcaactggagggcgtacccgacgaaagccgattggaaagcctaagaaaagggatagacttaggcggtttcgttacccgtccggcaagcatccgcatcttgaaacacggagaagcagattcgttatgggagcgcatcccgccgatacgcgtccgcaaaaccgttcccgatttttggattgaaattaccatttctgagggcaaaaaccgccaagtcaggcgaatgaccgccaaggcgggctatccctgcctgcgtctgatcagagtggcaagcggcaggctgaaactgtttgatttggatttaaaacccggggaatgggcatacgccccgtttaaaccataa

SEQ ID NO: 66006 - DNA, 564 bp, Neisseria meningitidis; identical to SEQ ID NO: 47907

SEQ ID NO: 66007 - DNA, 1848 bp, Neisseria meningitidis; identical to SEQ ID NO: 51147

SEQ ID NO: 66008 - DNA, 483 bp, Neisseria meningitidis; identical to SEQ ID NO: 51699

SEQ ID NO: 66009 - DNA, 1215 bp, Neisseria meningitidis
atggaatgggaattcaacagttattacacactgattgccgccacgctcgtgttgctggttggtaaatttctggttcaaaaaatcaaattcttacgagacttcaatattcccgagccggtcgctggcggtttggttgccgcgattatcctgtttgcgctgcacgaggcgtacggcgtgagcttcaaatttgagaaaccgctgcaaaatgcgtttatgctgattttcttcacgtccatcggcttgagcgcggatttttcccgtttgaaggcgggcggtttgccgctagtggtttttaccgcgattgtgggcggatttatcttggtgcaaaactttgtcggggtcggactggctacggctttgggtttggacccgctcatcggtctgattaccggttcggtgtcgctgacgggcggacacggtacgtcaggtgcgtggggacctaattttgaaacgcaatacggcttggtcggcgcaaccggtttgggtattgcatcggctactttcgggctggtgttcggcggcctgatcggtgggccggttgcgcgccgcctgatcaacaaaatgggccgcaaaccggttgaaaacaaaaaacaggatcaggacgacaactcggacgacgtgttcgagcaggcaaaacgcacccgcctgattacggcggaatctgccgttgaaacgcttgccatgtttgccgcgtgtttggcgtttgccgagattatggacggcttcgacaaagaatatctgttcgacctgcccaaattcgtgtggtgtctgtttggcggcgtggtcatccgcaacatcctcactgccgcattcaaggtcaatatgttcgaccgcgccatcgatgtgttcggcaatgcttcgctttcgcttttcttggcaatggcgttgctgaatttgaaactgtgggagctgaccggtttggcggggcctgtaaccgtgattcttgccgtacaaaccgtggtgatggttttgtacgcgacttttgttacctatgtctttatggggcgcgactatgatgcggcagtattggctgccggccattgcggtttcggcttgggtgcaacgccgacggcggtggcaaatatgcagtccgtcacgcatactttcggcgcgtcgcataaggcgtttttgattgtgcctatggtcggcgcgttcttcgtcgatttgattaatgccgcgattctcaccggttttgtgaatttctttaaaggctga

SEQ ID NO: 66010 - DNA, 2364 bp, Neisseria meningitidis
atgcaattctcctactcatggctgaaaacccaagccgataccgaactttcctccgataagctggaacatctgttaacgatgtccggcttggaagtggaagaagccgagactgccgcacctgcctttgcgggcgtggttgttgccgaagtgaaatccgttgaaaaacatccggatgcagaccgtttgaacgttacccgagttgatgcgggtacgggagagttggttcagatcgtgtgcggtgcgccgaatgtgaaagcgggcatcaaagtgccgtgttcgttgccgggcgccgttttgccgggcaatttcaaaatcaagccgaccaagatgcgcggtgtggtgtcgaacgggatgttgtgttccaccgacgaactcggtctgcccgacgacggtgtgaacggcctgcacattttgcctgaagacgcgcccgtcggtaccaatatccgtgaatacttggatttggacgatacgctgtttacgttgaaaattacgcctaaccgcgccgactgcttgagcatcaaaggcattgcgcgcgaagtgtccgcattgacggggtgcgcgttcaggcagcccgaaatccataccgcgccgatcacgggcagtcgaaaacagcccgtgcagattaacgcgcctgccgattgcggccgttttatcagccgcgttattgaaaatgtcaatgcgaaagcggctactcccgattggatgaaacaacgtttggagcgcagcggcatccgcagtatttccgtgctggtggacatcggcaattatgtaatgctggaaatcggccagccgatgcacgttttcgatgccgacaaactttccggcagcctgcacatccgccgcgcgcgcgaaggggaaacgctggaatgcctgaacgagaaaaccgtttccctgtctgaaaatacgctggtcgtggcagacgaaaaaggcgcgttgagtttggcgggcttaatgggcggcgcggcgagcgcggtttcagacggcacgcaaaatatcgtgctggaagcggcttggtttgcgcccgaaatcatcgccggcaaatcgcgccaatacggtttcggttcggattcgtcgttccgcttcgagcgcagcgtggattaccgtttgcaggcggatgccattgaacgtgctaccgaattggtgttgcagatttgcggtggtgcggcaggcgagatggtggaagcgcaaggcgaattgcctgaagcgaagcaggttggattgcgtttggaccgtctgaaaaccgtgttgggcgtggacattcctgccgaacaggtggaaaccattttgcaacacttggacctgcagcccgagaaaacggcggaaggcttccgcgttaccgcgccgagcttccgttttgacatcgaaattgaggctgatttgattgaagaaatcggacgcgtttacggctatgaaaacatccccgacgattacacgtcaggccgtctgaaaatgctggaactgcccgaaacacgccgcccgcgttttgccgtttacaacgaaatggcggcgcgcggctaccgcgaagtggtcagctatgcctttgttaacgagcagtgggaacaagattttgccgccaacgccgaccccatccgcctgcaaaacccactggcggcgcaatatgccgtgatgcgttccacactcatcggcggcttggtggaaattttgcaaaacaacctgaaccgcaaacaaaaccgcgtgcgcgtgtttgaaatcgcccgcgtgttcggcaaaggttcagacggccagtttgtccaaaacgaacgcatcggcggcttgtggtacggcgcggcaatgcccgaacaatggggcgggaaaacgcgcaatgcagatttttacgacatcaaggcagatgtggaaaatctgttgaaaaacaaagcagtcgagttcgttaaaaccggacatcctgccctgcatcccggacgcgccgccaatatcgtttcagacggcaaagtcatcggctttgtcggcgaactgcatccgaaatggctgcaaaaatacgacctgccgcaagcgccgctggtatttgaaatcgatatggcggccgtgttggaatgcgggaaaacgcgctatcgggccgtatcgaaattccagccggtgcgccgcgatttggcgtttgtgatgccggaagctatgagccatgatgatttgctgcttgtcttggaaggcgcggcaaacaagttggtacaggaaatcagcgtgtttgacgtgtatcgcggcatgggactgcccgaagggatgaagagcgtggcggtcaaagtgattttgcaggatatggaaaacacgctgacggatgaggcggtcgagccgcttatcggaaaactgattggcgcggcaacggcggcaggggcgcggcttcgcagttaa

SEQ ID NO: 66011 - DNA, 357 bp, Neisseria meningitidis
atggataaaatctttttgcacggcatcaaggcggatacgcttatcggcgtgtacggctgggaacgcgaacggttgcagaccctgattgtcgatttggacatcggtgttcccgagaaagcgggttcggacgacgatattgccaatacggtgcattatgccgaggtatgcgaaacgctgcgccgacatctgaaagaacaggatttcctgcttttggaagcgttggcggaatatattgccgatttggttttgggatatttcggcgcggtgtgggtgcgcgtgaaaatcgtcaagccgggtattttggaaggcgtgcgcgaggttggcgtggaaatcgagcgcggcaagcgtgaagattga

SEQ ID NO: 66012 - DNA, 465 bp, Neisseria meningitidis
atgtacaaacatctggtcgttgccgttgacggcagtgaaacgtccatcaatgccctgaaacatgccgccgagcttgcaggagtcaacagcgcgcgcctgactttggtgcacgttgccaatcctgccgaatatatggcgctcgcccccgaatttttgcaacacgaaagctacgaagccgccgccgtcgcgcaaggcaacgaagttttggatgccgccgagcgcaccgcccgggaactgggtgtggaaaataccgtcaaacacctgctggttgccaataagggtgcgcgtgaaatggcgcaggatttggttgattatgccgatgaaaacggtgccgacttgctggtgttgggtacgcacggacgtaccgggctgatgcaccttttaatgggcagttttgccgaaacggtaatgcgccaaagccacctgccgcttttgattatccgcagcaaagccgaagaggcgtag

SEQ ID NO: 66013 - DNA, 2781 bp, Neisseria meningitidis; identical to SEQ ID NO: 52165

SEQ ID NO: 66014 - DNA, 1398 bp, Neisseria meningitidis
atgagccaaggcaaaatcgtacaaattatcggtgcggttgttgacgtggaatttccacgcgacatgattccgcgcgtttacgacgctttgaaattagacgaaaacggtctgactttggaagtccaacagcttttgggcgacggcgtagtccgtaccattgcgatgggcagctcggacggtttgaaacgcggcatgactgtgagcaataccggtgcgcccattactgtgccggtaggtaaaggtacgttgggacgcattgtcgatgtattgggaacgcctgttgacgaggcaggtccaatcgataccgacaagagccgtgccatccaccaagccgctcctaagtttgacgaactgtcttccacaaccgaattgctcgaaacgggcattaaagtgattgacttgctgtgtccgtttgccaaaggcggtaaagtaggtctgttcggcggtgccggtgtgggtaaaaccgtgaacatgatggaattgatcaacaacatcgccaaagcgcacagcggcttgtccgtgttcgcaggcgtgggtgagcgtacccgcgaaggtaacgacttctaccacgagatgaaagattccaacgtattggataaagtggcaatggtttacggtcagatgaacgaacctccgggcaaccgtttgcgcgtcgcattgaccggtttgaccatggcggaatacttccgtgacgaaaaagacgaaaacggcaaaggccgcgacgtattgttcttcgtggacaacatctaccgttacaccctggccggtaccgaagtatccgcattgttgggccgtatgccgtctgcagtgggctaccaaccgacattggcagaagaaatgggtcgtttgcaagagcgtattacctctacccaaaccggttccattacttccatccaagccgtatatgtacctgcggacgacttgaccgacccgtctccggcaacaacgttcgcccacttggacgcaaccgtcgtattgagccgcgatattgcctctttgggtatttacccggcagtcgatccgcttgattccacttcgcgccaactggatccgatggtcttgggtcaagagcactacgacgtggcgcgcggcgtacagtccaccctgcagaaatacaaagaattgcgcgacatcatcgccatcttgggtatggacgaattgtctgacgaagacaaactgaccgtaatgcgtgcgcgtaaaatccaacgcttcctgtcccaaccgttccacgttgccgaagtgtttacaggttctccgggcaaatatgtcgccctgcgcgataccattgccggcttcaaagccatcttgaacggcgaatacgaccatctgcccgaacaggcattctacatggtcggcagcatcgaagaagcggttgagaaagcgaaaaccttaaactga

SEQ ID NO: 66015 - DNA, 756 bp, Neisseria meningitidis
atggattcttttttcaaaccggcagtttgggcggttttgtggctgatgtttgccgtccgccccgcccttgccgacgagttgaccaacctgctcagcagccgcgagcagattctcagacagtttgccgaagacgaacagcccgttttacccatcaaccgagcccccgcccggcgggcgggcaatgccgacgaactcatcggcagcgcgatggggcttaacgaacagcccgttttacccgtcaaccgagtccccgcccggcgggcgggcaatgccgacgaactcatcggcaacgcgatggggcttaacgaacagcccgttttacccgtcaaccgagcccccgcccggcgggcgggcaatgccgacgaactcatcggcaacgcgatgggacttttgggtattgcctaccgctacggcggcacatcggtttctaccggttttgactgcagcggcttcatgcagcacatcttcaaacgcgccatgggcatcaacctgccgcgcacgtcggcagaacaggcacggatgggtacgccggttgcccgaagcgaattgcagcccggggatatggtgtttttccgcacgctcggcggcagccgcatttcccatgtcggactttatatcggcaacaaccgcttcatccacgcgccgcgcacggggaaaaatatcgaaatcaccagcctgagccacaaatattggagcggcaaatacgcgttcgcccgccgggtcaagaaaaacgacccgtcccgctttctgaactga

SEQ ID NO: 66016 - DNA, 333 bp, Neisseria meningitidis
atgcagattttatcttttcaaccggacattgcggaacgtatgctggaaggtacggaaggcgagtcggtcaacgaaaacgcacaattcgtccgtacggacaacggctattggattgcgtggcatgaaggcgtagcggcactgcttgcgcccgatatgccgccgggcattccctgtttttgggtggaaggcgcggaaagccttgaagagttgtgcgccatggtggaacgcggcgagtttgacgaagtggaagagtttgacggcgatgacgacgaatggctcgaaacggcacagggttgcgggcaccacggcgacgcttgcgcctgcggacattaa

SEQ ID NO: 66017 - DNA, 1854 bp, Neisseria meningitidis; identical to SEQ ID NO: 51480

SEQ ID NO: 66018 - DNA, 657 bp, Neisseria meningitidis
atgaaaaacaaaaccaaagtctgggacttccccacccgccttttccattggctgcttgccgcatccctaccctttatgtggtatagcgcgaaaaccggcggcgatatgctgcaatggcacacgcgcgtcgggctgttcgtccttttcctgctcgtatttcgcctctgctggggcatttggggcagcgataccgcccgtttttcccgtttcgtccaaggctgggcaggcatacgcggctatctgaaaaacggtattcccgaacacatccagcccggacacaaccccttgggcgcactgatggtcgtcgcgcttttggtcgccgtctcatttcaagtcggcacggggctttttgccgccgatgaaaacaccttcagcaccaacggctatctcaaccatttggtttccgaacatacgggcagccttatgcggaaaatccacctcaactttttcaagctgctcgccgttttttccgccattcatatcgccgccgtcgccgcataccgcgtgttcaaaaagaaaaacctcgtcctcccgatgataaccggcttcaaatacatcgaaggcaaaacctcaatccgctttgccggcaaaaccgcgcttgccgccgcattatcggttgccgcgcttgccgcagccgccatcctgctcctgtcctga

SEQ ID NO: 66019 - DNA, 492 bp, Neisseria meningitidis; identical to SEQ ID NO: 39850

SEQ ID NO: 66020 - DNA, 1437 bp, Neisseria meningitidis
ttggaaaactcattaattatcggtttggcactggcggtattgctgatgcttttggttatgcgtgcgaagcagggtaagaaaacaccgaagcgcaaatcccaaggtgtcggcaatacgcaggggcagacacccggaagcaatgattcggactgggtcgatcagattggacaatcggtttcagacggcacgcaacccgactggtcttggaacgaaagtgccgagaccgcatccgccgccgtatccgcgcaagaagtcgatccgcttacggagtatcaggtttataagcaattcggttatcagggcaaggctgccgaatctttggctgcctatctggacggcattccggatggtgaagcgaaacctgaaaaccttatccgcgagctgctcgatatcaatctcgaagtgggggatgtcgatgttttggcagacaatctgcaaaaatacggcaaactgattccttccgaacttttggcaaaatatatcgaacaggcattacagcgcgattcaaaccatttgcgtatccgcgtcttggcagaagagggtttgggatggggtactcaggagattgaaaaacgtgcggaaggcggttctgcgacggcagcttccgcatcgcccccaccggatgccggcggtaaggcttatgaagccgaagaaatcaagcgcatcccgattgtgcggggcaaaaaagacgtgtccggaatcagtcaagaggaaatcggtgcgattgccggtttggtccgtgccgatcaaggtgcgaaaatccttaaagacaaagtcagctatgaaacggcatcgaaacaatacgaccgtgccatccaaacttccgaaaaacctgcaaacctgattatcgatgcgttgaaactcgattaccaacacgcggacatagaccgttttgccggacatttgtggaaactttaccaaacgttgggcaactacggcaggcaggttaaagagcggatgctggggtgggggtacagcctgggttaccatgaagttttcgatgatttggaaaaagggccgaacgaccggcaaatcaaagacatcggtatggggcacgggtatctgccgaaaaatatacagaaattcaaatcgcaacatcgggatttggtgcttcaagattcttcgttgattaacaccggttcgtctccggcagacgatgcggttaaagaagtagagtcgttgctgatgtatggtcagattgaagcggcaatggatgtgttggagcaggcggtattgaaatatcccgacgagtcccagctttatattacgttgatcgatatttatgaacgtactgaagattgggataggttggggcagtttttaagggtattgagggaacgtgcggacaggcttcctgaagaggtcgttatgctgatgagccggctgctgcagcgtatgaatcaaaatattaaaaaaataaaacggtacggaaaataa

SEQ ID NO: 66021 - DNA, 624 bp, Neisseria meningitidis; identical to SEQ ID NO: 37310

SEQ ID NO: 66022 - DNA, 531 bp, Neisseria meningitidis
atgaacgcaatccgaactttccaaaaccgcacgcccgaaatccacgaaagctgtatgatagacgaagcgtgcgtcgtcatcggcgaagtgtcgcttgccgaagacgtttctgtgtggccgtgcgccgtgttgcgcggcgatgtgaacagcatcaccgtcggcgcgcgcagcaatatacaggacggcagcgtcctgcacgtttcccacaaaaccgccgccaaacccgaaggatcgccgctggttatcggcgaagacgttaccgtggggcacaaagtgatgctgcacggctgccgaatcggcaaccgcgtcttggtcggtatgggcagcaccgttttggacgatgctgtgattgaggacgaagtgatgatcggcgcgggcagcctcgttccgccgcgcaaacgcttggcgggcggctacctttatatcggttcgccggtcagacaagtgcgcgtgctgaccgatgaggaaaaagcctttttgaaatattccgccgcgcattatgtgaagctgtcgaaacagtacgggatgtga

SEQ ID NO: 66023 - DNA, 393 bp, Neisseria meningitidis; identical to SEQ ID NO: 59104

SEQ ID NO: 66024 - DNA, 618 bp, Neisseria meningitidis; identical to SEQ ID NO: 43073

SEQ ID NO: 66025 - DNA, 375 bp, Neisseria meningitidis; identical to SEQ ID NO: 36393

SEQ ID NO: 66026 - DNA, 462 bp, Neisseria meningitidis; identical to SEQ ID NO: 43699

SEQ ID NO: 66027 - DNA, 1179 bp, Neisseria meningitidis
atggcaaaaatgatgaaatgggcggctgttgcggcggtcgcggcggcagcggtttggggcggatggtcttatctgaagcccgagccgcaggctgcttatattacggaaacggtcaggcgcggcgacatcagccggacggtttctgcaacaggggagatttcgccgtccaacctggtatcggtcggcgcgcaggcatcggggcagattaagaaactttatgtcaaactcgggcaacaggttaaaaagggcgatttgattgcggaaatcaattcgacctcgcagaccaatacgctcaatacggaaaaatccaagttggaaacgtatcaggcgaagctggtgtcggcacagattgcattgggcagtgcggagaagaaatataagcgtcaggcggcgttgtggaaggatgatgcgacctctaaagaagatttggaaagcgcgcaggatgcgtttgccgccgccaaagccaatgttgccgagctgaaggctttaatcagacagagcaaaatttccatcaataccgccgagtcggaattgggctacacgcgcattaccgcaacgatggacggcacggtggtggcgattctcgtggaagaggggcagactgtgaacgcggcgcagtctacgccgacgattgtccaattggcgaatctggatatgatgttgaacaaaatgcagattgccgagggcgatattaccaaggtgaaggcggggcaggatatttcgtttacgattttgtccgaaccggatacgccgattaaggcgaagctcgacagcgtcgaccccgggctgaccacgatgtcgtcgggcggctacaacagcagtacggatacggcttccaatgcggtctactattatgcccgttcgtttgtgccgaatccggacggcaaactcgccacggggatgacgacgcagaatacggttgaaatcgacggcgtgaaaaatgtgctgattattccgtcgctgaccgtgaaaaatcgcggcggcaaggcgtttgtgcgcgtgttgggtgcggacggcaaggcggcggaacgcgaaatccggaccggtatgagagacagtatgaataccgaagtaaaaagcgggttgaaagagggggacaaagtggtcatctccgaaataaccgccgccgagcagcaggaaagcggcgaacgcgccctaggcggcccgccgcgccgataa

SEQ ID NO: 66028 - DNA, 1518 bp, Neisseria meningitidis; identical to SEQ ID NO: 50444

SEQ ID NO: 66029 - DNA, 480 bp, Neisseria meningitidis; identical to SEQ ID NO: 39570

SEQ ID NO: 66030 - DNA, 483 bp, Neisseria meningitidis
atgatgaaaaagatactggccgtatcggcactatgcctgatgactgcggcggcacgggctgccgatacttacggctatctcgccgtttggcagaatccgcagaatgcggacgatgttttgcaggttaaaaccacaaaagaagattcgacgaaaagcgaagcgtttgccgagttggaagccttttgcaaaggtcaggacacgcttgcgggcattgccgaagacgagccgaccggatgccggtcggtcgtgtcgctgaacaatacctgtgtcgcgctggcatacccgaaagccttgggcgtgatgcgcgttgaaaacgccgtcgtgattacttctccgcgttttacgagcgttcatcaggtcgcactcaaccagtgcatcaaaaaatacggcgcacagggacaatgcggcttggaaacagtgtattgcacgtcttcttcttattacggcggaactgtgcgctctttgattcaaaatctcaaataa

SEQ ID NO: 66031 - DNA, 810 bp, Neisseria meningitidis
atggcaaaaattggggattttgccgccaaatccatgatagagatacggagcaaacgaatgattaccctgccttccttaaacaatctgccgtcaaaatgggatgaaatccgctattggctcgaaacccgggtttttgagtgcggcgttatgccgcatcccaatctgacggagtgcgaagccgggcagttcgatcgggatttttgggacaatatcggctgcgcgcctgaagaatatgtccgtatccgccgagccatccgtctgttggaagtgcgttatcccgacagcttgaacgagctggtgtgtgccgccattgccacgcctttgggcgagatgctggcggtgtttggaaataagggattgtgtctgctggagtttgtcggacagaagcatttggaacaggaaattgccgccgtccaaaaagccttgcgcggacggtttgtgtttcgggaggatgagcggacgcaacttttgcggcaggaattggacttatacttcaagggtcgtctgaaaacctttgccacgcctttggagcagattggcaccgagtttcaaaagcaggcatgggacgcgctcttggcgattccttacggtgaaacgcgcagctacaaggaacaggcgcagcatttgggcaaccccaaagccgtccgcgccgttgccgccgccaacgggcagaacaaagtatctatcctgattccctgccaccgcgtcatcggcagcgacggcaaactgaccggctacgcgggcgggttgaaccgcaaacagtttttactggctttggaacgcggcgaagttcagacggcattgttttaa

SEQ ID NO: 66032 - DNA, 762 bp, Neisseria meningitidis; identical to SEQ ID NO: 41129

SEQ ID NO: 66033 - DNA, 3435 bp, Neisseria meningitidis; identical to SEQ ID NO: 50915

SEQ ID NO: 66034 - DNA, 921 bp, Neisseria meningitidis; identical to SEQ ID NO: 46298

SEQ ID NO: 66035 - DNA, 339 bp, Neisseria meningitidis; identical to SEQ ID NO: 37943

SEQ ID NO: 66036 - DNA, 492 bp, Neisseria meningitidis
atgcgtgcggtcatacagaaaacggtaggtgcaaaggtggatgtcgtgtccgaagccggcacggaaacctgtggcaaaatcgacggcgggtttgtcgtgttactcggcgtaacgcatagcgacacagaaaaagatgcgcgctatatctccgacaaaatcgcccatttgcgcgtgtttgaagacgaggcgggcaagttgaacctgtctttgaaagatgtcggcggcgcggtgctgctggtgtcgcagtttacactttatgccgatgcggcaagcgggcggcggccttcgttttcccaagccgcacctgcagaacaggcgcagcagctttacctgcgaacggcggaactgttgcgcggacacgggattcatgtcgaaacagggcgtttccgcacgcatatgcaggtgtcgctctgcaacgacgggccggtaaccatactgctggactctttcatgacgcggatttccccaaaaatgaaggttgttccggattga

SEQ ID NO: 66037 - DNA, 903 bp, Neisseria meningitidis
atgtctgtttttcagacggcattttttatgtttcagaaacacttgcagaaagcctccgacagcgtcgtcggagggacattatacgtggttgccacgcccatcggcaatttggcggacattaccctgcgcgctttggcggtattgcaaaaggcggacatcatctgtgccgaagacacgcgcgttaccgcgcagcttttgagcgcgtacggcattcagggcaaacttgtcagcgtgcgcgaacacaacgaacggcagatggcggacaagattgtcggctatctttcagacggcatggttgtggcacaggtttccgatgcgggtacgccggccgtgtgcgacccgggcgcgaaactcgcccgccgcgtgcgtgaggtcgggtttaaagttgtccctgttgtcggcgcaagcgcggtgatggcggctttgagtgtggccggtgtggcgggatccgatttttatttcaacggttttgtaccgccgaaatcgggagagcgcaggaaactgtttgccaaatgggtgcgggcggcgtttcccgtcgtgatgtttgaaacgccgcaccgcatcggtgcgacgcttgccgatatggcggaactgttccccgaacgccgattaatgctggcgcgcgaaattacgaaaacgtttgaaacgttcttaagcggcacggttggggaaattcagacggcattgtctgccgacggcaaccaatcgcgcggcgagatggtgttggtgctttatccggcgcaggatgaaaaacacgaaggcttgtccgagtccgcgcaaaacatcatgaaaatcctcacagccgagctgccgaccaaacaggcggcggagcttgccgccaaaatcacgggcgagggaaaaaaagctttgtacgatctggcactgtcttggaaaaacaaatga

SEQ ID NO: 66038 - DNA, 186 bp, Neisseria meningitidis; identical to SEQ ID NO: 37303

SEQ ID NO: 66039 - DNA, 1746 bp, Neisseria meningitidis
atggaacggcagacagatgaatttgcccaagcggcggcaagggcggcaatctggtttttggcacgctatgcgggttccggcgacgaagtgcttgcaaactgcaccgaacgcctgtttcaggcattgcaaaacggtcattcgtttatccgtttgagcggtggcgaggctgacgcgctgtcggcactcgcacccgttgtcggaacatccgccgcgcctttgattttggaaggcagaaggctgtttttgggcaggatgtggcagttggaatacgatttggctgccgagataaaacgcttggcggcagccgacacgtccgcccccgacgcggcaggcgcgaggcaaaacctcgcaaaatggtttcaaggcacgggcagcgaagggcagcgcgatgccgccgccttggcactgttgcagtcttttatggtgattaccggcggacccgggacgggtaaaacgacgacggttgccaaactgctggcgctgatttgcggtgaagacgaaaatcttcccaacatcgcgcttgccgcaccgacgggcaaagcggcggcacatatggcgcgcgcgctgcaccgtgcaatcaacggttttgacgcgccggaggccgtccgccgccatttgctcaaactggaagggcaaaccgtccaccgactgctgaagctgcgcccgcccaaaatgcaggcggcgttcaaccctgtttacccgctgccgtttgacgtattggttatcgatgaagcctctatgctggatacggcattgatgctgcaacttttaaaagcggtcaaaaccggcgcgcgcgtgattctgctgggggatgaaaaccagctcccgtccgtcggaataggggcggtgctgtccgttttgtcgcaaaaaaccgttttggacggagaaacgcaccaaaggctggccggcttccttccggaacacggtttcagcgtcagcgcaaatccgcccgtgttggcgcaaaacaccgcccatctgtcgttcagccaccgcttcggcgacaacagcggcatcggctgccttgcccgtgccgccgtatcgggcgatgagggggcgtgggcattgtttgaccggtttccggacgaactggaacattcggaatgcagtccgaacgctcgagtcgaaaggttgtaccgggcgcacaaagcctattggcaggcggtaaaagacggcaatatcgaagccgcatacgcaggcatctcggatatcgtcgtcctcgcggcgtggcggcaggatgcggaagacttcaacgaagcctattgcagccatgtacgccgcaaaatgaacataccggaacatcaggcctatttcgccggagaaccgattatgatcagacagaacgactacgcgcttgaactgttcaacggcgacatcggactgattatggaagatgtcggacggcagggcagccttgccgcctattttgccgatgcggacggatttaaaaaggtagcggtaagctgcctgcccgaatttgaacccgcattcgccatgaccgtccacaaaagccaaggttcggaatatcgggaagtctggctgctgccgccttccgccgcaccttcggacgaaggggacgatgcattgtctggattgagtaaggagctgttatataccgccattacccgcgcgagagagaagttcgtattcttcggcggggaagaagccttccggcaagctgccgccaccgtcaaaacgcgtcagacggcgttgggcagtatgcttgagcgggtattttcacaaggataa

SEQ ID NO: 66040 - DNA, 480 bp, Neisseria meningitidis; identical to SEQ ID NO: 45716

SEQ ID NO: 66041 - DNA, 1344 bp, Neisseria meningitidis; identical to SEQ ID NO: 58404

SEQ ID NO: 66042 - DNA, 642 bp, Neisseria meningitidis; identical to SEQ ID NO: 45998

SEQ ID NO: 66043 - DNA, 1437 bp, Neisseria meningitidis; identical to SEQ ID NO: 50622

SEQ ID NO: 66044 - DNA, 516 bp, Neisseria meningitidis
atgaaaatcaaacaaatcgtcaaaccgggcttggcagtattggcggcgggcgttctgtctgcctgcgcaaccaaaagcaacgtcaaagccgacggcacgaccgacaatccggttttcccgaaaccctattccgtaacgctcgacaacaatcgcggtacattcccgacctatgacgaattggacttgatgcgccccggcctgaccaaagacgacatctacaaaatcctgggccgcccgcattacgacgaaggtatgtacggcgtgcgcgaatgggattacctgttccacttccacacccccggcgtaggtaccgatcctgaaaacacttctggcgtggaagatgttactacttgccaatacaaagtgattttcgataaagacaaatttgcccgcagcttctactggaaccccgtcttcccgaaagatgccgcctgtccgccgcccgcacccaaagccgagccgcaagtcatcatccgcgaaatcgtgccggcaaaaccgaaacgtatccgccaataa

SEQ ID NO: 66045 - DNA, 1524 bp, Neisseria meningitidis
atgaccgtcatcaaacaggaagactttatccaaagcatttgcgatgccttccaattcatcagctactaccatcccaaagactacatcgacgcgctctataaagcgtggcagaaggaagaaaaccccgccgccaaagacgcgatgacgcagattttggtcaacagccgtatgtgtgccgaaaacaaccgccccatttgccaagataccggtatcgcgaccgtcttcctcaaagtcggtatggatgtgcagtgggatgcggatatgagcgtggaagagatggttaacgaaggcgtacgccgcgcctacacttgggaaggcaatacgctgcgcgcttccgttctcgccgacccggccggcaaacgtcaaaacaccaaagacaacacgcccgccgtcatccatatgagcatcgtgccgggcgacaaagtcgaagtaacctgcgcggcaaaaggcggcggttctgaaaacaaatccaaactcgccatgctcaatccttccgacaacatcgtcgattgggtattgaaaaccatcccgacgatgggcgcgggctggtgtcctcccggcatcttgggcatcggcatcggcggcacgcctgaaaaagccgtgttgatggcaaaagaatccctgatgagccacatcgacattcaagagttgcaggaaaaggccgcgtccggcgcagaattgtccaccaccgaagccctgcgcctcgaactctttgaaaaagtcaacgcgctgggcatcggcgcacaaggtttgggcggtctgaccaccgtgttggacgtgaaaatcctcgattacccgacccacgccgcctccaaaccgattgccatgattccgaactgcgccgccacccgccacgtcgaatttgaattggacggctcaggccctgtcgaactcacgccgccgcgcgtcgaagactggcccgatttgacttacagccccgacaacggcaaacgcgtcgatgtcgataagctgaccaaagaagaagtggcaagctggaaaaccggcgacgtattgctgctgaacggtaaaatcctcaccggccgcgatgccgcacacaaacgcctcgtcgatatgctcaacaaaggcgaagaattgcccgtcgatttcaccaaccgcctgatttactacgtcggtcccgtcgatccggtcggcgatgaagtcgtcggtccggcaggtccgaccacagccacccgcatggacaaattcacccgccaaatgctcgaacaaaccgacctcttgggcatgatcggcaaatccgagcgcggcgtggccacctgcgaagccatcgccgacaacaaagccgtgtacctcatggcagtcggcggcgcggcgtatctcgtggcaaaagccatcaaatcttccaaagtcttggcgttccccgaattgggcatggaagccatttacgaatttgaagtcaaagacatgcccgtaaccgtcgccgtagacagcaaaggcgaatccatccacgccaccgccccgccccaatggcaggcgaaaatcggcatcatccccgtcgaatcttga

SEQ ID NO: 66046 - DNA, 789 bp, Neisseria meningitidis; identical to SEQ ID NO: 50360

SEQ ID NO: 66047 - DNA, 696 bp, Neisseria meningitidis; identical to SEQ ID NO: 39886

SEQ ID NO: 66048 - DNA, 480 bp, Neisseria meningitidis
atggctaacttagtaaaaacctttctgcttggcgaattggtaaaaggtatgggcgtaacgctcaaaaacttttttgcccgcaaagacacgatttattttcccgaagagaaaacgccgcaatccgtgcgtttccgcggcctgcacgcgcagcggcggtatccgaacggtgaggaacgctgcattgcgtgtaagttgtgcgaggcggtgtgtccggcaatggcgatcaatatcgaatcggaagaacgcgaagacggcacccgccgcaccaagcgttacgacatcgacctgaccaagtgcatcttctgcggtttctgcgaagaggcttgcccgaccgatgcgattgtggaaacgcacatttttgaataccacggcgagaaaaaaggcgacttgcacatgaccaagccgattcttttggccattggcgacaaatacgaagctgaaatcgccaaacgcaaagccgctgacgcgccgtatcgttaa

SEQ ID NO: 66049 - DNA, 2121 bp, Neisseria meningitidis; identical to SEQ ID NO: 50647

SEQ ID NO: 66050 - DNA, 1350 bp, Neisseria meningitidis
atgttgaatccatcccgaaaactggttgagctgatccgtattttggacgaaggcggttttattttcagcggcgatcccgtgcaggcgacggaggctttgcgccgcgtggacggcagtacggaggaaaaaatcatccgtcgggcggagatgattgacaggaaccgtatgctgcgggagacgttggaacgtgtgcgtgcggggtcgttctggttgtgggtggtggcggcgacgtttgcattttttaccggtttttcaggcacttatcttctaatggacaatcagggtctgaatttctttttggttttggcgggcgtgttgggcatgaatacgctgatgctggcagtatggttggcaatgttgttcctgcgcgtgaaagtggggcgttttttcagcagtccggcgacgtggtttcggggcaaagaccctgtaaatcaggcggtgttgcggctgtatgcggacgagtggcggcaaccttcggtacgttggaaaataggcgcaacgtcgcacagcctgtggctctgcacgctgctcggaatgctggtgtcggtattgttgctgcttttggtgcggcaatatacgttcaactgggaaagcacgctgttgggcgattcgtcttcggtacggctggtggaaatgttggcatggctgcctgcgaaactgggttttcccgtgcctgatgcgcgggcggtcatcgaaggccgtctgaacggcaatattgccgatgcgcgggcttggtcggggctgctggtcggcagtatcgcctgctacggcatcctgccgcgcctcttggcttgggcggtatgcaaaatccttttgaaaacaagcgaaaacggattggatttggaaaaaccctattatcaggcggtcatccgccgctggcagaacaaaatcaccgatgcggatacgcgtcgggaaaccgtgtccgccgtttcgccgaaaatcgtcttgaacgatgcgccgaaatgggcggtcatgctggagaccgaatggcaggacggcgaatggttcgagggcaggctggcgcaggaatggctggataagggcgttgccgccaatcgggaacaggttgccgcgctggagacagagctgaagcagaaaccggcgcaactgcttatcggcgtgcgcgcccaaactgtgcccgaccgcggcgtgttgcggcagatcgtccgactttcggaagcggcgcagggcggcgcggtggtgcagcttttggcggaacaggggctttcagacgacctttcggaaaagctggaacattggcgtaacgcgctggccgaatgcggcgcggcgtggctggaacccgacagagcggcgcaggaaggccgtctgaaaaccaacgaccgcacttga

SEQ ID NO: 66051 - DNA, 789 bp, Neisseria meningitidis; identical to SEQ ID NO: 39927

SEQ ID NO: 66052 - DNA, 744 bp, Neisseria meningitidis; identical to SEQ ID NO: 45653

SEQ ID NO: 66053 - DNA, 2751 bp, Neisseria meningitidis
atgctgacaaacattgccaagaaaatcttcggcagccgcaacgaccgcttgctgaaacaataccgtaaatccgttgccagaatcaacgcgctcgaagaacagatgcaagccctaagcgatgctgatctgcaagccaaaactgccgaattcaaacaacgcctcgccgacggtcagactttggacggcattttgcccgaagccttcgccgtctgccgcgaagcgtcccgccgcaccctcggtatgcgccacttcgacgtgcagcttatcggcggtatggtgctgcacgacggcaaaatcgccgaaatgcgtaccggcgaaggcaaaaccctggtcgccaccctcgccgtctatctcaacgcgctggccggcaaaggcgtgcacgtcgttaccgtcaacgactacctcgcctcgcgcgacgcaggcattatggagccgctctacaatttcctcggcctgaccgtcggcgtgattatttcagatatgcaaccgttcgaccgtcaaaacgcctatgccgccgatatcacctacggcaccaataatgaattcggcttcgactacctgcgcgacaatatggttaccgaccaatacgacaaagtgcagcgcgaactgaatttcgccgtcgttgacgaagtggactccatcttgattgacgaagcgcgcactccgctgattatctccggccaggcagacgacaacattcagttgtaccaaatcatgaacaccgttccgccccacctcgtccgccaagaaaccgaagaaggcgaaggcgactactgggtagatgaaaaggcgcaccaggtcatcctgagcgaagcaggtcacgaacacgccgagcaaatcctaaccaaaatgggattgctggcagaaaacgactcgctctattccgccgccaacatcgccctgatgcaccaccttatggcggcattgcgcgcgcatacgttattccacaaagaccaacattacgttatccaagacggcgaaatcgtcatcgtggacgaattcaccggccggctgatgtccggccgccgctggtcggagggtctgcatcaagccgtcgaagccaaagaaggcgtggaaatcaaacgcgaaaaccaaacccttgcctccatcaccttccaaaactatttccgcctgtacaccaagctctccggcatgaccggcacagccgataccgaagccttcgagttccaaagcatctacaacctcgaaaccgtcatcatcccgaccaaccgccccatacaacgcaaagacttcaacgaccagattttccgttccgccgaagaaaaattcgaagccgtcgtcaaagacatcgaagaatgccacaaacgcgggcagcccgtcctcgtcggtacgaccagcatcgaaaactccgaactggtctcccaccttctgcaaaaagccggactgccacacaacgtcctcaacgccaaagaacacgaacgcgaagccctgattgtcgcccaagccggcaaagtcggcgcgattaccgttgccaccaatatggcgggacgcggtacggacatcgttttaggcggcaacctgaagcaccaaaccgatgccatccgtgccgacgaagccttgagcgacgaagagaaacaggcacaaatctccgcactcgaagacggctggcaggcagaacacgacaaagtgatggaagcaggcggtttgcacatcatcggtacggaacgccacgaaagccgccgtatcgacaaccagttgcgcggacgttccggccgtcagggcgaccccggatccagccgtttctacctctcgtttgaagacccgctgctgcgcctattcgcactcgaccgcgccgccgccatcctcaaccgcctcgcccccgaacgcggcgttgccatcgagcacaacctgctgacgcgccaaatcgaaggggcgcaacgcaaagtcgaaggcagaaacttcgatatgcgcaaacaggttttggaatacgacgacgttgccaacgagcaacgtaaagtcatttacagccagcgcaacgaaattctgaccagcaaagacatcagcgacctgatgaaggaaatccgttctgatgtcgtcagcgacctcgtggatacctatatgccgcccgacagcatggaagaacaatgggacatcccgactttggagaaccgtctggctgccgaattcagactgcacgaagacatccaatcctggctgaaggcggacaatgcgattgacggtcaagacatcaaagaacgcctgatcgaacgcatcgaaaacgaatatgccgccaaaaccgaactggtcggtaagcaggcaatggccgatttcgagcgcaacgtgatgttgcaggtcatcgacaaccaatggcgcgaacacctcgccgctatggactacctgcgacaaggcatacacctgcgcagctatgcccaaaaaaatccgaagcaggaatataaacgtgaagcctttaccatgttccaagacctgtggaacggcatcaaattccatattgcctccctgcttacctcggttcaaatcgaacaaaaccctgtcgcggtggttgaagagcaacccatcggcaacatccagtccatccattccgaatcgcccgatatggaagaacttttgggtcagtcgcaaaccgatttggttaccgaggcctttaatcccgatggaacggatttcagccccgaagccttggaagcgcggggacaaatcgtccaccgcaacgacccctgcccctgcggcagcggtttgaaatacaaacaatgccacggcaaactggcttaa

SEQ ID NO: 66054 - DNA, 342 bp, Neisseria meningitidis; identical to SEQ ID NO: 39758

SEQ ID NO: 66055 - DNA, 996 bp, Neisseria meningitidis; identical to SEQ ID NO: 45012

SEQ ID NO: 66056 - DNA, 3486 bp, Neisseria meningitidis
atgcgcctgacccatatcaaactctccggcttcaaatcttttaccgacccgaccacaattcatgtgccggggcagcttgtcgcggttatcgggcccaacggctgcggcaagtcgaatgtgattgacgcggtgcgctgggtgttgggcgaggcttcggcgaagcagcttcgcggcgagagtatgcaggacgtgatttttaacggtgcggcaacgcgccgtcctgcgccaagagcttcggtggagctggtgtttgacaacagcgaccacagtttgcagggcgcgtgggggcagtatgccgaggtgagcatcaagcggcagctgacgcggcagggcgaatcgacttatttcatcaacaatcagaccgtgcgccgccgcgatattactgatttgtttctgggtacgggcgtgggcgcgcgcggttatgccgttatcgagcaggggatgatttcgcgcatcatcgaagcgcggccggaggagttgcgcgcttatatcgaggaggcggcgggtgtgtccaaatataaggaacgccgcaaggagacggaaggctgtctgaaagacacgcgcgagcatttgcagcgtttgggcgatttgcagaacgaattggcgcgtcaggtggaaaagctggagaaacaggcggaaaccgccgaacgctataaatccctgaccgcgcagttgaatcaacaacaggatttgctcgattacgcccaatggcagcaatcgcttgccgccgccgacaaagcgaccgcgcagcatcagtctttgcaggcgcagcaggacgaaaccgccgcgcaggttcaggcgttaaacgacgaagtacacgccttgcagaccgccgaacagtcgcagcagcaggcggtacacgaactgggcaacaaacgcggcgtgttgcgcgagcagattgcccgtttggaagaacaaatccgccatcagcaaaacctgcatcaacgcatcgaacgcgacaagcaggcggcgcaggcgcagttacaacgcattcatcaagagcagcagcaaatccgcgtgcagcttgaagaaaacgagttgcaggtcgaagaaaaacaaaccgagctggcggaatgggcgatgcaggttgccgaacacgaagagcgtctgcccgaattggaagaagcccaagccacgctcaatgccgccttccaaacccagcaggacgaggcaaaccgcatccgccgcgaactggcgttgaagcagcagcagcttgcccatgccgaacaaaccgttgccaagcacgaagagcgcaaaggtcgtctgaaacaggaaaaccaagccctgaacctgcccgacgaagccgaaaccgccgccgcgcaggaagccgccgccttgttgcaaagccagcaagagcattacgaagaacaaatcatcgccgccgaagaagctctacacgccgcccgcgaggcgtttcagacggcatcaaaccgcttccaaagcctgaagcagcaacacatcaccttgcaggcgcagcagcaggcgttgtcgcaaatcctgtcgcaacagcaggaagccgccgacttctggcaggcaaccgaccacgccgccgcgccgcagctgtggcaacacatcaccgcgcctgccgagtggcagcacgccttgtccgtcatccttgcagaacgcctgcacgcccgcgccgtgccgcaaggtttcgtaccgcccgaacctttgccgcaggggcaggcggcgtggctttcagacggtctctccggcggcatcaaaaaatccctgcccgtacaggcattgctgaaccaaatccaagcgcagccgccgtttcagacggcattgcactactggctcgacggcgtattgtgcgcgcccgatttgagctatgccctcgcgcatcaaaacgatttgggcgcacaccaaatctggctcacgcccgaaggtcatcaggtcgataaagtcagcgtcctgctctatgccaagcccgcgcaggaaagcctgattgcccaaaaagcgcgcctcgacggcatcgcatccgaactggaaaacctcgcccccgaactctccgctgacgaagccgcgttcaaacaggcagaagccgccgtgcgctcgtccgaagtgcaacataaaaacctgatgcagcagcaacagcagcacacgcgccaatacagtcaggcgcagcaacgcgccgccgaacttctggcgcgcaccaaccaagggcaaatccgccgcgaacacatcgagcgcgaactggcgcagttggcggaagagcagaccgtgttgcaacacacgtccgacgggctttcagacgacatcgttaccttgcaggaagccgccgccgaactcgaacaccagcagcaaaccaccgcgcacagccgccaagagcagcaaggccgtctgaaacaggcgcagcttgccctgttggaagccaaccgccaatacgggctggccgaagtcgccgttcacaagctcaaccagcaaaaacaaaactaccggcagcaaattgcccagctcgaacagcaaaccctagactggcaggaacgccagcaagagcttgccctcgcctatgaaaccgagttccaaaacgacgagcagcacatcaagcttgaagaattaagcgaagccgtacagaccttggacgaagaatatattgttgtgcaagagaaactcgcgcagattcaggaacagggcagggagcaatacgctaaagtgcaaaccctgcaaaccaagctgccgcagcttcaggccgccacccaaaccgccttgttgcagcagcaggaagccctgatcaacgccaaacgctaccatcaaaacctgaccgaacgcgccgccgatttggacgcgctcgaagcgttggcgaaagaatcgccgaaagtattgaacagcagcatcggcagcctttcgcaacaaatcgaagcactcggcgcggtcaacctcgccgccctgcaagaactcgaagaagcgcgcgaacgcgacggctactaccgcagccaaagcgaagacgtgcaggcagccatcacccttttggaagaagccatcgcccaaatcgacgacaaaaccaaagcgcgtttcaaagaaaccttcgatgccgtcaacggcaaagtccaaactttcttcccgaccctgttcggcggtggcgaagctaccctcaaaatgataggcgacgacctcctgaccgccggcgtgtccatcatggcgcgcccgcccggcaagaaaaacagcaccatccacctcctttccggcggcgaaaaagccctcaccgccatgagcctcgtgttcgccctgttcagcctcaaccctgctccgttctgccttttggacgaagtcgatgccccgctggacgatgccaacacctcgcgcttctgcaatttggtcaaagaaatgtcggcgcaaacccaattcctctacatctcacacaaccgcctgaccatggaaatggcggaacagctggtcggtgtaaccatgcaggaaaaaggcgtatcgcgcgtcgtcgccgtggacatcaagcaggcgttggaaatggcggaagccgtttga

SEQ ID NO: 66057 - DNA, 1260 bp, Neisseria meningitidis
atgagtatggcacttgcccaaaaacttgccgccgacagcattgcggcggttgccgaaggacgcaaccttcaggacgtgttggcgcaaatccgcaccgcgcatcccgaccttacggcgcaggaaaacggcgcgttgcaggacatcgcctacggctgccagcgttatttgggcagtttgaaacatatgctcgcgcagatgctgaaaaagccgattgacaacccgcagctcgaaagcctgcttttggcggcgttgtaccaactgcattacacgcgcaacgcgccccatgccgtggtcaacgaagcggtggaaagcatagccaaaatcgggcgcgggcagtaccgttcgtttgccaacgcggttttacgccgctttttgcgtgaacgtgaaaaattggcgtcttcctgcaaaaaagacgatgtggcgaaacacaacctgccgctgtggtgggtggcttacttgaaaaaccattatccgaaacactggcacaacatcaccgccgcgctgcaatcccatccgccgatgacgttgcgcgtcaaccgccggcacggcaatgccgaaagctatttggaaaaactggctgcggaaggtatcgccgcaaaggcgttggacgaatatgcggttacgttggaagaagccgtgccggtaaaccgtctgcccggtttttcagacggcattgtttcggtacaggacttcggcgcgcagcaggcggcgtatcttcttaacccgaaagacggagaacggattttggacgcgtgcgccgcgccgggcggcaagacggggcatatcttggaactggcggattgccgcgttaccgccttggacatcgatgcaggccgtctgaagcgtgtggaggacaatatcgcccgtttgggctttcagacggcatcggcggcgtgtgccgatgcgcgggatttggcggcgtggtatgatggaaagcctttcgacgcaatccttgccgacgtgccatgcaccgcttccggcgtagcgcggcgcaatcccgacgtgaaatggctgcgccgtccgaccgacgcgctcaaaaccgcccgccagcaggaagccctgctggacgcactttggcagacgctgaaacagggcggcagaatgctgcttgccacctgttccgtgttcgtcgaagaaaacgacgggcaattgcaaaaattcctcaaccgccatgccgatgccgaaccgatcgaatcgcgggtgcttttaccgaacaaacaccaagatggcttttattacgcgcttattcaaaagcattaa

SEQ ID NO: 66058 - DNA, 828 bp, Neisseria meningitidis; identical to SEQ ID NO: 60136

SEQ ID NO: 66059 - DNA, 2307 bp, Neisseria meningitidis; identical to SEQ ID NO: 50459

SEQ ID NO: 66060 - DNA, 576 bp, Neisseria meningitidis
atgccgtctgaaaacccgataggaaaaacgatgaaatccatagacgaacaaagcctgcataatgcccgccgcctgtttgaaagcggcgacatcgaccgtatcgaagtcggtaccaccgcgggcctgcaacagattcaccgttacctgttcggcggcttatatgattttgcgggtcaaatcagggaagacaacatttccaaaggcggttttcgttttgccaacgccatgtatttaaaagaggctttggttaaaatcgagcagatgcccgagcggacttttgaagaaatcatcgccaaatatgttgaaatgaacattgcccatccgtttttggagggtaatggcagaagtacccgcatctggctggatttggtgctgaaaaaaaacctgaaaaaagtcgtaaactggcaaaatgtaagcaaaaccctgtatttgcaggcgatggaacgcagccccgtcaacgatttagaactgcgctttctgttaaaggacaacctgactgacgatgtggacaaccgtgaaatcatctttaaaggtatcgagcagtcgtattattacgaagggtatgaaaaaggctga

SEQ ID NO: 66061 - DNA, 120 bp, Neisseria meningitidis; identical to SEQ ID NO: 43584

SEQ ID NO: 66062 - DNA, 432 bp, Neisseria meningitidis
atgaaaaccttttcagcgaaaccccacgaggtgaagcgcgaatggttcgtcatcgatgcccaagacaaagtcttgggtcgcgttgcagccgaagtcgccagccgtctgcgtggcaaacacaaacctgaatacaccccccacgtcgataccggcgattacatcatcgtcatcaacgcggacaaactgcgtgtaaccggtgccaaattcgaagacaaaaaatacttccgccattccggtttcccgggcggtatctacgaacgcaccttccgcgaaatgcaagagcaattcccgggccgcgctttggaacaagccgtaaaaggcatgttgcctaaaggtcccctgggttacgccatgattaaaaaactgaaagtgtacgctggtgcagaacatgcccatgccgcacaacaacccaaagttttggaactgaaataa

SEQ ID NO: 66063 - DNA, 360 bp, Neisseria meningitidis; identical to SEQ ID NO: 39367

SEQ ID NO: 66064 - DNA, 1143 bp, Neisseria meningitidis; identical to SEQ ID NO: 41235

SEQ ID NO: 66065 - DNA, 567 bp, Neisseria meningitidis; identical to SEQ ID NO: 59605

SEQ ID NO: 66066 - DNA, 1977 bp, Neisseria meningitidis
atggaatatatggatctcaaaagcctgcttaattttgggttgccaaatatgccaagaacagtaatagggctgagaaaaaaagcgcaaagggatggttggcaaacgagaaggcgtcaaggtaagggtggtggtgttgaatatgccctacctattgaaatccgagcagccatcatgaaacggcagtcggacgagctggcggaaaagatgccgaaaatgttgccccaagtcagaccggggacggcgatgtcggctcaggcactggctgaagcggccaagctgttgaacgagaaacaacggtcggtggcggatgcgcgatgtgcggtggtggcggcggtattggggattaaataccaatacggttgctctgcaaaggctgcggtggctcagtttttgggcttgctggcagaaagtaaattggacgcggtcacgcttgggaacttggaaaaggccaatgaccgcagccggtcggcaaaggttggcgaacgtactttagacggctggatttctgcttatttgaaagcggaaaacgcgacggagcggttggttgctttggctccgaagacgacgaaggcggtcaagccgattgagagctacggttggttgccgatgtttatgcagtttcacaatatcccttcggctccgaaactggcgcacagctaccgccggtttgtgcagtgggcggaagcggaaaatatgccggtcaatgatgtgcctaacttgagtatggtgcggcgcgtttgggacaagctcccgctgattatgcaggagcgcggcaggaaaacgggggcggcttataaatcgctgctgccttatgtgaaacgtgattggggggctttgaagccgaacgatgtttggatcggcgacggccatagctttaaggcaaaggtggcgcatccggtacatggcaggccgtttaagccggaagtgacggtgattattgatggttgtacgcggtttgtggtcgggttttcggtctcgttggctgaaagttgtgtggcggtatcggacgctctgcgtatcggggtcaagcactttggtttgccgattatctactactcggataacggtggcggccaaaccggcaagacgatagaccatgaaatcacgggtattacgtcccgattgggtatccggcatgaaacgggtatcgcgggcaacccgcaaggccgaggcatcatcgagcgatggtggaaagacaatctgattgagatggcgcgccagtatgagacgtttgcgggcgcggggatggacagcagtaccaagaacctgatgtaccgcaagatggaaagtgcgtttaacgctttggaaaaaggcaaggatttgacggaggaacaacagaaatatttgaaaaaactgccgggctggtcgcgttttatcgcggatgtggtcaagtgtatcgacgaatacaacaaccgcccgcacgtcgagctgccccgacatccggacggcgggcattattcgccgaaggcttatcgggaaatgaggctggaacaggacgggattgcgccggatatgttgtcggcggaagagctggcgacgatgtttatgccgcaggaagtgcgaaaggtacagcgcggttggctggatttgttcaacaactcttatttctcaaccgagctggcggagtatcacaaggacgaggtacgggtcagctacgatttggacgatgcttcggcggtcaatgtgtttgatatggacggcaagtttatcactaaggctcaggccgacggcaatacccgcgaggctttcccgacggctcgtatcgaccaactggcggaaaaacgccgaaaaggcaaaatcaagcgggcggaaaatgcaatcaagcttgcaaacgcggaagtcaatccggcactggaacaggctgcggtttgggacgagctgggacatttgggcggaaacgtcatcgaggcggagtatgcggtattgccgagaacgggcacggacgattttgtgctatttgagacggatagaagttaa

SEQ ID NO: 66067 - DNA, 861 bp, Neisseria meningitidis
atgaaaccctattccgccaatcccaacctgaccgaaccgcgccggctgcgcgtgttgctgattgccgccgcgctgggctttctgctgctgatgctggtcgtgccgctcgtcgccgtgttttacgaagccttaaaaggcggttgggatttgtacctaaaatccttaagcgatcccgaagcgtggtctgccatcaaattgacgctgattactgcgctgattgtcgttcccgtcaatgctgtattgggtgtggcgatggcgtggctgctgacccgttttgacttccgaggcaagcagttgctgactaccctgctcgatttgccgttttccgtatcgcccgtggtggccggtttaatgttcgtcttattgttcggcgcgcacacggcattgggtggctggctcgaagcgcaaggcatacagattatcttcgccatccccggtattgttttggcgacgctgttcgttaccttcccctttgtcgcacgcgaaatcatcccgctgatgcaggcacagggcgacagcgaagaacaggcggcattgatactcggcgcaagcggctggcagatgttttggcgcgttaccctgcccaacatcaaatgggcgttactctacggcatcatcctcaccaacgcccgcgcgatgggcgagttcggcgcggtcagcgtggtatcgggacacatacgcggcgaaaccaacaccgtcccgcttttggtcgaaatcttctacaacgaatacaacttcaccggcgcattcgccctctccggcgtattggcacttttagcactggcgacgctggcggtgcagaacatcattaccaaattacaagacaaaaaactcgccgccgccgaaaggaacgcagtatga

SEQ ID NO: 66068 - DNA, 450 bp, Neisseria meningitidis
atggacgtacaactccccatcgaagccaaagacatccaaaaactcatcccccaccgctatccgtttctccagctcgaccgcatcaccgccttcgagccgatgaaaaccctgaccgcgattaaaaacgtcaccataaacgagccgcagttccaaggccatttccccgacctgcccgtgatgcccggcgtactcatcatcgaagcgatggcgcaggcgtgcggcacgttggcgattttgagcgaaggcgggcgcaaagaaaacgaattcttcttcttcgccggcatagacgaagcccgtttcaaacgccaagtcatccccggcgaccaactcgtctttgaagtcgaactgctgaccagccgacgcggcatcggcaaattcaacgccgttgccaaagtggacgggcaagtcgccgtcgaagccgtgattatgtgcgccaaacgcgtggtttga

SEQ ID NO: 66069 - DNA, 894 bp, Neisseria meningitidis; identical to SEQ ID NO: 36738

SEQ ID NO: 66070 - DNA, 2115 bp, Neisseria meningitidis
atggatttattatcggttttccacaaataccgtctgaaatatgcggtggccgtgctgacgatactgcttttggcggcagtcgggctgcacgcttccgtatatcgcaccttcacgcctgaaaacatccgcagccgcctacaacaaagcattgcacacacacaccggaaaatctcgtttgatgcggacattcagcgcaggctcctgccccggccgaccgtcatcctgaaaaacctgaccattaccgaacccggcggcgaccagactgccgtttccgtccaagaaaccaaaatcggattgagctggaaaaacctgtggtcggatcagatacagattgaaaaatgggtggtttcgagtgcggaacttgccctgacgcgcgacgggaaaggtgtttggaacatccaagacctgatcgacagccaaaaacgccaagcctcagtcaaccgcattatcgtcgaaaacagcaccgtccgcctcaatttcctgcaggaacagcttatcctgaaggaaatcaacctcaacctgcaatcccccgattcgtcggggcagccgtttgaaagttcgggcatactggtttggggaaagctgtccgtcccgtggaaaagcagggggctgttcctttcagacggcatcggcacgcccaaaatctcaccgttccattttgaagcttccacttcgctggacggacacggcattaccatttccaccaccggcagcccttctgtccgcttcaacgccggcggagcggatgccgccggcctcggcctgcgtgcagacacttccttccgcaacctccacctgaccgcccaaatccctacgctggcactcagaaataacagcattaaaattgaaaccgtcaacggcgcatttaccgccggcggcgaatatgcccaatgggacggttcgttcaaactcgacaaagccaaccttcactccggcatcgccaacatcggcaacgccgaaatctccggcagcttcaaaacaccgcgccaccagaccaacttctccctcaattcgccgctcgtatggacggaaaacaaagggctggacgcgccgcgcctgtatgtatcgacccttcaggataccgtcaaccgcctgccgcaaccccgtttcatcagccggctcgacggttcgctgtccgtaccgaatctgcaaaattggaatgccgaattaaacggcacattcgaccgccaaaccgttgccgcgaaattcagatacacacatgaagacgcaccgcatctggaagccgccgtcgcactgcaaaaattgaacctgaccccctatcttgacgacgtgcggcaacaaaacggcaaaatatttcccgacaccctcgccaagctgtccggcgacatcgaggcgcacctgaaaatcggaaaagtccaacttcccggcctgcaactggacgatatggaaacctacctccacgccgacaaaggccatatcgcgctcagccgtttcaagtcagggctttacggcggccataccgaaggcggcatcagcatcgccaacacccgtcccgccacttaccgcctgcaacagaatgcaagcaacatccaaatccaaccgctgctgcaagacctgttcggcttccacagcttcagcggcaacggcgatgcggtcatcgacctgaccgcgagcggcgaaacccgaaaagagcttatccgctcgcttcagggcagcctgtcgctgaatatttccaacggtgcatggcacggtatcgacatggacaatatcctgaaaaacggcatttcgggcaaaactgccgacaatgccgcacccagcacacccttccaccaattcacgctcaacagcgaaatttcagacggcatcagccgccacatcgataccgaactcttctccgacagcctctatgttaccagcaacggctataccaatctggatacgcaggaattgtctgaagatgtccttatccgcaacgccgtccatccgaaaaacaaaccgattcccctgaaaatcaccggtacggtggacaagccgtccattaccgtcgattacggcaggctgaccggcggcatcaattcgcgcaaagagaaacagaaaatcctcgaagacaccctgctggaacaatggcagtggctcaaacctaaagaaccgtaa

SEQ ID NO: 66071 - DNA, 1005 bp, Neisseria meningitidis; identical to SEQ ID NO: 51760

SEQ ID NO: 66072 - DNA, 624 bp, Neisseria meningitidis; identical to SEQ ID NO: 36421

SEQ ID NO: 66073 - DNA, 885 bp, Neisseria meningitidis
atgagcaccttctttcagcaaaccgcacaagccatgattgccaaacacatcgaccgcttcccactattgaagctagatcaagtgattgattggcaaccgatcgaacaatacctgaaccgtcaaagaatccgttacgtccgagaccaccgcggccgtcccacctattccctgttgtccatgttcaaatccgtcttgctcggacaatggcacagcctctccgatcccgaactcgaacacagcctcattacccgcatcgacttcaacctgttttgccgttttgacgagttgagcatccccgattacagcaccttatgccgctaccgcaaccggctggcgcaagacaacaccctgtccgaattgctggaactgattaaccgccaactgaccgaaaaaaacctaaaaatagagaaagcatccgccgccgtcattgacgccaccattattcagaccgccggcagcaaacagcgtcaggccatagaagtcgatgaagaaggacaagtcagcggccaaaccacaccgagtaaagacagcgatgcccgttggacaaagaaaaacggcctctacagactcggttacaaacaacatacccgtaccgatgcggaaggctatatcgagaaactgcacatcaccccagccaatacccatgagtgcaaccacctgttgcctttgctggaaggcattaccgaaggcacgaccatctatgccgacaaaggctatgacagtgcggaaaaccgaacatctggaagaacatcagttgttagacggcattatgcgcgggcagcctatttcggactgattaaagtgagtgcgcaaagccacctgaaggcgatgtgtttgaacctgttgaaagccgccaacaggctaagtgcgcccgctgccgcctaa

SEQ ID NO: 66074 - DNA, 870 bp, Neisseria meningitidis
atgaagcgcatctttttgcccgccttgcccgccatcctgcctttatccgcttatgccgacctgcccttgacgattgaagacataatgaccgacaagggcaaatggaaactggaaacttcccttacctacctgaatagcgaaaacagccgcgccgcacttgccgcaccggtttacattcaaaccggcgcaacctcgtttatccccattccgaccgaaattcaagaaaacggcagcaataccgatatgctcgccggcacgctcggtttgcgctacggactgaccggcaataccgacatttacggcagcggcagctatctgtggcacgaagaacgcaaactcgacggcaacggcaaaacccgaaacaaacggatgtccgacatatccctcggcatcagccacactttccttaaagacgacaaaaaccccgccctaatcagctttcttgaaagcacggtttacgaaaaatcgcgcaacaaagcctcgtcgggaaaatcctggctcatcggcgccaccacctacaaagccatagatccgattgtcctttccctcaccgccgcctaccgcatcaacggcagcaaaaccctttcagacggcatccgctacaaatcgggcaactacctgctgctcaaccccaacatctcatttgccgccaacgacagaatcagcctgaccggaggcatccaatggctgggcacacagcccgaccgcatagacggcaaaaaagaaaccgcaagaaacacatccacctacgctcatttcggcacaggtttcggtttcaccaaaaccacggctttaaacgcatccgcacgtttcaacgtttcagggcaaagcagttccgaactgaaatttggcgtacagcatacattttaa

SEQ ID NO: 66075 - DNA, 2376 bp, Neisseria meningitidis
atgaataaaaatattaaatctttaaatttacgggaaaaagacccgtttttaagtcgtgaaaaacagcgttatgaacatcctttgcccagtcgggaatggataatcgaattgttggagcgcaaaggtgtgccttcaaaaatcgaatcgcttgcgcgcgagctgtcgattacggaagacgagtatgtcttttttgaacgccgtctgaaggcgatggcgcgggacggtcaggttttaatcaaccgtcggggcgcggtttgcgcggcggacaaattggatttggtcaaatgccgtgtcgaggcgcacaaagacggcttcggtttcgccgtgccgctcacgcccgccaaagacggtgattttgttttgtacgaacgccagatgcgcggcattatgcacggcgatattgtcactgttcgtcctgccggcatggaccgtaggggccgccgcgaagggacggttctggatattgtcgaacgcgcgcaaagcaaagttgtcggccgtttctatatggataggggcgtggcgattttggagccggaagacaagcgtctgaaccaaagcatcgtattggaaccggacggcgtggcgcgtttcaaacctgaatccggtcaggtcatcgtcggcgaaattgaggtttatcctgagcaaaaccggccggcagtggcaaaaatcatcgaagttttgggcgattatgccgacagcggcatggagattgaaattgccgtgcgcaagcatcatttgccgcaccaattcagtgaagcgtgtgccaaagccgcgaaaaaaattcccgaccatgtacgcaaaagcgatttgaaaggccgcgtcgatttgcgcgatttgcctttggtaacgatagacggcgaaacggcgcgcgattttgacgatgccgtgtttgccgaaaaaatcggacgcaattaccgtctggtcgtggcgattgccgatgtcagccattatgtccgccccgatgacgctatcgacacggacgctcaggaacgcagcaccagtgtttacttcccgcgccgcgtgattcccatgttgccggaaaacctgtccaacggcatctgctcgctcaatcctaatgtcgagcgtttgtgtatggtgtgcgatatggtcatcacttacgcgggcaatattaaagaataccgcttctaccccgccgtgatgcgctctcatgcccgcctgacctacaaccaagtttggaaatggctttcagacggcatcgggcatccgttcaaagcacaaatcgacacgctttacaaactcttcaaaatccttcagaaaaagcgtttcgaacgcggggcggtggagtttgacagcatcgaaacccaaatgcttttcgacgacaacggtaaaattgaaaaaatcgtccccgttgtccgcaacgatgcccacaagctgattgaagaatgtatgttggcggcaaacgtttgcgcagcggattttctgttgaaaaacaagcataccgcattgttccgcaaccatttggggcccacgcccgaaaaactcgccgccttgcgcgagcagctcggtctgttggggcttcaacttggcggcggcgacaacccgtcgccgaaagactatgccgcgcttgccggacagttcaaaggcaggccggatgccgaattgctgcaagtcatgatgttgcgctccatgcaacaggcggtttacgaaccgcattgcgacggacactttggtcttgcctacgaagcatacgcccacttcacctcgcccatccgccgctatcccgacctgaccgtacaccgcgccatcaaagccgtgttgaatcagcaaacctacacgccaaaaaaaagctggcaggctttgggcgtgcatacctcgttctgtgagcgccgtgccgacgacgccagccgcgacgtggaaaactggctgaaaacctattatatgcgcgataaggtcggcgaagtattcgaaggtaaaatctccggcatgaccagttttggtatctttgtaacactggacggcatccacattgacggcttggtgcatatcagcgatttgggcgaagactatttcaacttccgccccgaaatcatggcaatcgaaggcgaacgcagcggcatccgtttcaacatgggggacagggttgccgtccgggtcgcccgtgccgatttggatgatggaaaaatcgattttgtcctgattgccgaggggagcggcagggggcggaaagttaaatcatccgcgtctgccaaaccggcagggacggcggggaaagggaaaccgaaaaccgccgccgagaaaaaaacagcccgaggcggcaaagtaaggggaaggggcgcgtctgccgccgcagaatcggggaaaaaggcaaagaaaccggttccgattaaggtaaaaaaacggaaaggcaaatcataa

SEQ ID NO: 66076 - DNA, 531 bp, Neisseria meningitidis
gtgtctggcaatcatggcttgggcggtttgctggaagaaggtactcatggaaaatcccctaaatgtcatggtgggaatttaggggattttggggaattttgcaaaggtctcggaaaatatgttaaggaagttacagtcgcaaacggcgtcgttaccgccacaatgctttcaagcggcgtaaacaaagaaatccaaggcagaaaactctccctgtgggccaagcgtcaaaacggttcggtaaaatggttctgcggacagccggttacgcgcgccgccaacaacaccgccaaagacgccgtcaccgccgccaacgacaacagcaacaacggaatcaacaccaaacacctaccgtcaacctgccgcgatgcggcatctgccatttgcacaagaacaccacgcgccgacttcaaacacttccaaaaaatcagccgttaccgagtattgcccgaatcacggcacatggccgaaaaacttcgtcattcccgcgcaggcgggaatctaggtttgtcggtgcggaaacttatcgggtaa

SEQ ID NO: 66077 - DNA, 381 bp, Neisseria meningitidis; identical to SEQ ID NO: 59730

SEQ ID NO: 66078 - DNA, 1242 bp, Neisseria meningitidis; identical to SEQ ID NO: 50118

SEQ ID NO: 66079 - DNA, 1125 bp, Neisseria meningitidis; identical to SEQ ID NO: 60148

SEQ ID NO: 66080 - DNA, 351 bp, Neisseria meningitidis; identical to SEQ ID NO: 54616

SEQ ID NO: 66081 - DNA, 540 bp, Neisseria meningitidis; identical to SEQ ID NO: 44661

SEQ ID NO: 66082 - DNA, 729 bp, Neisseria meningitidis; identical to SEQ ID NO: 50623

SEQ ID NO: 66083 - DNA, 1299 bp, Neisseria meningitidis
atggctaaaaatgttgtagtaatcggcgcacagtggggcgacgagggtaaaggtaaaatcgttgactggctggcggaagaagccggcggcgtggtgcgcttccaaggcggccacaatgcgggtcataccttggttgtcggcggcaaaaaaaccattttgcgcctgattccgagcggcatcctgcatgaaagtctggactgcttcatcggttcgggcgttgtcgtctcccccgaagccctgttgggcgaaatcgacgagttgaacgcggcaggcgtgaaaaacgtcgaaggccgtctgaaaatcgcgccgacctgcccgctgatcctgccttatcacatcgcgctcgaccaagcccgagaagcatcgcgcggcaaaggcaaaatcggcacgaccggccgcggcatcggccctgcctacgaagacaaagtggcacgccgcgccattcgcgccgccgatttgctgcatcctgaaaaactgcgtgaaaaactggatgccgtccttgcttattacaacgtccaactgcaacatctgcacaatgccgagccggttaaagcggaagacgtgatggcggttatcgaaaaagtcgcgccgcgcattgcgccgatgattaccgacgtgtcccgcgtgttgaacgagaaaaacaaaaacggcgaaaaactgctgtttgaaggcgcgcaaggtgcgttgttggacatcgactacggcacttatcccttcgttacctcgtccaactgtctggcgggcgcagcttcggcaggcgcgggcgtaggtcctcaaatgctggattatgttttgggcatcgtcaaagcctataccacgcgcgtcggttcgggcccgttcccgaccgaattgttcgacgaagtaggcgtaggtttggcagaacgcggacacgaattcggttcggtaaccggacgcgcacgccgctgcggctggtttgatgccgccgccctgaaacgctccatccaaatcaacggcatttccggtatgtgtattactaaactcgatgtaatggacggcgttgaaaccatcaatatctgcgtcggctatgaattgcccgacggcggcaaaaccgacatcctgccttgcggttccgatgcggtggaaacctgcaagccgatttacgaaaccatgcccggctggcgcgaatccactttcggcgtgaaggactacggcgcattgcccgaaaacgccaaagcatatttgaaacggattgaagaagtctgcggcgcgccggtcgccatcgtctccaccggccccgaccgagaagaaacgattgtgctgcatcatccgttcgcataa

SEQ ID NO: 66084 - DNA, 738 bp, Neisseria meningitidis; identical to SEQ ID NO: 48124

SEQ ID NO: 66085 - DNA, 696 bp, Neisseria meningitidis; identical to SEQ ID NO: 51216

SEQ ID NO: 66086 - DNA, 849 bp, Neisseria meningitidis
atggacttcaaacaatttgattttttacacctgatcagtgtttccggttgggagcatctggctgaaaaggcgtgggcgttcgggctgaaccttgccgccgcgctgcttatttttttggtcggaaaatgggcggcgaaacgcattgtcgctgtgatgagggcggcgatgacgcgcgcgcaggtcgatgccacgctgattagttttttgtgtaatgttgccaatatcggcttattgattttggtgattattgccgcattgggcagattgggcgtttccacaacatccgtaaccgccttaatcggcggcgcgggtttggcggtggcgttgtccttgaaagaccagctgtccaattttgccgccggcgcgctgattatcctgttccgcccgttcaaagtcggcgattttatccgcgtcggcggttttgaaggatatgtccgagagattaaaatggtgcagacttctttgcggacgaccgacaacgaagaagtcgtgctgcccaacagcgtggtgatgggcaacagcatcgtcaaccgttccaccctgccgctttgccgcgcccaagtgatagtcggcgtcgattacaactgcgatttgaaagtggcgaaagaggcggtgttgaaagccgccgtcgaacaccccttgagcgttcaaaacgaagagcggcaggccgccgcctacatcaccgccttgggcgacaatgccatcgaaatcacattatgggcttgggcaaacgaagcagaccgctggacgctgcaatgcgatttgaacgaacaagtggtcgaaaacctccgcaaagtcaatatcaacatcccgttcccgcaacgcgacatacacatcatcaattcttaa

SEQ ID NO: 66087 - DNA, 144 bp, Neisseria meningitidis
atgttctgtatcgttgtttaccgtttccgcacctttgtccgccttaaagcaggtagacaccgcaatgaatcgacgcaaagaaaatgccgtctgaacatgcgttcgggcggcgttttgttgggggtatcggagcggaacgtctga

SEQ ID NO: 66088 - DNA, 702 bp, Neisseria meningitidis; identical to SEQ ID NO: 42609

SEQ ID NO: 66089 - DNA, 1335 bp, Neisseria meningitidis
gtgggcgaacctgaaaacaaatcatccgaacccgtacgcgagatacaggcatcaaaagaaatgccgtctgaaacctcttccccacgcaaagaaaacgaaacagaagtacacattcctgccgctccttttatcgtcaaacagtccggcagcaacgctttggcagtctgcgccctggtattggcggcattgggtttgggtacaagtggttttttgtttgtccaaggacagaatgtcttgaaaaaccaagagctggcattcaaccaaaaaatcgacaaagccgccttgggcgagtcggaaaacgccgccctgttgaaagacaacctcaaccggcaagccgccatacagtccgaactcgaccgtttggacagcggtgtcaaagccaacggcgaacagattctgatgacgcaaaaagcctatcgcgagctgaccaaagggcgtgccgattggctggtggacgaaaccgagaccatactcaatctggcggcgcaacagctggtgttgaccggcaatatccaaacggcagtcggcgtgttggagcatatcgacagccgcctgtcccgtttcaatcaggcagagcttctgccgatcaaacaggcagtcagcagcgacttggcggaactgaaaaaccgtccctatgtcgatatttccggcacggcattgcgcctcgacaggctggaaaccgccgtatccggactgccgctgattttggacggcgtattgaaaccgggcgtacaggcacgcaacgaagccgtttccgcttcatggtggcagaacgtatgggaaaaatccctcggcacattgaaggggctggtcgaaatccgccgtttggaaaacaacgatgccatgctgctttcaccggaacaggcatattttgtgcgtgaaaacctgcgcctccgccttttggatgcgcgcattgcattaatgcagcgcaacggcgaagtctatcagggcgatttgaacaatgccgaagccgccgtcagacagtatttcgatgccaagtctcccgccacgcagtcgtggctgaaagaactggcggaattgaaggcgttggatgtgcgcatgacggcggatgacggtttgaaaaacagcctaaatgccgtccgcgcctatcgcgacggtacgcgcatgacggcggcggaaaatcaagaagcggaacaggcggcttccgaaccggcaaacgaaaacacagcttccgaaccggctgccgcatcggatgtgaagaccatagaagcaccgtccctgccttcggaacgcaaaccggaacagcctgcaaaaaaacagtccgtgccggaaaaggcagggcgttcgccgtccgctaaaggagaacgcgcatga

SEQ ID NO: 66090 - DNA, 558 bp, Neisseria meningitidis; identical to SEQ ID NO: 59333

SEQ ID NO: 66091 - DNA, 1035 bp, Neisseria meningitidis; identical to SEQ ID NO: 42551

SEQ ID NO: 66092 - DNA, 2703 bp, Neisseria meningitidis
atgcaactgcatattctgaacaatccgaaggacgcggctttggcggcggacgcggaatttctgaaacaatccctgttcaacctcctgcacgaagaagcctcgccgttggttgtcgaaacggtcaaactcttgtccacttccgacgacagcgcggcattgattgaaaaagtattgccgcaattggacgaacaacaaacccacgatttaaccttggcctgcggcctgttcgcccagattttgaatatcgccgaagacgtgcaccacgaacgccgccgccaaatccacgaagaagccggacgcggcggcgcggaaggcagcctgacggaaaccgtccgcaggctcaaagcggggaaagccgacggcaaatcggtgcagcggcagttggacaatacgtccgttaccgccgttttgaccgcgcacccgaccgaagtgcaacgccaaaccgtcttaagcttcaaccgccgcatccgcgcactgttgccgcaacgcgaacgctgcaccaatgccgacgcgctggcacggctgcgccgcgaaatcgacactatcctgctgggcttgtggcagaccagcgaaacgcgccgccacaaactcagcgtcaacgacgaaatcaacaacggcgtgtccatcttcccgatgagctttttcgaagccctgcccaagctctaccgcaatatggaacacgactttcagatggtctatcccggcgtccgcgttccggacatcctcaaaatcggcggctggatcggcggcgaccgcgacggcaatccgtttgtttctgccgaaaccctgcgctttgccttccgccgccacgccgatgccgtgttccgcttctatcgcggcgaactcgacaaactctaccgcgaattgccgctctccatccgccgcgtcaaagtcaacggcgatgtaacggcgttgtccgacaaatcgcccgacgaagaaatcgcccgcgccgaagaaccctaccgccgcgccattgcctacattatggcgcgcgctatgggcaaagcgcgcgcgctcggtttgggcatgggctgcaaattcggctttctcgagccttatgcttcggcacaagaatttctcgatgatttgaaaaaattgcaacgttcccttatcgacaacggcagccgcctgcttgccgaaggccgtttggcagacctcatccgttccgtgtccgtgttcggcttccacatgatgccgctcgacctgcgccaacacgcaggcaaacacgccgatgtggttgccgagcttttccaacacgcaggcttggaagactacaacagcctgaacgaagagcaaaaacaagccgccctgttgcgcgaactgggccaccaacgtccgctgtacagcccgtttatcacatacagcgaccatacccgccacgaattggcgattttcaacgaagcgcgcaaaatcaaagacgaattcggcgaagatgccgtaacccaaagcattatttccaactgcgaacaacccagcgacctgctcgccttggcgttgctgctgaaagaaaccggcctgttggtggtggaaaacggcaaaccgcacagccgcatcaacatcgtgcctctgtttgaaaccatcgaagcgctcgaaaatgcctgtccggtcatggaaaccatgttccgcctcgactggtatgatgccctgctcgaaagccgcggcaacatccaagaaattatgctcggctactccgactccaacaaagacggcggctacgttaccagctcatggtgcctctatcaggcggaattgggcttggtcgaactcttcaaaaaatacggtgtccgcatgcgcctgttccacggccgcggcggcagcgtcggccgcggcggcggcccgtcttaccaagccattctcgcccaaccggcgggcagcgtggcgggacaaatccgcatcaccgaacaaggcgaagtcattaccgccaaatacgccgaccccggcaatgcccaacgcaacttggaaaccttggttgccgcgactttggaagccagcatcctgccggataaaaaagaccctgatgccaaactgatgcaggcattgtcggacgtatcgttcaaatactaccgcgaactgattacccatcccgacttcatcgactacttcctgcaaaccagcccgattcaggaaatcgccaccctcaacctcggcagccgtcccgccagccgcaaaaccttggcacggattcaggacttgcgcgcaattccgtgggtattctcatggatgcaaaaccgcctcatgctgccggcttggtacggtttcggcagcgcagtggaaaccttgtgcgaaggcagtcccgaaacccttgccgccctgcgcgaacacgctcaaagcaacccgttcttccaagccatgctctccaatatggaacaagtcatggcgaaaaccgacatcaccctggcggaaaactacgccggcttgagcgaatcgcccgataaggcaaaaatcatcttcggcatgattaaggaagaataccggcgcagccgcaaagccctgctcgacctgctgcaaaccgaagaacttttgcgcgacaaccgcagcctcgcccgttcgctcgccttgaggattccatatctgaacgcgctcaacggtttgcaagtcgccatgctcaaacgcctgcgtaaagaacccgacaatccgcacgccctgctgatggtgcacctgaccataaacggcgtggcgcaaggtttgcgcaatacaggctga

SEQ ID NO: 66093 - DNA, 312 bp, Neisseria meningitidis; identical to SEQ ID NO: 55809

SEQ ID NO: 66094 - DNA, 333 bp, Neisseria meningitidis
ttggccgccgacgtggtcaaagtacgcgacaggtttaacgaagaactggacaatgtccgcagggaaatcggcaaacggccgatggaagaattcaggaacgtatttttgcaggcagcccaagaagcacagacgacaatagggcagaaggcggttcaaatcgaactggaaaaattccccctgaacggcagcccttcggccaagcgaatcgcgttttatttcggcgcgcagcggataagggaagtagagcagaaggagcgggaagaccagcgcaaagagcaggagcggcaggcgcggcgtatggagcgggacgacggccacggcatcggcatgtag

SEQ ID NO: 66095 - DNA, 966 bp, Neisseria meningitidis
atgagccacacgcaactgacccaaggcgaacgataccacatccaatacctgtcccgccactgcaccgtcaccgaaatcgccaaacagctgaaccgccacaaaagcaccatcagccgcgaaatcagacggcaccgcacccaagggcagcaatacagcgccgaaaaagcccagcggcaaagccggactatcaaacagcgtaagcgacaaccctataagctcgattcgcagctgattcagcacatcgacacccttatccgccgcaaactcagtcccgaacaagtatgcgcctacctgtgcaaacaccaccagatcacgctccaccacagcaccatttaccgctaccttcgccaagacaaaagcaacggcagcacgttgtggcaacatctcagaatatgcagcaaaccctaccgcaaacgctacggcagcacatggaccagaggcaaagtacccaaccgtgtcggcatagaaaaccgacccgctatcgtcgaccagaaatcccgtatcggcgattgggaagccgacaccattgtcggcaaaggacagaaaagcgcattattgaccttggtcgaacgcgttacccgctacaccatcatctgcaaattggatagcctcaaagccgaagacactgcccgggcagctgttaggacattaaaggcacataaagacagggtgcacaccatcaccatggataacggcaaagagttctaccaacacaccaaaataaccaaagcattgaaagcggagacttatttttgtcgcccttaccattcttgggagaaagggctgaatgagaacaccaacggactcatccggcaatacttccccaaacaaaccgatttccgtaacatcagtgatcgggagatacgcagggttcaagatgagttgaaccaccgaccaagaaaaacacttggctacgaaacgccaagtgttttattcttgaatctgttccaaccactaatacactag

SEQ ID NO: 66096 - DNA, 321 bp, Neisseria meningitidis; identical to SEQ ID NO: 37031

SEQ ID NO: 66097 - DNA, 1008 bp, Neisseria meningitidis
atgagcaccttcttccggcaaaccgcccaagccatgattgccaagcacatcgaccgtttcccgctattgaagttggaccaggtgattgattggcagccgatcgaacaatacctgaatcgtcaaaaaacccgttaccttagagatcaccgcggccgtcccgcctatcccctgttgtccatgttcaaagccgtcctgctcggacaatggcacagcctctccgatcccgaactcgaacacagcctcattacccgcatcgatttcaacctgttttgtcgttttgacgaactgagcatccccgattacagcaccttatgccgctaccgcaactggctggcgcaagacgacaccctgtccgaactgttggaactgattaactgccaactgaccgaaaaaggcttaaaagtagagaaagcatccgccgccgtcattgacgccaccattattcagaccgctggcagcaaacagcgtcaggccatagaagttgacgaagaaggacaaatcagcggccaaaccacaccgagtaaggacagcgatgcccgttggatcaagaaaaacggcctctacaaactcggttacaaacaacatacccgtaccgatggggaaggctatatcgagaaactgcacattacccccgccaatacccatgagtgcaaccacctgtcgcctttgttggagggcattgccgaagatacgaccgtctatgccgacaaaggctacgacagtaaggaaaaccggcaacacctgaaagaacatcggttgctggacggcattatgcgcaaagcccagcgtaaccgtccgctgacggaagcgcaaaccaaacgtaaccgatatttgtcgaaaacccgttatgtggtcgaacaaagctttggtacgctgcaccgtaaattccgctacgcccgggcagcctatttcgggctgagcaaagtgagtgcacaaagccatctgaaggcgatgtgtttgaaccttttgaaagcggccaacaggctaagtgcgcccgctgccgcctaa

SEQ ID NO: 66098 - DNA, 288 bp, Neisseria meningitidis; identical to SEQ ID NO: 36767

SEQ ID NO: 66099 - DNA, 921 bp, Neisseria meningitidis; identical to SEQ ID NO: 50268

SEQ ID NO: 66100 - DNA, 1137 bp, Neisseria meningitidis; identical to SEQ ID NO: 51094

SEQ ID NO: 66101 - DNA, 210 bp, Neisseria meningitidis; identical to SEQ ID NO: 39235

SEQ ID NO: 66102 - DNA, 444 bp, Neisseria meningitidis; identical to SEQ ID NO: 51607

SEQ ID NO: 66103 - DNA, 324 bp, Neisseria meningitidis; identical to SEQ ID NO: 50928

SEQ ID NO: 66104 - DNA, 1311 bp, Neisseria meningitidis; identical to SEQ ID NO: 39684

SEQ ID NO: 66105 - DNA, 2829 bp, Neisseria meningitidis; identical to SEQ ID NO: 50744

SEQ ID NO: 66106 - DNA, 867 bp, Neisseria meningitidis; identical to SEQ ID NO: 38666

SEQ ID NO: 66107 - DNA, 2190 bp, Neisseria meningitidis
atgatctaccaccgcatcgccgtaaacgtgccgctttcagacggccttttgacttattcccattccgatccgcttcctccgggaacgcgggtgcttgtgcctttccgcaataaaaccgtggtcgggatggtgtgggaaacggatattgcgccggatatggatacggcgcggattttgagtattcagacgacctttttagacgagccgccgttgcctgaaagctggcgtgatttgctctcgtttacgtcgcgttattaccactatccgacggggcaggcggtgtttgccgcgctgccgcagggtttgaaggaaacgcgcgcggtggaaatgccgcagccgccgttgttttacgcgctgaacgaagcgggcagggcgcaaacgccgccgctggcgcggttcaacaaaaaagcggctctgtgggacgcactgctgtcgggcgggatgacgatggcggcgttgaagcaggtaaacgcgcaggcggcgaaattgattgaggattgggctgaacaaggctggattgaaacgacggaagcggcgaagcccgttttaaggtcgtgtaatgggcaggcttcgcactctgaatttgtattaaatgctgaccagcagaaggcttccgatgccattcagacggcattgggacgcttccagccgtttctgctgtacggcatcaccggcagcggcaagaccgaggtgtattttgatgcgatggcgaaagtgttggctcaggggcggcaggtgttgtttctgttgcccgaaatcaacctcacgccgcagcttttgaagcgggtggaaaaccgttttgctgacgtgccgaccgccgtgttgcacagccagatggcggcaggcaggcgcacgcaggattatttgcgcgcgatgttggggcaggcgaaattggtcatcggcacgcggctggcggtgttcacaccgatggatgatgtcgggctgattgtggtcgatgaggaacacgacggctcgttcaaacaggacaacgaattacgctaccacgcccgcgatttggcggtgtggcgggcgaagcagagcggctgccccgttgtgttgggcagtgctacgcccagtttggagagttggcacaaggcgcaaagcggcgcgtaccgcctgctgcaactgaccgaacgcgcccataccgccgcgcaactgccgcaagtggacatcctcaacgtaggtcgtctgaaactcgacaacggcttctcgccgcaagccttgcagcttttgaaacagaactttgaagcaggcggtatgtcgctggtgtacctcaaccggcgcggtttcgcgcccgcgctgttttgcggcgactgcggccataccttcggctgcccgaactgctccgccaaaatggtgttgcaccaacgcgcccgccaattgcgctgccaccactgcgaccaccgcgaacccattccgttcaaatgccccgactgcggcaaccaagacctgaccgccgtcggacacggcacgcagcgcgtcgaagaaaccctgcgcgccttcctgcctaaagccgccgtcgtccgcgtcgatagggacagcacggcgcacaaaaatgactgggcggatttgtaccgccgtatcgccgacaacgaaatcgacattctggtcggcacgcagatgctcgccaaaggtcatgatttcgcgcggctcaacctcgttatcgtattgaacgccgatggcagcctgtatagcgcggactttcgtgcgccggaaaggctgtttgccgagctgatgcaagtgtccggcagggcggggcgtgccgacaaacccggcaaggtgttgatacagacccaactgcccgaacatcccgtcttcgccgccgtcaaggcgcaggattatgccgtgtttgccgaaaatgaattgaacgagcggcaaatgttcgcgatgccgcccttcggtttccagaccgccgtccgcgccgatgcgccgcgtgttgccgatgcgatggaatttctcaatgccgccaaagaaaccctcgccccgctgttgcccgaaagcgtttcccagtttggcgccgcccctatgctgatggtgcgccttgctgaacgcgaacgcgcgcaaatcttcctcgaatcggtatcccgacaggatttgcaccgcgccgtgagtttgtgggtgcaggtgttgcagcaaaaccgcgacagcaaaatcagatggtcggtggatgtcgatccgcaggaggcttga

SEQ ID NO: 66108 - DNA, 606 bp, Neisseria meningitidis; identical to SEQ ID NO: 45248

SEQ ID NO: 66109 - DNA, 1773 bp, Neisseria meningitidis; identical to SEQ ID NO: 59887

SEQ ID NO: 66110 - DNA, 1449 bp, Neisseria meningitidis
atgaaaggcgatattggtgtaatcggtttggcggttatggggcaaaacctgattttgaatatgaacgattgcggatttaaggttgtcgcctacaaccgaacaatcggtaaggtggacgaatttttaaacggcgcggctaagggaacggatattgtcggcgcgtattccctgcaagacttggtcgataagctggcaaaaccgagaaaaatcatgatgatggttcgcgcaggttcggtggttgacgactttatcgaacaactgcttccgttgttggaagaaggcgacatcattatcgacggcggcaatgccaattaccccgacacgacacggcggacacattaccttgccgaaaaagggattttgtttgtcggcgcgggcgtatccggcggcgaagaaggcgcgcggcacggcccgtctatcatgccgggcggggataagcgcgcttgggaagccgtcaaaccgatttttcaggcgattgccgccaaaacgccgcagggcgaaccgtgttgcgactgggtcggcagggacggcgcggggcattttgtcaaaatggtgcataacggcatcgaatacggcgatatgcagttgatttgcgaagcgtaccagttcatgaaagacggcttggggctgtcttacgacgaaatgcaccgcgtgtttgccgagtggaacaaaaccgagctggattcttatctgattgaaatcacagcggcaattttgggctataaggacgaaggcggcgaaccgctggtcgagaaaatcctcgatacggcagggcaaaaaggcacgggcaaatggacgggcatcaatgctttggatttgggtattccgttgacgctgatttccgaagcggtattcgcccgctgcgtttcgtcgttcaaagaacagcgcgtgcagaccggcaagctattcgcccgaaccgttacgcccgtcgaaggcggcaaacaagaatgggttgaggcgttgagacaggccctgcttgcatctaaaatcatttcctacgcacaaggcttcatgctgatccgcgaagcgggcgaaagctacggctgggatttggactacggcaacactgcgctgctgtggcgcgaggggtgcatcatccgcagcgcattcttaagcaatatccgcgacgcgtatgaaaacaatcccgatttggtgttcttgggtgcggatccgtatttcaaaaatattttggaaaactgcctgccggcatggcgcaaggtggttgccaaggcggtcgaatgcggcatccctatgccctgcatggcttcggcgattacgttcttggacggctacacgaccgaacgtctgcctgccaacctcttgcaggcacagcgcgactacttcggcgcgcacacttacgagcgcaccgacaaaccgcgcggcgagtttttccataccaactggacgggcaagggcggagataccgcttcgacaacctacgatatttga

SEQ ID NO: 66111 - DNA, 1719 bp, Neisseria meningitidis
atgaacctacatcaaaccgtcgaacacgaagccgccgccgcctttgccgccgcaggcatcgccgacagtcccgttgttttgcagccgaccaaaaatgccgaacacggcgatttccaaatcaacggcgtgatgggtgcggcgaaaaaagccaaacaaaacccgcgcgaactggcgcaaaaggtcgccgacgcattggcaggcaacgccgtcatcgaaagcgcggaagtcgccggcccgggcttcatcaacctgcgcctgcgccccgaatttctcgcgcaaaacattcagacggccttgaacgacgcgcgtttcggcgtggcaaaaaccgacaaaccgcaaaccgtcgttatcgactattcttcgcccaatctggcaaaagaaatgcacgtcggccacctgcgttccagcatcatcggcgacagcatttcgcgcgtgttagaatttatgggcaataccgttatccgtcaaaaccacgtcggcgactggggtacgcagtttggcatgttggtcgcttatttggtcgagcagcaaaaagacaatgccgcgttcgagttggcggatttggagcagttttaccgcgccgccaaagtgcgctttgacgaagaccctgcctttgccgacaccgcacgcgaatacgttgtgaagctgcaaggcggcgatgaaaccgttttggcattgtggaaacagtttgtcgatatttcgctctcgcacgcccaagccgtttacgacacgctgggcttgaagctgcgccctgaagacgtggcaggcgaatcgaaatacaacgacgatttgcagcccgtagtcgatgatttggttcaaaaaggcttggcggtcgaagacgacggcgcgaaagtcgtgttcttggacgagtttaaaaacaaagaaggcgaacccgccgcatttatcgtgcaaaaacaaggcggcggcttcctttatgcttccaccgatttggcgtgtctgcgctaccgtgtcggcacgcttcatgccgaccgcctgctgtacgtcgtcgaccaccgccaagccctgcactttgagcaactctttaccacttcacgcaaagccggctatctgccggaaaacgtcggcgcggcatttgtcggcttcggcacgatgatgggcaaagacggcaaaccgttcaaaacacgcagcggcgacactgtaaaactggtcgatctgctgaccgaagccgtcgaacgcgccaccgctttggtgaaagagaaaaatcccgaattgggcgcggacgaagccgccaaaatcggcaaaaccgtcggcatcggcgcggtcaaatacgccgacttgagcaaaaaccgcaccagcgattatgtgttcgactgggacgctatgctctcgtttgaaggcaacaccgccccctatctgcaatacgcctacacccgcgtgcaaagcgtgttccgcaaaacaggcgaatgggatgcggacgcgccaaccgttttgaccgaaccgctggaaaaacagcttgccgccgagctgctgaaatttgaagacgtactgcaaagcgtggcggacacggcgtatccgcactacctcgccgcctacctctatcaaattgcgaccctgttcagccgcttctacgaagcctgtccgatactcaaagccgaaggcgcaagccgcaacagccgcctgcaactggcaaaactcaccggcgacacgctgaaacaaggcttggatttgctgggcatcgatgtgttggacgtaatgtaa

SEQ ID NO: 66112 - DNA, 435 bp, Neisseria meningitidis
atgtgcgggttgtggctgctgcgcgccctgactgccaaactgccccaacagcgttatgcggctttgtttattacactgttttttgccgcagtattggtgttcgggcggcatgattcgatgtattggtatcccgtcctcgtcaatctgatgatgttggcggtgttcggcggcagcctgtttgccgggcagacggtgattgaaaaacttgcgcggctgcaacagcccgacctgcctgaaaaagccgtgcgctatacccgccgggtaacgcaggtttggtgcgtattttttataatcaacgggacgcttgccgctttgttggcacggttggggcgatatgattggtgggcggtttataccggcgtgattgcctatgtattgatggggatgccgtttgccggcgaatggctttaccgcaaactcgttttgaaagtctga

SEQ ID NO: 66113 - DNA, 1185 bp, Neisseria meningitidis; identical to SEQ ID NO: 42541

SEQ ID NO: 66114 - DNA, 285 bp, Neisseria meningitidis; identical to SEQ ID NO: 38872

SEQ ID NO: 66115 - DNA, 381 bp, Neisseria meningitidis
atgcctttaaaattccaaccaagggaacgttcggttatcatgtgcgactttcgcggttatgaagaaccggaaatggtcaagaaacgccctgtcgtcgtcatagcgcgaaacaggcacaacggcaaactggtaacggtcgtacccttaagcagcacagaacctgtccctttggcggactaccaccacaaaatgagtggaaaccccttaccggacaagccgcacatccaatgttgagcaaaatgcgacatgacggcaacagtcggattggcacgattagaccgatacaaacccaaagggcgcgaccgctgcattccaataatcagtgaagaggattttcaggcgattaaaacagccgttgccaaggcattcaaactgtactag

SEQ ID NO: 66116 - DNA, 1860 bp, Neisseria meningitidis; identical to SEQ ID NO: 58627

SEQ ID NO: 66117 - DNA, 864 bp, Neisseria meningitidis
atgaaaaccttcttcaaaaccctttccgccgccgcactcgcgctcatcctcgccgcctgcggcggtcaaaaagacagcgcgcccgccgcatccgcttctgccgccgccgacaacggcgcggagaaaaaagaaatcgtcttcggcacgaccgtcggcgacttcggcgatatggtcaaagaacacatccaacccgagctggagaaaaaaggctacaccgtcaaactggtcgagtttaccgactatgtacgcccgaatctggcattggctgagggcgagttggacatcaacgtcttccaacacaaaccctatcttgacgacttcaaaaaagaacacaatctggacatcaccgaagtcttccaagtgccgaccgcgcctttgggactgtacccgggcaagctgaaatcgctggaagaagtcaaagacggcagcaccgtatccgcgcccaacgacccgtccaacttcgcccgtgtcttggtgatgctcgacgaactgggttggatcaaactcaaagacggcatcaatccgctgaccgcatccaaagcggacatcgccgagaacctgaaaaacatcaaaatcgtcgagcttgaagccgcgcaactgccgcgtagccgcgccgacgtggattttgccgtcgtcaacggcaactacgccataagcagcggcatgaagctgaccgaagccctgttccaagaaccgagctttgcctatgtcaactggtctgccgtcaaaaccgccgacaaagacagccaatggcttaaagacgtaaccgaggcctataactccgacgcgttcaaagcctacgcgcacaaacgcttcgagggctacaaatcccctgccgcatggaatgaaggcgcagccaaataa

SEQ ID NO: 66118 - DNA, 552 bp, Neisseria meningitidis; identical to SEQ ID NO: 51745

SEQ ID NO: 66119 - DNA, 360 bp, Neisseria meningitidis; identical to SEQ ID NO: 36598

SEQ ID NO: 66120 - DNA, 270 bp, Neisseria meningitidis; identical to SEQ ID NO: 48993

SEQ ID NO: 66121 - DNA, 501 bp, Neisseria meningitidis
atggcggatttgcagaaaacttttcaaacttcgttccgtgatgcgatggcatcctgtgcggcaggcgttcatgtcatcacgacagacggtgcggcagggcgttacggcattacaatgacggcggttgcgccggttaccgacgagccgccgaccgtgatgctgtgcatcaaccggagtgcgcgaatcattccgatcctgtcggaaaacggcagcctctgcatcaatacgctggcggacgaacatcaggatgttgccgaacattttgccgggctgaccggcctgtcgcccgaagagcggtttgcctaccacatctggcatcgcggcaaaacgggacaacttgaaatagagggcgcgttggtgcacctgcacgggcatattgtcggcaaacatgaaatcggcacgcattttgtgttttacgtcaggctcgacgaaatcaaaaactgcgggtgcaaacgccccgcgctgctgtatttcagacggcagtttagatttttagactga

SEQ ID NO: 66122 - DNA, 1011 bp, Neisseria meningitidis
atgaacgacaacacgcaaacccttcccccgcgccgcctttccgtcgccccgatgctcgactggacggacaggcactaccgttatatggcgcgccagattacccgaaatacttggctgtacagcgaaatggtcaacgccggcgcgattgtttacggcgacaaagaccgctttttgatgttcaacgaaggcgagcagcccgtcgccctgcaactgggcggcagcgacccgtccgatttggcgaaagccgccaaagccgccgaagcatacggctacaacgaggtcaacctcaactgcggctgccccagtccgcgcgtgcagaaaggttcgttcggcgcgtgtctgatgaacgaagtcgggctggttgccgactgcctcaacgccatgcaggacgcggtcggtattcccgttaccgtcaaacaccgcattggtgtggacaggcagaccgaataccaaaccgttgccgatttcgtcggcacgctgcgcgacaaaaccgcctgtaaaacctttatcgtccacgcccgcaacgcttggctggacggtctttcccccaaagaaaaccgcgacgttcccccgttgaaatacgattacgtttatcgcctcaagcaggagtttcccgggctggaaatcatcatcaacggcggcatcaccaccaacgaagcaatcgccggacacctgcaacacgttgacggcgtgatggtcgggcgcgaggcgtaccacaacccgatggtgatgcgcgaatgggacagattgttttacggcgacactgcgaacccgatcggatacgccgatttggtgcaacgcctctacacatacagccaagcccaaatccaagccggacgcggcacaatcctgcgccatatcgtccgccacagcctcgggctgatgcacggcttgaaaggcgcgcggacttggcggcgtatgctttccgacgcaacgctcttgaaagacaacgacggcagcctgattctcgaagcgtggaaagaggtcgaacgggcaaatacgcgcgaatag

SEQ ID NO: 66123 - DNA, 966 bp, Neisseria meningitidis; identical to SEQ ID NO: 65706

SEQ ID NO: 66124 - DNA, 489 bp, Neisseria meningitidis
atgaccgccttgctcgtcatcctcgccctcgccctgatagccgccggtacggcgggcatcgtttaccccgccctgcccggattggcattgatgtttgccggaacctggctgctcgcctactccggcggctaccaaatctacggcgcgggcgttttgtggacggtcggactcatcagccttgccggcatactggcggactatgtggcaggcatatgggggacaaaatataccggagcgggcaagctcgccgttcgcggcgcattggtcggcagcatcatcggcatatttttctcccttcccggactaatactcggtccctttatcggcgcggcggcaggcgaactgatcgatcggcgcaatatgcttcaggcaggtaaagcgggcttgggtacgctgttggggcttatcatcggtacgacattcaaaatcggctgcgccgtatccatcttgtttatcctgttggtgaaatacatcgcctacctgttttaa

SEQ ID NO: 66125 - DNA, 1536 bp, Neisseria meningitidis
atgaatttgcctattcaaaaattcatgatgctgtttgcagcagcaatatcgttgctgcaaatccccattagtcatgcgaacggtttggatgcccgtttgcgcgatgatatgcaggcaaaacactacgaaccgggtggtaaataccatctgtttggtaatgctcgcggcagtgttaaaaatcgggtttacgccgtccaaacatttgatgcaactgcggtcggccccatactgcctattacacacgaacggacaggatttgaaggcattatcggttatgaaacccatttttcaggacatggacatgaagtacacagtccgttcgataatcatgattcaaaaagcacttctgatttcagcggcggcgtagacggtggttttaccgtttaccaacttcatcggacagggtcggaaatccatccggaggatggatatgacgggccgcaaggcagcgattatccgccccccggaggagcaagggatatatacagctactatgtcaaaggaacttcaacaaaaacaaagagtaatattgttccccgagccccattttcagaccgctggctaaaagaaaatgccggtgccgcctctggttttttcagccgtgcggatgaagcaggaaaactgatatgggaaagcgaccccaataaaaattggtgggctaaccgtatggatgatattcgcggcatcgtccaaggtgcggttaatccttttttaatgggttttcaaggagtagggattggggcaattacagacagtgcagtaagcccggtcacagatacagccgcgcagcagactctacaaggtattaatcatttaggaaatttaagtcccgaagcacaacttgcggctgcaaccgcattacaagacagtgcttttgcggtaaaagacggtatcaattccgccagacaatgggctgatgcccatccgaatataactgcaacagcccaaactgcccttgccgtagcagaggccgcaggtacggtttggcgcggtaaaaaagtaaaccttaacccgaccaagtgggattgggttaaaaataccggctataaaacacctgctgcccgacctatgcagactttagatggggaaatggccggtgggaataagccagcgaagcaagctactcctaatggcaaagctggcgtttctacacaacaatctttgcaaaatagtctcgttccacaaaaaaattatacgcatactacctataatggtggatcagctattacagatggtaaatatattactgaccctctcagtatggtacgacacaaacctgatgcatctagtctagacaagatagatagcaaaagtttatttaaatcagatgttgatgcggaaaaagctacattagatgctgctagatatgcagataaacataatttatgggatagtcaaaataaggcaaaagttccaacgaacgacgtagttggctatacagacggaaaaccgacacatataattaacatttatcgtagaaagccgaataaagatgggtttagacctgtgcatggaacaccaggtaaggaacgttga

SEQ ID NO: 66126 - DNA, 828 bp, Neisseria meningitidis
atgaaactgattgaacaacatcaaatttttggcggttcgcaacaagtttgggcgcatcatgcccaaacgctgcaatgcgaaatgaaatttgccgtctatttgccaaataatccagaaaatcgaccgcttggtgtgatttattggctttccggcttgacgtgtacggaacaaaatttcattaccaaatcaggctttcagcgttatgcggcagaacatcaagtaattgtggtggcccccgataccagccctcgcggagagcaagtgccgaacgatgatgcttacgatttaggacagagtgcaggcttttatttgaatgcgaccgaacagccttgggcggcgaattatcaaatgtatgattacattttgaacgagctgccccgtctgattgagaaacactttcctaccaacggcaaacgttccattatggggcattcaatgggcggacacggcgcattggtattggcgctgcggaatcaggaacgttatcaaagtgtttctgccttttcgcctattttatcgccaagcctcgtgccgtggggagaaaaagcctttactgcttatttagggaaagaccgtgaaaaatggcagcaatatgatgctaactcactcattcaacaaggctataaagtgcaaggtatgcgcatcgatcaaggcttggaagatgagtttttgccgacacaattgcgtaccgaagattttatcgaaacctgccgtgcggcaaaccagccggtcgatgtgcgtttccataaaggctacgatcacagctattacttcatcgccagttttattggcgagcatattgcttatcacgccgcgtttttgaagtaa

SEQ ID NO: 66127 - DNA, 240 bp, Neisseria meningitidis; identical to SEQ ID NO: 43117

SEQ ID NO: 66128 - DNA, 198 bp, Neisseria meningitidis; identical to SEQ ID NO: 51876

SEQ ID NO: 66129 - DNA, 1257 bp, Neisseria meningitidis; identical to SEQ ID NO: 51276

SEQ ID NO: 66130 - DNA, 372 bp, Neisseria meningitidis; identical to SEQ ID NO: 51227

SEQ ID NO: 66131 - DNA, 1008 bp, Neisseria meningitidis
atgagcaccttcttccagcaaaccgcccaagccatgattgccagacacatcgaccgtttcccgctattgaagttggaccaggtgattgattggcagccgatcgagcagtacctgaaccgtcaaaaaacccgttaccttagagaccaccgcggccgtcccgcctatcccctgctgtccatgttcaaagccgtcctgctcggacaatggcacagcctctccgatcccgaactcgaacacagcctcattacccgcatcgatttcaacctgttttgccgttttgacgaactgagcatccccgattacagcaccttatgccgctaccgcaaccggctggcgcaagacgacaccctgtccgaactgttggaactgattaaccgccaactgaccgaaaaaggcttaaaagtagagaaagcatccgccgccgtcgttgacgccaccattattcagaccgtcggcagcaaacagcgccaggctatagaagtcgatgaggaaggacaaatcaacggccaaaccacaccgagtaaggacagcgatgcccgttggataaagaaaaacggcctctacaaactcggttacaaacaacatacccgtaccgatgcggaaggctatatcgagaaactgcacattacccccgccaatgcccatgagtgcaaacacctgccgcctttgttggaaggactgcccaaaggtacgaccgtctatgccgacaaaggctacgacagtgcggaaaaccggcaacatctggaagaacatcagttgcaggacggcattatgcgcaaagcctgccgcaaccgtccgctgtcggaagtgcaaaccaaacgcaaccggtatttgtcgaagacccgttatgtggtcgaacaaagcttcggtacgctgcaccgtaaattccgctatgcgcgggcagcctatttcgggctgattaaagtgagtgcgcaaagccacctgaaggcgatgtgtttgaacctgttgaaagccgccaacaggctaagtgcgcctgttgccgcctaa

SEQ ID NO: 66132 - DNA, 960 bp, Neisseria meningitidis; identical to SEQ ID NO: 42610

SEQ ID NO: 66133 - DNA, 3834 bp, Neisseria meningitidis
atgaccacgactaccgccccgcagcgtattcgggaaattccctataactatacttcttataccgaccgcgaaatcgtcatccgactgttgggcaacgaagcgtggcagattctgcaagacttgcgcggacagcgtaaaactggacgttcggcgcggatgctgtttgaagtgttgggcgatatttgggtggtcgtgcgcaatccgtatctggtcgatgatttgctggagcatccgaaacgccgcgccgcgttgatacgcgaaatgcgccaccgcctgaacgaaatccgcaaacgccgcgacgataatcggcaagtggatgtcttggttgccgcagcagaaaaagcagtcgagcgttttgatagcagttttgatgaaaccagccaaaagcggcggcagattttggagcgtttgagcaaaatcaccaagccgcacaatattatgtttgacggattggcgcgggtaacgcacgttaccgatgcaaccgactggcgcgtcgaatatccgtttgtcgtcgtcaatcctgataccgaggcagagatcgcgcctttggtgcgcgccttaatcgagctggatttggttattatcccgcgcggcggcggtacgggttataccggcggcgcgattcctttggacgcgatgagcgcggtcatcaatacggaaaagctggataaacataatggcgtggagtttgtcgaactggcgggcttggatggcaaacatccgattatccattgcggcgcgggcgtggtaacgcggcgggtggaagaaaccgcgcatcaggcaggtttggtgttcgccgtcgatccgacttccgccgatgcgtcctgtgtgggcggtaatgtggcgatgaacgcgggcggtaaaaaagccgtgctgtgggggacggcgttggacaacctcgcctactggcagatggtcaacccgcagggcgaatggctgcgcatcgagcgcgtgcgccacaatttcggcaaaatccacgacgaagaaaccgccgtgttcgacgttcacacgctggattcagacggcctcaatatcgttaaaaccgaacgtttggaaattcccggccacaaatttcgcaaagtcggtttgggcaaagacgttaccgacaaattcttgagcggcctgcccggcgtacagaaagaaggcacggacggcatcatcaccggcgttgctttcgtgttgcacaaaatgccgaaatacacgcgcactgtgtgtatggagtttttcggcacggtcgccaccgctacgccttctatcgtcgaaatccgcgatttcctgctcgcccacgacagcgttcggctggcaggtttggaacatttggactggcgttacgtccgcgccgtcggctacgcaaccaaagcggcgggcaagggacggccgaaaatggtcttgctggcggacgtggtttccgacgacgaagccgccgtagaggcagccgccgaacacatttgcgaacttgcccgcgcccgcgatggcgaaggctttatcgccgtgtctcccgaagcgcgcaaaaccttttggctcgaccgcagccgcaccgccgccatcgccaagcacaccaacgcctttaaaattaacgaagacgtggtcatcccgctcgaaaggctcggcgagtattcggacggcatcgaacgcatcaacattgagctttccatccaaaacaagctcaaactctgtgccgccttggagcaatatctttcgggcaaactccccatcgacaaaatgggcactgacctgccgaccgccgaactgttgggcgaacgcggcaaacacgccctagcccacgtttccgccgtcaaaacgcgttgggaatggctgctcgccaatctcgacacgccgcttgccgactacaaagcccgctacggcgcagccgtccacgccgcacccgaagccaaaaacaatgaaagctgctttattgccttccgcgatttccgcctgcgcgtgtctgtcaaagcggacgtaatgaagccgcttgccgaaatcttcagcggcaaaactgacaccaaaattatccaaggcttaggcaaaatccacgccaaaaccgtacgcagccgtgtctttgtcgccctgcatatgcacgccggcgacggtaacgttcacaccaatattccggttaactcagacgatgccgaaatgcttcagacggcataccgctcagtcgaacgcattatgaaaatcgcccgttcgctcggaggcgtgatttcgggcgaacacggcatcggcatcaccaagctcgaatttttaagcgacgaagaaatgcaaccgttttggaactacaaaaaccaagtcgatccgaaacacaccttcaaccgtcacaaactgatgaaaggctcggacttaagcaacgcctatacgccatccttcgagcttttaggtgcggaatcgttgattatggaaaaatcagacctcggtaccatcgccgattccgtcaaagactgcctgcgctgcggcaaatgcaaacccgtctgctctactcacgttccgcgtgccaacctgctgtacagtccgcgcaacaaaatcctcggcgtgggcttgctgaccgaagccttcttatacgaagaacaaacccgccgaggcgtttccgtcaaacactttgaagaactcatggacatcggcgaccactgcaccgtgtgccaccgctgcgtcaaaccctgccctgtcaacatcgacttcggcgacgttaccgtagccgtccgcaactaccttgccgattccggccacaaacgctttgcgccggcggcttcaatgggtatggcattcctaaacgcgaccggtcctaaaaccatcaaagccctgcgcgccgcgatgatacagaccggcttccccgcgcagaactttgcctacaaaatcggcaagcttcttccgatcggcactaaaaagcaaaaagccgaacccaaagccactgtcggcaaagccccgattaaagaacaggttatccatttcatcaaccgccccctgcccaaaaacgtacccgccaaaacaccgcgctccttattgggcatcgaagacggcaaaagcatccccatcatccgtaatccggcttctccggaagatgccgaagccgtgttctacttccccggctgcggttcggaacgcctgttcagccaaatcgggcttgccgtccaagctatgctctggcacgtcggcgtacaaaccgttctgccgcccggctatatgtgttgcggctatccgcaagacgcgggcggcaataaggcaaaagccgaagaaatgagcaccaacaaccgcgtggctttccaccgtatggcgaacaccctcaactacctcgacatcaaaaccgtcgtcgtcagttgcggcacttgttatgaccagctcgaaaaataccgcttcgaggaaatcttccctggctgccgcatcatcgacatccacgaatacctgctcgaaaaaggcgtgaaactcgacggcgtgaaaggtcagcaatacctctaccacgacccctgccacacgcccatcaaaaccatgaacgccacccaaatggccagcagcctgatggggcagaaagtcgttttaagcgaccgctgctgcggcgaatccggtatgtttgcagtcaaacgaccagacatcgccactcaggtcaagttccgcaaacaagaggaaatcgagaaaaacctcaaagagctgccgcagggcgaacccgtcaaaatgctgacctcctgccccgcctgcctgcaaggcttgagccgctacgccgacgacaacaatatgcctgccgactacatcgtcatcgaaatggcgaaatacatcctcggcgaaaactggctggatgagtttgtaaaaaaagccaacaacggcggtgtagagaaagtgttgctgtaa

SEQ ID NO: 66134 - DNA, 828 bp, Neisseria meningitidis; identical to SEQ ID NO: 53512

SEQ ID NO: 66135 - DNA, 342 bp, Neisseria meningitidis
atgccgtccgaacctcttaaaggcttgccggaacaaaacgtcgtctggctgaccggaaagcataccaacgacttggaagccgtcgtcggcaaatgtatggaaaccgacggaaagggcgcaccttcgggctgggcggcaaacggcgtgtgccataccttgtttgccaaactggtgggcaatatcgccgaagacggcggcaaactgacggattacctgatttcgcattccgccctgcaaccctatcaggcaggcaaaagcggctatgccgccgtgcagaacggacgctatgtgctggaaatcgacagcgagggggcgttttatttccgccgccgccattattga

SEQ ID NO: 66136 - DNA, 966 bp, Neisseria meningitidis
atgagctacacgcaactgacccaaggcgaacgataccacatccaatacctgtcccgccactgcaccgtcaccgaaatcgccaaacagctgaaccgccacaaaagcaccatcagccgcgaaatcagacggcaccgcacccaagggcagcaatacagcgccgaaaaagcccagcggcaaagccggactatcaaacagcgtaagcgacaaccctataagctcgattcgcagctgattcagcacatcgacacccttatccgccgcaaactcagtcccgaacaagtatgcgcctacctgcgcaaacaccaccggatcacgctccaccacagcaccatttaccgctacctccgccaagacaaaagcaacggcagcacgttgtggcaacatctcagaatatgcagcaaaccctaccgcaaacgctacggcagcacatggaccagaggcaaagtacccaaccgtgtcggcatagaaaaccgacccgctatcgtcgaccagaaatcccgtatcggcgattgggaagccgacaccattgtcggcaaaggacagaaaagcgcattattgaccttggtcgaacgcgttacccgctacaccatcatctgcaaattggatagcctcaaagccgaagacactgcccgggcagctgttagggcattaaaggcacataaagacagggtgcacaccattaccatggataacggcaaagagttctaccaacacaccaaaataaccaaagcattgaaagcggagacttatttttgtcgcccttaccattcttgggagaaagggctgaatgagaacaccaacggactcatccggcaatacttccccaaacaaaccgatttccgtaacatcagtgatcgggagatacgcagggttcaagatgagttgaaccaccgaccaagaaaaacacttggctacgaaacgccaagtgttttattcttgaatctgttccaaccattaatacactag

SEQ ID NO: 66137 - DNA, 726 bp, Neisseria meningitidis
atgagtgagggaatggtgtctcctgttttgtatttgattcctacgcctttgggtacgcccgatacgccgtgcctgttgccgcatgatcaacgggcggttgtcgggctgacggattttgtcgtggaagcggaaaaaacggcgcgcgcgcatttgaaacatttgggcgtgacaatgcctatccgcgaactgaatttgcaaacgctgaacgaacacacggatttgaagactttgccggaattgctaaaacctttgcaagaagggcgcagtatgggcattgtcagcgaggcgggttgcccggctgtggctgatccgggtgcgaatttggtggcattggcgcataaacacagttttgaagtacggcctttggtcggtccgtccagcttgttgctggcgctgatggcttcgggtgcgaatgggcagaactttgcgtttaagggttatttgccgtctgaaaaaaatgagcggattcagagtttgaaggctttggaacaacgttcgcgccagcagaatgaaacgcagctgtttatcgaaacgccgtatcgcaacgatgtgttgttggcggatgcggtggaaaacctgcatcctgaaacgcgcttgtgcacggctacggatttgacgttgccgactcagtcggtggtcagtaaaacggttgcggattggcgcaggatgaaggaaatgcccaatctgaaaaaacgcccgacgatttttgtgatgtatgcaggttga

SEQ ID NO: 66138 - DNA, 546 bp, Neisseria meningitidis; identical to SEQ ID NO: 50561

SEQ ID NO: 66139 - DNA, 954 bp, Neisseria meningitidis; identical to SEQ ID NO: 45270

SEQ ID NO: 66140 - DNA, 669 bp, Neisseria meningitidis
atgaaaaccgtttccaccgccgttgtccttgccgccgctgccgtttcactgaccggctgtgcgaccgaatcctcacgcagtctcgaggtagagaaagtcgcctcctacaatacgcaatatcacggtgttcgtaccccgatttccgtcggaacattcgacaaccgctccagcttccaaaaaggcattttctccgacggggaagaccgtttgggcagccaggcaaaaaccattctggtaacgcacctgcaacagaccaaccgcttcaacgtactgaaccgcaccaatttgaacgcattaaaacaggaatccggcatttccggcaaagcgcataacctgaaaggcgcagattatgtcgttaccggcgatgtaaccgaattcggacgcagagatgtcggcgatcatcagctcttcggcattttgggtcgcggcaaatcgcaaatcgcctatgcaaaagtggctctgaatatcgtcaacgtcaatacttccgaaatcgtctattccgcacagggcgcgggcgaatacgcactttccaaccgtgaaatcatcggtttcggcggcacttccggctacgatgcgactttgaacggcaaagttttagacttggcaatccgcgaagccgtcaacagcctggttcaggctgttgacaacggcgcatggcaacccaaccgt

SEQ ID NO: 66141 - DNA, 549 bp, Neisseria meningitidis; identical to SEQ ID NO: 39944

SEQ ID NO: 66142 - DNA, 366 bp, Neisseria meningitidis
atgaacctgattcaacagctcgagcaagaagaaattgcccgcctgaacaaagaaatccccgaattcgcaccgggcgacaccgtagtcgtatccgtacgcgtcgtagagggtacccgtagccgtctgcaagcctacgaaggcgttgtcattgcacgccgcaaccgtggtctgaacagcaacttcatcgtccgcaaaatctccagcggcgaaggtgttgaacgtactttccaactgtactctccgaccgtcgaaaaaatcgaagtcaaacgccgtggcgacgtacgccgtgccaaactgtactacctgcgcggtctgaccggcaaagctgcacgcatcaaagaaaaactgcctgcacgcaaaggttaa

SEQ ID NO: 66143 - DNA, 477 bp, Neisseria meningitidis; identical to SEQ ID NO: 53843

SEQ ID NO: 66144 - DNA, 237 bp, Neisseria meningitidis; identical to SEQ ID NO: 44060

SEQ ID NO: 66145 - DNA, 648 bp, Neisseria meningitidis
atggcttctaaatcatctaaaaccaacttggatctcaacaaccttcacctgctcaaccttcctgccaggctttttatcgccctgctggccgttgccgccgtgctggggctcggttatgccggattgttcaaaagccagatggaatcccttgaggaatacgaagcaaaagaaaccgaactgaaaaacacctacaaacagaaaagtatcgacgcggccagcctgaacaacctgagggacgaacttgcctcaatccgctctgccttcgatatcatgttgaaacagctgccgacagatgcagaaattcccaatttggttcaagagcttcatcaggcaggttcgagcaacggcctgcgcttggacagcgttatgccccaacctcccgtagatgacggccccatcaaaagattaccctattccatttccattaccggaaattacgaacagatcagccaatttacccgcgatgtcggcagcctctcccgaatcattacccttgagtcgctgaaaatcgcccaatctccggaaaacggcggcaatcctgacggcaagagcagcatcctgaacctcagcgccattgccaccacctaccaagcaaaatccgtagaagagcttgccgcagaagcggcacaaaatgccgagcaaaaataa

SEQ ID NO: 66146 - DNA, 2277 bp, Neisseria meningitidis; identical to SEQ ID NO: 50085

SEQ ID NO: 66147 - DNA, 618 bp, Neisseria meningitidis; identical to SEQ ID NO: 43961

SEQ ID NO: 66148 - DNA, 741 bp, Neisseria meningitidis; identical to SEQ ID NO: 42819

SEQ ID NO: 66149 - DNA, 1071 bp, Neisseria meningitidis; identical to SEQ ID NO: 42097

SEQ ID NO: 66150 - DNA, 714 bp, Neisseria meningitidis; identical to SEQ ID NO: 43936

SEQ ID NO: 66151 - DNA, 1407 bp, Neisseria meningitidis
atgaaactgttccaacgcatcttcgccacattttgcgcggttatcgtctgtgcaatctttgtggcgagtttttctttctggctggtgcagaacacccttgccgaaaaccagttcaaccaacgccgcaccatcgaaaccactttgatgggcagcatcatttccgcattccgggcacgcggggacgcgggcgcgcgcgaaatcctgacggaatggaaagacagccccgtctcatcgggcgtgtacgttatacagggcgacgagaaaaaagatatcctgaaccggtatatcgacagctataccatcgaacgcgcccggcttttcgccgccggacacccgcattccaacctcgtccatatcgaatacgaccgcttcggcgaagaatacctgttcttcaccaaagactgggacaaactccaagcccgccgcctgcccagccccctgttgatccccggcctgccgctcgccccgatttggcacgaactcatcatattgtccttcatcatcatcgtcggactgctgatggcatatatcctcgccggcaacattgccaaacccatcagaatcttaggcaacggcatggacagggtggcaaacggagaacttgaaacccgtatctcccaacaggtcgacgaccgcgacgacgaattgtcccatcttgccatccaattcgacaaaatggtggaaaaactcgaaaaactcgttgccaaagaacgccacctgctccatcacgtctcccatgaaatgcgttctccccttgcgcgcatgcaggcaattgtcggactgattcaggcgcagccccaaaaacaggagcaatatctcaaacggctggaaggcgaactgacccgcatggatacgctggccggggagctgttaaccctgtcccgtctcgaaacttccaatatggctttggaaaaagaaagcctgaaactcctgcccttcctgggcaacctggtagaagacaatcaaagcattgcccagaaaaacggacaaacggttaccctgtctgccgacggaaaaatccccgaaaacacaaccatccttgccaacgaaagctacctgtaccgcgccttcgacaacgtcatccgcaacgccgtcaactacagtcccgaaggcagcaccatcctgatcaacatcggacaagaccacaaacactggataatcgacgttaccgacaacggccccggcgtggacgaaatgcagctcccgcacatcttcaccgctttctaccgtgcagactccagtgccaacaaacctggaacaggactggggcttgcattgacccaacatattattgaacagcactgcggaaaaatcatcgccgaaaacatcaaaccgaacggtctgcggatgcgcttcatcctacccaagaaaaaaaccggttccaaaacagaaaaaagtgcgaactga

SEQ ID NO: 66152 - DNA, 372 bp, Neisseria meningitidis; identical to SEQ ID NO: 42581

SEQ ID NO: 66153 - DNA, 1056 bp, Neisseria meningitidis; identical to SEQ ID NO: 42642

SEQ ID NO: 66154 - DNA, 966 bp, Neisseria meningitidis; identical to SEQ ID NO: 42327

SEQ ID NO: 66155 - DNA, 1887 bp, Neisseria meningitidis
atgccgtctgaaaccgtttttcaagtaattgatatgaataaagaaacccgttttccggaacacttcgacatcccacttttcctcaaaaacctgcccaacctgccaggcgtataccgttttttcaacgaaagcggcaacgtcttatacgtcggcaaagccgtcaacctcaagcggcgcgtgtccggctatttccagaaaaacgaccattccccgcgcatcgcattgatggtgaaacaggttcaccacatcgaaaccaccatcacccgctccgaatccgaagccctgattctcgaaaacaacttcatcaaagccctgtcgcccaaatacaatattcttttccgcgatgacaaaagctatccttatttgatgctcagcggccatcaatatccgcaaatggcgtattaccgcggcacgctgaaaaagcctaatcaatatttcggcccatatcccaacagcaacgccgtgcgcgacagcattcaagtgttgcaaaaagtctttatgctgcgtacctgcgaagacagtgtattcgagcatcgcgaccgtccttgtctgctttaccaaatcaaacgctgcaccgcgccttgtgtaggccacatcagtgaagaagattatcgtgacagcgtgcgtgaagccgcgactttccttaatggcaaaactgacgaattgacgcgtaccctgcaacacaaaatgcaaaccgccgccgctaatctacaattcgaagaagccgcacgttaccgcgatcaaatccaagcgctcggcattatgcagagcaaccagttcatcgacagcaaaaacccgaacaaccccaacgatatcgatttgcttgcactggcggtttcagacggcctggtttgcgtacactgggtcagcatccgcggcggacggcacgtcggcgacaaaagctttttccccgacaccaaaaacgatcccgagccaaacggacaagattacgccgaagccttcgtcgcccaacactatctgggcaaaagcaaacccgacatcatcatcagcaactttcccgttcccgatgcgctaaaagaggctttggaaggcgaacacggcaagcagatgcaatttgtcaccaagaccataggcgaacgcaaagtccggttgaaaatggcggaacaaaacgcgcaaatggcgattgcacaacgccgcctgcaacaaagcagccagcaacaccgcattgatgaactggcaaaaatcctcggcatggattcagacggcctcaaccgccttgaatgtttcgacatcagccacacacaaggcgaagccactattgcgtcctgcgttgtgtacgatgagcaaaacatccagccttcgcaataccgccgctacaacatcacgaccgccaaacccggcgacgactacgccgccatgcgcgaagtgttgacgcgccgttacggcaaaatgcaggaggccgaagccaacggcgagaccgtcaaatggccggatgccgtgttgattgacggcggcaaagggcaaatcggcgtagccgtatcggtatgggaagaactcgggctgcacatccctttggtcggcattgccaaaggcccggagcgcaaagccggtatggaggagctcatactgccttttaccggcgaagtcttccgcctgccgcccaacagcccggccttgcatctattgcaaaccgtacgcgatgaatcgcaccgtttcgccattaccggtcaccgcaaaaaacgcgacaaagcccgcgttacctcctccttaagcgacatccccggcgtaggcagcaaacgccgccaagccctgctcacccgcttcggcggtctgcgcggcgtgattgccgccagccgcgaggacttggaaaaagtggaaggcatcagcaaggcattggcggaaacgatttacaatcatctgcattag

SEQ ID NO: 66156 - DNA, 531 bp, Neisseria meningitidis; identical to SEQ ID NO: 48015

SEQ ID NO: 66157 - DNA, 390 bp, Neisseria meningitidis; identical to SEQ ID NO: 45846

SEQ ID NO: 66158 - DNA, 222 bp, Neisseria meningitidis; identical to SEQ ID NO: 50201

SEQ ID NO: 66159 - DNA, 717 bp, Neisseria meningitidis
atgacagacaccgccgaaaaccaaacacaaaacaactggcaagccgaacatccccgcagcatccgcagcttcgtcctccgccaaagccatatgaccgccgcacagcaacgcgccatcgataccttatgggacagcttcggcatcgattaccaagcaacaccggccgatcttgatgccaatttcggaagcaaccgacccaaaatcctcgaaataggcttcggtatggggacggcaaccgcagaaatcgcccgccgcctgcccgaaaccgacttcctcgccatcgacgtacacggtcccggcgtaggcaatctgctcaaactcatcaacgaaaaccatttggaaaacatccgcgtgatgcggcacgatgccgtagaagttatcgaaaatatgctgcaagacggctcgctcgacggcatccacatattcttccccgacccgtggcacaaaaaacgccaccacaaacgccgtctgatacaagcccccttcatcgccaaactgctgcccaaactcaaaaccggcggctatatccacctggcgacagactgggaagaatatgcacggcagatgcttgaagtcctcagtagcttcgacagcctgcaaaatacggcggcagactacgcccccaccccggactaccgccccgaaaccaaattcgaagcgcgcggcaaacgcctcggacacggcgtttgggacttggtattcaaacggatcggataa

SEQ ID NO: 66160 - DNA, 1275 bp, Neisseria meningitidis; identical to SEQ ID NO: 51081

SEQ ID NO: 66161 - DNA, 198 bp, Neisseria meningitidis; identical to SEQ ID NO: 36305

SEQ ID NO: 66162 - DNA, 957 bp, Neisseria meningitidis; identical to SEQ ID NO: 51773

SEQ ID NO: 66163 - DNA, 129 bp, Neisseria meningitidis; identical to SEQ ID NO: 43085

SEQ ID NO: 66164 - DNA, 1470 bp, Neisseria meningitidis; identical to SEQ ID NO: 51727

SEQ ID NO: 66165 - DNA, 1581 bp, Neisseria meningitidis
atgtcttccatcaaacgctccctgatcagcctatccgacaagacaggcgcagtcgaatttgcccaaaccctgcacaaactcggtgtcgaaattctttctaccggcggtacagcaaaactcttggctgatgcaggcgttcccgttatcgaagttgccgactataccggttttcccgaaatgctcgacggccgcgtgaaaaccctgcatccgaaaatccacggcggtattctcggtcgtcgcgatttggacgaacacgtcgccaagatggaagaacacggcatcggcaatatcgacctcgtgtgcgtcaacctctaccccttcgctgccaccatcgccaaaccaaactgcacgctggaagacgcgattgaaaacatcgacatcggcggcccgaccatggtgcgctctgccgcgaaaaactggaaacacgtcgccatcgttaccgacaccgccgatttcccggccatagctgccgaactcgaagccaacaacggcgcattgagcgacaaaacccgtttcaacctctcgcgcaaagcattcagccataccgcccaatacgacggtatgatttccaattacctgacctcgctttcagacgacgtcttgagcggcacgcccgaaatcgccggattccccggccggttcaatcaaagctggattaaagtgcaagacatgcgctacggcgaaaacccgcatcagcgcgccgcgttctaccgcgatattgaccccgccgcaggcagcctcgctgcatacaaacaactgcaaggcaaagaattgtcttacaacaacatcgccgatgccgatgccgcatgggaagccgtcaaatccttcgacgtgcccgcctgcgtgattgtgaaacacgccaatccgtgcggcgtagccatcgcctccaataccttggatgcctacaaactcgcctacgccaccgacaccaccagcgcgttcggcggcatcatcgctttcaaccgcgaagttgacggcgcaaccgtcaaacaaattaccgacaaccagtttatggaagtcctcatggcgcctaagttcaccgccgaagccctcgaaatcgccgccgccaagaaaaacgtgcgcgtattggaagtgccgcttgaggcaggcgcaaaccgcttcgaactcaaacgcgtcggcggcggactgttggtgcaaacgcccgacatccaccgcatcagccgcgccgatttgaaagtcgtctccaaacgccaaccgaccgagcaggaatggaacgatttgctgttcgtctggaacgtcgccaaatacgtcaaatccaacgccatcgtattcggcaaaggcggtcaaacctacggcatcggcgcaggccaaatgagccgcgtggacagcacccgcatcgccgcccgcaaagcgcaagatgccggtctcgacctcaacggcgcgtgtgccgcatccgatgccttcttccccttccgcgacggcgtggacgtgattgccgaacagggcatcaaagccatcatccatccggcaggctcgatgcgcgatcaggaagttttcgacgcagccgacgaacacggcatcgccatggtcgtaaccggcatccgccatttccgccattga

SEQ ID NO: 66166 - DNA, 537 bp, Neisseria meningitidis; identical to SEQ ID NO: 43620

SEQ ID NO: 66167 - DNA, 2016 bp, Neisseria meningitidis
atgatgaaactcaatccccaacagctcgaagccgtccgttacctcggcggtcccctgctcgtcctcgccggcgctggcagcggcaaaaccggcgtgattacgcaaaaaatcaagtatttgattgtcaatgtcggctatctgccgcataccgttgccgcgattacctttaccaataaagccgccgcggaaatgcaggagcgcgtcgccaaaatgctgcccaagtcgcaaacgcgcgggctgacgatttgcacgttccattctttgggcatgaagattttgcgcgaagaggcgaaccatatcggttacaaaaaaaacttctccattctcgattctaccgacagcgcgaaaatcatcggcgaactcttaggcggtacgggcaaagaagccgtattcaaggcgcagcaccagatttccttgtggaaaaacgatttaaaaacgcctgaagatgtcgttcagacggcatcgaacatttgggaacaacaaaccgcacgcgtgtatgcgagctatcaggaaaccttacaaagctatcaggcagtggactttgacgacttaatccgcctgcctgccgtgctgttgcagcaaaacagcgaagtgcgccacaaatggcagcggcggctgcgttatctgctggttgacgaatgccaagatacgaatacctgccaatttacgttgatgaaacttctgaccggcgcggaaggtatgtttaccgccgtcggcgacgacgaccagtccatctacgcatggcgcggtgcgaacatggaaaacctgcgtaaaatgcaggaaaactatccgcagatgaaggtcatcaaactggagcaaaactaccgctccaccgcgcggattctcaaaatcgccaacaaagtcatcgaaaacaaccccaagctgtttaccaaaaaactttggtcgcaattgggcgaaggcgagccggtcaaagtcgttgcctgccaaaacgagcaacacgaagccgactgggtcgtcagccaaatcgtcaaacaaaaactcatcggcggcgacaaaacccaatatgccgatttcgccgtgttgtaccggggaaagcatcaggcgaggattttcgaggaagcattgcgcggcgcgcgcatcccctaccgtctctccggcggacaaagctttttcgacaaagccgaaatcaaagacgtgttgtcttatgtgcggctgcttgccaaccccaacgacgatcccgcctttctgcgtgccgttaccacgcccaaacgcggcatcggcgatgtaacgctgggcaagctcaacacttacgcgcacgaacacgaatgcagcctgtatgaagccgcgcaaaacgaagaagccctcgccacgctgaacaataccaaccgccaacacctgcaagcctttatggatatgttcggcagttaccgtgccaaagccgaaaccggcgaagcgggcgagttcatcaacagcctgctcgaagaaatcgactatgaaaaccacctgcttgccagtgaagaaggcaaagctggcgaaatcaaatggcgcaacgtcggcgatttggtatcatggtttgcgcgaaaaggcggggaagacggcaaaaacatcatcgaactcgcccaaaccgtcgccttgatgacgcttttggaaggaaaagacgaagaagaaaccgatgccgtctcgctatccacgctacacgccgccaaaggtttggagtatccgtatgttttccttgtcggttgcgaagaaggcgttttgccgcacaacgacagcatcgaagaaggcaacgtcgaagaagaacgccgcctgatgtacgtcggcatcacccgcgccaaacgccaactcacactgacccactgcgtcaaacgcaaaaaacaaggcacatggcagttccccgaacccagccgattcatagacgaaatgccgcaggaagatttgaaaatcctgggtcgcaaaggcggcgaaccgattgtcagcaaagaagaaggcagacgcaaccttgccgatataatcggaaggctcgacagcatgaaaaaaggcggtccggaggattaa

SEQ ID NO: 66168 - DNA, 2208 bp, Neisseria meningitidis
atgtttcccgaccaatccgcccccaacctgctgcaaggcttgaatcccgaacaactctccgccgtaacctggccgccgcaatccgcccttgtactggcgggcgcgggcagcggcaaaacgcgcgtgctgaccacgcgcatcgcatggctgttgcaaaccggtcaggcaagcgtgcacagcattatggcggtaacgtttaccaacaaagccgccaaagaaatgcagacccgtttgggcgcaatgattcccgtcaacgtccgcgccatgtggctcggcacgttccacggcctctgccaccgctttttgcgcctgcaccaccgcgacgcaggcctgccgtcttcctttcaaatcctcgacagcggcgaccagctttccctcatcaaacgcctgctcaaaagcctcaacatcgccgaagaaatcatcgcgccgcgttcgctgcaaggctttatcaacgcgcaaaaagaatccggtttgcgcgcttccgtgttgagcgcgcccgacccgcacacaagccgcatgatcgaatgctacgccgaatacgacaaaatctgccaacgcgaaggcgtggtcgatttcgccgagcttatgctccgcagctacgaaatgctgcaaagcaacgaaatcctgcgccagcattaccaaaaccgcttcaaccacattctcgtcgacgagttccaagacaccaacaaactgcaatacgcctggctcaaactcatggcgggcggaaacgcagcggtatttgccgtcggcgacgacgaccaaagcatttaccgtttccgtggcgcaaacgtcggcaacatgaccgcgctgatggaagaattccacatcgacgcgcccgtcaaactcgaacaaaactaccgctccgtcggcaacatccttgccgccgccaatgccgttatcgaaaacaacgacgaacgactcggcaaaaacctgcgcaccgacgccgaagcaggcgacaaaattcgctactactccgcctttaccgacctcgaagaagcccggttcatcgtggacgaaaccaaagccctcgaacgcgaaggctgggatttggacgaaatcgccgtcctctaccgtagcaacgcccaatcccgcgttatcgaacaaagcctgttccgcagcggcatcccctacaaaatctacggcggcttgcgcttttacgaacgccaagaaatcaaacacgccctcgcctacctgcgcctcgccgtcaatcccgacgacgacaacgccctcttgcgtgtcatcaacttcccaccgcgcggcatcggtgcacgtaccgtcgaaaatcttcagacggcatcgcaagagcaaggcgtttcactttggcaggcagcctgcaatgccggcgcaaaagccgccaaagtcgccgccttcgtccgcctcattgaagccctgcgcaaccaagtcggacaaatgcccctgcccgaaatcatcgccggcatcctcaaagacagtggcttgaccgaacactaccgcacccaaaaaggcgacaaccaagaccgcctcgacaaccttgacgaactcgtcaacgccgccatcgagttcaaacccgaagacagcaactttgaaaccctgcccgacaacatttcagacgaccccgccttccccatcctcgctttcttgagcaacgccgccctcgaatccggcgaaaaccaagcaggcgcaggcgaaaaagccgtccaactgatgaccgtccacgccgccaaaggcttggaattcaacgccgtcttcctcaccggcatggaagaaggccgcttccccagcgaaatgagccttgccgaacgcggcggcctcgaagaagaacgccgcctcatgtacgtcgccatcacccgcgcccgcaaacgcctctacatcaccatggcgcaacaacgcatgctgcacggacaaacccaattcggcatcgtctcccgcttcgtcgaagagatcccacccgaagtattgcactacctgtccgtcaaaaagaccgcctacgacagctacggcagcccgcgccaaaccgccgcatccaaagacaaaatcatcgacgactacaaacagccccaaacctacgcaggcttccgtatcggacaaaacgtccgccacgccaaattcggcaccggcgtgattatcgatgccgcagataaaggcgaatccgcccgactgaccatcaacttcggcaaacagggcgtgaaagagttggataccaagtttgcgaaattggaagcgatgtaa

SEQ ID NO: 66169 - DNA, 798 bp, Neisseria meningitidis
atggataccgcacaaaaacaacgctgggcaataaccctatcctatgacggcagccgcttttacggctggcagaaacaggctgacggcgtaccgaccgttcaggcggcattggaaaccgcgctcgcccaaatagcaggggaagcggtttccaccattgttgccggcaggaccgacaccggcgttcatgcgactgcccaagtcgttcattttgatactgccgccgcccgtccccaacaggcatgggtgcgcggcgtaaatgcccacctgcccgaaggcattgccgttttgcacgcccgacaggtcgcccccgaatttcatgcacgatttgacgcatacggacggcattaccgctacctgctcgaatccgtccccgtccgttcccccctgctcaaaaacagggcaggctggacacacctcaaactcgacatcgaaccgatgcgtcgggctgccgcctatttgatcggcgaacaagacttctccagcttccgcgccgccgaatgccaagcaaaatcccccgtcaaaaccatctaccgcgccgaccttacccaaagctcaggactcgtccgcctcgatttgcacggcaacgcctttttgcaccatatggtacgcaacatcatgggcgcgctcgtctatgtcggcagcggcagactcagcgtcgaaggcttcgccgcactgattcaagaacgcagccgcctcaaagccccgccgaccttcatgcccgacggactttacctgaccggcgtcgactatcccgaggcatacggcatcatccgcccccaaatccccgaatggctttaa

SEQ ID NO: 66170 - DNA, 3420 bp, Neisseria meningitidis; identical to SEQ ID NO: 51110

SEQ ID NO: 66171 - DNA, 402 bp, Neisseria meningitidis
atgcgtacaataaaatatcttgcaatggcgttattgcttatgtttacggttgccggctgtcagttggcgggttggtatccatgtccgtcgttgtccggctggtgtatgccgagaaaaccggctgccatcgatttttgggatattggcggcgagagtccgccgtctttagaggactacgagataccgctttcagacggcaatcgttccgttagggcaaacgaatatgaatccgcacaacaatcttacttttacaggaaaatagggaagtttgaagcctgcgggttggattggcgtacgcgtgacggcaaacctttgattgagacgttcaaacaggaaggttttgattgtttgaaaaagcaggggttgcggcgcaacggtctgtccgagtgtgtccgatggtaa

SEQ ID NO: 66172 - DNA, 423 bp, Neisseria meningitidis; identical to SEQ ID NO: 42719

SEQ ID NO: 66173 - DNA, 435 bp, Neisseria meningitidis; identical to SEQ ID NO: 43640

SEQ ID NO: 66174 - DNA, 441 bp, Neisseria meningitidis; identical to SEQ ID NO: 42980

SEQ ID NO: 66175 - DNA, 1134 bp, Neisseria meningitidis; identical to SEQ ID NO: 37868

SEQ ID NO: 66176 - DNA, 309 bp, Neisseria meningitidis; identical to SEQ ID NO: 64190

SEQ ID NO: 66177 - DNA, 387 bp, Neisseria meningitidis; identical to SEQ ID NO: 42223

SEQ ID NO: 66178 - DNA, 468 bp, Neisseria meningitidis; identical to SEQ ID NO: 42229

SEQ ID NO: 66179 - DNA, 534 bp, Neisseria meningitidis; identical to SEQ ID NO: 37691

SEQ ID NO: 66180 - DNA, 1248 bp, Neisseria meningitidis; identical to SEQ ID NO: 58931

SEQ ID NO: 66181 - DNA, 978 bp, Neisseria meningitidis
atgatttatccgtggcataatgagcaatggcggcagattgcggaacattgggagcgtcgtcccaatgcatggctgtttgccggcaaaaaagatacggggaaaactacatttgcccgctttgcggcgaaggcactgttgtgcgaaacccctgcaccgggctgcaaaccctgtggcgaatgtatgtcctgccatctgtttggacagggaagccatcccgatttttacgaaatcacccccttgtcggacgaacccgaaaacggacgcaaactgttgcagatcaaaatcgatgccgtcagggaaatcatcgataatgtgtacctgacttcggtacggggcggtttgcgcgtgattctgattcatcctgcggaaagtatgaatgtccaagccgccaacagtttgttgaaagtgttggaagagccgccgccacaagtggtctttttgctggtcagccacgcggcggacaaggttttaccgaccattaaaagccgctgccggaagatggttttgcccgctccttcgcatggggaagcattggcatatctgcgcgacaggggtgtggcggagccggaagaatttttggcgttccattcgggtgcgccgctgtttgatgaggcggacggtgtccgtgcgttgcggattaaactgttggatattttggcagaaccaaggttgttgaagattttggattacgccgcgcttttcgataaggagaaacttccgctcgacgtatttgtcgggtggatgcagaaatggctggtcgatttgggattgtgcctgcaacacatgaaacccgtctattatcccgcttatgaagacaggctgcttcagacggcatccggtttccgcccgcgcaatgtatttgcggcggaggatatgctcaaacagcttgccccttacgggtttcatactttaaatgtcaaaatgcagatcgagcatctgctcatcaattatttggaattgaagaaagagaacgggtga

SEQ ID NO: 66182 - DNA, 583 bp, Neisseria meningitidis
gtgggaatccagttttttgagtttcagtcattcccgataaattgccttagcattgaatgtctagattcccgcctgcgcgggaatgacgaatccatccgtacggaaacctgcaccacgtcattcccacgaacctgcaccacgtcattcccacgaacctgcatcccgtcattcccacgaacctgcatcccgtcattcccacgagcctgcatcccgtcattcccacgaacctgcatcccgtcattcccacgaacctgcatcccgtcattcccacgaacctgcatcccgtcattcccacgaacctgcatcccgtcattcccacgaacctgcatcccgtcattcccacgaacctgcatcccgtcattcccacgaacctgcatcccgtcattcccacgaaagtgggaatccagttcgttcggtttcgcttgttttaagtttcgggtaacttccacttcgtcattcccgcgaacctgcattccgtcattcccacgaaagtgggaatccagttcgttcggtttcgcttgttttaagtttcgggtaacttccacttcgtcattcccgcgcaggcgggaatccagtttcttga

SEQ ID NO: 66183 - DNA, 840 bp, Neisseria meningitidis
atgaaacaactccgcgacaacaaagcccaaggctctgcactgtttacccttgtgagcggtatcgttattgttattgcagtcctttatttcctgattaagctggcgggcagcggctcgttcggcgatgtcgatgccactacggaagcagcaacgcagacccgtatccagcccgtcggacaattgacgatgggcgacggcatccccgtcggcgaacgccaaggcgaacagattttcggcaaaatctgtatccaatgccacgcggcggacagcaatgtgccgaacgctccgaaactggaacacaacggcgattgggcaccgcgtatcgcgcaaggcttcgataccttgttccaacacgcgctgaacggctttaacgccatgcctgccaaaggcggtgcggcagacctgaccgatcaggaactcaaacgggcgattacttacatggcgaacaaaagcggcggttctttcccgaatcctgatgaggctgcgcctgccgacaatgccgcttcaggaacagcttctgctcctgccgatggtgcagctccggcagaagcgaaggcagaagacaagggtgcggcagcccctgcggtcggcgttgacggtaaaaaagtcttcgaagcaacctgtcaggtgtgccacggcggttcgattcccggtattcccggcataggcaaaaaagacgattgggcaccgcgtatcaaaaaaggcaaagaaaccttgcacaaacacgcccttgaaggctttaacgcgatgccggccaaaggcggcaatgcaggtttgagcgatgacgaagtcaaagcggctgttaactatatggcaaaccaatccggtgcaaaattctaa

SEQ ID NO: 66184 - DNA, 384 bp, Neisseria meningitidis; identical to SEQ ID NO: 58922

SEQ ID NO: 66185 - DNA, 873 bp, Neisseria meningitidis
gtgggcatcaatgccaatcctaactgtgctgatgaagcaggaaaactgatatgggaaaacgaccccaataaaaattggtgggctaaccgtatggatgatattcgcggcatcgtccaaggtgcggttaatccttttttaatgggttttcaaggagtagggattggggcaattacagacagtgcagtaagcccggtcacagatacagccgcgcagcagactctacaaggtattaatcatttaggaaatttaagtcccgaagcacaacttgcggctgcaaccgcattacaagacagtgcttttgcggtaaaagacggtatcaattccgccagacaatgggctgatgcccatccgaatataactgcaacagcccaaactgcccttgccgtagcagaggccgcaggtacggtttggcgcggtaaaaaagtaaaccttaacccgaccaagtgggattgggttaaaaataccggctataaaacacctgctgcccgacctatgcagactttagatggggagatggcaggggggaatagaccgcctaaatctataacgtccaacagcaaagcagatgcttccacacaaccgtctttacaagcgcaactaattggagaacaaattagtagtgggcatgcttataacaagcatgtcataagacaacaagaatttacggatttaaatatcaattcaccagcagattttgctcggcatattgaaaatattgttagccatccaacaaatatgaaagagttacctcgcggtagaactgcgtattgggatgataaaacagggacaatagttatccgagataaaaattctgacgatggaggtacagcatttagaccaacatcaggtaaaaaatattatgatgatttatag

SEQ ID NO: 66186 - DNA, 216 bp, Neisseria meningitidis
atgaaagaatacaaagtcgtcatttatcaggaaagccagttgtccagcctgtttttcggcgcggcaaaggtcaaccccgtcaatttcagcgcgttcctcaacaaacaaacccccgaaggctggcgggttgtaacgatggaaaaagatttgcgccgtatgctgctgtttttcaaacgcgaggcctacgtcgtcattttggagcgggatcgtgtttaa

SEQ ID NO: 66187 - DNA, 630 bp, Neisseria meningitidis
ttggtcaaaacggcagacggctacaaagctattgcccgtatccgagccggcgagagcgtcctctccaaggacgaggcaagcggaaaaatgggatacaaacccgttaccgcccgatacggcaatccgtatgaagaaaccgtttacattaaagtttcagacggcatcggcaacagccaaaccctgatttccaaccgcatccactcgttttattcgggcggcaaatggattaagacggaagatttgaaagcgggaatcaggctgttatccgaaagcggcaaaacccaaaccgtccgcaacatcgttgtcaaaccaaaaccgctcaaagcctacaatctgaccgttgctgactggcatacctacttcgtcaagggcagtcaggcggaaacggaaggggtttgggttcataatgcgtgtccgcctaaaagaacaggaagctccaagaatgaaaaacatggagatggcggtcgaagtcaaatatcagcagaatcacgaattgctgaattaaaaaataaaattattcccggaatgcacaaaaatgaacgattaaagattgagaaaacaatcagaaatattgcaaaaaatgccaatcgaaaagcaaaaggagaagagcatggtcgacacggtcgttaa

SEQ ID NO: 66188 - DNA, 402 bp, Neisseria meningitidis
atgcagcaacatattgaaaaatggcaacacttgagccgggaagaacagaaaatccttgccgaagtatggggtctcgtgcaaaacgacgatcaggaggttcactatgaaatgctcaaattgaacgcacccgacgaagccagtggcgaattttggttcagaatggcagaaacactcagcaccctgccgcccaaccgttccctcgaccttagaatgaacggcggcaggctggcgaccgccgtatccatcctttccgtcatgattgaagacaatcccgacataccgcagctttgggcgcaaaaaattaccgcgctcaattatagtggattaaatttaaaccagtacggcgttgcctcgccttgtcgtactatctgtactgtctgcggcttcgtcgccttgtcctga

SEQ ID NO: 66189 - DNA, 651 bp, Neisseria meningitidis; identical to SEQ ID NO: 51339

SEQ ID NO: 66190 - DNA, 375 bp, Neisseria meningitidis; identical to SEQ ID NO: 38650

SEQ ID NO: 66191 - DNA, 1053 bp, Neisseria meningitidis; identical to SEQ ID NO: 58317

SEQ ID NO: 66192 - DNA, 363 bp, Neisseria meningitidis; identical to SEQ ID NO: 43119

SEQ ID NO: 66193 - DNA, 855 bp, Neisseria meningitidis
atgaaaatcgtcctgattagcgggttgtccggttcgggcaaatccgtcgcactgcgccaaatggaagattcgggttatttctgcgtggacaatttgcctttggaaatgttgcccgcgctggtgtcgtatcatatcgagcgtgcggacgaaaccgaattggcggtcagcgtcgatgtgcgttccggcatagacatcggacaggcgcgggaacagattgcctctctgcgcggactggggcacagggttgaagttttgtttgtcgaggcggaagaaagcgtgttggtccgccggttttccgaaaccaggcgaggccaccctctgagtaatcaggatatgaccttgttggaaagcttaaagaaagaacgggaatggctgttcccgcttaaagaaatcgcctattgtatcgacacttccaagatgaatgcccaacagctccgccatgcagtccggcagtggctgaaggtcgaacgtaccgggctgctggtgattttggagtccttcgggttcaaatacggtgtgccgaacaacgcggattttatgttcgatatgcgcagtctgcccaacccgtattacgatcccgagttgaggccttacaccggtatggacaagcccgtttgggattatttggacggacagccgcttgtgcaggaaatggttgacgacatcgaaagatttgttacgcattggttaccgcgtttggaggatgaaagcaggagctacgttaccgtcgccatcggttgcacgggaggacagcaccgttcggtctatattgtcgaaaaactcgcccgaaggttgaaagggcgttatgaattgctgatacggcacagacaggcgcaaaacctgtcagaccgctaa

SEQ ID NO: 66194 - DNA, 354 bp, Neisseria meningitidis
atgaagcagattatcatcctacaatccgccgtattgtccatatgcgccgcagttgcctttgctgtatggggttttgccggattcctttcggcggtcggtggcggtttgtcctacctgcttcccacgtttgttgcagttttacttttaaaacttttcaggggaaaccctttcctgcaaagcaggatgttcgtcttcggagagattttaaaagtagtgctgtcgctgttgtccatgctcgccgtatttgcaatatggcatcaatcgctggtgttcgccccgtttctgatggggctgctcggtgtcagccatttggtttttttagtattgttgagagtgaaagattatggcaggtga

SEQ ID NO: 66195 - DNA, 345 bp, Neisseria meningitidis; identical to SEQ ID NO: 36231

SEQ ID NO: 66196 - DNA, 924 bp, Neisseria meningitidis
atgaatacaggcaaaccccaaaaacgtgccgtcaacggtgttttgctcttggacaaacccgaaggcctttccagcaacaccgcgctgcaaaaagcgcggcgtttgtttcatgccgaaaaagccggacataccggcgtgctcgaccctttggcaaccggacttttgcccgtctgcttcggtgaagcgaccaagttcgcgcaatacctgctggatgccgacaaagcctacaccgccacgctgaaactcggcgaagccagcagcacgggtgatgccgaaggcgaaatcattgccaccgcccgcgccgatatttccttagccgaatttcagacggcctgccaagcactgacaggcaacatccgccaagtgccgccaatgttttccgcgctcaagcacgaaggcaaaccgctgtacgaatacgcccgcaaaggcatcgtcatcgaacgcaaagcgcgctacattaccgtttacgccatcgatattgccgaatttgacgcgcccaaagccgtcatcgacgtacgttgcagcaaaggcacctacatccgcaccctcagcgaagacatcgccaaacacatcggcacgttcgcccacctgaccgccctgcgccgcactgaaaccgccggctttaccatcgcccaaagccacacgcttgaggccttggcaaatttgaacgaaacagaacgcgacagcttgctgctaccctgcgacgtattggtttcacactttccccaaaccgttttaaacgattatgccgtccatatgctccactgcggacaacgtccgcgtttcgaagaagacctgccttccgacacgccggtacgcgtttacacggaaaacggccgctttgtcggtctggcggaatatcaaaaagaaatatgccgtctgaaagccttgcgcctgatgaacacggcggcatccgccgcctga

SEQ ID NO: 66197 - DNA, 435 bp, Neisseria meningitidis
atggaaaaattcaacaatattgcacaactgaaagacagcggtctgaaggttaccggcccgcgtttgaagattttggatttgttcgagacgcatgcggaagagcatttgagtgcggaagatgtgtaccgcattttgttggaagagggtgtggaaatcggtgtggcgacgatttaccgtgtgctgacccagtttgagcaggcgggcattttgcaacgccaccattttgaaacgggcaaggcggtttatgagttggacaagggcgaccaccacgaccatatcgtctgcgtgaagtgcggcgaggtaacggagttccacaatcccgaaatcgaagccctgcaagacaaaatcgccgaggaaaacggctaccgcatcgtcgatcacgcgctgtatatgtacggcgtgtgcagcgactgtcaggccaagggcaaacgttaa

SEQ ID NO: 66198 - DNA, 312 bp, Neisseria meningitidis; identical to SEQ ID NO: 39965

SEQ ID NO: 66199 - DNA, 918 bp, Neisseria meningitidis; identical to SEQ ID NO: 51420

SEQ ID NO: 66200 - DNA, 216 bp, Neisseria meningitidis; identical to SEQ ID NO: 37963

SEQ ID NO: 66201 - DNA, 396 bp, Neisseria meningitidis; identical to SEQ ID NO: 43898

SEQ ID NO: 66202 - DNA, 2055 bp, Neisseria meningitidis
atgacacgcaaaatcctcgttacctccgccctgccctatgccaacggcagcatccacctcggccacatggtcgaacacatccaaaccgacgtttgggtgcgctttcaaaaactgcgcggcaacgaatgccactactgctgcgccgacgacacccacggcacgcccgtgatgcttgccgcgcaaaaacaaggcatcgcgcccgaagacatgattgccaaagtgcgcgaagagcacctcgccgactttactggctttttcatcggttacgacaattattacagcacccattcccctgaaaacaaacagttttcccaagacatttaccgcgcgctgaaagccaacggcaagattgagagccgcgtcatcgagcagcttttcgaccccgaaaaacaaatgttcctgcccgaccgcttcgttaaaggcgaatgcccgaaatgccacgcccaagaccaatacggcgacaactgcgaagtctgcggcacgacctattccccgaccgaactgattaacccgtattccgccgtttccggcgcgaaacccgaattgcgcgaatccgaacacttcttcttcaaactgggagaatgcgccgacttcctcaaagcatggacttccggcaacaacccgcacgacggcaagccccatctgcaagccgaagccctcaacaaaatgaaagaatggctgggcgaaggtgaagaaaccaccctgtccgactgggatatttcccgcgacgcgccgtatttcggttttgaaatccccgacgcgccgggcaaatacttctacgtctggctggacgcgcccgtcggctacatggcgtcgtttaaaaacctgtgcgaccgcatcggcgtcgatttcgacgaatacttcaaagccggcagccaaaccgagatgtaccacttcatcggcaaagacatcctctatttccacgccctgttctggcccgctatgctgcatttctccggccaccgcgccccgaccggcgtgtacgcacacggcttcctaaccgtcgacggacaaaaaatgtccaaatcgcgcggcacgtttattaccgccaaatcctatctggaacaaggtttaaaccccgagtggatgcgctactacatcgccgccaaactcaacagcaaaatcgaagacatcgatttgaacctgcaagactttatttcgcgcgtaaacagcgacctcgtcggcaaatacgtcaacatcgccgcccgcgcctcaggtttcatcgccaaacgctttgaaggccgtctgaaagacgtcgccgacagcgcattattggcaaaactgaccgcacaaagcgaagccattgccgaatgctacgaaagccgcgaatacgccaaagccctgcgcgacatcatggccttggcggacattgtcaacgaatacgttgatgccaacaaaccttgggaactcgccaaacaagaaggccaagacgcacgcctgcacgaagtatgcagcgagctcatcaacgccttcaccatgttgaccgcctacctcgcccccgtgttgccgcaaaccgccgccaacgccgcgcgtttcctcaatctggacgcgattacttgggcgaacacaagggtaaccttgggcgaacacgccatcaacaaatacgaacatttaatgcaacgagtggagcaaaaacaagtggacgatttaatcgaagccaacaaacaaagtattcagacaacccccgcgcctgttgaagacagcaaatacgaaaaagtcgccgaacaggcgggtttcgacgactttatgaaaatcgatatgcgcgtcgccaaagtattgaactgcgaagccgtcgaaggcagcaccaaactcctgaaattcgacctcgatttcggttttgaaaaacgtatcatcttctccggcatcgccgcgttttaccccaaccctgccgagttaaacggaagaatggtcattgccgtcgccaacttcgccccgcgcaaaatggcgaaattcggcgtatccgaaggcatgattttgagtgccgccacggcagacgggaaactgaaactgcttgatgtcgacgcaggcgcgcaaccgggcgacaaagtcggttaa

SEQ ID NO: 66203 - DNA, 318 bp, Neisseria meningitidis; identical to SEQ ID NO: 41968

SEQ ID NO: 66204 - DNA, 744 bp, Neisseria meningitidis; identical to SEQ ID NO: 51955

SEQ ID NO: 66205 - DNA, 981 bp, Neisseria meningitidis
atggcaatggcagaaaacggaaaatatctcgactgggcgcgcgaagtgttgcacaccgaagcggaaggcttgcgcgaaattgcagcggaattggacgaaaacttcgtccttgcggcagacgcgttgttgcactgcaagggcagggttgttatcacgggcatgggcaagtcgggacatatcgggcgcaaaatggcggcaaccatggcctcgaccggtacgcccgcgtttttcgtccaccctgcggaagcggcacacggcgatttgggcatgattgtggacaacgacgtggtcgtcgcgatttccaattccggcgaaagcgacgaaatcgccgccatcatccccgcgctcaaacgcaaagacatcacgcttgtctgcatcaccgcccgccccgattcaaccatggcgcgccatgccgacatccacatcacggcatcggtttccaaagaagcctgcccgctggggcttgccccgaccaccagcaccaccgccgtcatggctttgggcgatgcgttggcggtcgtcctgctgcgcgcacgcgcgttcacgcccgacgatttcgccttgagccatcctgccggcagcctcggcaaacgcctacttttgcgcgttgccgacattatgcacaaaggcggcggcctgcctgccgtccgactcggcacgcccttgaaagaagccatcgtcagcatgagtgaaaaagggctgggcatgttggcggtaacggacgggcaaggccgtctgaaaggcgtattcaccgacggcgatttgcgccgcctgtttcaagaatgcgacaattttaccggtctttcgatagacgaagtcatgcatacgcatcctaaaaccatctccgccgaacgtctcgccaccgaagccctgaaagtcatgcaggcaaaccatgtgaacgggcttctggttaccgatgcagatggcgtgctgatcggcgcgctgaatatgcacgacctgctggcggcacggattgtataa

SEQ ID NO: 66206 - DNA, 375 bp, Neisseria meningitidis; identical to SEQ ID NO: 39975

SEQ ID NO: 66207 - DNA, 300 bp, Neisseria meningitidis
atgaagaaaatgttcgtgctgttctgtatgctgttctcctgcgccttctcccttgcggcggtaaacatcaatgcggcttcgcagcaggagttggaggcgctgccgggcataggcccggcgaaggcgaaggccattgcggaataccgtgcgcaaaacggtgcgttcaagtctgtagacgatttgaccaaggtaaagggcatcggccctgcggtgctggcgaagctgaaggaccaggcttcggtcggcgcgcccgcaccaaaaggcccagctaaaccggtgctgcccgcggataaaaaataa

SEQ ID NO: 66208 - DNA, 306 bp, Neisseria meningitidis
atgaagaaaatgttcgtgctgttctgtatgctgttctcctgcgccttctcccttgcggcggtaaacatcaatgcggcttcgcagcaggagttggaggcgctgccgggcataggcccggcgaaggcgaaggcgaaggccattgcggaataccgtgcgcaaaacggtgcgttcaagtctgtagacgatttgaccaaggtaaagggcatcggccctgcggtgctggcgaagctgaaggaccaggcttcggtcggcgcgcccgcaccaaaaggcccagctaaaccggtgctgcccgcagtgaaaaaatag

SEQ ID NO: 66209 - DNA, 867 bp, Neisseria meningitidis
atgaaaggcatcatactggcaggcggcagcggcacgcgcctctaccccatcacgcgcggcgtatccaaacagctcctgcccgtgtacgacaaaccgatgatttattaccccttgtcggttttgatgctggcgggaatccgcgatattttggtgattaccgcgcctgaagacaacgcctctttcaaacgcctgcttggcgacggcagcgatttcggcatttccatcagttatgccgtgcaacccagtccggacggcttggcacaggcatttatcatcggcgaagaatttatcggcaacgacaatgtttgcttggttttgggcgacaatattttttacggtcagtcgtttacgcaaacattgaaacaggcggcagcgcaaacgcacggcgcaaccgtgtttgcttatcaggtcaaaaaccccgaacgtttcggcgtggttgaatttaacgaaaacttccgcgccgtttccatcgaagaaaaaccgcaacggcccaaatccgattgggcggtaaccggcttgtatttctacgacaaccgcgccgtcgagttcgccaaacagctcaaaccgtccgcacgcggcgaattggaaattaccgacctcaaccggatgtatttggaagacggctcgctctccgttcaaatattgggacgcggtttcgcgtggctggacaccggcacccacgagagcctgcacgaagccgcttcattcgtccaaaccgtgcaaaacatccaaaacctgcacatcgcctgcctggaagaaatcgcttggcgcaacggttggctttccgatgaaaaactggaagaattggcgcgcccgatggcgaaaaaccaatacggccaatatttgctgcgcctgttgaaaaaataa

SEQ ID NO: 66210 - DNA, 2274 bp, Neisseria meningitidis; identical to SEQ ID NO: 37870

SEQ ID NO: 66211 - DNA, 558 bp, Neisseria meningitidis
atgatgcaaaaacacaaatgtctaatagattttattttgactgttgccagccaaattgcttatgctgacttacctttaagtttggaagaattattgactgacaagggtaaattcaaactagaaagcagtattagctacatcaacactgaacgcaatcaaagcgaatttgctaatcctatttatgtgcaaaccagcgcaacgaaaattgcaactgtaatggctatgatgattacacctgtaatggcgcaaaatttagacagccaagtttttgacagccaaaatgtgaaagcaattcaattatcacaggctgaaatgaaagaaacacaaggtgaatttgttcccattattgcagccgctgcttttggcggtgcattaggtgcatgggggtatcatggtgctaatttgtataatcatggtaaattaggaactgcgcaaggcgcggctactgcgacaggaatcggtgcggcaacaggagtagcggcaaaacagggctggctgctgctaccggaggcggattggctgggaatttggcatggagaccgggtattcatgcactag

SEQ ID NO: 66212 - DNA, 927 bp, Neisseria meningitidis
atgaaagtcatcttcgccggcacgcccgattttgccgccgccgccttaagagccgttgccgccgccggttttgaaatcccgctggtgctgacccagcccgaccgtccgaaagggcgcggtatgcaactgactgccccgcccgtcaaacaagccgcgctggaactcggtttgcgcgtggcacagcccgaaaaactgcgtaacaacgccgaagccctgcaaatgctcaaagaggtcgaggcagacgtaatggtggttgccgcctacggtttgattctgccgcaggaagtgttggatacgccgaaacacggctgcctcaacatccacgcttcgctgttaccccgttggcgcggcgcggcgccgattcaacgcgcgattgaagccggcgatgccgagacgggcgtgtgcatcatgcagatggacatcggtttggacaccggcgatgtggtcagcgaacaccgttacgccattcaatcgaccgatacggcgaatgaagtacacgacgcgctgatgaacctcggtgcggcggcggttgttgccgatttgcaacagcttcaaagcaaaggccgtctgaacgcggtcaaacagcccgaagaaggtgttacttacgcccaaaaactaagcaaagaagaagcgcgtatcgattggagcgaaagcgcggcggttatcgaacgcaaaatccgcgccttcaaccccgtgcctgccgcgtgggttgagtatcagggcaagccgatgaaaatccggcgtgccgaagtggtggcgcaacaaggcgcggcaggcgaagtgttgtcctgttcggcggacggtttggtcgttgcctgcggcgaaaacgcgctgaagattaccgaattgcagcctgccggcggcaggcgtatgaatatcgcggcgtttgcagcaggacggcatatcgaagcagggacgaagctgtaa

SEQ ID NO: 66213 - DNA, 321 bp, Neisseria meningitidis; identical to SEQ ID NO: 43935

SEQ ID NO: 66214 - DNA, 501 bp, Neisseria meningitidis; identical to SEQ ID NO: 39468

SEQ ID NO: 66215 - DNA, 558 bp, Neisseria meningitidis; identical to SEQ ID NO: 45261

SEQ ID NO: 66216 - DNA, 873 bp, Neisseria meningitidis
atggaaatatggaatatgttggacacttggctcggtgccgtcccgatacgtgcggaggcggtcgaatccgtggcggcggttgcggctttgctgctggcgcgcgcccttctgttgaatatccacttcaaacggcatccggatttcggcatcgaaagcaagcggcggtttttggttgccagccgcaatataacgctgcttttggtgctgttttcgctggcatttatctggtcggcgcaaatccaaacgctggctttgtcgatgtttgcggtggcggcggcggtcgtcgtggcgacaaaggaactgattatgtgtctgtcgggcagtattttaaggtctgccacccagcaatactcggtcggcgactatatcgaaatcaacggcctgcgcgggcgcgtggtcgacatcaacctgttgaacacgctgatgatgcaggtcggtccgaaccccctggtcggacagcttgcgggaaccaccgtttctttccccaacagcctgttgttgagccatcccgtgcgccgcgacaatattttgggcgactacgtcatccatacggtcgaaatccccgtccccatccatttggattcggatgaagccgtatgccgtctgaaagccgtactcgagcccttgtgcgcgccctacatccccgccatccagcggcatttggaaaacgtgcaggcggaaaaactgtttatcacgcccgccgccagaccgcgcgttacccgcgtgccgtacgatgacaaggcataccgcatcatcgtccgcttcgcctcccccgtttcaaagcggctggaaatccaacaggcggttatggacgaatttttgcgcgtacaataccgcctgttaaatcaccccgccggctccgaaacactttaa

SEQ ID NO: 66217 - DNA, 1452 bp, Neisseria meningitidis; identical to SEQ ID NO: 45985

SEQ ID NO: 66218 - DNA, 2025 bp, Neisseria meningitidis
atgaacgatatgactttatatttgataattgcccttgttccgttggcaggctcgctgattgcgggtttgttcggcaacaaaatcggccgcgccggcgcgcatacggttacgatactcggcgtggcggtgtccgccgtgctgtcggcttatgtgttgtggggctttattgacggcagccgcgccaagtttgacgagaacgtctatacctggctgacaatgggcggtttggatttctccgtcggcttcttggtcgatacgatgacggcgatgatgatggtcgtggtaacgggcgtgtcgttgatggtgcatatctacaccatcggctatatgcacgatgaaaaagtcggctaccaacgcttcttcagctatatttctttgtttactttcagcatgttgatgctgattatgagcaacaacttcatccagctcttcttcggttgggaagcggtgggcttggtgtcgtatctcttgatcggtttctatttcaaacgtccgagcgcgacatttgccaacctgaaagcctttttgatcaaccgtgtcggcgacttcggctttttgctcggtatcggcttggtgcttgcctatttcggcggcagcctgcgctatcaagatgtattcgcttatctgcctaatgttcagacggccaccattcaattgttccccagtgtggaatggtctttgattactgtaacctgtttgctcctgtttgtcggtgcgatgggtaaatcggcacaattcccgctgcacgtctggctgcctgattcgatggaaggcccgaccccgatttctgcattgattcacgccgcaaccatggttaccgccggtctgttcatggtatcgcgtatgtcgccgatttatgagatgagcagcactgcgctgtctgtcatcatggtaatcggtgcgattaccgccctgtttatgggtttcttgggcgtgattcaaaacgacatcaagcgcgtggttgcgtattccaccctgtcgcaactgggctatatgaccgtggctttgggcgcgtccgcctattccgtggcgatgttccatgtgatgacccacgccttctttaaagccttgctgttcttggcggcaggtagcgcgattatcggtatgcaccacgaccaagatatgcgccatatgggcaacctgaaaaaatatatgccggttacttggctgactatgctgatcggcaatttgtcgctgatcggtacgccgttcttctccggcttctattctaaagattcgattatcgaagcagcgaaatacagcaccctgccgggcagcggctttgcttattttgccgtccttgccagtgtgttcgttaccgcgttttacgcgttccgccaatactttatggtgttccacggcgaagaaaaatggcgcagcctgcccgaacaccattcagacggccatggtgaagaacatcacggcttgggtaaaaacgacaatccgcacgaaagcccgctggtcgttaccctgcctttgattttgcttgccattccgtccgtcatcatcggctatgttgccatcgggcctatgctttacggcgatttcttcaaagatgtgattttcgtcaacgccgacgcgcatccgactatgcacatcatgaaggaagagttccacggcgcattggcaatggtgtctcacagcctgcattcgcctgtactctaccttgctatcgcaggcgtgttgagcgcatggcttttgtacgtcaaactgccgcacatgccagcgaaaattgcacagacgttccgtccgatttacgttttgtttgaaaacaaatactacctcgacgccctgtatttcaacgtcttcgccaaaggcacacgcgcattgggtaccttcttctggaaagtcggcgataccgccattatcgacaacggtattgtcaacggctctgccaaactggtcggcgcgattgccgcgcaagtgcgtaaagcccaaaccggctttatctacacttacgctgccgctatggtattcggcgtattggtactgctcggcatgaccttctggggattgttcagataa

SEQ ID NO: 66219 - DNA, 1164 bp, Neisseria meningitidis
atgatgaaaatcaaagccctgatgattgccgccgcattgctggcagcagccgatgtccacgccgcaccgcaaaaggcaaaaaccgcatccgccaaagctgccaaagctgccaaagctgccaaagctgccaaagctgccaaagttgccaaagttgccaaagttgccaaagttgccaaagttgccaaagttgccaaagttgccaaagttgccaaagttgccaaagttgccaaagttgccaaagttgccaaagttgccaaagttgccaaagttgccgccacggcgcaaaaagaagccgcacccgcacaacagcagggcggtatccgcttttcagacggcattgccgccgttgccgacaacgaagtcatcacgcgccgccggcttgccgaagccgttgccgaagccaaagccaacctgcccaaagacgcgcagataagcgaatccgagctgtcccgacaggtgctgatgcagcttgtcaaccaatccctgattgtacaggcgggcaaacgccgcaacattcaagcaagcgaagcggaaatcgatgccgtcgtcgcaaaaaatcccgccctcaaaaacctcagccccgcccaacgccgcgattttgccgacaacatcattgccgaaaaagtccgccagcaggcagtgatgcagaacagccgagtgagcgaagctgaaatcgatgccttcctcgagcaggcgcaaaaacaaggcatcaccctgcccgaaggcgcaccgttgcgccaataccgcgcccaacacatcctgattaaagccgacagcgaaaacgccgccgtcggcgcggaaagcaccatccgcaaaatctacggagaggcccgcagcggcacagacttttccagcctagcgcgccaatattcgcaagacgcgagcgcgggcaacggcggagatttgggctggtttgccgacggcgtgatggttcccgcctttgaagaagccgtccacgcgctcaaacccggacaggtcggcgcgcccgtccgcacccaattcggctggcatatcatcaaattgaacgaagtgcgcgatgccggcacacctcaggaacgtatccgcaattccgtgcggcaatacatcttccaacaaaaagccgaacaggcaaccgtcaacctgttgcgtgacctgcattccggcgcgtatgtcgacatccgctaa

SEQ ID NO: 66220 - DNA, 2379 bp, Neisseria meningitidis; identical to SEQ ID NO: 41982

SEQ ID NO: 66221 - DNA, 195 bp, Neisseria meningitidis; identical to SEQ ID NO: 40091

SEQ ID NO: 66222 - DNA, 1422 bp, Neisseria meningitidis
atgaccaccatctacaacacccttacccgccaaaaagaaccctttgcccccatcgaccctgaaaacgtgcgtatgtacgtttgcggcatgaccgtttacgactattgccacttaggccatgcccgtgtgatggttgtgttcgacatgattgcccgttggttgcgcgagtgcggctatccgctcacttatgtacgcaacatcaccgacatcgacgataaaatcattgcccgtgcggctgaaaacggcgagactatcggcgaactgaccgcgcgtttcattcaggctatgcacgaagatgccgatgctttgggtgtgttgcgtcccgatatcgagccgaaggcgacggaaaacatcccgcaaatgattgccatgattgaaaccctgattcaaaacggcaaggcatatcctgccgcaaatggcgacgtttactacgccgtgcgcgagtttgccgcttacggacaactgtcgggcaaatcgttggacgacctgcgcgcgggcgaacgcgtggaagtggacggtttcaaacgcgatccgcttgattttgtattgtggaaagcggcgaaagcaggcgaaccggcgtgggaaagcccgtggggcaacggccgtccgggttggcacattgaatgctctgccatgagtgaaaacctgttcggcgatacgttcgacattcacggcggcggcgcggatttgcagttccctcatcatgaaaatgaaatcgcccaaagcgtcggcgcgacggggcatacctgcggtcatcatcacgcgcaaacccaccacgggcaaagcatcgccagccacgtcaaatactggctgcacaacggcttcatccgcgtggatggcgaaaaaatgtcgaaatcgctgggcaacttcttcaccatccgcgaagtattgaaacaatacgaccctgaagttgtgcgtttcttcatcctgcgcgcccactaccgcagcccgttgaactattccgacgcgcatttggacgacgcgaaaggcgcgttgacccgtctatacaccaccttgaaaaacacgcctgccgccgcgtttgatttgtctgaaaacgccaacgactacacccgccgcttctacgccgccatgaacgacgatttcggtacggttgaagcggttgccgtgttgtttgagctggcaggcgaagtgaacaaaaccaatgacgcacagctcgccggctgcctgaaagccttgggcggcatcatcggactgctgcaacgcgacccgaccgagttcctgcaaggcggcgcggcttcagacggcctctccaacgaagaaatcgaagacttgatcgcccggcggaaacaggcgcgcgccgataaaaactgggcggaatccgaccgcatccgcgaccttctgaacgaacacaaaatcattttggaagacaacgccggcggcacgacttggcggcgcggttaa

SEQ ID NO: 66223 - DNA, 1395 bp, Neisseria meningitidis; identical to SEQ ID NO: 52008

SEQ ID NO: 66224 - DNA, 300 bp, Neisseria meningitidis; identical to SEQ ID NO: 52011

SEQ ID NO: 66225 - DNA, 867 bp, Neisseria meningitidis; identical to SEQ ID NO: 66209

SEQ ID NO: 66226 - DNA, 951 bp, Neisseria meningitidis; identical to SEQ ID NO: 50204

SEQ ID NO: 66227 - DNA, 1449 bp, Neisseria meningitidis; identical to SEQ ID NO: 52013

SEQ ID NO: 66228 - DNA, 291 bp, Neisseria meningitidis; identical to SEQ ID NO: 37933

SEQ ID NO: 66229 - DNA, 1878 bp, Neisseria meningitidis
atgagccaagccttaccctaccgcccggacatcgacacattgcgcgccgccgccgtcttgtccgtcatcgtgttccatatcgaaaaggattggctgccgggcgggtttctcggtgtcgatatattctttgtgatttcaggctttttgatgacgacgattcttcaccgcgaaatgtcggggggggggaggttttccctgaaggcattttatatccgccgcatcaagcggattctgcccgcatttttcgccgtattggcggcaacgctggcaggcggcttctttttattcaccaaagatgatttctttcttttgtggaaatccgcgctgaccgccttgggtttcgcctctaacctgtattttgcaagggggaaggattatttcgatcccgcgcaggaagaaaagcccctgctgcacatctggtctttgtcggtcgaagaacaattttactttgtctttccgatactgctgctgcttgtcgcccgcaaaagcctgcgcgtacagttcggcttccttgccgcactgtgcgccttaagccttgccgcttcctttatgccttccgcgttcgataaatattacctgccccacctgcgcgcctgcgaaatgctggtcggatcgctgaccgccgtgtggatgcggtaccggcaacagcggaatctcgccgtcggcagatgctgtgccgccgccggcgcattgttttcctcgtgcatactgtccgcctgcctgtttgcctattcggaacaaaccgcctatttcccggggcccgccgctttgattccctgtctggctgttgccgcgctgatttatttcaaccattacgaacacccacttaaaaaatttttccaatggaaaatcaccgttgccgccggtttgatttcctattcgctttatctgtggcattggccgatattggcctttatgcgctatatcggtccggataacctgccgccttattcgccggcggcggcggtcgtcctgatattgctgctttccctgttttcttaccactgcatcgaaaaaccgtttaaaaaatggcaaggttcgttcgcacaatccgttttatggatttatgccttgcctatgctcattttgggggcgggctcgtttttcgcgatgaggctgccgtttatggcgcaatacgaccgtttggggctgacgcgttccaacacctcctgccacaacaataccggcaaacaatgcctgtggggggatacggaaaaacagccggagctgctggttttgggcgactcccacgccgaccattacaaaacattcttcgatgccgtgggcaaaaaagaaaaatggtccgccactatggtttccgccgacgcttgcgcctatgtggaaggctacgcgtcccgtgtgttccaaaactgggcagcctgccgcgccgtttatcgctatgccgaagaacacctgccccggtattcaaaagtggttttggcgatgcgctggggcagccaaatgcccgaaaacagccgctcccttgcctatgatgccggttttttccaaaaattcgaccgtatgctgcataaactctcgtccgaaaaacaagccgtttacctgatggcggacaaccttgcctcgtcttacaacgtccagcgcgcctatatcttgtcttcacgcataccgggttaccgccaagccctgcgcccggacgacgaaagcaccctgaaagccaatgcccgcatcagggaattggcagccaaataccccaacgtctatattattgatgccgccgcctatatccccgcagattttcaaatcggcggattgccggtttactcggacaaagaccacatcaacccttacggcggcacggaattggcaaagcgtttttccgaaaaacaacggtttctcgatacgcgccataaccattga

SEQ ID NO: 66230 - DNA, 207 bp, Neisseria meningitidis; identical to SEQ ID NO: 39999

SEQ ID NO: 66231 - DNA, 378 bp, Neisseria meningitidis
atgtgtgagttcaaggattttagaagaaacatcccttgttttgaagagtatgacgaaaattcatttattggcaaatggtatgatgacggggtatgggatgatgaagaatattggaaattggagaatgctttaatcgaggttaggagaaaatatccttatccgatggatataccaagggatatcgtgattggaatcggtaccattattgagtttttaatggttccaaattggaaactttttacaattaaatcttccccttggttgcctaaaagtatcaaaattaatgagcgttatgaaaggttcagagtaatgctccgttatatttttaccgagatagacatagtcaacgtgcaatttgattattacaacaaaaaatag

SEQ ID NO: 66232 - DNA, 1107 bp, Neisseria meningitidis; identical to SEQ ID NO: 52017

SEQ ID NO: 66233 - DNA, 543 bp, Neisseria meningitidis; identical to SEQ ID NO: 47973

SEQ ID NO: 66234 - DNA, 468 bp, Neisseria meningitidis; identical to SEQ ID NO: 40006

SEQ ID NO: 66235 - DNA, 561 bp, Neisseria meningitidis; identical to SEQ ID NO: 43976

SEQ ID NO: 66236 - DNA, 321 bp, Neisseria meningitidis; identical to SEQ ID NO: 52023

SEQ ID NO: 66237 - DNA, 1197 bp, Neisseria meningitidis; identical to SEQ ID NO: 52024

SEQ ID NO: 66238 - DNA, 261 bp, Neisseria meningitidis; identical to SEQ ID NO: 52025

SEQ ID NO: 66239 - DNA, 390 bp, Neisseria meningitidis; identical to SEQ ID NO: 47854

SEQ ID NO: 66240 - DNA, 1536 bp, Neisseria meningitidis
gtgtctgattccaagacgaaagaacgcgctacattcggtacacgccgcgcgtttatgattgccgccatcgggtccgccgtcggcttgggcaatatttggcgtttcccctatattgcttttgaaaacggcggcggcgcgttcatcctgccctatctggtcgcgcttctgacggcgggcatcccgctgctgctgctcgattatgccatcggccaccgttaccgtggttctgcgcccttggctttccgccgcctcggacgatggtttgagccggtcggctggtggaacgtgatgaccaatatcgtcatctgcatctattacgcggtaattatcggttgggcggcaagctatacctattattcggtcaacgccgcctggggtgcggatccgcagggttttttctttaaagacttcctgcaaatggcgggcccggaagccttgggtttggattttgtcggcaaagtggccggtcctttggcgggcgtgtgggtttttaccgccgccattatggctttgggcgtgcaaaagggcgtggcgcgcgcctcgtcgttctttatgccgctgcttttggtgatgtttttgattatggtcggcatttcgctgacgttgccgggcgcggcaaagggcttggacgcattgtttacgcccgactggtcgaaactcgccgattccaaggtctgggtggcggcatacgggcagattttcttttcgctttccatctgcttcggcattatggttacctattcttcttatttgaagaaaaaaaccgacttgggcggaacggggctggtggtcggttttgccaacagcagctttgaactgctcgcgggcatcggcgtgtttgccgcattgggctttatggcgcaggcgggcggtaaggcggtcaacgaggttgcctcaggcggcatcggtttggcgtttatcgcctttccgaccattatcaaccaggcaccgatgggctggctgatcggcatattgtttttcggttcgctggtattcgccggcgttacgtcgatgatttccatccttgaagtgattgtggcggcgattcaggacaagctgaacatcgggcgcgtcaacgccacgctgctggtctgcattccgatgggcattgtttccacgctgctgttcggtacggcgacggggctgccggttttggacgtgatggacaaattcgtcaacacctacggcattgttgccgccggctttgcttatgttgccgccatcatcatcagcggcaggctgccggaattacgcaagcacctgaacgctttgtcctccatccgcatcggcggcttgtggacggtctgcgtcgtggttaccgtcgtgatgctcggctatatgctgtttaaagataccagcggcctgatggagaaaaattacgaaggttatccggatggtttcctcagtattttcggctgggggatgtcggcggcgttggtcgtgttcgggctgctgctgtcgttgctgccttggaaacacggtcaggatttcaacgtcaaagacgaacacgaacatgaacaaggagaagaaaaatga

SEQ ID NO: 66241 - DNA, 366 bp, Neisseria meningitidis; identical to SEQ ID NO: 43983

SEQ ID NO: 66242 - DNA, 1356 bp, Neisseria meningitidis
atgtctgatttttttcattctgacgtgttgtccgtttccgagttgaatgcatttgccaaaagtattttggaaaaccaccttgccggtttgtggattgccggcgaagtgtccaacctgacccgcgccgccagcggacattattacttctcgcttaaagacagccgcgcgcaggtgcgttgcgcgatgttcaaaggtgcggcggcgcgtttggcgaagcctttgaaagaaggcgatcatatcgaggtatcaggaaaaatcagtatttacgaggcgcggggcgaatttcaaattaccgtaaacgaagtacggctcaaaggtttggggcagctttacgaagcctatgagcggttgaaggcgcagttgcaggcggaaggcgcgtttgcggcggaacgcaaaaaacctctgcctgcccgaccgcaatgtatcggcatcgtaaccagtttggcggcggcggcattgcgcgatgttgtaaccaccttgaaacgccgcgcgcccgaaattcccgtcatcgtttatccgaccgtcgttcaaggcacaggcagcgagttgcaaatcgcacaagtgattaaaaccgcatcgcaacgcgccgaatgcgatgtgttgattgtctgtcgcggcggcggcagcattgaagatttgtgggcgtttaacgaagaaccggtcgtacgcgcaatcgaagcctgcacgattccggtcgtcagcggcgtaggccacgaaaccgatttcacgcttgccgattttgttgccgacgtacgcgcaccgacaccgaccggtgcggcggagctggtcagccccaaccgccaagaatcgctacatcgtctcgctcaggcgcaaggccgtctgaaaaccgttttggaacaacgctatttcgatgccagccaaaaattcgactggctggcgcggcaaatccgtcatccgcgccaaaaactcgacgaacagcgcacctacatccacaaactggcgcaaacgctgtcttactcgatgacgcaaaacctccgcgcccacgccgcccgtttcgaacgccaaacccaagccctgcaacattaccgtcctgatatttccgtttgcaaaaaaaacatcgaccgctttcagacggcattgcccgccgccttcagccaattgctcgcccgccgccgccaaagcctgagcgcccaagcagcattgctcgaagccgtttcgccgcagcacattctggagcgcggcttttccgtcgtcaaaaacacacgcggacaagtcatccgcaacgccgatgttttgaagcaggggcagaagctgcacattatcttcgccgacggcgaaaccgacgtgcgcgtaagcaaagaacaagggcagcaggatttgttcgattgcatttaa

SEQ ID NO: 66243 - DNA, 354 bp, Neisseria meningitidis; identical to SEQ ID NO: 60208

SEQ ID NO: 66244 - DNA, 273 bp, Neisseria meningitidis; identical to SEQ ID NO: 47986

SEQ ID NO: 66245 - DNA, 1176 bp, Neisseria meningitidis
gtgtttaaagtgaaattttatattcgtcacgcagtattattattgtgtggaagtttaattgtaggatgctctgcgattccttcatcaggccccagcgcaaaaaaaattgtctctttagggcaacaatctgaagttcaaattcctgaagtggagctgattgatgtgaatcatacggttgctcagttattatataaggctcagataaatcagtcattcactcagtttggcgatggttatgcttcggctggtacgctaaatattggtgatgtattggatattatgatttgggaagcgccgccggcagtattgtttggtggtggcctttcttcgatgggctcgggtagtgcgcatcaaactaagttgccagagcagttggtcacggcacgtggtacggtttctgtgccgtttgttggcgatatttcggtggtcggtaaaacgcctggtcaggttcaggaaattattaaaggccgcctgaaaaaaatggccaatcagccacaagtgatggtgcgtttggtgcagaataatgcggcgaatgtgtcggtgattcgtgctgggaatagtgtgcgtatgccgctgacggcagccggtgagcgtgtgttggatgcggtggctgcggtaggtggttcaacggcaaatgtgcaggataccaatgtgcagctaacacgtggcaatgtggtgcgcacggtggctttggaagatttggtggccaatccgcggcaaaatattttgttgcgccgtggtgatgtggtgacgatgattaccaatccctacacttttacgtctatgggtgcggtggggagaacacaagaaatcggtttttcagccagaggcttatcgctttctgaagccattggccgtatgggcggtttgcaagatcgccgttctgatgcgcgtggtgtgtttgtgttccgttacacgcctttggtggaattgccggcagaacgtcaggataaatggattgcgcaaggctatggcagtgaggcggagattccgacggtatatcgtgtgaatatggctgatgcgcattcgctattttctatgcagcgctttcctgtgaagaataaagatgtattgtatgtgtcgaatgcgccgttggctgaagtgcagaaattcttgtcgtttgtgttctcgccggttaccagtggcgcgaacagtattaataatttaactaattaa

SEQ ID NO: 66246 - DNA, 111 bp, Neisseria meningitidis; identical to SEQ ID NO: 40033

SEQ ID NO: 66247 - DNA, 462 bp, Neisseria meningitidis; identical to SEQ ID NO: 52040

SEQ ID NO: 66248 - DNA, 2526 bp, Neisseria meningitidis
atgcatcactttgggcgggctgcgacgagttgcgcggcggtatggatgcgagcctttataaagaactatgtgcttacgctattgtttttaaaatatgtttctgataagcataagtacggcggcggcatgattgagctgcacgccggtacgacttttgacgacatcgtcaaactcaaaaacaccgccgacatcggcgaccgcctgaataagattatcgcccaaattgccgaagccaacgacttaaaaggcgtgatcgacgttaccgacttcaacgacgaagacaaactgggtaaaggtaaggagatgatcgaccgtttgagcaggcttgtcggcatttttaaaaagctcaacctttcttccaaccaagccgaagacgacgatttgttaggtgatgcctacgaatacctgatgcgccattttgcgaccgagtcaggcaaatccaaagggcagttttacacgcctgccgaagtctcccgcattatggcgaagattatcggaatcagcgcagattgccgtccagcaccagcgtttatgacccgacctgcggctcgggttcgctgttgctcaaagccgccgcccaagccggcagccaaatcagcctttacggtcaggaaaaagatgtggcaaccgcgtcccttgcccgtatgaatatgattttgcacaacaacgaaaccgccgaaatcaacaccgggaacaccttgtccgattcgtctttccgtgatgaaaacgacgggcttaagaccttcgattttgccgttgccaatccgccttatcccgcccgaaaaaaacggcgattacgcctttttgctgcatctgctcaaaagcctgaaaccaagcggcaaaggtgcgattattcttccgcacggtgtgctgtttcgcggcaatgccgaagcgcgtattcgcacggaattgcttaaccttgaccttattaaaggcattatcgggctgcctgccaacctgttttacggcacgggcattcctgcctgcatcatcgtcatcgacaaagaacacgcccaaaccgcccaatttgccgaagagggaacaaaccaagttatcagtggcggcagcgtgtttatgattgacgcatcgcgcggcttcattaaagacggcaacaaaaaccgtctgcgtgagcaagacattcacaaaatcatcgacacttccacaaacctcgttacagccgtatggtgcatttaagcgaaatcgcagcacaagattacaaccttaatctgcctcgctatatcgacagcggagaagttgaagacctgcaaaatctcgccgcctatctttatggcggcatacctgcgcacgatatggacgcattggaagcctattggcaagttttaggccgtatgaaaaacgagttgtttgccgaacacgatggacgctttaccactatacaacggaatcgattgcaaatctttcccactgttcttgaaagaatgcgaatttcgatttaacttcggcacaccgtctcaacagcttaaaatcctgcgggattggtgtggaatttagggctaatctagtacagccccaaatttaatccactataaaatcgaaagcagccaaatcaaagcccatatattggcgcaccccgattacgccgccttcaaagccggacacctggcaaagtttgccgcgtggcacactcaaaacgaccttgccgccatccaaccgggcaggcttatccggaaatggagcgaaagcctgctggacgcgttcaaacccggcagcctgattgaagaatacgatttctaccaaatcctgacggactactgggcggaaaccctgcaagacgatgtttatctcatcgcccaagatggctggaaggcggttaaaaacctggccgaaatcaccaaagaaagcgatgaagacgcgaacctgaccgtcgtctttgaggaaaccgaaaccggcaaaaaaggcaaagccaaaaccaagcgcatcagcaaaaaataccgcagcgaagtcatcgcccccgagctggttgcccgccgctacttttcagacggcatcgccaagctggaagaaaaacaaagcgagctggaacgcctaagccaagaattggaaaaccacatagaagaacacggcggcgaagagggtgcgctgaacgacgtattggatgcaaaaggcaaactttccgccaaacttctgaaaaccgcattggaagaaagcggcatagaagaaggcgaacgggctgttttacaaaccacccaaacactgatgacgcaggaaaaagccgcgaaagacgcagtcaaaacccaaatcgaagccctgaaccttgccgtattcaaacaattcggccgactttccgaagccgaaatcaagcagcttgccgttcaagacaaatggcttgccgatttacaaagccgaatcgaaaatcgcttggaaaacagtattcagcagcttatcagccgcttgaacacgctggaagaccgctaccgcagcccgatggccgagcttgcccgagaagtggaaaagtggcaaagcaaagtcaatgcccaccttgaaaatatgggttttggaggctga

SEQ ID NO: 66249 - DNA, 279 bp, Neisseria meningitidis; identical to SEQ ID NO: 51115

SEQ ID NO: 66250 - DNA, 306 bp, Neisseria meningitidis; identical to SEQ ID NO: 52042

SEQ ID NO: 66251 - DNA, 369 bp, Neisseria meningitidis; identical to SEQ ID NO: 52043

SEQ ID NO: 66252 - DNA, 2085 bp, Neisseria meningitidis
atggattatttatcaagactgtcctttggatttaacaaaaagctacctgtcattctgcaaacagaagttgctgaatgtggtttagcatgcctgacatccatcttgtcctattatggctttcacactgatttaagaacgttacgccaaaaatacaccctgtcattaaagggcgcaaatcttgcagacatcatgagatttggcaatgaaatgaatttaacgccacgagctttgcgtttagagttagatgagctgtcaaatttacaactaccctgcattctccattggaacttaaaccattttgttgtactttgttccatttccaaagacagtatcgtcattatggaccctgctgtcggtatgcgaaaaatcaaaatggacgaagtttcacaaaaattcacagggattgccctagaattattccccaatacccattttgaagagaaaaaagaaacaaagaaaatcaaaatattatctctattaaggggggcaggcttaaaacgctctttaattcaaatgcttatattagctatttctttggaagtctttgcattggttagtccattctttatgcaatgggtaatagaccatgtcattgtaactgctgataaaaatttattattgacccttactttgggatttggtttactgactatcctgcaacagttaattagcctgttacaagcatgggtaggtatgcacctatctacaactcttaatttacaatggaaagccaatatatttaaaaggttacttgacttacctaatgactatttcagtaaacgacatttaggagatgtgatttcaagatttggttcaatagatcatatccaagaaacactaacttctactttttttgttttagttttaaatagcttaatggctgtttttactttcgtgttaatgacaatttacagcactcaattatcgctgattgttcttttaacacttgttttgtacatactaattcgttggcttgcatattacccattaagaaatgcaacagaagaaaatattgttcatgaagccaaacaaaactcatatttcatggaaaccattcgtggtatccaatcagttaaattatttgataaacattatcaaagacatggcacttggatgagcctatttgtgaatacagtcaataccaagctgacaacagataaactctctgctttatttgaattttcaaataaactgttgtttagcatggaaaatgttatcataatttatcttggtgcaagcgcaattttagatggttcatttacagtcggtgttctgatggcttttttggcttataaagggcaatttgaaagcagaacagcttctctcgttgaccaatacatccaaatcaaaatgttagggcttcatgctgaacgtttggctgacattactttaaatgaaacagaaactgaaattattaagtataatcatatacctaaattagataatgaacaactggttcttaaagttgaaaacgtctcattcagatatgctgataatgagccatatctttttgaaaacattaatttggaatttaaagataatgaagcagttgttttaacaggacaatctggtcgggggaagtccactttgttaaacattttaacaggtagcctaaaacctgaaactggtacagttagtattaatgggcatgatatatatcaagtttctccatcctttattaggggattgagcgggattgttcgccaagatgatgtcctttttgcaggttctattggggaaaatatttcattttttgatgaaagcccaaatatggagctcattgaacaatgtgcaaaaatggcacaaatacatgacgatatacttaaaatgccaatgggctatgagaccttgattggcgatatgggaaatatcttatcaggtggacaaaagcagagagttatcttggctcgtgcattgtataaacgacccaaaattctatttttagacgaagcaagtagccatttagatgtagaaaatgaacaaaaaattaaccataacctaaaaagtcttggtattatgaaaataatggttgcacaccgccaagaaacaattcaatcggcagataaaattctgaatttaggttga

SEQ ID NO: 66253 - DNA, 1041 bp, Neisseria meningitidis; identical to SEQ ID NO: 52075

SEQ ID NO: 66254 - DNA, 1269 bp, Neisseria meningitidis; identical to SEQ ID NO: 44008

SEQ ID NO: 66255 - DNA, 1002 bp, Neisseria meningitidis; identical to SEQ ID NO: 44009

SEQ ID NO: 66256 - DNA, 1371 bp, Neisseria meningitidis
atgtcttccccttcaaataccaatcgtcaaacctgatccagccgattaacctatatcctgaccgttgccggcgcgactgtcggcttcggcgcgacgtggcgtttcccgtatttggtcggtgaaaacggcggcggcgcgtatgtgtttttattctgtatcgccatgctcgttatcggtataccgatgattttggtggaaaacgtcatcggacggcgcaaaggcgtgaacgcgctggatgcgttcggcggctcgatgaacggcaaacccgtcgctaaaatttggaagctggtcggctgggcgggactgctcggcgcgttcggcattatggcttattatatggtgctcggcggctgggtaatcagctatatcgtcaacattatcggcggcaatctggacatttccagccccgtcgacggtatggttacaaaaaacttctttaccgaacacatcgaaaacagcccttgggaaattgcgttttatacgctgctttttgtcgccgtgaaccaatggattttggtcaaaggcgttatcggcggcattgaaaaagcggcaaaatagctgatgccgctgctgtttttgttcctaatcgcgatggtcgtccgcaacgttacccttccgggcgcaatggaaggggttgctttctatctgaaacctgatttcagcaagattaccgccgaactgttcgtcttcgttttggggcaggtattttttgccctgagcctgggtttcggcgtgatgattaccttgtccagctatttggataaaaacgaaaatctggttcagacggcagttatcacggcaattaccaataccatcatcgccatacttgcgggctttatgattttcccgtcgctcttcagcttcggcgttgcccccgattccggcccgactttggtgttccaaagcttgccgattgtgttctcacatatgtgggcgggatctgtgttcgccgtgattttcttctcgctgctcctgattgccgcgttgacaacttcgctgaccatttatgaagtgttgattacgaccattcaggaaaaaaccaaaatccgccgtaccgccgcgattacgattgtattggctgccatcttcattttcggcaacatcccgtccattctgagctatggtccgtggaaagacgtttccgtgttcggcaaaaatattttcgatgccttcgactacatcagcggcaacatcttgtttatgctgaccgcgctcggttccgcgctgtttgtcggttttgtgatgaaggacgaagcgaaggaagaattgctttataaaggcaaccatacgacggtcaatatttggtttgcctatgtgaaatacctcgtgccgttggtgattctgctgatttttatcagcaacctgttctaa

SEQ ID NO: 66257 - DNA, 726 bp, Neisseria meningitidis
atgaatagacccaagcaacccttcttccgtcccgaagtcgccgttgcccgccaaaccagcctgacgggtaaagtgattctgacacgaccgttgtcattttccctatggacgacatttgcatcgatatctgcgttactgattatcctgtttttgatatttggtaactatacgcgaaagacaacagcggagggacaaattttacctgcatcaggcgtaatcagggtgtatgcaccggatacggggacaattacagcgaaattcgtggaagatggagaaaaggttaaggctggcgacaagctatttgcgctttcgaccttacgtttcggcgcaggaggtagcgtgcagcagcagttgaaaacggaggcagttttgaagaaaacgttggcagaacaggaactgggtcgtctgaagctgatacacgggaatgaaacgcgcagccttaaagcaactgtcgaacgtttggaaaaccagaaactccatatttcgcaacagatagacggtcagaaaaggcgcattagacttgcggaagcagtagcaaaaacggcactgggcagacaggaattgtcgggattgggcatggtatcctccgatttggcgaagagcaacgaacctgtttatcttgtgaaaataaaacccgacaaatcaaccatcactgcatacggtgaggaaaaaccgctgcaaatcggcatgacgttggaagcagacatcctacacgagaaacggtga

SEQ ID NO: 66258 - DNA, 3132 bp, Neisseria meningitidis
atgaataaaacttggaaacggcaggttttccgccataccgcgctttataccgccatattgatgttttcccataccggcggggggggggggcaggcgcaaacgcataaatacgctattgtaatgaacgcgcaaaatctgcctgaggtaaagtgggggcaggactatagaaaattggcgcaaaaaagcaatgaacgccaatttacccatacgactaatttttacaccaaaaaaaacgtaagtttatcattcaataataccgatgaagttgttgctaaaaaaaacggtactgtcgttttcggcgcggcgacctacctgccgccctacggcaaggtttccggttttgatgacaaaaggctgaaagagcgcggcaatgccgttaattggattcatacgaccgacccagggttggtaggctacagctacgaagatgttacatgcaacagcggcaactgtcctgaagttagctataaaacccaatttatcttcgataatcaccagttggcaaaaaagaaaacagacagcaagctggatatatacgaagacaaaagccgcgacaattcgcccatttacaaattgcaggattatccttggttgggcgtgtctttcaatttgggcggagagagctccttcaaaccaaagagacaaggttctttggtatcttcttttagcgaggatgtgacgcagcaaaatggtacacaagaccaatacaaaggcaaaaacctcgtttatacgacagaagattacaataatcagggtaatcgtaaccatcaggacaaacaccacgccatcgccttttatctgaacgccaaactgcacctgctggacaaaaaagggattaaagatatcaccgacaaaacagtgcagttgggtgtcttgaaaccgcgcatcgatttgacggaagcgtggaaaaacaggcatgggagcttttttggtaatggtaattggacgtttgaagataaaggagcagtcagcgtcaaacttatcttgccggaagtcaaagcaggccgctgcatcaataaaccgaaccccaatcccaaagcccaagccctttcccccgcactgactgcccccgcgctgtggttcggacctgtgcaaaatggtaagatggagatgtattccgcttcggtttctacctaccccgacagttcgagcagccgcatcttccttcaaaatctgaaaagaaaaaacgaccccaacaaacccggccgctattccctcgcagacttgagcgcgtcggagattaaaagtaaagagccgactttcacagggcggcaaaccgtcatccgattggataaaggcgtacatcagatcaaacttaaaggcaatgaggtcgaaggttttaagggaaacaacggcaacgacactttcggcattgttagtgaagggagcttcatgcctgatgacagcgagtggaaaaaagtgctgctgccttggacggttcgtgctttcaatgatgacggtcaatttaacacagtcaacaaagaagaaaacaacggcaagccaaaatacagtcaaaaataccgcagccgcaacaacggcaagcacgagcgcaatttgggcgacatcgtcaacagccccatcgtggcggtcggcgagtatttggctacttccgccaacgacgggatggtgcatatcttcaaaaaaagcggcggggatgaccgcaactatagtctgaagctcagttatatcccgggcacgatgccgcgcaaggatattcaaagccaagactccacccttgccaaagagctgcgcgcctttgccgaaaaaagctatgtgggcgaccgctacggcgtggacggcggctttgtcttgcgccaagtcgaatggaaagggcaaaaccgcgtgtttatgttcggcgcgatgggctttggcggcagaggtgcatacgccttggatttgaccaaagccgaaaacggtgacccgaccgccgtttccctgtttgatgtcaaacatgacaataatggcaagaatagcaataatagcgtgcaattaggctacaccgtcggcacgccgcaaatcggcaaaacccacaacggcaaatacgccgccttcctcgcctctggttatgcgactaaagacattaacaacggcgacaataaaaccgcgctgtatgtgtatgatttggaaagcaacaacggtacgccgattgcaaaaatcgaagtacccaacggcaagggcgggctttcgtcccccacgctggtggataaagatttggacggcacggttgatatcgcctatgccggcgatcgcggcggcagtatgtaccgctttgatttaagcggcaacaacccgaccagttggtctgcacgcgccattttcagcggcaacaaaccgattacttccgcgcccgccatttcccaactgaaagacaaacgcgtggtcatcttcggcacgggcagtgatttgagtgaggaggatgtggacagcaaagaaatccaacacgtttacggtatttttgacaatgaaacagacacgggtacggcgaaagacgggcagggcaacgggctgctcgagcaagtgcttagtgaggaaaataaaaccttattcctgaccgattacaagcgatccgacggatcgggcagtaaggggtgggtagtgaagctgaaggaaggacagcgcgttaccgtcaaaccgaccgtggtattgcgtaccgcctttgtaaccatccgcaaatataacgacggcggctgcggcgcggaaaccgccattttgggcatcaataccgccgacggcggcaagctgaccaagaaaagcgcgcgcccgattgtgccggacaccaatacggctgtcgcgcaatattccggccataagaaaggcaccaacggcaaatccatccctataggttgtatgcaaaaaggcaatgaaatcgtctgcccgaacggatatgtttacgacaaaccggttaatgtgcgttatctggatgaaaagaaaacagacggattttcaacaacggcagacggcgatgcgggcggcagcggtatagaccccgccggcaagcgtgccggcaaaaacaaccgctgcttctcccaaaaaggggtgcgcaccctgctgatgaacgatttggacagcttggacattaccggcccgatgtgcggtatgaaacgaatcagctggcgtgaagtcttctactga

SEQ ID NO: 66259 - DNA, 870 bp, Neisseria meningitidis; identical to SEQ ID NO: 43036

SEQ ID NO: 66260 - DNA, 474 bp, Neisseria meningitidis
atgactgatttttccgtttgggagaccgccccctttggtgcaaccgtcgatcatatcctgcaacgctaccacaatgtccaccgcgcacaatttgaagaattggtgccgctggcgcagaaagtggcccaagtccatgccgatacctttccggcagaaattgccgggctgcttgcctatatgcagaacgaactgctgatgcatatgatgaaggaggagcggatgctgtttccgatgattaatcagggtgtcggacgcggtgcggcgatgcccatcggcgtgatgatgcacgaacacgaagaacacgaccgcgccatcgcacggctcaaagagctgaccgacaatttccaaccgccagaaggggcttgcggaagctggacgcggctttacgcgctggcgaaagaaatggtggaggatttgaacgaccacattcatttggaaaacgatattttgtttgcccgcgtactcgattcttaa

SEQ ID NO: 66261 - DNA, 963 bp, Neisseria meningitidis
atgaatccggcaatgattgagcgtcttaaggcagtcgagaatcaggcggaagcaatgggacgcggcgcacgctctgcatatcttaagcagcaggcgcaggaattgggcatcagccttgccacgctataccgcaagctggaggcggtcagcatcaagccgacgcgcaaacggcgcagcgatgcgggcaagacggagcttaaaacggaagaagccaaattgatttcggcggttttggtggaggcgatgaggcgcaacggcaagcggttgatgtcggtgcggcaggcggtggaaatgctgcgcgccaacggaaaaatcgaggcggcgcggattgatggggaaaccggggaagtcatcccgtccgtccgcactgctttccgcccgctggcaagacatcgacctcaccgcccggttatggcacatccccgccgccgacatgaagaccaaacacccctttaccgtcccactgtcggactgggcggtagaaatactccgagagctgcacacacagaccggcgacaacatccaccttttccccggcatccgcccacggcgcaaacgcccccccatcccgaccacatcagcatcaaattcgcccacaacgccatccggcgactgggctatgacggcagcacccccggcaaatccaaacacacaatgcacggattccgccacctcttcaccaacatcagcctgaccgccggaaaagacaccctcacaacagacctcgccctcggccacatcagccgcgccgccctccaacgcgccggcttctcaagcctgcaccactataccgccgacagctaccgcctccaagagcggcgcgaactcgccgaatggtacagccgccgccaccgccaagcatacgaagccgccgccaaaaccccgcaaaacaaaaaaccgcctgaaaaaaattcagacggcatcctgcccaaaacacttgcaataaaacctaaaaggtattaa

SEQ ID NO: 66262 - DNA, 2031 bp, Neisseria meningitidis
atgctgccaacccaacccaacccaacccaacccaacccaacccaagccagcgacacagccggggcgaacactgaggcaatctacacttcagacggcattaccgccaactctacccaactcgaacagctcaaaaaactgtttcccgcctgttttgacgcagacggaaatttccttatcgacagattacaagccgaaatcgcgccgcagaccgacatcggacgcgaattttacgaaatgaactggctgggcaaatcatatgctcgcctgcttcgcaacctgccgcccgaaaccctgataagtgaagacaagacgcacaacgccaagcccgaaaatgcaggcagccaaaacctgctgattcgtggcgacaatctagaagtgttgaaacacttaaaaaacgcctacacaaacagcgtgaagatgatttacatcgacccgccctaaaacaccggatcagacggctttgtctatcaggacgaccgcaaattcacacccgctgaacttgcccgcctagccaatattgatgaagacgaagccgcgcggattttagatttcaccgacaaaggctcaaactcgcacagcgcatggctcacctttatgtatccgcgcctgtatgtcgcccgcgaactgttaaaggacgacggtgtgatttttatctcgattgacgataacgaagcggcgcagttgaaattgttgtgtgatgaagtgtttggggaagggaattttgttgcacaattgccttggcgaaaaagaacagctaaatcagatgtgccttttggtatttcgcaggattatgaatggatatttgtattcgcaaaatcttgccaatttattgcagcaactaaaggcaaggaacgacgctattatgagactgatgatttccccgatcgtccttggcgtacccacgacttaacgaaacaaacaactgcggcggaaaggccaaatagttttttcacaatggttgatcccaagacaggaaaaaaatatccagcaaatccaaatgcaacttggcgtgtaaccaaagatacatttcaagattattataataaaggaaaaatcgttttccctgatgattatgatttcttaaatatcagcaatccagttatgcgttactttaaagatgacgacatgaaaaaagctggcgaggattttggcaaagtagctgtaagcagtagattacctgaaaatgttggtacattagccgatgcagtagccgaatatttggctatttttagtaggacactacctgaaaatatcggaatgactaaagaaggcacaaaagaaatcacagatttatttggtagcaaaatatttaccttccccaagcctagtcaattgattaaatttttagtttcaataagttcaaagagtaatgacctaatcctagacttcttcgcaggcagcggcacaaccgcccacgccgtgatgcagcttaacgccgaaggacaaaacggtaaccgccgctatatctgtgtacagcttcccgaaaaaaccgctgaaaaatccgaagcccgtaaagcaggctacccgaccatcttcgacatcaccaaagcccgcatagaaaaagccgccgccaaaatccgcgtcgaacatcccgattacacgggcgattcgggcttcaaaatctttcaaacggcagacaatttcaggcagcatccggacaaggatttttcgcccgaacaaccggatttgccgcttaacgatgaattaagcgaagaacagctgcaaacgcttctgaccacctggacgctgtatgacggggcggcactgaccacgccggttgagcctgtgcggttaggggcttacacggcgtatctgtgcgaaaaacggctgtatctgatgaatgccggttttacttccgccgatttgttggcgtttatccgcaagctggacgacgatgcggatttcaatcccaaccgcgtgattgtattcggcagcaatatggcaagcgccatgcagcacgaacttgaccaggcggttcgcggttatgccaataaaaaagagattgagttgaatgtggttatcagggtttga

SEQ ID NO: 66263 - DNA, 2103 bp, Neisseria meningitidis; identical to SEQ ID NO: 58442

SEQ ID NO: 66264 - DNA, 1527 bp, Neisseria meningitidis
atggattatccaccgcttaagggtgcggcattggcatggattacgctgtctttggggcttgccgtatttatggaagttttagatacgactatcgccaatgtcgccgttcccgttatcgccggcaacctcggtgcggcaaccacgcaggggacgtgggtcattacttcttttgctgtggcaaacgccgtttccgtgccgttaacgggctttttggcaaaacgtatcggcgaggtcaaattgtttaccgccgccgctgtcggtttcgtcatcacatcgtggctgtgcggtattgcccccaaccttcagtcgctggttgttttccgcatcttgcagggctttatcgccgggccgctgattcccttgtcgcaaagcctgttaatggcatcctatccgcccgcaaaacggacgctggcactggcattgtgggcaatgaccgtcgttgtcgcccctgttctcgggccgatactcggcggctggatttccggaaactggcattggggttggattttcttcattaatatccctatcggtatcatatcggcatggattacatggaaacatttgaaatgtcgggaaacggaaaccgttaaaatgccgaccgactatgtcgggcttacattgatggtagtcggtatcggcgcgttacagatgatgttggacagggggaaggaactcgactggttcgcctctggagaaatcattaccttgggcgtagtcgcactggtgtgcttgtcgtattttattgtttgggaattgggagaaaaatatccgattgtcgatttatcgctgtttaaagatcggaattttaccgtcggcgtcattgccacatcattgggttttatggtgtatatggggacgctgaccctgctgccgttagtgttgcagaccaacctgggctatacctccacgtgggcggggcttgccgccgcacccgtcggtatcctcccagttttcctgtctccgttaatcggcaggttcggcaataaaatcgatatgcgcctgctcgtaaccgccagcttcctgacctttgcctttactttctattggcgcaccgatttttatgccgacatggatatcggcaacgtcatctggccgcagttttggcagggggcaggcgttgccatgttcttcctgccgctgaccaccatcacactgtcgcacatgaagggcgggcagattgccgccgccggcagcctgtcgaatttcctgcgcgtgctgatgggcggtgtcggcgtatccgtcgtcagcaccctgtgggaacggcgcgaagcgttgcaccacacgcgctttgccgaacacatcacgccttattccgcaacattgcacgaaacggccgctcatttgtcccagcacggcgtttccgacattcaaaccctaggcatcatcaacaataccattacccagcagggttttattatcggctcgaacgaaatctttatggcgggcagcttgttattcattatcatgatacccgtcatatggctggcaaaaccgccgttccacaacggcggcggcggtggacattga

SEQ ID NO: 66265 - DNA, 630 bp, Neisseria meningitidis; identical to SEQ ID NO: 44026

SEQ ID NO: 66266 - DNA, 1143 bp, Neisseria meningitidis
atgaaaaaatccgtattagccgttttggccgcgctgtctctggcagcctgcggcggcagcgaaaaaaacgccgtgcaacctcaagcagacgctgcgtctgctgccaatgccgaagccgctgccaccgatactctgaacatctacaactggtcgaactatgttgacgagagtacggtcgaagactttaaaaaagccaacaatctgaagctgacttacgacttgtacgaaaacaatgaaacgctggaagccaaaatgctgaccggcaaatccggttacgatttggttgtgccgggcatcgccttcctgccgcgccaaatcgaggcgggcgcgtatcaaaaagtcaacaaagacctgattcccaactataaaaacatcgatcccgaactcttgaaaatgctggaaaccgccgacccgggcaaccagtatgccgtcccctatttctccggcgtgaacacgattgcgattacggcgaaaggcaaagagcttttaggcggcaagctgcccgaaaacggctgggatttgctgttcaaacctgaatacacccacaaactgaaatcctgcggcatcgccctgtgggacaccccgagcgaaatgttcccgattttgctgaactacttgggcaaagaccccaaaggctcgaatcctgaagatttgaaggcggcggcggaagtgttgaagtctatccgtcctgatgtcaaacgtttcagcccgtccatcatcgacgagctggcgcgcggcgacatctgcctggcggcaggcaacggcggcgatttgaacttggcgaaagcacgttccgaagaagtgaaaaacaacgtcggcatcgaagtgctgaatccgaaaggcatgggcttctggattgagtcttggctgattcccgccgatgcgaaaaacgtcgccaatgcccacaaatacatcaactacacgctcgaccccgaaatcgcggcgaaaaacggcatcgccgtaaccttcgcccccgccagcaaaccggcgcgcgaaaaaatgcctgccgaactggtgaacacccgttccatcttcccgaacgagcaggatatgaaagacggtttcgtgatgccgcaaatgagtacggatgcgaaaaaactgtctgtcagcctgtggcagaaaatcaaagtcggcaccaactga

SEQ ID NO: 66267 - DNA, 876 bp, Neisseria meningitidis
atgaattacgcaaaagaaatcaatgcgttaaacaacagcctttccgatttgaaaggcgacatcaacgtttcgtttgaatttttcccgccgaaaaacgaacaaatggaaacgatgctgtgggattccatccaccgtctgcaaaccctgcatcccaagttcgtatccgtaacctacggcgcaaattccggcgaacgcgaccgcacgcacggcatcgtcaaacgcattaagcaagaaaccggcttggaagccgcgccgcacctgaccggcatcgacgcttctcccgacgaattgcgccaaattgccaaagattattgggacagcggcatccgccgcattgtcgccctgcgcggcgacgagccgcccggttacgagaaaaaaccgttttatgccgaagacttggttaagctattacgctccgtcgccgacttcgacatctctgtagcagcatatcccgaagtgcatcccgaagcgaaatccgcacaagccgacctgattaatttgaaacgcaaaatcgatgcgggcgcgaaccacgtcatcacccaatttttctttgacgtagaacgctacctgcgcttccgcgaccgctgcgtgatgttgggtatcgatgtggaaatcgtccccggtattttgcctgttaccaacttcaagcagctcggtaaaatggctcaagtaaccaacgtcaaaatcccaagctggctgtcgcaaatgtatgaaggtttggacgacgaccaaggtacgcgcaatctggtggcggcaagtatcgccatcgatatggtcaaagtcctgtcccgcgaagtgaaagatttccacttctatacgcttaaccgcagcgagctgacttacgccatctgccatattttaggcgtgcgcccttaa

SEQ ID NO: 66268 - DNA, 978 bp, Neisseria meningitidis
atgcaagaaaacccgaccgtgtggctgttcgacctcgacaacacgctgcacaatgccgatgccggcatcttcacactcatcaaccgcgccatgacacgctatatggcacgccgcctcaaactctccgaatccgccgcgtccgacctgcgtcaagactattggcaccgctacggcgcaacgctcgccggactgcaaatccaccatcccgaaatcgacatcgccgaatttttgcgcgaaagccatccgattgacgaggttttgacccgtctgcacggtatgccgaaaacacaaaacaccctgagccgcctaaaagggcgcaaggcggttttttccaacggcccgtcgttttacgtccgcgccattgtcggcgcactcggtttggaaaaccgtttcgacgcactgttcggcacagatgatttcggactgctgtacaaacccaatccgcaagcgtatctcaatgtctgccgccttttggacgtaccgcccgaatgctgcattatggtggacgacagcgcggacaacctgcatcaggcaaaagcattgggcatgaaaaccgtccggttcggcgcaaaagtgcacgacctgccctttatcgatgcttccgtaagcgatatggcgcaactggctcggtatgcagaaactttgtcagaacaccgccaaaatcattacaatactccacaacccccgaaaatacgaaagaatgttatgcgtaaaaccttccttatcctgatgactgccgccgcccttttgtcgggctgcgcgtgggaaacttatcaagacggcaacggcaagaccgccgtccgtcaaaaatatcccgccggcacgcccgtttattaccaagacggcagctactcgaaaaatatgaactacaaccaataccgccccgaacgccatgccgtgttacccaaccaaaccggcaacaacgccgacgaagagcatcgccaacactggcaaaagcccaaatttcaaaaccgataa

SEQ ID NO: 66269 - DNA, 1032 bp, Neisseria meningitidis; identical to SEQ ID NO: 43767

SEQ ID NO: 66270 - DNA, 423 bp, Neisseria meningitidis; identical to SEQ ID NO: 44041

SEQ ID NO: 66271 - DNA, 360 bp, Neisseria meningitidis; identical to SEQ ID NO: 44043

SEQ ID NO: 66272 - DNA, 1554 bp, Neisseria meningitidis
ctaataaagagcgatattttcgccttagctccacaaataaaaaatagccatatcaacagcgaaattttatctgtaggtaattatatcgaatggcttcgcccaacacttaataagcttcctagttggcaagagcatctatattctggtttagatccattccactatattgaggttacagacaactcgcacgttatcgggcaaacgatcagtttggatgaattccgcttagaaaattctctctgggaaccccgttgggattctgatgttggggaattaaaaacaacgaatgcagacatccgttttaatactaaaagtgaaagtttactcgtaaaagaagattatgctggcggagctcgttttcgttttgcttacggtctaaaagataaagtccctgaaacaccaattttaacttttgaaaaaaatataactggcacatcagatattatttttgagggaaaagcgttggataatttaaaacacctagacgggcatcaaattatcaaagtaaatggcacagcagataaacacgcattccgtctttctggcaaacaccaaaagggaatttatacgctttctttacaacaacgcccagagggcttttttaccaaagtgcaagaacgcgatgatattgcgatttatgcacaacaggctcaagccgccaataccttattcgccttgcgtttgaacgacaaaaacagcgatattttcgaccgcactttaccacgcaaaggcttgtggttgcgtgtgattgacggacattccaaccaatgggtgcaaggcaaaacagcacctgtaaaaggctatcgaaaaggtgtgcaactcggtggcgaagtattcacatggcaaaacgaaagtaatcaactttctgttggcttaatgggcggacaggcagaacaacgcagtactttccgcaatccagatacagacaatcttacaacgggaaatgtgaaaggctttggtgcaggcgtttacgccacttggcatcagcttcagggcaaacagacaggtgcgtatgcggatagctggatgcaatatcaacgcttccgccaccgtatcaacactgaagatgctacagaacgttttacttcaaaaggtattactgcctcaattgaagcaggttacaacgctttattggcggaacacgtaactaaaaagggcaacagccttcgtgtttacctacaaccacaggcacaattgacttatttgggggtaaacggaaaattcagcgatagcgaaaatgcccacgtgaatttacttggctcccgccaattacaaagccgagtgggcgttcaagctaaagcgcaattttcactctataaaaatatcgctattgaacctttcgccgctgtgaacgcgctttaccacaacaaacctttcggtgtggaaatggacggagagcgtcgagtgataaacaataagacggcaattgagagccaattaggtgtagcagtgaaaatcaaatctcacttaaccttacaagccacattcaaccgccaaacaggcaaacatcatcaaactaaacaaggtgcgttgaatttgcagtggacgttttaa

SEQ ID NO: 66273 - DNA, 321 bp, Neisseria meningitidis; identical to SEQ ID NO: 44046

SEQ ID NO: 66274 - DNA, 375 bp, Neisseria meningitidis; identical to SEQ ID NO: 40077

SEQ ID NO: 66275 - DNA, 381 bp, Neisseria meningitidis; identical to SEQ ID NO: 52085

SEQ ID NO: 66276 - DNA, 237 bp, Neisseria meningitidis; identical to SEQ ID NO: 50090

SEQ ID NO: 66277 - DNA, 189 bp, Neisseria meningitidis; identical to SEQ ID NO: 44052

SEQ ID NO: 66278 - DNA, 198 bp, Neisseria meningitidis; identical to SEQ ID NO: 40083

SEQ ID NO: 66279 - DNA, 291 bp, Neisseria meningitidis; identical to SEQ ID NO: 52087

SEQ ID NO: 66280 - DNA, 480 bp, Neisseria meningitidis; identical to SEQ ID NO: 46068

SEQ ID NO: 66281 - DNA, 360 bp, Neisseria meningitidis; identical to SEQ ID NO: 60248

SEQ ID NO: 66282 - DNA, 243 bp, Neisseria meningitidis; identical to SEQ ID NO: 44059

SEQ ID NO: 66283 - DNA, 204 bp, Neisseria meningitidis; identical to SEQ ID NO: 41400

SEQ ID NO: 66284 - DNA, 204 bp, Neisseria meningitidis; identical to SEQ ID NO: 40089

SEQ ID NO: 66285 - DNA, 195 bp, Neisseria meningitidis; identical to SEQ ID NO: 46074

SEQ ID NO: 66286 - DNA, 440 bp, Neisseria meningitidis
atgaagtggttattaaatatgataatgagacctattaaatttagtatggtaaatacgttattatttattgttatatgtagttcattttttgatctgctcgttcaattatgtacaattttatttcatagccaaaaaatatactttattacattatttttattatttatttttaattttgttacaaaatctatctatatggcaattatttatcctattttatatttttttacgataaaaaatattatccttactctaggaaagtgataattctattatcattagcattatctatatattttagttttatggacttttactttttttccatatattcagataaccttagctatgaaacggagcctttacatttatacatccctattattattaattttttctcacttttagtttctaattttattttatcttttatcaacaag

SEQ ID NO: 66287 - DNA, 798 bp, Neisseria meningitidis
atggcagacatcctgccatccgacaagcggcggcaaccgccaaaaacgaaaggaaatccaatgaacataatcgaacaagaaacgaaacgcgccgagttaagaaaaatagacgccgaaatcgccaaaatcattgccgacgcgcacaaaatcaacgccgaatccgtaaaaatagcccaagagtcccgctggtatcccatgatagcggcaaccgggctggttaccgccatcgccgccgtgttggcactgatattcaaatttgcctgaccacaagccccgcaaggggctttatcccacgaacaaaatgaacagagccgcgctattcaaccgctaccccgaatggattatcgggcaagacggcgcaagccgtttcattacccattgccgctatccccgcctgattgccaaaatccacaggcagacagacggcgaatgcccgggcaggcattaccgccattccgaaaacggcatcaccctttacgattttatttttttcgacggaaaaccggcagacgaagcccgatttgccgccgtccttaccgaaacctgccgccgggcagtcaaaaaaatatgcgaaacaaaataaaccgcaacgacatggaactcggctacacaccttacaacctgcgcaaccgctgcaaactgatacaggccgagttggcgcaaatcgtcggggtgaagcactacatacaggtaggccgctgggaagccgaacccgataccgaaacgcggcgggccgatatgccgctggaaaaatggcggcagttcctcgattggacagaaaaaacaaacgccgtctga

SEQ ID NO: 66288 - DNA, 249 bp, Neisseria meningitidis; identical to SEQ ID NO: 52077

SEQ ID NO: 66289 - DNA, 273 bp, Neisseria meningitidis; identical to SEQ ID NO: 52100

SEQ ID NO: 66290 - DNA, 219 bp, Neisseria meningitidis; identical to SEQ ID NO: 52102

SEQ ID NO: 66291 - DNA, 216 bp, Neisseria meningitidis; identical to SEQ ID NO: 52103

SEQ ID NO: 66292 - DNA, 291 bp, Neisseria meningitidis; identical to SEQ ID NO: 44076

SEQ ID NO: 66293 - DNA, 195 bp, Neisseria meningitidis; identical to SEQ ID NO: 44078

SEQ ID NO: 66294 - DNA, 657 bp, Neisseria meningitidis
atggacaggcatttcgggcgcaggcgttttctgacggttgccgccgttgcggcggcgggcgcggcggtttctttcctgccgaatccttttgccgccgacggtgaaaaacgaaacggggatgaaaaacgcaatgaaaatgtgtttttctggaaaggtgtcgcgctgggttccggcgcggagctgcgcctgttcggcgtggataacagacaggcggcggatttggtcaacaaggttttggcggaagtggcgcgtttggaaaaaatgttcagcctttaccgtgaagacagcctgatcagccgcctgaacagggacggttatctgacttcgccgtcggcggattttttggaactgttgagcctgtgccgcgatattcacgcgctgacggacggcgcgttcgatccgacagtgcaggcgttgtggaaactgtatgccgattattttgccgcccgtcccgatgcggaaacgccgcctcctcaaaacagcgtgaaggaagccctgaaacgggtcggcttcggcaaagtctcgtttgacgaccgtgaaatccgttttgccgaaaagggtatgggtttgtccttgaacggcatcgcgcaaggctatagtggattaacaaaaaccagtacgtcgttgcctcgccttagctcaaagagaacgattctc

SEQ ID NO: 66295 - DNA, 222 bp, Neisseria meningitidis; identical to SEQ ID NO: 40096

SEQ ID NO: 66296 - DNA, 2079 bp, Neisseria meningitidis
atgggcaaagccaacgcctttaccgcgccgattaccgtcgtcaactacgacgaacaagccctcaacaacaccgaggcgcgtactttggtggatgccgtagcgaaaaaagacgcttccgtttggcagttcggcggcgaaagcaacacgctgaccggattgtatttcagaggttatcagcttgatgcgcgccaattcagcgtcaacggtttgacaggtatgtacggcacgcaaggcacgaccagcgtgcaagtcggctccgcacaactgattcaaggcgcgtccaccgccgtaaacggcatgaaccctgatggcgcggtatccggttccgtcaatatcgaaaccaaaaaagccgctgatgaaggcaaccgcaaaatcggtttggcccggttcggcaacaaccgcgcccaaggtacgttcgacttgggccaacgtttcggcgaaaacaaagcattcggcgtgcgcgccaacggcaaactgcgccacggcgacaccccgcgccacggttacagcgaagacaacaaagaatttgcggtaaatgccgactatcgcggcgaaacactgcgcgtagcgttcgattccatctacgcaaaacgcaaaaccaacggcggtcgcgcgcgtatgcaggacattcaaaacgccggcggacgcttgtcctgactttgggcggacgtttccaagcggttgaatacaccaataagaaaaaatcacgcggaacggcagccggagctagcaaggtagaagtgaaggcaaacggaaatattgagcatcaattggcatcgtttacagccgactatcccaattcttgggagaactctgccaacttggatgccaatatcaaagtcaacagcctggctttgtccgacaccttgggcttcgtggataacaaataccgttggcgcgcccgatggtaaaaccaacctgctgccttcttggaactggcaaaataccgccggccaaaccaatatgcttacgtttgaatgggatgcgtttgacaatgcccaaattaccggcggtatcggctacaacaaggcgcgttattacggcacgctgatttccccgaccgtttgcggtacaagcggtgcgagcgaccaaaccgctacctgctcaagtgccaagcaataccacaccggcacggcgagcctgaccgaccaatatttccgcacattgagtatgaacctgaccgcacgcggcgaatttgaaaccggtccggtaacacataactggagcaccgcgttcgaccgtgttatccgccagcggaaaaccattcagagcggtgatgccaaacgtttcagcccgatgctgatggcggcgtgggtgccgcaacctgatttggttgtgtacggcaactatatggaagacttggagcctgccgatatcaaaaccgatgattccggcgaaacgacaatggcgaaaccgcgtgtcagccgtcagtttgaagtgggcgtgcgtaaaaactggggcaatttcgtaaccacgttaaacgcgttccaaatcaaacgcccgggctactggcgcggtcagactaataaagatggcagcctgacctacggcaataattccgattttgcccgctataaagcgcaaggcggtgcggccaaagacgaacaaggcatggaacgcaatcgcggtattgagttcaacacctacgcgaacttgctcaacaatactttgcgtccgactttgggtctgatgtatctgcaatcgaccgtgaaagagtatccaaattcacgcgatatgctggttaacggcgtacaagttgccaacccgcgtgtgattgccaaagcgggcgtggaatgggataccccgtttgccaaaggtttgaccttgaacggcaacgtttcgtatttcggcaagtcttaccaagatacgaaaaaacaatacgccttcccgtcttacactttggttgacgtaggcgcgcgctacaaaaccaagcttggcaaaaacactctgaccgtcagcagctcggtggaaaacctgttcaacaaaaactattggcaggtacagcgcggccaatacgaccgcagcttcgccgtcgtcggtatgccgcgcacttactggctgaaggcggaattggatttc

SEQ ID NO: 66297 - DNA, 1230 bp, Neisseria meningitidis; identical to SEQ ID NO: 56203

SEQ ID NO: 66298 - DNA, 411 bp, Neisseria meningitidis; identical to SEQ ID NO: 40101

SEQ ID NO: 66299 - DNA, 213 bp, Neisseria meningitidis; identical to SEQ ID NO: 40103

SEQ ID NO: 66300 - DNA, 213 bp, Neisseria meningitidis; identical to SEQ ID NO: 40104

SEQ ID NO: 66301 - DNA, 1131 bp, Neisseria meningitidis
atgaaaatcgtttttatcacaacagtcgcatccagcatttacggtttccgcgcccccgtcattaaaaaattaatcggcaaaaaccatcaggtgtatgcctttgtatcggagttttccgacaatgaattggatattatcagggaaatgggggttacacccgttacctaccgttcaaaccgcagcgggctgaacccgttttccgatataaaatccaccttcctcatctttaaagaactcaaaaaaatatcgccggatttggttttcccttatttcgcaaaacccgtgattttcggcacttttgccgcaaaactggcaggcgtgcccagaatcgtcgggatgctggaaggtttgggattcgcatttaccccgcagccggaaggcataccgttaaaaacaaaaatcataaaggggattttgattgccttgtaccacattgccctgccgatgttggaaagcctgattgtattaaaccccgacgacaaagacgaactgacggacaaatacggcatcaaaataaaaaacatccatattttgggcggaatcggtctggatttgcggcaatatccttattccgaggcggatattcccgatgaaaaagaacccgtaaaatttctctttatcggcagattgttgaaagaaaaagggattgatgagtttattcgggcggcggaacaggttaaggacaaataccccgatacggtttttaccgctttgggcgcaatcgacaaatcacgcgggggggggggggatttggaacgccttatcgcccgcgatattatccgtttccccggttttgtgaacaatgtttccgaagtgataaaggcgcatcatatattcgtattgccgtcttattatagggaaggcgttccccgaagcactcaggaggcaatggccgtcggcagggcagtgattacgacggatgtccccggatgcagggaaacggtcgccgacaaggtcaacggcttcctgatcgaaccttggaatccccgcatcttggccgaaaaaatgatttattttatcgaaaacagggaagccgtccgcctgatggggaatgcaagttatgcgattgccaaagataaattcgatgccgaaaaagtcgatttgaaattgctcgatattttgaaggcgtaa

SEQ ID NO: 66302 - DNA, 1146 bp, Neisseria meningitidis
atgccgacaatgggggcggagatgaatacacggaatatgcgctatattcttttgacaggactgttgccgatggcatccgcttttggagagaccgcgctgcaatgcgccgctttgacggacaatgttacgcgtttggcgtgttacgacaggatttttgcagcacagcttccgtcttcggcagggcaggaagggcaggagtcgaaagccgtactcaatctgacggaaaccgtccgcagcagcctggataagggcgaggcggtcattgttgttgaaaaaggcagggatgcgcttcctgccgacagtgcgggcgaaaccgccgacatctatacgcctttgagcctgatgtacgacttggacaaaaacgatttgcgcgggctgttgggcgtacgcgaacacaatccgatgtaccttatgccgctctggtacaacaattcgcccaactatgccccgggttcgccgacgcgcggtacgactgtacaggaaaaattcggacagcagaaacgtgcggaaaccaaattgcaggtttcgttcaaaagcaaaattgccgaagatttgtttaaaacccgcgcggatctgtggttcggctacacccaaagatccgattggcagatttacaaccaaggcaggaaatccgcgccgttccgcaatacggattacaaacctgaaattttcctgacccagcctgtgaaggcggatttgccgttcggcggcaggctgcgtatgctcggtgcgggttttgtccaccagtccaacggacagagccgtcccgaatcgcgttcgtggaacaggatttacgccatggcaggcatggaatggggcaaattgacggtgattccgcgcgtgtgggtgcgtgcgttcgatcagagcggcgataaaaacgacaatcccgatattgccgactatatggggtatggcgacgtgaatcagtaccgcctgaacgacaggcagaatgtgtattccgtattgcgctacaaccccaaaacgggctacggcgcgattgaagccgcctacacgtttccgattaagggcaaactcaaaggcgtggtacgcggattccacggttacggcgagagcctgatcgactacaaccacaagcagaacggtatcggtatcgggttgatgttcaacgacttggacggcatctga

SEQ ID NO: 66303 - DNA, 396 bp, Neisseria meningitidis; identical to SEQ ID NO: 54183

SEQ ID NO: 66304 - DNA, 1072 bp, Neisseria meningitidis
atgcgcccgtttttcgtcggcgcgacagtgcttgccatactcggcgcgttggtgtttttcatcagccccggtgccgtcgtcctgcaccgccaaatcttcttagaactcatgctacctgcggcatatggtggtttcctgactgcggctttgttggactggacggttttttcgggtaacctgaaacctgtcgcgactttgatggcggcattattgctcgccgcatccgctatactgcccttttcgccgcaaactgcctcgtttttcgttgccgcctattggctggtattgctgctgttctgcgcccggctgatttggctcgaccgcaacaccgacaacttcgctcttttgacgttgcttgccgcatttaccgtttttcagacggcctatgccgtcagcggcgatttgaacttactgcgcgcgcaagtgcatttgaatatggcggcggtgatgtttgtttccatacgcgtgagtgttttgctgggtgcggaagcgttgaaagaatgccgtctgaaagaccccgtattcatccccaacgtcgtctataaaaacatcgccatcaccttcctgctgctgcacgccgccgccgaactttggctgcccgcgcaaaccgccggttttaccgcattcgccgtcggtttcatcctgctcgccaagctgcgcgaactgcaccatcacgaactcctgcgcaaacactacgtccgcacctattacctactccaactctttgccgccgcaggctatctgtggacaggcgcggcgaaactgcaaaatctgccctcctccgcgcccctgcacctgattactctcggcggcatgatgggcggcgtgatgatggtgtggctgactgccggactgtggcacagcggctttaccaaacttgactaccccaaactctgccgcatcgccatccccattcttttcgccgccgccgtttcgcgcgctgttttaatgaacgtgaacccgatattcttcatcaccgtccccgcgattctgaccgccgtcgtgttcacgctttatcttttcacgtttgttccgatttttcgggcgaatgcgtttacgggcgacccggaat

SEQ ID NO: 66305 - DNA, 402 bp, Neisseria meningitidis
atggcaaaccgatttcggcagcgcaaatccgcataccgccgccttagcggcaagccgttgttttcagacggcattgcggccaacctttgcggcgggcgaaaaaccttgtcctataatttatcccgcttcaaaatcagcatacggtcggaaatgcaaaaaatatctttcaatttgttgaaacctgcaaccccctaaatagggaaacgccgccccggtttgaacggtgcgccgcatattccgatgccctccccccgataccttccggcaagcccagaaatgcccagcaacaatatccatccggcaaaaatccgaaacaacacacccggtggcaggcagagtcaaaccgccccgcaaagcatccgccatcagaaaaacaaaccgcctccgagggcttcatcctaa

SEQ ID NO: 66306 - DNA, 657 bp, Neisseria meningitidis; identical to SEQ ID NO: 44093

SEQ ID NO: 66307 - DNA, 1122 bp, Neisseria meningitidis
atggatttaagtatcgtagttcccatttataatgtcgagagttatttggaagcgtgtctaaattccatagaacctatattaagtaatgaaaatgtcgaacttatccttgtgaatgacgggtcaaaagacggaagtgaagatatatgttataaatatatagataacaacaaacaacaaacaacaaacaacaaacaacaaacaacaaacaacaaacaacaaacaacaaacaacaaacaacaaacaacaaacaacaaacaacaaacaacaaacaacaaacaacaaacaacaaacaacaaacaacaaacaacaaacaacaaacaccggacaccaaatatcaaatatatatatcaggataaccaaggattgtcagaggcgagaaataccggaataaaaaattcaaacggaaaatatatagtctttattgattcggatgattttattaattgtcaggtcttgctggattttcttagtaaagatgatattgatatgccggatgtggtttttttaaatgcagttaaatatgataagggaagtgtttcatattttggcgaagattatcagcctgaaaaaatactcaatcaatccaaagtcgaagttttgaaaggattatgccgatttagaaaatttccgggttcggcgtggaataagattataaaaagagaattgattattaaagaaaaactgttttttgaaaagggaatttattctgaagatgtcgaatggtcaatgagattatttaatgcggcaacaactttttcttatttggacggttgttattactattatcggcagggaagagaagattctattacgggaactgtttcggaaaaaagtataaagtcattattatatattttggagaaaaatgcggaaatggaatttaatagggatatatcaagttatctttattcttttctttcctacgaatatctcgttttgctttttatcatgacgagtaaaaatatagcgtgtgatgctgatataaaaagaagggcgtatcatttaaggtttatgctgttaaagtccaataaattgatatataagctgatattcccgataatcacattattcggggtcgatattacaggcaggattttaaaagcaatcagggggaatatttaa

SEQ ID NO: 66308 - DNA, 1158 bp, Neisseria meningitidis
atgaaacgccaagccttagctgcaatgattgcttccttattcgcattagccgcctgcggaggcgaacctgccgcgcaagcccctgccgcttccgcagaagccgcaagttccgccgcacaaaccgccgccgaaacgccgacaggcgaactgcccgttatcgatgcagttaccacccacgctcctgaagtacctcccgcaatcgaccgcgactatcctgccaaagtccgcgtaaaaatggaaactgtcgaaaaactgaccatggaagacggtgtggaataccgctactggacatttgacggcgacgttccgggtcgcatgatccgcgtacgcgaaggcgatacggttgaagtggaattttccaacaatccttcttctaccgtaccgcacaacgtcgacttccacgcggctaccggccagggcggcggcgcggccgcaacctttaccgctccgggccgtacttccacattcagcttcaaagccctgcaaccgggtctgtacatctaccactgcgccgtcgcaccggtcggtatgcacatcgccaacggtatgtacggtctgattttggtcgagcctaaagaaggcctgccgaaagtggataaagagttctacatcgtccaaggcgacttctacaccaaaggcaaaaaaggcgcgcaaggtctgcaaccgttcgatatggacaaagccgttgccgaacagcctgaatacgtcgtattcaacggtcacgtaggtgctatcgccggcgataacgcgctgaaagccaaagcaggcgaaactgtacgtatgtacgttggtaacggcggtccgaacttggtatcttccttccacgtcatcggcgaaatcttcgacaaagtttatgttgaaggcggcaaactgattaacgaaaacgtacaaagcaccatcgttcctgccggcggctctgccatcgtcgaattcaaagtcgacatcccgggcagctacactttggttgaccactccatcttccgcgcattcaacaaaggcgcgttgggccaattgaaagtagagggtgcggaaaaccctgaaatcatgactcaaaaattgagtgataccgcttacgccggcaacggtgcggctcctgccgcttccgcccccgcagcttctgccccggcagcctctgcatccgaaaaaagcgtttattaa

SEQ ID NO: 66309 - DNA, 732 bp, Neisseria meningitidis; identical to SEQ ID NO: 56214

SEQ ID NO: 66310 - DNA, 1176 bp, Neisseria meningitidis
atggatatacaaagtaaagcgaaaaaattgattgagatgattcagacggcaccggtggagtggaagccgttgggggaagtggcaagtataggaaagggaaagcagcttaataaatcactacttagagaaaaagataagtatcccgtaatcaatggcggtattaatccatcaggttattggcatgaatacaataacgaagctggcacgattgttattagccaaggaggagcaagtgcggggtttgttaattggatggatatccctttttttgcaggagctcacgcatatactattaaagcgaacgaagacaaactattgcaacggtttgcatatttttttaaaaatgaagcaaattacattcatgcaatgtcaatacggagcagtataccagcacttgctaaaagtgaattgcaaaacttacttattcccatcccgcccctagaaacccaacaaaaaattgtaaaaatacttgacaaattcaccgagctggaagctacgctggaagcggaattagccctgcgcaaacgccaataccggtattaccgcgactttcttttagattttgacaatcaaatcgggggggtagctgatggctatcaatgccgtctgaaagatgtggtttggaagacgttgggggagattgccgaatattcaaaaaaccgtatttgttcggataaactgaacgaacataattacgtgggcgtggataatctcttacaaaatagagaaggtaaaaagttatccggttatgttccaagtgagggaaaaatgacagaatatattgccaatgacatcttgattggaaatattcgtccgtatttgaaaaaaatctggcaggcagactgcacgggcggaacaaacggtgatgttttggttatccgggtaacagatgaaaaggttaatccaaaatatctgtatcaggtattggccgatgataaattttttgcctttaatatgaagcacgccaaaggtgcaaaaatgccgcgtggcagcaaagcagcgattatgcaatataaaatccccatcccaccactccccgaacaggaaaaaatcgtcgccatcctagacaaattcgacaccctgacccactccgtcagcgaaggcctgccgtacgaaatcgccctgcgccgcaaacaatacgaatattaccgcgaacagctgcttgcctttcggtag

SEQ ID NO: 66311 - DNA, 1053 bp, Neisseria meningitidis; identical to SEQ ID NO: 44095

SEQ ID NO: 66312 - DNA, 369 bp, Neisseria meningitidis; identical to SEQ ID NO: 52129

SEQ ID NO: 66313 - DNA, 481 bp, Neisseria meningitidis
atgtttgtgaacgagaaatatccttatgcggctctgtttgcgggactggtgtttttgacgctgccgtttgcgttggcggtgcatgatgcctttgcgcttgcgttcggacggacggggttgctggtgtcggtgtcggacggcggattcggctggcgtggcggttgggacggcactgtttggtttgtgttcggtgtgtttgcgtttttgaatgtggttgtgtcggcgggtctgacgaaactggcgtacaaaaagatgatgcggcggcattcgcgttacacactgtttctgtcgggcgtggcggcttgcgcggcggcagcggtggcttggattttcgagctgctgcttggcagtggggctttgggcgggctgggggaggcggtgttggaatatgcgtttgccgtgtggctggtggcgatgctgacgctgcccaaacgcctgacgcgcgcgccggtgcagccggtggtgtttcacaggaaaaaat

SEQ ID NO: 66314 - DNA, 1149 bp, Neisseria meningitidis; identical to SEQ ID NO: 60285

SEQ ID NO: 66315 - DNA, 543 bp, Neisseria meningitidis
atgattaatcatattgaaaaatatataggcactatttctcatggctcgaaaagcgattcgggaagtcagtacaaattaaatatcgcagctattccctcttcccctaacagggatttaaaaacttatattactttagggttaagcaaacatgatctgaattataaaagcagatttgaaatactttttgtatgttctttaaaatatgatgaaaatcagattttcccatttttaagatggctggcagaaaccatcattgagaataaaaaaatccttcttcggggggaggttgtttatttgcccagaagcattgttgattcaacaaaaatggatgcactgtatgtttccgctccattttatttcgacgatgatttccaggtctgttatggcgaacactacaatatcgttttccctttgcttgtcccgttgtataaacaggaagcagaattggtggaaaaaaagggttggaatgcttttgagcagttcttgttggataatgaagttggcaacctttcggatatgaatcggaaaccgtttgtttggtaa

SEQ ID NO: 66316 - DNA, 1572 bp, Neisseria meningitidis
atggctcaaatccaaatgagcgcaaatgttaaaaccatcaacgccgtctttgccgccatgctggtaggtacagtcggctattttatttattggggcttgggttatacccattacaattacgccgccttattcattattgccacgatgttcggcgtgtttatggcgttcaacatcggcggcaacgatgttgccaattctttcggcaccagcgtcggtgcgggtacgctgaccatcccgcaggctttgctgattgcggcggtatttgaggtcagcggcgcggtcatcgcgggcggtgaggtaaccaataccatacgcaaaggcatcgtcgatttgaagggtgttgatttcgaacccatacagtttgtgtttattatgatgtccgcgcttttggcggcggcgttgtggctgttgtttgcctcgaaaaaagggcttccggtatctaccacccattccattatcggcggcattgtcggcagcgcggtatgtatggcggtaatgaacgatgccgcatcgggcgatttgatacgttggggcaagctgggcggtattggtgtttcttgggtattgtcgcccgtgttgggcggcgcggtgtcctatttcctgttttcgcgcgtcaagaaaaacgtcttagattacaacgcttgggcggaaggcacgctcaagggcatcaagcaaaaaaaagcctataaagaacggcaccgcctgtttttcgagggtttgtccgaagccgaaaaagtcgagtacgccaccaaaatggcgcacgacgcgcaaatttacgacgaacccgaattcgatccgcaagagctgcaatcggagtattaccgcggtctttatgcgttcgacaaccgtaaaaacaatgtcgattcctacaaagcgctgcattcttggattccctttatcgcttcgttcggcgcgatgatgatttccgctatgctgattttcaagggcttgaaaaacctgcatttggggatgagcaacgtcaacagcttcctgaccatctttatgataggcgcggcggtgtggatggggacgtttgtgtttgccaaaagcctcaagcgtaaagacttgggcaaatcgacctttcagatgttttcatggatgcaggtctttaccgcctgcggcttcgcattcagccacggtgcgaacgatatcgccaacgccatcggtccgtttgccgcgattatggatgttttgcgtaccaacagcgttgccgcgcaaaatgtcgtccccccgattgcgatgctgactttcggtatcgcgctgattgtcggtttgtggtttgtcggtaaagaggtgattaaaaccgtcggtacgagtttggcggaaatgcatcctgcttcgggttttaccgccgaactgtccgccgcctccgtcgtgatgggcgcgtcgctgatggggctgcccgtgtccagtacgcatatcttggtcggcgcggtactcggcatcggtctggtcaaccgcaatgccaactggaaactgatgaagcccatcggtttggcgtgggtcattaccctgcctgccgccgccgtattgtcggttgtctgctacttggttttacaggcagtattctga

SEQ ID NO: 66317 - DNA, 366 bp, Neisseria meningitidis
atgaaaccgttgaaacgacatcccgcccttatcgggctttcgcgtgaccaccaccattcgctttccctgtgcgtgcgtctgttgcggacgccggaagaaaggcatcgggacgaactcgaaccgcattttgccgaattggaaacccattttcgcgaagaagaagccaagtttgccccaatttggcagaatgtccccgaattgaaacaacgtttcgagaaagaccacgcccgactgcggcagatgatggcaagccccgaatacggtaacgcggcgtggaataccgcttttgccacaaccctgcgcgaccacgcgcgctttgaagaacgcgagctgtttcccgccgccgaaccgtttttgccggcatga

SEQ ID NO: 66318 - DNA, 729 bp, Neisseria meningitidis
atggcaggccatagcaagtgggcaaatatccagcataaaaaagcccgtcaggatgccaaacgcggcaaaatctttacccgtttaatcaaagaaatcaccgttgcggcgcgtatgggcggcggcgaccccggttcaaatccgcgcctgcgcctggctttggaaaaagcagccgaaaacaatatgcccaaagacaatgtgcaacgcgccatcgacaaaggcacgggcaacttggaaggcgtggaatacatcgagttgcgctacgaaggctacggcatcggcggcgcggctttgatggtggactgcctgaccgacaacaaaacccgcaccgttgcggacgtacgccacgcgtttaccaaaaacggcggcaacttgggtaccgacggctgcgtggcgttcaacttcgtgcatcagggttatttggtattcgaacctggcgttgacgaagacgcgctgatggaagcggctttggaagccggtgcagaagacgtggttaccaacgacgacggttcgattgaagtcattaccgcgccaaacgattgggcgggcgtaaaatctgctttggaggcggcaggttacaaatccgttgacggcgacgttacgatgcgcgcccaaaacgaaaccgaactctccggcgacgatgccgtcaaaatgcaaaaactgattgacgcgctggaagacttggacgacgtgcaagacgtttacacttccgccgtattgaatctggactga

SEQ ID NO: 66319 - DNA, 522 bp, Neisseria meningitidis; identical to SEQ ID NO: 43029

SEQ ID NO: 66320 - DNA, 609 bp, Neisseria meningitidis
atgcgccgcaccgccctcctgctgctcgcactcgccgccggcacgtccctcgctgccggcttcagccaagacacgccgatcaacacccgctaccgcgaaacgcccgaagaggccgccgcccgcgaatttaaagaacataccgccaaactgccgccgctgcccgatacgcactcggacggctggttcgacatttatgtggatgaaaattacggcaaacagccgaaaatcctgctcgacagcctgcaaattatgcccgcgcccgacggcagcatccgctacattctcaatatccgctccgacaaaggctacgacaacctgactgccgaaggcatattctgcgcccgcttctccatcaggttcggcaacggcaaaccttcctcctataaagtgttcggctacggcgacacggtcaaccgccgctggatacagccccgaaacgccgaatggaaaccgataggcggtacattaagccgcaacgacgcactgcgcaccgtcctgtatcaggcattctgcgagggcggtgtacccgccgacacgaaaggtttggtacaacgcctgaaagaacgtgccggacgctatgccccgtcgataaagccgcacaacaaataa

SEQ ID NO: 66321 - DNA, 1116 bp, Neisseria meningitidis
atggttgccgtcgctaccgcaggcgtagccgacaaaatcggtgcttcggcactgaacaatgtcagcgataagcagtggatcaacaacctgaccgtcaacctggccaatgcgggcagtgccgcactgattaataccgctgtcaacggcggcagcctgaaagacaatctggaagcgaatatccttgcggctttggtgaatactgcgcatggagaggcagcaagtaaaatcaaacagttggatcagcactacattgcccataagattgcccatgccatagcgggctgtgcggcagcggcggcgaataagggcaagtgtcaagatggtgcgatcggtgcggcggtcggtgaaatccttggcgaaaccctactggacggcagagaccctggcagcctgaatgtgaaggacagggcaaaaatcattgctaaggcgaagctggcagcaggggcggttgcggcgttgagtaagggggatgtgagtacggcggcgaatgcggctgctgtggcggtagagaataattctttaaatgatatacaggatcgtttgttgagtggaaattatgctttatgtatgagtgcaggaggagcagaaagcttttgtgagtcttatcgaccactgggcttgccacactttgtaagtgtttcaggagaaatgaaattacctaataaattcgggaatcgtatggttaatggaaaattaattattaacactagaaatggcaatgtatatttctctgtaggtaaaatatggagtactgtaaaatcaacaaaatcaaatataagtggggtatctgtcggttgggttttaaatgtttcccctaatgattatttaaaagaagcatctatgaatgatttcagaaatagtaatcaaaataaagcctatgcagaaatgatttcccagactttggtaggtgagagtgttggtggtagtctttgtctgacaagagcctgcttttcggtaagttcaacaatatctaaatctaaatctccttttaaagattcaaaaattattggggaaatcggtttgggaagtggtgttgctgcaggagtagaaaaaacaatatacataggtaacataaaagatattgataaatttattagtgcaaacataaaaaaatag

SEQ ID NO: 66322 - DNA, 7542 bp, Neisseria meningitidis
atgaataaaactctctatcgtgtaattttcaaccgcaaacgtggggctgtggtagccgttgctgaaactaccaagcgcgaaggtaaaagctgtgccgatagtgattcaggcagcgctcatgtgaaatctgttccttttggtactactcatgcacctgtttgtcgttcaaatatcttttctttttctttattgggcttttctttatgtttggctgtaggtacggccaatattgcttttgctgatggcattattgctgataaagctgctcctaaaactcaacaagccacgattctgcaaacaggtaacggcataccgcaagtcaatattcaaacccctacttcggcaggggtttctgttaatcaatacgcccagtttgatgtgggtaatcgcggggcgattttaaacaacagccgcagcaacacccaaacacagctaggcggttggattcaaggtaatccttggttggcaaggggcgaagcacgtgtggttgtaaaccaaatcaacagcagccattcttcacaaatgaatggctatattgaagtgggcggacgacgtgcagaagtcgttattgccaatccggcagggattgcagtcaatggtggtggttttatcaatgcttcccgtgccactttgacgacaggccaaccgcaatatcaagcaggagaccttagcggctttaagataaggcaaggcaatgttgtaatcgccggacacggtttggatgcccgtgataccgatttcacacgtattctcagttatcattccaaaattgatgcacccgtatggggacaagatgttcgtgtcgtcgcgggacaaaacgatgtggtcgcaacaggtaatgcacattcgcctattctcaataatgctgctgccaatacgtcaaacaatacagccaacaacggcacacatatccctttatttgcgattgatacaggcaaattaggaggtatgtatgccaacaaaatcaccttgatcagtacggccgagcaagcaggcattcgtaatcaagggcagttgtttgcttcttccggtaatgtggcgattgatgcaaatggccgtttagtcaatagtggcacgatggctgccgccaatgcgaaagatacggataatacagcggaacacaaagtcaatatccgcagtcagggcgttgaaaacagcggtacggcggtatcgcaacaaggcactcaaattcacagtcagtcgattcaaaacactggcacattattgtcctcaggcgaaatattgattcacaattcgggcagcctgaaaaatgaaacatcaggcaccattgaagccgctcgtttggctattgataccgacacacttaataatcaaggcaaactctctcaaacaggttcacaaaaactccatattgatgcacaaggcaaaatggataaccgtggccgcatgggtttacaagataccgcaccaaccgcgtcaaatggttcaagcaatcaaaccggcaatagttacaatgcatctttccattcatccactaccacaccaacaacggcaacaggtacgggtactgcaaccgtttctatatcaaacataactgcgcctacctttgctgatgggacaattcgcactcatggtgcactggataattcaggcagtattattgccaatggtcaaacagatgttagtgcgcaacaaggtttaaataatgcaggacaaatagacattcatcagttaaatgcaaaaggttcggcgtttgacaatcacaatggaacaattatcagtgatgcggtccacattcaagccggcagcctgaataatcaaaatggcaacatcacaacacgccaacagttagagattgaaaccgatcaactggataacgctcatggcaagttattatcagcagaaatagcggatttagccgtttcaggcagcctgaacaatcaaaatggcgaaatagcgaccaatcaacaactgattattcacgatggtcagcaatctaccgctgtcattgataatacgaatggcacgatacaatcaggccgtgatgttgctattcaggcaaaatcgttatccaacaacggcacacttgccgctgataataaactggatattgcgttacaagatgattatgtagaacgcaatatcgtggcgggcaatgaattgtcgctcagtacacgaggcagcctgaaaaattcacatactttgcaagcaggaaaacgcattcggattaaagcaaataaccttgataatgcagcacaaggcaacattcaatccggcggtacgacagacattggcacgcagcacaatttaaccaatagaggcttgattgacggacaacaaaccaaaatccaagccgggcaaatgaataatatcggtacaggtcggatttatggcgacaatatcgctattgcggctacccgcttagacaatcaagatgaaaacggtacaggtgccgccattgcggcacgtgaaaacctgaatttaggcatcggacaattaaacaaccgtgaaaacagtctgatttacagcggtaacgatatggcggttggcggcgcattagataccaatggccaagccacaggcaaagcccaaaggatacacaatgccggcgcaaccattgaagctgcaggcaaaatgcgtttaggtgtagaaaagctgcacaataccaatgagcatttgaaaacgcagttggtagaaacagggcgcgagcatattgttgatcacgaagcatttggacgacacgaattattgcgagaaggcacgcaacatgaattaggctggtctgtctataacgatgaatcagaccacttacgcacccctgatggagcggcgcatgaaaattggcataaatacgattatgaaaaagtcacccaaaaaacccaagttacccaaactgcgccagccaaaatcatttcaggtaatgatttaaccattgatggtaaagaagtatttaataccgatagccaaatcattgctggtggcaatctcattgtacaaacagaaaaagacggtttgcataacgagcaaacctttggcgaaaagaaagtattcagtgaaaatggcaaattacacagctattggcgtgagaaacataaaggacgagactcaacgggacatagcgaacaaaattacactttgccggaggaaatcacacgcaacatttcactgggttcatttgcctatgaatcgcatcgcaaagcattaagccatcatgcgcccagccaaggcactgagttgccgcaaagcaacggtatttcgctaccctatacgtccaattcttttaccccattacccagcagcagcttatacattatcaatcctgtcaataaaggctatcttgttgaaaccgatccacgctttgccaactaccgtcaatggttgggtagtgactatatgctggacagcctcaaactagacccaaacaatttacataaacgtttgggtgatggttattacgagcaacgtttaatcaatgaacaaatcgcagagctgacagggcatcgtcgtttagacggttatcaaaacgacgaagaacaatttaaagccttaatggataatggcgcgactgcggcacgttcgatgaatctcagcgttggcattgcattaagtgccgagcaagtagcgcaactgaccagcgatattgtttggttggtacaaaaagaagttaagcttcctgatggcggcacacaaaccgtattggtgccacaggtttatgtacgcgttaaaaatggcgacatagacggtaaaggtgcattgttgtcaggcagcaatacacaaatcaatgtttcaggcagcctgaaaaactcaggcacgattgcagggcgcaatgcgcttattatcaataccgatacgctagacaatatcggtgggcgtattcatgcgcaaaaatcagcggttacggccacacaagacatcaataatattggcggcatgctttctgccgaacagacattattgctcaacgcaggcaacaacatcaacagccaaagcaccaccgccagcagtcaaaatacacaaggcagcagcacctacctagaccgaatggcaggtatttatatcacaggcaaagaaaaaggtgttttagcagcgcaggcaggaaaagacatcaacatcattgccggtcaaatcagcaatcaatcagagcaagggcaaacccggctgcaagcagggcgcgacattaacctagatacggtacaaaccagcaaacatcaagcaacccattttgatgccgataaccatgttattcgcggttcaacgaacgaagtcggcagcagcattcaaacaaaaggcgatgttaccctattgtcagggaataacctcaatgccaaagctgccgaagtcagcagcgcaaacggtacactcgctgtgtctgccaaaaatgacatcaacatcagcgcaggcatcaacacgacccatgttgatgatgcgtccaaacacacaggcagaagcggtggtggcaataaattagtcattaccgataaagcccaaagtcatcacgaaaccgcccaaagcagcacctttgaaggcaagcaagttgtattgcaggcaggaaacgatgccaacatccttggcagcaatgttatttccgataatggcacccagattcaagcaggcaatcatgttcgcattggtacaacccaaactcaaagccaaagcgaaacctatcatcaaacccagaaatcaggattgatgagtgcaggtatcggcttcactattggcagcaagacaaacacacaagaaaaccaatcccaaagcaacgaacatacaggcagtaccgtaggcagcttgaaaggcgataccaccattgttgcaggcaaacactacgaacaaatcggcagtaccgtttccagcccggaaggcaacaataccatctatgcccaaagcatagacattcaagcggcacacaacaaattaaacagtaataccacccaaacctatgaacaaaaaggcctaacggtggcattcagttcgcccgttaccgatttggcacaacaagcgattgccgtagcacaaagcagcaaacaagtcggacaaagcaaaaacgaccgcgttaatgccatggcggctgccaatgcaggctggcaagcctatcaaacaggtaagagtgcacaaaacttagccaatggtacaaccaatgccaaacaagtcagcatctccataacctacggcgaacagcaaaaccgacaaaccacccaagttcaagccaatcaagcccaagcgagtcaaattcaagcaggtggtaaaaccacattaatcgccacaggcgcagcagaacaatccaatatcaacatcgcaggctcagatgttgccggcaaagcaggcacaatcctgattgccgataacgacatcacactccaatcagccgagcaaagcaataccgaacgcggccaaaacaaatcggcaggctggaacgcaggtgctgccgtatcattcggacaaggaggctggtcattaggcgttaccgcaggcggcaatgtcggcaaaggctacggcaatggcgacagcatcacccaccgccatagccatatcggcgacaaaggcagccaaacccttatccaaagcggtggcgacactaccatcaaaggcgcgcaagtacgcggcaaaggcgtacaagtcaatgccaaaaacctaagtattcaaagcgtacaagatagagaaacctatcaaagcaaacaacaaaacgccagtgcacaagttaccgtaggttatggcttcagtgccggtggcgattacagccaaagcaaaatccgagccgaccatgtttcagtaaccgagcaaagcggtatttatgccggagaagacggctatcaaatcaaggtcggaaaccatacagacctcaaaggcggcatcatcaccagtacccaaagcgcagaagacaagggtaaaaaccgctttcagacggccaccctcacccatagcgacatcaaaaaccacagccaatacaaaggcgaaagttttggattgggcgcaagtgcgtccataagcggcaaaacactgggacagggcgcacaaaataaacctcaaaacaaacacctgacaagcgtagccgataaaaacagcgcaagttcatcagtgggttatggcagcgacagcgacagtcaaagcagcatcacaaaaagcggcatcaacacccgcaacattcaaatcaccgacgaagccgcacaaatccggctgacaggcaaaacagcggcacaaaccaaagccgatattgatacaaacgtaaccacagacaccgccgaacgacattcgggcagcttgaagaacaccttcaacaaagaagcggtgcaaagtgaactggatttacaaagaaccgtcagccaagattttagtaaaaatgttcaacaagccaataccgagattaaccaacatttagacaaactcaaagcagacaaagaagcagccgaaacagcagcagccgaggcattagccaatggcgatatggaaactgccaaacgcaaagcccatgaagctcaagatgcggcagcaaaagcagataattggcaacaaggcaaagtcattctcaacatgttagcctcaggtttagctgcgccgacccaaagcggagcgggcatcgctgcggctaccgcatcgccagccgtatcgtatgcgattggacagcactttaaagatttagccggtcaaaacgcgaatggtaaactaaccgccagtcaagaaaccgcacacgttcttgcccacgcggtattaggagcagcggttgccgcagtaggagacaacaatgctctagcaggagcattgagtgcgggcgggtcggaagcggctgcgccttacatcagcaaatggttatacggcaaagaaaaaggaagcgacttaacggcggaagagaaagagactgtaacagcgattacaaatgtattgggtacggctacgggtgcggcagtcggcaacagcgcaacagatgcagcgcaaggcagcctgaatgcgcaaagtgcggtggagaataatgatactgtagagcaagtgaaatttgctcttaggcaccctagaattgctattgcaattggatctgtacataaagatcctggctctacattagagcctaatatttcaacaattgcttcaacttttcaattaaatttatttcctaatagtgaatttggtggtgaaggtggagttggcaatgcattcaggcacgttttatggcaagcaaccatcacacgagaatttggcaaagatattgctgttaaagtaggaaatagtcatgaaagtggggaaaaaattaattattctataagacgtaatctttcattagataaagcagatgaaatgattgatcaactaaataacgaaataggaagagaaatagcattaaataccaataggttaaacacaaaagagttagttggattaattctggaaacttataaaaataatggtttttatcaagcagaaagaaacagtaatggaaattatgatgttgtaagaaaaagattatctgaaaaagattaccagaatacaagcaatatattgattcacttagataatactggtgccggatttaaaattcagcagaggagaaaacaaatcagagcacaaatttcagccagacaatggagaagataa

SEQ ID NO: 66323 - DNA, 414 bp, Neisseria meningitidis
atgaaaacatcgacggtcgtttttggcggattttttatggcagacaacggagagcgaatccaaatccccgttttggaaaatcctgacattagggaaatcaatcactttttcgtatcaaattttgagaaaaaagccggcgtccttgttttcagaatcatccccgagccggaatttggcgataccgaattaactatctattttgaaaaaggatattatttgccaatgattcaaacaattttagaagacggggatattgaagtcaaaaaccttaaaacagaaaattacagcgggaaggcaagggaaatcttgggagattcctaccctattgagcatatctctaaaaatatttctacaattcaaaatataatttctgaatttatgatacaaaaacaaacaccggcaccaataatttga

SEQ ID NO: 66324 - DNA, 1008 bp, Neisseria meningitidis
ttgcaacctttagtcagcgtattgatttgcgcctacaacgcagaaaaatatttcgcccaatcattagccgccgtcgtgaatcagacttggcgcaacttggagattttgattgttgatgacggctcgacggacggcacgccctccattgcccggcgtttccaagaacaggacggcaggattaggataatttccaatccccgcaatttgggctttatcgcctctttaaacatcgggctggacgaattggtaaagtcgggggggaatattgcgcgcaccgatgccgacgatattgccgcccccggctggattgaaaaaatcgtgggcgagatggaaaaagacgcggatattgccgcgatgggttcctatttggagattttggcggaagaaaacaataaaagcgtgcttgccgccattgcccgaaacggcgaaatttggaaaaaccccctgacccatcaggaaatcacgtctgccttccccctccgcaaccccatacacaacaacacgatgattatgcggcgcagcgtcattgacggcggtttgcggttcgatcccgcctatatccacgccgaagactataagttttggtacgaagccggcaaattgggcaggctggcgaattaccccgaagccttggtcaaataccgtttccatcaagaccagacttcttccaaacacaacctgcaacagcgtaagacggcgtggaaaatcaaagaagaaatcagggcggggtattggaaggcggcaggcataaccgtcgggtcggactgcctgaattacgggcttttgaaatcaacggcatatgcgttgcacgaaaaagccttgtccggacaggatatcggatacctccgcctgttcctgtacgaatatttcttgtcgttggaaaagtattctttgaccgatttactggattttctgacagaccgcgtgatgaggaagctgtttgccgcaccgcaatataggaaaatcctgaaaaaaatgttacgcccttggaaataccggggctattga

SEQ ID NO: 66325 - DNA, 510 bp, Neisseria meningitidis; identical to SEQ ID NO: 46052

SEQ ID NO: 66326 - DNA, 300 bp, Neisseria meningitidis
ttgtccgccgtttttattgcaccttacctgacggcatttcacgaacaagaaaaaacattcgaatatgcggaattgaccgttaccgcccccaaccgcagcggacgggcaatcaaactggatgcagacgggcagcattaccggctttcctgctatgggttcgacagtttgtgcacaggcggcaatatcggcagaaccatcagggcggagcaggttagagccgttttaagcgaaaccgtcggcaaaggttttttaaacggcgttctgttggaataccgcaacagtggcagtgtctataaacaa

SEQ ID NO: 66327 - DNA, 504 bp, Neisseria meningitidis
atgaaactcgaagcaagcaagcagaagtttaaaaaatcatttattataagtctatttttttctattctttatacctctccgcttttggctgttgattacgtttacgacaattctaaattaacaaatgagcaaattgatcgcttaaaaaaacttagagataaaagcagcgaatactggaaacaagaaacttatcttctaaaaccgacgaatggtagctctcagaactctctcaaagttcccgcactatactctaaaacacaccaattcaaaaacatcaacaactcaaaaaagatttctttttatgacaaggaatacactgaagattaccttgttggcttcgcccgaggtttcggggttgaaaaaagaaatggggaagaagaaaaaacactccagcaatattttaaggactgtgtaaatactgggaattccaataatgataagtgtgaacaaccatccttcgaaaactctggcccaagattagggcgtgtcctcaatttaacttag

SEQ ID NO: 66328 - DNA, 2094 bp, Neisseria meningitidis
atgacactgaaagcaagcaagcaagcaagcaagcaagcaagcaagcacggtcgggttaatctattaacattatctgttttatcgctgttttgcacgccatatgtttgaggttcggatgcgtacgatcccgtcaaagaagccgagattaaaaacaaatttattttagaagcggcggaagacagaaattcccacgtttggcgcggcccgtgcagcatatcttttgattgcttcggtatgttcagagctcagcttggttcaaatactcgttctaccaaaatcggcgacgatgccgatttttcattttcagacaagccgaaacccggcacttcccattatttttccagcggtaaaaccgatcaaaattcatccgaatatgggtatgacgaaatcaatatccaaggtaaaaactacaatagcggcatactcgccgtcgataatatgcccgttgttaagaaatatattacagatacttacggggataatttaaaggatgcggttaagaagcaattacaggatttatacaaaacaagacccgaagcttgggcagaaaataaaaaacggactgaggaggcgtatatagaacagcttggaccaaaatttagtatactcaaacagaaaaaccccgatttaattaataaattggtagaagattccgtactcactcctcatagtaatacatcacagactagtctcaacaacatcttcaataaaaaattacacgtcaaaatcgaaaacaaatcccacgtcgccggacaggtgttggaactgaccaagatgacgctgaaagattccctttgggaaccgcgccgccattccgacatccatatgctggaaacttccgataatgcccggatccgcctgaacacgaaagatgaaaaactgaccgtccataaagcgtatcagggcggcgcggatttcctgttcggctacgacgtgcgggagtcggacgaacccgccctgacctttgaagacaaagtcagcggacaatccggcgtggttttggaacgccggccggaaaatctgaaaacgctcgacgggcgcaaactgattgcggcggaaaaggcagaccctaattcgtttgcgtttaaacaaaattaccggcagggactgtacgaattattgctcaagcaatgcgaaggcggattttgcttgggcgtgcagcgtttggctatccccgaggcggaagcggttttatatgcccaacaggcttatgcggcaaatactttgtttgggctgcgtgccgccgacaggggagacgacgtgtatgccgccgatccgtcccgtcaaaaattgtggctgcgcttcatcggcggccggtcgcatcaaaatatacggggcggcgcggctgcggacgggcggcgcaaaggcgtgcaaatcggcggcgaggtgtttgtacggcaaaatgaaggcagccggctggcaatcggcgtgatgggcggcagggccggccagcacgcatcagtcaacggcaaaggcggtgcggcaggcagttatttgcatggttatggcgggggtgtttatgctgcgtggcatcagttgcgcgataaacaaacgggtgcgtatttggacggctggttgcaataccaacgtttcaaacaccgcatcaatgatgaaaaccgtgtggaacgctacaaaaccaaaggttggacggcttctgtcgaaggcggctacaacgcgcttgtggcggaaggcgttgtcggaaaaggcaataatgtgcggttttacctgcaaccgcaggctcagtttacctacttgggcgtaaacggcggctttaccgacagcgaggggacggcggtcggactgctcggcagcggtcagtggcaaagccgcgccggtattcgggcaaaaacccgttttgctttgcgtaacggtgtcaatcttcagcctttcgccgcttttaatgttttgcacaggtcaaaatctttcggcgtggaaatggacggcgaaaaacagacgctggcaggcaggacggcgctcgaagggcggttcggcattgaagccggttggaaaggccatatgtccgcacgcatcggatacggcaaaaggacggacggcgacaaagaagccgcattgtcgctcaaatggctgttttga

SEQ ID NO: 66329 - DNA, 2691 bp, Neisseria meningitidis
atgtccgacaaccgcctcgacaccgcccggcaccattccctgttccttgcccgccagctcgacaacggcaaactcaagcccgaaattttcctgcccatgttggacaaggtgttgaccgaagctgatttccaagcttttgctgattgggacaaaatccgcgcggaagaaaacgaggaagaattggcgcggcagttgcgcgagttgcgccgttatgtcgtgtcgcagattatcgtgcgcgatataaatcgcatcagcgatttgaacgaagtaacccgcacgattacgctgtttgccgattttgccgtcaataccgcgctggatttcgcctacgcctattatcgggacatgtacggcacgccaatcgggcgttataccaaatcgccgcagcatttaagcgtggtggcgatgggcaaggcgggcggctatgagttgaacgtgtcttccgacatcgatttgattttcgtctatcccgaatcaggcgacaccgacggcaggcgcgaacggggcaatcaggaatttttcaccaaagtcgggcagaaactgattgcgctgctgaacgacattaccgccgatgggcaggtgttccgcgtcgatatgcggctgcggccggacggcgattcgggcgcgttggtattgagcgaaaccgcgctggagcaatatttgattacacaggggcgagaatgggaacgctacgcgtggtgcaaaggtcgcgtggttacgccgtatccgaacgacatcaaagcactggtgcgcccctttgtgttccgcaaatatctggattacggcgcgtatgaggcgatgcgtaagctgcaccgccaaatccgcagcgaagtcagcaaaaaaggcatggcggacaacatcaagctcggcgcgggcggcatccgcgaagtcgaatttatcgcccagattttccagatgatacgcggcggccaaatgcgtgcgctgcaattgaaaggcacgcaggaaacgctgaagaaacttgccgaaaccgggatcatgccgtctgaaaacgtcgaaaccctgcttgccgcctaccgcttcctgcgcgacgtcgaacaccgcctgcaatactgggacgaccaacaaacccaaaccctgcccacttcgcctgaacagcggcaactgctcgctgaaagcatgggtttcgacagctacgccgccttttcagacgatctcaatgttcatcggaacaaggtcaatcagttgttcaacgaaattctgagcgaacccgaagaacaaacgcaaagcaacagcgaatggcaatggacatggcaggaaaagcctgatgaagaagaacggctaggccgtctgaaagaatatgggtttgatgccgaaaccatcgccacgcggctcgaccaaatccgcaacggccataaataccgccacctttccgcccacgcccagccgcgttttgacgccattgtgccgttgttcgtacaagcggcggcagagcaaaacaacccgaccgatacattgatgcggctgttggattttctcgaaaacatcagccgccgatccgcctatctcgccttcctcaacgaacatccgcaaaccttggcgcaactggcgcagattatgggccaaagttcttgggtggcggcgtatctgaacaaatatccgattttgttggacgaactcatcagcgcgcagcttttggataccgcgtttgattggcaggcgctcgccgccgccctttcagacgacctcaaagcctgcggcggcgatactgaagcgcaaatggacaccctgcgccgcttccagcacgcccaagtcttccgtctcgccgtccaagacctcgccggactgtggacggtagaatccctctccgaccaactctccgccctcgccgacaccatcctcgccgccgccctgctgtgcgcatgggcggacatgcccaaaaaacaccgcgacacaccgcaattcgccgtcgtcggctacggcaaactcggcggtaaagaactcggctacgcctccgacctcgacctcgtctacctctacgacgacccccaccccgacgcaggcgacgtgtacagccgcctcgcccgccgcctgaccaactggctttccgccgccaccggcgcaggcagcctctacgaaaccgacctgcgcctgcgccctaatggcgacgccggtttcctcgcccacagcatcgccgcctttgaaaaataccagcgcgaaaacgcctggacgtgggaacaccaatcccttacccgcgcccgcttcatctgcggcacacccgaaattcagacggccttcgaccgcatccgcaccgaaatcctcaccgccgaacgcgaccaaaccgccttgtcaggcgaaatcatcgaaatgcgcgaaaaaatgttccccacccacccgcctgccgacagcaacgtcaaatacgcacgcggcggcgtggtcgatgtcgaatttatcgtccaatatctgatacttgcccatgcccgccagtatccgcaactcttggacaactacggcaacatcgccctcttaaacatctccgccgactgcggtttgattgacaaaaccctcgccggacaaagccgcaccgcctatcgcttctaccgccggcagcagcacaacaccaaactgcgcgacgcggcaaaaaccgaagtaagcgacgaattactgtcccattacggcaatgtcaggaaattgtggcgggaagtgttcggcgaagaagcggcaaccgcctga

SEQ ID NO: 66330 - DNA, 1410 bp, Neisseria meningitidis
atgaaatacatcagcacgcgcggcgaaaccgcacacaaaccgttcagcgaagttttattgatggggcttgcacccgacggcggcctgatgctgccggaacattatccgcaaatcgggcgggaagccttggacaaatggcgcggtttggcttatcccgaattggcgtttgaaatcatgcgcttgttcgttacggatattccggaggacgatttgcgcgatattctgaaccgtacttacacggaagcggcgttcggtactaaggaaatcacccccgtccgcacgctttcagacggcatcaaaatccaagccttgtccaacggcccgacgctggcgttcaaagatatggcgatgcagtttttgggcaatgcgtttgaatatgttttaaacaaagaaggtaaaaaactcaatatcttgggcgcgaccagcggcgatacgggttcggctgcggaatatgccttgcgcggcaaaaaaggcgtgaacgtatttatgttgtcacccgacggtaagatgagcgcgttccaacgcgcgcaaatgtacagcctgcaagacggaaatatccacaatatcgccgtgaaggggatgtttgacgattgtcaggacattgtgaaggcagtgcaaaacgatgccgcgttcaaggaaaaataccatatcggtacagtcaactcgattaactggggacgcatcgtcgcgcaagtggtttattactttgcgggctatttcaaggcgacgcaaagcaatgacgagcaggtcagcttctgcgtgccgagcggcaacttcggcaacgtttgcgcgggacacatcgccaaacaaatgggcctgcctgtccgccgcctgattgtcgcgaccaatgaaaacgatgtattggacgagtttttcaaaaccggcgcgtaccgcccgcgcaacagcgcgcatacttatgttacctccagcccgtctatggacatttccaaagcgtccaacttcgagcgtttcgtgttcgacctgatggatcgcgatcctcaggaaatcaatacgctgtgggcggaagtagcggcgggcaaaggctttgacctgcggtttgctttagaaaaagtcggtggcaaatacggttttacctccggcaaatccacccaccccgaccgcctcgccaccatcagacaggtttatgagcaagaccaagaactcatcgacccgcacactgccgacggcgtaaaagtcgcccgcgaagtgcgcgaagaaggggaaacggttgtgtgtttggaaaccgcgttggcagcgaaattcgatgcgaccatacgcgaagccgtcggcgatgccgccattccgcgccctgccgcgctggaaggtttggaaaacctgccgcagcgcgtgcaaaccgtgccgaacagtgcggatgcggtaaaaggcatcatcgaacaaacccttgcctga

SEQ ID NO: 66331 - DNA, 855 bp, Neisseria meningitidis; identical to SEQ ID NO: 53400

SEQ ID NO: 66332 - DNA, 825 bp, Neisseria meningitidis
atggacggcgcacaaccgaaaacaaatttttttgaacgcctgattgcccgactcgcccgcgaacccgattccgccgaagacgtattaaacctgcttcggcaggcgcacgagcaggaagtatttgatgcggatacgcttttgaggttggaaaaagtcctcgatttttccgatttggaagtacgcgatgccatgattacgcgcagccgtatgaacgttttaaaagaaaacgacagcatcgaacgcattaccgcctacgttatcgataccgcccattcgcgcttccccgtcatcggcgaagacaaagacgaagttttgggtattttgcacgccaaagacctgctcaaatatatgttcaaccccgagcagttccacctcaaatccattctccgtcccgccgtcttcgtgcccgaaggcaaatcgctgaacgcgcttttaaaagaattccgcgaacagcgcaaccatatggctattgtcatcgacgaatacggcggaacatccggcttggtcacctttgaagacatcatcgagcaaatcgtcggcgaaatcgaagacgaatttgacgaagacgacagcgcggacaacatccacgccgtttcttccgaacgctggcgcatccacgcggctaccgaaatcgaagacatcaacaccttcttcggtacggaatacagcagcgaagaagccgacaccatcggcggcctggtcattcaagagttgggacatctgcccgtgcgcggcgaaaaagtccttatcgacggtttgcagttcaccgtcgcacgcgccgacaaccgccgcctgcatacgctgatggcgacccgcgtgaagtaa

SEQ ID NO: 66333 - DNA, 711 bp, Neisseria meningitidis; identical to SEQ ID NO: 38308

SEQ ID NO: 66334 - DNA, 318 bp, Neisseria meningitidis
atgagcaccttcttccggcaaaccgcccaagccatgattgccaaacacatcgaccgtttcccgctattgaaattggaccgggtgattgattggcagccgatcgaacaatacctgaatcgtcaaaaaacccgttaccttagagatcaccgcggccgtcccgcctatcccctgttgtccatgttcaaagccgtcctgctcggacaatggcacagcctctccgatcccgaactcgaacacagcctcatcacccgcatcgatttcaacctgttttgccgtttcgacgaactgagcatccctgattacagtatagtggattaa

SEQ ID NO: 66335 - DNA, 1065 bp, Neisseria meningitidis
atgaaagcagcacgtttttacgacaaaggcgacatccgcatcgaatacatccccgaaccgaccgtcgcccccggcactgtcggcatcaatgttgcctggtgcggcatctgcggtaccgacctgcacgaattcatggaaggcccgattttcatcccgccctgcggtcatccgcacccgatttccggcgagtccgctcccgtaacgatgggacacgagttctccggcgtggtctatgccgtcggcgaaggcgtggacgacatcaaagtcggtcaacacgtcgttgtcgagccttacatcgtacacgacgacgtaccgaccaacccgggcagcaactaccacctctccaaagacatgaactttatcggcttgggcggctgcggaggtggcttgtctgaaaaaatcgctgtcaaacgccgttgggtgcatccgatttccgacaaaatcccgttggatcaagccgctttgatcgaaccgctgtctgtcggacaccacgcctatgtacgcagcggcgcgaaagaaggcgatgtcgcattggtcggcggcgcaggtccgatcggtttgctgttgtccgccgtactgaaagccaaaggcatcaaagtcatcatcaccgagttgagtaaagcacgcaaagacaaagcgcgcgaatccggcgttgccgactacatcctcgacccgtccgaagtcgatgttgtcgaagaagtgaaaaaactgaccaacggcgaaggcgtggacgtggcattcgaatgtaccagcgtgaacaaagtgttggatactttggtcgaagcctgcaaacctgccgccaacttggttatcgtatccatctggagccaccctgcaaccgtcaacgtccacagcgtcgtgatgaaagaactggatgtgcgcggcacgattgcctactgcaacgaccacgcggagaccatcaaactggtcgaagaaggcaaaatcaacctcgaacccttcatcacccagcgcatcaagctggacgaactggtttccgaaggcttcgagcgtctgatccacaacaacgaatccgccgttaaaattattgtgagtccaaacctgtaa

SEQ ID NO: 66336 - DNA, 474 bp, Neisseria meningitidis
atgtcccgcaataccgaagagctgcaaggcatctcgcttttgggtaatcagaaaacccgatatccgaccggctacgcgcctgaaattctcgaagcattcgacaacaaacatcccgacaacgactatttcgtcaaattcgtctgcccagagttcaccagcctctgccccatgaccgggcagcccgacttcgccaccatctacatccgctacattccgcacatcaaaatggtggaaagcaaatccctgaaactctacctcttcagcttccgcaaccacggcgattttcatgaagactgcgtcaacatcatcatgaaagacctcattgccctgatggatccgaaatacatcgaagtattcggcgagttcacaccgcgcggcggcatcgccattcatccgtttgccaactacggcaaagcaggcaccgagtttgaagcattggcgcgtaaacgcttgttcgaacacgacagccaataa

SEQ ID NO: 66337 - DNA, 531 bp, Neisseria meningitidis
atgcagggttttgaactcgaagatttgacgctttggctgatacgcgatgccggagaggatcagatgtggatagaccgttgggcggtcagttatcccgtcgtgcagatgtccgaagtatcggccggccaaagcatagaggaatggcaggcagggcttcagacggcattcgaacggatacagggtcggcatatcgccgttgtcgcacacggagcgggcgcggccgcgttcttggcgtggctgtatcgggcagacatcctgacccgggagaaaattgccaacatcatccttgtaccgcagcgtcccgatattttctccgatgatgcggaacacaccttccggcgcgtgcgctgcccctgccgtgccgcattggtggtgtccgaacacggcggcgtgccgcacggttgggcgcaaaaacaggcagatttgtggaacgcccgcctgttggtttccccgcattcgggcagtttgaacggtatgctcggcggctggcagtggggcatgaagctgatgcaggaaatgttgctggcgtga

SEQ ID NO: 66338 - DNA, 729 bp, Neisseria meningitidis
atgactacttaccgtatcgcacccagcattttatcggcagactttgcccgcctcggagaagaggtggaaagcgtcattgcggcaggtgcagatctgatccattttgacgtgatggacaaccattatgtgccgaacctgaccttcgggcctatggtttgcgcggcgttgaagccttatgcaagcgtgccgatcgatgtgcatttgatggtcgaacccgttgacgacctgattcagtcgtttgccaaagcaggagcatcgattatcacttttcatcccgaagcgagccgccatatcgaccgcagcttgagcctgattcgtgatatgggctgtcaggcggggctggtgttgaatccggcaacgcccgtatatctgttggaaaacgtattggacaggctggatatggttttgctgatgtcggtcaaccccggattcggcggacaaagcttcatcccgcacacccttgaaaaaatccgccgggtgcgggcgatgctggatcggtacgaagcacaaagcgggcggcacatcgccatcgaagtggacggcggcatcaaaaccgacaatattgccgccgttgcccgagctggtgcggatacctttgttgccggttctgcgattttcggcaaaccagactataaggcggtgattgatgcgatgagggcggaactggaaaaaagcggcaggctgaaccttgcgccaatgattgaaatagaaatgccgtctgaaaattag

SEQ ID NO: 66339 - DNA, 1011 bp, Neisseria meningitidis; identical to SEQ ID NO: 43278

SEQ ID NO: 66340 - DNA, 1458 bp, Neisseria meningitidis
atgcacaaaatcctgcccatcgcccacgtcctctcccgactgggtatgctgttttcctttatcctgctgatacccgccgccctctcctacgccttttcggacggcgcgtacaccgccttcgccaccaccgcgaccgttaccctttccggctcgtacatcgtccggctcgccaccctccggttcaggcgcgaactgcgcccgcgcgacggcttcaccctcgtcctgatgttgtggctggcgtttgccgctatggcggcgatgccgatgtacctgtatttcccgaatatgggctttaccgacgcattttttgaatcgatgtcgggactgaccaccaccggcgcgaccgtcatcccccacgtcgacgggctcgccccctccgtcaacttttggcggcatatgctcaactggctgggcgggatgggcatcatcgtccttgccgtcgccatcctgcctatgctcggcgtaggcggcacgcagttattcaaagccgaaatccccggcattgacaaagaaagcaaaatgtcgccgcgcatttcccaagtggcgaaaaaactctggttcggctacaccctgatcaccatcctcgcggcagcctgcctgcattttgccgggatgggctggttcgatgccgtctgtcacgcaatggcgaccctctcgctgggcggattttccacccacgatgccagcatagcttattacaactcccccctcatcgaggcggtcatcatcgttttcaccattgtcggcggcatcaattttgccagccatttctccgccctcaacagccgcagcctcaaaacctattggaaagacgaagaatgccggacgatgctgctgctgctctccggcagcatccttaccgccgccctgtacctgtggcacaccggttattacgccggttttaccgaatccctgcgctacaccgccttcaacttcgtctccatcggactggcaaacgggctggccaacaccgacttcgcacaatggccgctcctgatttccctgtggatgtttttcctcgccaacatcctcgccaactccggctcgaccggcggcggcatcaaaaccatacgcgccctcgtcctgttcaaattcagcctgcgcgaaatgatggtgctgctgcaccccaaagccgtccgcaccgtcaaaatcagcggcaaggccatacccgaccgcctcgcgctgaccgttatgtccttcatcttcatctactttatgaccgtcgtcctcttcagcttcctgctgatggcgagcggtatggaatttaccaccgccttcaccgccgtcatcgcctgcatcaccaacgccggccccggcctgggcgaagtcgggcccgccggcaattacgccggtttggacgtgatgcagaaatggatctgcgttaccgccatgctcttgggcaggctggaaatcttcaccgtcttcatcctcttcacccccgcctactggaagaaataa

SEQ ID NO: 66341 - DNA, 375 bp, Neisseria meningitidis
ttggctgaaggtcaaaaatcagccgtcaccgagtattacctgaatcacggcgaatggcccgccaacaacagttctgccggcgtggcatccaccccctccgacatcaaaggcaaatatgttcagaaagttgaagtcgcaaaaggcgtcattaccgcccaaatggcttcaagcaacgtaaacaatgaaatcaaaggcaaaaaactctccctgtgggccaagcgtcaagacggttcggtaaaatggttctgcggacagccggttacgcgcaccggcaccaccaccaacaacgacgaagtcaccgccgccagcgacaagcagatcgacaccaagcacctgccgtcaacagcatcgacaagaaaatcgacaccaaactag

SEQ ID NO: 66342 - DNA, 489 bp, Neisseria meningitidis; identical to SEQ ID NO: 51388

SEQ ID NO: 66343 - DNA, 393 bp, Neisseria meningitidis
atgcccacctcaaccaaaccctacatcctccgcgcactttgcgaatggtgcagcgacaacagcctcacaccgcacatccttgtctgggtcaacgaacacacgcgcgtccccatgcagtacgtccgcgacaacgaaattatgctcaacatcggcgcgaccgccacgcaaaaccttcaaatcgacaacgattggatcagcttttccgcccgcttcggcggacaggcgcacgacatatggatacctgtcggacacgtcctcagccttttcgcacgggagaccggcgaaggtatggggtttgaattggaagcgtatcgccccgacacgtcgcctgaaaacacctctgccgaaaccgcgccccggcccgccaaaaaaggcttgaaattggtcaaataa

SEQ ID NO: 66344 - DNA, 1677 bp, Neisseria meningitidis
atgagcttcaaaaccgatgccgaaatcgcccaatcctccaccatgcgcccgattggcgaaattgccgccaagctgggtctgaacgccgacaacatcgagccttacggtcattacaaggcgaaaatcaatcctgccgaagcgttcaagctgccgcaaaaacagggcaggctgattttggttaccgccattaatccgactcctgcgggtgagggtaaaaccaccgttaccatcggtttggcggacgcgttgcgccatatcggcaaagattcggttatcgccctgcgcgagccttctttgggtccggtgttcggcgtgaaaggcggtgcggcaggcggcggctatgcccaagttttgccaatggaagacatcaacctgcacttcaccggcgacttccacgccatcggcgcggcaaacaaccttttagccgccatgctcgacaaccatatctaccaaggcaacgagttgaacatcgatccgaaacgtgtgctgtggcgtcgcgtggtcgatatgaacgaccgccagttgcgcaacatcatcgacggcatgggcaaacctgttgacggcgtgatacgtcctgacggtttcgacattaccgttgcttccgaagtgatggcggtattctgtcttgccaaagacatcagcgatttgaaagagcgtttgggcaacatccttatcgcctacgccaaagacggcagccccgtttatgccaaagatttgaaggcacacggcgcgatggcggcattgcttaaagatgcgattaagcccaacttggtgcaaaccatcgaaggcacgcccgccttcgtacacggcggcccgttcgccaacattgcccacggctgtaactctgtaacggccacccgtttggcgaaacaccttgccgattatgccgtaaccgaagcaggcttcggtgcggatttgggtgcggaaaaattctgcgacatcaaatgccgtctggcagatttgaaacctgatgcagctgttgtcgtagctactgtccgcgctttgaaatataacggcggcgtggagcgtgccaacctcggtgaagaaaacctcgaagccttggcaaaaggtttgcccaacctgctgaaacacatttccaacctgaaaaacgtattcggactgcccgtcgtcgttgcgctcaaccgcttcgtgtccgactccgatgccgagttggcgatgattgaaaaagcctgtgccgaacacggcgttgaagtttccttgaccgaagtgtggggcaaaggcggcgtgggcggtgcagacttggcgcgcaaagtcgtcaacgccatcgaaaaccaaccgaacaacttcaatttttcctacgatgttgagctgagtattaaagacaaaatccgtgcgattgcccaaaaagtatacggcgctgaagatgtcgatttcagcgcggaagcgtctgccgaaatcgcctcactggaaaaactgggtttggacaaaatgccggtctgtatggcgaaaacccaatattctttgagcgacaacgccaaactgttgggctgccccgaaggcttccgcatcgccgtgcgcggcatcaccgtttccgccggcgcgggcttcatcgtcgcgctgtgcggcaatatgatgaagatgccgggtctgccgaaagttccggccgccgagaaaatcgatgtggacgaacacggcgtgattcacggcttgttctga

SEQ ID NO: 66345 - DNA, 4170 bp, Neisseria meningitidis
atgaccgataccgcaccgacagataccgatccgaccgaaaacggcacgcgcaaaatgccgtctgaacaccgccctgccccgccggcaaaaaaacgccgcccgctgctgaagctgtcggcggcactgctgtctgtcctgattttggcagtatgtttcctcggctggctcgccggtacggaagcaggtttgcgcttcgggctgtaccaaatcccgtcttggttcggcgtaaacatttcctcccaaaacctcaaaggcacgctgctcgacggcttcgacggcgacaactggtcgatagaaaccgagggggaagaccttaaaatcagccgcttccgcttcgcgtggaaaccgtccgaactgatgcgccgcagcctgcacattaccgaaatttccgccggcgacatcgccatcgttaccaaaccgactccgcctaaagaagaacgcccgccgctcagccttcccgacagcatagacctgcctgccgccgtctatctcgaccgcttcgagacgggcaaaatcagcatgggcaaagcctttgacaaacaaaccgtctatctcgaacggctggatgcttcataccgttacgaccgcaaaggacaccgccttgacctgaaggccgccgacacgccgtggagcagttcgtcgggggcggcctcggtcggcttgaaaaaaccgtttgccctcgataccgccatttacaccaaaggcggactcgaaggcaaaaccatacacagtacggctcggctgagcggcagcctgaaggatgtgcgcgccgaactggcgatcgacggcggcaatatccgcctctcgggaaaatccgtcatccacccgtttgccgaatcattggataaaacattggaagaagtactggtcaaagggttcaacatcaatccggccgccttcgtgccttccctgcccgatgccggactgaatttcgacctgaccgccatcccgtcgttttcagacggcatcgcgctggaaggttcgctcgatttggaaaacaccaaagccggctttgccgaccgcaacggcatccccgtccgtcaggttttaggcggctttgtcatccggcaggacggcacggtgcatatcggcaatacgtccgccgccctgctcggacggggcggcatcaggctgtcgggcaaaatcgacaccgaaaaagacatcctcgatttaaatataggcatcaactccgtcggcgcggaagacgtactgcaaaccgcgttcaaaggcaggttggacggcagcatcggcatcggtggcacgaccgcctcgcccaaaatctcttggcaactcggcatcggcacggcgcgcacggacggcagcctcgccattgcaagcgacccagcaaacggacagcggaaactggtgctcgacaccgtcaacatcgccgccgggcaaggcagcctgaccgcgcaaggctgtctcgagctgtttaaagaccgcctgctcaagctggacatccgttcccgcgcattcgacccttcgcgcatcgatccgcaacttccggcaggcaatatcaacggctcaataaaccttgccggcgaactggcaaaagagaaattcacaggcaaaatgcggtttttacccggcacgttcaacggcgtaccgattgccggcagtgccgacattgtttacgagtcccgccaccttccgcgtgccgccgtcgatttgcggctggggcggaacattattaaaacagacggcggcttcggcaaaaaaggcgaccggcttaacctcaatatcaccgcacccgatttatcccgtttcggtttcggactcgcggggtctttaaatgtacgcggacacctttccggtgatttggacggcggcatccgaacctttgaaaccgacctttccggcgcggcgcgcaacctgcacatcggcaaggcggcagacatccgttcgctcgatttcacgctcaaaggttcgcccgacacaagccgcccgatacgcgccgacatcaaaggcagccgcctttcgctgtcgggcggagcggcggttgtcgataccgccgacctgatgctggacggcacgggcgtgcagcaccgcatccgcacacacgccgccatgacgctggatggcaaaccgttcaaattcgatttggacgcttcaggcggcatcaacagggaacttacccgatggaaaggcagcatcggcatcctcgacatcggcggcgcattcaacctcaagctgcaaaaccgtatgacgctcgaagccggtgcggaacgcgtggcggcaagtgcggcaaattggcaggcaatgggcggcagcctcaacctgcaacacttttcttgggataaaaaaaccggcatatcggcaaaaggcggcgcacacggtctgcatatcgccgagttgcacaatttcttcaaaccgcccttcgaacacaatctggttttaaacggcgactgggatgtcgcctacgggcgcaacgcgcgcggctacctcaatatcagccggcaaagcggcgatgccgtattgcccggcgggcaggctttgggtttgaacgcattttccctgaaaacgcgctttcaaaacgaccgcatcggaatcctgcttgacggcggcgcgcgtttcgggcggattaacgccgatttggacatcggcaacgccttcggcggtaatatggcaaatacaccgctcggcggcaggattaccgcctcccttcccgacttgggcgcattgaagccctttctgcccgccgccgcgcaaaacattaccggcagcctgaatgccgccgcgcaaatcggcggacgggtcggctctccgtccgtcaatgccgccgtcaacggcagcagcaactacggaaaaatcaacggcaacatcaccgtcgggcaaagtaattctttcagtacctcgcccctgggcgggaaactcaacctgaccgttgccgatgccgaagtattccgcaacttcctgcccgtcggacaaaccgtcaaaggcagcctgaatgccgccgtaaccctcggcggcagcatcgccgatccgcacttgggcggcagcatcaacggcgacaaactctattaccgcaaccaaacccaaggcatcatcttggacaacggttcgctgcgttcgcatatcgcaggcaggaaatgggtaatcgacagcctgaaattccgtcacgaagggacggcggaactctccggtacggtcggtatggaaaacagcggacccgatgtcgatatcggcgcggtgttcgacaaataccgcatcctgtcccgccccaaccgccgcctgacggtttccggcaacacccgcctgcgctattcgccgcaaaaaggcatatccgttaccgggatgattaaaacggatcaggggctgttcggttcgcaaaaatcctcgatgccgtccgtcggcgacgatgtcatcgtattaggcgaagtcaaaaaagaggcggcggcaccgctccccgtcaatatgaatctgactttagacctcaatgacggcatccgcttcgccggctacggcgcggacgttaccataggcggcaaactgaccctgaccgcccaatcgggcggaagcgtgcggggcgtgggcacggtccgcgtcatcaaagggcgttataaggcatacgggcaggatttggacattaccaaaggcacggtctcctttgtcggcccgctcaacgaccccaacctcaacatccgcgccgaacgccgcctttcccccgtcggtgcgggcgtggaaatattgggcagcctcaacagcccgcgcattacgctgacggcaaacgaaccgatgagtgaaaaagacaagctctcttggctcatcctcaaccgcgccggcagcggcagcagcggcgacaatgccgccctgtctgcagccgcaggcgcgctgcttgccgggcaaatcaacgaccgcatcgggctggtggatgatttgggctttaccagcaagcgcagccgcaacgcgcaaaccggcgaactcaaccccgccgaacaggtgctgaccgtcggcaaacaactgaccggcaaactctacatcggctacgaatacagcatctccagcgcggaacagtccgtcaaactgatttaccggctgacccgcgccatacaggcggttgcccgtatcggtagccgttcgtcgggcggcgagctgacatacaccatacgtttcgaccgcctattcggttcggacaaaaaagactccgccggaaacggcaaagggaaataa

SEQ ID NO: 66346 - DNA, 840 bp, Neisseria meningitidis
atgaaacaactccgcgacaacaaagcccaaggctctgcactgtttacccttgtgagcggtatcgttattgttattgcagtcctttatttcctgattaagctggcgggcagcggctcgttcggcgatgtcgatgccactacggaagcggcaacgcagacccgtatccagcccgtcggacaattgacgatgggcgacggcatccccgtcggcgaacgccaaggcgaacagattttcggcaaaatctgtatccaatgccacgcggcggacagcaatgtgccgaacgctccgaaactggaacacaacggcgattgggcaccgcgtatcgcgcaaggcttcgataccttgttccaacacgcgctgaacggctttaacgccatgcctgccaaaggcggtgcggcagacctgaccgatcaggaactcaaacgggcgattacttacatggcgaacaaaagcggcggttctttcccgaatcctgatgaggctgcgcctgccgacaatgccgcttcaggaacagcttctgctcctgccgatagtgcagctccggcagaagcgaaggcagaagacaagggtgcggcagcccctgcggtcggcgttgacggtaaaaaagtcttcgaagcaacctgtcaggtgtgccacggcggttcgattcccggtattcccggcataggcaaaaaagacgattgggcaccgcgtatcaaaaaaggcaaagaaaccttgcacaaacacgcccttgaaggctttaacgcgatgccggccaaaggcggcaatgccggtttgagcgatgacgaagtcaaagcggctgttgactatatggcaaaccaatccggtgcaaaattctaa

SEQ ID NO: 66347 - DNA, 279 bp, Neisseria meningitidis; identical to SEQ ID NO: 64635

SEQ ID NO: 66348 - DNA, 486 bp, Neisseria meningitidis
atgagatttttcggtatcggttttttggtgctgctgtttttggagattatgtcgattgtgtgggttgccgattggttgggcggcggttggacgctgtttctaatggcggcaacctttgccgccggcgtgctgatgctcaggcatacggggctgtccggtcttttattggcgggcgcggcaatgagaaacggcggaagagtatccgtttatcagatgttgtggcctatccgttatacggtggcggcggtgtgtctgatgagtccgggattcgtatcctcggtgttggcggtattgctgctgctgccgtttaggggaggtgcagtgttgcaggcaggaggtgcggaaaattttttcaacatgaaccaatcgggcagaaaagagggcttttcccgcgatgacgatattatcgagggagaatatacggttgaagagccttacggcggcaatcgttcccgaaacgccatcgaacacaaaaaagacgaataa

SEQ ID NO: 66349 - DNA, 306 bp, Neisseria meningitidis
atgatttattctgaaaataaacagagtgttattgacggtatgctcggtatgaccttcagctcggaggaggatgaaatcccctggatttccgagaagttgacggagttgtcgaaacataaagacttggatattgccagattgtcattaacctgtttcggacatctcgccaggatgcatgaaaatatcggcgattgcgataaagtgattgctttattgctctcaaaacaaggtgatccggattttcaaggttttgccgaagatgcgttagacgagatttctttatttatatttaaaaagcgtccgtaa

SEQ ID NO: 66350 - DNA, 780 bp, Neisseria meningitidis
atgaaagaacacaaagcccgcaagcgtttcgggcagaattttttgcaggacacgcggattatcagcgatattgtcaacgccgtgcgcccgcaggcggatgatgtcgtgattgaaatcggcccgggtttggcggcgattaccgaacctttggcgaaaaaactgaaccgcctgcacgttgtcgaaatcgaccgcgacatcgtatgccgtctgaaaacgctgccgtttgcggataaactcgtcattcatgaaggcgacgtgttgcagtttgatttcaacaacattgaaggcaaaaagaaaatcgtcggcaacctgccgtacaacatttccacgccgcttttgttcaagctggcggaggtggcggacgatgtcgtcgatatgcactttatgctgcaaaaagaagtggtcgagcgcatggttgccgcgccgaaaagcaacgactacgggcgtttgggcgtgatgctgcaatatttcttcgatatggaaatgctgattgacgtgccgcccgaatcgttcgaccctgcgccgaaagtggattccgccgtcgtccgtatgattccggtgaaacaccgcatcggcagggcggacgatttcgagcattttgccaaactcgtgaaactcgccttccaccaacgccgcaaaaccatacgcaacaatctgaaagagcttgcaggcgacgatgatttgcaggcagtcggcatcaatccgcaagaccgtgccgaacacatcgcgccggagaaatatgtggcgttgagcaattatctggcgggcaaggccgtctga

SEQ ID NO: 66351 - DNA, 969 bp, Neisseria meningitidis
atgactgccaaacctttttccctcaacctgaccaacctcctgctgctggcggtattgtttgccgtcagcctgtcggtgggcgttgccgatttccgctggtcggatgtgttttcgctatccgacagccagcaggtcatgttcatcagccgcctgccgcgcacgtttgcgattgtgctgacgggcgcgtctatggcggtggcgggcatgattatgcagattctgatgcgtaaccgttttgtcgagccttctatggcgggtgcgggtcagagtgcggctttgggtttgcttctgatgtccctgctgctgcctgccgcgccgctgccggtcaaaatgtcggttgccgccgttgccgcgctaatcgggatgctggtgtttatgctgctgatccgccgcctgccgccgacggcgcaactgatggtgccgctggtggggattattttcggcggcgtggttgaggcggtggcgacgtttatcgcgtatgaaaacgaaatgctgcaaatgctcggcgtgtggcagcagggcgatttttcgagcgtgctgctggggcggtacgagctgctttggattacgggcggtttggcggtgtttgcctatctgattgccgaccggctgacgattttggggctgggcgagacggtcagcgtgaatttgggtttgaaccggacggcggtgttgtggtcggggctgattattgtagcactgattacatcgctggtcattgtaacggtcggcaatattccgtttatcgggctggtcgtgccgaacatcatcagccgcctgataggcgacaggctgcgccaaagcctgcctgcggtcgccctcttgggcgcgtctttggtgttgctgtgcgacattatcggacgcgtgattgtgtttccgtttgaaattccggtctctacggtttttggtgtgttggggacggctttgtttttgtggcttttgttaaggaaacccgcctatgccgtctga

SEQ ID NO: 66352 - DNA, 1098 bp, Neisseria meningitidis
atgaaatccgtccgctccttcatccgcgacgacatacaagctatgtcggcatatcagattgccgacgttccgcctggctttgccaaactcgattcgatggaaagtcccgtccacccttttgccggacatgaaacgctgttgcaggaatggcaggcacggcttgccgccgcgcccatacatctttaccccaatccctccggcagcggtttacaggaagcattacgttcggcgttcgacattcccgactgcgccgacatcgcgctgggcaacggctcggacgagctgatacagttcatcacgatgctgaccgccaaaccgggcgcggcaatgttggcagccgaacccagtttcgtcatgtaccgccacaacgccgcgctgtacggcatggattatgtcggcgttccactgaacggagatttcaccctcaacctgcccgccgtcctcgaagccgtcaggaagcaccgccctgccctgacctttatcgcctaccccaacaaccccaccggcgtatgtttcacgcgtgccgaaatcgaagccgtcatcgaagcttcagacggcatcgtcgtcgtcgacgaagcctacggcgcattcaacggcgacagcttcctgccgcaggcgggcagcattcccaacctcatcgtcatgcgtaccgtcagcaaaatcggttttgccggactgcgtatcggctatgcggcaggctgtcccgaagtcatcggcgaactgcaaaaaatcctgccgccctacaatatgaaccaactgagcctgaccaccgccaaactcgccctgcaacactacggcatcatctctgccaacatcgacagcctgaaaaacgaacgcgaacggatgttcgccgaattgggcaaaatatgccgtctgaacacctttccaagtcaggcaaacttcattaccatacgcgtacccgatgccgatttgttgtttgacacgctcaaacaaaaccgcatcttggttaaaaaactgcatggcgcgcacccgcttttggaacactgcctgcgcattaccgtaggcagccccgcacaaaacgatgccgttctcaacatcattcgccaactttactgccaaccaacggatttcctatga

SEQ ID NO: 66353 - DNA, 900 bp, Neisseria meningitidis; identical to SEQ ID NO: 36345

SEQ ID NO: 66354 - DNA, 363 bp, Neisseria meningitidis; identical to SEQ ID NO: 55741

SEQ ID NO: 66355 - DNA, 864 bp, Neisseria meningitidis
atgagaatcctattgacaggctcgaaaagccaactggcacgctgcctgcgcgaccgtcttccggaagactgggaaaccattgcgacggattccgcatccctagacattaccgatgccgatgccgtctgcaacatggtcaaaagtttccaacccgacgccattgtcaacacggctgcctatactgccgtcgacaaagcggaaggcgatgcggcagcggcatttgccgtcaatgcttccgccgtttacaaccttgccttggcagcacatcgcgcccatgcccgattcatccacatctcaaccgactatgtctttgacggaaaagggaaaagaccctaccaggaaagcgactttaccaacccttccaatgtatacggacaatccaaaaccgcaggcgagctgctcgcactgtctgccaatcccgacagccttatcctgcggacttcttggctgtttagcgaatacgggaacaactttgtccgcacgatgctgaaccttgcacgggaacgttccccgctgtccgccgtccacaaccaaatcggctgcccgacctatgccggcgatttagctgccgccatcatccgccttttgcagcaaacgtcgcccgtgcgcggcatttaccactacgccggcggcaaatccgtatcctggtacgaatttgtccaacatattttccaagcggcatcgcaacagcagacatccttccccattcccgaattgactgccgtttcagacaaggaatatccgaccgccgcccccaggcccgcatacagcattttggactgccgcaaaatcgaaaacgacttcagcatcaaaccgtcagactggcaaaaagcccttgcacaggtcgtttccaagctgctctga

SEQ ID NO: 66356 - DNA, 732 bp, Neisseria meningitidis
ttgcaagatcgtaccggtcaaaaagtaccttccgtagtattccgcacccgcgtcggcgacacttggaaagatgtgtctaccgatgatttgttcaaaggcaaaaaagtagtcgtattctccctgcccggtgcatttaccccgacttgttcttcttcacacctgccgcgttacaacgaattgtccggcgcgttcaaagaaaacggcgttgacgcaatctactgcgtatctgtaaacgatacgttcgtaatgaacgcttgggctgccgaagaagaatccgacaacatctacatgattcctgatggcaacggcgaatttaccgaaggtatgggtatgctggtcggtaaagaagacttgggcttcggtaaacgctcttggcgttactccatgctggttaacgacggcgtggttgaaaaaatgttcatcgagcctgaagaaccaggcgatccgttcaaagtatccgatgcagatactatgctgaaattcgttgctcctgattggaaagctcaagagtctgtggcaattttcactaaaccaggttgccaattctgcgccaaagccaaacaagctttgcaagacaaaggtttgtcttacgaagaaatcgtattgggcaaagatgcaaccgttacttccgttcgcgccattaccggcaagatgactgcccctcaagtcttcatcggcggcaaatacatcggcggcagcgaagatttggaagcttacttggctaaaaactga

SEQ ID NO: 66357 - DNA, 1443 bp, Neisseria meningitidis
atgcatccgacctattccgccgtacaggcgcggctgctcgaagccaaccgcctttcccccgaactgctcgccaaaagcctgtgcatcatcggcgcgcaccacgtcgattacgccgacatctactgccagcgcaccgcttatgaaagctggcatttggaagagggcatcgtcaaatcgggcagcttccaaatcaatcagggcgtgggcgtgcgcgccgtttcgggcgacaaaaccgcctttgcctacgccgacagcctgtgcatcgattcgataaaccgttccgcccgcgccgtccgcgcgattggggcggcaggcggcaaggtgtccgccaaaatgccgtctgaaacgcgcggcaagccggtttgttccgcgtccgaccccattgccggcctcgattccgccgccaaagtcgcgctgttgaacaaagtggaagcaatcgccaaagccgccgatccgcgcatcgtgcaagtgatggccggtttgacctgcgaatacgatatggtttacctcgcccgtctggacggcaaacacgccgccgacatccgcccgatggtgcgcctgaacgttaccgttatcgccaaacagggcgaacgccgcgaacagggcagcgcgggcggcggcggacgctacgacttggcttatttcgatgaaaacttggtgcggcagtttgtcgatgccgccgtcaaacaggcactcaccaacctcgaatcccgccccgcgcccgctggcgaaatgaccgtcgttttgggcaacggctggccgggcgtgttgctgcacgaagcggtcggacacggtttggaaggcgatttcaaccgcaaggggacaagcgtcttttccggccggatcggagagcgcgtcgccgccaaaggcgttaccgtcgtcgatcagggcgatattgccggccggcgcggttcgctcaacatcgacgacgaaggcaacgaaacccgccgcaccgtattgattgaagacggcattttagtcggctatatgcaggacgaaaccaatgcccgcctgacgggtacgcaatccaccggcaacggccgccgcgaaagttacgcttccgcccctatgccgcgcatgaccaatacctttatggaaaatggcagctatgagccggaagaaatcatcgcgtccatcgacaaaggcatttacgccgtcaactttggcggcggacaggtggacattaccagcggcaaatttgtgttcagcgcgtccgaagcatggtgggtggaaggcggcaggctgcaataccccgtcaaaggcgcgaccattatcggcaacggccccgaagtgctgaaacacgtttcgatgataggcaacgatactgcgctcgacagcggtgtcggcgtgtgcggcaaagaagggcagagcgtccccgtcggcgtggggcaaccgactttgcggattgatgccggactgaccgtcggcggcagcgcaatctga

SEQ ID NO: 66358 - DNA, 885 bp, Neisseria meningitidis
atgagcagcggaaatatccacatccacagcatgaccggctttgccaacgcggcggcagagtgcggcagcaaacgcatcaacctcgacatccgcgccgtcaaccaccgctttttggacattcaaatcaggatgccggatgatttgcgctatttggaaagcggtatccgcgagaaaatttcatcccatatcgcgcgcggcaaagtcgaatgcaaaatccaaattcaagatacggaaaacagcagacagtccttggaactcaactcggatttggtgaaccagcttgccgaaatcaacaaaaacctccgcaagcatcacgatttggcaaaactgggcgttgccgacatcctgcgtttccccggcgtattggcaagccaaagggaaaatacggaggaattggcaaaaagcattaccgaactgaccgaaaaagcgttaaaagactttactgccgcacgccggcgcgaagggaaaaaattgggcgagcacctgttacaacgcctcgaaagcatggaagaaatcatagatgcattgagcgaactctttcctaccctgctggaaacacataaagaaaaaatccgcgcccgcctcgtcgaagcagtcggcgacatcaataatgacaggctgcaacaggaatttgccctctttattcaaaaatccgacatcgacgaagaattcagccgcctgcgcacgcatatcgacgaagtacgccgcatcgttaccgaacacaaaggcagcagcggaaaacgcttggatttcctgatgcaggaattaaaccgcgaagccaacactttgggcagcaaatccattgccgccgaatgcacccaagcctcggtcgaactgaaagtcttaatcgagcagatgcgggaacaagtgcagaatatcgaataa

SEQ ID NO: 66359 - DNA, 1101 bp, Neisseria meningitidis
atgacccgtatcgccatcctcggcggcggcctctcgggaaggctgaccgcgttgcagcttgcagaacaaggttatcagattgcacttttcgataaaggctgccgccggggcgaacacgccgccgcctatgttgccgccgccatgctcgcgcctgcggcggaagcggtcgaagccacgcccgaagtggtcaggctgggcaggcagagcatcccgctttggcgcggcatccgatgccgtctgaacacgcacacgatgatgcaggaaaacggcagcctgattgtgtggcacggacaggacaaacctttatccaacgagttcgtccgccatctcaaacgcggcggcgtagcggatgacgaaatcatccgttggcgcgccgacgacatcgccaaacgcgaaccgcaactcggcagacgtttttcagacggcatctacctgccgaccgaaggccagctcgacgggcggcaaatattgtctgcacttgccgacgctttggacgaactgaacgtcccttgccattgggaacacgaatgtgcccccgaagacttgcaagcccaatacgactggctgatcgactgccgcggctacggcgcaaaaaccgcgtggaaccaatcccccgagcacaccagcaccctgcgcggcatacgcggcgaagtggcgcgggtttacacacccgaaatcacgctcaaccgccccgtgcgcctgctacacccgcgctatccgctctacatcgccccgaaagaaaaccacgtcttcgtcatcggcgcgacccaaatcgaaagcgaaagccaagcacctgccagcgtgcgttccgggctggaactcttatccgcactctatgccgtccaccccgccttcggcgaagccgacatcctcgaaatcgccaccggcctgcgccccacgctcaatcaccacaaccccgaaatccgttacaaccgcgcccgacgcctgattgaaatcaacggccttttccgccacggtttcatgatctcccccgccgtaaccgccgccgccgtcagattggcagtggcactgtttgacggaaaagacgcgcccgaacgcgatgaagaaagcggtttggcgtatatccgaagacaagattaa

SEQ ID NO: 66360 - DNA, 1569 bp, Neisseria meningitidis
atgaaacaccgtactttcttttccctttgcgccaagttcggctgcctgcttgcgctgggtgcttgttcgcccaaaatcgtcgatgccggagccgcgaccgtgccgcacactttatccactttgaaaaccgcagacaaccgccccgccagtgtttacttgaaaaaagacaaaccgacgctgattaaattttgggcgagctggtgtcctttgtgtctgtccgaattgggacagaccgaaaaatgggcgcaagatgcaaaattcagctccgccaacctgattaccgtcgcgtctccgggctttttgcacgagaaaaaagacggcgacttccaaaaatggtatgccggtttgaattatcccaagctgcccgtcgtaaccgacaacggcggcacgatcgcccaaagcctgaatatcagcgtttacccttcgtgggcgttaatcggtaaagacggcgacgtgcagcgcatcgtcaaaggcagcatcaacgaagcgcaggcgttggcgttaatccgcgacccgaatgccgatttgggcagtttgaaacattcgttctacaaacccgacactcagaaaaaggattcaaaaatcatgaacacgcgcaccatttacctcgccggcggctgcttctggggcttggaagcctatttccaacgcatcgacggcgtggttgacgcggtatccggctacgccaacggcaacacgaaaaatccgagctatgaagacgtgtcctaccgccatacgggccacgccgaaaccgtcaaagtgacctacgatgccgacaaactcagcctagacgacatcctgcaatatttcttccgcgtcgttgatccgaccagcctcaacaaacagggcaacgacaccggtacgcaataccgcagcggcgtgtactacaccgaccccgccgaaaaagccgtcatcgccgccgccctcaaacgcgagcagcaaaaataccaactgcccctcgttgttgaaaacgagccgctgaaaaacttctacgatgccgaggaataccatcaggactacctgattaaaaaccccaacggctactgccacatcgatatccgcaaagccgacgaaccgctgccgggcaaaaccaagaccgccccgcaaggcaaaggcttcgatgcggcaacgtataaaaaaccgagtgacgccgaactcaaacgcaccctgaccgaagagcaataccaagtgacccaaaacagcgcgaccgaatatgccttcagccacgaatacgaccatttgttcaaacccggcatttatgtggacgttgtcagcggcgaacctttgttcagctccgccgacaaatatgattccggctgcggctggccgagcttcacgcgcccgattgatgcaaaatccgttaccgaacacgatgatttcagctacaacatgcgccgcaccgaagtgcgcagccacgccgccgactcacacttggggcacgtcttccccgacggcccgcgcgacaaaggcggactgcgctactgcatcaacggcgcgagcttgaaattcatcccgctggaacaaatggacgcggcaggctacggcgcgttgaagagtaaagtgaaataa

SEQ ID NO: 66361 - DNA, 546 bp, Neisseria meningitidis
atgggcaaaaccgtaaccttaaccgctggacacagcaacaccgacccgggtgcggtcaacggcagcgaccgtgaggcggacttggcgcaggatatgcgcaacattgtggcttcaatcctgcgtaacgattacggcctgaccgttaaaaccgacggcacgggcaaaggcaatatgccgctgcgcgaagcggtcaagctgattcgcggctcggatgtggcgattgagtttcacaccaacgctgccgtcagcaaagcggcgacaggcatcgaagccttgagtaccgttaaaaacaaacgctggtgtcaggtgttgagcaaagccgttgccaagaaaaccggctggaaactgcgcggcgaagacggctttaaacccgacaatgcgggccagcattcgcgcctggcttatgcgcaggcaggcggcattgtgtttgagccgttttttatcagtaacgacactgatttggccttgtttaagacgaccaaatggggcatctgccgcgcgattgcggacgcgatcgcgatggaattgggggcggcaagagtatga

SEQ ID NO: 66362 - DNA, 1395 bp, Neisseria meningitidis
atgaccgtcaaaacccgtttcgcccccagccctaccggctacctgcacatcggcggcgttcgcaccgccttgttctcatgggcgtttgcccgccatcataaaggcgaattcttattgcgcatcgaagacaccgacttggcgcgttccaccgctgaatccgtcaacatcatcctcgacggcatgaaatgggtcggtctctattacgacaacgccgataacgtcgtttaccaaacccgccgtttcgaccgctacaaagaagtcattgccgaacttttagaaaaaggccatgcctactactgctattgcagcaaagaagaactggaagccatgcgcgagaaagccgaaaaagaaggcacggcgacttacgaccgccgctggcgtccggaagaaggcaaaaccctgcccgaaattcctgccgacgtgcaacccgtcgtccgcttcaaaacgcctttggacggcgtgaccaaatggacggacttggtcaaaggcgaaatctctattcccaacgaagcgcttgacgacctgattatcgcccgcgccgacggtacgccgacttacaacttctgcgttgtcgtagacgactacgacatgggcgttacccacgttatccggggcgacgaccatgtgaacaacacgccgaaacaaatcaacatcttaaaagccattggcgccaccctgcctgaatacggccacctgcccatgattctcaacgaacaaggcaaaaaaatctccaaacgcagcggcgataccgttgccattaccgactttggcgcaatgggtatcctgcctgaagccatgctcaactatctggcacgcttgggctgggcgcacggcgacgatgaattcttcacaatggaacaattcatcgaatggtttgatttgaaagacgtttccccgtctccaagccgtatggacttgaaaaaactctactggaacaacggcgaacacatcaaaatcaccaccaacgaaaaactggccgaaatggtgaaaccgcgcctcgccctgcgcgatatccatgaaacaagcaagcctgctttggaagacgtgttggcattggtcaaagaccgcgcccaagatttgaacgccttggcagacgaatgtctgtatttctacaaaaaacaagtccctgccgaagccgatgttgccaaacactgggacgacgaagccgccgcccgtatgctgcgcttcgccgaacgcctcgaagggctggaagactggaacaccgaagccatccacgatctgttcaaacctttctgcgacgaagaaggcatcaaaatgggcaaactcggcatgcctttgcgcctcgctgtctgcggcacggcgaagaccccaagcgtcgatgccgtgttggcattaatcggcaaagaagaagtgttgaaacgcatccgcgcttaa

SEQ ID NO: 66363 - DNA, 582 bp, Neisseria meningitidis; identical to SEQ ID NO: 54271

SEQ ID NO: 66364 - DNA, 1449 bp, Neisseria meningitidis
atgaaaggcgatattggcgtaatcggtttggcggttatggggcaaaacctgattttgaatatgaacgattgcggatttaaggttgtcgcctacaaccgaacaatcggtaaggtggacgaatttttaaacggcgcggctaagggaacggatattgtcggcgcgtattccctgcaagacttggtcgataagctggcaaaaccgagaaaaatcatgatgatggttcgcgcaggttcggtcgtcgacgactttatcgaacaactgctgcccctgttggacgaggaagacatcattatcgacggcggcaatgccaattaccccgacacgacacggcggacacattaccttgccgaaaaagggattttgtttgtcggggcgggcgtatccggcggcgaagaaggcgcgcggcacggcccgtccattatgccgggcggggataagcgcgcttgggaagccgtcaaaccgatttttcaggcgattgccgccaaaacgccgcagggcgaaccgtgttgcgactgggtcggcaaggacggcgcggggcattttgtcaaaatggtgcataacggcatcgaatacggcgatatgcagttgatttgcgaagcgtaccagtttatgaaagacggcttggggctgtcttacgacgaaatgcaccgcgtgtttgccgagtggaacaaaaccgagctggattcttatctgattgaaatcacagcggcaattttgggctataaggacgaaggcggtgaaccgctggtcgagaaaatcctcgatacggcagggcaaaaaggcacgggcaaatggacgggcatcaatgccttggatttgggtattccgttgacgctgatttccgaagcggtattcgcccgctgcgtttcgtcgttcaaagaacagcgcgtgcagaccggcaagctgttcgcccgaaccgttacgcccgtcgaaggcggcaaacaagaatgggttgaggcgttgagacaggccctgcttgcatccaaaatcatttcctacgcacaaggctttatgctgatccgcgaagcgggcgaaagctacggctgggatttggactacggcaacactgcgctgctgtggcgcgaggggtgcatcattcgcagcgcgtttttgggcaatatccgcgatgcctatgaaaacaatcccgatttggtgttcttgggtgcggatccgtatttcaaaaatattttggaaaactgcctgccggcgtggcgcaaggtggttgccaaggcggtcgaatgcggcatccctatgccctgcatggcttcggcgattacgttcttggacggctacacgaccgaacgtctgcctgccaacctcttgcaggcacagcgcgactacttcggcgcgcacacttacgaacgcaccgacaaaccgcgcggcgagtttttccataccaactggacgggcaagggcggagataccgcttcgacaacctacgatatttga

SEQ ID NO: 66365 - DNA, 1212 bp, Neisseria meningitidis
atgaaccaactgaaacttgccgtttccggcgcgcagattttatttgtggcattcggcgcaatggtgctggttcccctgctgaccggtctgaatccggctcttgcgcttttgggcgcaggcttgggaacgctgctgttccaaatcacaaccaaacgcaaagtgccgatttttcttggttcttcgtttgcctttatcgcaccgattatctactccgtcggcgaatgggggctgccttccaccatgttcggactgtttgccgccggctttatgtattttgtgtttgccgcgctgatccgttggcgcggactggcagcggtacacaaactgctgcctccggtcgtcatcggccccgtcatcatggtcatcggtctgtctgttgccgtggcggcaagcagcatggcaatgggtcaggcggacggcaaacaggtcatcgactataccgattcgctgattctttccggctttacctttgccgttaccgccatcgtatcggttttcggcagcaggatgatgaagctgattcccatcttgatcggtgtcgcttcgggttatgttttggcactgctgatgggactggtggacacggcaagcattgcacacgcgccctggttcgccgttccccattttgaaacgcctcagatcaactggcaggctgcactgtttatgctgcccgttgccgtcgcccccgccatcgaacacatcggcggcatcatggcaatcggcaatgtgacggggaaagactatacgaaagacccgggcttggacaaaacccttgcaggcgacggtttgggcgtatgcgttgcgggtctgatcggcggcccgccggttacgacctacggcgaagtaacgggtgcggtgatgattaccaaaaacagcaaccccgtcatcatgacttgggcggcggtttttgccgtctgcatggcgtttttcggcaaattcaatgcgtttttggcttccattccgatgccagtaatgggcggcattatgctgctgctgttcggcacgattgcttctttgggcgtgaaaacgctgattgatgccaaagtcgatttgatgctgccgaaaaacctggtcatcgtcagctcggtactgaccacgggcatcggcggcatgacgctcaaattgagcagcttcagctttgccggcgtgggcttgtgcgccgtacttgccattatgttgaacagcctgctgcccgatccgaaagaatcctga

SEQ ID NO: 66366 - DNA, 591 bp, Neisseria meningitidis; identical to SEQ ID NO: 43293

SEQ ID NO: 66367 - DNA, 450 bp, Neisseria meningitidis
atgaaaatcggaacaacttggcagacggcatccgctatgctggttttgcgtctgtttgccgcatatgaatttttggaatcgggtttgcaaaaatggaacggggagaattggttttctgaaatcaacgatcaattcccattcccgttcaacttgctgccggacgcgttaaactggaatctcgccatgtatgcggagcttttgctgcccgtactgttgcttttgggtttggcaacgcgtctgtcggcattagggctgatggtcgttaccgccgtcgcttgggctgcggttcacgccggttcgggttacaatgtctgcgacaacggttataaaatggctttaatttatatcgtggtattaatcccgctgcttttccagggtgcgggcggatggtcgctggatacgctactgaaaaaacggttttgcccccaatgccgtctgaagcaagattga

SEQ ID NO: 66368 - DNA, 537 bp, Neisseria meningitidis; identical to SEQ ID NO: 40264

SEQ ID NO: 66369 - DNA, 633 bp, Neisseria meningitidis; identical to SEQ ID NO: 41857

SEQ ID NO: 66370 - DNA, 789 bp, Neisseria meningitidis
atgctcaccctatacggagaaactttcccctcgcggctgctgctcggcacggctgcctacccgacccctgaaatcctcaaacaatccgtccgtatcgcccaacccgcgatgattaccgtctcgctgcgccgcacgggaagcggcggcgaggcgcacggtcaggggttttggtcgctgcttcaagaaaccggcgttcccgtcctgccgaacacggcaggctgccaaagcgtgcaggaagcggtaacgacggcgcaaatggcgcgcgaagtgtttgaaaccgattggattaaactcgaactcatcggcgacgacgacaccttgcagccggatgtgttccaacttgtcgaagcggcggaaatcctgattaaagacggcttcaaagtgctgccttattgcaccgaagacctgattgcctgccgccgcctgctcgatgtgggctgtcaggcgttaatgccgtgggcggctccgatcggcacgggtttgggcgcggttcacgcctacgcgttgaacgtcctgcgcgaacgcctgcccgacacgccgctgattatcgacgcgggcttgggtttgccctcacaggcggcacaagtgatggaatggggttttgacggcgtgcttttgaatactgccgtttcccgcagcggcgatccggtcaatatggcacgcgccttcgcactcgccgtcgaatccggacggctggcatttgaagccgaaccggtcgaagcacgcgacaaagcgcaagccagcacgccgacagtcggacagccgttttggcattcggcggaatattga

SEQ ID NO: 66371 - DNA, 1620 bp, Neisseria meningitidis
atggacaatctcgtatgggacggcattcccgacatccgcacactcgaccaaaccatccgcaaacacgcacacccgctcaacctgattgtctgcctccccgataatcagattcccgattttcaaaccgcacaagatgcttcggacgcggaatgccgtctgaagcaccgtttggatcaggcaacgcagtgcctccagttcgacagcatcaacctcatcgaacacatcctgcccgatgtccgcttctggctggttcccccttcacgcacccgccgcctgcacgaacacttccaccacatttcctggcagaccgaagccatcctgcaaaccgaaagcaagcccgacaaaccctggtttgcacttccacaaacatccgaacggcaaaaaccggaacacgttctcgttatcggcgcgggtattgccggcgcgtcaaccgcccacgccttagcatcacacggcatttccgttaccgtattggaaacccgaaaagccgcccaagccgccagcggcaaccgccaagggctgctctacgccaaaatctcgccgcacgacaccgaacaaaccgaactgctgcttgccggctacggctacaccaaacgcctgctcggacacatcctgcccgaatccgaaacctggggcggcaacggcatcatccacctcaattacagccgcatcgaacaacaacgcaatcacgaattgggtttgcaaaaacaccataaccacctctaccgcagcatcacgtctgcagaagccgaaaaaatcgccggtatcccactgtccgtcccatacgaccacccttcatgcggactctactggcaacacggcgtatggctcaatccacccgcattcgtccgcgccctcctcaaccatccgctcattggactacacgaagacacaccgttaaccgacatttcccacgacggggaaaagtggattgcaagcacgccaaacggcatattttccgccacacacatcatctactgcaccggcgcgcacagctcctgcctgcccgaaaccaacctcgccgccctgcctctcaggcaaatacgcggacaaaccggcctcacaccatccaccccgttttccgaacaactgcgttgcgccgtttcaggcgaaagctacatcagcccgtcgtggcacggactgcactgctacggcgcgagttttattcccaacagcagccataccggatggaacgaagccgaagaagcctcaaaccgccaagcattggcacagcttagccccgccctcgccgaatcattgtttgccgccaacccaatcccccaaaaacaccaagggcacgccgccatgcgctgcgacagccccgaccaccttcccctagtcggcgcactcggcgacattgccgctatgcaacaaacttacgccaaactcgcgctggacaaaaactatcgcatcgacgccccctgcccgtacctgcccaatgcctacgccaacaccgcccacggcacacgcgggcttgccaccgcccccatctgcgccgccgccgttgcagccgaaatcctaggcttgccccatcccctctcaaaacgcctgcgccacgccctacaccccaaccgcaccatcatccgcgccatcgtcagaaggaaggatctaaccccttaa

SEQ ID NO: 66372 - DNA, 1671 bp, Neisseria meningitidis
atgaaaaaaatttggttagacagctacgagaagggcgtcagtgccgaaatcgacatcacgcaatacggttccgtcagcgatgtattttgccaaagtgtcaagaaatttgccggccaacctgcttttcaaaatatgggcaaaacgctcacttatgccgaaaccggcaaactggcaacagattttgcttcttatctgcaaaacgtcctgaagctgccgcgcggcgaacgtgttgccattatgctgcccaacgtattgcaatacccggttgcgcttttcggcattttgcaggcaggtttggtggcggtgaacaccaatccgctctataccccgcgcgagctggagcatcagttgaaagacagcggcgcgaccgccatcatcgttttggaaaatttcgccaacacgctggagctggtgctgccgcgcacgcagatcaaacacgttatcatcgcctctgtcggcgaaatgttcgggctgcttaaaggttcgctgatcaatttcatcatccggaaaatcaagaaaatggtgcccgaataccgtattcgggaaaccatttcctttcagacggcattgaaagagggggcgaagcacgttttccaacctgtcgcattaaaccgcgaagataccgcgctgttgcaatacacgggcggcacgacaggtgttgccaaaggggcggtgctgagccacggcaacatctgcgccaatatgcttcaggcaaaagaatggattaaaaaccagttgcgtgagggaaaagaaaccgttatcgccgccttgccgctgtaccatatttttgccttaaccgtgaatctgatgatttttgccaatgccggctcgaaaattgtcctgattaccaacccgcgcgatatgaaaggctttatcggcgaactgaaaaaacagcgggttaatgtatttatcggcgtaaacacgctgtttaacgcgatggttaaccggcccgattttgccgaagtcgatttttcaggattgcggctgactttgggcggcggtatggcgacccaaaaagccgttgccgaaaaatggaaaaaaatcaccgacacgcccatcgtcgaagcctacggtctgaccgaagccagccccggcgtgtgctgcaaccccttaaacatcgaatcatacagcggcagcatcggtttgcccgtctcgtccaccgaagtcgaactgcgcgacgcaaacggcaaagaagtccccgtcgggcagccgggcgaattgtgggtaaaaggccctcaagtgatgcaaggctactggaaccgccccgaagaaaccgccaaagccatagacgcgcgcggcttcttggaaactggcgatattgccgtcatggacgaaaaaggctggttgaagctggtcgatcgtaagaaagacctcgtcgttgtttccggattcaatgtttatccgaacgaaatcgaggaagtcatcgcgcatcacggcaaagtgatggaagtcgcctgtatcggcgtacccgacgaaaaaaccggcgaggcactcaaagtattcgtcgtcaaaaaagacccgtcattgaccaaagaagaacttatcgccttttgccgcaccgaattaaccgcatataaagttccgaaaaatatcgaattccgcgacgagttgcccaagtccaacgtcggcaaaatcctgcgccgcgagttgcgccaaagtaccgggaaataa

SEQ ID NO: 66373 - DNA, 1266 bp, Neisseria meningitidis
atgagcaaaaaccaacccgcacaaccgaccaggcgcactctttttaaaaccgcgatcgcagctggagcagtcggcgcaatcggaggttatctcggcggcaaaaaacggggcgaaaccgccgaacgcaccgccgaaagccaacactcgccccaagcctatccctgctacggcgaacatcaggcaggcatcgttacgccgcagcaggcgttttcgattatgtgcgccttcgacgtaaccgcgcaaagtgccaagcagctggaaaacctgttccgcacgctgaccgcccgcatcgagtttctcacccaaggcggcgaataccaagacggcgacgacaaacttccgccagccggcagcggcattttgggcaaagccttcaaccccgacgggttgaccgttaccgtgggggtgggcagcagcctgtttgacggccggttcggactcaaagacaaaaaaccgattcatttgcaggaaatgcgcgacttctccaacgataagctgcaaaaaagctggtgcgacggcgatttgagcctgcaaatctgtgccttcacccccgaaacctgccaagccgccctgcgcgacatcatcaaacacaccgtccaaaccgccgttatccgctggagtatcgacgggtggcagcctaaatccgaacccggcgcgatggcggcgcgcaacctgttgggcttccgcgacggcacgggcaaccccaaagtttccgaccccaaaactgccgacgaggttttgtggacgggggtggccgccaacagcctcgacgaaccggagtgggcgaaaaacggcagctatcaggcagtccgccttatccgccactttgttgagttttgggacaggacgccgcttcaagagcaaaccgacattttcgggcggcgcaaatacagcggcgcgccgatggacggcaaaaaagaagccgaccaaccggattttgccaaagaccccgaggggaataccacgcccaaagacagccatatacgcctggcgaatccgcgcgatcccgagttccttaaaaaacaccgcctcttccgccgcgcctacagctattcgcgcggactcgcctcaagcggacagcttgatgtcgggctggtgttcgtctgctatcaggcaaaccttgccgacggattcatcttcgtgcaaaacctcctcaacggcgaaccgctggaagaatacatcagccccttcggcggcggctatttcttcgtcttgcccggcgtggaaaaaggcggctttttggggcaagggctgctgggcgtataa

SEQ ID NO: 66374 - DNA, 441 bp, Neisseria meningitidis
gtgcgcgcctttcagacggcattgaggccgtcccgcatcctgaacatcctgactgtatcgcttcacgccgcctcccttgccgtctgcctgacttggttttacggccggatgatgtggttcggtttggcggctttggtggcaagttacgcatactcgctcaggataacgaacctgaaacaccgccatgccataaccgccattaccatagaccgcgacggacaggcggaaatcgtatccggcaaagacaaaacagcggcaacacttgcgggcagcagtatggttacgccttatgccttattcttacaatgggacaccggcggcaaaaccgtccgccactgcatcacccccgatatggcggacaaagaatcctaccgcaggctgaaagtctgggtgctttggcggcaaccgaaaaaaaccgccgaaaccgatacaccaagctga

SEQ ID NO: 66375 - DNA, 1395 bp, Neisseria meningitidis
atgctcgaattcccgggtaacactttcggcttggcgatgaacctggagcgcgactccgtcggcgccgtagtgttgggcgagtacgaacatattaaagaaggcgacacggttacctgtaccggtcgtatcttggaagtgccggtcgggcgcgaactggtcggacgcgtcgttgatgcattgggtcggcctatcgacggcaaaggcccgattaatacaactttgaccgcccctatcgaaaaaatcgcaccgggcgtgattgcgcgcaaatcggttgaccagccgatgcaaaccggtctgaaggcgattgactctatggttcctgtcggtcgcggtcagcgtgagttgattattggcgaccgtcagacaggtaaaacggccgtagcattggatgccatcgtcaaccaaaaaggtacgggcgttatctgtatttatgtcgctatcggtcaaaaagcatcttctattgccaacgtggtccgcaaattggaagagcatggcgcgatggaacacacgattgtggttgctgcaactgcatctgaagcggcggcattgcaatatatcgcaccttactccggttgtacgatgggtgaattcttccgcgaccgcggcgaagatgccttgattgtttatgacgatttgtccaaacaggctgtggcttaccgtcaaatttccctgcttttgcgccgtccgcccggccgcgaagcctatcccggcgatgtgttctacctgcactcccgtctgttggaacgtgcagcacgtgtcaatgaacacgaagtggagaaattgaccaacggcgaagtaaaaggcaaaaccggttctctgaccgcgttgccgattatcgaaacccaagcgggcgacgtatctgctttcgttccgactaacgtcatttcgattaccgacggtcagattttcttggaaaccgacctcttcaacgccggtatccgtcctgcaatcaatgccggtatttccgtatcccgcgtaggcggtgctgcacaaaccaaagtgattaaaaagctgggtggcggtatccgtttggcgttggcacaatatcgtgaattggcggcgttctcgcaatttgcatccgatttggatgaagctacgcgcaaacaattggagcatggcgaagtcgtaaccgaactgatgaaacagaaacagttcagtacgttgaatacggctgaaatggctttgaccctttgggcaatcaacaacggttcgtattctgatgttccggttgccaaagctctggcttttgaatctgaatttttgagctttgtccgtacccaacatccggaagttttggaagccgtcaatgcttcaggtgcaatgtccgacgagagcgagaaaacgcttgaagcagccatgaaatccttcaaatcttcttacgcctatcaggcataa

SEQ ID NO: 66376 - DNA, 588 bp, Neisseria meningitidis
ttgaatattaaactgaaaaccttgttattgcccttcgccacgctggcattgtgcaccaacgcttttgccgccccgcctagcgacgcgtcgttggcgcgttggctggatacgcagaattttgaccgggatatagaaaaaaatatgattgagggctttaatgccggatttaaaccgtatgcggacaaagcccttgccgaaatgccggaagcgaaaaaagatcaggcggcagaagcctttaaccgttatcgtgagaatgttttgaaagatttgattacgcccgaagtgaaacaggctgtccgtaatactttattgaagaatgcccgtgagatatacacgcaagaagaaattgacggcatgattgccttttacggttcgcctgtcggtcagtccgtcgttgccaaaaatccgcgcttaatcaagaaatcgatgagtgaaatagcagtatcttggactgcattgtcagggaaaatcgcgcgacatcatttgcccgcgtttacggaagagttgcggcgcatcatctgcggcggtaaaaatcccgatgcgggctgtaaacaagccggacaggttgggaaaaggcatcagaaataa

SEQ ID NO: 66377 - DNA, 375 bp, Neisseria meningitidis
atgagcaccttcttccggcaaaccgcacaagccatgattgccaaacacatcgaccgtttcccactattgaagttggaccaggtgattgattggcagccgatcgagcagtacctgaaccgtcaaaaaaaccgttaccttagagaccaccgcggccgtcccgcctatcccctgctgtccatgttcaaagccgtcctgcccggacaatggcacagcctctccgatcccgaactcgaacacagcctcatcacccgcatcgatttcaacctgttttgccgtttcgacgaactgatcatccccgattacagtaccttatgccgctaccgcaaactggctggcgcaagacgacaccctgtccgaattactcaaactgattaa

SEQ ID NO: 66378 - DNA, 357 bp, Neisseria meningitidis
atggataaaatctttttgcacggcatcaaggcggatacgcttatcggcgtgtacggctgggaacgcgaacggttgcagaccctgattgtcgatttggacatcggcgttcccgagaaagcgggttcggacgacgatattgccaatacggtgcattatgccgaggtatgcgaaacattgcgccgacatctgaaagaacaggatttcctgcttttggaagcgttggcggaatatattgccgatttggttttgggatatttcggcgcggtgtgggtacgcgtgaaaatcgtcaagccgggtattttagaaggcgtgcgcgaggttggcgtggaaatcgagcgcggcaagcgtgaagattga

SEQ ID NO: 66379 - DNA, 771 bp, Neisseria meningitidis
atgaacttcaccgacacccactgccatctcgccgatcccgccttacgcgaaaacctgccgcacattttgaccgccgcgcggaaagttggggtgaagcggtttatcgttcctgccacctgtccgcaggattggcaaagcgtggcggaactgtcggaaatgccgtccgaacacggtcaaatccgtattgcgctcggcatccatccttggttttcagacggcattgcggaacaagatttcgccggtttggcagccgtattggcgcgttatcccggcgcgtgggtcggcgaaatcggcttggatttttacgacaaaacccaaacgccgcagcagcgcgaacggcaaatccaagtcttcagccgccagcttgaaatcgcgcaaaccctgcgtcggcgcgtgattatccataatctcaaagccgccgccgacatcgccgccgccgtcaaacagacgggctttacccgaggcggcatcgtccacgctttttccggcagcgcggaagaagcgcgcgtgttgaccaagctcggtttcaaaatcggcatcggttcgctgttgctcaatccgaacgcgcgaaaaatacgcgatacgcttaaagccttgaacgacggggatttcgtattggaaacggatagcccgtttatgctgaaaaaggagattaatacgcctgccaacattcttcggattgccgaaattgccgcgcagatacgcggtaccggcgcggcggacatcgccgcgataacggaacgcaatgccgacagcctgctccgtccctag

SEQ ID NO: 66380 - DNA, 807 bp, Neisseria meningitidis
atgaatatgaaaaaatggattgccgccgcccttgcctgttccgcactcgcgctgtctgcctgcggcggccagggcaaagatgccgccgcacctgccgccaaccccgacaaagtgtaccgcgtggcttccaacgccgaatttgccccctttgaatctttagactcgaaaggcaatgtcgaaggtttcgatgtggatttgatgaacgcgatggcgaaggcgggcaattttaaaatcgaattcaaacaccagccgtgggacagccttttctccgccttaaacaacggcgatgcggacgttgtgatgtcgggcgtaaccattaccgacgaccgcaaacagtctatggacttcagcgacccgtattttgaaatcacccaagtcgtcctcgttccgaaaggcaaaaaaatatcttcttccgaagatttgaaaaagatgagcaaagtcggcgtggtaaccggctacacgggcgatttctccgtttccaaactcttgggcaacgacaatccgaaaatcgcgcgctttgaaaacgttcccctgattatcaaagaactggaaaacggcggcttggattccgtggtcagcgacagcgcggtcatcgccaattatgtgaaaaacaatccgaccaaaggaatggacttcgttaccctgcccgacttcaccaccgaacactacggcatcgcggtacgcaaaggcgacgaagcaaccgtcaaaatgctgaacgatgcgttgaaaaaagtacgcgaaagcggcgaatacgacaaaatctacgccaaatattttgcaaaagaagacggacaggccgcaaaataa

SEQ ID NO: 66381 - DNA, 1647 bp, Neisseria meningitidis
atgaaacactttcacgacttacccgcatggccgaaattgtggaaccactttgacgacagcaaaacattgcatatgcgcgaaatgttcgagcaagacccgcagcgtgcggaacgctactggctgcaagtcggcggactgacgctggactactccaaaaaccgcatcaacgacgaaaccatgtcgcttttgttcgagttggcgcgtgaagcaggcgtgccggagcggatgcggcagatgttccacggcgaaaaaatcaatacgacggaaaaccgcgccgtcctccacgtcgcccttcgcaaccgcaccaattcgccgattgtggttgacggtgaagatgtgatgccaaaagtcaaccgcgttttgcaacgtatgggcgaatttgcacacgaagtccgcagtggaagctggctgggctataccaaccaagtcattaccgacgttgtcaacatcggcatcggcggatcggatttgggcccgttgatgatgtgtaccgcgctcaaacctttcggtcatccacgcctcaatatgcacttcgtctccaacgtggacggctcgcaactgcgcgacgtattgtccaaagtccaccccgaaaccacgttgttcatcatcgcctccaaaacatttaccacgcaggaaacgctgaccaacgcgctgaccgcgcgcgaatggtttttgaatcatgcgggcgacgaagaagccgttgccaaacacttcgccgccgtttccaccaatcaaaaagccgtcgccgaattcggcatcgacaccgccaatatgtttgaattttgggattgggtcggcggtcggtacagcctgtggtccgccatcggattgccgattatgctgtatctcggcgaagaaaacttcatcgaaatgctcaacggcgcgcacctgatggaccaacacttcatcaacacaccgctcgagcgcaacctgcccgtcattctcgccctcatcggcatctggtatatcaactactacggcggcggcagccacgtcatcgcgccttacgaccaacatttgcaccgcctgcccaaattcatccagcagctcgatatggaaagcaacggcaaacaggttacgttggacggcaaagcagtcggacacgaaacctcgccgattatctggggcgaaacgggcattaacggccagcacgccttcttccaactgctgcaccaaggcacgcacattacccccatcgacctgattgcctcgcttgaaaaacgcagcaacctgcccggacaccacgaaatcctgcttgccaacgtcttcgcccaagcagaagcctttatgcgcggcaaaacccccgacgaagtccgcgccgaactcaaagcgcagggtatggatgaggcgcgcatcgaagagctggtcccgcacaaaaccttctccggcaaccgcccgaccaacctcattctcatggacaaggtcaacccgcgcaatatgggcagcctgattgccatgtacgaacacaaaaccttcgtacaaggcatcatttggggcatcaacagcttcgaccagtggggcgtggaactcggcaaacaactggctaaaaccattttgggcgaactgaccggcgaaaccgagccgcaaaagcacgacagttcgaccgaacgcctgatcaacctctacctgcagaccaaccgcaaataa

SEQ ID NO: 66382 - DNA, 483 bp, Neisseria meningitidis
atgaaatacttgaatcttgccgcaatcacccttgccgccacatttgccgcacataccgcctcggcagacgaactggccggatggaaagacaacaccccacaaagcctgcaatcactcaaagcccccgtacgcatcgtcaacctttgggcaacctggtgcggcccgtgccgcaaagagatgcccgccatgtctaaatggtacaaagcgcagaaaaaaggcagcgtcgatatggtcggcatcgcgctcgacacatccgacaatatcggcaacttcctcaaacaaactcctgtttcctacccgatttggcgttacaccgaggcgaacagccgaaactttatgaaatcctacggaaacaatattggcgtactgccctttaccgtcgtcgaagcaccgaaatgcggatacaggcagaccattaccggggaggcaaacgaaaaaagcctgaccgacgccgtcaaactcgcccattcaaaatgccgttaa

SEQ ID NO: 66383 - DNA, 1071 bp, Neisseria meningitidis; identical to SEQ ID NO: 56015

SEQ ID NO: 66384 - DNA, 180 bp, Neisseria meningitidis; identical to SEQ ID NO: 39090

SEQ ID NO: 66385 - DNA, 456 bp, Neisseria meningitidis
ttgcgcggtttgttgaaagaaggtgctcatgagaaatcccctaaatgtcttggtgggaatttaggggattttggggaattttgcaaaggtctcagcctgcgcgacacggtttgttatcccgacatcgacaaacagcatcccgagttagccgaagccatgaacacctgccgtttgggttatctgattgacaaattggataaaacagacgactggcaacataaactctcccccggcgaactgcaacgcgtcgccttcgtccgcgccctgctctcgcagcccaaaatcatcctactcgacgaagccaccgccgccttggacgaaccgaccgaagccatgctctaccgagccttaaagcaaaaactgcccgacagcatcatcatcagcatcggacaccgcagcacgctcaacgcgttccacaatatgcacctcgatgtcggcaacgttgcctgcggctga

SEQ ID NO: 66386 - DNA, 201 bp, Neisseria meningitidis; identical to SEQ ID NO: 46518

SEQ ID NO: 66387 - DNA, 1215 bp, Neisseria meningitidis
atgaccgtcaaaacccccgtttacctcgactacgccgccaccaccaccgttgacaaacgcgttgccgaaaaaatgattccctatctgaccgaaaccttcggcaaccccgcctccaacagccacgcattcggctgggaagcagaagaggccgtcgaaaaagcccgcgccgacatcgctgccctgattaatgccgaccccaaagaaatcgtcttcaccagcggcgcgaccgagtccgacaacctcgccatcaaaggcgcggcaaacttctacaaaaccaaaggcaaacacctcattaccgtcaaaaccgaacataaagccgttttagatacaatgcgcgaactcgaacgccaaggttttgaagtaacctacctcggcgttcaagaaaacggtttgattgatttggaagaactcaaagccgccatccgcgacgacaccatcctcgtttccgtaatgtgggcaaacaacgaaatcggcgtggtgcaagacattcccgccatcggcgaaatctgccgcgaacgcaaaatcgtcttccacgtcgatgccgcacaagcctgcggcaaagtgcctgtcgatgtcgaagccgccaaaatcgacctgctctcgatgtccgcgcacaaagtgtacggccccaaaggcatcggcgcgctgtacgtccgccgcaaaccgcgcgtccgcctcgaagcccaaatgcacggtggcggccacgaacgcggcttccgcagcggcacattaccgacccaccaaatcgtcggtatgggcgaagccttccgcatcgccaaagaagaactcgaacaagatatggcgcactaccgcaaactgcgcgacatcttcctcaaaggcatcgaaggcatcgaagaagtctatatcaacggcgacctcgaacaccgcgccccgaacaacctgaacgtcagcttcaacttcgtcgaaggcgaaagcctgattatggcagtgaaagaactcgccgtatccagcggctccgcctgcacctccgcctcgctcgaacccagctacgtcctgcgcgcattgggcagaaatgacgaattggcgcactcgtccctgcgcatcaccttcggtcgcatgaccactgaagaagaagtgcaattttccgccgaactgattaaatccaaaatcggcaaactgcgcgaactgtcgccgttgtgggaaatgttcaaagacgggattgatttgaactcgattgaatgggcggcgcattaa

SEQ ID NO: 66388 - DNA, 216 bp, Neisseria meningitidis
atgaaagaatacaaagtcgtcatttatcaggaaagcctgttgtccagcctgtttttcggcgcggcaaaggtcaaccccgtcaatttcagcgcgttcctcaacaaacaaacccccgaaggctggcgggttgtaacgatggaaaaagatttgcgccgtatgctgttgtttttcaaacgcgaggcctacgtcgtcattttggagcgggaccgtgtttaa

SEQ ID NO: 66389 - DNA, 1296 bp, Neisseria meningitidis
atgagcgtcatccaagacctgcaatcgcgcggccttatcgcgcaaaccaccgacatcgaagccttagacgctttgttgaacgaacaaaaaattgccctttattgcggcttcgacccgaccgccgacagcctgcacatcggacacctgctgcccgtattggcattgcgccgcttccaacaggcggggcatacgccgattgctttggtgggcggcgcgaccggtatgatcggcgaccccagcttcaaagccgccgaacgcagcttgaattccgccgaaactgttgccggctgggtggaaagtatccgcaaccaattaacccctttcttgagctttgaaggcggaaatgccgccattatggcgaacaacgccgactggttcggcaaaatgaactgcctcgacttcctgcgcgacatcggcaagcatttctccgtcaacgccatgctgaacaaagaatccgtcaaacagcgcattgaccgcgacggcgcaggcatttccttcaccgagttcgcctactccctgctgcaaggctacgacttcgccgagttgaacaaacgccacggcgcggttttggaaatcggcggctccgaccaatggggcaacatcaccgccggtatcgacctgacccgccgcctgaatcaaaaacaagtgttcggcctgaccctgcctttggttaccaaatcagacggcaccaaattcggcaaaaccgaaggcggcgcagtatggctgaacgcgaaaaaaacctcgccctatcagttctaccaattctggctgaaagtcgccgatgccgatgtgtataaattcctgaaatactttaccttcctgtccatcgaagaaatcgatgccgtcgaagccaaagaccaggcaagcggcagcaagcccgaagcgcaacgcatcctcgccgaagaaatgacccgcctgattcacggcgaagaagcccttgccgccgcgcagcgcatttccgaaagcctgtttgccgaagaccaaagcagcctgaccgaaagcgacttcgagcagctcgccctcgacggcctgcctgcatttgaagtttcagacggcatcaatgtcgtcgaagccttggtaaaaaccggtttggcatcctccaataaagaagcgcgcggctttgtgaacagcaaagcggttttgctcaacggcaaacctgccgaagccaacaaccccaaccacgccgccgaacgccccgacgatgcctgcctgctgaacggcgaacacaaacgtttcggcaaatacactatccttcggcgcggcaaacgcaaccacgcgcttttggtttggaaataa

SEQ ID NO: 66390 - DNA, 474 bp, Neisseria meningitidis
atgcaagttaccaaaaatttcagtctgcgcgagttgacacgcagtgaaaccgcgcgtcgcgcaggtgtaccgaacgaaccgtcgcccgccgaaatggacaacatttattacaccgcacagcagcttgaaaaaatccgcgaatacgtcggtcgcccgattatcgtaacaagttgcttgcgcagcgagcaggtaaacaaattggtcggtggcagcccgacatcggcgcaccggcacggacttgccgccgattgtgacgcatcgggtatgacctcgccggcatttgccaaactgttaatcaaaatgcgtgatgaaggcgcgctgaaattcgaccagttgatactcgaatttcccgagcgcggggacggcgcatgggtacacatcggtttccgacgcaacagcccgcaacgcaaccagatactgaccgcaaccaagaaaaacggcaaaaccgtgtatctgcccgggctgcatccttga

SEQ ID NO: 66391 - DNA, 627 bp, Neisseria meningitidis
atggtcattgcagccattatggcgatgatagccctccccaatatgagccaatggattgcatcccgccgcattgccagtcacgcggagcggattgccaaccttttgcgtttctccaggggcgaagccgtccggctcaatctccctgtctatatctgtcctgttcaagttaaaaaagacggtacggtcaacaataaatgtgactccggcaagaaggggcagggaatgttggctttcggcgacaaaaacggcaataagggatatgacaatgatacggcggatgttcttctccgcagtgtggtattgaatgatgatatcaatgataagcggattaattatgccttcaaccatatcgcttttggtcagactcagccgaccaccgaccgtgtagtttggacattcaatcaaaacgggacgttcggttatacgaaagaccagcatcttacaaaacaatccagctttttttattccgacggttatatccaaatcgtgctgacagatgcgagagcagtttcagatgccgataagaaattccgttcggcggtggttttgattgacagcagcggcagggtcgaagtttgccctaggggtgatcggcgtactcggcgtactatgtgccagtataaataa

SEQ ID NO: 66392 - DNA, 504 bp, Neisseria meningitidis; identical to SEQ ID NO: 36801

SEQ ID NO: 66393 - DNA, 4266 bp, Neisseria meningitidis
atgggcggcaaatcgggcggaggacaacggacaccttatgaagccccaaacagtttatccagcgcccagtcgctgcggattattgatgcggtatccgaaggtgtggtttcggggtttgccaacggcgatgatgcgccgttcaaaagcgtgtattttgatgacactcctgtccaaaattcggacggcagctacaattttaatggagttacgggttatttccagcgtggcgagcaagaccagtcctatgttccgggtttcgatgcttccgagcgcaccgtagccgtttcggctgcggtgaagcagaatcagccgatggttcgcgccgttaccgacgaattggtcagccgtttgcggattacggtcgctgtcgagcggaatgcacaggttgaagacaacggcgacaccgtgcctgctgataccttaatgcgcgttgagttgataaacagcaatggtgtgcaggcatcaaatcaggtgcgtttcaatgaaaaatccagcgggacatattatcaggatgtcgaatttgatgtggtgccgcaagtgccgttcaatatccgcgttttccgaatttcgcctgattccaagaccgacaaggtcagcaacaatacctatttttcgtcctacgttgaaatcgttgatgcgaaattgagctatccgcataccgcgtttgcggcattgtcgattgattcggcgcagttcgggaatcagattccgcgtcgcaattatttgatgaaaggccgcttggtcaaagtgccgtccaattacaatcctgaaacccgccaatatacgggtggaacatgggatggcagtttcaaaaccgcatggacaaacaacccggcatgggttttttacgatgtgctgacccagccgagattttccacgctggcacgtcgtctgaatgtggcagacatagacaaatggagcctgtaccaaatcgggaaatattgcgacgagccggtcgatgacggcttcggcggcaaagagccgcgtttcgtctgcaacgcctacattaccgacctgatgcaggcaggtgaatttttgaacaatcttgccagcgtctttaccggtttaccggtttggaacggacagcaagtatccgtcgtcatggatgccgacgccgatccggtggcgcaatataccaatgccaatgttaaagacggcctgtttaattatgcgggtgcagcgttgaagtccattcatactgctgttcatgtgcagtatatagacaaatacgatggctatcgcgctaaaacagaatatgtagccgacaacgaagccattgcccgctatggtttgaatatcaagcagattactgcgttcggctgcgattcgcgcgggcaggcggcacgtttcggcgcatggacgctgcaaactgagttgcggcagcagaacgccgtaacgtttgaaatcgggcgtgaggggttgaagcatctgccttacgacatcgtgcagattatggacaatcaatacgcaggtgcagagttgtctggacgtgttgccgccatttcgggcaatgtgctgacgctggatcgacctgtatccgatgcggtcggagccttggtgttttattctgaaggcggtagtctgaaatcagcgaagataactgcggcagcaggcaataaggttactttggagcgtgaggtgccgttgcaggctggcgatacgtgggttttatccggcaaagtcaagccgcgcctctaccgtgccatcggcatcaaagagaatacggatgcgggtacttataccgttaccgcgttgctgcatgacccgaaaaaatatgctgccgtggatagttttgcgcattttgaccatgaaattaccacgctgcacaacactgcccctgtgttgaccgatgcggctgtcaataccgacggtgggacagttgtggtgacatgggacaacctggccgcaaacggtcaggttttaacttacgatattaagatttaccgtaacaacagcctataccgccatatccctgatgcacagacagcggaaattcgtttggaaaatctgccgaacggcaattatcgggcggaaatacgcggccgtaatgcacggggtgtactgtccgcaccgttggttaaggcttggagtatcgactataccgttaccggattgaggacgacgccgaaaacactgtctgtgaccgtggattgggtattgccgcaaaccgttgtttccgatttggttttcgagctgtggtatagcaagaccaacaatcttcagacggcaacgaaactcgcgtcgctggcgtatccgcaaaacagttataccttaaccggcgtcggcgttgccgacgtttattatttctgggtgcgcatacgtgatattgcaggaaatacgggggaatttaccgctgccgtacagggtagggcagataacaatcctgcgccgatagtgcagcagattcagggtgcaatcgggaagtctgcattaagcagggagctgatagacacgctgaatcgtgatatggctgcggctgcggggttgaaagtgtctgcagaggcagcggaacgtgctaaagccttacaggaggaagcacgggcgcgaacggcggcaatacaggcggaatcatctgcccgaactgccgagcttgccagaaagtcatccgaaatcggtacgcgtattgccgcaacagaagctgtcaatgagcagcaggcgcagcaaatccaaactgttacgtctgcgcaaggcaataccgccgccgggctggaagccgaaaaaaaagcccgtaccgatggcgacagagccgaggcgcaggcgcgtgaaacactggctgtcagacttggtaatgcagaaagcggtatttcggcattgcgggaaaccgtaacacgtcaggatgctgccaggtcgtctgagatcaacacgttgacggcgaagctggagaatgttgaagtcggcggtcggaattatgccttatcaacaggaacagccggcaaagtgttgaccgctagcgagaataatcagaccaaaaccgtcactatcgacgtttcgtctgctttggatctgaagcaaggcgatagtttgattatctcgtgcgatatcgaactggtaaacgccacatcgcctcatggcaaaccatacccgcgaatcggtgcggaattttccgtaatctatgcggacaactcggtaggttattttgctgcgtggtacggcgaagccgtcagcggtacgaccaaaacgctgaaacagcgtattgtcgccaaacacacggttgccaaagaggttaaagcacttcgaagcttcatcgttcaggcgcggtatcagacatcagaatccatcaaggtttcaaatgtaaaactggagcgcggcacggtagcaactgactggagtcctgcaccggaggacagtaacgccgatacgtctgctttgactaccttgtcggctaaagttcagcaggccagttctgctgttgcagagataggagggaaaatacagtctttgtacacgctgaagactgaggcaatagcaggcggtcgtcgggcagttgcaggggttgcagtgggagccgatggaaagacgggaagtggcgaaatcctcctgatggcagataaagttgcttatgtcgatccgaaagataagacggttacgcccgctttcgttaccgttatcgaaaacggcaaggcgaagcaggctttgaacggcgacctgttcgcgactggttcgatactggcaaagcacatcgctgccaaccagactatcgaagccccaacgctgaatggtgcaaccgtcaatgcaggtctaattaagggtggtacgatacgtggcgcgcgaattgaagccgtggatttggaggtcgctaatatcatcggagatgtcgtggcggtcaggacgtttgagctgaagcagtcgccattaggttatcaggaattgatatgccaaatccctgatagccgaaaaacacgccggacggttatcgtgccgccggtttttgctgttgcagaaaacggtgcagttgtcagtctacaactgcacatggatggtgtgattcagcgggaggttacgattcagtcacctgaaaagaggatagcgcgtaacaaaaagttttccgtatgggttcctggccctccgccgctgtatataaggactccgcaggaggtgcctcttagtttttccgtcccattccatctaccaaagacaggcagtatatcttttcagaagggtatcgatggtgcagcacattcgttgcatatcctctgccgcattagcggcaattttgattattcacccttgggcgatttatcgggtattgtctgtcttattgtttaa

SEQ ID NO: 66394 - DNA, 903 bp, Neisseria meningitidis
atggataccgcaaaaaaagacattttaggatcgggctggatgctggtggcggcggcctgcttcaccattatgaacgtattgattaaagaggcatcggcaaaatttgccctcggcagcggcgaattggtcttttggcgcatgctgttttcaaccgttgcgctcggggctgccgccgtattgcgtcgggacaccttccgcacgccccattggaaaaaccacttaaaccgcagtatggtcgggacgggggcgatgctgctgctgttttacgcggtaacgcatctgcctttggccaccggcgttaccctgagttacacctcgtcgatttttttggcggtattttccttcctgattttgaaagaacggatttccgtttacacgcaggcggtgctgctccttggttttgccggcgtggtattgctgcttaatccctcgttccgcagcggtcaggaaacggcggcactcgccgggctggcgggcggcgcaatgtccggctgggcgtatttgaaagtgcgcgaactgtctttggcgggcgaacccggctggcgcgtcgtgttttacctttccgtgacaggtgtggcgatgtcgtcggtttgggcgacgctgaccggctggcacaccctgtcctttccatcggcagtttatctgtcgtgcatcggcgtgtccgcgctgattgcccaactgtcgatgacgcgcgcctacaaagtcggcgacaaattcacggttgcctcgctttcctatatgaccgtcgttttttccgccctgtctgccgcattttttctgggcgaagagcttttctggcaggaaatactcggtatgtgcatcatcatcctcagcggtattttgagcagcatccgccccactgccttcaaacagcggctgcaatccctgttccgccaaagataa

SEQ ID NO: 66395 - DNA, 2016 bp, Neisseria meningitidis
atgaaatcctaccccgacccctaccgccattttgaagacctcgattccgccgaaacgcaaaacttcgctgctgaagcgaatgccgaaacgcgcgcgcgttttttaaacaacgacaaggcgcgcgcattgtctgacggtattttggcgcagttgcaggacacgcggcagattccgttttgtcaggaacaccgtgcgcggatgtaccatttccatcaggacgcggaatatccgaagggcgtgtaccgcgtgtgcacggcggcgacgtatcgttccggctatcccgagtggaaaatcctgttttcagtggcggatttcgacgagctgctcggcgacgatgtgtatttgggcggcgtgtcgcacttggtggaacagcccaaccgcgcgctgttgactttgagcaaatcaggcggcgatacggcgtacacgctggaagtggatttggaagcaggggaattggtagaaggcggttttcactttccggcaggcaaaaaccatgtgtcgtggcgcgatgaaaacagcgtgtgggtgtgtccggcttgggacgaacgccagttgaccgaatcgggctatccgcgtgaggtgtggctggtggagcgcggcaaaagtttcgaggaaagcctgccggtgtaccaaattgccgaagacgggatgatggtgaacgcgtggcgttacctcgatccgcaaggttcgccgattgatttgattgaagcgtcggacggtttttacactaaaacctatttgcaggtgtcggccgaaggcgaggcgaaaccgttgaacctgcccgccgattgcgacgtggtcggctatctggcggggcatcttttgctgacgctgcgcaaagactggaaccgcgcgaaccaaagctatccgagcggcgcgttggtggcggtgaagctgaatcggggcgaactcggggcggcgcagcttttgtttgcgcccgatgaaacgcaggcattggaaagcgtggaaacgaccaagcgttttgtcgtggcgagcctgctggaaaacgtacagggtcgtctgaaagcgtggcgttttactgatggcaaatggcaggaaaccgagttgccgcgcctgccttcgggcgcgttggaaatgaccgaccaaccgtgggggggcgacgtagtttaccttgccgccagcgatttcaccacgccgctgacgctgtttgcattggatttgaacgtgatggaattgaccgtcatgcgccgccagccgcagcagttcaattcagacggcatcaacgtgcagcagttttggacgacttcagccgacggcgagtgcattccttatttccacgtcggcaaaaacgccacgcccgacacgccgaccttggtttatgcctatggcggtttcggcattcccgaattgccgcattatctgggcagcatcggcaaatactggcttgaagaaggcaacgccttcgtgttggcgaacatacgcggcggcggcgagttcggcccgcgctggcatcaggcggcgcagggaatcagcaaacataaaagcgttgatgatttattggcagtcgtgcgcgatttgtccgaacgcggtatcagttcgcccgaacacatcggcttgcagggcggcagcaacggcggactgattactgccgccgccttcgtgcgcgaaccgcaaagcataggcgcgctggtgtgcgaagtgccgctgaccgacatgatccgttatccgctgctctccgccggttcaagctggacagacgaatacggcaatccgcaaaaatacgaagtctgcaaacgccggttgggcgaattgtcgccgtatcacaatctttcagacggcatcgattatccgcccgcgctcattaccaccagcctgtccgacgatcgcgtccatcccgcccacgcgctcaagttctacgccaaactgcgcgaaacctcgccgcaatcttggctctactcgcctgacggcggcggccataccggcaacggcacgcagcgcgaagccgccgacgaactcgcctgcgtgttgctgtttttgaaagagtttttgggctaa

SEQ ID NO: 66396 - DNA, 474 bp, Neisseria meningitidis
atggaacaaaaagggtttacattgattgagatgatgatagtcgtcgcgatactcggcatcatcagcgtcattgccataccttcttatcaaagttatattgaaaaaggctatcagtcccagctttatacggagatggtcggtatcaacaatactgtcaaacagtttattttgaaaaatcccctggacaataatcagaccatcaagagcaaactggaaatatttgtctcaggctataagatgaatccgaaaattgccaaaaaatatagtgtttcggtaaggtttgtcgataaggaaaaatcaagggcatacaggttggtcggcgttccgaaggcggggacgggttatactttgtcggtatggatgaacagcgtgggcgacggatacaaatgccgtgatgccgcttctgcccgagcctattcggagactttatccgcagatgccggctgtgaagccttctctaatcgtaaaaaataa

SEQ ID NO: 66397 - DNA, 453 bp, Neisseria meningitidis
atgacgggatttaatgatgccgccggcgtggcatccgtctccaccgacatcaaaggcaaatatgttcaaagcgttacagtcgcaaacggcgtcattaccgcccaaatggcttcaagcggcgtaaacaacgaaatcaaaggcaaaaaactctccctgtgggccaagcgtcaagacggttcggtaaaatggttctgcggacagccggttaagcgcgacggcgccaacgccaccgacgccgttaccgccgacaccgccgccgccaacaagaagatcgacaccaatcattcccacgaacctacatcccgtcattcccgcgaaagtgggaatgacggcggagcagtttctgttttttccgataaattcctaaaacttaaaatttcatcattcccacaaaaacataaaaccaaaaacagaaacctaaaattcgtcattcccacgaaagtgggaatctag

SEQ ID NO: 66398 - DNA, 387 bp, Neisseria meningitidis; identical to SEQ ID NO: 45699

SEQ ID NO: 66399 - DNA, 594 bp, Neisseria meningitidis
atggtcgacggcatgggcaatctgattggctgggaaaaaacggggcttgttgtcggtaagcagtggataaccgcaaaagacgacaaggtgtccgatgtctgcaatgccaacggcgagatgggcgtaatcgggctttacgagcctttctcacacggcgcattgacgatacccggtcatccgaactgccgatgcgaggttgtttccgtatcgggtggcgaattgggagaatttgccgaaaaaaaggagcttcgtaaagcggctatgcagtatgcgcgggataactttatcggcaaaagctatgtcaataaaaacagcgggcatgaactgaaggtaacttggcaaggtgtgaaacacgctgcgtcaaaggcaaatcaggcggaattatccatcataacaaaacttgatgacttattgcgctacgcaaaatatgagggttcttattcggataggaaaggtcgtcctgatattattgcagcacataagtatcgtgccgttaccaaggttgggaatgagtctttaaatgtcggcgtgattgtaagggagtttccagacggccataaacattacgaccatttcatcttgaaggatgagtaa

SEQ ID NO: 66400 - DNA, 1479 bp, Neisseria meningitidis
atgttcagcaagttaacccctttggctgaaaccggcatcccgaccctgtcgtgtgcaaacgcggcagggcgtttgttgcattcagacagccgccaaatcaaacaaggcgatattttcgttgcctgtccgggcgaatatgccgacggacgcagttatatccccgccgccgttgccaacggcgcggcttttgttttttgggacgacgatggcaaattcgcgtggaatcccgaatggaaagtccccaatcaaggcatcaaagatttgaaacaccgtgccggcatattggcggcgcaagtttacggcaacgtttcagacggtctcaaagtctggggcgtaaccggcaccaacggcaaaacctccatcacgcaatggctggcgcaagctgccgatttgttgggcgaaaaaaccgccattgtcggcacggtcggcaacggcttttggggtgcattggaagaaaccgcgcataccacacccgcccccgtcgatgtccaaaccctgctctaccgtttccgtcaacaaggcgcaacagtcgccgcgatggaagtctccagccacgggcttgaccagtcgcgggtcaacggcgtgtcattccgcagcgcaatctttaccaacctcacccgcgaccacctcgactaccacggtacgatggaagcctacggtgccatcaagtcgcgcctgttttactggcacggcttgaaacacgcagtcatcaacgtggatgacgaatacggcgcggaactcgtatgccgtctgaaaaaagactgtcccgatttagccgtttacagttacggcttcagcgagcaagccgacatccgcattatcgatttcaccgcctcttcagacggcatagcagccgtattccaaaccccgtggggcgaagggaaatgccgcacgcgcctgctcggacggttcaacgcgcaaaacctcgccgcctgcatcgccttgctgtgcgccaacggctatccgcttgataatgtattggatgtgctggcaaaaatccgtcccgcttcagggcgcatggactgcatcatgaacagcggcaaacctttggtcgttgtcgattatgcccatacgcccgacgcattggaaaaagcactcgccaccttgcaggaaatcaaaccgcagggtgcggctttgtggtgcgtattcggttgcggcggtaaccgcgatcgcggcaaacgcccgctgatgggcgcggcagccgtacagggcgcggataaagtcgtcgtcaccagcgacaacccgcgcttggaaaatccgcacgacatcatcaacgacatcctgcctgccgttcccgcgcccgaatgcgtcgaagccgaccgtgccgccgccatccgttatgcggttgaacaagccgccgcaaacgacatcatcctgattgccggcaaagggcatgaaaactatcaggatgtacaaggcgtgaagcaccgtttttccgatcttgaaatcgtcggacaggctttgttaactcgtaaataa

SEQ ID NO: 66401 - DNA, 441 bp, Neisseria meningitidis
gtgaacatccgccgtgccgtttatgccgattgcgaggagctggcagcactcgatgccgtctgcaacccgtccgcgtggacgcaacgccaatttgagtccgcactggtttcgccgtccgaacaggttttccttgcggaaaaagacggcgggattgccgcctttatcgtttggcagaacctgcccgatgaatccgaactgcacctgattgccaccgcgcccaaatgccgccgccgtggtgttgcatccgccctgctcgaatattggtacgcacatctgcccgaaggcacgcaacgcctgctgcttgaagtccgcgcgggcaatatcggtgcgcaggtgctgtatgcggcacacggctttaccgatgcgggcaggcggaaaaactattaccgtacagccgacggtaaaaccgaagatgccgtcttaatggagaaaatatgttaa

SEQ ID NO: 66402 - DNA, 312 bp, Neisseria meningitidis; identical to SEQ ID NO: 39211

SEQ ID NO: 66403 - DNA, 1155 bp, Neisseria meningitidis
atggatacgcacacggacgaaacaaaacttcaaaacacgcaagccaaacgcaaacgccgcctgacggcattgacgctgctgttcgcgcttgccgccgcagccgccgggtcggcgttttttttatggtggcagcacgaagaggaaacggaagacgcttatgttgccggacgcgtggttcaggttacgccgcaaaagggcggtacggtgcggaaggttttgcacgacgatacggatgccgtgaaaaaaggcgacgtgctggcggtattggacgacgataatgatgtgctggcttacgagcgggcaaaaaacgagctgattcaggcggtgcggcaaaaccgccggcaaaatgccgccacttctcaggcgggggcgcaggttgctttgcgccgagcggatttggcacgtgcgcaggatgatttacgccgccggtctgctttagcggaatcgggcgcggtgtccgccgaagagctggcacatgcccgtgcggcagtgtctcaggctcaggcggcagttaaggcggctttggcggaagagtcttcggcacgtgcggctttgggtggtcaggtcgctttgcgcgaacagccggcggttcagacggcaatcggcaggttgaaagatgcgtggctgaaccttcagcggacgcaaatccgcgcgccgacggacggtcaggtggcaaagcgttcggtgcaggtcgggcagcaggtggcggcaggcgcgccgctgatggcggtggtgccgctgtcggatgtgtgggtggatgccaattttaaagagacgcagttgcggcatatgaaaatcggacagcctgctgagctggtgtccgatttgtacggcaaacaaattgtttatcgcggcatggtggcagggttttcggcaggtacgggcagcgcgttttcgctgattccggcgcaaaacgcaacgggcaactggattaaagtggtgcagcgcgtccccgtccgtatcgtgctgaaccgcgaagatgtggacaggcatccgttgcgtattggtttgtcgatgacggttaaagtggatacttctgccgcaagcgcgcctgtttcaaaaacgccgggtgcggcattgccggaaatggaaagtaccgactggtcggaagtcgatcggacggtcgatgaaatcctcgggcaatccgcgccctga

SEQ ID NO: 66404 - DNA, 303 bp, Neisseria meningitidis; identical to SEQ ID NO: 46346

SEQ ID NO: 66405 - DNA, 2394 bp, Neisseria meningitidis
atgaaactgaaacagattgcttccgcactgatggtcttgggcatatcgcctttggcacttgccgacttcaccatccaagacatccgcgtcgaaggcttgcagcgtaccgagccgagtaccgtattcaactacctgcccgtcaaagtcggcgacacctacaacgacacacacggcagtgccatcatcaaaagcctgtacgccaccggtttctttgacgacgtacgcgtcgagactgcggacgggcagctcctgctgaccgtcatcgaacgccccaccatcggctcgctcaacatcaccggcgcaaaaatgctgcaaaacgacgccattaagaaaaacctcgaatcgttcgggctggcgcagtcgcaatactttaatcaggcgacactcaatcaggcagtcgccggcctgaaagaagaatacctcgggcgcggcaaactcaatatccaaatcacgcccaaagtaaccaaactcgcccgcaaccgcgtcgacatcgacatcacgattgacgagggcaaatccgccaaaatcaccgacatcgaatttgaaggcaaccaagtctattccgaccgcaaactgatgcggcagatgtcgctgaccgaaggcggcatttggacatggctgacacgaagcaaccaattcaacgagcagaaatttgcccaagacatggaaaaagtaaccgacttctaccagaacaacggctacttcgatttccgcatcctcgataccgacatccaaaccaacgaagacaaaaccaagcagaccatcaaaatcaccgtccacgaaggcggacgtttccgttggggcaaagtctccatcgaaggcgacaccaacgaagtccccaaagccgaactggaaaaactgctgaccatgaagcccggcaaatggtacgaacgccagcagatgaccgccgttttgggtgagattcagaaccgcatgggctcggcaggctacgcatacagcgaaatcagcgtacagccgctgccaaacgccgaaaccaaaaccgtcgatttcgtcctgcacatcgaaccgggccggaaaatctacgtcaacgaaatccacatcaccggcaacaacaaaactcgcgacgaagtcgtgcgccgcgaattgcgccaaatggaatccgcgccttacgacacctccaagctgcaacgctccaaagagcgcgtcgagcttttgggctacttcgacaacgtacagtttgatgccgtcccgcttgccggcacacccgacaaagtcgatttgaacatgagcctgaccgaacgttccaccggctcgctcgacttgagcgcgggctgggtacaggataccggcctggtcatgtccgcaggcgtttcccaagacaacctgttcggtacgggcaagtcggccgccctgcgcgcctcacgaagcaaaaccacgctcaacggctcgctgtcgtttaccgacccgtacttcacggcagacggggtcagcctgggctacgatgtttacggaaaagccttcgacccgcgcaaagcatcgaccagcatcaaacaatataaaaccaccacggcaggcgcaggcatccgcatgagcgtgcctgttaccgaatacgaccgcgtgaatttcggtttggtggcagaacacctgaccgtcaacacctacaacaaagcgcccaaacactatgccgactttatcaagaaatacggcaaaaccgacggcacagacggcagcttcaaaggctggctgtacaaaggtaccgtcggctgggggcgcaacaaaaccgacagcgcgttatggccgacgcgcggctacctgacgggcgtgaacgccgaaatcgccctgcccggcagcaaactgcaatactactccgccacccacaaccaaacctggttcttccccctgagcaaaaccttcacactgatgcttggcggcgaaatcggctatgccaacggctacggcaaaaccaaagaaatccccttctttgaaaacttctacggcggcggcctgggttcggtacgaggttacgaaagcggcacactcggtccgaaagtctatgacgaatacggcgaaaaaatcagctacggcggcaacaaaaaagccaacgtctccgccgagctgctcttcccgatgcccggcgcgaaagacgcgcgcaccgtccgcctgagcctgtttgccgacgcaggcagcgtgtgggacggcaaaacctacgacgacaacagcagttccgcgaccggcggcagggttcaaaacatttacggcgccggcaatacccataaatccacctttaccaacgaattgcgctattccgccggcggcgcggttacctggctctcgcctttaggcccgatgaaattcagctacgcctacccgctgaagaaaaaaccggaagacgaaatccaacgcttccaattccaactcggcacgacgttctaa

SEQ ID NO: 66406 - DNA, 558 bp, Neisseria meningitidis
atggatgctttaaaattattgacgaaccgccgatcttccaaaaagctgaagcaccccgcccccgatgcggcggagttggaacaaatatttaaggcggcaacccaagttcccgatcacggcaatatgcgcccgttccgttttaccgtgattcaaggcgaggtaggattgcaacgttttcgcgatgtgttgaagcaaacggttgccgaattgaatttcggcgacgatgcgatgaaaaaggcggaaaaagtgggcaatatggcgccgatggttatcggggtaacgtttgcgccgaaccgcgatgtgcctaagccgaaaccggaatgggagcagatgctgacggcgggttgtgcggcgtatgcgctgcaactggcggcaacggcgcaaggtttcgacaatgtctggataacggggatgtgggtcaacagccccctgttgcgtgaggctttcggatgtgcggataaggataaaatcatcgggctgatgatggtcggcacgccgacagaggaagtgcataagcccaagaataccgatttggaagcgtttgtcagccattggtaa

SEQ ID NO: 66407 - DNA, 1035 bp, Neisseria meningitidis
atgaataaaacaatctgccgcactgctgcactattgataagcggtttttcatacgcaaacaccgtcattcccgatgtctcccccgtcgcacaaggtcaacatgtcttcattaacatccctcagcaacgcctgttcctctacaccgacggcaaactgaccaaggtttatcccgttgcagtaggtcgggcgatgacgcaaaccaatctaggcgaacataaaatcggtgcgaaagcctataaccctgtttggtacatccccaaatccatacagaaagaacgcggcgacggcgtaaaaaccatagccgccggcccggacaaccctttggggccggtttttgtccgcttaggcgaccctaaactcggtttgggcatacacgggaccaatgcgccggccagcgtccccggggttcggagtcacggctgcgtccgcatgaaatcgcccgacgcgctcgagtttgccaaaaccatcgccagcggctcgcccgcctccgtcatctatcaaatggcgggtctcaatgaagatgcggatcgcaacctgtggcttgccgccttccgcgacccttacggtaagaacaaccttgacatcgcctctctgaaaaaaagtattgcgcaatgggcaaaaacacagggtaaaaccatcgcgcccgagaaagtcgatgctgtactcaaagaccgcaccggatcggccgtctgcctgacctgcggcaaaaacggcaagatgaagatgccgctcaaatcgctggcgtggatacagggttcttcctcatacagccaagctgaagtcattgaacaaactgaggaaaccaactctgccgaaatatccgagacacgcacgcccgaagtgcctgatgtacacacgcccgaggcacaaccgcatttaaatacccaatccgacggcacgccgactgcctataccgaaccggctgccgattcatcgccgcaagtagaaacacctgatcaggctgcttccgagccggttgatgtattattttcaatagatgtgatacggcagggaaatttgcgtttaggtaattga

SEQ ID NO: 66408 - DNA, 2130 bp, Neisseria meningitidis
atggcctatcaagttctcgcccgaaaatggcggcccaaaaccttttccgacctagtcggtcaggaacacgtcgtcaaagccctgcaaaatgccttggacgaaggcaggctgcaccacgcctacctgctgaccggtacgcgcggcgtgggcaaaaccaccatcgcccgcatccttgccaaaagcctcaactgcgaaaacgcgcaacacggcgaaccttgcggcgtatgcgaaagctgtacgcagatcgatgccggacgctatgtcgacctgctcgaaatcgacgccgcctccaacacaggcatcgacaacatccgcgaagtcttggaaaacgcccaatacgcgccgaccgccggcaaatacaaagtctatatcatcgacgaagtgcatatgctttccaaaagcgcgttcaacgctatgctcaaaacgctggaagagccgcccgaacacgtcaaattcatccttgccacgaccgatccgcacaaagtccccgttaccgtattaagccgctgcctgcaattcgtcttacgcaatatgaccgcgcagcaggttgccgaccaccttgcccacgtcctcgacagcgaaaaaatcgcctacgccccccccgccctgcaacttttgggacgcgccgccgccggatcgatgcgcgatgccttgagcctgctcgaccaagccatcgccatgggttcgggcagcgttgccgaacaagacgtccgccaaatgatcggtgcggtcgataaacaatacctgtacgaactgctgacaggcatcgtcaaccaagacggcgaagccctgctggcaaaagcacaggaaatggctgcgtatgccgtcggctttgacaacgccttgggcgaacttgccatactgctgcaacacctcgccctgatacaggcagtgccgaatgccttggcgcacgacgaccccgattccgatattttgcaccgcctcgcccaaaccataagcggcgaacaaatccagctttactaccaaatcgccgtccacggcaaacgcgacctgagcctcgcccccgacgaatacgccggctttatgatgaccctgctgcgtatgctggcgttcgcacccttggcggcaacatcgtgtgatgcaaacgccgtgattgaaaataccgaacttcaatccccatcggcacaaaccgccgaaaaggaaaccgccgcaaaaaagccccaaccgcgccctgaaacggaaaccgcccaaacatccgttcagacggcatccgcagcggcaatgccgtctgaaagcaaaactgccgaacccgtttccaatcaagaaaacaacgatgttccgccttgggaagacgcgccggacgaagcccaaaccgcagccggcacggcgcaaacgtcggcaaaaagcattcagacggcatccgaagccgaaacgccgcccgaaaaccaagtttccaagaacaaggcagccgacaacgaaaccaatgcccccttgtccgaaacgccgtctgaaaaccccattcaggcaacaccgaataatgaagccgttgaaacggaaacatttgcacacgaagcccctgcagaacctttctacggttacggctttccggataatgactgccccgtagaagacaacgcagaaatcccgccgcccgattgggaacacgccgcccctgccgataccgcaggcggaggcgcggacgaagaagcagaagcgggcggcatcggcggaaacaacacgccgtccgccccgccgcccgaattttccaccgaaaactgggcagccatcgtccggcatttcgcccgcaaactcggcgcggcgcaaatgccggcgcaacactccgcgtggacggaataccatcccgacaccggcctgatggttttggcgatgaccgccgaagcacgcgccaccgccgacaaaaaacgcctcgacaaaatccgcgacacccttgcccaagcctacgggctgcaactcaccctgcaaacccaagactggcaggacgaatccggcagagaaacccccgcgatgcaggacaagcgcgtccaagccgaggacaggcaaaaagcacaagcattgctcgaagccgaccccgccgcacaaaaaatcctccaagcattcggcgcgcaatggcagcccgaatcactggaattggcggcaaaccggccataa

SEQ ID NO: 66409 - DNA, 606 bp, Neisseria meningitidis
atgattttgctgcatttggattttttgtctgccttactgtatgcggcggtttttctgtttctgatattccgcgcaggaatgttgcaatggttttgggcgagtattatgctgtggctgggcatatcggttttgggggcaaagctgatgcccggcatatggggaatgacccgcgccgcgcccttgttcatcccccatttttacctgactttgggcagcatattttttttcatcgggcattggaaccggaaaacagatggaaacggatggcaggcagactccgaacatccgctgctcgggctttttgccgtcagtaatgtatcgatgacgcttgcttttgtcggaatatgtgcgttggtgcattattgcttttcgggaacggttcaagtgtttgtgtttgcggcactgctcaaactttatgcgctgaagccggtttattggttcgtgttgcagtttgtgctgatggcggttgcctatgtccaccgctgcggtatagaccggcagccgccgtcaacgttcggcggctcgcagctgcgactcggcgggttgacggcagcgttgatgcaggtctcggtactggtgctgctgctttcagaaattggaagataa

SEQ ID NO: 66410 - DNA, 939 bp, Neisseria meningitidis
atgcttgaactgaacggactctgcaaacgcttcggcggcaaaacggttgccgacaacatctgcctgactgtcgggcgcggcaaaatactcgccgtactggggcggtcgggctgcggaaaatccaccctgctgaatatgattgcgggcatcgtccggccggacggcggcgaaattcagctgaacggggaaaacattacccgtatgccgcccgaaaaacgccgtatttcgctgatgtttcaagattacgcgctgtttccccatatgagtgcgctggaaaatgcggcattcggtttgaaaatgcaaaaaatgccgaaagccgaagccgaacgccttgccatggcggcacttgccgaagtcggactggaaaacgaggtgcaccgcaagcctgaaaaactttccggaggcgagaaacaacggttggcactggcgcgcgctttggttgtccgcccttccctgctgctgttggacgaatcgttttccagtttggacacgcatttgcgcggcacgctgcgccgcatgactgccgaacgcatccgcaagggcggcatccctgccgttttggtaacgcattcgcccgaagaggcctgcacggcggcggacgaaatcgccgtcatgcacgaggggaaaatccttcaatgcggtacgcccgaaaccttggttcaaacgcctgccggcgtgcaggtcgcccgactgatgggtttgcccaataccgacgatgaccgccatattccgcaacatgcggtgcgtttcgaccaagacggcatggagtgccgcgtattatcccatacctgtttgcccgaatcgttcagcctgtccgtcctccatccggaacacggcatcctgtggctgaacctcgatatgccgcacgccggtgaaatatcgggaaacgatacggtacgcatccatatcgaagacagggaaatcgtccgcttccgctga

SEQ ID NO: 66411 - DNA, 1221 bp, Neisseria meningitidis
atggctgtcaacctgaccgaaaaaaccgccgaacaactgcccgacatcgacggcattgccctctacaccgcccaagcaggcgtgaagaagcccgggcataccgacctgacactgattgccgtagccgccggcagcaccgtcggtgcagtcttcacgaccaaccgtttctgtgccgcgcccgtccacatcgccaaatcgcaccttttcaacgaagacggcgtgcgcgccctcatcatcaacacgggcaacgccaacgcgggtacgggcgcacagggcagaatcgatgctttggcagtgtgtgccgccgccgcccggcaaatcggctgcaaaccgaaccaggtgctgcccttctccaccggcgtgattctcgaaccgctgcccgcagacaaaatcatcgccgcgctgcccaaaatgcagcctgccttctggaacgaagcggcacgcgccatcatgaccaccgacaccgtgcccaaagccgcctcgcgcgaaggcaaggtcggcgacaaacacaccgtccgcgccacgggcatcgccaaaggctcgggcatgattcatcccaatatggcgaccatgctcggtttcatcgccaccgatgccaaagtttcccaacccgtcctccaactgatgacgcaggaaatcgccgacgaaaccttcaacaccatcaccgttgacggcgacaccagcaccaacgacagcttcgtcatcatcgccaccggcaaaaacagccaaagcgaaatcgacaacatcgccgacccgcgttacgcccaactcaaagaattgttgtgcagcctcgcgctcgaactcgcccaagccatcgtccgcgacggcgaaggtgcgaccaagttcatcaccgtccgcgtcgaaaacgccaaaacccgcgacgaagcccgccaagccgcctacgccgtggcacgttcgccgctggtcaaaaccgcctttttcgcctccgaccccaacctcggcaggctgctcgccgccatcggttatgccggcgttgccgacctcgataccgacctcgtggaaatgtatctcgacgatattttggttgccgaacacggcggacgcgccgcaagctacaccgaagcacaagggcaggcggtgatgtcgaaggacgaaatcaccgtccgcatcaagctgcatcgcggacaagccgccgccaccgtctatacctgcgacctgtcgcacggatacgtttccatcaacgccgactaccgttcctga

SEQ ID NO: 66412 - DNA, 480 bp, Neisseria meningitidis; identical to SEQ ID NO: 54289

SEQ ID NO: 66413 - DNA, 198 bp, Neisseria meningitidis; identical to SEQ ID NO: 36305

SEQ ID NO: 66414 - DNA, 333 bp, Neisseria meningitidis
atgagcagcgaattaatcgtacacaccggcgatgccgctttcgagcaagatgttttgaaatccgacctccccgtcctgctggacttttgggctccgtggtgcggcccctgcaaaatgattgccccgattttggacgacatcgccgccgaatttgaaggccgtctgaaagtagtcaaaatcaacatcgacgacaacgaagccaccccgtcccgtttcggcgtgcgcggcattccgaccctgatggtgtttaaaaacggcgaagtcgtcgccaccaaagtcggcgcattggcaaaaggccagctaaccacctttgtcgaagcctctatcgcctga

SEQ ID NO: 66415 - DNA, 735 bp, Neisseria meningitidis
ttggtcaaaacggcagacggctacaaagccattgcccatattcaagccggcgaccgcgtcttcgccaaagatgaaaccagtggaaaaactggatacaaacctgttaccgcccaatacggcaatccgtatcgggaaaccgtttacattgaaatttcagacggcatcggtaacagccaaaccctgatttccaaccgcatccatccgttttacagtcaaggaaaatggatacaggcaggtcgtctgaaaaaaggcgacaccctgctttccgaaagcggtgcaaaacagacagttcaaaacattaccctcaaacagcagccgctcaaagcctacaatctgaccgttgccgactggcatacttactttgtcaaaggcgataaggcggaaacggaaggagtttgggttcataatgattgtccgtatggaaaatctccaagaaaaattaatgctgttatcaatgaaaccaatactcaaagaggtaatataacaagtaagcatactttatcttctgatgaagccttagatgctggaattaaatacttaggctccgaatataaagaaattggtaaatcaggtagcggcgtttatcggaacaaagcaggcacaaggcaatttagaattgataacaactctttagaggggaatcatgcgccaaatgtaccgcatatccatttggaaaggatagacccgaataagaaaaaaccactaacaaataaccatattcccattaaagattag

SEQ ID NO: 66416 - DNA, 1116 bp, Neisseria meningitidis; identical to SEQ ID NO: 37027

SEQ ID NO: 66417 - DNA, 618 bp, Neisseria meningitidis; identical to SEQ ID NO: 38819

SEQ ID NO: 66418 - DNA, 723 bp, Neisseria meningitidis
atgaaacccgcctatttcatctccgacctgcatttgagcgaaaagcaccccgaactgaccgcgctgctgctgcgttttttacgttcttccgccgccgggcaggcgcgggcgatttatattttgggcgatttgtttgatttttgggtgggcgatgacgaagtttccgagttgaatacttcggttgcgcgggaaatcaggaaattgtccgacaaaggcgttgccgtgttcttcgtcaggggcaaccgcgacttcctgatcggtcaggatttttgccggcaggcgggtatgacgctgctgccggattactcggttttggacttgttcggctgcaaaaccctcatctgccacggagacacattatgcaccgacgacaaggcataccaacgtttccgcaaaatcgtgcatcggaagcggctgcaaaaactgttcctgatgctgcccctaaagtggcgcacgcgccttgccgccaaaatcaggcgtgtcagcaaaatggaaaaacaggtcaagcccgccgatattatggatgtcaatgccgcctttaccgcgcggcaggttcgcgcctttaacgcggaaaggctgatacacggacacacccaccgcgagcatatccatcacgaaaacggctttacccgcatcgttttgggcgactggcataacgactatgcttcaatcctccgcgtagacggggacggtgcggtattcgtgccgctggaaaaatactga

SEQ ID NO: 66419 - DNA, 780 bp, Neisseria meningitidis
atggcagcctcgcccgaagcaaaattcactgaagaaaagattttgtgggtcaaacaccacacgccgaaactcatcactttcgccatcagccgtcccgaatcctaccgttttaaagccggacagttctcccgactcggtttctacgaaggggaaggctttatttggcgtgcctattccatcgtttccgcagaatatgccgacacgctcgaatattttgccgtactcatccaagacggccccatgtcgatccgtttcgccaaaatgcaacagggcgacaccatcctgctcgataaaaatgccaccggcttcctcctgcccgaacgcttccccgacggcaaggatttggtgatgctctgcaccggctccggcatcgcccccttcctttccattctcgaacaacccgaaatccggcagcgtttcgataccgtcaacctgatacattccgtatcttttcccgaagaattgattttcaacgaccggctcgccgcattgtccgaacatcccctggtaggcgaatacggacactcgttccgtttcgtccctgttaccacccgtgccgccaacccctcgggcttaagcggaaaacgcattcccgaactcttaaaaaacggcagcatcgaacaggcgctgcataccaagttcaccccggaatccacacggtttatgatttgcggcaacccggaaatggtcaaagacactttccaaacgctgcttgacatgggttacgccatgcaccgcaaccgcattcccggtcaaatcatgatggaaaacggcttctaa

SEQ ID NO: 66420 - DNA, 204 bp, Neisseria meningitidis; identical to SEQ ID NO: 37144

SEQ ID NO: 66421 - DNA, 408 bp, Neisseria meningitidis; identical to SEQ ID NO: 51811

SEQ ID NO: 66422 - DNA, 285 bp, Neisseria meningitidis
atgttcggcggtcgtttgaaaaacgctccatccattaccgccaaacactttttgaaggaaaatatcatgaaatttattaacacctgccgtaaatacggcgcaaaactggctgttgtaacagctgctcccctggctttggccgcacatgcaaatgcaacgttgcccgatacggcaaaaaacgctttggaagccgcaaaagccgacggtatggaagtcggttggattgtagtgggcgttttcgccgcgctttttgtattttccatcgttaagagagtgatgaagtaa

SEQ ID NO: 66423 - DNA, 1071 bp, Neisseria meningitidis
atgaacctgatttcacgttacatcatccgtcaaatggcggttatggcggtttacgcgctccttgccttcctcgctttgtacagcttttttgaaatcctgtacgaaaccggcaacctcggcaaaggcagttacggcatatgggaaatgctgggctacaccgccctcaaaatgcccgcccgcgcctacgaactgatgcccctcgccgtccttatcggcggactggtctctctcagccagcttgccgccggcagcgaactgaccgtcatcaaagccagcggcatgagcaccaaaaagctgctgttgattctgtcgcagttcggttttatttttgctattgccaccgtcgcgctcggcgaatgggttgcgcccacactgagccaaaaagccgaaaacatcaaagccgcggccatcaacggcaaaatcagtaccggcaataccggcctttggctgaaagaaaaaaacagcattatcaatgtgcgcgaaatgttgcccgaccataccctgctgggcattaaaatctgggcccgcaacgataaaaacgaactggcagaggcagtggaagccgattccgccgttttgaacagcgacggcagttggcagttgaaaaacatccgccgcagcacgcttggcgaagacaaagtcgaggtctctattgcggctgaagaaaactggccgatttccgtcaaacgcaacctgatggacgtattgctcgtcaaacccgaccaaatgtccgtcggcgaactgaccacctacatccgccacctccaaaacaacagccaaaacacccgaatctacgccatcgcatggtggcgcaaattggtttaccccgccgcagcctgggtgatggcgctcgtcgcctttgcctttaccccgcaaaccacccgccacggcaatatgggcttaaaactcttcggcggcatctgtctcggattgctgttccaccttgccggacggctcttcgggtttaccagccaactctacggcatcccgcccttcctcgccggcgcactacctaccatagccttcgccttgctcgccgtttggctgatacgcaaacaggaaaaacgctaa

SEQ ID NO: 66424 - DNA, 615 bp, Neisseria meningitidis
atgtcttttgataactatcttgtccctaccgttatcgagcagagcggtcgcggtgagcgtgcattcgatatctattcccggcttttgaaagagcgcatcgtattcttggtcggcccggtaaccgacgagtccgccaatctggtggttgcccaactgttgtttttggaaagtgagaatccggataaggatattttcttctatattaactcgccaggcggttcggtaacggccggtatgtcgatttacgacaccatgaattttatcaagcccgatgtatcgactttgtgcttggggcaggcagcaagtatgggcgcgttcttattgtcggcaggcgaaaaaggcaaacgtttcgccctgcccaacagccggattatgattcaccagcctttaatcagcggcggcttgggcggtcaggcatccgatattgaaattcacgcacgcgaactgttgaaaatcaaagaaaaactcaaccgcctgatggcgaaacattgcggccgcgatttggcagatttggagcgcgacaccgaccgtgataatttcatgtccgccgaagaggctaaagaatatggtctgattgatcaaatcttggagaaccgtgcttctttacagttttaa

SEQ ID NO: 66425 - DNA, 531 bp, Neisseria meningitidis
atgaaattcgtcagcgaccttttgtccgtcatcctgtttttcgccacctataccgttaccaaaaatatgattgccgctacggcggtcgccttggttgccggtgtggttcaggcggcttttctgtattggaaatataaaaagctggatacgatgcagtgggtcggactggtgctgattgtgatattcggtggcgcaaccattgttttgggcgacagccgcttcattatgtggaagccgagcgttttgttttggctgggcgcgctgttcctgtggggcagccacctcgccggtaaaaacggcttgaaggcgagtatcggcagggagattcagcttccggatgccgtatgggcgaaattgacgtatatgtgggtcggtttcctgatttttatgggtatcgccaactggtttgtgtttacccggttcgagtcgcaatgggtcaactataaaatgttcggctcgactgcactgatgcttgttttctttattattcagggtatttatctgagtacctgtctgaaaaaggaggattga

SEQ ID NO: 66426 - DNA, 819 bp, Neisseria meningitidis; identical to SEQ ID NO: 51900

SEQ ID NO: 66427 - DNA, 1569 bp, Neisseria meningitidis
atgaaaaaatcccttttcgttctctttctgtattcgtccctacttactgccagcgaaattgcttatcgctttgtattcggaattgaaaccttaccggctgcaaaaatggcagaaacgtttgcgctgacatttgtgattgctgcgctgtatctgtttgcgcgttataaggcaacgcgtttgttgattgcggtgtttttcgcgttcagcattattgccaacaatgtgcattacgcggtttatcaaagctggataacgggcattaattattggctgatgctgaaagagattaccgaagttggcggcgcaggggcgtcgatgttggataagttgtggctgcctgcgttgtggggcgtgttggaagtcatgttgttttgcagccttgccaagttccgccgtaagacgcatttttctgccgatatactgtttgccttcctaatgctgatgattttcgtgcgttcgttcgacacgaaacaagaacacggtatttcgcccaaaccgacatacagccgcatcaaagccaattatttcagcttcggttattttgtcggacgcgtgttgccgtatcagttgtttgatttaagcaagattcctgtgttcaaacagcctgctccaagcagaatcgggcaaggcagtattcaaaatatcgtcctgattatgggcgaaagcgcggcgcatttgaaattgtttggctacgggcgcgaaacttcgccgtttttgacccagctttcgcaagccgattttaagccgattgtgaaacaaagttattccgcaggctttatgacggcagtatccctgcccagtttctttaacgtcataccgcatgccaacggcttggaacaaatcagcggcggcgataccaatatgttccgcctcgccaaagagcagggctatgagacgtatttttacagtgctcaggctgaaaaccaaatggcaattttgaacttaatcggtaagaaatggatagaccatctgattcaaccgacgcagcttggctacggcaacggcgacaatatgcccgatgagaagctgctgccgctgttcgacaaaatcaatttgcagcagggcaggcattttatcgtgttgcaccaacgcggttcgcacgccccatacggcgcattgttgcagcctcaagataaagtattcggcgaagccaatattgtggataagtacgacaacaccatccacaaaaccgaccaaatgattcaaaccgtattcgagcagctgcaaaagcagcctaacggcaactggctgtttgcctatacctccgatcatggccagtatgtgcgccaagatatctacaatcaaggcacggtgcagcccgacagctatattgtgccgctggtgttgtacagcccgaataaggccgtgcaacaggctgccaaccaggcttttgcgccttgcgagattgccttccatcagcagctttcaacgttcctgattcacacgctgggctacgatatgccggtttcaggttgtcgcgaaggctcggtaacgggcaatctgattacaggcgatgcaggcagcttgaacattcgcgacggcaaggcggaatatgtttatccgcaataa

SEQ ID NO: 66428 - DNA, 1179 bp, Neisseria meningitidis
atggcatttttaaaactgaccgaacaaaacgtgcagggcaaaaccgtcctcatccgcgccgatatgaacgtgccgttcaaagacggcaaaatcagcgacgacacccgtatccgcgcctcgcttgcgtccgttaaatactgcgtggacaacggcgcgtccgtcatcgtgatgacccacttgggccgcccgactgaaggcgagttccaccccgaagacgacgttgcgcccgttgccgcgcatttgggcggtctgttgggcaaagacgtgaaagtattgaacgactggcgcgaaaacaaaccggctttgaacgcgggcgatgtcgtgatgctgcaaaacgtgcgtatcaacaaaggcgagaagaaaaacgatttggaactgggcaaagcctacgcttctttgtgcgacgtgttcgtcaatgacgcgttcggcaccgcccaccgcgcccaagcctcgaccgaagccgtcgcccaagccgcccccgttgcctgcgccggcgtattgatggcgggtgaactcgacgctttgggcaaagccttgaaacagcccgcgcgcccgatggtggcgattgttgccggcagcaaagtgtccaccaagctgaccatcctcgaatcgctggcggataaagttgaccaactcattgtcggcggcggtatcgccaacaccttcctgttggcggaaggtaaagccatcggcaaatctttggcggaacacgatttggtggaagaatccaaaaaaattatggcgaaaatggcggccaaaggcggttctgtgccgctgccgaccgatgtcgtcgttgccaaagcctttgccgccgatgccgaagcggtcgtgaaagacattgccgacgttgccgaagacgatatgattttggacatcggtccgaaatccgccgccgagcttgccgaactgctcaaagccgcaggcacggtcgtttggaacggtccggtcggcgtgtttgagtttgaccagttcgcaggcggtacgaaagcccttgccgaagccatcgcccaaagcaaagcattctcgattgcgggcggcggcgacacgctggcggcgattgccaaattcggcgttaccgaccaaatcggctacatctccaccggaggcggcgcgttccttgagttcttggaaggtaaagagttgcctgccgtagccgctttggaaaaacgcggcgagtaa

SEQ ID NO: 66429 - DNA, 3054 bp, Neisseria meningitidis
  misc_feature 3031, 3032, 3033, 3034, 3035: 'n' is a, c, g or t
atgtctgcacccatccaagcatttgacccgctgaccgtccccattgccggcaccaacctgattgaggcctctgccggcaccggaaaaacctacggcattgccgccctgtttacgcgcctgatcgtattggaacaaaaaaacgtcgagcgcgtattggtcgttaccttcaccaaagccgccaccgccgagttgaaaacacgcctgcgcgcacgtttggacgatgtgttgcaggttttagaaagtaaagaaattgccaaacttggagacgacacgctttcagacggcatcgccgcctactgcgccgaacaccacaaaggcgacaccttcctgcccgcactcttaaaacaggctttgcaaaaagagggccggacgcgtctgattgtccgcctcaaagccgccatcgggcaattcgacaacgccgccatctataccatccacggcttctgccagcgcatcctgcgcgactacgcgtttttgtgccaagcaccgttcgatgtcgaactgaccgaagaagacggcgaccgcctgcttgtcccggcgcaagatttttggcgggaacgcgtcagcaatgatccggtgcttgccgcattggcgtttaaacgcaaagctgtgccgcaaaccgtccttgcccaaatccgcgcctacctgtcccgcccgtacctgaatttccgccgtccgcaggcggatttgaaacaggcgcagcgcaacgccgaaacctcatggcaaaccgtctgccgcctgctgcccgagctggaagccggcttttggcgcatccatcccgacctcaacggcaacagttaccgcaaaaacagcttcggcaacctttttaaagaactggcacaaaaatccgccgccggacaactgccctttctggacaaagacacgcacgacagactcttgaaacttgcgtccgacaaactcgaagccggactgaaaaaaggcaaaacgcccgatgcggcagtatttgccgaattgcagaaactggcagacttcgggcgcgatttgaacgcactcgaagaagcggaagaagcaacaatgatccggctgcaactggatttaatcggatacctcaaccgcagccttgccgagatgaaaaaatcgcgccgcgaacgcggtttcgacgacctgcttctcgatgtccacaccgcgctgaccgacaatccgcacgccgaaaccctcgcccgcgccgttgccgaaaactgggaaaccgcgctgattgatgaattccaagacaccgacccgctgcaatacgaaatcttccaaaaaatcttcatcgcccaaaaccgaccgctgtttctggtcggcgatcccaaacaggcgatttacagctttcgcggtgcggacatttacgcctaccttcaggcggcggaagatgcgcggcaccgctacacgctcgccaccaactaccgcagccacgccgcgcttatcggcagcataggcgcgctgttccgcctcaaagaacgcccgttcgttttggaaaacatcggctattcggaagtcggtgcggcgcgtgccgaaagcaggctgtcccccgaacgtcctgccgtacaggttcgttggctgcacgaaaacgacaatgaaaaagccaacaaagacgttttgcgccgccgtgccgccgactattgcgccgacgaaatcgcccacgcgctcaacgaagccgccggaggccgtctgaatttcaaaggccgcccgttgcagtcgggcgatattgccgtgctggtccgcacgcacaacgaggcggtgatggtttccgccgccctgaaaaaacggcaggtgcaaagcgtcctgctttcgcgcgaatccgtgttcgcctcgcccgaagccgccgccctgtccgcactcatcggcttctggctcgaaccgcgccgcgccggaacgctgcgctttgtcctgacaagcggcatattcggttatgacgcgcagcaattgcacgacttcaaccaaaacgaaagcgagattttgcattgggcggaatctgcccgaaccgcactcgacaactggaatcaatacggcattttcgccgctatgcagcaattttcccaaacacacggcatcgaaacgcgcctcttaagccggaacaacgggcgcagcctgaccaactatttccaactgctcgaactgcttgccgccgaagacgcgcaaaaccgcaacccagccgcgctgcacaaatggttgcgcgaccaaatcagcctggccggcaacaacagcggcgacaaccgagccatccgtctggaaagcgacgaagatttggtcaaaatcgttaccatgcacgcctcgaaaggtttgcagtatccgctggtgtactgcccgtttgcgtgggacgcgcaagataccggaccgtccgactggcaaatcctccaccaaagcgcaaaccgaaccgaactgttggcaaaggcgcaactgtcggaagacgaacagaagcaatacgccgacgaagaaatggcggaacgcctgcgcctgctttatgtcgcgctgacgcgtgcagaggaacagctcaacatctacgccgcctattcttccgataccgccgacaaccccctcgcctacctgatcgaaggcttgccgcaagacagccgcgaaaccgtccgccgtgcctatgcgtgtgaaaaagacggcatcgcgatgctcaaacgcaactggcggcgcgtggcggacaacgccccttccggcacaaatttcgccttcacagaagatgcgccgccccctgccgcctatcgcggcaacgccggtcaaaccgccgaatttgccgcaaacagcattcccgaacgcagattccgatttgtccgccacaccagctttaccgccttaagccgccatacccaaacgcccgacggcggcgaagaagatgcctgcccgtccttggatgccgccgaaatctcggtagccgcgatgccgtctgaaacgccgacggcttcagatggcatatcgatacacaactttccgaaaggcacgcaggcggggctgtgcctgcacgaaattcttgaagatttcaaattcggacaagcagccgccggacaggaaacccctcatnnnnncacacacttaattaattaa

SEQ ID NO: 66430 - DNA, 579 bp, Neisseria meningitidis; identical to SEQ ID NO: 50989

SEQ ID NO: 66431 - DNA, 354 bp, Neisseria meningitidis
atgggaataaaaaatgaacaaataataatttgtaaaaaatataatacagaaatatatcctgtttccgatgtttcaaaaatcggtgttgctgaaaatgtcaaacagacaggcctgtatccgattaacgggttaaggcaccgtcccaaaggtgatactaacggttggtatatctgggccggtgaaaacttctcctatgataaaaattttttcctgcccttgcatacgttccatttgcaaatatggcgacccgaaatcatcccctttttaacacttccgcccggttaccgttttttaattggggaaaacggttatgaagatgtatggtttgatgaattgctattaaatgataattga

SEQ ID NO: 66432 - DNA, 1155 bp, Neisseria meningitidis; identical to SEQ ID NO: 39455

SEQ ID NO: 66433 - DNA, 852 bp, Neisseria meningitidis; identical to SEQ ID NO: 36631

SEQ ID NO: 66434 - DNA, 468 bp, Neisseria meningitidis
atgactgaactgcaacaccccgtcctcgtcgtcgatgacgaaaccgacattctcgacctgatggaaatgaccctgatgaaaatgggcttgcgcgtccataccgcgtcaggcgttgccgaagccaaaaacaagctcgacagccaacgctattcgctcgtcctgaccgatatgcgtatgccggacggctcggggctggaagtcgtccaacacatcaacagccgcctgctcgatacgccggttgccgtcatcaccgccttcggcaacgccgatcaggcacaggaagcgttgcgttgcggcgcgttcgaccccgataccatgcagatacaggactatctcgaccaaatcgaacgcgacattatcgaacaaaccctcaaacaaaccgaaggcaaccgcacgcaggccgccaaacgcttgggcatcagcttccgttccatgcgctaccgtatggaacgcctcaacatcggctga

SEQ ID NO: 66435 - DNA, 954 bp, Neisseria meningitidis
atgacacataccgtccacctgcatttagaagaaaccgacaacttggcgttgcagcgtctgtgcggttcttttgacaacaaccttgatttacttgctaaagcactcgatatccacatcagccgccgttttgaacatttcactttcaacggcgcatttgcacacgccggcaaacgcgcactgctcaaactcttggaaacggcgcagacgcgcgacctaaacgacggcgacatcaggcttgccgccgtcgaagcccaaaccgaagatgccggtcatcaagaaaaaaaccatgaccacgcctattatttccgcaccaagcgcggcagcatcggcggcagaacgccacggcagaacggctatatccgcgccctactcaaccacgacatcgtattcggtctcgggccggcaggtacgggcaaaacctatctcgccgtcgccgccgccgtcgatgcgatggaaaaacaccaagtcgaacgcatcattttagtgcggcctgccgtcgaagccggcgagaaactgggcttcctgcccggtgacctgacccagaaagtcgatccctaccttcgtccgctttatgatgccctctatgacctgatgggctttgaccgtgtaaccaagctgattgaaaaaggcctgattgaaatcgccccgctcgcctatatgcgcggcaggacgctcaacggcgcatacatcatcctcgacgaagcgcaaaacaccacgcccgaacaaatgaaaatgttcctgacccgcatcggcttcggcgcgaaagccgtcattaccggcgacaccagccaaatcgacctgcccaaaaacatcaaatcgggattaaaagatgcgcgtgagaaactgcacaacgtggaagggctgtatttccacacctttaccggcgaagacgttgtccggcatcctttggtgcaaaaaatcgtcgaagcctacgaatcggcagaacacgactga

SEQ ID NO: 66436 - DNA, 501 bp, Neisseria meningitidis
ttgggtatccatcccaattcggcagcactgttctaccgtaaaatccgcatggttatcaaccatcatttggccttggctgccgatgaggtttttgagggctctgtcgagccggacgaaagcgatttcggcggacggcgtaaaggcagacgtggtcgcggtgcggcaggaaaagtggttgtcttcggcattctgaaacacaacggacgggtctataccgttgtcgtagacaatgccaaatctgaaacgttactccctgtcatcaaaaagaaaatcatgccggacagtattgtttataccgatagtctgagcagcggcgacaagttggacgtgagcggttttatccattaccgcatcaaccattccaaggaatttgcagaccgtcagaaccacattaacggcattgagaacttttggaatcaggcaaaacgcgtcttgcgaaaatatagtggattggcacgaacgtttccccgaattggaagcgcaactgggtgcgccgattga

SEQ ID NO: 66437 - DNA, 423 bp, Neisseria meningitidis
atgaatttggaacagttgggcaggcgggacgcgctgctttccggacttttgaaacaggcgggacagtggcggcggttggatgccgccgtgaaaaaactgctgcctgccaacctgcacccgcattttcagacggcatgtatcgaagacggcaggcttgtccttttggcggcaaacaatatggcggcatcgcgcttgaaaatgattgcaccgtcggtattgccgcagttggcagggcttgacgcttcgatacgctctgtttcggtcaggctggtcccgaaaccggaaaaaccgccgaaaaccaataccctgcatttgagtaaggctgcgctggagagtttcggttcggcggcggtaaagttggaaaaacggcatcccgaattggcggaggtattggcaaacttggttagaaggcatggcgcataa

SEQ ID NO: 66438 - DNA, 573 bp, Neisseria meningitidis
atgacttatgaaattcaagcttctgttcgtgaagcacaaggcactggtgcgagccgccgcctgcgtcgcgaaggccaaatccccggcattctgtacggtgaaggtcaagagcccgttgccattgccgtggatcacaaaaccgtattctacgcattggaaaaagaatctttccataccgcgttgattaaattgtctctgaacggcgaaaccaaagacgttatcgtccgtgatttccaaatgcacccgttccgccgcgaagttcaacacatcgacttccaagctgtgaaagccgatcaacttgtacgcatccgtgttcccctgcacatcgttaacgctgaaaattcccaagcggtcaaactgcaaggcggccgtgtatctctgttgaacacgacggttgaagtgcttgcgttgcctgccaatatccctgctttcttggatttggattgtgccgaagtggttgccggcgacattttgcatttgtcagacatcaaattgcctgaaggtgtagaaagcgtttccttgaaacgtaacgaaaatctggctgttgccaccgttaccggtaaaaaacgctaa

SEQ ID NO: 66439 - DNA, 1260 bp, Neisseria meningitidis
atgcacgtctccgaattacaaaccctgcacatttccaaactcttagaattggcggaagaacacggcatcgaaaacgccaaccgattccgcaaacaagacctcgtatttgccatcgtccgccagatgatgaaaaaaggcgagggtttcacctgctccggcacgcttgaaatcctgcccgacggcttcggcttcctccgcagcgcggacacgtcctatcttgccggccccgacgacatctatgtctcgcccacccaaatccgccgcttcaacctgcatacgggcgacaccatcgaaggaagcgtgcgcgtcccaaaagacaacgaacgctattttgccctggtcaggcttgataccatcaacggcgaccacccggaagtatgccgccataaaatcctgtttgaaaacctgaccccgctgtttccgaccgaacagttgaagctggaacgcgacttaaagtccgaagaaaacctgaccggacgtgccatcgacctgatttcccctatcggcaaaggtcagcgcgccctcttggttgccccgcccaaaagcggtaaaaccgtgatgctgcaaaacattgcccacgccgttacctcaaactatcccgaagtcgaactcatcgtcctcttgattgacgagcgtcccgaagaagtaaccgaaatgagccattccgtccgcggcgaagtggtttcctccacctttgacgaaccggcgcaacgccacgtccaagttgccgaaatggtgcttgaaaaagccaagcgtatggtagaacacaaaaaagacgtggtcatcctgctggattcgattacccgccttgcccgcgcctacaataccgtcgtgcctacctcgggcaaaatcctaaccggcggtgtcgatgccaacgcactgcaccgccccaaacgtttcttcggcacggcgcgcaacgtggaagaaggcggttcgctgaccatcatcgccaccgcattggttgaaaccggcagccgtatggacgatgtgatttacgaagaattcaaaggcaccggcaatatggaattgcaccttgaccgccgtatggcggaaaaacgcctcttccccgccatcaacatcaacaaatccggcacgcgccgcgaagagctgcttgtgccgaacgaccagttgcaacgtatgtggctcttacgcaagttcctgcacccgatggacgaaatcgaggcagccgaatttttaatcgggaaaatcaaagcctctaaaaacaatgatgatttctttgaactgatgcgcggcaaataa

SEQ ID NO: 66440 - DNA, 807 bp, Neisseria meningitidis
atgccgacagttttcatctttttgacggcggtttacgcaggattgggtgcatttgcatggcactgccaacagcaggggcgcggccgggattacccgtggaagacggaattgccggttttgggcgcggcattgaccgtccacggcgcggcactgcttatgccggtcattcaagacaaaatcatcattatgggcttcgggtattccggcagcctgattgtttggatgatgctgtttatttattttgccggcagcttcttttatccgctgcgcggagtgcagttgctgctgtatccttgcgccgcactgatgctgctgtcaggtttggtttttcctggaaaattctcgggatatgaaattaccgaccttccctttatgctgcatatcggaacttcgctgcttgcatacgggctgttcggcatcgcaacattattgtccgttttgaccctgctgctgaatcggagcctgcaccgcaggaacttctccaagctcgcaggattcctgccgtcgctgctcagtttggaaaaactcatgttccaggccatgtgggcaggtttcatcttgctgacctattccgtcgtcagcggaacattttttgccgaagccgtattcggcaaacccatgacctttacccataaaaccgtattcggcatattgtcatggctgatttacggcggactgctgctcaagcacagcatgaccgcatggcgcggcaaaaaagccgccgtgtggaccatcatcggatttgtcagcctgatgattgcctatatgggcagcaagttcgtattggaaatcattctgaacagataa

SEQ ID NO: 66441 - DNA, 471 bp, Neisseria meningitidis
atgaccgatacggatacccaagccgaccgcttcgaacagatgatgtggcaggcggtggacaaactttttgaacagcatgacggcaaactcgaaagcatggacgggcgggaacaggagctggttttgatttggcggacagaagccgatatcggtaacggcggcatactgcaatttgtctgcaactggggtttccccgccgccgaaaagacttgttccgttctgaaaaaaatcggcgcggtacacagcgcaatgctgatccatcgggcggcagacgcattgagaaaagaaatccgccacctccaatcggaaggtaaaaacctgaaagaaatgtgggatataacaaaacatctcgacaacaaaaccgcctcactgccgaacagtctggatgaacaatattggcaagaccccgacaaactgtatctgccgggatggcaatactattccggcaaccctgttcagacgctgttttaa

SEQ ID NO: 66442 - DNA, 477 bp, Neisseria meningitidis
atgaacaccatcgcccccaacctcgacggcaaacacctccgcatcggcatcgtacaggcacgcttcaccaacgaaatcggcagcgaaatgctcaaagtctgctgccgcactctcaaagaattgggcgtggcagacgaaaacatcaccgtcgccaccgtacccggcgcacttgaaatccccatcgcgctgatgaaccttgcctcttccgaaaagtttgacgcactgattgccatcggtgtcgtcatccgtggcgaaacctaccatttcgagctggtttccaacgaatccggagcaggggttagccgcgtcgcactcgactacaacatcccgattgccaatgccgtcctgaccaccgaaaacgacgcgcaggcaatcgaacggattgaagaaaaagcctcggatgccgccaaagtcgccgtcgaatgcgccaacctcgtcaacctgctgctcgaagaacagtttgaagacgaagaataa

SEQ ID NO: 66443 - DNA, 1137 bp, Neisseria meningitidis
atgaaaaacatatctctttctccgcccgccatgcttggcatcctcggcggcggacaattaggcagaatgtttaccgttgccgccaaaaccatgggctacaaagtaaccgttctcgaccccgatccggacgcgccggcagcagaatttgccgactgtcatttatgcgcgccgtttaacgaccaagctgctttggacgaattggcaaaatgcgcggcggtgaccactgaatttgaaaacgtcaatgccgatgcgatgcgctttttggcaaaacataccaatgtttcccctagcggcgattgtgtggcgattgcacaaaaccgcattcaggaaaaggcatggatacgcaaagcgggattgcaaaccgcgccgtatcaagtggtttgtaaggctgaagacatcactgaagcaagcgcgcaatttttgcccagcatcctgaaaacggctacgttgggctacgacggcaaaggtcaaatccgcgtaaaaacattggatgaactcaaagccgcgtttgccgaacacggcggcgtggattgcgttttggaaaaaatggtggatttgcgcagtgaaatttccgtaatcgtatgccgtttgaacaatgacaacgtgcaaactttcgaccctgccgaaaacatccacgaaaacggcatcttggcttattccatcgtccccgcgcgactgagtgccgacgtgcagcaacaggcgcggcagatggcgcaacgcttggcggacgaattggattatgtcggcgtattggcggtagaaatgtttgttgtcggtgacacacatgaattggtcgtcaacgaaatcgcgccgcgtccgcacaactccggccaccataccatcgatgcctgcgcggcagaccaattccagcaacaggtccgcctgatgtgcaacctgccacctgccgataccaaattgctgagttcttgctgtatggcgaatattttgggcgacgtttggcaggaagacggcggcaaaccggattggtttcccctgcaaagccggccggacgcgcgcctgcacctttacggcaaaaaaaccgcgcacaaagggcggaaaatgggacactttaccgttttaaccaccgattcggacaccgcatttcaagaagcaaaaaaactgcatcagtccctataa

SEQ ID NO: 66444 - DNA, 648 bp, Neisseria meningitidis
atgaaacctttaattttagggcttgccgccgtgttggcgctgtctgcctgccaagttcaaaaagcgcccgatttcgactacacgtcattcaaggaaagcaaaccggcttcaattttggtggttccgccgctgaacgaatcgcccgatgtcaacggaacatggggtgtactggcttcgaccgccgcgccgctttccgaagccggctattacgtcttccccgccgcagtcgtggaggaaaccttcaaacaaaacggcttgaccaatgccgccgatattcacgccgtccggccggaaaaactgcatcagattttcggcaatgatgcggttttgtacattacggttaccgaatacggcacttcatatcaaattttagacagcgtgacgaccgtatccgccaaagcacggctggtcgattcccgcaacggaaaagagttgtggtcgggttcggccagcatccgcgaaggcagcaacaacagcaacagcggcctgttgggggctttggtcagcgcagtggtcaatcagattgccaacagcctgaccgaccgcggttatcaggtttctaaaaccgccgcatacaacctgctgtcgccctattctcacaacggcatcttgaaaggtccgagattcgtcgaagagcagcccaaataa

SEQ ID NO: 66445 - DNA, 627 bp, Neisseria meningitidis
atgacgcaagaacgtttcccatcattcttcaaccaagccccgaccatcaccgtcagagacccgcttgccgcattcctcggcgcggccgaaaacggcatcctcacttaccgctacgccgatgccgtgcgcctgtgcggacattcctgcccgaccgtcgcgggcgcgtacctgatggttatcaaaggtctgaaagccctttacggagaagagctgcccgaacgcggcggcatcgaagccgccatgcagggagcgcgcgacgaaggcacggtcggcgtaaccgcgtccgtcgtccaacttctcaccggcgcagcccccgaaaccggcttcggaggcatcggaatgcagggacgcttcgcccgccgcaacctcttatcctttggtgcaggcgaaatcaacggcacactgaccctgcgccgcaaagacaacggcaaaaccgtcgccgtcagcctcaacgccgccctgcaacccttcgcacccgaaatgcgcgaacttatgcccaaaaccgtcggcggcagcgcaagcgcagaagaactcgaacgcttcggacaactctggcaggcacgcgttaaagcatttttgaccgaatcggcggacgacccgcagttcgtcatcgtccgcgaagtgtga

SEQ ID NO: 66446 - DNA, 435 bp, Neisseria meningitidis; identical to SEQ ID NO: 36830

SEQ ID NO: 66447 - DNA, 855 bp, Neisseria meningitidis
atgaaaatcgtcctgattagcgggttgtccggttcgggcaaatccgtcgcactgcgccaaatggaagattcgggttatttctgcgtggacaatttgcctttggaaatgttgcccgcgctggtgtcgtatcatatcgagcgtgcggacgaaactgaattggcggtcagcgtcgatgtgcgttccggcatcgacatcggacaggcgcgggaacagattgcctatctgcgcggactggggcacagggttgaagttttgtttgtcgaggcggaagaaagcgtgttggtccgccggttttccgaaaccaggcgaggacatcctctgagcaatcaggatatgaccctgttggaaagcttaaagaaagaacgggaatggctgttcccgcttaaagaaatcgcctattgtatcgacacttccaagatgaatgcccaacagctccgccatgcagtccggcagtggctgaaggtcgaacgtacagggctgctggtgattttggagtccttcgggttcaaatacggcgtgccgaacaacgcggattttatgttcgatatgcgcagtctgcccaacccgtattacgatcccgagttgaggccttacaccggtatggacaagcccgtttgggattatttggacggacagccgcttgtgcaggaaatggttgacgacatcgaaaaatttctgacgcattggctgccgcgtttggaggatgaaagcaggagctacgttaccgtcgccatcggctgtaccggcgggcagcaccgttccgtctatgttgtcgaaaaactcgcccgaaggttgaaagggcgttatgaattgctgatacggcacagacaggcgcaaaacctgccgagccgctaa

SEQ ID NO: 66448 - DNA, 1194 bp, Neisseria meningitidis; identical to SEQ ID NO: 62680

SEQ ID NO: 66449 - DNA, 393 bp, Neisseria meningitidis
atgtattcgtttgaagcgaatgcaaatgcagtaaaaatatctgaaactgtttcagttgataccggacaaggtgcgaaaattcataagtttgtacctaaaaatagtaaaacttattcatctgatttaataaaaacggtagatttaacacacatccctacgggcgcaaaagcccgaatcaacgccaaaataaccgccagcatttcccgcgccggcgtattggcggggggcggcaaacttgcccgcttaggcgcgaaattcagcacaagggcggtttcctatgtcggaacagcccttttagcccatgacgtatacgaaactttcaaagaagacatacaggcacgaggctaccaatacgaccccgaaaccgacaaatttgcaaaggtctcaggctaa

SEQ ID NO: 66450 - DNA, 297 bp, Neisseria meningitidis
ttgaaaatccccgtcatcgtgtatctgaaataccgcaaggatgatcatttctcggtattgcgcggtatagacggcaatacggttttgcttgccgacccgtcgctgggtcatgtttcaatgagcagggcgcagtttttggatgcttggcaaacccgtgagggaaatttggcaggtaagattttggcggtcgtgccgaaaaaagccgagacaatttcaaataaattgtttttcacacatcatcccaagcggcagacagaatttgcagtcggacaaatcaggcaagcacgtgcagagtaa

SEQ ID NO: 66451 - DNA, 186 bp, Neisseria meningitidis
atgagcaccttcttccggcaaaccgcccaagccatgattgccaaacacatcgaccgcttcccgctattgaagttggatcaagtgattgattggcagccgatcgaacaatacctgaatcgtcaaaaaacccgttaccttcgagaccaccgcggctatcccgcctatcctgtcgccggtattccctaa

SEQ ID NO: 66452 - DNA, 2274 bp, Neisseria meningitidis
atgaacattactcaaattctttcccaagaactttccgcgactaccgcgcaaatcaatgccgctattgagcttttagacgacggcgcaaccgtgccgtttatcgcgcgttaccgtaaagaagccaccggcgggctggacgacacgcagctgcgccggcttgccgagcggctgcaatacctgcgcgagttggaagagcgcaaagccgttgtgttaaaaagcattgaagagcaaggcaaactttcagacggcctccgcgcgcaaatcgaagccgccgacaacaaaaccgcgctggaagacctgtatctgccctacaagcccaaacgccgcaccaaggcgcaaattgcgcgcgaacacggtttgcagccgctggcggacgtgttgcttgccgagcagtcgcaggacgtggaagccgccgcacaaggctacctgaacgaaaacgtccccgatgccaaagccgcgttggacggcgcgcgtgcgattctgatggagcagtttgccgaagacgcggaactcatcggcacgctgcgcgacaagctgtggaacgaagccgaaatccacgcgcaagttgttggaggcaaagaaaccgaaggcgaaaaattcagcgattattttgaccaccgcgaacctattcgtgcgatgcccagccatcgtgcgctagcggttttgcgcggacgcaacgaaggcgtgttgaacatcgcgctcaaatatcagcccgacgacacgccgattacgcagcaaagcgaatacgagcaaatcatcgcccgccgcttcaaagtttcagacggccacaaatggctgcgcgacaccgtgcgcctgacttggcgcgcgaaaatctttttgtcgttggaacttgaagctctcaatcgtttgaaagaagccgccgacaccgacgcgattaccgtgttcgcccgcaatctcaaagacttgctgcttgctgcgcccgccggacggctgaccacgctgggtctcgaccccggctaccgcaacggcgtgaaatgcgccgtggtggacgacaccggcaagctgctggataccgtcatcgtctatttgcatcaagaaaacaatatgttggcaacgctgtcgcgcctgattaaacagcacggcgtgaagctcatcgccatcggtaacggcaccgccagccgtgaaaccgacaaaatcgcgggcgaactggtgcgtgaaatgtcgaaaatggggctgcataaaatcgtcgtgtccgaagccggcgcgtcgatttattccgcgtccgaactggcggcgcgcgagttccccgacttggacgtttccctgcgcggcgcggtgtccatcgcccgcaggctacaagacccgcttgccgagttggtcaaaatcgaccccaaatccatcggcgtggggcagtatcagcacgacgtgaaccaaagccagctcgccaaatcgctggacgcggtggtcgaagactgcgtgaacgccgtcggcgtggacgtgaacaccgcctccgccccgctcttggcgcgaatttccggtttgaatcaaacccttgcccaaaacatcgttgcctaccgcgatgaaaacggcgcgttcgacagccgcaaaaaattgctgaaagtaccgcgtttgggcgaaaaaaccttcgagcaggcggcaggctttttgcggattaacggcggtaaagagccgttggacgcgagcgccgtccaccccgaagcctatcccgtcgtcgccaaaatgctggcgcaacaaggcattagcgccgccgaactcatcggcaaccgcgagcgcgtgaagcaaatcaaagcgtccgacttcaccgacgaacgcttcggcctgccgaccattttggacatcctgtccgaactggaaaaacccggccgtgatccgcgcggcgagtttcagacggcatcgtttgccgaaggtatccacgaaatcagcgacttgcaagtcggtatgatactcgaaggcgtggtttccaacgtcgccaacttcggcgcgttcgtggacatcggcgtccatcaggacggcttggtgcacatctccgccctgtccaacaagttcgtccaagacccgcgcgaagtggtgaaagctggcgacgtggtgaaagtgaaagtgctggaagtcgatgctgcacgcaaacgcatcgcgctgaccatgcgcttggatgacgaaccgggcggcgcaaaacataaaatgccgtctgaaaaccgcagccgcgaacggacagccggccgcaaaccccaacgcaacgaccgcgccccagccaattcggcgatggcggatgcgtttgcgaagctgaagcggtaa

SEQ ID NO: 66453 - DNA, 1512 bp, Neisseria meningitidis
atgaaatggttgaaacgcctgacggttattgtcgggactttttaccgctatcggctggcaggtctgtgtgcttcgctgatgggtagcggttggatatgcgctctgctgaaaatgatgccgcagtcgtccaaattgaaaaacgaaccgcctgctgtccgtctgcgccttgccttggaaagcctggggccgattttcatcaagttcgggcaggttttgtccacacgccccgatttgattccgcacgattacgccgtcgaactggcaaagctgcaagacaaagtgccgccttttgacgcgcggctttcgcgtgaacaaatcgaaaaatcgttgggtcagtccatcgaaaagctgtatgcggaatttgaaaccgagcccatcgccagcgcgtccatcgcccaagtacacaaagcccgcctgcattcgggcgaacgagtggcggttaaagttttgcgccccaaccttttgccccttatcgaacaggatttgtcgctgatgcgtttcggcgcggcctgggtcgaacgcttgttttcagacggcaggcgtctgaagccgctcgaagtggtggcggagttcgacaaatacctgcacgacgagttggatttgatgcgcgaagccgccaatgccggacagctcgggcgcaatttccaaaacagcaatatgctgattgtgcccaaggtgttttacgactactgcaccagcgacgtgctgacaatcgaatggatggacggcacgccggttgccgacatcgccaaactcaaagcagacggcatcgatttgcacaaactcgccgattacggcgtggaaatctttttcacgcaggtcttccgcgacggctttttccacgcggatatgcaccccggcaatattttggttgccgccgacaaccgctacatcgccctcgatttcggcatcgtcggcacgctgaccgattacgacaaacgttatctcgccatcaatttcctcgcctttttcaaccgcgattaccggcgcgtcgccaccgcccacatcgaatcgggctgggtgcctgccgacacgcgtgcggaagaattggaagccgccgtccgcgccgtgtgcgaaccggtgttcaacaaaccgatttcgcagatttccttcggcttggtgctgatgcgcctgtttgaagtcagccgccgcttcaatgtcgaaatccagccgcagctggtattgctgcaaaaaacgctgctcaacatcgaaggcttgggacggcagcttgatcccgatttggacttgtggaaaaccgccaaaccgtttttggtgaaatggatgaacgggcaggtcggccctaaagccctttggcgcaacctcaaaaacgaagcccccgactgggcgcaaatcattccttcattgccgcgcaaaatcagtgcgttgattgatgaaaaccgccagcaggaaatgcgtgatgcctatatccatttggtcaaagtgcagcagcggcaaagcctgtggctggcggcgatagcggttgttttgctgctgattttgcttttgaaatag

SEQ ID NO: 66454 - DNA, 1311 bp, Neisseria meningitidis
atgagcgcgcccgacctctttgtcgcccacttccgcgaagccgtcccctacatccgccaaatgcgcggcaaaacgctggtcgccggcatagacgaccgcctgctcgaaggtgataccttaaacaagctcgccgccgacatcgggcttttgtcgcaactgggcatcaggctcgtcctcatccacggcgcgcgccacttcctcgaccgccacgccgccgctcaaggccgcacgccgcattattgccggggcttgcgcgttaccgacgaaacctcgctcgaacaggcgcagcagtttgccggcaccgtccgcagccgttttgaagccgcattgtgcggcagcgtttccgggttcgcgcgcgcgccttccgtcccgctcgtatcgggcaacttcctgaccgcccgtccgataggtgtgattgacggaaccgatatggaatacgcgggcgttatccgcaaaaccgacaccgccgccctccgtttccaactcgacgcgggcaatatcgtctggctgccgccgctcggacattcctacagcggcaagaccttctatctcgatatgcttcaaaccgccgcctccgccgccgtctcgcttcaggccgaaaaactcgtttacctgaccctttcagacggcatttcccgccccgacggcacgctcgccgaaaccctctcggcacaggaagcgcaatcgctggcggaacacgccggcggcgaaacgcgacggctgatttcgtccgccgttgccgcgctcgaaggcggcgtgcatcgcgtccaaatcctcaacggagccgccgacggcagcctgctgcaagaactcttcacccgcaacggcatcggcacgtccattgccaaagaagccttcgtctccatccggcaggcgcacagcggcgacatcccgcacattgccgccctcatccgcccgctggaagaacagggcatcctgctgcaccgcagccgcgaatacctcgaaaaccacatttccgaattttccatcctcgaacacgacggcaacctgtacggttgcgccgccctgaaaacctttgccgaagccgattgcggcgaaatcgcctgccttgccgtctcgccgcaggcacaggacggcggctacggcgaacgcctgcttgcccacattatcgataaggcgcgcggcataggcataagcaggctgttcgcactgtccacaaataccggcgaatggtttgccgaacgcggctttcagacggcatcggaagacgagttgcccgaaacgcggcgcaaagactaccgcagcaacggacgaaactcgcatattctggtgcgtcgcctgcaccgctga

SEQ ID NO: 66455 - DNA, 627 bp, Neisseria meningitidis
atgaaaaacatcgtcatcctgatttccgggcgcggcagcaacatgcaggcaatcgtcaatgccgctattcccaacgtccgcattgccgccgtgttgagcaacagcgaaacggctgccggtttgcaatgggcggccgaacgcggcatcccgaccgatagcctgaatcataaaaactttgaatcacgacttgccttcgataccgccatgatggagaaaatcgacgcatatcaacccgacttggtggttttggcaggttttatgcggattctgacccccgagttttgcgcccgttacgaaggcaggctgatgaacattcacccgtccatccttccctcgtttaccggacttcatacgcacgaacgcgctttggaggcgggctgccgcgttgccggctgcaccatccatttcgttactgccgaactggattgcggcccgattgtatcgcaaggggttgtgccgatactcgacggcgatacggcagacgatattgccgcacgggttttggctgtcgagcataaactttatccgaaagccgttgccgattttgccgccggccgcctgattatcgagggaaaccgcgtcagaaattcggaaaacgccgatgccgcccgtttcctgacggcgtaa

SEQ ID NO: 66456 - DNA, 627 bp, Neisseria meningitidis; identical to SEQ ID NO: 55000

SEQ ID NO: 66457 - DNA, 909 bp, Neisseria meningitidis
atggacaaatcagcgattttgaccgcaatcacggcagcattccgcaaagaatttcaaacgggtttggaatccgtcaagcccgactataccgccgttgcgatgaccattccgtccaatacggcaaccaatacttatgcgtggctcggcaaattcccccaaatgcgcgaatgggtcggctcgcgccaaatcgaaaaaatgaacaagcaggcgatgagcctcgacaacaaaaagtttgaagcaaccgtcggcgtagcgcgtacggacatcgaagacgaccaagtcggcatgtaccgcccgatgatggcggcaatgggcgagtccgccgccgccctgcccgatacgctggtgtggggtctgctcaaaaaaggtaaaaccactgtcggttatgacggccaatatttcttcgataccgaccaccccgtttacgagaaatcggacggcacgggtcagaatacgccgcactccaatctgacgaccggtacggacaacgacgcgccgaccttctacgtcgtcgatgacaccaagaccctgaagccgctgattttccaaaaccgcaccgactccgagtttgaaaccaaattcgacccgtccaaatccgaccgcgtgtttatggaagacgaatacctgtacggatcgcgccgccgctgcaatgccggtttcggtttgtggcaactgatgcacatggcggaaaaaaccgcgctgacccgcgaaaacctcgccgccattatcgtcaaaatgcagaaaatcaaagccgacggtggctatgtgttgaatgtgaagcccagcctcttggtcgttccgcccgagctggaagacaaagcccgtgaattattggaagccgacaaaatcaacggcacgaccaataccttcaaaggccgtctgaaactgcacgtttgcgtccacctgtaa

SEQ ID NO: 66458 - DNA, 489 bp, Neisseria meningitidis
atgaccgtactgaccgtcatcctcgccctcgccctgatagccgtcggcacggcgggcatcgtttaccccgccctgcccggattggcattgatgtttgccggaacatggctgcttgcctatgccggcggctaccaaatctacggcgcaggtgttttgtggacggtcggactcatcagccttgccggcatactggcggactatgtggcaggcatattgggggtaaaatataccggagcgggcaggctcgccgttcgcggcgcattggtcggcagcatcgtcggcatatttttctcccttcccggactaatactcggcccctttatcggcgcggcggcaggcgaactcatcgacagacgcaatatgcttcaggcaggtaaagcgggcttgggtacgctgttggggcttatcgtcggtacggcgttcaaaatcggctgcgccgtatccatcttgtttatcctgttggtgaaatacatcgcctacctgttttaa

SEQ ID NO: 66459 - DNA, 252 bp, Neisseria meningitidis
atgtcgctttttattaccgacgagtgcatcaactgcgacgtatgcgaacccgaatgccccaatgatgccatttcccaaggcgaggaaatttacgaaatcaaccccaacctctgcacgcagtgcgtcggacactacgatgagccgcagtgccagcaggtttgcccggtggactgcatcctgattgacgaagaatatcccgaaacccatgacgagttgatggcgaaatacgaaaagattatccagtttaaataa

SEQ ID NO: 66460 - DNA, 318 bp, Neisseria meningitidis; identical to SEQ ID NO: 51629

SEQ ID NO: 66461 - DNA, 1263 bp, Neisseria meningitidis
atgtcaaacacacaaaaacagcttgcccttgccaaagcggcaaaaaaatccgtcaacacggcggatacggaagaaaaaaaccgcgcgctgcttgctatggcggacagcttggaagcggcggcggcagatattttggcggcaaaccgtcaagacttggaagccgcggcaggcaacattcccgaaagcatgaccgaccgccttttgttggacgaaaaacgcattggcgcgatggcggacggcatcagggcggttgccgcgctgcccgaccccgtgggcgaaatactggaaacctcgactttgcccaacggcttggaaatcgtcaaaaagcgcgtggcgatgggcgttatcggcattatttacgaaagccgcccgaacgttacttccgatgcggcggctttggcactgaaaagcggcagcgcggtcgtactccgcagcggcaaagatgcattccaatccgcacgcgccatcgttgccgccctgaaaacggggttggcacaaacccgcatcgaccccgacgcgctccagttgattgaagacaccgggcgcgaaagcagttacgaaatgatgagggcgaaagattatctagatctgctgattccgcgcggcggggcggggctgatacgggcggtggttgagaatgccgtcgtgccggtcattgaaacgggaacgggcattgtccacatttatatcgacaaggacgctgattgggataaggcactccgtatcgtgtacaacgccaaaaccagccgtccgtccgtgtgcaactcgatggaagtgctgctggtgcatgaagacattgctgccgacttcctgcccaagctcgaacgactgttggttcgcgaccgcatagaagccggactgccgcccgtccgcttccgtttagatccgcaggcggcgcggcatatcggcggcgaagcggcgggtgcagacgatttcgataccgagtttttagactacatcctcgccgtgaaaaccgtcgcatcggtcgaagaggcggtcgggcacatcgaagcccacggcacacaccattcagacggcatcgttaccgaaaaccgccacgctgcggactatttcacgacccatatcgattctgccgccgtgtatgtcaacgcgtccacgcgctttaccgacggcggcgaattcggcttgggttgcgaaatgggcatctccacgcaaaaactccacgcccggggtccgatgggtttgaaagagctgacgagttacaaatacatcgtacaaggcacgggacaggttagggaataa

SEQ ID NO: 66462 - DNA, 1467 bp, Neisseria meningitidis
atggctgaagcgacagacgttgtcttggtgggcggcggcattatgagcgcgactttgggcgttttgctcaaagaactcgaaccgtcttgggaaatcaccctgattgaacgcttggaagatgtggcgttggaatcgtcaaacgcgtggaacaacgccggcacggggcattccgcgctgtgcgaattgaactatgcgccgttgggtgcaaatgggattatcgatccggcgcgcgccctcaatattgccgaacagtttcatgtcagccgccagttttgggcgacgttggtcgcggaaggcaagttggaagacaattccttcatcaatgccgtgccgcatatgtctttggtgatgaatgaagaccattgttcttatcttcaaaaacgttatgacgcgtttaaaacccaaaaactttttgaaaatatggaattttccatcgatcggaacaaaatttccgattgggctccgctgatgatgcgcggccgggacgaaaaccaacccgtcgccgccaactactccgccgaaggtacggatgtcgatttcggacggctgacgcgccaaatggtgaaatatttgcagggcaagggcgtaaaaaccgagttcaaccgccacgtcgaagacatcaaacgcgaatccgacggcgcgtgggtgctcaaaaccgccgatacccgcaaccccgacgggcagctcaccctccgtacccgcttcctcttcctcggcgcgggcggcggcgcgctgaccctgctgcaaaaatccggcatccccgaaggcaaaggctacggcggcttccccgtgtccggcctgttcttccgcaacagcaaccccgaaaccgccgaacaacacaacgccaaagtgtacgggcaggcttccgtcggcgcgccgccgatgtccgtcccgcacctcgacacacgcaacgtggacggcaaacgccaccttatgttcggcccttacgcaggcttccgttccaacttcctcaagcaaggctcgcttatggatttgccgctgtccatccatatggacaacctctatcctatgctgtgcgccggctgggcgaatatgccgctgaccaaatacctgctgggcgaattgcgtaaaaccaaagaagaacgcttcgcctccctgctggaatactaccccgaggcaaaccccgacgactgggaactcatcaccgcagggcaacgcgtccaaatcattaaaaaagactccgaaaaaggcggcgtgctccagtttggtacggagattgtcgcccacgccgacggctcactcgccgcattgctgggcgcgtcgccgggcgcatcgaccgctgtgccgctgatgatccggctgatgcaccaatgcttccccgagcgcgccccgtcttgggaagaccgtctgaaagagctggtaccgggttacggcatcaagttgaacgaaaaccctgaaagggcggatgaaattatcgcctataccgcgaaagtattggatatttaa

SEQ ID NO: 66463 - DNA, 489 bp, Neisseria meningitidis
atgaaaaaaatactcaccgccgccgtcgtcgcactgatcggcatcctccttgccatcgtcctcatccccgacagcaaaaccgcgcccgccttctccctgtccgacctgcacggaaaaaccgtttccaacgccgacctgcaaggcaaagttaccctgattaatttttggtttccctcctgtccgggttgtgtaagcgaaatgcccaaaatcattaaaacggcaaatgactataaaaacaaaaacttccaagtccttgccgtcgcccagcccatcgatccgatagaaagcgtccgccaatatgtcaaagactacggtttgccgtttaccgtcatgtatgatgcggacaaagctgtcggacaggcgttcggcacacaggtttatccgacttccgtccttatcggcaaaaaaggcgaaatcctcaaaacttatgtcggcgaacccgatttcggcaaactctaccaagaaatcgataccgcgctggcgcaataa

SEQ ID NO: 66464 - DNA, 1410 bp, Neisseria meningitidis
atgccccatattgattttgacacgattccgggcagcatccgcgtgcccgggcagtatattgaatttaacacccgcaatgccgtgcaaggtttgccgcaaaatccgcaaaaggtattgatggttgcacccatgctgaccgcgggcatacagcccgccttagagccggtgcaactatttagcgatgctgaggcggccgatttgttcggacaaggctcgctggcgcatttgatggtgcgccaagcatttgccaacaacccttatttggatttgaccgttatcggtattgccgaccacagcgcaggcgtgcaggcaaccgcaaccgttaccctttccggcacggccaccgcgccgggcgtggtggaaatcacgattggcggcaagcaggtaagcacggtcgttaacaccggcgagaccgccgccacagtggcaggccgtctgaaaaccgccatcactgccgccgatgtaaccgttaccgcatccggcagcggcgcagccgttacgctgacggccaaacacaaaggcgagatcggcaacgagagcggcttaaccgtgagcaccggcaataccggcctaacttatcaagccaatgcctttaccggcggtgccaaaaatgcggacattgccacggccttgtccaaagtggcgggcaagcattatcacattatttgcagcccgtttagcgatgacgccaacgccaaagccttgagcaaccatattaccaacgtatccaacgccatcgagcagcgcggctgtatcggcgtattgggtatgagtgcggccttgagcacggccaccaccgctaccggcgaaatcaacgacggccgcattacctgtgcttggtacaaaggtgcggtagagccaaacggcatcatcgccgcaggttatgcggcggtgttggcctttgaagaagaccctgccaagccgctgaacacgctggaaatcaaagggctgaccgttacacctgatgcgcaatggccgctgtttgcagaatgcaacaatgcgctgtacaacggcttgaccccgctcacagtggtcaacaaccgcgtgcagattatgcgtgccgtatcaacctataccaagtcggccaacaacaccgacgacccggcactactcgacattaccaccattcgcacgctggattatgtgcgccgcagcgttaaagagcgcattgccctgcgttttccgcgcgacaaattgagcgaccgcctgctgcccaaggttaagagcgagattttggacgtgctgattaagctcgaccaagccgaaatcatcgaaaacgccgaggccaacaaaggcaagctggtggtggcgcgtgcgcaaaacgaccccaaccgtgttaatgccattatccccgccgatgtggtcaacggcctgcacgtctttgccgggcgcattgatttgattttgtaa

SEQ ID NO: 66465 - DNA, 1455 bp, Neisseria meningitidis
atgactacgcaaaccatcaaatttcacatgaagccggaaactttcaagcaaaacgccgcaatttcccttcaagacaagcctttgcgcaaaagcctgcgtaccgcgatggatatgctgatgaccaaacgcaaagccgttttgaccgacgaagaagagctgcaaagcctgcgcgatttgtgcgaacacgtccgtcagcgttcattgtctaaattacctgccctgctggagcagctggaagaaaacctaactaagctgggcgtgaaagtgcactgggcagaaaccccgaccgaagcctgccaaattatccacgacatcatcacagccaaaaacggcaagctgatggtcaaaggtaaatccatggtcagcgaggaaatcgagctgaaccattatcttgaagcaaaaggcattaaagcggtagaaagcgacttgggcgagttcatcgtccaaatggcaggtgaaaaaccgacccatatcgtgatgcctgctatccacaaaaccaaagaacaggttagcgaactgttccaccaaaacctcggtacgccgctgacagacgatgtagaccaactgaccggcttcgcccgtaaagcactgcgcgatatttacagcactgccgatgtcggtttgagtggcgtaaactttgccgttgctgaaacaggtacgctgtgtctggtggaaaacgagggcaacggtcgcttgagtaccaccgttcctcccgtgcatatcgctattaccggcattgaaaaagtggtggcgaaattgtccgacatcccacccttgtacagtctgctgccgcgctccgccatcggtcaaaacatcacaacctatttcaatatgattaccggcccgcgccgcagtgaagaattagacggtccgcaagaaatgcacttggttctgctcgacaacggccgcagccaggcttatgccgaagaccaaatgcgccgcaccctgcaatgtatccgttgcggcgcgtgtatgaaccattgcccggtttatacccgcatcggcggcgcggcatacggcacaacctatcccggcccgattggcgagattatttcccctcacctgttgggtctggatgccactcgcgacctgccaaccgcctgtaccatgtgcggcgcgtgcgtggaagtttgtccggtacgcatcccgattaccgaacaaatgcagcgtttgcgcgttgaagcgcaacgttcgccgaccgaaaccgtgccgcaccccatccgagggcaaggcgcatcgcataccttcggcgaacaaatggcgtggcgcacattcaacggtattttcagcggcagcaaaacctaccgcgccttcggttgggcagccaccaagttccgcaacctgaccccgcgcaaacagttgggttggacgcaaaaccgcgtgccgatgaaaccggcgaagaaaaccctgcacgaactgatggcagaaaaaatgcgccaaaaagaacaggcataa

SEQ ID NO: 66466 - DNA, 258 bp, Neisseria meningitidis
atgacgacccagatgtgtgcttcccgcgatgtcagcaaaagcgccaaaggttggagtgtcggtatcggtctgaatgtaggcaaacagttgaccgacagcgtcggtctcgagtttgatccatactaccgtcacaaaacaatctgcaaaccccgtgagattgttttggacggcgacaaaaccaaaatgggccgctccaaatccaacgagtacggcttccgcgtaaccgcaacgttctatagtcaattaaaatcaaagtag

SEQ ID NO: 66467 - DNA, 645 bp, Neisseria meningitidis
gtgaaaaaacggctgttttgcagccgcaacggcttgcgctattacctgttgggcggtttctgtttgagtgtttttccgcttttgctggtgtttgcctcatccgtttgggcggtttatcggacgggcggtcaggttttgccgccgtatgtccgggcggatgccgcgctggtgttgggcgccgccgcgtgggacaaacgcccttccccggtttttcgggaacgcatcaaccacgccatcgcgctttatcagagccgcagggtcggcaaaatcatttttaccggcggcaggagtaaaaagggttatatgacggaggcggaagtcgggcggagatacgcgctcaagcaaggaattccgccgcgcaacatcctgtttgaaaacacttcgcgcaacacttatgaaaacctgaacaacatccgtccggttttgcgtgccaacggtattgccagcgtggtgattgtcagcgatccctaccatttggcacgggcggcggaaatggcggaggatttgggtgtccgcgtttatatgtctgccacgccgaccacgcggtttgatgcgggaaataagaaaaaaatctttatgctgcaagagggatatgcgttatccctctaccgtttggaaaaatgggggcgggattttttcaattag

SEQ ID NO: 66468 - DNA, 417 bp, Neisseria meningitidis; identical to SEQ ID NO: 37115

SEQ ID NO: 66469 - DNA, 612 bp, Neisseria meningitidis; identical to SEQ ID NO: 50253

SEQ ID NO: 66470 - DNA, 1170 bp, Neisseria meningitidis
atgacagcacataaaatcctgcccgtcctgctttccatcatcttaggcgtttctcacgcaacggccgcatcgcccgcgcccaacaaaccggcggtacacgccgcccccacgttccaaacacccgaaaccctcacagcggcacacatcgttatcgaccttcaaagcaaacagattttatccgccaaaaacatcaatacccctgtcgaaccggcggcactaacccaactgatgaccgcatatctggttttcaaaaacatgaaatcgggaaatatccgatctgaagaaaacttaaaaatacccgaatccgcatgggcttcagaaggaagcagaatgtttgtacgtcccggcgatacggtcagcaccgacaaactcttaaaaggcatgattgcactatccgcaaacgatgccgccctaacccttgccggccggctgggcaacggctcgattgaaaattttgtgcaacaaatgaacaaagaagcccgacgcttgggcatgaagaacactgtattcaaaaatccgacaggcttgagtagagaaggacaggtttccaccgccaaagacctcgcccagctgtctgaagcattgatgcgcgactttccggaatattacccgctgttttccatcaaatctttcaaattcaaaaatatagagcaaaacaaccgcaatatccttttatatagggacaacaatgtaaacggtctgaaagccggacacacagaaagcggcggctacaaccttgccgtgtcatactccggcaacggcaggcacatccttgtcatcacattgggttcggaatcggcggaaacacgcgcatcagacaacagcaagctgctgaactgggcattgcaggccttcgatacgcccaaaatatatccgaaaggcaaaaccgttgcccaaatccaaatttccggaggcagcaaaaaaaccgtccgcgcaggcttcctcaaagaagcctacatcactctgccacataaggaagcgaaaatggcagaacagattttggaaaccatacagccgattcccgccccggtaaaaaaggggcagattttaggaaaaatcaaaatcagacaaaacggatacaccattgccgaaaaagaaattgtcgcactggaaaatgtagaaaaaagaagccggtggcaaaggctttgggcgcgtctgacgggacagtaa

SEQ ID NO: 66471 - DNA, 294 bp, Neisseria meningitidis; identical to SEQ ID NO: 62999

SEQ ID NO: 66472 - DNA, 1245 bp, Neisseria meningitidis
atgaccctattttgcgaacaagtcccctacccccgccttgccgaagcattcggcacaccgctttatgtgtacagccaatccgcgctgaccgaagcatttgaacactaccaaactgcctttgccgagctctccccgctcgtctgctatgcggttaaagccaatggcaacctgagcatcatcaaacactttgcttctttggggagcggttttgacattgtgtccggcggcgaattggcacgcgttttggcggcaggcggcgacgcggcaaaaaccatattttcaggcgtaggcaaaagcgaggcggaaatcgagttcgcgctgaatgcaggcgtgaaatgcttcaatatggaaagcatccccgaaatcgaccgtattcagaaagttgccgcgcgtttgggtaaaaccgcgcccgtctccctgcgcgtcaatcccgatgtcgatgcgaaaacccatccttacatctccacaggtttgaaagccaacaaattcggtatcgcctacgccgacgcgctcgaagcctaccgccatgccgcacaacagcccaatttgaaaatcatcggcatcgactgccacatcggctcccaactaaccgacttaagcccgctggtcgaagcctgcgaacgcattttgattttggttgacgcgcttgccgccgaaggcattgttttggaacatttggacttaggcggcggcgtcggcattgtttaccaaaacgaaaaagtgcctgatttgggcgcgtatgcccaagcggttcaaaaactgatcggcacacgccgtctgaaactcattcttgagcccggccgcagcttggtcggcaacgcaggcgcgttgttgacgcgtgtcgaattcgtcaaatacggcgaagagaaaaactttgtgatggtcgatgcggcgatgaacgatttaatgcgccccgccctatatgatgcctatcatcacatcgaagcggtagaaccaaaaaacatcgcgccgctgactgccaacatcgtcggcccgatttgtgaaaccggcgacttcctcggcaaagaccgcaccatcgcctgcgaagaaggcgatttgctgcttatccgcagcgcgggcgcatacggagccagtatggcgagcaattacaacgcgcgcaaccgtgcggcggaagtgttggttaacggtggcggatacaaactcatccgccgacgcgaaaccttagaacagcaaatggcaaacgaactcgcctgcctgcaagccgaacatcaaaatgccgtctga

SEQ ID NO: 66473 - DNA, 1218 bp, Neisseria meningitidis
atgaaaacggtagtctggattgtcgtcctgtttgccgccgccgtcggactggcgctggcttcgggcatttacaccggcgacgtgtatatcgtactcggacagaccatgctcagaatcaacctgcacgcttttgtgttaggttcgctgattgccgtcgtggtgtggtatttcctgtttaaattcattatcggcgtattcaatatccccgaaaagatgcagcgtttcggttcggcgcgtaaaggccgcaaggccgcgcttgccttgaacaaggcgggtttggcgtattttgaagggcgttttgaaaaggcggaacttgaagcctcgcgcgtgttgggcaacaaagaggcgggcgacaaccggactttggcattgatgctgggtgcgcacgccgccggacagatggaaaacatcgagctgcgcgaccgttatcttgcggaaatcgccaaactgccggaaaaacagcagctttcccgttatcttttgttggcggaatcggcgttgaaccggcgcgattacgaagcggcggaagccaatcttcatgcggcggcgaagatgaatgccaaccttacgcgcctcgtgcgtctgcaacttcgttacgctttcgacaggggcgacgcgttgcaggttctggcaaaaaccgaaaaactttccaaggcgggcgcgttgggcaaatcggaaatggaacggtatcaaaattgggcataccgccgccagctggcggatgctgccgatgccgccgctttgaaaacctgcctgaagcggattcccgacagcctcaaaaacggggaattgagcgtatcggttgcggaaaagtacgaacgtttgggactgtatgccgatgcggtcaaatgggtcaaacagcattatccgcacaaccgccgccccgagcttttggaagcctttgtcgaaagcgtgcgctttttgggcgagcgcgaacagcagaaagccatcgattttgccgatgcttggctgaaagaacagcccgataacgcgcttctgctgatgtatctcggtcggctcgcctacggccgcaaactttggggcaaggcaaaaggctaccttgaagcgagcattgcattaaagccgagtatttccgcgcgtttggttctggcaaaggtttttgacgaaaccggagaaccgcagaaggcggaggcgcagcgcaacttggttttggcaagcgttgccgaggaaaaccgcccttcctccgaaacctgttga

SEQ ID NO: 66474 - DNA, 1239 bp, Neisseria meningitidis
atggctttttatgcttttaaggcgatgcgtgcggccgcgttggctgccgccgttgcattggtactgtcgtcttgcggtaaaggcggagacgcggcgcagggcgggcagcctgcgggtcgggaagcaccggctcccgtcgtcggtgtcgtaaccgtccatccgcaaaccgttgcgttgaccgtcgagttgccgggacgtttggaatcgctgcgtaccgccgatgtccgtgcgcaagttggcggcattatccaaaaacgcctgttccaagaaggcagttatgtccgtgccggacagccgctgtatcagatcgacagttccacttatgaagcaaatctggaaagcgcgcgcgcgcaactggcaacggctcaggcaacgcttgccaaagcggatgcggatttggcgcgatacaagcctttggttgccgccgaagccgtcagccggcaggaatacgatgctgcggtaacggcgaaacgttctgccgaggcaggtgtcaaagcagcacaggcggcgatcaaatctgccggcatcaatctgaaccgttcgcgcattaccgcgccgatttccggctttatcggtcagtccaaagtttccgaaggtacgctgttgaatgcgggcgatacgaccgtgctggcaaccatccgccaaaccaatccgatgtatgtgaacgttacccagtctgcatccgaagtgatgaaattgcgccgtcagatagccgaaggcaaactgctggcggcggatggtgtgattgcggtcggcatcaaatttgacgacggcacagtttaccctgaaaaaggccgcctgctgtttgccgatccggtcgtcaacgaatcgaccggtcagattaccctgcgcgccgccgtaccgaacgatcagaatatcctgatgcccggtctgtatgtgcgcgtgctgatggaccaagtggcggtggataacgcatttgttgtgccgcagcaggcggtaacgcgcggtgcgaaagataccgtgatgattgtgaatgcccaaggcggtatggaaccccgcgaggtaacggttgcgcaacagcagggtacgaattggattgttacgtcgggtctgaaggacggggacaaggtggttgtggaaggcatcagtatcgccagtataacgggtgcgaaaaaggtaacgcccaaagaatgggcgccgtctgaaaaccaagccgccgcgcctcaatccggcgttcagacggcatctgaagccaaaactgcttctgaagcggaataa

SEQ ID NO: 66475 - DNA, 840 bp, Neisseria meningitidis
atgctggtcgcttttttaattatgttgcgcgagggtattgaagccgcgctcattgtcggcatcgttgccggttttctgaaacagtccggacattccaaactgatgcctaaggtctggttcggggtcgtccttgcttctttgatgtgtttggggctggggtacggcatccattcggcaacgggcgagattccccagaagcagcaggagttcgtcgtcggcattatcggtttggttgctgtcgcgatgctgacttatatgattttatggatgaaaaaggcggcgcgttcgatgaagcggcagcttcaggattctgtgcaggcggctttgaaccgtggcagcggtcaaggatgggccttggtcggtatggcgtttcttgccgtggcgctcgaaggtctggagagcgtttttttcctgcttgccgtattcaaacagagcccgacgtggcagatgccggccggtgcggtagcgggggttttggctgccgccgtgattggcgcgttgatttatcagggcgggatgcgcctgaatctggcgaagttttttcgttggacgggggcgtttttgattgccgttgccgccggcctgcttgccggctcgctgcgcgcgctgcacgaagcaggcatttggaacgcgcttcaggacattgtgttcgactcatcaaaatatttgcacgaagacagtccgttaggtgtgctgctcggcggatttttcggctataccgaccatccgacgcagggcgaggccttggtttggctgctgtaccttattcccgtcatgacttggtttttgtgcggcagcaggccgtctgaaactttaacccgtaaagaggagctgaaatga

SEQ ID NO: 66476 - DNA, 411 bp, Neisseria meningitidis
atgcctgtctatttccgcaccccaagcaggaaacgcctgcacaaaatgaaccgccgccagcataaaaagctgcatttgggcgagtttcaaacattgattttcggcgttcaaggcagtttgcaccaagctgaggacgatgccgaagcgttcggccgctttatggacgagcttatcgcgtatcttgtggtaaacggctttgaaatggcgggcgggggcgattgcggcgatttttcgtgcctgtttcaaaaatccggtgcccgaagcttgggagaaaccgagaaaaaagccattatctcttggctggcagaccgcgaagatgttgccactttgtacgccaccccgctggttgacggtttttatggggatgacggctgggaaaattacagcgaaacctataaacaggcagattaa

SEQ ID NO: 66477 - DNA, 396 bp, Neisseria meningitidis
gtgaaactgctggcgaataactggcaaccgattgccatcatcgcgcttgtcggcacgctcttggcggtgtcgcaccatcaaggctacaagtcggcttttgcgaagcagcaggcggtcattgacaagatggaaaaagacaaagcgcaagccctgctgttgtcggctcaaaactatgcacgcgagctggaacaggcgcgtgcggaagctaaaaaatatgaagtcaaggcgcacgccgtcggcatggctttggcgaaaaaacaggcggaagtcagccgtctgaaaacggaaagagacctttgcaaaattcctttccttcccgacagccgaaacccaaacacaggttttcagctatttccgccccaaatacctcctaattttacccaaatacccccttaa

SEQ ID NO: 66478 - DNA, 156 bp, Neisseria meningitidis; identical to SEQ ID NO: 43525

SEQ ID NO: 66479 - DNA, 432 bp, Neisseria meningitidis; identical to SEQ ID NO: 43713

SEQ ID NO: 66480 - DNA, 687 bp, Neisseria meningitidis; identical to SEQ ID NO: 38997

SEQ ID NO: 66481 - DNA, 1806 bp, Neisseria meningitidis
atgcgctacaaaccccttctgcttgccctgatgctcgttttttccacgcccgccgttgccgcccacgacgcggcacacaaccgttccgccgaagtgaaaaaacagacgaagaacaaaaaagaacagcccgaagcggcggaaggcaaaaaagaaaaaggcaaaaatggcgcagtgaaagataaaaaaacaggcggcaaagaggcggcaaaagagggcaaagagtccaaaaaaaccgccaaaaaccgcaaagaagcagagaaggaggcgacatccaggcagtctgcgcgcaaaggacgcgaaggggataagaaatcgaaggcggaacacaaaaaggcacatggcaagcccgtgtccggatccaaagaaaaaaacgcaaaaacacagcctgaaaacaaacaaggcaaaaaagaggcaaaaggacagggcaatccgcgcaagggcggcaaggcggaaaaagacactgtttctgcaaataaaaaagtccgttccgacaagaacggcaaagcagtgaaacaggacaaaaaatacagggaagagaaaaatgccaaaaccgattccgacgaattgaaagccgccgttgccgctgccaccaatgatgtcgaaaacaaaaaagccctgctcaaacaaagcgaaggaatgctgcttcatgtcagcaattccctcaaacagcttcaggaagagcgtatccgccaagaacgtatccgccaagagcgtatccgtcaggcgcgcggcaaccttgcttccgtcaaccgcaaacagcgcgaggcttgggacaagttccaaaaactcaataccgagctgaaccgtttgaaaacggaagtcgccgctacgaaagcgcagatttcccgtttcgtatcggggaactataaaaacagccagccgaatgcggttgccctgttcctgaaaaacgccgaaccgggtcagaaaaaccgctttttgcgttatacgcgttatgtaaacgcctccaatcgggaagttgtcaaggatttggaaaaacagcagaaggctttggcggtacaagagcagaaaatcaacaatgagcttgcccgtttgaagaaaattcaggcaaacgtgcaatccctgctgaaaaaacagggtgtaaccgatgcggcggaacagacggaaagccgcagacagaatgccaaaatcgccaaagatgcccgaaaactgctggaacagaaagggaacgagcagcagctgaacaagctcttgagcaatttggagaagaaaaaggccgaacaccgcattcaggatgcggaagcaaaaagaaaattggctgaagccagactggcggcagccgaaaaagccagaaaagaagcggcgcagcagaaggctgaagcacgacgtgcggaaatgtccaacctgaccgccgaagacaggaacatccaagcgccttcggttatgggtatcggcagtgccgacggtttcagccgcatgcaaggacgtttgaaaaaaccggttgacggtgtgccgaccggacttttcgggcagaaccggagcggcggcgatgtttggaaaggcgtgttctattccactgcaccggcaacggttgaaagcattgcgccgggaacggtaagctatgcggacgagttggacggctacggcaaagtggtcgtggtcgatcacggcgagaactacatcagcatctatgccggtttgagcgaaatttccgtcggcaagggttatatggtcgcggcaggaagcaaaatcggctcgagcgggttgctgccggacggggaagaggggctttacctgcaaatacgttatcaaggtcaggtattgaacccttcgagctggatacgttga

SEQ ID NO: 66482 - DNA, 1044 bp, Neisseria meningitidis
atgagtaaaaaaatcaaagtcggcattgtcggcgcgacgggctacaccggcgtggaactgctgcgcctgcttgccgcccatcccgatgtcgaagtcgccgccgtaaccagccgcagcgaagcgggaaccgcagttgccgattactttccaagtctgcgcggcgtgtacggcctcgccttccaaacgcccgacgaggcaggtttggaacaatgcgacatcgtcttcttcgccacgcccaacggcatcgctatgaaagacgcgctgcgccttttggaacagggcgtgcgcgtcatcgacctttccgccgacttccgcatacgggacattccgacctgggaacactggtacggcatgacccacgccgcccccggcctcgtttcccaagccgtgtacggattgagcgaactcaaccgcgaagccgtcgcacaggcgcgcctcgtcgccaaccccggctgctacccgacctgcgtatccctaccgctcgtgccgctgttgcggcaatgccgtctgaagcccggtatgccgctgattgccgactgcaaatccggcgtgtccggcgcgggcaggaaaggcaatgtcggttcgctgttgtgcgaagccggcgacaacttcaaagcctacggcatagccggacaccgccacctgcccgaaatcaggcagaccatcgccgggcttcaggacggcatcgccgaaggattcgtgttcacgccgcacctcgcgccgatgatacgcggtatgcacgccaccgtttacctccacctttcaaacggcaactgccccgaaaccgtcctgcgcgactattaccgcgacagcctgttcgtggacatcctgcccgccggttcgacaccagaaacccgcagcgtgcgcggcgcaaacctctgccgcatcagcatccaacaggcggcgcaatccgatgtgtgggtcgtcctttccgtcatcgacaacctcgtcaaaggcgcggcgggtcaggcggtgcaaaatatgaacatcatgttcggactgaaagaaacacacggcttgggcgcaatccccctgctcccctga

SEQ ID NO: 66483 - DNA, 225 bp, Neisseria meningitidis
atgaagaaaaacgccccgaaatcgtttgaagaggcactgtcgcgccttgaatcgctgacgcagtctatgcagggcgaaatgcccttggaagacgcgcttgccgcctatcaggaaggcaacgagctggtcaggtactgccaaaccaagctggcacaagtcgaacagaaattacaggttttggatgcggacggaccgaaggagttgaaccttgaatccgacgaatga

SEQ ID NO: 66484 - DNA, 387 bp, Neisseria meningitidis
  misc_feature 364, 365, 366, 367, 368: 'n' is a, c, g or t
gtgagcattagcgcaccgtatgccaatgagaacagccgcatcagtctgagtgcggcaaacatcgaagctgaaaacggcaaaatcaaaattcaatcttacggtgaccaatattactatgcgagacagagcgaactctatacctttgaacgccgcagctacaaaaccggcaaatggtacaaccgcaaacacattaccgaagtcaaagaacacaaaaacgccaagcccgacgcagtaaccctcagcgcatcccaaggcatcgacatcaaatctggtggcagcatcgacgcctacgccaccgcattcgatgcccccaaaggcagcattaacatcgaagccgggcggaaattgacactctatgccgtannnnncacacacttaattaattaa

SEQ ID NO: 66485 - DNA, 573 bp, Neisseria meningitidis
ttgaacgcccccgccgccgccctgacgaaaaacagcggacgcaaaggcgaacgctccgccggactgtccgtcaacggcacgggcgactaccgcaacgaaaccctgctcgccaacccccgcgacgtttccttcctgaccaacctcatccaaaccgtcttctacctgcgcggcatcgaagtcgtaccgcccgaatacgccgacaccgacgtattcgtaaccgtcgacgtattcggcaccgtccgcagccgtaccgaactgcacctctacaacgccgaaacccttaaagcccaaaccaagctcgaatatttcgccgtcgaccgcgacagccggaaactgctgattgcccctaaaaccgccgcctacgaatcccaataccaagaacaatacgccctctggatgggaccttacagcgtcggcaaaaccgtcaaagcctcagaccgcctgatggtcgatttctccgacatcaccccctacggcgacacaaccgcccaaaaccgtcccgacttcaaacaaaacaacggtaaaaaccccgatgtcggcaacgaagtcatccgccgccgcaaaggaggataa

SEQ ID NO: 66486 - DNA, 195 bp, Neisseria meningitidis; identical to SEQ ID NO: 37083

SEQ ID NO: 66487 - DNA, 915 bp, Neisseria meningitidis
atgacttggcgcagcctgctcattcaaaacggcggcaaactatccttgcaacgccggcaactgctgattcaacaaaatgacgagtcccacaccgtaccattagaagacatcgccgttatcatcatcgaaaaccgcgaaaccctgattaccgctccacttctgtcagccttagccgaacatggcgcaaccttactgacatgtgacgagcagttcctgccctgcggacaatggctgccttatgcccaatatcaccgccaacttaaaatcctcaaactgcagctgaatataagcgaacccttaaaaaagcaattctggcaacatatcgtccgccaaaaaatcctgaatcaagcatttgtcgcagacgaaaccggcaatgatcttgcagccaaacggctgcgcactttggcatctgaagtccgctcgggcgatacaggaaaccgcgaagcccaagccgccgccctctacttccaagccctctttggcgaaaaatttacccgcaatgacaacaacgccgtcaatgccgcattgaactatacctacgctgtgctccgggctgcagttgcacgcgccctgaccttatacggttggttgcctgcattaggcttgtttcatagaagtgagttgaatccattcaatctcgccgatgactttatcgaacccttacgcccattggccgatctggtcgttatacatttgtacgaacaaggccgtctgaaaactgaactgacgcccagcatcaaacaacaccttatcaaaacccttcactgtcaaaccagcatcgaacggcaacatttcagcaccttggctgccatcgacaaaatggtttcgtcatttcaagccggcgtaactgataaaaacgccaaacaactgaaactgcctgaaatcctaccattgaaagcataccaatatgagtga

SEQ ID NO: 66488 - DNA, 384 bp, Neisseria meningitidis; identical to SEQ ID NO: 40323

SEQ ID NO: 66489 - DNA, 339 bp, Neisseria meningitidis
atgaacacacgcatcatcgtttcggctgcgttcgttgcgttggcattagtaggttgcggctcaatcaataatgtaaccgtttccgaccagaaacttcaggaacgtgccgcgtttgccttgggcgtcagcccaaatgccgtaaaaatcagcaaccgcaacaatgaaggcatacgcatcaactttaccgcaactgtgggtaagcgcgtgagccaatgctatgttaccagtgtaatcagcacaatcggcgttaccacttccgatgcaatttgtttgggaggcggaacgcacaaaggcaaaagtcaatgcaatgctttgcttaaagcggcaggccgttgctaa

SEQ ID NO: 66490 - DNA, 828 bp, Neisseria meningitidis; identical to SEQ ID NO: 38917

SEQ ID NO: 66491 - DNA, 399 bp, Neisseria meningitidis
atggcaaaaaccaacaacaaaccagaaaccgccgaaaccgccgccccgtcgtttgaagacatcaaagccgaattggacgccgtgcaggcagagcttgccgccgcccgaaacgatgtcgaaatgctgaccacagccttggaaaaagccgaagacgacaaaaaggcactgtccgccgaacttgccgaactcaaagtgcagcatacgcaacgtgccgccgacgctttggcggacagccgcgatgtgatgctcgtcagtaccggcgcagacggcaaagaattttggcgcggcggcctgctgtttgacggcggctggcgcgaagtgaagcgcgccgaagtcggcgaagcggtgtggaaggcaatctgcgccgagcctatgctgcaacgcaaggcggtcgagtaa

SEQ ID NO: 66492 - DNA, 822 bp, Neisseria meningitidis
atgtctttgcaaaacatcatcgaaaccgcctttgaaaaccgcgcggacatcaccccgaccaccgttactcccgaagtcaaagaagccgtgttggaaaccatccgccagctcgattccggcaaattgcgcgtcgccgaacgcttgggcgtgggtgagtggaaagtcaacgaatgggcgaaaaaagccgtgttgctgtccttccgcatccaagacaacgaagtcctcaacgacggcgtgaacaaatacttcgacaaagtgccgaccaagtttgccgattggtctgaagacgagttcaaaaacgcaggcttccgcgcagttccgggtgcggttgcccgacgcggcagctttgtggcgaaaaatgtcgtgctgatgccgtcttacgtcaacatcggcgcatacgtcgacgaaggcgcgatggtcgatacttgggcaaccgtcggctcttgcgcgcaaatcggcaaaaacgtccacttgagcggcggtgtcggtatcggcggcgtactcgaacccctgcaagccagcccgaccattattgaagacaactgcttcatcggtgcgcgttctgaaatcgttgagggcgtgattgtcgaagaaggcagcgtgatttcgatgggcgtgttcatcggtcaatccaccaaaatcttcgaccgcaccaccggcgaaatctaccaaggccgcgtaccggcaggttcggtcgtcgtgtccggcagtatgccttccaaagacggcagccacagcctttactgcgccgtcatcgtcaaacgcgtggacgcgcaaacccgtgcgaaaaccagcgtgaacgaattgttgcgcggcatctga

SEQ ID NO: 66493 - DNA, 654 bp, Neisseria meningitidis
  misc_feature 635, 636, 637, 638, 639: 'n' is a, c, g or t
atgagcaccttcttccggcaaaccgcacaagccatgattgccaaacacatcgaccgtttcccgctattgaagttggaccaggtgattgattggcagccgatcgaacaatacctgaaccgtcaaaaaaaccgttaccttagagaccaccgcggccgtcccgcctaccctctgctgtccatgttcaaagccgtcctgctcggacaatggcacagcctctccgatcccgaactcgaacacagcctcatcacccgcatcgatttcaacctgttttgccgtttcgacgaactgatcatccccgattacagtaccttatgccgctaccgcaactggctggcgcaagacgacaccctgtccgaattactcaaactgattaactgccaactgaccgaaaaaggcctaaaaatagagaaagcatccgccgccgtcgttgatgccaccattatccagaccgccggcagcaaacagcgtcaggccatagaagttgacgaagaaggacaaatcagcggtcaaaccacaccgagtaaggacagcgatgcccgttggataaagaaaaacggcctctacaaactcggttacaaacaacatacacgtaccgatgcggaaggctatatcgagaaactgcacattaccccgannnnncacacacttaattaa

SEQ ID NO: 66494 - DNA, 831 bp, Neisseria meningitidis
ttgcaaaggtctcaggtcgccctcgtcgtgacggaaagtaccgtcggtctcgaaatccccgccgccaaagccatccgccgagcaggcatagccgtgattatcgccaacccgcgtcagacgcatcagtttgcccaatcgcagccgctgaccaaaaccgacgccaaagatgccaaaatgcccgccttcttcgcacagatgacggcacagaaagaagattcgcaaaccatgccctaccaaccgcccaccgaagcggaagaagtgttggaagccttggttaaccgccgcaaccaaccggcggatatgcggactgccgagaaaaaccgtctgcatcaggttcacgaaacgcaagtcggaagcgtcaaacaactgattgcccattttgaccggctgattgacgaattggacaaacaaatcgacgaccacacccacacgcattttgacggcaaagcccaagtggcagaacaaatcaaaggcatcggttcgataacgacggctacgctgatggcgatgctgcctgagttggggcggctgtcgcacaaacggatagcgagtttggtcggcattgccccgcacccgagggagagcggggaaaccaaattcaaaagccgctgctttggcggaaggtctgcggtgcttaaggcactgtatatggctaccgtggcagcgacacgttttgaaccgcttattcgggatttctaccaacgcctgctgtccgagggtaagccgtataaggttgccgttacggcatgtatgcgcaaactgctgacgatatcgaatgcccggatgcgtgattattttgccgaaaacgataccgccgaaaacggtatctaa

SEQ ID NO: 66495 - DNA, 1713 bp, Neisseria meningitidis
atgaaagccagccaattctttatctctactttaaaagaagcccctgccgaagccgcgcttgccagccacaagctgatgattcgcgccggtctgattaaagccaacgcgtccggcctttatacttggatgccgatggggctgcgcgtgttacgcaaagtcgaaaacgtcgtgcgcgaggaaatggcgcgcgcgggcagtgtggagctgctgatgccggtggtgcagcctgccgagctgtggcaggaatccggccgctgggagttttacggtaaagaactgctgcgcctgaaagaccgccacgaccgcgatttctgcatgggcccgacctgcgaggaagtcatcgccgacatcgtgcgtaaagagatcaacagctacaaacaactgccgaaaaacttttaccacatccaaaccaaattccgtgacgaagtgcgcccgcgcttcggtgtgatgcgtgcgcgcgagtttgtcatgaaagacgcttattccttccatgccgactacgcctcgcttcagacgacctatgatgccatgtatgacgcttactgccgtatcttcacccgtctgggcttggaattccgccccgttgccgcagataccggcagcatcggcggtacgggttcgcacgagtttcaagtgttggcggaaagcggcgaagatgttattgcgtacagcgacacttccgattacgccgccaatatcgagttggccccgaccttgccgcttaaaggcgaacgcgccgctgctcaggcagaactcgtcaaagtacacacgccaaacgtcaaaaccattgagtctttggttgaattcctgaatattccggttgaacaaaccctcaaatccatcgtggttgaaggcgaaaacgaaggcgaaatcgtcttattactgttgcgcggcgaccatgagttcaacgacatcaaggcagaaaaactcgcaggcgtgaaatcgccattgacgatggcaagtcctgccgcgattgtcgaacagttcggcgcaaacggcggctcgctgggtccggtcagctttgcaggtaaagtttatgccgattttgctactgaaaaaggagcggactgggtcatcggtgcgaacgaagacggctaccactacaccagcttcaacttcgggcgcgatgccgccgagcctgaattcgtcgatttgcgtaatgtggtcgaaggcgacgaaagccccgacgggcaaggccgtctgaaactcgcgcgcggcattgaagtcggacacgtcttccagttgcgcgacaaatatacccaagcgatgaacgtcagcttcctcgacaacaacggcaaatcgcaaattatggaaatgggctgctacggcatcggcatcacccgcgtcgttgccgccgccatcgagcagaataacgacgaaaaaggcatcatctggaccaaagcaatggcgccgtttgaagtcgttatcgtgccgatgaactacaaaaaatcagacaccgtacgcgaagccgccgacaaaatctatgccgaattgctggcggcaggcgcggatgtgctgctggatgaccgcgacgaacgcgcgggcgtattgctgaacgactccgagctgttgggcatcccgcaccgcatcgtcatcggcgaccgcgccttgaaagaaggcaatgtcgaatacgccgaacgccgcaacaacgaagcgcaggcagttgcaatcggagaaattgttgcgcgtgtaacagcttcattaaatgcgtaa

SEQ ID NO: 66496 - DNA, 456 bp, Neisseria meningitidis
atgaaaaaaccgaaaatcctttttgtctgcctcggcaacatctgccgttcgccgatggcggaatacattttgcgccgccgcgccgccgaagcgggcattccccttgaagcggacagcgcggggacatcgggctggcacgacggcgaagatatgcaccgcgagacggcaaagatattgaaaaaatacggtatcgatgcttcaggctttaccagccgcaaaatccgccaaagcgatgcggcggcgtttgactgcatcatcgcgatggacggcaagaatttgtccgaattggaaagaaccttcggcaggcggtcggaaaaaatattcaagctgaccgacctgatacccgaaagcggttacgaccatgtccccgatccgtggtatacgggcgattttgaagaaaccttcaggcttgcggatgcgggctgtcgggcattgttggaaaagatttccaaataa

SEQ ID NO: 66497 - DNA, 348 bp, Neisseria meningitidis; identical to SEQ ID NO: 45022

SEQ ID NO: 66498 - DNA, 1857 bp, Neisseria meningitidis
atgttgaacaaaatcttttcctggttcgaatcccgaatcgacccctatcccgaagccgccccgaaaacgcctgaaaaaggactgtggcggtttatctggagcaacatggctggggtgcggaaatggatagccgccctggctgcgctgaccgccggcatcggcattatggaagccctggtttttcaatttatgggcaaaatcgtggagtggctcggcaaatacgcgcccgccgaactgtttgccgaaaaaggttgggaactggcggcaatggcggcgatgatggtattttcggttgcgtgggcgtttgccgcgtccaacgtgcgcctgcaaacccttcagggcgtgttccccatgcgcctgcgctggaacttccaccgcctgatgctgaaccaaagcctcggtttttatcaggacgaatttgccggacgcgtgtccgccaaagtcatgcagaccgcgctggcgttgcgcgacgcggtgatgacggttgccgatatggtcgtttatgtgtcggtgtatttcattacctccggcgtgattctcgcctcgctcgactcatggctgctgctgccctttatcggctggattgtcggtttcgcttcggtgatgcgcctgctgattcccaaattggggcaaaccgccgcatggcaggcggatgcccgctcgctgatgaccggccgcattaccgatgcctattccaatatcgccaccgtcaaactcttctcccacggcgcgcgtgaagccgcctatgccaagcagtcgatggaagaatttatggttacggtgcgcgcccaaatgcggctggcgacgctgctgcattcgtgcagcttcatcgtcaacacctccctgaccctctccaccgccgcactgggcatctggctctggcacaacgggcaggtcggcgtgggcgcggttgctacagccaccgccatggcgttgcgcgtcaacggtttgtcgcaatacattatgtgggaatccgcgcggctgtttgaaaacatcggcaccgtcggcgacggcatggcaaccctgtccaaaccgcacaccatcctcgacaagccgaacgccctgccgttgaaagtgtcgcaaggagaaatcaagttcgaacacgtcgatttttgctacgaagcaggcaaaccgctgctcaacggcttcaacctcaccatccgacccggcgaaaaggtcggcttgatcggacgcagcggcgcgggcaaatccaccatcgtcaacctgcttttgcgcttctacgaaccgcaaagcggcacggtttcgatcgacgggcaggacataagcggcgttacccaagaatctttacgcgcccaaatcggtttggtcacgcaagatacctcgctgctgcaccgttccgtgcgcgacaacattatttacggccgccccgacgcgaccgatgccgaaatggtttctgccgccgaacgcgccgaagccgccggcttcatccccgacctttccgatgccaaagggcggcgcggctacgacgcacacgtcggcgaacgcggcgtgaaactctccggcggtcaacgccagcgcatcgccatcgcccgcgtgatgctcaaagacgcaccgattcttcttttggacgaagccaccagcgcgctcgattccgaagtcgaagccgccatccaagaaagcctcgacaaaatgatggacggcaaaaccgtcatcgccatcgcccaccgcctctccaccatcgccgcaatggacaggctcgtcgtcctcgacaaaggccgcatcatcgaagaaggcacacacgccgaactcctcgaaaaacgcgggctttacgccaaactctgggcgcaccagagcggcggcttcctcaacgaacacgtcgagtggcagcacgactga

SEQ ID NO: 66499 - DNA, 3132 bp, Neisseria meningitidis
atgcaaaatatgaaaaaccaagtacgcggatcaggcatggatgcacgatccaacccagccaatgtttcagacggcctgcaaaacagttcgggccatatcggtaccaacacgcgctaccgcctgaccaaactcggcgaacaaatggcgcgcctgcccatcgacccgaaaatcgcgcgcattttgttggcggcgaagaaacacgactgcatggcggaaatattggtgatcgcatccgcgctgtcgattcaagacccacgcgagcgaccgttggaagcgcgcgatgccgccgccaaggcgcatgaacgctttaccgacaagcagtccgatttccttgcctatctgaatatttgggacagcttccagcgtgagcgcgacaaaggtttgtccaacaagcagctggtgcagtggtgccgccaatatttcctgtcacacctgcgtatgcgtgaatggcgcgagctgcaccaccagcttgcccaaaccgcgattgaaatgggtttgaccaccaaagaagccgcgtttagacaacctccttcccaagaacaattaaggccgtctgaaagccagggcgaccaagatttggcggctaaactcaaacaaaaacaactggataagaagcaacaccgcgcccaaatccgcgccgccaaagaagcgggctacgaacaaatccaccgcgccctgctcaccggccttatcgccaacgtcggcatgaaatcgcccgacggcaacgactacaccggcgcgcgcggcagccgcttccaccttttccccgcctccgccctgttcaaagccaaacccaaatgggtaatggcggcagaactcgttgaaacgacaaaactttatgcccgcgacgtggccgccatccagcccgaatggatagagcaggaagcaccgcacctcgtccgctaccattatttcgagccgcactgggaacaaaaacgcggcgaagtcgtcgccagcgaacgcgtgacgctttacggcctgaccgtattgccgcgccgccccgtgccttacggcaaagttgcgcccgaagaagcacgtgaaatctttatccgcagcgcgttggtggcgcaggaatgcgatttgaaagcggatttttttgtccacaacaaaaagctgattaaagaaattaccgaactcgaacacaaatcgcgcaagcaagacgtattggtcgacgacgaagccctgtttgcgttttatcacgaacggctgcccgatttttatacggcggatgcggtttcagacgacctgcatcctacaaatccgcagcaaactgccccctcctacgcgagggaagaacggagagagggcaaaacagttgccgcacaaaccaacttctccgcaaccgcagcaaaccctctccctaaccctctcccacaggagagggagcagagtgccgcagcttcagcggtttcaaacgacctgcatcctgcaaatccccaacaaaccgccccctcccccgtgggggagggtcggggagagggcaaaacagttgcctctcaaaccaacttctccgcaaccacagcaaaccctctccctaaccctctcccacaggagggggaacagagtgccgcagcttcagcggtttcaaacgaccccaaacccaaaaagcagcctgcacccccaaaaggccgtctgaaacccctccccctcgccgacatccgtaccttccaagcctggatcaaaaccgccgaacgcgacaatctgcgcctgctgttcctcagccgcgacgatttgatgcaacacgccgccgcacacattaccgaagagcaattccccaaattctggcaaaccgcagacggcaaattcaaactcagctaccgcttcgagccgcaccacccgctcgacggcgttaccctcaccctgccgcttaccgtgctcaaccgcatcagccccgccgccctcgaatggctcgtgcccggtatgatacgagaaaaaatccagatacaaatcaaagcgctgcccaaacaaatccgccgaatctgcgtgcccgtacccgaattcatcacccaatttttaagccaaaaccccgaccgcaacgcccccatcctgccccaactcgcccaagccatcgccaaaactgcaggcgacatccgcatactcgagcaaatcaaccaagacgaatgggccgcgttcaggctgcccgaacactgctatttcaacctccgcatcatcgacgacggcggacaagaattagccatagggcgcgatttaatccaaatccaacaacaacttggcaaagccgccaccaccaccttccgcgacaacacccaagaattcgagcgcgacaacgttaccacatgggacatcggcatcctgcccgaatccatcaaattcgcacgcggcaaacaacagctcaccggctatctcggtctgcaaaaagaaaaagacggccgcatcgccctgcgcctgtttgacacatctgccgccgccgaacaggcacaccgtcaaggcgtaatcgaattgatgaagctgcaattaaaagagcaggtaaaagatctgaacaaaggcatccaaggccaaggcttcacccaagccgccatgctgctcaaacacatcaacgccgacaccctgcgcgacgacctcacccaagccgtctgcgaccgtgcctttatcggcgaagacgagctgccgcgcaacgaaaaagccttcaaagagcaaatcaaacgcgcccgcagccgcctgcccgccgtcaaagaagccctcagccgctacttgcaggaaaccgccgccgcctacgccgaactgaacggcaaactcggcaaacacccgctcacccatctcctaagactacgcctgcaaaccctgctcgccgccggcttcgccacccgcaccccgtgggcacaatggccgcgcctccccatctacctcaaaactatgaccctgcgcctcgaaaaatacagcagcaaccccgcccgcgacgcagcccgcgaagccgatacccaagagctggaacaaatgtggcaggaaaaaacagacagcctgattaaacaaggtctccccatttcagacggcctcgccgcgtttaaatggatgattgaagaattgagggtgtcgctgttcgcgcaggaattgaagacaccgtatccggtgtcggtgaagcggctgttgaaagagtgggaggatcttaattaa

SEQ ID NO: 66500 - DNA, 309 bp, Neisseria meningitidis
atgaaaactgttccaaccatcctgattagcatccttttggcaaccgcccttcctgcatccgcacacggtatgcataagagcaagcccctgactatggatgagctgcctccgatttgccaacaatatttcaaacgcgccgaaacctgttacaacaaagccggaaacaaagcagatttcgcacgcaacaacaccaaattcctattccaagccctgcctgctgccgatttgggacagcgtaagcaaatgtgccaaatcgccatggattcatttgcagaaaaaacccgcatcagcaatagcaatgccgtctga

SEQ ID NO: 66501 - DNA, 441 bp, Neisseria meningitidis
  misc_feature 418, 419, 420, 421, 422: 'n' is a, c, g or t
atggaaatcagcccttggacgctgcgttcggcaaagctggaaaaagaacacaaacggctgcaagagagcctgaccagcttgggcaacggctatatgggtatgcgcggcagctttgaagaaacctattccgccgacagccacttgggtaactacatcgccggtgtgtggtttcccgacaaaacccgcgtcggctggtggaaaaacggctaccccaaatatttcggcaaagccatcaacgcgctcaatttcagcaaagtcaaaatctttgtcgacgggcaggaagtggacttggcgaaaaacggtgttgccggcttctccgtcgaactcgatatgcagcacggcgtgttgcgccgctcgttcaccgtattcggcgtgcgtttcgatgtgtgtaaattcctgtccgtcgcgcaaaaagagnnnnncacacacttaattaattaa

SEQ ID NO: 66502 - DNA, 285 bp, Neisseria meningitidis; identical to SEQ ID NO: 66422

SEQ ID NO: 66503 - DNA, 255 bp, Neisseria meningitidis
atgagcggacatgactatgcggtagaacttgaagaagcgcgagagattctgaacagccttcgaaaagcctacaaggaacatgcggcaggcaggggcatgaccaagcggtacaaaatcaaagaccgcgaaatggagttttccagccttgccgatttattgaagcagatacggttctggcagcaggaaatcaagcggctggaagcggcggcgggtgtttccccgcgccgttcaggccgtatcatcacgcgattttag

SEQ ID NO: 66504 - DNA, 717 bp, Neisseria meningitidis
atgaagaccaaattaccgctttttatcatttggctgtccgtatccgccgcctgttcttcccctgtttcccgcaatattcaggatatgcggctcgaaccgcaggcagaggcaggtagttcggacgctattccctatcccgttcccactctgcaagaccgtttggattatctggaaggcacactcgtccgcctgtcgaacgaagtggaaaccttaaacggcaaagtcaaagcactggagcatgcgaaaacacacccttccagcagggcatacgtccaaaaactcgacgaccgcaagttgaaagagcattacctcaataccgaaggcggcagcgcatccgcacataccgtcgaaaccgcacaaaacctctacaatcaggcactcaaacactataaaagcggcaggttttctgccgctgcctccctgttgaaaggcgcggacggaggcgacggcggcagcatcgcgcaacgcagtatgtatctgttgctgcaaagcagggcgcgtatgggcaactgcgaatccgtcatcgaaatcggagggcgttacgccaaccgtttcaaagacagcccaaccgcgcccgaagccatattcaaaatcggcgaatgccaatacaggttgcagcagaaagacattgcaagggcgacttggcgcagcctgatacaggcttacccgagcagcccggcggcaaaacgcgccgccgcagccgtgcgcaaacgatag

SEQ ID NO: 66505 - DNA, 843 bp, Neisseria meningitidis; identical to SEQ ID NO: 37164

SEQ ID NO: 66506 - DNA, 1407 bp, Neisseria meningitidis
gtggaatttagcacaaaaaccgaaatcttgcaggaacagcaggcaggcgcacagttatttgtctgcaccgaagaggcgcaattaaaccatccgaccgcccttgcccttttgtcttcgcttgaagaaggtcaaaattttgccgacacaaaaatcccgacaggcaacggtttgcaggctgttgccgtatgctgtctgaaaagcaccggccgcgccgcattgaacaaggccgccgccgaagccgccaaatgggcgcaaaatcaggaaacggtcaatgtggacatccatgccttcgatgaagcgcaagccgccgccgtagccgaagcgtttgcgattgcgttcggcaacgccgcctaccgtttcgaccgctacaaaaaagaagccaagcccgccaaatttgaaaccgccgtgttccacagcgcacacgaagccgtcgttaaagaagccttgcgcgtcgccgaagcgcaagtttacggacaaagcctctgccgcgacttgggcaacgccgcgcccaacgaatgcacgcccgaatttttagcgcgcaccgccaaagccgaagccgaaaaactgggcgcgcacgccaaaatcatcgaaaaagactacatcaaagaaaacatgggttcgttttggtcggtcgccaaaggcagcgcggaagccccctatttggtcgaactgagctatttcggtgcagccgacaaagaagccgcgcctgtggtattggtcggcaaaggcattaccttcgacaccggcggcatctccctcaagcccggcctgaacatggacgaaatgaagtttgatatgtgcggcgcggcaaccgtcatcagcaccttctgcgccgccgtcaaactgcaactgccgattaacctgattgccgtcgtcgccacttgtgaaaatatgccttccggcgcggcaaacaaaccgggcgatgtcgtgaaaagtatgaaaggtctgaccatcgaagtgttgaacaccgatgccgaaggccgtctgattttgtgcgacgcgctcacttacgccgagcagttcaaacccaaagccgtcatcgacgtcgccaccctgaccggcgcgtgtattgttgccttggggcacgatgtcagcggcgtgatgggcaacaatcaggatttgatcgacagcctgcttgccgcttcctacaacgtggacgacaaagcatggcaactgccgctctttgagacctacaaagaccaactcaaatccaactttgccgacattccaaacatcggcacgcccggcgcgggcacgattaccgccgcaacattcctatcctactttaccgaagactatccatgggcacaccttgacatcgcgggtacggcgtggaaatccggtgcggaaaaaggtgcgaccggccgtcccgttcccttgctgctgaactatctgcggaatctttaa

SEQ ID NO: 66507 - DNA, 285 bp, Neisseria meningitidis; identical to SEQ ID NO: 37122

SEQ ID NO: 66508 - DNA, 1092 bp, Neisseria meningitidis
atgtcccatatctcccccatccccgaaatcctagccgacatcaaagccggcaaaatggtcatcatcaccgatgccgaagaccgagaaaacgaaggcgacctgctgatggcggcgcaattcgtcacgcccgaagccatcaacttcatgatcaaacacgcgcgcggcttggtctgcctgccgatggacggcgaaatggtcgaaaaactcgggctgccgatgatgacccaaaaaaacggcgcgcaatacggcaccaactttaccgtctccatcgaagccgcacacggcattaccaccggcatttccgccgccgaccgcgcactgaccattcaaaccgccgtttccccgaccgctaaacccgaagacatcgtccaacccggtcatatctttccgcttcgcgcccaaaaaggcggcgtactcgtccgcgccggacacaccgaagccggcgtcgacctggcgcaaatgaacgggctgattcctgcctccgttatttgcgaaatcatcaacgacgacggcacgatggcgcgtatgcccgaactgatgaaattcgccgaagaacacaagctcaaaatcggcacgattgccgacctcatcgaataccgcagccgtaccgaaagcctgcttgaagacatgggcaatgcgcctgtacaaaccccgtggggcgagttccaacaacacgtttacgtcgacaaactctccggcgaaacccacctcgccctcgtcaaaggcacgccctccgccgacaccgaaaccctcgtccgcgtccacgaacccttcagcgtcatggacttcatccaagctaacccgcgtcattcatggtcgctgcccaaagcactcgagcgcatccaacaggccgaaagcggcgtagtcatccttctgcaccgcaccgaagacggcgccgccctgctcgaccgcaccctgcccaaaggtgcaaaccaagcctacaaatgggacagcaaaagctacggcataggcgcgcaaatcctcgccggcctcaacgtcaaaaaactgcgcgtcctcgggcagccctcatctttcaccggcctgaccggcttcggtttggaagtcgtcggctttgaagaagcggaaaaataa

SEQ ID NO: 66509 - DNA, 279 bp, Neisseria meningitidis
  misc_feature 260, 261, 262, 263, 264: 'n' is a, c, g or t
atgacagaatatcccggcatcgggtcgtcgttgttttacggcgttttttttgcggcagtgctggtcatgattgccttggatatgttttcgctgaagaaaaacggcagccataaagtcggcgtcaaagaagccttggcatggagcggcttgtgggttgccgtatcctgcctgttcgcgggctggctgtatttcgaactcgccggcaatcccggctacggcgcggcagtcgcaaaaagaaaaagtattggaattctttaccnnnnncacacacttaattaa

SEQ ID NO: 66510 - DNA, 606 bp, Neisseria meningitidis
atgccgtctgaaatgcagataatccgcccgattgtgttgtttgtaacttttatttttgctgcatgcagtgccaaaaatcaaccttccgacgaggatcgacaaagctttgcgcgcattgccgtcgatttgttccggagtgcctgcgtcctgactcaaggcagttttgaatcggtttccaagtttgccgctgtcggacattttgtccctgtcggaaaggaagacctgtcccgtctgccgcccgctgttgcagaacccgatgtacaggcgttgtggacgcttgaacgcgatggcggcatttattatttgagcctgccgcgcgacagttgcagtgtgaaagccgagcgggcagacagtgccgcgctgttggaacattttgacggacttatccgacagccgccgaaaaataccaatatagaattaagggcagaacagtcggtgcaggcaccgtttgaaaccaggcaaatcggctatgcctggcgagaaacgggcagccctgaagaaaccgtattgaccgcacaaaccgccgattcctcggatttgcccgtacaggcagttttgaacctgacgcaccgttcccacaacgggaaacccctaattctcccctaa

SEQ ID NO: 66511 - DNA, 966 bp, Neisseria meningitidis
atgagctacacgcaactgacccaaggcgaacgataccacatccaatacctgtcccgccactgcaccgtcaccgaaatcgccaaacagctgaaccgccacaaaagcaccatcagccgcgaaatcagacggcaccgcacccaagggcagcaatacagcgccgaaaaagcccagcggcaaagccagactatcaaacagcgtaagcgacaaccctataagctcgattcgcagctgattcagcacatcgacacccttatccgccgcaaactcagtcccgaacaagtatgcgcctacctgtgcaaacaccaccagttcacgctccaccacagtaccatttaccgctaccttcgccaagacaaaagcaacggcagcacgttgtggcaacatctcagaatatgcagcaaaccctaccgcaaacgctacggcagcacatggaccagaggcaaagtccccaaccgtgtcggcatagaaaaccgacccgctatcgtcgaccagaaatcccgtatcggcgattgggaagccgacaccattgtcggcaaaggacagaaaagcgcattattgaccttggtcgaacgcgttacccgctacaccatcatctgcaaattggatagcctcaaagccgaagacactgcctgggcagctgttagggcattaaaggcacataaagacagggtgcacaccattaccatggataacggcaaagagttctaccaacacaccaaaataaccaaagcattgaaagcggagacttatttttgtcgcccttaccattcttgggagaaagggctgaatgagaacaccaacggactcatccggcaatacttccccaaacaaaccgatttccgtaacatcagtgatcgggagatacgcagggttcaagatgagttgaaccaccgaccaagaaaaacacttggctacgaaacgccaagtgttttattcttgaatctgttccaaccactaatacactag

SEQ ID NO: 66512 - DNA, 1389 bp, Neisseria meningitidis
atgaatgcagtcgtagttgccgtaatcgttatgctggtgctgtcgctgtcgcgcgtgcacgtggtattgagcctgacggtcggcgcgtttgtcggcggcgcggtggcgggtatgccgctgcaaaacattgccgatgcggcgggacaggtcagccaggcggggattatccccgtgttcaacaaaggtttggaaggcggcgcgaaaattgcgctttcttatgcgatgctcggcgcgtttgcgatggcgattacccattccggcctgccgcagcagcttgccggcgcggtcgtccgcaagctgaaccggggcggtatgcccgacagcgtgcgttcgggcgagggcgcggtcaaatggctgctgctttccatcatccttgtgatgggcattatgagtcagaacatcatccccatccacattgcctttatcccgatgattgttccgccgctgcttttggtgttcaaccgcctgaaaatcgaccgccgtctgattgcgtgcgtcatcactttcgggctggttacgacttatatgttcctgccttacggcttcggcgcgatttttttgaacgaaatcctgttgggcaacatccattccgccgcgccgcagcttgatgtgaaaaacatcaacgtgatggcggcaatggcgattcccgcgttgggaatgctggccggactcctgctggcgtttgtccactaccgcaaaccgcgcctgtaccaaagcaacaatgccgatacggcgggcaacgccgatgcggcaaaccgtccgcagccgtccgcctaccgcagcctggccgccgccgccgccattgccgtatgctttgccatccagttgatgtatgaagactcgctggtgttgggcgcgatgctcggtttcgccgtatttatgatgttgggcgtcatcaaccgcgacaaggcaaacgacgtattcggcgaaggcatcaagatgatggcgatggtcggcttcattatgattgccgcgcagggttttgccgccgtgatgaatgcgaccgggcatattcagccgctggtggaaagcagtatggcgatattcggcaacagcaaaggtatggcggcgttggcgatgctggtggtggggcttttggtaacgatgggcatcggttcgtccttttccactttgccgattattgccgcgatttatgtgcctttgtgtgtcggtttgggtttttcgccgcttgccaccgtcgccattgtcggcacggcgggggcgttgggcgatgccggttcgcctgcgtccgattccacgctgggtccgacgatggggctgaacgccgacgggcagcacgaccacatccgcgattccgttatcccgaccttcatccactacaacatcccgctgctgattgccggctggattgccgcgatggtgctgtaa

SEQ ID NO: 66513 - DNA, 555 bp, Neisseria meningitidis
  misc_feature 8, 9, 10, 11, 12: 'n' is a, c, g or t
gtgtgtgnnnnnttcagttgcatcggcgtcgatccgcacggcatcaacgaccatcccgatttaagcggcctgcgttacggcaaaatcgccatcctgtccgatgccgacgtggacggctcgcatattcaagttttgctgctgaccctgttctaccgccacttcccgaaactggtcgctgacggacacatctacgtcgcccagccgccgctgttccgcgtcgatgtcaacgcacaaggcaaaagcaaacccgcccgcaaattctacgcgctcgaccaaaacgaactcgacagcattttggagcggctgcaaaaagaaggcgtcaaagaaaccgcctattccatcagccgtttcaaaggcttgggcgagatgaaccccgaccagctcaaagacaccaccatgcaccccgacacccgccgcctgttgcaggtacaaatcccagaaggtgcagatgacgagacgcgcgacatcttcgtcaaactgatgggcaaaggcgaagccgccgcccgccgcgcttggatggaacgcgaaggcgatacggcggaattggatatttga

SEQ ID NO: 66514 - DNA, 540 bp, Neisseria meningitidis
atgaacatcattgataccgccattcctgacgtaaaactgcttgagccccaagtcttcggcgacgcgcgcggcttttttatggaaaccttccgcgacgagtggtttaaaacccaagtctgcgaacgcaccttcgtgcaggaaaaccactccaaatccggcaaaggcgtattgcgcggcctgcactatcaaactgaaaacacacaaggcaaactcgtacgcgtggttgtcggcgaagtattcgacgtggccgtcgatatgcgtaaagactcccccactttcggcaaatgggtaggcgagattctgtccgcagaaaacaaacgccaactgtgggtacccgaaggtttcgcacacggcttctatgtactgagcgatgaagccgagttcgtctataaatgcacagactattacaagccggaagccgaacaggttttaatatggaacgacccggcaataggcatagactggccgcttcaaaccgagccgaacctgtcgcctaaagacttggccggcaaagtattggctgaagcggtcacgttttaa

SEQ ID NO: 66515 - DNA, 492 bp, Neisseria meningitidis
atgaaataccgtcgtttttaccgcaatggcggcacttacttttttacggttgtagccaataaacggcagaggattttgaccgatgatgcggtgcgtttggctttgcgacaggcggtaatggctgtgcgcgaacggtatccgtttgaaattttggcatgggtgttgatgcccgaccatctgcataccatatggcggctgccggacaatgattctgcttattcggaacgctggcggcagatcaagcggcacagcaaatatttaatcggcggcaatctcaggctttggcaaaaacgcttttgggaacatactatccgcgatgaggccgattttgcctgccattttgattatctgcatttcaatccggtcaaacatggctatgtaggacaaatttccgattggcggttttctacgtttcaccgttatgtcaaacagggtatttatccgcataattggggtggcggcaatgcggacttttctattgaatacgattaa

SEQ ID NO: 66516 - DNA, 327 bp, Neisseria meningitidis
ttggatcaggcgcgggcgttgaatgtgaacgggcggtttgtgtttgaaagtgtgaattttcaagggcatatcaataaggaaagtccgcgcgtggcgatgcagcgggcggggctggatacgacggcgcacggtttgcgcttgcttgcgcgtacttatttgcgcgaggttctgaaggtggataatgatgtggcggaaaagctgcttgcccattcgttggggacgaggacgcaaacggcttacaaccgctcggagctttgggaggagcgtaaggatgcgctggaacggtgggggaatgatgttttgaggcttgccaaaaacggaaaatga

SEQ ID NO: 66517 - DNA, 783 bp, Neisseria meningitidis
  misc_feature 8, 9, 10, 11, 12: 'n' is a, c, g or t
gtgtgtgnnnnngtccaagacatcgctatcctgaccggcggcaccgtaattgccgaagaagtcggcctgtctctggaaaaagcgactttggacgacttgggtcaagccaaacgcatcgaaatcggtaaagaaaacaccaccatcatcgacggcttcggcgacgcagcccaaatcgaagcgcgtgttgccgaaatccgccaacaaatcgaaaccgcaaccagcgattacgacaaagaaaaactgcaagagcgcgttgccaaattggcaggcggtgtggcagtcatcaaagtcggcgcggcgaccgaagttgaaatgaaagagaaaaaagaccgcgtggaagacgcgctgcacgctacccgcgcagccgttgaagaaggcgtggttgcaggcggcggcgtagccctgttgcgcgcccgtgccgctctggaaaacctgcacaccggcaatgccgaccaagacgcaggcgtacaaatcgtattgcgcgccgttgagtctccgctgcgccaaatcgttgccaacgcaggcggcgaacctagcgtggttgtgaacaaagtgttagaaggcaaaggcaactacggttacaacgctggcagcggcgaatacggcgacatgatcgaaatgggcgtactcgaccccgccaaagtaacccgttccgcgctgcaacacgccgcatctatcgccggcttgatgctgaccactgattgcatgatcgctgaaatccctgaagaaaaacctgctatgcctgacatgggcggtatgggcggtatgggtggcatgatgtaa

SEQ ID NO: 66518 - DNA, 678 bp, Neisseria meningitidis; identical to SEQ ID NO: 61606

SEQ ID NO: 66519 - DNA, 645 bp, Neisseria meningitidis
atgactttaggtctggttggacgcaaagttggtatgacccgcgtgttcgacgaacagggtgtttctgttccggtaaccgttttggatatgtctgccaaccgcgttacacaagtaaaatccaaagatactgacggctatactgccgttcaagttacctttggtcagaaaaaagccaatcgtgtcaacaaagccgaagccgggcactttgcaaaagcaggtgttgaagccggtcgcggtttgattgagtttgctttgactgaagaaaaactggctgaattgaaagctggtgacgaaatcaccgtttctatgtttgaagtcggtcaactggtcgatgtaaccggtacctctaaaggtaaaggtttctccggcacgattaaacgtcataacttcggtgcccaacgtacttcccacggtaactcccgttctcaccgtgttccaggctctatcggtatggcgcaagacccgggtcgcgtgttccccggtaaacgcatggccggccaatacggcaacaccaaagcaactgttcaaaaattggaagttgtccgtgttgatgcagaacgccaactgctgttggttaagggtgctgttccaggtgcggtcaacagcgatgttgtagttcgtcccagcgtgaaagtaggtgcgtaa

SEQ ID NO: 66520 - DNA, 1506 bp, Neisseria meningitidis
atgtgttgttctcttagttttgcagaaccagcaagaatagatgatcgaataataaaatttaggccatctaaatcaaagttttttgaatctacaggatatagaaaaatcaataatgaattttctaaattcacagaagcggcaaatgtcgaacatatccccacgggcgcaaaagcccgaatcaacgcaaagataaccgccagcgtatcccgcgccgccgtcttgtcaggagtcggcaaacttgtccgccaaggcgcgaaattcagcacaagggcagtcccttatgtagggacagcccttttagcccacgacgtatacgaaactttcaaagaagacatacaggcacgaggctaccaatacgacaccgaaaccgacaaatttgtaaaaggctacgaatatagtaattgcctttggtacgaagacgaaagacgtattaatagaacctatggctgctacggcgttgacagttccattatgcgccttatgtccgattacagcagattccccgaagtcaaagaattgatggaaagccaaatggaaaggcttgcccgtccgtattgggaaaagttaaggaatcgtcctgatatgtattattttaaaaactacaattttaaacgttgttatttcggattgaacggcggagattgtttagttgctaaaggtgatgatggtagaacttttatcagtttctcacttcaaggaaattcaaaatacaaagaagaaatggatgccaaaaagctggaagagattttatcgttgaaagtcgatgccaatcccgacaaatacataaaggcaaccggatatcccggttattccgaaaaagtagaagtcgcacccggaacaaaagtgaatatgggacccgtcacggacaggaacgggaatcccgttcaggttgtcgcaacattcggcagggattcgcaaggcaacaccacagtggatgttcaagtaattccgcgtcccgacttaacccccggaagcgcggaagcgccgaacgcacagccgctgcccgaagtatcgcccgctgaaaaccccgcaaacaacccggcccccaatgagaaccccggcacgcgtcccaatcccgaacccgaccccgatttgaatcccgatgcaaatcccgatacggacggacagcccggaacaagccccgattccccggccgttccggaccgcccaaacggcagggacggcaaagatggcgggcttttgtgcaaattcttccccgacattctagcttgcgacaggctgcccgagcccaatccggcagaagatttaaatctgccgtctgaaaccgtcaatgtagagtttaagaaatccggaatctttcaagattccgcacagtgtcccgcccccgttacgttcactataaccgtgcttgattcaagcaagcagttcgcgttcagctttgagaacgcatgtaccatagccgaacggctaaggtacatgcttctcgcccttgcttgggcggttgccgcctttttttgtatccgcacagtatcccgtgaagtctag

SEQ ID NO: 66521 - DNA, 138 bp, Neisseria meningitidis; identical to SEQ ID NO: 40349

SEQ ID NO: 66522 - DNA, 207 bp, Neisseria meningitidis
atggctatcgtatctacaccacaccccgctctttccgccctcatcatcctcgcccattatcacggcattgccgccaaatctttgggattgaaggcaaaggtagtacgccagcctgtcaaacgtttggctatggtgaccttacctgcattggtatggtgtgatgacggcaaccattttaaggaaaagtggttgttttcggcattctga

SEQ ID NO: 66523 - DNA, 738 bp, Neisseria meningitidis
atgattattttggacaaggtttccaagcattaccaaacgcgcgacaagacccgttttgccgccgtcgagccgaccagcctcgaaatccgcgacggcgaaatcttcgggctgatgggttattcgggtgcaggcaaatccaccctgttgcgactgattaacctgttggaacgtcccgacacgggcaaggtcaacgtctgtggacaagagctgaccgcgcttgatgccgccgcattgcgtcaggcgcggcagaatatcggcatggtgtttcagcagtttaatcttttgagcaaccgcaccgttgccgacaatgttgcctttcctttggaaatcgccggatggccgtctgaaaaaatcaaagcgcgcgttgccgaatgcctcgaaatcgtcggactgaccgaacgcgccggccactatcccgcccagctttccggcggacaaaaacagcgtgtcggcatcgcccgcgcgctcgcgcccaaaccccaagtcatcctcgccgacgaacccacttccgccctcgatcccgccaccacgcgcagcgtcttggaatgtttggaagacatcaacaaacgattcaacgtaaccatcgtcatcgtaacccacgaaatgagcgtcatccgccgcctgtgcgaccgcgccgccctcttggataaaggcaaagtcgtcgaaatcgtcgaagtacgcggcaaccaaatccacgcccaatccgacatcgggcgcgaactgattcgggaggactga

SEQ ID NO: 66524 - DNA, 513 bp, Neisseria meningitidis
atgaaaaactttaacggcaaactcatcctcatcggactgatgggcgcgggcaaaaccacgctgggccggcaaatggcgcagcggctggattaccgtttttacgacagcgatcacgaaatcgccgcagccgccggcgttcccatccccaccatatttgaaatggaaggcgaacagggattccgttcgcgcgaaaccgccatactcaaaaagctggttatcctgccccatatcgtcctgtctaccggcggcggcgcggtgttaaaagaagaaaaccgcgcccttatccgcaaaagcggcacggtcgtctatctgcacgccccgcccgaaatcctgctcgaacgcacgcgctgcgacaacagccgtcctttgctgcaagttgccgatcctttggcgaaattacgtgaactctacgccgcacgcgaccccgtttaccgccaaaccgccgactttaccgtagaatcggcaaactgccgggaaaccgtgcaaaccctgctcaaacgcttatcccgataa

SEQ ID NO: 66525 - DNA, 324 bp, Neisseria meningitidis; identical to SEQ ID NO: 38645

SEQ ID NO: 66526 - DNA, 972 bp, Neisseria meningitidis; identical to SEQ ID NO: 39558

SEQ ID NO: 66527 - DNA, 327 bp, Neisseria meningitidis; identical to SEQ ID NO: 39180

SEQ ID NO: 66528 - DNA, 312 bp, Neisseria meningitidis
atgtttgatggcgaagtagaagtagatgaaagttattttggcggacaacgcaaaggcaaacgcggtcgcggtgctgccgataaagtcgccgtattcggtcttttgaagcgaaatggtaaggtttatacggttacagtaccgaatactcaaaccgctactttatttcctattatccgtgaacaagtgaaacctgacagtattgtttatacggattgttatcgtagctatgatgtattagatgtgcgcgaatttagccattttagcttcgctgaaacttcgttttcgtatcaatcacagcccccattttgctga

SEQ ID NO: 66529 - DNA, 2151 bp, Neisseria meningitidis
atgctcaccgatttagaaaaaaacgccatccgcgaccattaccaaaacatcggcaaaaacctgcccggtttccgtccgcgcgcttcgcagcgggaaatgattgcggcggttgccaacgctttttcgcggacgttggcgcgcgaagaaggcggcgagccgcccaagcgcgagggcgagagcatcgccgtaatcgaagggccgaccggcgtgggcaaatcgcttgcctacctgctggcgggcggcatcatggcgcagacgcgcggcaagcggctgattgtgagcagcgcaacggttgccttgcaggagcagttggtggaccgcgacctgccgtttttggtcgaaaaaagcggtttggaactgagcttcgcgcttgccaaagggcgcggccgctatctctgcccctacaaactctatcaactgacgcaaagcaatgcccagcaaaacctgctcggctttgaagcccccgccgtcttgtgggacagcaaacccaagcccgaagaattgaagctgctgcgcgacattgccgacgaattttctgcccgacggttcaatggcgaccgcgacgcctggccggaaaaaatcgacgacgcgatttggctcaaagtgaccaacgaccgccacggctgcctgaaaaccgcctgtcccaaccgtccggaatgtccgttttacctggcacgcgatgtcttggaaaccgtcgatgtcgtcgttgccaaccacgatcttctgcttgccgacatcagtatgggcggcggcgtgattctgcccgcgcccgaaaacagtttctattgcatagacgaagcgcaccacctgcccaaaaaagccctcagccgttttgccgccgaacattcatggaatattgccgtttggacgctggaaaaactgccgcaactgaccggcaagattgccgcgctgaccgataaagccgaacttgccaacctcgccgacgaagccgcagcatcattgctcgacagcctgcacgaatggcagttccatttggcggaagagccgtctttaagtatggggccgtctgaaaacgacagacgaaccaacagcgaaccgacttggctgtgggaagacggcaaaatccccgaaggcctcgaaaccaccgtttccaatacggccattgctgcgcgcagcctgctcaaacacgttatcgggctgaacgatgcgctttctgccgcacgccgcgaaaaagaacaggacggcgcgctcctcgaccgcctgaccggcgagttcggcatcttcatcgtccgtatcgaacaaatcagcgcggtttgggatttgctctccaccgtccccctcgaaggcgaagagccgctggcaaaatggataacccgccgtgccgacgacaaaaacgactacattttcaacgccagccccatcagcagcgcatcccaccttgccaacagcctgtggcggcgtgcggcaggcgcggtattgacttccgccaccctgcaatccttgggcaacttcaacctgatgctgcgccaaaccgggctgcaatggctgcccgaaaccaccaccctcgccctcaaaagcccctttgactttgaaaaacagggcgaactctacatcccccccatatacgccagccccaaagaccccgaagcccacaccgccgccgtcatcgaatggctgcccaagcttatttcgcccaccgaagccatcggcacgctcgtcttgttttcctcgcgcaaacaaatgcaggatgtcgccctgcgcctgcccggagactacctgccgctcttgctcgtacaaggcgaattacccaaagccgtcctcctgcaaaaacaccaccgggccatagaagaaggcaaagccagcatcatcttcggactcgacagtttcgccgaaggactcgacctgcccggcaccgcctgcgtgcaagtcatcatcgccaagctgccgtttgcgatgcctgacaaccccatcgaaaaaacccaaaaccgctggatagaacagcgcggcggcaatccttttattgaaatcaccgtccccgaagccggcatcaaactcatccaggccgtcggccgcctcatccgcaccgaacaagactacggccgcgtaaccatcctcgacaaccgcatcaaaacacagcggtacggccaacaattattggccggcctgccgccgtttaaaaggatagggtaa

SEQ ID NO: 66530 - DNA, 1008 bp, Neisseria meningitidis
atgagcaccttcttccggcaaaccgcacaagccatgattgccaaacacatcgaccgtttcccgctattgaagttggaccaggtgattgattggcagccgatcgaacaatacctgaaccgtcaaaaaaaccgttaccttagagaccaccgcggccgtcccgcctaccctctgctgtccatgttcaaagccgtcctgctcggacaatggcacagcctctccgatcccgaactcgaacacagcctcatcacccgcatcgatttcaacctgttttgccgtttcgacgaactgatcatccccgattacagtaccttatgccgctaccgcaactggctggcgcaagacgacaccctgtccgaactgctcaaactgattaactgccaactgaccgaaaaaggtttaaaaatagagaaagcatccgccgctgttgttgatgccaccattattcagactgccggcagcaaacagcgtcaggccatagaagttgacgaagaaggacaaatcagcggccaaaccacaccgagtaaggacagcgatgcccgttggataaagaaaaacggcctctacaaactcggttacaaacaacatacacgtaccgatgcggaaggctatatcgagaaactgcacatcacccccgccaatgcccatgagtgcaaacacctgccgcctttgttggaaggactgcccaaagatacgaccgtctatgccgacaaaggctacgacagtgcagaaaaccggcaacatctggaagaacatcagttgcaggacggcattatgcgcaaaacctgccgcaaccgtccgctgtcggaggcgcaaaccaaacgcaaccggtatttgtcgaagacccgttatgtggttgaacaaagcttcggtacgctgcaccgtaaattccgctatgcgcgggcagcctatttcggactgattaaagtgagtgcgcaaagccatctgaaggcgatgtgtttgaacctgttgaaagccgccaacaggctaagtgcgcccgctgccgcctaa

SEQ ID NO: 66531 - DNA, 684 bp, Neisseria meningitidis
atgtttgcccttttggaagccttttttgtcgaatacggctacgcggccgtgtttttcgttttggtcatctgcggtttcggcgtgccgattcccgaggatttgaccttggtaacaggtggcgtgatttcgggtatgggttataccaatccgcatattatgtttgcagtcggtatgctcggcgtgttggcgggcgacggcgtgatgtttgccgccggacgcatctgggggcagaaaatcctcaagttcaaaccgattgcgcgcatcatgacgccgaaacgttacgcacaggttcaggaaaaattcgacaaatacggcaactgggtgttatttgtcgctcgtttcctgcctggtttgcggactgccgttttcgttaccgccggcatcagccgcaaagtatcgtatctgcgctttctgattatggacgggcttgccgcgctgatttccgtgcccgtttggatttacttgggcgagtacggcgcgcacaacatcgattggctgatggcgaaaatgcacagcctgcaatccggcatcttcatcgcattgggcgtgctggcggcggcgctggcttggttctggtggcgcaaacgccgacattatcagctttaccgcgcacaattgagcgaaaaacgcgccaaacgcaaggcggaaaaggcagcgaaaaaagcggcacagaagcagcagtaa

SEQ ID NO: 66532 - DNA, 474 bp, Neisseria meningitidis
ttgctcgattcccacgagggcggttacgtcaatcatcccaaagaccctggcggcgaaaccaattggggcatcactaagcgcaccgcacaggcaaacggctacaacggctccatgcgtgccatgacgcgtgaacaggctatcggcatttaccgaaaggcgttttgggagcgttaccgcgccgaccaaatgccggaagcggtcgcgttccaattttttgatgcctgcgtcaaccacggttacggcaatgccgcccgtatgctccaacgcgccgcaggcgtgccggacgatggaatcatcggcgaaatcagcctcaaagccatcaattcccttcccgaaaacgaccttttattgcggttcaacgccgagcgtttggtcttttataccaagctgggtacgttcacctctttcggcaagggctgggtacgccgtgtggcgcaaaacctgattcacgcgtctgcagataacactgattaa

SEQ ID NO: 66533 - DNA, 2082 bp, Neisseria meningitidis
atgaaatcactcaaaaccttcctcatttggggcatagtggtactggtcggcttagcatcctttaccactctggccctcagccgaggcgaacaggtcagcgcggtatggatggtcaccgccgccatatccgtttactgcatcgcctaccgtttttacagcctctacatcgccaaccgcgtaatgcggctcgatcctaaccgcctgactccggcagaacgccacaacgacggcttggactacgttccgacgcacaagggcgtattgttcggacaccactttgccgcgattgccggcgcgggccctttggtcggcccggttttggcggcgcaaatgggttacctgcccggtactttgtggattatcttcggcgtggtgtttgccggcgcggtacaggatatgatggtcttgttcgtctctatgcgccgcgacggtaagtctttgggcgatattgtgaaacaggaactcggcactgtccccggcgtgattgcctccatcggtattttgatgattatggtcatcattatggcggtgttggcgttgattgtcgtaaaagcactggttcacagcccttggggtacgtttaccatcgccgccactatgccgattgccctgtttatgggtatttacacgcgctatatccgtccgggcaaaatcggcgagatttccatcgtcggctttattttgctgatgctggcggtaatttacggcgaagatgtggcgaaaagttccatcgggcattggttcgaccttgacggcatccagctcacttgggcgattatgatttacggctttgtcgcctccgtattgcccgtatggttgctgctcactccgcgcgactatctctccaccttcctgaaaatcggtacgattgcggccttggctttgggcatcgtcatcgtcaatcccgctttgcaaatgcctgccgtaacccactttatcgacggttccggtccggtattctcaggcgcattgttcccgttcctcttcatcaccatcgcctgcggtgcggtttcgggcttccacgcgctgatttcctccggcaccacgccgaaaatgctggaaaacgaaacccacgtccgtatgattggttacggcggtatgttgatggaaagtttcgtagccattatggcgcttgccgccgccgcatcgcttgatcccggcgtgtacttcgccatgaacagccctgccgccctgatcggtacggatgccaataccgccgccgaagtgattaccaccaagctgcaattccctgtcgatgcggcaaccctgttgcataccgctaaggaagtgggcgaaaacaccatcctttcccgtgcaggcggtgcgcccaccctcgcagtcggtatggcgcacattatgagccgcctgattccgggcgaggcgatgatggcgttctggtatcacttcgccctgttgtttgaagccttgttcatcctgaccgccgtcgatgccggtacgcgcgtcgcacgttttatgattcaagacttgggcagcatcttctataaacctttcggcaacaccgactccatccccgccaacctgattgcgaccttcttcgccgtggcattgtggggctactttctctacaccggcgtaaccgacccgctgggcggcatcaactcgctctggcctttgttcggcatcgccaaccaaatgctggcgggcgtggccttgattatgtgcgccgtggtgctgattaagatgaaacgcgaccgttatgtctgggtggtactcgttcccgccgtcggcgtactgttcgtaacctgctacgccggcctgcaaaaactgttccacagcgacccgcgcatcagcttccttgcccacgccggcaaatacagcgacgcattggctaaaaacgaaatccttgcgcctgccaaagacatcggcgaaatggcgcaaatcatcttcaacgacaagattaatgccggtctgaccatcctcttcttgtcggttgtcgtgattgtcgccgcgtacggtttgcgtaccgccctcaaagcacgcaaagtcggctggccgaccgccaaagaaatcccggcggtgtaccgcgacggcaaacagccggaggcacaaagtgaagcataa

SEQ ID NO: 66534 - DNA, 1578 bp, Neisseria meningitidis
atgcgcgccaaccccaaaacacaggcaatgccgtctgaaaccatatccctgatgaaaacacgcagcctaatttcccttttatgcctccttctctgttcatgttcttcatggttgcccccactggaagaacggacggaaagccgtcatttcaatacttccaaacccgtccgcctggacaacatcctgcaaatccggcacacccctcataccaacgggctatccgatatctatctgttgaacgacccccacgaagcctttgccgcccgcgccgcccttatcgaatctgccgaacacagcctcgatttgcaatactacatctggcgcaacgacatttccggccgactgctgttcaacctgatgtaccttgccgcagaacgcggtgtgcgcgtacgcctgctgttggacgacaacaacacgcgcggattggacgacctcctgctcgccctcgacagccatcccaatatcgaagtgcgcctgttcaaccccttcgtcttccgcaaatggcgcgcactcggctacctgactgacttcccccgcctcaaccgccgcatgcacaacaaatcctttaccgccgacaaccgcgccaccatactcggcggacgcaatatcggcgacgaatacttcaaagtcggtgaggacaccgttttcgccgacctggacatcctcgccaccggcagcgtcgtcggcgaagtatcgcacgacttcgaccgctactgggcaagccattccgcccacaacgccacgcgcatcatccgcagcggcaacatcggcaagggtcttcaagcactcggatacaacgacgaaacgtccagacacgcgctcctgcgctaccgcgaaaccgtcgaacagtcgcccctctaccaaaaaatacaggcaggacgcatcgactggcagagcgtccaaacccgcctcatcagcgacgaccctgcaaaaggactcgaccgcgaccgccgcaaaccgccgattgccgggcggctgcaagacgcgctcaaacagcccgaaaaaagcgtctatctggtttcaccctatttcgtccccacaaaatccggcacagacgcactggcaaaactggtgcaggacggcatagacgttaccgttctgaccaactcgctacaggcgaccgacgttgccgccgtccattccggctatgtcaaataccgaaaaccgctgctcaaagccggcatcaaactctacgagctgcaacccaaccatgccgtccccgccacaaaagacaaaggcctgaccggcagctccgtaaccagcctgcacgccaaaaccttcattgtggacggcaaacgcatcttcatcggttcgttcaacctcgacccccgttccgcgcgtctcaacaccgaaatgggcgttgttatcgaaagccccaaaatcgcagaacagatggagcgcacccttgccgataccacacccgaatacgcctaccgcgttaccctcgacaggcacaaccgcctgcaatggcacgatcccgccacccgaaaaacctacccgaacgaacccgaagccaaactttggaaacgcatcgccgcaaaaatcctatccctgctgcccatagaaagtttattatag

SEQ ID NO: 66535 - DNA, 936 bp, Neisseria meningitidis; identical to SEQ ID NO: 51277

SEQ ID NO: 66536 - DNA, 1425 bp, Neisseria meningitidis
atggacacaaaagaaatcctcggctacgcggcaggctcgatcggcagcgcggttttagccgtcatcatcctgccgctgctgtcgtggtatttccccgccgacgacatcggacgcatcgtgctgatgcagacggcggcggggctgacggtgtcggtgttgtgcctcgggctggatcaggcatacgtccgcgaatactatgccgccgccgacaaagacactttgttcaaaaccctgttcctgccgccgctgctgtctgccgccgcgatagccgccctgctgctttcccgcccatccctgccgtctgaaatcctgttttcgctcgacgatgccgccgccggcatcgggctggtgctgtttgaactgagcttcctgcccatccgctttctcttactggttttgcgtatggaaggacgcgcccttgccttttcgtccgcgcaactcgtgtccaagctcgccatcctgctgctgctgctgccgctgacggtcgggctgctgcactttccggcgaacaccgccgtcctgaccgccgtttacgcgctggcaaaccttgccgccgccgcctttttgctgtttcaaaaccgatgccgtctgaaggccgtccggcgcgcaccgttttcatccgccgtcctgcatcgcggcctgcgctacggcataccgatcgcactaagcagcatcgcctattgggggctggcatccgccgaccgtttgttcctgaaaaaatatgccggcctggaacagctcggcgtttattcgatgggtatttcgttcggcggagcggcattattgttccaaagcatcttttcaacggtctggacaccgtatattttccgcgcaatcgaagcaaacgccccgcccgcccgcctctcggcaacggcagaatccgccgccgccctgcttgcctccgccctctgcctgaccggcattttctcgcccctcgcctccctcctgctgccggaaaactacgccgccgtccggtttatcgtcgtatcgtgtatgctgccgccgctgttttgcacgctggtagaaatcagcggcatcggtttgaacgtcgtccgaaaaacacgcccgatcgcgctcgccaccttgggcgcgctggcggcaaacctgctgctgctggggcttgccgtaccgtccggcggcgcgcgcggcgcggcggttgcctgtgccgcctcattctggttgttttttgttttcaagacagaaagctcctgtcgcctgtggcagccgctcaaacgcctgccgctttatatgcacacattgttctgcctggcctcctcggcggcctacacctgcttcggcacgccggcaaactaccccctgtttgccggcatatgggcggcatatctggcaggctgcatcctgcgccaccggaaagatttgcacaaactgtttcattatttgaaaaaacaaggtttcccattatga

SEQ ID NO: 66537 - DNA, 873 bp, Neisseria meningitidis; identical to SEQ ID NO: 38217

SEQ ID NO: 66538 - DNA, 651 bp, Neisseria meningitidis; identical to SEQ ID NO: 49015

SEQ ID NO: 66539 - DNA, 2748 bp, Neisseria meningitidis
atgaaacagcaacatttgttccgattaaatattttatgcctgtctttaatgactgcgctgcccgtttatgcagaaaatgtgcaagccggacaagcacaggaaaaacagttggataccatacaggtaaaagccaaaaaacagaaaacccgccgggataacgaagtaaccggtttgggcaaattggtcaaaaccgccgacaccctcagcaaggaacaggtactcgatatccgcgacctgacgcgttacgaccccggcatcgccgtggtcgaacaggggcgcggcgcaagctcgggctactcgatacgcggtatggacaaaaaccgcgtttccttgacggtggacggcttggcgcaaatacagtcctacaccgcgcaggcggcattgggcgggacgaggacggcgggcagcagcggcgcaatcaatgaaatcgagtatgaaaacgtcaaagctgtcgaaatcagcaaaggctcaaactcggtcgaacaaggcagcggcgcattggcgggctcggtcgcatttcaaaccaaaaccgccgacgatgttatcggggaaggcaggcagtggggcattcagagtaaaaccgcctattccggtaaaaaccgggggcttacccaatccatcgcgctggcggggcgcatcggcggtgcggaggctttgctgatccacacgggtcggcgcgcgggggaaatccgcgcacacgaagccgccggacgcggcgttcagagcttcaacaggctggtaccggttgaggataccaatcagtacgcaaatttcatcgttgaagaagaatgcgaaagcgggaattacgaaacgtgtaaagcgaatccgaaaaaagatgttgtcggcaaagacgaacgtcaaacggtttccacccgagactacacgggtcccaaccgcttcctcgccgatccgctttcatacgaaagccggtcgtggctgttccgcccgggttttcgttttgaaaacaaacggcactacatcggcggcatactcgaacgcacgcaacaaactttcgacacgcgcgatatgacggttccggcattcctgactaaggcggtttttgatgaaaataaaaaacaggcgggttctttgtccggcaacggcaaatacgcgggcgaccacaaatacggcggtctgtttaccaacggcgaaaacggtgcgctggtgggcgcggaatacggtacgggcgtgttttacgatgagacgcacaccaaaagccgctacggtttggaatatgtctataccaatgccgataaagacacttgggcggattatgcccgcctctcttacgaccggcagggtatcggtttggataatcattttcagcagacgcactgttctgccgacggttcggacaaatattgccgtccgagtgccgacaagccgttttcctattacaaatccgatcgcgtgatttacggggaaagccacaggctcttgcaggcggcattcaaaaaatccttcgataccgccaaaatccgccacaacctgagcgtcaacctcggttttgaccgttttggttccgacctccgtcatcaggattattattatcaaaatgccaaccgcgcctattcgtcgaaaatacccactcaaaacggcaatcaaaacatcagccccaacggcagccaagacaaaccctattgggtcagcataggcgggggaaatgtggttacggggcaaatctgccgcttgggcaataatacttatacggactgcacgccgcgcagcatcaacggcaaaagctattacgcggcagttcgggacaatgtccgtttgggcaggtgggcggatgtcggcgcgggcttgcgctacgactaccgcagcacgcattcggacgacggcagcgtttccaccggcacgcaccgcaccctgtcctggaacgcaggcatcgtcctcaaacctgccgactggctggatttgacttaccgcacttcaaccggcttccgcctgccttcgtttgcggaaatgtacggctggcggtcgggcgataaaataaaagccgtcaaaatcgatccggaaaaatcgttcaacaaagaagccggcatcgtgtttaaaggcgatttcggcaacttggaggcaagttggtttaacaatgcctaccgtgatttgattgtccggggttatgaagcgcaaattcaaaacggcaaagaaacagccaaaggcgacccggcttacctcaatgcccaaagcgcgcggattaccggcatcaatgttttgggcaaaatcgattggaacggcgtatgggataaattgcccgaaggttggtattctacatttgcctataatcgtgtccgtgtccgtgacatcaaaaaacgcgcagaccgcaccgatattcaatcacatctgtttgatgccatccaaccctcgcgctatgtcgtcggcttgggctatgaccaactggaaggcaaatggggtgtgaacggtatgctgacttattccaaagccaaggaaatcacagagttgttgggcagccgggctttgctcaacggcaacagccgcaatacaaaagccaccgcgcgccgtacccgcccttggtatattgtggatgtgtccggttattacacgattaaaaaacactttaccctccgtgcgggcgtgtacaacctcctcaactaccgctatgttacttgggaaaatgtgcggcaaactgccggcggcgcagtcaaccaacacaaaaatgtcggcgtttacaaccgatatgccgcccccggccgcaactacacatttagcttggaaatgaagttttaa

SEQ ID NO: 66540 - DNA, 420 bp, Neisseria meningitidis; identical to SEQ ID NO: 44898

SEQ ID NO: 66541 - DNA, 321 bp, Neisseria meningitidis; identical to SEQ ID NO: 39509

SEQ ID NO: 66542 - DNA, 1290 bp, Neisseria meningitidis
atgaaaaaactcaacacccaatcgcccgatttccaagccggactcaaagccctgctggcttttgaaaccgcgcaaaaccccgaaaccgaacgcatcgtcgccgacatttgcgccgacgtgcaaaagcgcggcgatgcggctttgattgaatacaccaacaaattcgatcagacaaacgctaaaagcatcgatgatttaatactcacgcaagccgatttgaaagcggcgttcgagcgcattccgaacgacgttcagacggcattgcagaccgccgcccgccgtgtcgaaagctaccaccaacgccaaaaaatggaatcgtggagctacaccgatgaagacggcacgctgttgggacaacaaatcacaccgcttgaccgcgtcggcatttacgtccccggcggcaaggcggcatatccgagttccgtcatcatgaacgccatgcccgcccacgtcgcaggcgtgaaagaaatcatcatggtcgtgccgacaccgaaaggcgaacgcaacgacatcgtgcttgccgccgcatacgtcgccggcgtaaccaaagtcttcaccgtcggcggcgcgcaggcggttgccgccctcgcctacggcacggaaaccatcccccaagtcgataaaatcaccggtccgggcaacgccttcgtcgccgccgccaaacgccgcgtgttcggcgtggtcggcatcgacatggtggcggggccgtctgaaatcctggtcatcgccgacggcacgacacctgccgattgggtggcgatggatttgttcagccaggccgaacacgacgaaattgcccaagccatcttaatcggcacgtcgcaagcgtatctcgacgaagtagaagccgctatggacaggctcatcgaaaccatgccgcgccgcgacatcatcgaagcctcgctcggcaacaggggcgcgatgatactcgccaaagacttggacgaagcctgcgaaatcgccaactacatttcccccgaacacttggaattgtcagtcgaaaatccgcaggaatgggcgaaaaaaatccgccacgccggcgcgattttcatgggacgctacaccggcgaaagcctcggcgactactgcgccggtccaaaccatgtattgcccaccagccgcactgcccgcttttcctcgcctttggggacatatgatttccaaaaacgctccagcctgattcaggtttcggaacagggcgcgcaaaaattaggcgaaaccgccagcgtgctggcacacggcgaaagcctgaccgcccacgcccgcgcggcagagttccgtatgaaataa

SEQ ID NO: 66543 - DNA, 393 bp, Neisseria meningitidis; identical to SEQ ID NO: 43472

SEQ ID NO: 66544 - DNA, 585 bp, Neisseria meningitidis
atgcacatactgaccgccggcgtggacgaggcaggacgcggacctttagtcggcagcgtgtttgccgccgccgtcatccttccggaaacattcgacctgcccggactgaccgactccaaaaaactcagcgagaaaaaacgcgacgcgcttgccgaaatgataaaaaatcaggcggttgcgtggcacgtcgccgccgccacgcccgaagaaatcgccagcctcaacatcctgcacgccaccatgctcgcgatgaaacgcgccgttgacggtttggctgtgcgtcccgaaagaatattcatcgacggcaaccgcattcccgaacatttgaacatccctgccgaagccgtcgtcaaaggcgacagcaaaatcatcgaaatctccgccgcatccgttttggcaaagaccgcacgcgatgcagaaatgtacgcactggcgcaacgccatccccaatacggtttcgacaaacacaaaggttacggcacgaagcagcatctggaagccctcaaacaatacggcgtgctgcccgaacaccgccgagacttcgcccccgtcagaaacctgctcgcgcagcaggccttgttttaa

SEQ ID NO: 66545 - DNA, 654 bp, Neisseria meningitidis
atgaagataacgcactgcaaattaaagaaaaaagtacagaaagaactgctccgtttttttgtactcgaagttaccgcccgttctgccgccgatattttgggtatccatcccaattcggcagcactgttctaccgtaaaatccgcacggttatcaaccatcatttggccctggctgccgatgaggtttttgaggatcctgtcgagccggacgaaagcgatttcggcggacggcgtaaaggcagacgtggtcgcggtgcggcaggaaaagtggttgtcttcggcattctgaaacgcaacggacgggtctataccgttgtggtggataatgccaagtctgaaacgttactccctgtcatcaaaaagaaaatcatgccggacagtattgtttataccgatagtctgagcagctgcgacaagttggacgtgagcggttttatccattaccgcatcaaccattccaaggaatttgcagaccgtcagaaccacattaacggcattgagaatttttggaatcaggcaaaacgcgtcttgcgaaaatacaacggaatcgattgcaaatctttcccgctgttcttgaaagaatgcgaatttcgatttaacttcggcacaccgtctcaacagcttaaaatcctgcgggattggtgtggaatttag

SEQ ID NO: 66546 - DNA, 630 bp, Neisseria meningitidis
ttggtcagaacggcagacggctacaaagccattgcccatattcaagccggagaccgcgtcctttccaaggacgaggcaagcggagaaacgggatacaaacccgttaccacccgatacggtaatccgtaccaggaaaccgtttacattgaaatttcagacggcatcggcaacaaccaaaccctgatttccaaccgcatccatccgttttattcgggcggcaaatggattaaagcggaagatttgaaagcgggaagcaggctgtttgccgaaagcggcaaaacccaaaccgtccgcaacatcattgtcaaaccaaaaccgctcaaagcctacaatctgaccgttgccgactggcatacttacttcgtcaagggtgatagggcggaaacggaaggggtttgggttcataattcttgtccgcctaaaagaacaggaagctccaagaatgaaaaacatggagacggcggtcgaagtcaaatatcagcggaatcaagaattgctgaattaaaaaataaaattattcccggaatgcccaaaaataaacgcttaaagattgagaaaacaatcaaaaatattacaaaaaatgccaatcgaaaagcaaaaggagaagagcatggtcgacgcggtcgttaa

SEQ ID NO: 66547 - DNA, 360 bp, Neisseria meningitidis; identical to SEQ ID NO: 45472

SEQ ID NO: 66548 - DNA, 1218 bp, Neisseria meningitidis
atgacgcacaccgcatcgaaaacacccaaattttggctgaccatcaccgccgccgcattcatcctgctgattaccatcggcatgaggatgacgctcggactgttcgtccaacccgtcgtcaacaccaccgaattgagcattgcccaattcagcctcatcatcgccgttttccaactgatgtggggcatatcgcaaccattgtccggcgcgcttgccgaccgtttcggcgcgttcagggtattaagcggcggcgccgtcctgctcgtctgcgcctgcctgattgcccccaacatcccgacttattgggggctgatgattgccgtcgggctgctgctcgcattcggcaccggttccggcggtttctccatcattatggggcaggtcgccgcccaagtccccgcacacaaacgcggcttggcatccggactggtcaacgccggcggttcggcaggacaattcctgttcgcaccgctggttcaaggactcgtcgtcctgcccgaagtcggctggacgggcacattttacgtttggggcgcaatcgccctgctgattctgcccgtctcatggtggcttgccggcggcaacaacgccgcccacacccaacactcccaagccacacacggacaaagcctcggagaagcagtcaaaaccgccttcaaaaccccaagctacatcctgctgcacctaagcttttttgcctgcggcttccacatcgcctttctcgtaacccacctacccacggaagtcgctctgtgcggactgcccgccaccgtcgcatccacagccatcgccatcatcggactggcaaacatcgccggttgtgtgttctcaggctggtgcacaagccgcgttcggggcaaatacgtcctgttcggactgtacgcctcgcgcgccgcgatgatactcatctacattttttcgcccaagaccgacctcaacttctacattttcgccgccgcactcggatttacctggctcgccaccgtcacgccgaccgcctccattaccggcaaactcttcggcacacgctacctcgccaccctgttcggactgacgatgctcagccaccaaatcggcggattcctcggctcgtacatcggcggcatcgtgattacacaattcggcgactacggctggatgtggtacgccgacgcactgctggcgggaaccgccgccctcctcaacctccccatccgcgaaccccgaaccgccgcatga

SEQ ID NO: 66549 - DNA, 639 bp, Neisseria meningitidis
atgcaaaccgccattatcgattacggtatgggcaacctgcattccgtattgaaatccgtccggacggcggggcagcttgccggaaaaaataccgaaatctttttaagcggcgaccccgaacgcgtgtcccgcgccgacaaagtcatttttcccggtcagggcgcgatgcccgactgtatggcggcactgacgcgcgacggcttggacgaggcagtcaaagatgctttaaaaaacaaaccctttttcggaatctgcgtcggcgcgcaacttttattcgaccacagtgaagaaggaaacaccgacggcttgggctggttcggcggcaaagtcagacgctttgcccgcgacctccgcgaccggcagggatgccgtctgaaagtcccgcatatgggctggaacaccgtgcgccaaacccaaaaccacccgctgtttaaagatattccccaagacacgcgtttttacttcgtccacagctactatttcgcccccgaaaatcccgaaaccatattgggcgaaagcgactacccgtccccgtttgcctgcatcgtcggcaaagacaacgtattcgccacgcaatttcacaccgaaaaaagccacgatgccggactgacgatgttgaaaaactttttaaactggtaa

SEQ ID NO: 66550 - DNA, 312 bp, Neisseria meningitidis
atgtttgatggcgaagtagaagtagatgaaagttattttggcggacaacgcaaaggcaaacgcggtcgcggtgctgccgataaagtcgccgtattcggtcttttgaagcgaaatggtaaggtttatacggttacagtaccgaatactcaaaccgctactttatttcctattatccgtgaacaagtgaaacctgacagtattgtttatacggattgttatcgtagctatgatgtattagatgtgcgcgaatttagccattttagcttcgctgaaacttcgttttcgtatcaatcacagcacacattttgctga

SEQ ID NO: 66551 - DNA, 210 bp, Neisseria meningitidis; identical to SEQ ID NO: 40404

SEQ ID NO: 66552 - DNA, 630 bp, Neisseria meningitidis
atgaacagacacatccgccaagaaatcttcgaacgcttccgcgccgccaacccccatccgaccacagaactcaacttcaactcccctttcgagcttttaatcgccgttttactgtcggcacaggcaaccgacgtcggcgtaaacaaagcgacggcgaagctgtttccggttgccgatacgccgcaggcgatgctggatttgggtttggacggcgtgatggaatatacgaaaaccatcgggttgtataaaaccaagtccaagcacatcatgcagacctgccgcatcctgctggaaaaatacaacggcgaagtgccggaagaccgcgaggctttggaatcattgccgggcgtggggcgcaaaacggcaaacgtggtattgaacacagcgttcggccatcccgttatggcggtcgatacgcatattttccgcgtgtccaaccgaaccaaaatcgcccccgggaaagatgtgcgcgaagtcgaagacaaactgatgcgcttcattcctaaagaatttctgatggacgcgcaccactggctgattttgcacggacgctacacctgcaaggcactcaaaccgcaatgccaaacctgcatcatcaacgatttgtgcgaatatcccgccaaagcctga

SEQ ID NO: 66553 - DNA, 1077 bp, Neisseria meningitidis
atgaaaaaatccctgattgccctgactttggcagctctgcctgttgcagcgatggctgacgttaccctgtacggtacaattaaagcaggcgtagaagtttctcgcgtaaaaggtgctaatgcatataaagctcaaggcggaaaatccaaaaccgcaacccaaattgccgacttcggttctaaaatcggtttcaaaggtcaagaagacttcggcaacggcatgaaagccatttggcagttggaacaaaaagcctccatcgccggcactaacagcggctggggtaaccgccaatccttcatcggcttgaaaggcgacttcggtaccgtccgcgccggtaatctgaacaccgtattgaaagacagcggcgacaacgtcaatgcttgggaatctagttctaacaccgaagatgtactgggactgggtactatcggtcgtgtagaaagccgtgaaatctccgtacgttacgattcccctgtatttgcaggcttcagcggcagcgtacaatacgttccgcgcgacaatgcgaatgatgtggacaaatacacacataagctgtccagccgtgagtcttaccacgctggtctgaaatacgaaaatgccggtttcttcggtcaatacgcaggctcttttgccaaatatgctgatttgaacaatgatgcagaacgtgttgcagcaggtaaggacaatcctgttaaggattaccaagtacaccgcgtagttgccggttacgatgccaatgacctgtacgtttctgttgccggtcagtatgaagctgctaaaaacaacgatggttctgccaatcaaggtaaaaaacacgagcaaactcaagttgccgctactgccgcttaccgttttggcaacgtaacgcctcgcgtttcttacgctcacggcttcaaagctaaagtgaatggcgtgaaagacgcaaatcgccaatacgaccaagttatcgttggtgccgactacgacttctccaaacgcacttccgctctggtttctgccggttggttgaaagaaggcaaaggcgcagaaaaagtcgaaaaaactgccagcatggttggtctgcgtcacaaattctaa

SEQ ID NO: 66554 - DNA, 1497 bp, Neisseria meningitidis
gtgaaaccgctgcgcagactgacaaacctccttgccgcctgcgccgtagcggccgccgccttcggacagcccgccctcgcagcggacttggcgcaagacccgttcattaccgataacgcccaacggcagcactacgaacccggcggcaaataccacctcttcggcgacccgcgcggcagcgtctccgaccgcaccggtcaaatcaacgtcatccaagactatacccaccagatgggcaacctgctcatccaacaggcggcaatccaaggcaatcttggttacaccgtccgcttttccggacacggacacgaagaacacgcccccttcgacaaccacgccgccgacagcgcaagcaaagaacaaggcaacgttgacgaaggctttaccgtgtaccggctcaactgggaaggacacgaacatcatcccgccgatgcctacgacggcccgaagggcggcaattaccccaaacctacgggcgcacgagacgaatacacctatcacgtcaacggcacagcccgcagtatcaaactcaatccgaccgacacccgcagcatccggcaacgcatatccgacaactacaacaacctcggcagcaatttctccgaccgcgccgatgaagccaacagaaaaatgttcgagcacaatgccaagctcgaccgctggggcaacagcatggagtttatcaacggcgtcgccgccggcgcgctcaacccctttatcagcgcgggcgaagccttgggcataggcgacatactgtacggaacgcgctatgccatagacaaagccgcaatgcgcaacatcgcccccttacccgccgagggcaaattcgccgccatcggcggcttgggcagcgtggcgggctttgaaaagaatacgcgtgaagccgttgaccggtggatacaggaaaaccccaatgccgccgaaaccgtcgaagccctggtcaacgtcctgccgtttgccaaagtcaaaaacctgacaaaggcggcaaaaccggggaaggctgcggttagtggggatttttctgctgcatacaatacaagaacaactagaaaagttactacagaaacagaggggttaaatagaatcagacagaaccagaaaaatagtaatatacatgagaaaaattatggaagagataatcctaatcatattaatgttttatctggaaattctatacaacatatactgtatggagatgaagcaggaggtgggcatctttttcctggcaaacctggtaagacaacattcccccaacattggtcagccagtaaaataactcatgaaattagtgatatcgttacatccccaaaaacgcaatggtatgcacagactggaacaggcggcaaatatattgctaaaggaagaccagccaggtgggtatcatatgaaacgagagatggaattcgtatcagaacagtttatgaacctgcaacaggaaaagtggtaactgcattccccgatagaacctctaatcccaaatataaccctgtaaaataa

SEQ ID NO: 66555 - DNA, 372 bp, Neisseria meningitidis
  misc_feature 353, 354, 355, 356, 357: 'n' is a, c, g or t
atgaatattttattattagacggcggcaaagcgttcggacattctcacggcgggttaaaccgcacgcttcacaaaaaagcgaaagaagttttgaccgcgctcggacacaatgttcaagaaaccgtgattgatgccggctatgatgttgaggcagaaatcgaaaaattcgtttggatggatgctgtgatttggcagatgccgggctggtggatgcacgagccttggacagtgaaaaaatacatagacgaagtattaaccgctggacacggcaaactctaccaaagcgacggcagacacagcgtcaatccgactgagggctacggcacaggcggcttgttgcaaggcaaaaaacnnnnncacacacttaattaa

SEQ ID NO: 66556 - DNA, 546 bp, Neisseria meningitidis
atgaaaaaacaaatcaccgcagccgtaatgatgctgtctatgattgcccccgcaatggcaaacggcttggacaatcaggcatttgaagaccaagtgttccacacgcgggcagatgcaccgatgcagttggcggagctttctcaaaaggagatgaaggagactgagggggcgtttcttccattggctatcttgggtggtgctgccattggtatgtggacacagcatggttttagttatgcaacgacaggcagaccagcttctgttagagatgttgctattgctggcggattaggcgcaattcctggtggtgtaggcgccgcaggaaaggttgtttcctttgctaaatatggacgtgagattaaaatcggcaataatatgcggatagcccctttcggtaatagaacaggtcatcctattggaaaatttccccattatcatcgtcgagttacggataatacgggcaagactttgcctggacagggaattggtcgtcatcgcccttgggaatcaaaatctacggacagatcatggaaaaaccgcttctaa

SEQ ID NO: 66557 - DNA, 1377 bp, Neisseria meningitidis
atgaaacacatccacattatcggtatcggcggcacgtttatgggtgggattgccgccattgccaaagaagcagggtttgaagtcagcggttgcgatgcgaagatgtatccgccgatgagcacccagctcgaagccttgggcataggcgtacacgaaggcttcgacgcggcgcagttggaggaatttaaagccgacgtttacgtcatcggcaatgtcgccaagcgcgggatggatgtggttgaggcgattttgaaccgcgggctgccttatatttccggtccgcaatggctggctgaaaacgtgctgcaccatcattgggtactcggtgtggcggggacgcacggcaaaacgaccaccgcgtccatgctcgcatgggttttggaatatgccggactcgcgccgggcttccttatcggcggcgtaccggaaaactttagcgtttccgcccgcctgccgcaaacgccgcgtcaagacccgaacagccaatctccgtttttcgttatcgaagccgacgaatacgacaccgcctttttcgacaaacgctccaaattcgtacattaccgcccgcgtaccgtcgtgttgaacaatctggaattcgaccacgccgacatctttgccgacttgggcgcgatacagacccagttccaccacctcgtgcgcaccgtgccgtctgaaggcttaatcatctgtaacggacagcagcaaagcttgcaggatactttagacaaaggctgctggacgccggtggagaaattcggcacggaacacggctggcaggccggcgaagccaatgccgacggctcgttcgacgtgttactcgacggcaaaacggccggacgcgtcaaatgggatttgatgggcaggcacaaccgcatgaatgcgctcgccgtcattgccgccgcgcgtcatgtcggtgtcggcattcagacggcctgcgaagccttgggcgcgtttaaaaacgtcaaacgccgcatggaaatcaaaggcacggcaaacggcatcaccgtttacgacgacttcgcccaccacccgaccgccatcgaaaccacgattcaaggtttgcgccaacgcgtcggcggcgcgcgcatcctcgccgtcctcgaaccgcgttccaacacgatgaagctgggcacgatgaagtccgccctgcctgtaagcctcaaagaagccgaccaagtgttctgctacgccggcggcgtggactgggacgtcgccgaagccctcgcgcctttgggcggcaggctgaacgtcggcaaagacttcgatgccttcgttgccgaaatcgtgaaaaacgccgaagtaggcgaccatattttggtgatgagcaacggcggtttcggcggaatacacggaaagctgctggaagctttgagatag

SEQ ID NO: 66558 - DNA, 387 bp, Neisseria meningitidis; identical to SEQ ID NO: 44178

SEQ ID NO: 66559 - DNA, 924 bp, Neisseria meningitidis
atgacgaaaaccgaaccgaacaacgtccaactcgactggttggaatccgaatccatccacattatccgcgaagtggcggcagaatgcgaaaaccccgccctgctcttttccggcggcaaagattccgtggtcctgctcgccctcgcctgcaaagccttccggctgggcagcaggccggtaaaactgcccttcccgctggtgcatatcgacacggggcacaactaccccgaagtgattgccttccgcgacgcgcaggcggcaaaactcaatgcccgcctgatagtggggcgcgtggaagactccatcgctaaaggcacagtagttttacgcaaagaaaccgattcgcgcaatgcggcgcaggcggttacgctgttggaaaccatcgaggcaaacggctttgacgcgctgatgggcggcgcgcggcgcgacgaagaaaaagcccgcgccaaagaacggattttctcgttccgagacgagttcggacaatgggatccgaaggcgcaacgccccgagctgtggtcgctgtacaacaccaggctgcacaaaggcgaaaatatgcgcgtcttcccgatttccaactggacggaactcgacatctggcaatacatcgcccgcgaaaacctcgagctgccgccgatttattacagccacaggcgcgaagtggtcagacgcagggggctgctggtccctgtaacaccgctcaccccgaaaatgccgtctgaaacctccgaaatccttgatgtccgcttccgcaccgtcggcgacatcagctgcacctgcccggtagaaagcaccgcgtccacgccgacggagattatcagagaaacagcggttgccgacatttccgaacgcagcgcgacccggctggacgatcaggcaagcgaggcggcaatggaaaaacgcaaaaaagaaggctatttctaa

SEQ ID NO: 66560 - DNA, 312 bp, Neisseria meningitidis
atggcaaaccaaaaaatccgtatccgcctgaaagcttatgattacgccctgattgaccgttctgcacaagaaatcgttgaaactgcaaaacgtaccggtgccgttgtaaaaggcccgattcctttgccgaccaaaatcgagcgtttcaacattttgcgttctccgcacgtgaacaaaacttcccgtgaacaattggaaatccgcacccacttgcgcctgatggacatcgtggattggaccgataaaactaccgatgcgctgatgaagctggatttgccggccggtgttgatgtagaaatcaaagtccaataa

SEQ ID NO: 66561 - DNA, 1404 bp, Neisseria meningitidis; identical to SEQ ID NO: 44608

SEQ ID NO: 66562 - DNA, 1335 bp, Neisseria meningitidis
atgactgacctgaacaccctgtttgccaacctcaaacaacgcaatcccaatcaggagccgttccatcaggcggttgaagaagtcttcatgagtctcgatccgtttttggcaaaaaatccgaaatacacccagcaaagcctgctggaacgcatcgtcgaacccgaacgcgtcgtcatgttccgcgtaacctggcaggacgataaagggcaagtccaagtcaaccggggctaccgcgtgcaaatgagttccgccatcggtccttacaaaggcggcctgcgcttccatccgaccgtcgatttgggcgtattgaaattcctcgcttttgaacaagtgttcaaaaacgccttgaccaccctgcctatgggcggcggcaaaggcggttccgacttcgaccccaaaggcaaatccgatgccgaagtaatgcgcttctgccaagcctttatgaccgaactctaccgccacatcggcgcggacaccgatgttccggccggcgacatcggcgtaggcgggcgcgaaatcggctacctgttcggacaatacaaaaaaatccgcaacgagttttcttccgtcctgaccggcaaaggtttggaatggggcggcagcctcatccgtcccgaagcgaccggctacggctgcgtctatttcgcccaagcgatgctgcaaacccgcaacgatagttttgaaggcaaacgcgtcctgatttccggttccggcaacgtggcgcaatacgccgccgaaaaagccatccaactgggcgcgaaagtgctgaccgtttccgactccaacggcttcgtcctcttccccgacagcggtatgagcgaagcgcaactcgccgccttgatcgaattgaaagaagtccgccgcgaacgggttgccacctacgccaaagagcaaggtctgcaatactttgaaaaccaaaaaccgtggggcgtcgccgccgaaatcgccctgccctgcgcgacccagaacgaattggacgaagaagccgccaaaaccctgttggcaaacggctgctacgtcgttgccgaaggtgcgaatatgccgtcgactttgggcgcggtcgagcaatttatcaaagccggcatcctctacgccccgggcaaagcctccaacgccggcggcgtagcaacttcaggtttggaaatgagccaaaacgccatccgcctgtcttggactcgtgaagaagtcgaccaacgcctgttcggcatcatgcaaagcatccacgaatcctgtctgaaatacggcaaagtcggcgacacagtaaactacgtcaatggtgcgaacattgccggtttcgtcaaagttgccgatgcgatgctggcgcaaggcttctaa

SEQ ID NO: 66563 - DNA, 273 bp, Neisseria meningitidis; identical to SEQ ID NO: 41774

SEQ ID NO: 66564 - DNA, 1002 bp, Neisseria meningitidis
atgcagtttccttaccgcaatgttccggcttcgcgtatgcgccgtatgcgcagggacgatttttcacgccgcctgatgcgcgaacacacgctgaccgccgatgatttgatttatccggtgttcgtattggaggggtcggcgcgcgaggaggatgtgccttctatgccgggtgtgaagcgtcaaagtttggacaggctgctgtttacggcggaagaggcggtaaagctcggtattccgatgttggcactgttccccgtggttacggcaaacaaaaccgagcgtgcgcaggaggcgtacaatcccgaaggactcgtgccgtcaactgtccgcgccttgcgcgagaggtttcccgaactgggcattatgacggatgtcgcgctcgatccttatacggttcacggtcaggacgggctgacggacgaaaacggttatgtgatgaacgatgaaaccgtagaggttttggtcaagcaggctttgtgccacgctgaagcgggcgcgcaggtggttgccccttccgatatgatggacgggcgtatcggtgcgattcgcgaggcgttggaggatgccgggcatatccatacgcggattatggcgtattccgccaaatatgcttctgcattttacggccctttccgtgatgcggtaggcagttcgggcaatttgggcaaggcagataaaaagacctaccagatggatccggcaaataccgatgaggcgttgcacgaagtggcgttggacattcaggaaggtgcggatatggtaatggtcaagcccggtttgccgtatttggacgttgtccgccgcgtaaaggacgagttcggtgtgccgacttatgcctatcaggtttcgggcgaatatgcgatgctacaggcggcggttgccaacggatggctggatggcgataaagtggttttggaaagcctgctggcattcaaacgtgcgggcgcggatgggattttgacctattatgccattgaggcggccaagatgctgaagcgttga

SEQ ID NO: 66565 - DNA, 918 bp, Neisseria meningitidis
atgtctgtctataccagtgtttccgatgatgaaatgcgcggcttcctgagcggttacgatttgggggaatttgtttccctgcagggcatcgcgcaggggattaccaacagcaattattttctgacgacgacttcgggacgttatgtgctgaccgtgtttgaagtgttgaaacaggaagagctgccgttttttctggagcttaaccggcatttgagtatgaagggcgtggcggttgccgcgccggttgcgcgcaaagacggccggcttgattccgttttggcgggcaagccggcttgtttggttgcctgcctgaaaggttcggataccgcgctgccgacggctgagcagtgtttccataccggtgcgatgttggcgaaaatgcaccttgccgccgccgatttccctttggaaatggaaaacccgcgttacaatgcgtggtggacggaggcgtgcgcccggctgctgcccgtcctgtcgcaagacgatgccgcactgctgtgttccgaaatcgatgcgttgaaggacaatctcggcaatcatctgccttcgggcatcatccacgccgacctgtttaaagacaatgtgttgcttgacggcggtcaggtatcgggcttcatcgatttctattatgcctgccggggcaattttatgtatgacttggcgattgcggtcaacgattgggcaaggacggcggacaataagttggatgaggcgttgaaaaaggcgtttatcggcggttatgagggcgtgcgccccttgagtgccgaagaaaaggcgtatttcccgaccgcccaacgtgccggctgcatccgtttttgggtgtcgcgcctgttggattttcattttccgcaggcgggcgagatgacgtttatcaaagacccgaacgcgttccgcaacctgctgttgagtttgggttga

SEQ ID NO: 66566 - DNA, 126 bp, Neisseria meningitidis
ttgaccttgctctttcgtaatttttcacataattatcttcctttgccgtcaaacgctcttttggttacctgctttgtgtcaaaaatgccgtctgaaagccgaatatcatttcagacggcattttga

SEQ ID NO: 66567 - DNA, 1035 bp, Neisseria meningitidis
ttggaagacgaagattttattcgcgccgcgtccatgctcgccgaagaagttttcggtttcggtatctacaaagagtccaaaggctcgggcggtcgtttttatgagcgctgttggttgatgggttcggaagacgtcctatacggtcgcgtccattttggcggacaaaacaataccattcttttcgaactgaccggcaccggttgcggcgtcgcaaaagaaggctgggaatcacgacttttcgcattcctgactaatgcaatccgcccaaaaatcacacgcgttgacatcgcaaaagactttttcaacggcgaatacagcccgaaccaagcccgtgaagaccgaaataaaggtatgtttacctgtcatcacgtcaaaccaaaaggcgaatgtttggggtcagattgggaagaagacgatgaagccaaaatgaccaaaggcaagacctatggtatcggctcccgtgaatcgtccaaatatgtccgcgtctatgaaaaaggcaagcagttgggcgataaaacaagcacatggacgcgctttgaaattgaattcaaagcaaaagacatcgttatccctttcgaagttttgcagaatccgggcgaatatttcggcggcgcatatccgatttgcgaacgattcgcccaaaaggcaacgcgcatacacgcggttaaggaagataaggtcatttcagccgaccgctaccttgaatgggtaaaaaaacagttcggacgtgcggcaaacggtctgaaattcatttttcccgaattggacaaagccaaactgtttgaactgattgagccgagtcatcacaagctgcccaagtctttggctcccgaagcctacgactgcgcctttttgaaagctcaagccattcatgaacagcccgcattcaaaccgtacaaagacccttactatatgtacgaatattacgagaatcttgaaaaacagcttgaacagcaaaaacacgtcaacaatgaagaaagctataacaacttcatttacgacaaattcgcaagactaccgatttcatgggcttaa

SEQ ID NO: 66568 - DNA, 1566 bp, Neisseria meningitidis
atgacccaagacaaaatcctcatcctcgacttcggttctcaagttacccagctgattgcccgccgcgtgcgtgaagcccacgtttactgcgagctgcattccttcgatatgcctttggacgaaatcaaagccttcaaccccaaaggcatcatcctttccggcggccctaattccgtttacgaatccgactatcaagccgataccggcatcttcgatttgggcattccgattttgggcatctgctacggcatgcagtttatggcgcaccacttgggtggcgaagtgcagcccggcaaccagcgcgaattcggttacgcgcaagtcaaaaccatcgacagcggactgacacgcggcattcaagacgacgcgcccaacacactcgacgtatggatgagccacggcgacaaagtatccaaactgcccgacggtttcgccgtcatcggcgacactccgtcctgcccgattgccatgatggaaaacaccgaaaaacaattctacggcatccagttccaccccgaagttacccacaccaaacaaggtcgcgccctgttgaaccgctttgtcttggacatctgcggcgcgcaaccgggctggacgatgccgaactacatcgaagaagccgttgccaaaatccgcgaacaagtcggcagcgacgaagtgattttaggtttgtccggcggcgtggactcttccgtagcggccgcgctgattcaccgcgccatcggcgaccaactgacctgcgtgttcgtcgatcacggtttgttgcgcctgaacgaaggcaaaatggtgatggatatgttcgcccgcaacttgggtgtgaaagtgattcacgtcgatgccgaagggcagtttatggcgaaactcgccggcgtaaccgaccccgagaaaaaacgcaaaatcatcggcgcggaatttattgaagtatttgatgccgaagagaaaaaactcaccaatgccaaatggctggcgcaaggtacgatttaccctgacgtaatcgaatccgcaggcgcgaaaaccaaaaaagcccacgccatcaaatcgcaccacaatgtcggcggcctgcctgaaaacatgaagctcaagctgcttgagccgttgcgcgacttgttcaaagacgaagtgcgcgaactcggcgttgctttgggcttgacgcgcgaaatggtgtaccgccatccgttccccggccccggtttgggcgtgcgtatcttgggcgaagtgaaaaaagaatacgccgacttgctgcgtcaggcggacgacattttcatccaagaattacgcaatactaccgacgaaaacggcacatcttggtacgacctgaccagccaagcctttgccgtattcctgcctgtgaaatccgtcggcgtaatgggcgacggacgcacatacgactacgtcgttgccttgcgcgccgtcatcaccagcgactttatgaccgcgcattgggctgagttgccttactcactgctcagacgcgtgtccaaccgcatcatcaacgaagtcaaaggcatcaaccgcgtggtgtacgatgtcagcggcaaaccgcctgccaccatcgagtgggaataa

SEQ ID NO: 66569 - DNA, 423 bp, Neisseria meningitidis
atgaaaatcaccaaaatcttcaccttcgactcctcgcatatgctcgacgggcatgacggcaaatgccaaaacctgcacggacatacctacaaactcgaaatcaccgtttcagacggcattatcaaaggcggcgcgaaagacggtatggtgatggactttaccgacttgaaagccattgtcaaacaacacattaccgaccccttcgaccacgccttcatctaccacggcggcaacagccgcgaatctcaaatcgccgcactcttggaaggctggaacatgaaaaccctgcgcctgccctgccgcaccactgccgaaaatatggcggtcgaaatgtacgaccgtctgaaaaacgcggggctgaacgtgtgccgcgtcaaattgtgggaaacgccgacatcgtgtgcggagtatgaaggggagtag

SEQ ID NO: 66570 - DNA, 969 bp, Neisseria meningitidis
atgaacgagaaaaccatcatccttgccaatccgcgcggcttctgcgctggtgtggatcgggcaatcagtattgtcgaacgtgctttggaagagttcggcgcgccgatttatgtgcgccacgaagtcgttcacaacaaattcgtcgtggacaacctgcgtgaaaaaggtgcggtgtttattgaagacttggcggaagtgccgccgggcgcgacactggtttattcggcacacggcgtatcgaaggcggtgcggcaagaagcggcggagcgcggtttccgcgtgtttgatgcgacttgcccgctggtgacgaaagtgcataaggaagtcgcccgactggatgcccaagactgtgaaatcatcatgatcgggcataaggggcacgtcgaggttgaaggaacgatggggcagcttgcgccgggcaaaatgcttttggtcgaaacggtcggagatgtggcaaaactcgaaattaaaaaccccgacaaactcgcctatgtcagccaaaccacgctctctgtcgatgaaaccaaagacatcatcgccgcgctgaacgcgcgtttccccaatatccgcaatccgcacaaggaagacatctgctatgcgacgaccaaccggcaaaccgccgtcaaagagttggcagaacagtgcgacatcgtgattgtggtcggttcgcccaattcgtccaacagcaaccgcttgcgcgaagtggcggcatcgcgcggaatcgatgcgtatatggtggataatgcaggctacctgcaacgcgcatggtttgagggcaaaaacaaagtcggcgtaacggcaggcgcgtccgcgcccgaagtgttggtgcgggaagtactggcaaccatacgcggatgggggcacgaaaccgtacgcgaaggcgagggtgaggaagaaagcattgtgttcgtcctgcccaaagagctgcgccgcgagggcgaaaccaaacccgatttgtgcaaacgttga

SEQ ID NO: 66571 - DNA, 183 bp, Neisseria meningitidis
ttgtatgccggtcattatggcggaaataccgtttgggaggcagccgcatcgcgtggaatcggcacggcagccgcatcgcgtggaatcggcacggcaggcgatgcgccgatgccttcgggcgtgaaggcggggcaatcggcagtttggaaaaaggcaatggaatctgtgggcagaagaagttaa

SEQ ID NO: 66572 - DNA, 303 bp, Neisseria meningitidis
gtggtgtacgttgaccgtcgccgaacagaacaggaaacgtttgattttccgcctacctaccggcatacggtgcggctggttacgctggtttgcgtgcaggctgctgccggtgcggacgaactggcggaagaaatgctgtccttgattgggcagttgtttgccgaacattccgatttgggtgttggtgatttggaaaatctggtgcctgatttgctgaatatcgattccgacgaaagcggcgaggccgttaccgtctattatcagcaaggatggcaggcaatttattttgatacggcagtctga

SEQ ID NO: 66573 - DNA, 2829 bp, Neisseria meningitidis
atgatggacgaaaaactcaatttctcttacctgttcggttcgaacgcaccctacattgaggaattgtacgaggcttttttggaaaaccccgatgcggttgatgaaaaatggaagcagtatttcaccgatttgagcaaacagccggggacggttgctgtcgatgtcgcacacacaccgattcgcgaatcatttgttactttggcgaaaaagaaaattgcatctgccgttgcgggcggtgcggatgaggcaatgctgaaaaagcaagtcagcgttttacggctgatttctgcctatcgtatccaaggcgtgggtgcagcccaacttgatccgctcaaacgtatccccccgcgcgatattgaagccctcgatccgaaattccacggtctgtctgatgccgatatggcgcttcaattcaatatgggcgagggcgattttgccaatcgcggcaaactgcctttgtcccaaatcatcagcaacctcaaacaaacctactgcggccacatcgcattggaatatatctatattcccaataccgaagagcgccgctgggtacgcaattattttgaaagcgtattgtccacaccgcattacaatgccgatcaaaaacgccgtatcttgaaagagatgactgctgccgagactttggaacgttatctgcataccaaatatgtcggtcagaaacgtttcggtgtcgaaggcggcgaaagcgcgattgccggtttgaactacctgattcaaaacgccggtaaagacggcgtggaagaagtcatcatcggtatggcgcaccgtggccgtctgaatgttttggtgaacattttgggtaaaaaacccggagatttgttcgctgagtttgaaggccgtgccgaaatcaaattgcctagcggcgacgtgaaataccacatgggcttcagctccgacatcgccactccacatggtccgatgcacgtttctttggcgttcaacccgtcacacttggaaatcgtcaatccggtagtggaaggttctgcacgcgccaagcaaaaacgtttgggcgaaaacggccgcgataaagtcttgcccgtattgattcacggcgactccgcatttatcggtttgggtgtcaaccaagcgacattcaacctgtctaaaacgcgcggttataccaccggcggtacggttcatatcgtcatcaacaatcaaatcggctttaccacttccgatatccgcgatacccgttcaaccgtacactgtaccgatatcgcaaaaatggtttccgctccggttatccatgtgaacggcgatgatcctgagcgtgtttgctttgccatccaagccgctttggattaccgcaaaaaattccataaagacatcgtgattgacgttgtctgctaccgtaaatggggtcacaacgagggcgatgatccgaccttgacccaaccgatgatgtacaaaaaagtatcgcaacaccccggtgcgcgtgctttgtacaccgagcaactgattgccgaaggcgtggtaacccaagccgaggcagacggttacatccaagcctaccgtgatgctttggacaaaggcgaacacgtcgagcaaacaacgttgagcaactttcaacgcacgcaaatcgactggagcaaataccaaggcaaagattggcgcgaacacatcgaaaccggtttgcctgccgcagatattgagcgtctcactgagaagtttaccgccgtaccggaaggctttgccctgcatccgactgcaaaacgtgtgattgaagcgcgtaaagccatggcatccggcaaacaggccatagattggggtatggccgaaaccttggcatacgccagcctcgtaaccaaaggtcatggcgtgcgtatctccggtgaggactccggccgcggtacgttctcgcaccgccacgccgtattgcacgatcaaaaacgcgaaaaatgggacgacggtacttatgttcctctgcgccatatgggcgaaggaatgggcgagttcctggttatcgactccattttgaacgaagaggccgtgatggcgttcgagtacggctttgcctgctccgcacctgacaagctgaccatttgggaagcgcaattcggcgatttcgccaacggcgcgcaagtgacgattgatcaattcctgtcttcaggcgaaaccaaatggggtcgcttgtgcggtctgaccaccatcctgccgcacggttacgacggtcaaggccctgagcactcttctgcacgcgtagaacgttggttgcaactgtgttctgagaacaatatgcaagtcatcatgccatctgaagcgtcgcaaatgttccacctcttgcaacgtcaagtcttaggttcataccgcaaaccgctagtgattttcatgtccaaacgcctgttgcgattcaaaggggcaatgagcccgctggaaaacttcaccgaaggttcgactttccgtccggttatcggcgataccgccgaacgcgcaagcaacgacagcgtgaaacgcgtggtattgtgtgccggtcaggtttactatgacttggaagccggtcgagccgaacgtaaactggaagatgatgtcgctattgtccgcgttgagcagctgtatccgttcccatacgacgaggttaaagccgaactggcgaaatatccgaacgcaaaatctgtggtttgggcacaagaagagccgaaaaaccaaggcgcgttctaccaaatccgccaccgcatcgaagacgttatcagcgaagagcaaaaactgtcttatgccggtcgtccaagcagcgcatcgcctgcagtgggctactcaagcaaacacattgctcaattgaaacaattggttgaagacgctttggcattgtaa

SEQ ID NO: 66574 - DNA, 525 bp, Neisseria meningitidis
atgtcattgaacaaagtcatcctcatcggccgcctcggacgcgatcccgaagtgcgctatatgcccaacggcgaggcggtgtgtaatttcagcgtcgccaccagcgaaacttggaacgaccgcaacggccaacgtgtagagcgcactgagtggcacaacatcacgatgtaccgcaaactggcggaaattgccgggcaatacctcaaaaaaggcgggctggtttatctggaaggcagaatccaaagccgcaaataccaaggcaaagacggcatcgaacgtaccgcttacgatattgtcgccaacgaaatgaaaatgttgggcgggcgcaatgaaaacagcggcggcgcgccttacgaggaaggttacggtcagagtcaggaggcttaccaacgccccgcgcagcaaagccggcagcccgcctccgacgcgccgtcccatccccaagaagcaccagccgcgccgcgccgccaacccgtgcctgccgccgccccggtcgaggacattgacgacgatatcccgttctga

SEQ ID NO: 66575 - DNA, 834 bp, Neisseria meningitidis
atggcaatcgttaaaatgaagccgacctctgcaggccgtcgcggcatggttcgcgtggtaacagaaggtttgcacaaaggtgcgccttatgcacctttgctcgaaaagaaaaattctactgccggtcgtaacagtaatggtcatatcaccacccgtcacaaaggcggcggtcataaacaccattaccgtgttgtagactttaaacgtaacaaagacggcattcctgctaaagtagagcgtatcgaatacgatcctaaccgtactgccttcatcgcactgttgtgctatgcagacggcgagcgtcgttacatcatcgctcctcgcggtattcaagtcggtgccgtattggtttccggtgctgaagctgccatcaaagtaggcaacaccctgccgatccgcaacattcccgttggtacgactatccactgtatcgaaatgaaacccggtaaaggtgctcaaatcgcacgttctgccggtgcttctgcggtattgctggctaaagaaggcgcgtacgctcaagtccgcctgcgctctggcgaagtccgtaaaatcaacgtagattgccgtgcaaccatcggtgaagtcggtaacgaagagcaaagcctgaaaaaaatcggtaaagccggtgccaatcgttggcgcggtattcgtccgactgtacgtggtgttgtcatgaaccctgtcgatcacccgcatggtggtggtgaaggccgtacgggcgaagctcgtgaaccggtcagtccatggggtactcctgctaaaggctaccgcactcgtaataacaaacgcacggataacatgattgttcgtcgccgttactcaaataaaggttaa

SEQ ID NO: 66576 - DNA, 1182 bp, Neisseria meningitidis
atgaaatgggcggctgttgcggcggtcgcggcggcagcggtttggggcggatggtcttatctgaagcccgaaccgcaggcttcttatattacggaaacggtcaggcgcggcgacatcagccggacggtttctgcaacaggggagatttcgccgtccaacctggtatcggtcggcgcgcaggcatcggggcagattaagaaactttatgtcaaactcgggcaacaggttaaaaagggcgatttgattgcggaaatcaattcgacctcgcagaccaatacgctcaatacggaaaaatccaaattggaaacgtatcaggcgaagctggtgtcggcacagattgcattgggcagcgcggagaagaaatataagcgtcaggcggcgttatggaaggaaaacgcgacttccaaagaggatttggaaagcgcgcaggatgcgtttgccgccgccaaagccaatgttgccgagctgaaggctttaatcagacagagcaaaatttccatcaataccgccgagtcggaattgggctacacgcgcattaccgcaacgatggacggcacggtggtggcgattctcgtggaagaggggcagactgtgaacgcggcgcagtccgcgccgacgattattcagcttgccaatttggatatgatgttgaacaaaatgcagattgccgagggcgatattaccaaggtgaaggcggggcaggatatttcgtttacgattttgtccgaaccggatacgccgattaaggcgaagctcgacagcgtcgaccccgggctgaccacgatgtcgtcgggcggctacaacagcagtacggatacggcttccaatgcggtctattattatgcccgttcgtttgtgccgaatccggacggcaaactcgccacggggatgacgacgcagaatacggttgaaatcgacggcgtgaaaaatgtgctgcttattccgtcgctgaccgtgaaaaatcgcggcggcaaggcgtttgtgcgcgtgttgggtgcggacggcaaggcggcggaacgcgaaatccggaccggtatgagagacagtatgaataccgaagtaaaaagcgggttgaaagagggggacaaagtggtcatctccgaaataaccgccgccgagcaacaggaaagcggcgaacgcgccctagcggcccgccgcgcgataaacgaatatgccgtctga

SEQ ID NO: 66577 - DNA, 369 bp, Neisseria meningitidis; identical to SEQ ID NO: 39395

SEQ ID NO: 66578 - DNA, 564 bp, Neisseria meningitidis
atgcgccatttggaaaacaacggctatgcgaacgttgccggattggaacgcatcctcgccgtcaaaaccgacaattacaaagaaaaagaaaacctgctccatgaaatttttagtaaaagcaggataggcgataccgaattgttcgccgtggacgagaatcttgtaaaacgtttgtttttatcgcttcgcggcgaaatcgtgttcccgaaaaacgaaacggcggaatcggaatttgaaaaaagcgtccacgaacgcaggcaggaagggaatgccggatccggccgcaaacaactgcttgatttggtacggcgcggacaccgggaatacccttacgcgctgccccggcttttggcgggcgcggcatcctacaagccgaaaaaatcgaaaatccgcctttttaaagaagcatatttacgcaaaagcggtacgaggctgaccgacgaaattgcagacggcatccatatttacacctgtttttcgcgggcggatttggaaaaagcctattccgaatatttggaacttttcaaatccgaatcggatgccgaaggcagaaaaccacggtaa

SEQ ID NO: 66579 - DNA, 1749 bp, Neisseria meningitidis; identical to SEQ ID NO: 44747

SEQ ID NO: 66580 - DNA, 672 bp, Neisseria meningitidis; identical to SEQ ID NO: 37569

SEQ ID NO: 66581 - DNA, 723 bp, Neisseria meningitidis; identical to SEQ ID NO: 42576

SEQ ID NO: 66582 - DNA, 1230 bp, Neisseria meningitidis
atggcgttcggcaaatccttatttcatgcgatcggccgcgtcagcctggtcaggcagattgccgccggtttggcgttgggcatcgtaatcggttcggtttccccgcaactgggcttggcggcaggcttgttcggcagcctgtttgtcggcgcgctcaaagcggtcgcgccggttttggtatttattttggtggcggccacaatcgcgcagcaccaaaaaggcaacaaggcgcatatcaggccgattatcgtcctttacctcatcggtacgttttccgcagccctgaccgccgtcatcgccggtatggttttcccgacgcacattgttttggcgggcgcgggcgatgtgtccgccgcgccgccttccggcattgtggaagtattgaaatcgctgctgatgaacctggtcgccaacccgattaacgcgattgccaatgccaactatatcggcattttggcttgggctttggttttgggcgcggcgttgcggaatcacggttcggacgttacgcggcaggtcgttgccgatttggcggaagcggtttccaccgtcgtgaaatggattatccgttttgcccctttgggcattttcgggctggtgtcgtccacaatcgcggagacgggtttcggcgcgctggcgggttatgcgaagctgcttgcggtactgttgggctgtatggcgtttatcgcgctggtggtcaatcccgccatcgtgtggtggaaaatccgccgcaacccttatccgctggtgtttacctgcctgcgcgaaagcggcgtgtatgccttctttacccgttcttccgccgccaatatccccgtgaatatggctttggcgaaaaaactggggctgcacgaagacacttattcgatttccatcccgttgggggcgactgtcaatatgggcggcgcggcgattacgattaccgttttggctatggcggcggcgtacacccaaggcatacaggttgattttgccaccgcgctgctgttgagcctggtggcgacggtcagcgcgtgcggtgcgtccggtgtggcgggcggttcgctgctgctgattccgctggcgtgcagcctgttcggcatcagcaacgatgtcgccatgcaggtggttgccgtcggctttatcatcggcgtgattcaggattcggcggaaacggcgttgaattcttcaaccgatgttttgtttaccgctgccgccgatttgggtcgacagagaaaccgggcggaataa

SEQ ID NO: 66583 - DNA, 480 bp, Neisseria meningitidis; identical to SEQ ID NO: 38443

SEQ ID NO: 66584 - DNA, 1452 bp, Neisseria meningitidis
atgccgctgctgtctgtcgagttcgcactgttctttctcgccttcctgccgatttactggggcttggcgaaatacccgtccgtccaaaacctgctgcttttggctgccggtatgggctggctctaccatatcggccccgtatttgcggcaatcgtcgtcctttattcctcctgcgtgtaccttttgggcgaactgctccgttccgatcgcgaaaatacgcgccgcttttggctggggtgcggcattgccgtctcgctgaccgtcttgggctttttcaaatatttcgattttttccgcccgctgattgcacaatatgccggacaaggcggcgcaatcgacatcctgatgccgctggggctttcgtattacaccttccagtcaatcgcctatttggtttactgcttccgtgcgccgcacgccgcgcgtttcgagtggcacgaactgctgctgcacctgagttttttccccaccgttacctccggcccgattatccgcgccgccgcattcaaaagcgcggacggcgagcaggcgggcgcattggcgcaaatccgtacccaccaaccacgctcacccgtccgccccgcactcgccgtttccctgattctgctgggtattgccaaaaaatggtggctggcggggatgctcgcagaaaactgggtgtcgcccgtatttgaaaatcccgcccaattcgacggctggggcgtattggcgggcgtgtacggctataccttccaactctttttagacttttccggatattccgacttggttatcggaatggcaatgctgctgggcttccggctgcccaaaaacttctccgcaccgcttcgtgccgcgaatatccgcgcattttgggacaaatggcacatcagcctttccacctggatacgcgactacatctacatccccttgggcggcagcaaaaaaggctttttgcggacacagttcaacctgatggcggcaatggtgctctcaggcatctggcacggctacggctggaacttcctcatttggggtgcactacacggcacggcgctggtgctgctcaacacgggcgaccgctatttcggacgcaacgcactatgccgtctgaaataccttgcgccgctctcgtggtttgttaccttccatttcgtctgcctgaccttcgtcgtcttcaataccgcaaaaccccgacgatgccggcgcggttttcaatgccctctttgccaatgccaacggctggaatgcgccgcaacaggcggatatgctgctgcttgcctcgtttgcatccgtgatgctgctctacccttacctgcaacgcgctttcgacggcgcggtcaaaggtttggaaaaaatcccgatgtggctgtggtttatccccgtttccgccgtcctgctgctgattatcgtattggccccctcggggatacccggctttatttatgccaatttttaagggtttggacatga

SEQ ID NO: 66585 - DNA, 918 bp, Neisseria meningitidis; identical to SEQ ID NO: 37376

SEQ ID NO: 66586 - DNA, 351 bp, Neisseria meningitidis; identical to SEQ ID NO: 54616

SEQ ID NO: 66587 - DNA, 1218 bp, Neisseria meningitidis
atggcgttaatcgtacacaaatacggcggcacatccgtaggctcgcccgaacgcattaaaaacgtagccaaacgtgtcgccaaagcccgcgccgaaggacacgacatcgtcgtcgtcgtatccgccatgagcggcgaaaccaaccgcctggtcgcgttggcgcacgaaatgcaggagcatcccgatccgcgcgaattggacgtggttttgtccaccggcgaacaagtcaccatcggtcttttggcgatggcattgaaagacatcggcgtggaagccaaaagctacaccggctggcaggtcgccctcaaaaccgataccgcccacaccaaagcccgcatcgaaagcattgatgacgaaaaaatgcgtgccgaccttgccgccggcaaagtcgtcatcgtcgccggtttccaaggcatcagcagcgaaggcgacatttccacgctcggacgcggcggctccgacacctccgccgttgcgcttgccgcagccctcaaagcggacgaatgccaaatctataccgacgtagacggcgtttacacaaccgacccccgcgtcgtacccgaagcgcaccgcatggatacggttacatttgaagaaatgatcgaactggcaagcctcggttcgaaagttttgcaaatccgttcagtagaattcgccggaaaatacaaagtgcgcctgcgcgtactgagcagcctgcaagacggcggcaatggcaccttaattacctttgaagaggacgacaacatggaaagagctgccgtaaccggtatcgcattcgataaaaaccaagcccgcatcaacgtgcgcggcgtacccgacaaacccggcgttgcctatcagattttaggcgcgatcgccgatgccaacatcgaagtcgatatgattatccaaaatgtcggcagcgaaggcacaaccgatttttcctttaccgtaccgcgcggcgattacaagcagactttggaaatcctgtcggaacgccaagacagtatcggcgcggcttctattgatggcgacgacaccgtatgcaaagtctccgcagtcggtttgggtatgcgttcgcacgtcggtgtagccgccaaaatcttccgcacgctcgccgaagagggtatcaacatccaaatgatttccacctccgaaatcaaagtttccgtattgattgatgaaaaatacatggaactggcaaccagggtattgcataaagcctttaatttgggctga

SEQ ID NO: 66588 - DNA, 273 bp, Neisseria meningitidis; identical to SEQ ID NO: 41867

SEQ ID NO: 66589 - DNA, 825 bp, Neisseria meningitidis; identical to SEQ ID NO: 39236

SEQ ID NO: 66590 - DNA, 267 bp, Neisseria meningitidis
atgcaagttttgaagaaagttgattggaagatgtttgtggcgcgctctttttggcgttgggtgccggttggtttgacggtgggcgtgtggtgttttgtggcgggaatggcgttgcattcctgcgcgaaagaacccgaaccggttgcgaaagagccgacgaaggttgaggcgatggaaagacaggcggatttggaggtcaaggtatgggaagggcaatacgagtcaatgagcgtcgaggaaaaaatgaaagggattgtttatgagtga

SEQ ID NO: 66591 - DNA, 642 bp, Neisseria meningitidis
atggcagtgaaattaccgaacggtgcgaccgttcacattgcgaccgctttggcggcggagaaaaaagctacggtggcaactaatgctgccgaatgcgtcctgacggtaacaggacacgggtttgccaacggcgatttggttttgtttaaaagcggctggggaaagttgaatgaacgcattttccagattggcgatgtcaaaaccgatacattcaagctgaccggcattgatacttccaatgcagatgagtttccggcaggcagcggtattggtgctgttcagaaaattaccgattgggtgcaagtttcgcaaattgtagaattttcgaccagtggcggcgagcagcaatatgtggattttggtttcctggaggacgattttgaccagcaaatcccatccacgaaatcagctatgtcaatgtcgattaagatcgctgacgatacttcgttgtccggctacaaggcggctgcaaaatgcagcgataaaggcggcaagtggcctttgaaagtggttttgaaaggtggtgggctgatttgctataacggttatcccagcatgaataaaacccccgaattggttcgtaaccaagtaatggcggtaacgttgtcctacgccatttccggcgaagtaaaccgttattga

SEQ ID NO: 66592 - DNA, 477 bp, Neisseria meningitidis
atgaaaacaaatttcaaacagaaaattatcgaacaggcacgcagcgaaggcttgcaggtaaccgctttgcgcgagcaggtattagatattgtcttgcagcaaagcggcgtgattaaagcctacaacgtcttgtcgcagatgcagcagcaaagcgagggcgtgcttgcaccgcctaccgcctaccgcgcccttgatttttgggcggagcagggcgttttgcacaaagtggcggcggtcaacggctatattttgtgcagccacgcgcagcacgagtgcgacgaccattgccacgaccacgaagaagccgaagcgcaccacagcgcgtttattttggtctgcaccgaatgcggcacggcggacgagcaaaccctcagccacgagtgggcggcactgcgcgcaggcgttgccgaaagcggctttgcgctgaaagaagaacacgttgttttaaccgggatttgtaaaaaatgtcagaagtga

SEQ ID NO: 66593 - DNA, 282 bp, Neisseria meningitidis
gtggattggatgggcagtctgttcctgccgggtggcgcactgttgtttctgagcgtggtttcgaccactttacccgcacgtttgggaatgcctttgctgctggtttctcccgccggcgtgttggacggggcggcggaagccttggcgattgcggcgttcctgatgctggtcgcgcgtccgccggcagtgttcggcggtttgtggaaattcaattacagcctgcgtgaaaaggcgtatatcagttggttgggtttggcggagccgtgccgatttcgccggtga

SEQ ID NO: 66594 - DNA, 510 bp, Neisseria meningitidis; identical to SEQ ID NO: 42226

SEQ ID NO: 66595 - DNA, 597 bp, Neisseria meningitidis
  misc_feature 574, 575, 576, 577, 578: 'n' is a, c, g or t
atgagcaccttcttccggcaaaccgcacaagccatgattgccaaacacatcgaccgtttcccgctattgaagttggaccaggtgattgattggcagccgatcgaacagtacctgaaccgtcaaaaaacccgttaccttcgagaccaccgcggccgtcccgcctacccgctgttgtccatgttcaaagccgtcctgctcggacaatggcacagcctctccgatcccgaactcgaacacagcctcatcacccgcatcgatttcaacctgttttgccgttttgacgaactgagcatccccgattacagcaccttatgccgctaccgcaactggctggcgcaagacgacaccctgtccgaactgttggaactgattaactgccaactgaccgaaaaaggcttaaaagtagagaaagcatccgccgccgtcgttgacgccaccattattcagaccgagacctttgcaaaattcctttccctcccgacagccgaaaccccaacacaggttttcgtctattttcgccccaaataccgcctaattttacccaaatacccccttaatcctcccggatacccgnnnnncacacacttaattaattaa

SEQ ID NO: 66596 - DNA, 1059 bp, Neisseria meningitidis; identical to SEQ ID NO: 42848

SEQ ID NO: 66597 - DNA, 561 bp, Neisseria meningitidis
atgaacagactgctactgctgtctgccgccgtcctgctgactgcctgcggcagcggcgaaaccgataaaatcggacgggcaagtaccgttttcaacatgctgggcaaaaacgaccgtatcgaagtggaaggattcgacgatcccgacgttcaaggggttgcctgttatatttcgtatgcaaaaaaaggcggcttgaaggaaatggtcaatttggaagaggatgcgtccgacgcatcggtttcgtgcgttcagacggcatcttcgatttcttttgacgaaaccgccgtgcgcaaaccgaaagaagttttcaaacacggtgcgagcttcgcgttcaagagccggcagattgtccgttattacgaccccaaacgcaaaaccttcgcctatttggtgtacagcgataaaatcatccaaggctcgccgaaaaattccttaagcgcggtttcctgtttcggcggcggcataccgcaaaccgatggggtgcaagccgatacttccggcaacctgcttgccggcgcctgcatgatttccaacccgatagaaaatcccgacaaacgctga

SEQ ID NO: 66598 - DNA, 660 bp, Neisseria meningitidis
ttgtgtgcgtcctgtttgaatgttaacaaaatcgttataatcgcaacattctaccgcaatcctgaaaggccgtctgaaatgaggaacgaggaaaaacacgccctgcgccgcgaattacgcgggtggcgttcgcaaatggggtgggacgtgcgggcggcggcaacggtaaaaattaaccgcctgctcaaacgttatatcaagcacggtcggaaaatcggcgtgtattggccgatgggcaaggaattgcgtttggacggctttgtccgcgcggcgcaaaaacgcggcgcaaaactttatctgccttatatcgaaccgcgttcgctgcggatgtggtttacgccgtatcctgaaagcggaatggaacgggagcgcatacggggcagggcgaggttgaacgtgccgcagtttgcagggcgcaaaatccgcgtgcacggtttgtcggtattgctcgttccgcttgtcggcatagaccgcgaaggctaccgtttggggcaggcaggcggctattacgatgcgacgcttgcagcgatgaaataccgtttgcaggcaaaaaccgtgggcgtgggctttgcctgccagttggtggacagactgtcggtcgaggcgcacgacctgccgctggacggttttgtgtcggaggcggggatattgtgtttttag

SEQ ID NO: 66599 - DNA, 1008 bp, Neisseria meningitidis
atgtattcgaataatgctataactaataatagaaacaatattacgctaggtgcgtatagggatgctattatttccatattttctgatgaaaatgtggttagggcgattggtacgattaactcaatgtacgaagaatatttgaccctttcgcacaagatagatcaacgagcatttttaagggagggtgagcgtctgtctgctaaggcaagagaattccaacgcacagcagaagaggcacaaaaaagcttaaaagaaggaattggaagagctgctagtaaatttcgtggtaattcaaaggaggcatttgttgcaagaaaagtacaaagtgatttgcaaaaagcattgaatgctagcaactataacaagcagcaatatgcaagacgtgcggcaacagcgttagagaatgcttcaaaatcaaaagttatggcagcgaatttgggtaagtttacttatggggcaactgttgccatgggaactttgagtatgggaagtgcttggtggaaagccttggatgaagaaggaaattggagtgatgttggtctctcatcagcttcttttttgggtgggctaatgggcttccaatggggtgcggctttgggtgttggggcttttggtttacttactggtggcgcaggttggctagtagttggaactataattggaggtggcgcaggagcttggtggggatcattaggagctgaaaaagcttggagatggtttgaagatttcttaaatcttaaccgcagcgacaaattccacgtaaccgacccccttgccctagatctagatggcgacagtatagaaaccgttgccaccaaaggccttgcaggtgcattgttcgaccaccgcagccaaggtatccgcaccgccacgggctggattgctgcatatgacggttttcctgtgcgcaaattaaacagtaacgggggcattattagcacgacagataccatattccaatctttgcatacatggcttgatcatcaaccaaatgatacatgccattga

SEQ ID NO: 66600 - DNA, 303 bp, Neisseria meningitidis; identical to SEQ ID NO: 37654

SEQ ID NO: 66601 - DNA, 1296 bp, Neisseria meningitidis; identical to SEQ ID NO: 36939

SEQ ID NO: 66602 - DNA, 756 bp, Neisseria meningitidis; identical to SEQ ID NO: 44544

SEQ ID NO: 66603 - DNA, 1371 bp, Neisseria meningitidis
atgccgcaaaacactttaaacatcgtcatcctcgccgccggcaaaggcacgcgcatgtattccaaaatgcccaaggttttgcacgaaatcggcggcgaaacaatgctcgggcgcgttatcaacaccgccgccgcgctgaatccgcaaaacatctgcgtcgtcgtcggccacggcaaagaccaagttttggacaccgtcaaacgcgatgtcgtctgggtcgaacaaaccgaacagctcggtaccggccacgccgtcaaaaccgccctgccccacctttccgccgaaggccgcacgctggtgttgtacggcgacgttcctttaattgacgttgaaaccctcgaaaccctgctcgaagccgcaggcaacgaagtcggcctgttgaccgacgttcccgccgacccgacaggcttgggccgcatcatccgcgacagcagcggcagcgtaaccgccattgtcgaagaaaaagacgcaagtaccgcccaaaaagccgtgaaagaaaccaacacaggcattctcgtcctgcccaacgccaaactggaaaactggctgaacagcctttccagcaacaatgcccaaggcgaatactatctgaccgacctcatcgccaaagccgtttcagacggcatcaaagtccgccccgtccgagtgcgcgcctctcacctcgccgccggcgtgaacaacaaacgccagctcgccgaactcgaacgcatcttccaaactgaacaggcgcaagaattgctcaaagcaggcgtaaccctgcgcgacccggcacgtttcgatttacgaggccgtctgaaacacgggcaagatgtcgtaattgatgtgaactgtatctttgaaggcaaaatcgaactcggcgacaacgtcgaaatcggtgccaactgcgtcatcaaaaacgctaaaatcggcgcaaacagcaaaatcgcccccttctcccacctcgaaggctgcgaagtcggcgaaaacaaccaaatcggcccctatgcccgcctgcgtccgcaagccaaactggctgacgatgtacacgtcggcaacttcgtcgaaatcaaaaacgccgccatcggcaaaggcaccaaagccaaccacctcacctacatcggcgatgccgaagtcggcagcaaaaccaacttcggcgcaggtacgattattgccaactacgacggcgtgcacaaacacaaaaccgtcatcggcgacgaagtgcgcatcggttcaaactgcgtcttggtctcccccgtcaaaatcggcaacaaagtaaccaccggcgcgggcagcacgattacccgcaatgtcgaagacggcaaactcgccctcgcccgctcccgccaaaccatcatcgacggctgggtgaggcctgaaaaaaacaaacaataa

SEQ ID NO: 66604 - DNA, 897 bp, Neisseria meningitidis
atggagtctgaaaacattatttccgccgccgacaaagcgcgtatccttgccgaagcgctgccttacatccgccggttttccggttcggtcgccgtcatcaagtacggcggcaacgcgatgaccgaacctgccttgaaagaagggtttgcccgcgatgtcgtgctgctgaagctggtcggcattcatcccgtcatcgttcacggcggcgggccgcagatcaatgcgatgcttgaaaaagtcggcaaaaagggtgagtttgtccaaggaatgcgcgttaccgacaaagaggcgatggatattgtcgaaatggtgttgggcgggcatgtcaataaagaaatcgtgtcgatgattaacacatatggcggacacgcggtcggcgtgagcggacgcgacgatcatttcattaaggcgaagaaacttttgatcgatacgcccgaacagaatggcgtggacatcggacaggtcggtacggtggaaagcatcgataccggtttggttaaagggctgatagaacgcggctgcattcccgtcgtcgcccccgtcggcgtaggtgaaaaaggcgaagcgttcaacatcaacgccgatttggtggcaggcaaattggcggaagaattgaacgctgaaaaactcttgatgatgacgaatatcgccggtgtgatggacaaaacgggcaatctgctgaccaaactcacgccgaaacggattgatgaactgattgccgacggcacgctgtatggcggtatgctgccgaaaatcgcttctgcggtcgaagccgccgtcaacggtgtgaaagccacgcatatcatcgacggcaggttgcccaacgcgcttttgctggaaatctttaccgatgccggtatcggttcgatgattttgggcggtggggaagatgcctga

SEQ ID NO: 66605 - DNA, 714 bp, Neisseria meningitidis; identical to SEQ ID NO: 63969

SEQ ID NO: 66606 - DNA, 1272 bp, Neisseria meningitidis
gtgggcgacggtgtccacactctgctgctcgacaggccgattgtgcgcgacggcaggaaattcgacgcgccgcttttgtggatggtggtgctgatgacggcgttcagcctgctgatgatttattcggcttctgtgtatttggcatcgaaggaaggcggcgatcagtttttctatttgaccagacaggcggggttcgtcgttgccggcttgatagcgagcggttttttatggtttctttgcaggatgaggacatggcggcggcttgtgccgtggatttttgccctatccggcctgttgctggtagtcgtattgattgccgggcgcgaaatcaatggcgcgacccgttggatacctttgggtccgttgaatttccagccgaccgagctgttcaagctggcggtcatcctttatttggcaagcctgttcacgcgccgtgaagaagtgttgcgcagcatggaaagtttgggttggcagtcgatttggcgggggacggccaatctgatcatgtccgccaccaatccgcaggcacgtcgtgaaacattagaaatgtacggccgtttccgggcgatcatcctgccgattatgctggtggcgttcggtttggtgctgataatggtacagccggatttcggttcgtttgtcgtcattaccgtcattgccgttggaatgctgtttttggcaggattgccgtggaaatattttttcgtcctggtaggcagcgtcttgggcgggatggtgctgatgattaccgccgctccctaccgtgtgcagcgggtagtggcatttttggacccgtggaaagacccgcagggtgccggctaccagcttacccactctctgatggcaatcgggcgcggagagtggttcggtatgggtttgggtgcgagtttgagcaaacgcggctttctgccggaagcgcataccgattttatttttgccatcatcgccgaagaattcggtttcttcggtatgtgcgtgctgatattctgttacggctggctggtggtgcgggcgttttccatcggcaagcagtcgcgcgatttgggtttgactttcaacgcctatatcgcttcgggtatcggcatttggatcggtatccaaagtttcttcaatatcggtgtgaacatcggtgctttgccgaccaaaggtctgacgctgccgttgatgtcctatggcggttcgtcagtctttttcatgctgatcagcatgatgctgctgttgcgtatagattatgaaaaccgccggaaaatgcgcggttaccgggtggagtaa

SEQ ID NO: 66607 - DNA, 951 bp, Neisseria meningitidis
atgaaattacaacaattgaaatacgccttagaagtttaccagcacaacctgaacgtttccgaagcggccgaagccttgtttacttcgcaacccggcatctccaaacaaatcaaattgctggaagaagaaatcggcattcagatttttatccgcagcggcaagcgcgtggtttcggtctcgcagccgggcaaggtggttttggatattgcggaacgtattttacgcgatgtacagaacattaaaaatatcggcagcgagtttaccggacaggacagcggttcgctgacggttgccacgacgcatactcaggcacgctatgccctacccttgattgttgccgattttgtgaaacgctatccgaaagtcaacctgaccatcaaacaggggagccctgccgccatcgcacgtatggttacctcaggcgaggcggacttggcgattgttacggaacggatagacgaccatcccgaactgggaaaacttccctgctatgactggactcatgcggttatcgtgccgaacgaccatccgctgctcgaatgcaggaatcccctccgtattgaagatttggcgaagtttccactaattacctatgaatttgcattcaacacgggcagcagcatcgcgcgggcattttccaaagcccgtttggaacagccggatgtcgcattggcggcggcggatacggacgtattgaagacttatgtgcgcttgggtttgggcgtgggactgatggcgaaaatggcgtacaacccggatacggacggcgatttgcagcttgtggatgcggcacacctgttcgagccgtcgccgacgtggattgctttgcgcagcgatacttatttgcgcggatatgcctacgactttatccaagcgtttgcgccgcacctgacacgcgagaaggtggataggattctgtacacgcccatcagcgaggatttttcgatttag

SEQ ID NO: 66608 - DNA, 450 bp, Neisseria meningitidis
atgagccttatcggcgaaattttgcctttgtcccatattgttttggatatggaggtgggcagtaaaaaaaggctgtttgaggaagcgggcctgcttttggaacgcgaatcctcattgtcccatgctgatgttttcgaatgtctttttgcccgtgaaaaactcggttcgaccggtttggggcagggcgttgccatcccgcacggccgtcatgccggcgtgaagcaggcgacgggcgcgttcatccgcacgcgcgaacccgtcggatttgacgcaccggacggcaagccggtttccctgatttttatcttgctggtgccggaaaacgcaactggcgaacatttggaagtcttatccaaactggccggcaagttttcccaaaaaagcatccgcgaatcgctgatgacggtttcttctgcggaagaagcccgcgccattttgactgaagaataa

SEQ ID NO: 66609 - DNA, 432 bp, Neisseria meningitidis
  misc_feature 4, 5, 6, 7, 8: 'n' is a, c, g or t
gtgnnnnnaaccggcgcggatttggttgtcaacgccgccaaagaagacgctgccaaagtgattcaggaaaaaaccggcggcgcacacgctgcggtcgtaaccgccgtatctgctgccgcattcaactctgccgtgaattgcgtccgcgcaggcggacgtgtggttgccatcgggctgccgccggaatcgatggatttgtccatcccgcgtttggttttggacggcatcgaagtggtcggctctttggtcggcacgcgcaaagatttggaagaagccttccaattcggcgcggaaggtttggttgtgccgaaagtccaactgcgtgctttggatgaagcacccgccattttccaagaaatgcgcgaaggcaaaatcaccggtcgtatggtaatcgatatgaaaaaagaatgcggctgcggccaccaccactga

SEQ ID NO: 66610 - DNA, 285 bp, Neisseria meningitidis
ttgaaattagatcccaaacgttcaggcaaataccacgtttacgaccccctcgccctaaatctagacggcgacggtatagaaactgtcgctgccaaaggcttttcaggcagcttatttgatcacaccaacaacggcatccgcaccgccacgggctggattgctgcatatgacggttttcctgtgcgcaaattaaacagtaacgggggcattattagcacgacagataccatattccaatctttgcatacatggcttgatcatcaaccaaatgatacatgccattga

SEQ ID NO: 66611 - DNA, 1977 bp, Neisseria meningitidis
atgtccaaactcaaaaccatcgctctgaccgcatcaggtctgtccgtttgtccgggtttcctatacgcccaaaacacctcatcacaccaaatcggtttggcgattatgcgcttaaactcttcaatactcgacctgcccccgacaaaacaatatttccaatccggcagcctgtggagcgagctgcgccaaggcttccggatgggcgaagtcaatcccgaactggtacgccgccacgaaagcaaattcatcgcaagccacagctatttcaacagggtcatcaaccggagtagaccctatatgtaccatatcgccaacgaagtcaaaaaacgcaatatgcccgccgaagccgccctgcttcccttcatcgaaagcgcgttcgtcaccaaagccaaatcacacgtcggcgcatcgggcctgtggcagttcatgcccgctaccggcaggcattacggcctggaaaaaacaccggtttacgacggcaggcacgacgtttacgccgccaccgatgccgcactcaactatctgcaatacctctatggactgttcggcgactggccgcttgcctttgccgcctacaactggggtgaaggcaacgtcggacgcgccatcaaccgcgcccgcgcccaagggctcgaaccgacctacgaaaacctgcgtatgcccaacgaaacgcgcaactatgtccccaagctgctcgccgtgcgcaacattattgccactccccaatctttcggcatgaatatcagcgacatagacaacaaaccctattttcaggcagtcgaaccggatcgtccgctcgacaacgaagccatcgcccggcttgccggcatcacgcaaagcgagctgctcgccctaaaccccgcattcaacgtccccgcgtttatccccaaaagcaaacgcaaactgctgcttcctgtcgcgtccgtacaaaccttccaaagcaactacctcaacgccgcacccgacagcctgttttcatgggaagtctatacgcctgccgccaaaaccagcctgtccgacatctcgacggcaaccggcatgagcattgccgacatcaaacgcctcaacaacctgaacggcaaccttgtcaacgcaggacgcagcatccttgtcgccaagaacggcaaaacccttcatacggcatcggaatccgtcgtttccatcgacatcgacaatacgcccgacacctaccgttccaatatgccggcaggcacggtgaacgtcggcattgcccgaatccgacccgccgccgcacagacagcggacattaccgtcgcacctttgccgcagaaaaccgtccgtacggaacccgatccccttgtccgtattgccgaacctgcccttgcgacagccgcagcgcaacctcaaaccgaaaaacagaccgccatgccgtctgaaacccaaaccgcaacactcgcgcagatcatcccccaaaacgacatgcaggcggcagacgaactcatgcagcttgttgcccgaaacaacctgcgccgacaggctgaagaaaccatctccgccgtcatcggcacgcctgacacagttgccgaacacaacatttcctcatctccgcaacataccgttgccgccgacggcaaacgccgggcacgtttggaaacgcgcgtagccaaagctgccgacggcgaagccgaaatctccccgctccatgccagcatccaccgcgttgtagaaggcgacaccctgttcaacattgccaaacgctacaacgtcagcgtagccgacctgattgtcgccaacaacatcaaaggcaacaccatccaaaaaggacaggtactccgcctggcgcaggcagcccctgcccaaacccgtattgaaaaagtatcctacaccgcgcgcaaaggcgacaccttcaaaagtatcgccgcgcgcttcaatatccatatcgacgacatccgccggctcaatcccaacctgaacaccatcaatccaggacagagggtcaaactgattggaagctga

SEQ ID NO: 66612 - DNA, 606 bp, Neisseria meningitidis
atgccctaccaaccgcccaccgaagcggaagaagtgttggaagccttggttaaccgccgcaaccaaccggcggatatgcggactgccgagaaaaaccgtctgcatcaggttcacgaaacgcaagtcggaagcgtcaaacaactgattgcccattttgaccggctgattgacgaattggacaaacaaatcgacgaccacacccacacgcattttgacggcaaagcccaagtggcagaacaaatcaaaggcatcggttcgataacgacggctacgctgatggcgatgctgcctgagttggggcggctgtcgcacaaacggatagcgagtttggtcggcattgccccgcacccgagggagagcggggaaaccaaattcaaaagccgctgctttggcggaaggtctgcggtgcttaaggcactgtatatggctaccgtggcagcgacacgttttgaaccgcttattcgggatttctaccaacgcctgctgtccgagggtaagccgtataaggttgccgttacggtatgtatgcgtaaactgctgacgatatcgaatgcccggatgcgtgattattttgccgaaaacgataccgccgaaaacggtatctaa

SEQ ID NO: 66613 - DNA, 729 bp, Neisseria meningitidis
atgatcaaattcaaaaacgtacacaaacatttcaaagacctgcacgtcatcaacggcgtgaacttggaaatcaaaaaaggcgaagtggtcgtcgtctgcgggccttcgggcagcggcaaatccacactcatccgcaccgtcaaccagcttgaaagcatcgaaagcggcgagatttgggtggacggcgtcaacgttgccgaccccaaaaccgatttgaacaaaatccgcgaagaagtcggctttgtatttcaaagtttcaacctctacccccacctgaccgtattggaaaacatcaccctcgcaccgatgaaggttaaaggtcaaaatgcggaacaggcggagaaaaaagcgatggaacttttggaacgcgtcggactggcgcacaaaaaagacgccttcccttcccaactttccggcggccagcagcaacgcgtggcgattgcacgcggtttggcgatggaaccgcgcgtaatgttgtttgacgaaccgacctccgcactcgaccccgaaatggtcggcgaagtgttgaaagtgatgaaagacttggcagaaagcggcatgaccatgatgtgcgtaacccacgaaatggggtttgcccgcgaagttgccgaccgcgtgattttcgtcgataaagggcaaatcctcgaagacgaaacgcccgaagcgttttttaccaacccgaaacacgaacgcgccaagcagttcctgcaacaggtcatgacccactga

SEQ ID NO: 66614 - DNA, 453 bp, Neisseria meningitidis
atgcaaattattctgttagaaaaaatcggcggtctgggcaacttgggcgacatcgtaaccgttaaaaacggttatgcccgcaacttcttgattcccgcaggtaaggcaaaacgtgcgaccgaagcgaatatgaaagagtttgaagcacgccgtgccgaattggaagccaaacaggccgaaattttggcagatgcccgagcccgtcaggaaaaattggacggtcaaactattaccgttgcacaaaaagccggtgtggacggccgcctgttcggttccgttaccaatgccgacattgctgctgcaatcgttgccgccggcatcgaagccgtgaaagcaaatgtacgtctgccgaacggtcctctgaaagccgttggcgagtacgaagtggaagtggctttgcacactgatgccgttgctaaaattaccgttgccgtcgttgccgtagccgagtaa

SEQ ID NO: 66615 - DNA, 1785 bp, Neisseria meningitidis
atggaactgatgactgttttgctgcctttggcggcgttggtgtcgggcgtgttgtttacatggttgctgatgaagggcaggtttcagggcgagtttgccggtttgaacgcgcacctggcggaaaaggcggcaagatgtgattttgtcgaacaggcgcacggcaaaaccgtgtcggaattggcggtgttggacgggaaatatcggcatttgcaggacgaaaattatgctttgggcaaccgtttttccgcagccgaaaagcagattgcccatttgcaggaaaaagaggcggagtcggcgcggctgaagcagtcgtatatcgagttgcaggaaaaggcacagggtttggcggttgaaaacgaacgtttggcaacgcagctcggacaggaacggaaggcgtttgccgaccaatatgccttggaacgccaaatccgccaaagaatcgaaaccgatttggaagaaagccgccaaactgtccgcgacgtgcaaaacgacctttccgatgtgggcaaccgttttgccgcagccgaaaaacagattgcccatttgcaggaaaaagaggcggaagcggagcggttgaggcagtcgcataccgagttgcaggaaaaggcacagggtttggcggttgaaaacgaacgtttggcaacgcaaatcgaacaggaacgccttgcttctgaagagaagctgtccttgctgggcgaggcgcgcaaaagtttgagcgatcagtttcaaaatcttgccaacacgattttggaagaaaaaagccgccgttttaccgagcagaaccgcgagcagctccatcaggttttgaacccgttgaacgaacgcatccacggtttcggcgagttggtcaagcaaacctatgataaagaatcgcgcgagcggctgacgttggaaaacgaattgaaacggcttcaaggattgaatgcgcagctgcacagcgaggcaaaggcactgaccaacgcgctgaccggtacgcagaacaaggttcagggcaattggggcgaaatgattctggaaacggttttggaaaattccggcctccagaaagggcgtgaatatgtggttcaggcggcatccgtccgaaaagaggaagacggcggcacgcgccgcctccagcccgacgttttggtcaacctgcccgacaacaagcagattgtgattgattccaaggtttcgctgacggcttatgtgcgctatacgcaggcggcggatgcggatgcggcggcacgcgaactggcggcacacgttgccagcatacgcgcgcatatgaaaggcttgtcgctgaaggattacaccgatttggaaggtgtgaacacattggatttcgtctttatgtttatccctgtcgaaccggcctacctgctggcgttgcagaatgacgcgggcttgttccaagaatgtttcgacaaacggattatgctggtcggccccagtacgctgctggcgactttgcggacggtggcgaatatttggcgcaacgaacagcaaaatcagaacgcactggcgattgcggacgaaggcggcaagctgtatgacaagtttgtcggctttgtacagacgctcgaaagtgtcggcaaaggcatcgatcaggcgcaaaacagctttcagacggcattcaagcaacttgccgaagggcgcgggaatctggtcggccgcgccgagaaactgcgtctgttgggtgtgaaggcaaacaagcagcttgcacgcgatttgaccgaacgtgccaatgaaacaacggcgttgtcggaatctttggaatatgcggcagaagatgaagcagtctga

SEQ ID NO: 66616 - DNA, 948 bp, Neisseria meningitidis
atggaatttttcattatcttgttggcagccgttgccgttttcggcttcaaatcctttgtcgtcatcccacagcaggaagtccacgttgtcgaaaggctggggcgtttccatcgcgccctgacggccggtttgaatattttgattccctttatcgaccgcgtcgcctaccgccattcgctgaaagaaatccctttagacgtacccagccaggtctgcatcacgcgcgacaatacgcagctgacggttgacggcatcatctatttccaagtaaccgaccccaaactcgcctcatacggttcgagcaactacattatggcgattacccagcttgcccaaacgacgctgcgttccgttatcgggcgtatggagttggacaaaacgtttgaagaacgcgacgaaatcaacagtatcgtcgtctccgccctcgatgaagccgccggagcttggggtgtgaaggttttgcgttatgaaattaaagacttggtgccgcctcaagaaatccttcgctcaatgcaggcgcaaattaccgccgaacgcgaaaaacgcgcccgtatcgccgaatccgaaggccgtaaaatcgaacaaatcaaccttgccagcggtcagcgcgaagccgaaatccaacaatccgaaggcgaggctcaggctgcggtcaatgcgtcaaatgccgagaaaatcgcccgcatcaaccgcgccaaaggcgaagcggaatccctgcgccttgttgccgaagccaatgccgaagccatccgtcaaattgccgccgcccttcaaacccaaggcggcgcggatgcggtcaatctgaagattgcggaacaatacgtcgccgcgttcaacaatcttgccaaagaaagcaatacgctgattatgcccgccaatgttgccgacatcggcagcctgatttctgccggtatgaaaattatcgacagcagcaaaaccgccaaataa

SEQ ID NO: 66617 - DNA, 849 bp, Neisseria meningitidis
atgttaagcaaaatcagcgaatcactggcaaacctttccggtgcggaacgcaaagtcgccgaatgtgcattggcggaacccaaatggttcgttcatgccgccgttgccgaaattgccgaacgtgcgtccgtcagccagccgaccgtcatccgattctgccgcagcttgggttataaagggctgcccgagttcaagctcgccttgtccgccagcatcggtcatgagggtatgccctatgtccacgaagaactcaatgccgacgacgatatggcaagcgtggtcgagaaagtgttgggcaatgccgccgcctcgctgttgggcgaacgccgcttcctgaaagagtcggagctggaaaacgccattgccacgctgatgcacgcccgtcgcgtcgagttttacggtgtcggcaattccggtatcgttgcgcaggacgcgcaacacaagtttttccgtttcggaatgtccacggtcgcctatgtcgatacgcacacgcagctgatggcagcatccgttttgagcgatcaggatgttttggttgccatttccaacacgggttcgtctatcgaacttttggatgcggtcagcatcgccaaagaaaacggcgcgtccgtcatcgcactgacccgcaacgattcgcctctggcgcaacttgccgactgcgtgttgagcgttgccacacaggaaaatgccgaactctacacgcccatggtttcccgcctcttgcagcttgccgtcatcgacatccttgccatcggacttgccctgcgcttgggcgatgctgccagcctgcaattgcagaaaagcaaaaaaagcatacacaacaagcacatcgattacgacaaagattga

SEQ ID NO: 66618 - DNA, 888 bp, Neisseria meningitidis
atgtacacaggacgttttgcccccagcccgaccgggctgctccacatcggctcgctgctgaccgccgccgcttcctatgccgatgcacgctcaaacggcggcaaatggctggtccgcatggaagacctcgatccgccgcgcgaaatgccgggggcggcaagccatatcctgcacacgcttgaggcattcggattcgagtgggacggagaagtcgcctatcagagccgccgttacgccctgtatgaagaaacactatgccgcctgaaaaccgccggactggtctatccctgccattgcagccgcaaagactggcagaccggggcaaggcggggcgcagacgggttcgtctataacggacgctgccgcaatccgcagcaacgccctgcactgcaaggcaaacagccggcgtggcgcatccgcgtccccgaccgcgacatcggcttttcagacggcatcgtcggcggttacgcccaaaacctcgcccgcgacatcggcgatttcgtcctgcttcgtgcagacggttactgggcataccaactcgccgtcgttgccgacgatgccgaacagggcgttacccacatcgtccgcggacaagacctgcttgtttctacgccgcgccaaatctatttgcagcagtgtttgcacgttccgacaccgcaatatgcccacctgccgctgctgaccaacgcacaagggcagaaatggtcgaaacagacgctcgcacccgcattggatttaaaccgccgcgaacaactcctccgccaagtgttccgttacctcaacctgcccgaagcaccggaagccgaccgccctgccgaactgctcgactgggcggtggcacactgggatatgggcaaagtgccgaaacacgccattaccgccccctaa

SEQ ID NO: 66619 - DNA, 858 bp, Neisseria meningitidis; identical to SEQ ID NO: 42902

SEQ ID NO: 66620 - DNA, 318 bp, Neisseria meningitidis; identical to SEQ ID NO: 51540

SEQ ID NO: 66621 - DNA, 432 bp, Neisseria meningitidis
atggatatccaaaccatcctcgaaaaaaccctgcccggcctgggctacgaactggtcgatttcgaactgaccgcgcaaggaacattgcgcgtgttcatcgacaaagaaggcggcattaccgtcgaagactgcgcaaccgtcagcaaccacttgagccgcgtcttcatggttgaagacatcgactacaaaaacctggaaatttccagccccggactcgaccgccccttgaaaaaagccgccgacttcgtgcgctttgccggtcagaatgccaaaatcaaaacccgcctgccgatagacggtcaaaaaaactttatcggtaaaatcgaaggctgcgaaaacgacactgttaccgtttccttcgacggcaaaaccgtacaaatcgaattgggcaacatcgacaaagcccgcctgcgccccgaattcaaattctaa

SEQ ID NO: 66622 - DNA, 1266 bp, Neisseria meningitidis
atgttcagcttcttccgtcgcaagaaaaaacaggaaacgccggctctcgaggaggctcaaattcaggaaaccgcagcaaaaacagagtccgaaaccgatcaagtaattgaaaatattaaagaagatgctgaatctttagcagaaagcgtcaaagggcaggtcgaatcggctgttgaaaccgtcagcggtgcggttgaacaagtaaaggaagccgttgccgagatgctgtctgaagcagaggaagcggcggaaaaagcagcggaacaagtcgaagcggcaaaagaagccattgccgaaaccgtcggcgaggctgtcgggcaagttcaagaagccgttgcaacaactgaagaacacaagctcggttgggcggcgcgtttgaaacaaggtttgaccaaatcgcgcgacaaaatggcgaaatcgctggcgggcgtgttcggcggcggacaaatcgacgaagatttgtacgaagagctggaaaccgtgctgattaccagcgacatgggcatggaagccaccgaatacctgatgaaagacgtgcgcgaccgtgtcagcctcaaagggctgaaagacggcaacgaattgcgcggcgcgttgaaagaagccttgtacgacctgattaagcctctggagaaaccgctggttttgcccgaaaccaaagagccgtttgtcatcatgcttgctggcatcaacggcgcgggcaaaaccacatccatcggcaaactcgccaaatatttccaagcgcagggcaaatctgtgctgcttgccgccggcgatactttccgcgccgccgcgcgtgagcagcttcaagcttggggcgaacgcaacaacgtaaccgtgatttcgcaaaccacgggcgattccgccgccgtgtgcttcgatgccgtccaagccgccaaagcgcgcggcatcgacatcgtgcttgccgacaccgccggccgcctgcccacgcagcttcatttgatggaagaaatcaaaaaagtgaaacgcgtgctgcaaaaagccatgcccgacgcgccgcacgaaatcatcgtcgtgcttgatgccaacatcgggcaaaacgccgtcaaccaagtcaaagcctttgacgacgcattagggctgaccggtttaatcgtgaccaaactcgacggcacggcaaaaggcggcatcctcgccgcgcttgcctccgaccgccccgtccccgtccgctatatcggcgtgggcgaaggcatagacgatttgcgcccgtttgacgcgcgcgcgtttgtggacgcactgctggattga

SEQ ID NO: 66623 - DNA, 990 bp, Neisseria meningitidis
atgaaaattaccgttatcggcgcaggttcgtggggtacggcgctcgccctgcacttttcccaacacggcaaccgcgtatccctgtggacgcgcaacgcagaccaagtccgccaaatgcaggaagcgcgtgaaaacaaacgcggactgcccggcttttcctttcccgaaaccttggaagtgtgtgcggatttggcagacgcgctcaaagacagcggacttgtccttatcgtaacctccgttgccggattgagaagcagcgcagagctgctcaaacagtacggcgcgggacacctccccgtcctcgccgcctgcaaaggattcgagcaggatacagggctgctgacctttcaagtattgaaagaagtattgcccgacaataagaaaatcggcgtactctccggtccgagttttgcacaggaactcgccaaacaactgccctgtgccgtcgtcctcgcttccgaaaaccaagagtggattgaagaactcgtaccgcagctcaacacgactgtcatgaggctttacggcagtaccgatgttatcggcgtggcggttggcggcgcggtaaaaaatgttatggcgattgccaccggattgtccgacggcctagagtacgggcttaacgcccgcgccgcactggttacgcgcggattagctgaaattacccgccttgcctccgcaatgggcgcacagcccaaaaccatgatggggcttgccggtatcggcgacctcatcttgacctgcaccggcgcactttcgcgcaaccgccgcgtcggcttgggtttggcagaaggcaaggaactgcatcaggtgctggtcgaaatcggacacgtttccgaaggggtcagcacgatagaagaagtcttcaatactgcctgtaagtaccaaatcgacatgccgattacccaaaccctgctgcaactcatccgtaaggaaatgaccccgcaacaggttgtcgaaagactgatggaacgcagcgcgcgttttgaataa

SEQ ID NO: 66624 - DNA, 564 bp, Neisseria meningitidis
  misc_feature 4, 5, 6, 7, 8: 'n' is a, c, g or t
gtgnnnnncgccgtcccgtaccttaacctttcagacggcataaagatacacattgccgtagggcagggcagccgccgcgcattggaacgctgtttgggcagaacggtcatcgcgccggatgacggaaacgacagcgaggcggttttgcgcctgccggtttggaacagtctgccagaaggtgcgcgcgtattgtttgtgcgcggacacggccggcgagattttctgatgaatgccttgcaggagaaaggttttcggacggaggtggcagaagtctatttcagacggcataaacctttgaactttcaaaatttccaaaccgaaaatattgccgccgcctatattacgtccacagaactcgtgcgcttgctgttcggacagcttccgccgcaattttcccgattcttcaaatccttgctatactttacccatcatccgcgcattgcggaggcattgaagcgcgaaggcgtgtgttcggtcgaaaccgtccctacgctggaagccgcgctttcccattcttccatttccgtttcagacggcatggtctttcccggaacctcaaattaa

SEQ ID NO: 66625 - DNA, 2625 bp, Neisseria meningitidis
atgaaaaccaccgaactacgccaaaaattcttaaaattctttgaatctaaaggccacaccatcgtccgctcttcctcgctcgtgccgcacgacgacccgaccctgctgtttaccaacgcgggcatgaaccagtttaaagacgtatttttaggtttcgacaaacgcccgtacagccgcgccaccaccgcgcaaaaatgcgtacgcgcaggcggcaagcacaacgacttggaaaacgtcggctacaccgcccgccaccacaccttctttgaaatgatgggcaacttctccttcggcgactacttcaagcgcgacgcgatccacttcgcttgggaattcctgacttcccctgaatggttgaacatccccaaagacaaactcttggcgaccgtgtatgccgaagacgacgaagcctacaacatctggttgaacgaaatcggtatgccgtccgagcgcatcgtccgcatcggcgacaacaaaggcgcgaaatacgcgtccgacaacttctggcaaatgggcgacaccggcccttgcggcccctgctccgaaattttctacgaccacggcgaagaaatctggggcggcattcccggcagccccgaagaagacggcgaccgctggatcgaaatttggaactgcgtatttatgcagttcaaccgcgacgaacaaggcaatatgaatccgctgcccaagccgtccgtcgataccggcatgggtttggagcgcatggcggcggtaatgcagcacgtccacagcaactacgaaatcgacttgttccaagacctgctcaaagccgttgcccgcgaaaccggcgcgccgttcagtatggaagaacccagcctgaaagtgattgccgaccacatccgctcctgctcattcctgattgcagacggcgtattgcctgccaacgaaggacgcggctacgtattgcgccgcattatccgccgcgccgtgcgccacggttacaaactgggtcaaagcaaaccgttcttccacaaactcgttgccgatttggtcaaagagatgggcgatgcctaccccgagttgaaagaaaaacaagcacaaatcgaagaagcattgaaaaacgaagaaagccgttttgcccaaactctggaaaccggtatggctttgttggaaaacgcgttggctaaaggcggcaaaacactcgacggcgaaatcatcttcaaactctacgatacttacggtttcccatacgacttgaccgccgacatctgccgtgaacgcaatattgaaccggacgaagcaggcttcgagcgcgaaatggaagcccaacgcgcacgcgcacgcgccgcccaaagcttcaaagccaacgcccaactgccttatgacggtcaagacaccgagtttaaaggttatagcgaacgccaaaccgaatccaaagtcctcgccctctacaaagacggcgagcaagtcaacgaattgaacgaaggcgacagcggcgcagtcgtcattgactttaccccgttctatgcagaatccggcggccaagtcggcgatgtcggctatatcttctcaggcgaaaaccgctttgaagtacgcgatacccaaaaaatcaaagcggccgtattcggtcaattcggcgtacaaacttcaggccgtctgaaagtcggcgacagcgttaccgccaaagtggacgacgaaatccgcaatgccaatatgcgcaaccacagcgcaacccacttgatgcacaaagccctgcgcgatgtattgggcagacacgtcgaacaaaaaggctctttggttaccgccgaatccacccgtttcgacatttcccatccccaagcggtaactgccgaagaaatcgccgaagtcgagcgccgcgtcaacgaagccgttttggcgaacgttgccgtcaacgccgccattatgagcatggaagacgcgcaaaaaaccggcgccatgatgctcttcggcgaaaaatatggcgacgaagtacgcgtattgcaaatgggcggtttctctaccgaattgtgcggcggcacgcacgtttcacgcaccggcgacatcggcctcttcaaaatcatcagcgaaggcggtattgccgcaggcgtgcgccgtatcgaagccatcaccggcctgaacgcactcaaatgggcgcaagagcaagaacgcttggtgaaagacattattgccgaaaccaaagcccaaaccgaaaaagacgtattggcgaaaatccaagcaggcgcggcacacgccaaagccttggaaaaagaattggcacgcgccaaagccgaacttgccgtccacgcaggcgcaaaactcttggacgatgcaaaagacttgggcgcagccaaactcgttgccgcccaaatcgaagccgacgcagccgccctgcgcgaaatcgtaaccgacctgaccggcaaatcagaacaagccatcgtattgctcgccgcagtcaacgagggcaaagtctccctgtgcgccggcgtatccaaaccgttgaccggcaaagtgaaagcaggcgatctggttaaatttgcagccgaacaagtcggcggcaaaggcggcggccgtcccgacttggcgcaggccggcggcacggatgccggcaaattgcccgccgtgttggatagcgtgaaagactgggtcggcgcgaagctggtttga

SEQ ID NO: 66626 - DNA, 930 bp, Neisseria meningitidis
  misc_feature 915, 916, 917, 918, 919: 'n' is a, c, g or t
atgagccaagccttaccctaccgcccggacatcgacacattgcgcgccgccgccgttttgtccgtcatcgtgttccatatcgaaaaaaattggctgccgggcggatttctcggtgtcgatatattctttgtgatttcaggctttttgatgacggagatcctccttcgcgaaatgtcgggggggggttccctgaaggcattttatatccgccgcatcaaacggattttgcccgcatttttcgccgtattggcggcaacgctggcaggcggcttctttttattcaccaaagatgatttctttcttttgtggaaatccgcgctgaccgccttgggtttcgcctccaacctgtattttgcaagggggaaggattatttcgatcccgcgcaggaagaaaagcccctgctgcacatctggtctttgtcggtcgaagaacaattttactttgtctttccgatactgctgctgcttgtcgcccgcaaaagcctgcgcgtacagttcggcttccttgccgcactgtgtgccttaagccttgccgcctcctttataccttccgcgctcgataaatattacctgccccacctgcgcgcctgcgaattactgataggatcgctgaccgccgtgtggatgcgctgccggcaacctgccgtcggcagacgctgtgccgccgccggcgcattgtttgccgtgtgcatattgtcaacctgcctgttttcctattcggaacaaaccgcctatttcccgggccccgccgctttgattccctgtctggctgttgccgcgctgatttatttcaatcattacgaacacccgcttaaaaaatttttccaatggaaaatcaccgttgccgccggtttgatttcctattcgctttatctgtggcattggccgatattggcctttatgcgctatatcggnnnnncacacacttaa

SEQ ID NO: 66627 - DNA, 1032 bp, Neisseria meningitidis
atgggcatcaaagtcgccatcaacggctacggacgcatcggccgccaggttttgcgcgccatctacgactatcagattcaagaccaactccaaatcgtcgccgtcaacgccagcggcagccttgaaaccaacgcccatctgaccaaattcgacaccgtgcacggacgctttgaagccgacgtatcccacgacggcggcaacctcatcgtcaacggcgacaaaatccccttcttctcgacccgcaaccctgccgaactgccgtggaaagaactcggtgtcgatttggtcatggaatgcaccggcgcgttcaccagcaaagaaaaagccaaaatccacctcaaaagcggcgcgaaaaaagtcctcatttccgcaccgggcggcgacgatgtcgatgcaaccgtcgtatacggcgtgaacgacagcatcctgaccgccgacatgaccgtcgtttccaacgcttcctgcaccaccaactgcctctcgccggttgccaaagtgttgagcgaaagcgtcggcatcgtcaaaggcacgatgaccaccatccacgcgctgaccaacgaccaaaccgttaccgacgtgcgccacaaagacctgcgccgcgcccgcagcggcgtggaaaacatgattccgaccaaaaccggcgcggcaaaagccgtcggtttggtgctgcccgaattgaaaggcaggctcgacgggcttgccatccgtgtgccgaccgtcaacgtatccctggtagatttgagcttccaagccgcgcgcgacaccacagtcgaagaaatcaacgcactgatgaaagccgcctcggaagcaggcgcgctcaaaggcgttttgggctacaacaccctgccattggtttccatggacttcaaccacaccaccgaagccagccacttcgacgccacactgaccaaagtcgtcgacggcaatatggtcaaagtgttcgcgtggtatgacaacgaatggggcttcagctgtcaaatgctgaacactgcacgccgcatgttcgaacttgaagtgcgcccgctcaaataa

SEQ ID NO: 66628 - DNA, 324 bp, Neisseria meningitidis; identical to SEQ ID NO: 47851

SEQ ID NO: 66629 - DNA, 381 bp, Neisseria meningitidis
  misc_feature 358, 359, 360, 361, 362: 'n' is a, c, g or t
atgagcaccttcttccggcaaaccgcccaagccatgattgccaaacacatcaaccgtttcccgctattgaagttggaccaggtgattgattggcagccgatcgaacaatacctgaaccgtcaaagaacccgttaccttcgagaccaccgcggccgtcccgcctacccgctgttgtccatgttcaaagccgttctgctcggacaatggcacagcctctccgatcccgaactcgaacacagcctcattacccgcatcgatttcaacctgttttgccgttttgacgaactgagcatccccgattacagcaccttatgccgctaccgcaactggctggcgcaagacgacaccctgtccgaannnnncacacacttaattaattaa

SEQ ID NO: 66630 - DNA, 372 bp, Neisseria meningitidis; identical to SEQ ID NO: 39755

SEQ ID NO: 66631 - DNA, 486 bp, Neisseria meningitidis
atgatacaaatcggcatcatcatgggcagcaacagcgattggcccgttatgcggcaggcagcgcagtttcttgaagagttcggcgtagaatatgaggcgcgcgttgtttccgcacaccgcaccccggatttgatgttccaatacgccgaaaccgcacgggcgcgcggcatcaaagccatcatcgcgggtgcgggcggcgcggcgcatttacccggtatggttgccgccaagaccaccgtccccgttttgggcgtacccgtccccagcaaatacctgcgcggcgaagattcgcttttatcgattgtacaaatgcccaaaggcgtacccgtcgccacattcgccatcggcgaggcaggtgcggcaaatgccgcattgttcgccgtttccatgctcgccaacgaaaaccccgaactggcgcaaaaactggcagacttccgagccaaacaagaacagactgttttgaatatggaattggaacagatttaa

SEQ ID NO: 66632 - DNA, 1086 bp, Neisseria meningitidis
atgaccgtcccccatattccgcgcggccccgtcatggcagacattgccgccttccgcctgaccgaagaggaaaagcaacgcctgctcgatcccgccgtaggcggcatcatcctcttccgccgcaacttccaaaacatcgaacaactcaaaacactcaccgccgaaatcaaagccctgcgcacacccgaactcattatcgccgtcgatcacgaaggcggcagggtgcaacgtttcatcgaaggcttcacccgcctgcccgcaatgaacgttttagggcaaatttgggacaaagacggcgcgtccgccgccgaaaccgccgccggacaagtcggccgggtgttggcaaccgagctttccgcctgcggcatagacctctccttcacccccgttctcgacttggactggggacaatgcgccgtcatcggcaaccgcagcttccaccgcaaccccgaagcggtcgcacgcctcgccctcgcccttcaaaaaggtttggcaaaaggcggtatgaaatcctgcggcaaacattttcccggacacggatttgtcgaaggagacagccatctggtcttgccggaagacaggcgcagcctgtccgaactcgaagccgccgacctcgcccccttccacattatgagccgcgaaggtatggcggcggttatgcccgcccacgtcgtttatccacaagtggacacaaagcccgcagggttttccgaaatctggctcaaacaaattttgcgccgcgacatcggattcaaaggcgtgattttctctgacgatttgaccatggaaggcgcatgcggagccggcggcatcaaagaacgcgcccgcatttcctttgaggcaggttgcgacatcgtcctcgtctgcaaccgtcccgaccttgtggacgaactgcgcgaagatttccgcattcccgacaatcccgctttggcgcaacgttggcaatatatggccaacacgctcggcagtgccgccgcgcaagccgtgatgcagacggcggatttccaagcggcgcaagcctttgttgccggccttgcctcgccgcaggacacggcgggcggcgtaaaagtcggcgaagccttttaa

SEQ ID NO: 66633 - DNA, 270 bp, Neisseria meningitidis; identical to SEQ ID NO: 36672

SEQ ID NO: 66634 - DNA, 1164 bp, Neisseria meningitidis
atgtctgagcaacttcctgtggcagttgccactgaaaccaaagccgagcgtaaaaagccgaaaaagaaaagttggattaaaaagctaagccctttattttgggtaacggtgattattcctacggtaatttcgttggtgtatttcggcttcttcgcttccgatcgttttacgtcgcaatcgagctttgtggtgcgctcgcctaaaagccaatcttctctcaatggcctgggtgccattttgcagggcacaggttttgcccgtgcgcaagatgatatttacacggttggggagtatatgcgttcgcgctcgtctttggatgaactgcgtaaaatcttgccggtgcgtgagttttatgaaaccaaaggtgatgcgttcagccgctttaatgggtttgggttccgtggcgaggaagaggctttttatcaatactataaaaatcaggtgatgatcaattttgatacggtttcgggtatttccacgttgaatgtaacttcctttgatgcgctggaatctaagaaaatcaatgaggctttgttaaaacaaggtgaagcattgattaaccagttgaacgatcgtgcacgtgctgatacggtgcgctatgcggaagaagtagtgaaaacggcggcagagcgggtaaaggaagcctctcagaatctgacggattaccggattgccaatggcgtttttgatttgaaagcgcaatcggaagtgcaaatggggttggtttccaagctgcaagatgaattgattgtgattcaaacccagctggatcaggtgaaagcagtcactccggagaatccgcagattccgggtttgcaggcgcgtgagcagagcttgcgtaaagaaattgaccaacagttacgtgccatttcgggcggtgggcattcttcgttgtctaatcaggctgccgaatatcagcgtgtgtatttggaaaaccagttggcagagcagcagttggcagccgccatgacttctttggaaagtgccaaggttgaagcagaccgtcagcagctttatttggaagtgatctcgcaaccgagcctgccggatttggcacatgagcctaaacggttatacaacattgttgccactctgattatcggcttgatggtttatggtattttgagcctgttgactgccagcattcgtgagcataaaaactga

SEQ ID NO: 66635 - DNA, 507 bp, Neisseria meningitidis; identical to SEQ ID NO: 62532

SEQ ID NO: 66636 - DNA, 672 bp, Neisseria meningitidis
atgactttttccgcgattctgttctatatccttgccgccatcgttttgtacggcgcggttcgtaccgttaccgctaaaaaccctgtccatgccgctttgcatctggtgctgaccttctgcgtgagcgcgatgctttggatgctgatgcaggctgagtttttgggcgtgacgctggtggtggtttacgtcggcgccgtgatggtgttgttcctgtttgtcgtgatgatgttgaacatcgacattgaagaaatgcgcgccggtttctggcgtcatgcgcctgttgccggtgtggtcggcacattgttggcggttgccttgatcctgattctggtcaacccgaaaaccgacctagccgcatttggtctgatgaaagacattccggccgattacaacaatattcgcgatttgggcagccgtatttataccgactacctgttgccgtttgaattggcggcggtattgctgctgttgggcatggtggccgcgattgcgctggttcaccgcaaaaccaccaatccgaaacgcatggatccagccgaccaagtcaaagtacgcgccgatcaaggccgtatgcgtctggtgaaaatggaagcggtcaaaccgcaaaccgaatctgccgaagaaagcgaagtttcagacggcctcaagccggaaggggagggcaaagcatga

SEQ ID NO: 66637 - DNA, 1101 bp, Neisseria meningitidis
atggaaacacagctttacatcggcatcatgtcgggaaccagcatggacggggcggatgccgtactgatacggatggacggcggcaaatggctgggcgcggaagggcacgcctttaccccctaccccggcaggttacgccgccaattgctggatttgcaggacacaggcgcagacgaactgcaccgcagcaggattttgtcgcaagaactcagccgcctatatgcgcaaaccgccgccgaactgctgtgcagtcaaaacctcgcaccatccgacattaccgccctcggctgccacgggcaaaccgtccgacacgcgccggaacacggttacagcatacagcttgccgatttgccgctgctggcggaacggacgcggatttttaccgtcggcgacttccgcagccgcgaccttgcggccggcggacaaggtgcaccgctcgtccccgcctttcatgaagccctgttccgcgacgagaaagaaacacgcgtggtactgaacataggcgggattgccaacatcagcgtactcccctccgacgcacccgctttcggcttcgacacggggccgggcaatatgctgatggacgcgtggacgcaggcacactggcagctgccttacgacaaaaacggtgaaaaagcggcacaaggcaacatattgccgcaactgctcgacaggctgctcgcccacccgtatttcgcacaaccccaccctaaaagcacggggcgcgaactgtttgccctaaattggctcgaaacctaccttgacggcggcgaaaaccgatacgacgtattgcggacgctttcccgttttaccgcgcaaaccgtttgcgacgcagtctcacacgctgcggcagatacccatcaaatgtatatttgcggcggcggcatccgcaatcctgttttaatggcggatttggcagaatgtttcggcacacgcgtttccctgcacagcaccgccgacctgaacctcgatccgcaatgggtggaagccgccgcatttgcgtggttggcggcgtgttggattaatcgcattcccggtagtccgcacaaagcaaccggcgcatccaaaccgtgtattctgggcgcgggatattattattga

SEQ ID NO: 66638 - DNA, 567 bp, Neisseria meningitidis
atgagcatcaagtccgacaaatggatacgccgaatgagcgaagaattcggcatgatcgaccccttcgagccgaaccaaatcaaagaagccgacggcaaacgcatcatctcctacggtacgtccagctacggctacgacatccgctgcgccaacgaatttaaaatcttcaccaacatcaacagcaccatcgtcgatcccaaaaacttcgacccgaaaaacttcgttaccgttgaagacgactgctgcatcatcccgcccaattccttcgcactggcgcgcacggtcgaatatttccgcatcccgcgcaacgtcctgaccgtctgcttgggcaaatccacctacgcccgctgcggcattatcgtcaacgttaccccgttcgaaccggaatgggaaggctacgttaccctcgaattttccaacaccacccccctgcccgccaaaatctacgcaggcgaaggcgtggcgcaagtcctcttcttcgagagcgacgaaatctgcgaaacctcatacaaagaccgcaacggcaaatatatggggcaaaccggcgtaaccctgcccaaagcctga

SEQ ID NO: 66639 - DNA, 840 bp, Neisseria meningitidis
  misc_feature 8, 9, 10, 11, 12: 'n' is a, c, g or t
gtgtgtgnnnnntccctgctggcccgccaagtaggcgtaccttacatcatcgtgttcatgaacaaatgcgacatggtcgacgatgccgagctgttggaactggttgaaatggaaatccgcgacctgctgtccagctacgacttccccggcgatgactgcccgattgtacaaggttccgcactgaaagccttggaaggcgatgccgcttacgaagaaaaaatcttcgaactggctgccgcattggacagctacatcccgactcccgagcgtgccgtggacaaaccgttcctgctgcctatcgaagacgtgttctccatttccggccgcggtacagtagtaaccggccgtgtagagcgcggtatcatccacgttggtgacgagatcgaaatcgtcggtctgaaagaaacccaaaaaaccacctgtaccggcgttgaaatgttccgcaaactgctggacgaaggtcaggcgggcgacaacgtaggcgtattgctgcgcggtaccaaacgtgaagacgtagagcgtggtcaggtattggccaaactgggtactatcactcctcacaccaagttcaaagcagaagtgtacgtactgagcaaagaagagggcggccgccataccccgttcttcgccaactaccgtccccaattctacttccgtaccaccgacgtaaccggcgcggttactttggaagaaggtgtggaaatggtaatgccgggtgagaacgtaaccattaccgtagaactgattgcgcctatcgctatggaagaaggcctgcgctttgcgattcgcgaaggcggccgtaccgtgggtgccggcgtggtttcttctgttatcgcttaa

SEQ ID NO: 66640 - DNA, 321 bp, Neisseria meningitidis
ttgggcgaaaaaattaaagacggcaaaaaaaccgtactttcctgcgaagaagaacaaaaaatctgcaatactttcacgaataaacaggcagtggaagatttcagtgtggtaatcggctacgatgaaatcaaagcgaagaatcacagcttgtcggcggggcagtatttcgaggtaaagattgattatgtggatatttccgccgacgaatttgcgcaaaaaatggcgggattttcagcggatttggataaacttttcgccgaatctgccgaattggaaaaagagattaaggatagattggcgatgttgaaattcaattcataa

SEQ ID NO: 66641 - DNA, 621 bp, Neisseria meningitidis; identical to SEQ ID NO: 41552

SEQ ID NO: 66642 - DNA, 270 bp, Neisseria meningitidis; identical to SEQ ID NO: 47139

SEQ ID NO: 66643 - DNA, 903 bp, Neisseria meningitidis
atggaaaatatggtaacgttttcaaaaatcagaccgcttttggcaatcgccgccgccgtgttgcttgccgcctgcggcacggcgggaaataatgctgcccgcaagccggtgcaaaccgctaaacccgccgcagtggtcggtttggcactcggtggcggcgcatctaaaggatttgcccatgtaggtattattaaggttttgaaagaaaacggtattcctgtgaaggtggttaccggtacatcggcaggttcgattgtcggcagcctttttgcatcgggtatgtcgcccgaccgcctcgaattggaagccgaaattttaggcaaaaccgatttagtcgatttaaccttgtccaccagtggttttatcaaaggcgaaaagctgcaaaattacatcaaccgaaaagtcggcggcaggcggattcagcagtttcccatcaaatttgccgctgttgctactgattttgaaaccggcaaggccgtcgctttcaatcaagggaatgccgggcaggctgtgcgcgcttccgccgccattcccaatgtgttccaacccgttatcatcggcaggcatacatatgttgacggcggtctgtcgcagcccgtgcccgtcagtgccgcccggcggcagggggcgaatttcgtgattgccgtcgatatttccgcccgtccgagcaaaaacatcagccaaggcttcttctcttatctcgatcagacgctgaacgtaatgagcgtttccgcgttgcaaaatgagttggggcaggcggatgtggttatcaaaccgcaggttttggatttgggtgcagtcggcggattcgatcagaaaaaacgcgccatccggttgggtgaggaggcagcacgtgccgcattgcctgaaatcaaacgcaaactggcggcataccgttattga

SEQ ID NO: 66644 - DNA, 1140 bp, Neisseria meningitidis
atgaaaaaaacactggtggcggcggcaatcctgagcctcgccttgactgcgtgcggcggcggaaacgataccgccgcccaagccccctccgccaagcctgaagccgaacaatcgggcaaactcaatatctacaactggtcggattatgtcgatcccgaaaccgtcgccgcctttgaaaaagaaaccggcatcaagacgcgttccgattattacgacagcaacgaaacactggaggcaaaagtcctgaccggcaaatccggctacgacctgaccgcgccgtccatcgccaacgtcggccggcaaatcaaagcgggcgcgtatcagaaaatcgacaaggcgcaaatcccccattacagcaacatcgataaagatttgctgaaaatgatggaagccgtcgatccgggcaacgaatacgccgtcccctatttctggggcatcaacaccttggcaatcaacacgcggcaggtgcaaaaggcattgggtacggacaagctgcccgaaaacgaatgggatttggtgttcaaccccgaatacaccgccaaactcaaatcctgcggcatcagctatttcgacagcgcaatcgaacagattcccttggcgttgcactatttgggcaaagaccccaacagtgaaaatcccgaagacatcaaagccgccgtcgatatgatgaaagccgtccgaggcgacgtgaaacgcttcagctcttccggctatatcgacgatatggcggcgggcaacctgtgtgccgccatcggttacggcggcgatttgaacattgccaaaacccgtgccgaagaagccgcaaacggcgtggaaatcaaagtattgaccccgaaaaccggcgtgggcgtgtgggtggattcctttatgattccgcgcgacgcgcaaaacgttgccaacgcccaccgctatatcgactacacgctcctgcccgaggtggcggcgaaaaacggcagcttcgttacctacgcacccgccagccgccccgcgcgcgagctgatggatgaaaaatacacctccgacgcatcgattttcccgaacaaagaactgatggaaaaaagtttcatcgtatcgcccaaatccgcagaatccgccaaactgggcgtgaagctgtggcaagggctcaaagcgggcaaataa

SEQ ID NO: 66645 - DNA, 1887 bp, Neisseria meningitidis
atgccgtctgaagccgtttttcaaatgattgatatgaatacagaaaaccgttctccggaacaattcgacatcccgctcttcctcaaaaacctgcccaagctgccgggcgtgtaccgtttttttgacgaaggcggcaaagtcttatatgtcggcaaagccgtcaacctcaagcggcgcgtgtccggctatttccaaaaaaacgaccattcgccgcgcatcgcattgatggtgaaacaggttcgccacatcgaaaccaccatcacgcgttccgaagccgaagccctgattctcgaaaacaacttcatcaaagccttgtcgccgaaatacaatatccttttccgcgacgacaaaagctatccttatttgatgctcagcggccatcaatatccgcagatggcgtattaccgcggcacgctgaaaaagccaaaccaatacttcggcccgtatcccaacagcaacgccgtgcgcgacagcattcaagtgttgcaaaaagtctttatgctgcgtacctgcgaagacagcgtattcgagcatcgtgaccgcccttgcctgctgtatcaaatcaaacgctgcaccgcgccctgcgtcggacacatcagcgaagaagactaccgcgacagcgtgcgtcaagccgccacttttctcaacggcaaaaccgacgaactgacccgcaccctgcaacacaaaatgcaaactgccgccgcgaatctgcaatttgaagaagccgcccgctaccgcgaccaaatccaagcactcggcattatgcagagcaaccagttcatcgacagcaaaaacccgaacaaccccaacgatatcgatttgctcgcgctggcggtttcagacggcatcgtctgcgtacactgggtcagcatacgcggtgggcggcacgtcggagacaaaagtttcttccccgacaccaaaaacgatcccgagccaaacgggcaagactatgccgaagccttcgtcgcccaacactatctgggcaaaagcaaacccgacatcatcatcagcaacttccccatgcccgacgcattgaaagaagccctagagagcgaacacggcaaacaaatgcagttcgttaccaaaaccataggcgaacgcaaagtctggttgaaaatggcggagcaaaacgcacaaatggcgattgcacaacgccgcctgcaacaaagcagccagcaacaccgcatcgacgaactcgccaaaatcctcggtatggattcagacggcctcaaccgcctcgaatgtttcgacatcagccacacccaaggcgaggccactattgcgtcctgcgttgtgtacgatgagcaaaacatccagccctcgcaataccgccgctacaacatcacgaccgccaaacccggcgacgactacgccgccatgcgcgaagtgttgacgcgccgttacggcaaaatgcaggaggccgaagccaacggcgagaccgtcaaatggcccgatgtcgtattgattgacggcggcaaagggcaaatcggcgtagccgtatcggtatgggaagaactcgggctgcacattcctttggtcggtatcgccaaaggcccggagcgcaaagccggtatggaagaactcatactgccttttaccggcgaagtcttccgcctgcccccacacagcccggccttgcatctattgcaaaccgtacgcgatgaatcgcaccgctttgccatcacaggccaccgcaaaaaacgcgacaaagcgcgcgttacctcatccctcggcgacattcccggcgtaggcagcaaacgccgccaagccctgctcacccgcttcggcggtctgcgcggcgtgattgccgccagccgcgaggacttggaaaaagtggaaggcatcagcaaggcattggcggaaaccatttataatcatctgcattag

SEQ ID NO: 66646 - DNA, 1128 bp, Neisseria meningitidis
atgaaacacttactcatcgattttgaaaacgtccagccgcaaaacttagacaaattaccaaccgaaaatacccatatttggctatttataggtgtattacacaaaatgttacctattagtctggtgcaatccctactacgtttcggcgaacgtgtccatcttgtccagttacaaaaaacggggaaaaacgcattggatttttacctgtcctattacctcggacaaattaccgccacagaccccaatgcccaaatcggcatactctcgcgtgatggaggatacgatgttctggtcgaacatattttgaaaaaccaccaggcgaagggtatcgtgcgcctagccaatatagatgaagtacaacatcagaaaattactaccgaaccgccgtcagcattgctggaaaacactcctcagcctgaaaccaccctcaaaccacagcaaccattaacttcctatttccaagcagccctaactgcactgcgccgccccgacgctttccgcccctgccgcctgcataacctgcgacaaaatctgcgtaagcatattttgagtgatttgtttaaagaaaaaaccgatgaagaatgcgaaataaccactgctaacgttatcaataaactcaaagcacaaaacttcatcagcattgatgaacaggaaaccgtttcctaccatctcagtgataatgatttgttacaaagaatccaacgccatattttaagccaacgtcccaaaacctacgctgattttcaagccgtcgtgcaaaaccgagcagatgcacttcacttaacagtcggtaccaacgacattcaatcctttgcgcgacatttgcgcgaccaaaacctgatccgccaaaacaatggggaaattgaatatgcaccgtttactgaacctaaaccacagccaacgcccaagcagcctaaaaaaaccgcatgggaacctgatgaaattatttggaaaaaagtgattgccgcgttatcgttaaagaaccgtcctaataaaaccaaaactttacgcaatacaatccaggcactcacaaaatccaatgcacaagaaactgacaaactgctacaacatttacaagatacccaagtcctacgtattgacggtactaaaattgtgtatatcaagtag

SEQ ID NO: 66647 - DNA, 873 bp, Neisseria meningitidis
atgtcattctcaattgctcttccattggtatatctgtttattggcattttgattgggaaatccccttttagaaaaattaaaggcactttttctgtaatattgagcaggtggattatcccttttgttattgtctataacataacgacatatcgtgatggtatgcagtatgttatgttatggatgattatttcgatggggctgattatcctaatcgggaaaagagttaataaagatcctgtttggaatttgtgtttgtgctatttgaacatcggatggttggggcttcccatagttgcaaccttgtttggagatgaggcggcgcaagtgcttatttcggcatacgtgggaagttctttattcggaaattcggtcggggtcgggttgttattgaataatagtaatttcatatccggattgaaaaagactttaaaatcccctcccgttgttgcattggtaataggagtgtccggtattccgctggggcattttgtagcagattattttggggaagtttattttttctcgaaaatggcaatgggaatattggggatggtgatactcggtatttggctggctgagataaaactaaatttgaatgatttgaagaaaagtattaaaccgtttctaataaaaaacattttatttatagggattgtttttctttttatccaaatagctgcatattttgacttgaagttgattcttgaaaaccaaaaaacattgtatttaataccgttgctgccgcctgctgccaatattattgtgttggaaacggcatatttgaaaacagggcgttcagcttctatgattgcgtatggtacgatttttagtttaatcgcaatcagcatttatattttactggtgcaaatttaa

SEQ ID NO: 66648 - DNA, 855 bp, Neisseria meningitidis
atgttttaccaaatccttgccctgattatctggagcagctcgtttattgccgccaaatatgtctatggcggcatcgatcccgcattgatggtcggcgtgcgcctgctaattgccgcgctgcctgcactgcccgcctgccgccgtcatgtcggcaagattccgcgtgaggaatggaagccgttgctgattgtgtcgttcgtcaactatgtgctgaccctgctgcttcagtttgtcgggttgaaatacacttccgccgccagcgcatcggtcattgtcggactcgagccactgctgatggtgtttgtcggacactttttcttcaacgacaaagcgcgtgcctaccactggatatgcggcgcggcggcatttgccggtgtcgcgctgctgatggcgggcggtgcggaagagggcggcgaagtcggctggttcggctgcctgctggtgttgttggcgggcgcgggcttttgtgccgctatgcgtccgacgcaaaggctgattgcacgcatcggcgcaccggcattcacatctgtttccattgccgccgcatcgttgatgtgcctgccgttttcgcttgctttggcgcaaagttataccgtggactggagcgtcgggatggtattgtcgctgctgtatttgagtttggggtgcggctggtacgcctattggctgtggaacaaggggatgagccgtgttcctgccaatgtttcgggactgttgatttcgctcgaacccgtcgtcggcgtgctgctggcggttttgattttgggcgaacacctgtcgcccgtgtccgccttgggcgtgtttgtcgtcatcgccgccaccttggttgccggccggctgtcgcatcaaaaataa

SEQ ID NO: 66649 - DNA, 372 bp, Neisseria meningitidis; identical to SEQ ID NO: 42883

SEQ ID NO: 66650 - DNA, 1128 bp, Neisseria meningitidis; identical to SEQ ID NO: 46291

SEQ ID NO: 66651 - DNA, 228 bp, Neisseria meningitidis; identical to SEQ ID NO: 53211

SEQ ID NO: 66652 - DNA, 1059 bp, Neisseria meningitidis
atgccgtctgaaacacgcctgccgaactttatccgcgtcttgatatttgccctgggtttcatcttcctgaacgcctgttcggaacaaaccgcgcaaaccattaccctgcaaggcgagaccatgggcacgacctataccgtcaaatatctttcagacggccaagacaaacttccctcccctgccgaaatacaaaaacgcattgatgacgcgcttaaagaagtcaatcggcaaatgtctacctaccagaccgattccgaaatcagccaattcaaccagctgcgcaccgtcaatcaagccatgcccatttcccaagactttgcctatgtgaccggcgaagccttgcgtttaaacaaactgacgcacggcgcactggacgtaaccgtcggccctttggtcaacctttggggattcggccccgacaaatccgttacccgtgaaccgtcgccggaacaaatcaaacaagcagcatcttatacgggcatagacaaaatcattttgaaacaaggcaaagattacgcttccttgagcaaaacccaccccaaagcctatttggatttatcttcgattgccaaaggcttcggcgttgataaagttgcgggcgaactggaaaaatacggcattcaaaattatctggtcgaaatcggcggcgagttgcacggcaaaggcaaaaacgcgcgcggcgaaccgtggcgcatcggtatcgagcaacccaatatcatccaaggcggcaatacgcagattatcgtcccgctgaacaaccgttcgcttgccacttccggcgattaccgtattttccacgtcgataaaagcggcaaacgcctctcccatatcattaatccgaacaacaaacgacccatcagccacaacctcgcctccatcagcgtggtcgcagacagtgcgatgacggcggacggcttgtccacaggattattcgtattgggcgaaaccgaagccttaaagctggcagagcgcgaaaaactcgctgttttcctgattgtcagggataaaggcggctaccgcaccgccatgtcttccgaatttgaaaaactgctccgctaa

SEQ ID NO: 66653 - DNA, 192 bp, Neisseria meningitidis; identical to SEQ ID NO: 37158

SEQ ID NO: 66654 - DNA, 987 bp, Neisseria meningitidis; identical to SEQ ID NO: 40869

SEQ ID NO: 66655 - DNA, 1776 bp, Neisseria meningitidis
atgagtatcgtgctgcacggcgtggcggcgggcaaaggtattgccgtcggttgcgcccacctgattgcgcgcggtacggaggaagtgccgcagtatgatgttgcggaggcggacaccgatgccgaagccgaacgtttcgatgccgccgtcaaagccacgcgcaaagagttggaacagctccgcagcgcgattcccgaaaacgccccgaccgagttgggcgcgttcatctcgctgcacctgatgctcttgaccgatgttaccttgtcgcgcgaacccgtcgatattttaagggaacaaaaaatcaacgccgagtgggcattgaagcagcagagcgacaaactcgccgcccaattcgacaatatggacgatgcctatttgcgcgaacgcaagcaggatatgctgcaagtcgtccgccgcatccacaacaacctgatcgggcagggcaacgagttggaagttgccgacaacctgtttgacgaaaccgttctgattgcaaacgacctttcgcccgccgacacggttttgtttaaagagcagcgcattgccgccttcgttaccgatgccggcggccccaccgggcatacggcgattttgggcaggagcttggacatcccgtccgtcgtcgggctgcacaacgcgcgcaaactgattaccgagggcgaaacggtcattgtggacggtatcaacggcgtgttgattatcgcgccggatgagtcggtgttggacgaataccgccgccgtgcccgcgaataccgcagccacaaacgcgatttgaacaagctcaaaaaaaccgccgccgccaccgctgacggggtctgcatcgagcttgtgggcaatatagaatccgccgaagacgtgaaaccgctgcacaacctcggcgcagacggcatcgggctgttccgcagcgagtttctttacctgaaccgcgatacgatgccgtctgaagacgagcagtacgaagtgtacagcgcgattgtcaaaaaaatgaaaggcaaaagcgtaacgatacggacagtcgatttgggtgtggacaaaaacccgcgctggttcgggaaaaacagcacgcccaacggcagcctcaaccccgcgctgggcatgaccggcatccgcctgtgccttgccgaaccggtcatgttccgcacccagatgcgcgccatcctccgcgccgccgcccacggccccgtgcggatgatgtggccgatgattacctccgtatccgaagtgcgccagtgcctcatccacctcgacaccgcgcaacgccagcttgccgaacgcggcgatgccttcggtaaagtcggcatcggctgtatgattgaaattccgtctgccgcgctgaccgtcggcagtattttgaaactggtcgatttcatctccgtcggtaccaacgacctgattcaatacatcttgtccgtcgatcgcggcgacgacagcgtcagccacctctaccagcccggccatcccgccgtgctgaaaatgctgcaacacgtcatccgtaccgccaaccgcatggacaaagacgtatccgtatgcggcgagatggcgggcgataccgcgtttacccgcgttttattgggtatggggctgcgccgtttttccatgaaccccaacaacatcctgcccgtcaaaaacatcattctgcacagcaatgtcggacagctcgaaagcgatattgtgaaagtcatccgctgcgaagacgaagagaagtcggaaaagctgatcaaacagatgaacagcgtgtctgtcgaggaagaagccgacttcaaggggcggaaataa

SEQ ID NO: 66656 - DNA, 927 bp, Neisseria meningitidis
atgtcttttgccttcttttttcccggacaaggttcccaaagcctcggtatgatgaacggctttgccgaacacgccatcgtcaaaaacacatttgacgaagcctccgccatattggggcaggacttgtgggcgatgattaacggcagcgatgccgaaatcatcggtcaaaccgtcaacacccagcccattatgctcaccgccggcgttgccgtttaccgcgcctattcggaagcgggcggcaaaacgcctgccgccgttgccggacacagcctcggcgaatacaccgcactcgttgccgccggcgcattggattttgccgacgcggtcaaactcgtgcgcctgcgcgccgaactgatgcagtctgccgtaccgcaaggcgtgggcgcaatggcggcgattctcggcttggaagatgaacaggtaaaacaaatttgcgccgaatccacacaaggcgaagtggttgaagccgtcaacttcaactcgcccggacaagtcgtgattgcaggcaataccgccgccgtcgagcgcgctatgcttgccgccaaagaagccggcgccaaacgcgccctgccgctgcccgtgtccgtaccttcccattgcagcctgatgaaacccgccgccgacaaactcgccgaagccctgaaaaccgttgaaatcaagcagccgcaaatccgcgtcatccacaacgccgacgttgccgcctacgatgatgccgacaaaatcaaagacgcgctcgtccgccagctttacagccccgtacgctggacagaaaccgtcaacgcccttgtttcagacggcattgccgaatccgccgaatgcggcccgggcaaagtgttggcgggcttggcaaaacgcatcaacaaggccgccgcgtgcagcgcactgaccgatgccggacaggttgccgcctttatcgaagcgcactga

SEQ ID NO: 66657 - DNA, 735 bp, Neisseria meningitidis; identical to SEQ ID NO: 44160

SEQ ID NO: 66658 - DNA, 1746 bp, Neisseria meningitidis
atggaacggcagacagatgaatttgcccaagcggcggcaagggcggcaatctggtttttggcacgctatgcgggttccagcgacgaagtgcttgcaaactgcaccgaacgcctgtttcaggcattgcaaaacggtcattcgtttatccgtttgagcggtggcgaggctgacgcgctgtcggcactcgcacccgtggtcggaacatccgccgcgcctttgattttggaaggcagaaggctgtttttgggcaggatgtggcagttggaatacgatttggctgccgagataaaacgcttggcggcagccgacacgtccgcccccgacgcggcaggcgcgaggcaaaacctcgcaaaatggtttcaaggcacgggcagcgaagggcagcgcgatgccgccgccttggcactgttgcagtcttttatggtgattaccggcgggccgggaacgggcaaaacgacaacggttgccaaactgctggcgctgatttgcggtgaagacgaaaatcttcccaacatcgcgcttgccgcaccgacgggcaaagcggcggcacatatggcgcgcgcgctgcaccgtgcaatcaacggttttgacgcgccggaggccgtccgccgccatttgctcaaactggaagggcaaaccgtccaccgactgctgaagctgcgcccgcctaaaatgcaggcggcgttcgaccatatccgtccgctgccgttggacgtattggttatcgatgaagcctccatgttggataccgcattgatgttgcaacttttaaaagcggtcaaaaccggcgcgcgcgtgattctgctgggggatgaaaaccagctcccgtccgtcggaatcggggcggtgctgtccgttttgtcgcaaaaaaccgttttggacggagaaacgcaccaaaggctggccggcttctttccggaacacggtttcagcgtcagcgcaaatccgcccgtgttggcgcaaaacaccgcccatctgtcgttcagccaccgcttcggcgacaacagcggcatcggctgccttgcccgtgccgctgtatcgggcgatgagggggcgtgggcattgtttgaccgatttccggacgaactggaacattcggaatgcagtccgaacgctcgagtcgaaaggttgtaccgggcgcacaaagcctattggcaggcggtaaaagacggcaatatcgaagccgcatacgcaggcatctcggatatcgtggttctggcagcttggcggcaggatgcggaagacttcaacgaagcctattgcagccatgtacgccgcaaaatgaacataccggaacatcaggcctatttcgccggagaaccgattatgatcagacagaacgactacgcgcttgaactgttcaacggcgacatcggactgattatggaagatgtcggacggcagggcagccttgccgcctattttgccgatgcggacggatttaaaaaggtagcggtaagctgcctgcccgaatttgaacccgcattcgccatgaccgtccacaaaagccaaggttcggaataccgggaagtatggctgctgccgccttccgccgcaccttcggacgaaggggacgatgcattgtccggattgagtaaggagctgttatataccgccattacccgcgcgagagagaagttcgtattcttcggcggggaagaagccttccggcaagctgccgccaccgtcaaaacgcgtcagacggcattgggcagtatgctcgagcgggtattttcacaagaataa

SEQ ID NO: 66659 - DNA, 423 bp, Neisseria meningitidis
atgactgatattttcactacatccaaacgttctttcgtgatgtcaaaaatccatagcaaagaaaccaaaccggaaatattggtaaggaaatttcttttctcccaaggttttcgttatcggaaaaacgataaacgctatgcaggcaaaccggatatcgttttgccgaaatataaaacagtcgtgtttatacacggctgtttttggtacgggcattcttgtaataaaggacatatcccgaaaagcaatacggatttttggttggaaaaaatcacaaaaaattgcgaacgtgatattaaaaatgaaaccgagctggaaaagatcggtttcaaagtgattgtcgtttgggagtgcgaattaaaaaataaagctatttgtagggagcgattaaatcggttggtcagggaaataaaagatgccgtctga

SEQ ID NO: 66660 - DNA, 1413 bp, Neisseria meningitidis
ttgttgtttgaatttaaagagaataaaatgattgttgcttcccgctggcccttgctggaaaaggtatttttacggtttggaatgcctgttgccgtggtcgatttggaatcgacgggtggcaatctgtatgaagacagggtaatcgaagtggctttggtcaagtttgagcagggaagggtggtgaggcatgagtggttggttaatcctcaaaaaccgattccgcagtttgtggcggggctgacggggatttcagacggcatggttgccgatgcgcctgtttttgcagagattgccggcgagttgttttcggtattgaagggttgtgtgctggttgcacataacagccgtttcgactatacgtttttaaagcatgagtttcatcgtgtgggtatcggattttcatcgcctgctttgtgcagtgtgcagctgtcccggtgtctgtatccgcaattttacaagcacagcctggacagtatcatcgaaaggttggggattgttgtggaagacaggcatcgtgcgatggcggatgtatcggcattgtgcgattatttggaatacagtctgtcggaacacggggtcgaggcatggatcaggcagtgtttccgtttgatgaatccgaaaccgttgcctgccgcgctgcccgaacggttgagggaacagttgtacggtttgcctgacggtatgggggtgctggcctgtttcgacggcggaggaaaagtaaattacatcggtacgtttgaacgggtatatagcgaggtttcggctttattggattccggaaaagccccgtttgattggtgcaatacggaggaagtccgtttttttcctgcattgggcagcctgcatgcatataagattaaagcggaattggtcggacgttatcattcgggttgttatgtatctgccaaaaatctgcttaaaacatttacgaccgtcaggtttgaaaaaggttcagacggcatgttgaatgcgaaaacagcggctttgaaaaacggtgtgacggataatccgcctaccggattatttgccaataaaaaggcggcgagacgggctttgtcgtcgtgggcggaaacatacggattgtgtcctgccgcagccggtatcctgtcggacggttatacagaggatgagccttgtcccgtatatgtttcagaccgatgtgataaggcgtgcggccgttctgacgaacaggttttggcgtttgcacacaagttgcctgtcttggattggggaaaaatgaatgaggtggaaattaccgaaaccgatcctttaacgcgggaaaaagtcgttctgcatggaatgggcggcgcattggaaatgggtgacgggctttggtatttcgataaagatttaccggatgcgtttaaggcgaagtttaaaacggacaggaaaaatattaaggaaatcggttaa

SEQ ID NO: 66661 - DNA, 942 bp, Neisseria meningitidis
atgaaacgtaaaatgctaaacgtaccaaaaggcaattatgatggtatgaagggttttaccattattgaatttttggttgcgggcatgctcagtatgattgtcctgatggcggtcggatcgagttacttcacatcccggaaattaaatgatgcggcaaacgagcgtctttccgcgcaacaggatttgcggaatgcggcaacattgattgtccgcgatgcgagaatggcgggcggcttcggttgtttcaatatgtccgagcattctgcaactgatgttatttccgatacgacgcaacaaaattctcctttttccttaaaaaggaacagtacaaataaacttatccccataacggaatcttcaaatatcaattatcagaattttttccaggttggtagcgcattgatttttcaatacggaatcgatgatgttaatgcaagcgccgcgactaccgtcgtcagcagctgtgccgcaatatcgaaaccgggcaagcaaatccttactttagaaaatgtaaaaaaagaattgaagatttcggatcaggataaggagcaaaatggcaatatagcgcgtcaaaggcatgtggtcaatgcctatgcggtcggcaggattgccggtgaggaaggtttgttccgcttccaattggatgataagggcaagtggggtaatcctcagttgctcgcgaaaaagattagacatatgaaagtgcggtatatctatgtttccgactgccctgaagatgacgatgccggcaaagaggaaacattcagatatacggataaattcaacagcgcccaagatgctgttacgcccgccggggtggaggttttattgagtagcggtactgataccgagattgccgcttcttcagacaatcatatttatgcttaccgtatcgatgcgacaatacgcgggggaaatatatgcgcaaacagaacgctttga

SEQ ID NO: 66662 - DNA, 642 bp, Neisseria meningitidis
atgaaagcctttaccaaaattaccgccatcgtcgccccgctcgaccgcagcaacgtcgataccgacgccatcatccccaaacaatttttaaaatccatcaaacgcagcggcttcggccccaatgcctttgacgaatggcgttacctcgaccacggcgaaccaggcatggacaacagcaaacgcccgttgaaccctgatttctcgctgaaccagccgcgttaccaaggcgcgcaaatcctgttgacgcgtaaaaacttcggttgcggctcttcacgcgaacacgccccttgggcattggacgactacggcttccgcgccgtcatcgcccccagcttcgccgacatcttctttaacaactgctacaaaaacggccttttgcctatcgtgttgaccgaagaacaggttgaccggcttttcaaagaagttgaagccaacgaaggctaccggctctccatcgaccttgccgggcaaaccctgaccacccccggcggcgaaacattcgcattcgacattaccgaacaccgcaaacactgcctcttaaacggcttggacgaaatcggactgaccctgcaacacgccgatgaaattcacgcctttgaagaaaaacgccgccaaagccagccttggctgtttaacggttaa

SEQ ID NO: 66663 - DNA, 729 bp, Neisseria meningitidis
atgaccaaacagctgaaattaagcgcattattcgttgcattgctcgcttccggcactgctgttgcgggcgaggcgtccgttcagggttacaccgtaagcggccagtcgaacgaaatcgtacgcaacaactatggcgaatgctggaaaaacgcctactttgataaagcaagccaaggtcgcgtagaatgcggcgatgcggttgctgcccccgaacccgagccagaacccgaacccgcacccgcgcctgtcgtcgttgtggaacaggctccgcaatatgttgatgaaaccatttccctgtctgccaaaaccctgttcggtttcgataaggattcattgcgcgccgaagctcaagacaacctgaaagtattggcgcaacgcctgagtcgaaccaatgtccaatctgttcgcgtcgaaggccatactgactttatgggttctgacaaatacaatcaggccctgtccgaacgccgcgcatacgtagtggcaaacaacctggtcagcaacggcgtacctgtttctagaatttctgctgtcggcttgggcgaatctcaagcgcaaatgactcaagtttgtgaagccgaagttgccaaactgggtgcgaaagtctctaaagccaaaaaacgtgaggctctgattgcatgtatcgaacctgaccgccgtgtggatgtgaaaatccgcagcatcgtaacccgtcaggttgtgccggcacacaatcatcaccaacactaa

SEQ ID NO: 66664 - DNA, 585 bp, Neisseria meningitidis; identical to SEQ ID NO: 47826

SEQ ID NO: 66665 - DNA, 957 bp, Neisseria meningitidis
atgaacaccgccgccatctaccgccagtaccaaacctatgtccgctccgataaatccggctgggcgttggacggctgttccgacagcgcgctcattgcgcaggcaaaacagcccggtttgcatctggaaatgtgcatcaaccgcttcgactcgggcatcaccttgtcgcggatgcgcggcggcggaacgggcgcgtttcccaccgaaatccacaatttcagccacaactgcgccttgttcgtcatggtgtcggggcagaaccggttacaaatgggcggcagggaataccgcccgtctgccggcgaaatctggctggtacgcggcgagttggcggacgtatccgaaaccctgctgcccgacaacagcggcatgtgcgcgctgcatttggatttttcgctggaaaaattgcgccgctggcacgacgaaggcttgctggacgaacgcctgttttcgccgcaaacgataggccgattcgccctgcaacggctggcgcaaaacgcagcggcactgacggcggcggcctgcccactgctgcaacgcccgttcgaatcggacggcttcggcctgcttgccgacgaagccgccgcgctggaactctccgcccgattattgcgcttcaccttccgccgccacgacaacggttaccgccgtcggcgcatagacgaagccgccgacatcctgcaacacgaattcgcccgtccgctgaccatcgccgaaatcgcccgccgcgtcggactgaacgaatgctacctgaaacgctatttcaaagcgcaaaccggcgaaaccgtcgccggatgcctgcgccgcctgcggctggaacacgcgctcgccctcatcgaatccggcagcaccgtccaagccgccatgcacttttgcggctaccgccacgcgggacggttcaacgaagcgttcagacggcattacggatttttgccttcggatgtgaagaagtgctga

SEQ ID NO: 66666 - DNA, 303 bp, Neisseria meningitidis; identical to SEQ ID NO: 37201

SEQ ID NO: 66667 - DNA, 801 bp, Neisseria meningitidis
atgaacgcgttcaaccttatcattatcggcgacgaaatcctgcacggcagccgccaagacaagcatttcgcctttttcaaatccctgctcgaatccaaagggctgaagctcaatcaggtgcaatatctgcccgacgaacccgatttgctggtcaggcaactgcgccgcagcttttcagacggcataccgacgtttgttaccggcggcatcggtgctacgcccgacgaccacacgcgccaagcggccgccgccgctttggagttgcccgtcgtccgccatcctgaagccgccaagtttatcgaaggcgtaaccctgaaacgcggcgagccgctcgattcgcccgaacacgcccaacgcctgaaaatggcagatttccccgaaggcgcggaattggtgcccaatccgtttaacaacatcgccggattttctatccgcgagcattattttttccccggcttccccgtgatggcgcacccgatggcggaatgggttttggatacttattacgtcggccgcttcaaccaaaccaaacgcggcagccgcagcgtgtatgtgttcgagcagcccgaatcgcgcattacgccgattatggagcatatcgagcaaacttatctcggggtgcgttcgtacagcctgcccagcgtcggttggacgcattcagacggcacgcaggtcaaaccgcacattgagttcggcatcaaagccgaaggagaagccgtcaatcttttggacgcggcgtgggcggaagtgttgcacagcttggacggattgggagcagagctgaaaaatcgggtaaactga

SEQ ID NO: 66668 - DNA, 639 bp, Neisseria meningitidis
atgtccaaactgaccccccgcgaaattttgaccgccggcgcagttgtgccggtaatggcgattgacgacttaagcaccgccgtcgatttgtcccacgcccttgtcgaaggcggcatccccaccctcgaaatcaccctgcgcacccctgtcggcctcgatgccatccgcctgattgccaaagaagtgcccaacgccatcgtcggcgcgggtacggttaccaaccctgaacagctcaaagccgtcgaagacgcaggcgcggttttcgccatcagcccgggtttgcacgaatccctcgccaaagccggccacaacagcggcatccccctgattcccggtgttgccaccccgggcgaaatccaactggctttggaacacggcatcgacaccctcaaactcttccccgccgaagtcgtcggcggcaaagccatgctcaaagccctttacggcccttacgccgatgttcgcttctgcccaaccggcggcatcagcctggcaactgcccccgaatacctggcactgcccaacgtcctgtgcgtcggcggctcttggctgacaccgaaagaagccgtgaaaaacaaagactgggacaccatcacccgcctcgccaaagaagcggcggcattgaaacccaaagcctga

SEQ ID NO: 66669 - DNA, 324 bp, Neisseria meningitidis
atggacaactgtattttctgcaaaatcgccgccaaagacattctggcgcaaaccgtctacgaagacggcgaaatggtttgtttcaaagacatcaaccccgctgctccggttcatctgctgctgattcccaaagtccatttcgattcgttggcacacgccgcgcccgaacatcagccccttttgggaaaaatgatgctgaaagttcccgaaatcgccaaagcggcaggactggcagacggcttcaaaaccctgatcaacaccggaaaaggcggcggacaagaggtcttccacctgcatatacacatcatgggcacacccgtataa

SEQ ID NO: 66670 - DNA, 975 bp, Neisseria meningitidis
atgattgccaaacacatcgaccgtttcccgctattgaagttggatcaggtaattgattggcagccgatcgagcagtacctgaaccgtcaaaaaaaccgttacctccgagaccaccgcggccgtcctgcctatcccctgctgtccatgttcaaagccgtcctgctcggacaatggcacagcctctccgatcccgaactcgaacacagcctcattacccgcatcgatttcaacctgttttgccgttttgacgaactgagcatccccgattacagcaccttatgccgctaccgcaaccggctggcgcaagacaataccctgtctgaactgttggaactgattaaccgccaactgaccgaaaaaggtttaaaaatagagaaagcatccgctgccgtcgttgacgccaccattattcagaccgccggcagcaaacagcgccaggccatagaagttgacgaagaaggacaagttagcggccaaaccacaccgagtaaggacagcgatgcccgttggataaagaaaaacggcctctacaaactcggttacaaacaacatacccgtaccgatgaggaaggctatatcgagaaactgcacattactcccgccaatgcccatgagtgcacacacctgtcgccgttgttggaagggatagctgaaggtacgaccgtctatgccgacaaaggctatgacagtgcggaaaaccggcaacatctgaaagaacatcagttaccggacggcattatgcgcaaagcctgccgcaaccgtccgctgtcggaagtgcaaaccaaacgtaaccgatatttgtcgaagacccgttatgtggtcgaacaaagcttcggtacgctgcaccgtaagttccgctatgcgcgggcagcctatttcggactgattaaagtgagtgcgcaaagccacctgaaggcgatgtgtttgaacctgttgaaagcggccaacaggctaagtgcgcccgctgccgcctaa

SEQ ID NO: 66671 - DNA, 1275 bp, Neisseria meningitidis
atgccgtctgaaacctcttccccacgcaaagaaaacgaaacagaagtacacattcctgccgctccttttatcgtcaaacagtccggcagcaacgctttggcagtctgcgccctggtattggcggcattgggtttgggtacaagtggttttttgtttgtccaaggacagaatgtcttgaaaaaccaagagctggcattcaaccaaaaaatcgacaaagccgccttgggcgagtcggaaaacgccgccctgttgaaagacaacctcaaccggcaagccgccatacaatcagagctcgaccgtttggacggaaacgtcaaagcaaacggcgaacaaatcttggaaatgcaaaaatcctatcgcgagttgaccaaaggacgcgccgattggctggtggacgaaaccgagaccatactcaatctggcggcgcaacagctggtgttgactggcaatatccaaacggcagtcggcgtattggagcatatcgacagccgcctgtcccgtttcaatcaggcagagcttctgccgatcaagcaggcggtcagcagcgacttggcggaactgaaaaaccgtccctatgtcgatatttccggcacggcattgcgcctcgacaggctggaaatcgccgtatccggactgccgctgattttggacggcgtattgaaaccgggcgtacaggtgaagaacgaagccgcttctgcttcatggtggcagaacgtatgggaaaaatccctcggcacattgaaggggctggtcgaaatccgccgtttggaaaacaacgatgccatgctgctttcaccggaacaggcatattttgtgcgtgaaaacctgcgcctccgccttttggatgcgcgcattgcattaatgcagcgcaacggcgaagtctatcagggcgatttgaacaatgccgaagccgccgtcagacagtatttcgatgccaagtctcccgccacgcagtcgtggctgaaagaactggcggaattgaaggcgttggatgtgcgcatgactgcggatgatggtttgaaaaacagcctaaatgccgtccgcgcctatcgcgacggtacgcgcatgacggcggcggaaaatcaagaagcagaacaggcggcttccgaaccggcaaacgaaaacacagcttccgaaccggctgccgcatcggatgtgaagaccatagaagcaccgtccctgccttcggaacgcaaaccggaacagcctgcaaaaaaacagtccgtgccggaaaaggcagggcgttcgccgtccgctaaaggagaacgcgcatga

SEQ ID NO: 66672 - DNA, 429 bp, Neisseria meningitidis; identical to SEQ ID NO: 40578

SEQ ID NO: 66673 - DNA, 1041 bp, Neisseria meningitidis
atgaacacacccatccccttctccgaacggctcatccgctggcaaaaacaacacggtcgccaccacctcccttggcaggtcaaaaacccttattgcgtctggctttccgaaatcatgctccagcaaacgcaggtcgccaccgtgttggactactatccgcgtttcttagaaaaattcccgaccgttcagacgcttgccgccgcgccgcaagacgaagtgttgtcgttgtgggcgggcttgggctattacagccgcgcgcgcaacctgcacaaagccgcgcaacaagtcgtcaggcaattcggcggcacgtttccgtcggagcgcaaagacttggaaaccctctgcggcgtaggcagaagcaccgccgccgccatttctgccttctccttcaaccgccgcgaaaccattttggacggcaacgtcaaacgcgtactctgccgcgtgttcgcccgcgacggcaatccgcaggacaaaaaatttgaaaactcgctctggacacttgccgaaagcctgctgccgtctgaaaacgccgatatgcctgcctatacacaaggtttgatggatttgggcgcgaccgtgtgcaaacggacgaaacccttgtgccaccaatgcccgatggcggacatctgcgaagcaaaaaagcaaaaccgcaccgccgagctgccgcgcaaaaaaaccgccgccgaagtaccgaccctgccgctttactggctgattgtccgcaaccgggacggcgcgattttgctggaaaaacgccccgccaaaggcatttggggcgggctgtattgcgtgccgtgttttgaaagtttgaacgggctttccgactttgccgccaaattctccctgaccatggcagatatggacgaacaaaccgccctgacccaccgtctgacgcaccggctgctgatgattacgccgtttgaaggacaaatgccgtctgaaagcccttcagacggcatttggataaagccggcgcatttgaaagattacggcctgcccaagcctttggaaatttatttaaacggtaataggttagaataa

SEQ ID NO: 66674 - DNA, 327 bp, Neisseria meningitidis; identical to SEQ ID NO: 37835

SEQ ID NO: 66675 - DNA, 492 bp, Neisseria meningitidis
atgaaaaacggcagccgcagctatgcgccgaaggcgggcgaattaaaacaaccggtaaccaatgtttcctggtttgccgccaacgcctattgcgccgcacaaggcaaacgcctgccgaccattgacgaatgggaatttgccggacttgcttccgccacgcagaaaaacggctcaaacgaacccggctacaaccgcactattctcgattggtatgccgacggcggacggaaaggcctgcacgatgtcggcaaaggccgcccgaactactggggcgtttatgatatgcacgggctgatttgggaatggacggaagatttcaacagcagcctgctttcttccggcaatgccaacgcgcaaatgttttgcagcggcgcgtctatcgggtcgagcgactcgtccaactatgccgccttcctccgctacggcatccgtaccagcctgcaatccaaatatgtcttgcacaacttgggcttccgttgcacaagccgataa

SEQ ID NO: 66676 - DNA, 318 bp, Neisseria meningitidis; identical to SEQ ID NO: 39139

SEQ ID NO: 66677 - DNA, 282 bp, Neisseria meningitidis; identical to SEQ ID NO: 38303

SEQ ID NO: 66678 - DNA, 579 bp, Neisseria meningitidis; identical to SEQ ID NO: 45203

SEQ ID NO: 66679 - DNA, 375 bp, Neisseria meningitidis
atgcagtatctgattgtcaaatacagccatcaaatcttcgttaccatcaccattttggtattcaacatccgttttttcctactttggaaaaatccagaaaagcccttggcgggcttttggaaagcactgccccaccttaacgacaccatgctgctgtttacgggattgtggctgatgaaaattacccatttctccccgttcaacgcgccttggctcggtacaaaaatcctgcttctgctcgcctatatcgcattgggtatgatgatgatgcgcgcccgtccgcgttcaaccaagttctacaccgtttacctgctcgctatgtgttgcgtcgcctgcatcgtttaccttgccaaaaccaaagtcctgccgttctga

SEQ ID NO: 66680 - DNA, 975 bp, Neisseria meningitidis
atgaatatcctcagtaaaatcagcagctttatcggaaaaacattttccctctgggccgcgctctttgccgccgccgcttttttcgcgcccgacaccttcaaatgggcggggccttatattccttggctgttgggcattattatgttcggtatgggtttgacgctcaaaccttccgacttcgatattttgttcaaacatcccaaagccgtcatcatcggcgtaatcgcacaattcgccattatgccggcaaccgcctggctgctgtccaaactgttgaacctgcctgccgaaatcgcggtcggcgtgattttggtcggctgctgcccgggcggtacggcttccaatgtgatggcctatctggcgcgcggcaatatggctttgtcggttgccgttacgtctgtttccaccctgatttccccattgctgactcccgccatcttcctgatgcttgccggtgaaatgctggaaatccaagcggccggtatgttgatgtccatcgtcaaaatggttttgctccccattgttttgggtttgattgtccataaggttttgggcagtaaaaccgaaaagctgaccgatgcgctgccgctggtttccgttgccgccatcgtgctgattatcggcgcggttgttggggcaagcaaaggcaagattatggaaagcggcctgctgatttttgcggttgtcgtactccacaacggcatcggctacctgctcggcttctttgccgccaaatggaccggcctgccttatgatgcacaaaaaacgctgaccatcgaagtcggtatgcaaaactcgggcctggccgccgcgcttgccgccgcacactttgccgccgcgccggtcgttgccgttccgggcgcattgttcagcgtgtggcacaatatctccggctcgctgctggcaacttattgggcggccaaagccggtaaacataaaaaaaccctaaacgcctttcatcataatgccgtctga

SEQ ID NO: 66681 - DNA, 2190 bp, Neisseria meningitidis
atgatctaccaccgcatcgccgtaaacgtgccgctttcagacggccttttgacttattcccattccgatccgcttcctccgggaacgcgggtgcttgtgcctttccgcaataaaaccgtggtcgggatggtgtgggaaacggatattgcgccggatatggatacggcgcggattttgagtattcagacgacctttttagacgagccgccgttgcctgaaagctggcgtgatttgctctcgtttacgtcgcgttattaccactatccgacggggcaggcggtgtttgccgcgctgccgcagggtttgaaggaaacgcgcgcggtggaaatgccgcagccgccgttgttttacgcgctgaacgaagcgggcagggcgcaaacgccgccgctggcgcggttcaacaaaaaagcggctctgtgggacgcactgctgtcgggcgggatgacgatggcggcgttgaagcaggtaaacgcgcaggcggcgaaattgattgaggattgggctgaacaaggctggattgaaacgacggaagcggcgaaacccgttttaaggccgtaccacgggcaggcttcgcactctgaatttgtgttgaatgccaaccagcagaaagcttccgatgccattcagacggcctttggcagcttccaaccgtttctgctgtatggcatcaccggcagcggcaagaccgaggtgtatttcgatgcgatggcgaaagtgttggcgcaggggcggcaggtgttgtttctgttgcccgaaatcaacctcacgccgcagcttttgaagcgggtggaaaaccgttttgccgacgtgccgaccgccgtgttgcacagtcagatggcggcaggcaagcgcacgcaggattatttgcgcgcgatgttggggcaggcgaaattggtcatcggcacgcggctggcggtgttcacgccgatggatgatgtcgggctgattgtggtcgatgaggaacacgacggctcgttcaaacaggacaacgaattgcgctaccacgcccgcgatttggcggtgtggcgggcgaagcagggcggctgcccgatcatattgggcagtgccacccccagcttggagagctggcacaaggcgcaaagcggcgcgtaccgcctgctgcaactgaccgaacgcgcccataccgccgcgcaactgccgcaagtggacatcctcaacgtaggccgtctgaaacttgacaacggcttctcgccgcaagccttgcagcttttgaaacagaactttgaagcaggtggcatgtcgttggtgtacctcaaccgtcgcggcttcgcgcccgcgctgttttgcggcgactgcggttataccttcggctgcccgaactgctccgccaaaatggtgctgcaccaacgcgcccgccaactgcgctgccaccactgcgaccaccgcgaacccatcccgtacaaatgccccgactgcggcaaccaagacctgaccgccgtcggccacggcacgcagcgcgtcgaagaaaccctgcgcaccttcctgcccaaggcagccgtcgtccgtgttgacagggacagcaccgcgcacaaaaacgactgggcggatttgtaccgccgcatcgccgacaacaaaatcgacattttggtcggcacgcagatgctcgccaaagggcatgatttcgcgcggctcaacctcgttatcgtgttgaacgctgacggcagcctgtacagcgcggactttcgcgccccggaaaggctgttcgccgagctgatgcaggtgtccggcagggcggggcgcgccgacaaacccggcaaggtgttgatacagacccaactgcccgaacatcccgtcttcgccgccgtcaaagcgcaggactacgccgtgtttgccgaaaacgaattgaacgagcggcaaatgttcgccatgccgcccttcggtttccagaccgccgtccgcgccgacgcgccgcgcgttgccgatgcgatggagtttctcaatgccgccaaagaaaccctcgccccgcttttgcccgaaagcgtttcacagttcggcgccgccccgatgctgatggtgcgcctcgccgaacgcgaacgcgcgcaaatcttcctcgaatctccgtcccgacaggatttgcaccgtgccgtgagtttgtgggcgcaggtgttgcagcaaaaccgcgacggcaaaatcagatggtcggtggatgtcgatccgcaggaggcttga

SEQ ID NO: 66682 - DNA, 195 bp, Neisseria meningitidis
  misc_feature 180, 181, 182, 183, 184: 'n' is a, c, g or t
atgaaaatcaccacttggaacgtcaattcgctcaatgtgcggctgccgcaggtgcaaaacctgcttgccgacaatccgcctgatattttggttttgcaggaactcaaactcgatcaggacaaatttccggccgccgctttgcaaatgatgggctggcactgtgtttggagcgggcagaannnnncacacacttaa

SEQ ID NO: 66683 - DNA, 255 bp, Neisseria meningitidis
  misc_feature 236, 237, 238, 239, 240: 'n' is a, c, g or t
gtggtcggtaacggcaaaaaatatgccgcaccattgctggtgctgggttgcgtggtgttcggtctgggcagtctgattgtcagatccgtccccgtcggttcgtatgcaatcgcattttggcggttgctgatttcggtgttcgtattttggtttttagcacggtttttcaggcaaaaattcccaaaaaacaggaaaaccgtccgatatgccctgacggcgggcgtgtttctctcttnnnnncacacacttaattaa

SEQ ID NO: 66684 - DNA, 1392 bp, Neisseria meningitidis
atgcaagtgtttttagacaatcccaaagccttttttgaaaccgtcagcggctgggtttggggacctttgatgctgatgctgctggtcggcacgggtattttgctgactgttttattaaaaggtttgcagttcacgatgttgggttatgcgctgaaacaggcgtttatgccgccaaagaagcataaaagcggcgaaggccacgaaggcgatatttcccatttcgcggcgttgatgaccgcgctgtccgccaccatcggtacgggtaacatcgccggcgtggcgactgcggtggtaaccggcggcccgggcgcggtattttggatgtggatgaccgccattttcggcatggccaccaaatacggcgaaggcgtgttggcggtgaaataccgcgtcaacaattccaaaggcgaaatgtccggcggcccgatgtattacatcgaaaaaggcttgggcaaaaactggaaatggatggccgttgcatttgcgctgttcggcacattcgcttccttcggtatcggcagctcggtgcagtccaactcggttgcacaggcggtgcaaaccagcttcggtatcgaacctgcctataccggcattacgttgaccgttctgactgccgttgtcgttttaggtggtattaaaggcatcgccaaagccgcttctttcatcgtgcctgctatggcggtgttttatgtgttgggcggtctttccattatcgcgattaattccgatgcactgatgcctgccgtcaagctgattttctccgatgcgttcagcgcgcaggcagtggcgggcggcgctatcggtacggtcatccgctacggtgtggcgcgcggcgtgttctccaatgaggcgggtatgggttctgcgcctattgccgccgcagccgcgaaaaccgaccatcccgtccgtcaggccttggtttctatgaccggtacgtttttggataccatcgtcgtttgctcgattaccggcatcgtgttggtaatgggactgctcggcgcgggcggcgagtttgtcaaacctgaagtgagcggcgcggcactgacaaccgtcacattccaaaaaatgctgcccggcatcggcggctggattgtcaccatcggcctgattttctttgcctactcaaccattctcggctggtgctattacggcgaaaaatgcgcggtgtatgttttcggcgagaaatttgccggtttgtaccgcgtcggttatgtttcttccgttatgctgggtaccgtgttgagccttgatttggtgtggctggcttcggacacattcaacggcttgatggcattgcccaacctgattgcacttttattgatggcgaaagtcatcgtcaatgaaacgcgcgacttcaaacaaaaaatcacaaacggcgaattgccgcattaa

SEQ ID NO: 66685 - DNA, 2028 bp, Neisseria meningitidis
atggaagttatccaatacccaaattcccccttcaaactccaccaacccttcccgcccgcaggcgaccagcccaccgccattgcaggcctgctcgaagggctttcagacggccttgcctatcaaaccctgctcggcgtaaccggttcgggcaaaacctacaccatggcgaacgtcatagcgcgaagcggccgccccgccatcatcatggcgcacaacaaaacccttgccgcccagctttacgccgaaatgcgcgaatttttccccgaaaacgcagtggaatatttcgtctcctactacgactattaccagcccgaagcctatgtgcccagccgcgacttgttcatcgaaaaagacagcgcgatcaatgaacacatcgaacaaatgcgcctttccgccaccaaaaacctgatgacgcgcgacgacgtgattatcgtcgccaccgtgtccgccatttacggtatcggcgacccgaccgagtatcaacaaatggtgttgtccgtcaaagaaggcgataccatagcccagcgcgacatcatcgccacgctcgtttccatgcagtacgaacgcggcgatttggacttcaaacgcggcagcttccgcgtgcgcggcgacgtgattgacgtgtaccccgccgaaagctccgaaaacgccttgcgtatcagcctgtttgacgacgaaatcgaccgcctcgatatgttcgacccgctttcaggcagccttatccaacgcgtcggccgctacaccgtcttcccgtccagccactacgttaccccgcgcgacaccgtattgcgcgcctgtgactccatcaaagaagaattgcgcgaacgcattgatttctttaccaaagaaaaccgtcccgtcgaacaacaacgcatcgaacagcgcacccgtttcgacctcgaaatgctctacgaaatgggcttctgtaaaggaatcgaaaactactcccgccacttctccggcaaaaaagaaggcgaaccgccgcccacgctgatggactacctgccaagcaacaccatcatgttcatcgacgaaagccacgttaccgttacccaaatcggcggcatgtacaaaggcgacgcctcgcgcaaacaaaacctcgtagattacggcttccgcctgccttccgcccgcgacaaccgcccgctcaaattccacgaatttgaaaaagtcatgccgcaaaccgtcttcgtttccgccactcccgccaaatacgaagaagaacacgccggacaagtggtcgaacaagtcgtccgtcccacagggctggtcgacccccaaatcatcatccgccccgtcgccacccaagttgatgacttaatgagcgaaatcaacgaccgcatccaaaaaggcgaacgcgtactcgttaccaccctcaccaaacgtatggcggagcaactcaccgactattacagtgaactcggcatcaaagtgcgctacctgcacagcgacatcgataccgtcgagcgcgttgaaatcattagagatttgcggctcggtctgtttgacgtactcgtcggcatcaacctcttgcgcgaaggcctcgacatccccgaagtctcccttgttgccatcctcgacgccgacaaagaaggcttcctgcgctcccaccgcagcctgattcaaaccataggccgcgccgcgcgcaacgtgaacggcgtcgcgattctgtacgccgacaaaatcaccgactccatgaaagccgccatcgacgaaaccgaacgccgccgcgaaaaacagattaaattcaacgaagaacacggcatcgtgccgcagcagattaaaaaacaagtcaaagacattatcgacggcgtgtaccacgaagaagacggcggcaaaggccgtctgaaaggcaaaaacaaggttaaagtcggcgagattcacaacgaagaagacgcgattaaagaaatcgccaaactggaaaaagctatgcagcaggcggctcgggatttgcagtttgaagaagcggctgttcttcgtgataggatacggaatattaaagagagtttgttgtttggggcggaataa

SEQ ID NO: 66686 - DNA, 2121 bp, Neisseria meningitidis
atgcgccgttttctaccgatcgcagccatatgcgccgtcgtcctgttgtacggactgacggcggcaaccggcagcaccagttcgctggcggattatttctggtggattgttgcgttcagcgcaatgctgctgctggtgttgtccgccgttttggcacgttatgtcatattgctgttgaaagacaggcgcgacggcgtattcggttcgcagattgccaaacgcctttctgggatgtttacgctggttgccgtactgcccggcgtgtttctgttcggcgtttccgcacagtttatcaacggcacgattaattcgtggttcggcaacgatacccacgaggcgcttgaacgcagcctcaatttgagcaagtccgcattgaatctggcggcagacaacgcccttggcaacgccatccccgtgcagatagacctcatcggcgcggcttccctgcccggggatatgggcagggtgctggaacattacgccggcagcggttttgcccagcttgccctgtacaatgccgcaagcggcaaaatcgaaaaaagcatcaacccgcacaagctcgatcagccgtttccaggtaaggcgcgttgggaaaaaatccaacaggcgggttcggtcagggatttggaaagcataggcggcgtattgtacgcgcagggctggctgtcggcaggtacgcacaacgggcgcgattacgccttgtttttccgtcagccggttcccaaaggcgtggcagaggatgccgtcttaatcgaaaaggcaagggcgaaatatgctgagttgagttacagcaaaaaaggtttgcagacctttttcctggcaatcctgctgattgcctcgctgctgtcgatttttcttgcactggtcatggcactgtatttcgcccgccgtttcgtcgaacccgtcctatcgcttgccgagggggcgaaggcggtggcgcaaggcgatttcagccaaacccgtcctgttttacgcaatgacgagttcgggcgtttgaccaagttgttcaaccacatgaccgagcagctttccatcgccaaagaagcagacgagcgcaaccgccggcgcgaggaagccgccagacattatcttgaatgcgtgttggaggggctgaccacgggcgtggtggtgtttgacgaacaaggctgtctgaaaaccttcaacaaagcggcggaacagattttggggatgccgcttacccccctgtggggcagcagccggcacggttggcacggcgtttcggcgcagcagtccctgcttgccgaagtgtttgccgccatcggcgcggcggcaggtacggacaaaccggtccatgtgaaatatgccgcgccggacgatgccaaaatcctgctgggcaaggcaaccgtcctgcccgaagacaacggcaacggcgtggtaatggtgattgacgacatcaccgttttgatacacgcgcaaaaagaagccgcgtggggcgaagtggccaaacggctggcacacgaaatccgcaatccgctcacgcccatccagctttccgccgaacggctggcgtggaaattgggcgggaagctggatgagcaggatgcgcaaatcctgacgcgttcgaccgacaccatcgtcaaacaggtggcggcattgaaggaaatggtcgaagcattccgcaattatgcgcgttccccttcgctcaaattggaaaatcaggatttgaacgccttaatcggcgatgtgttggcattgtatgaagccggtccgtgccggtttgcggcggagcttgccggcgaaccgctgatggtggcggcggatacgaccgccatgcggcaggtgctgcacaatattttcaaaaatgccgccgaagcggcggaagaagccgatgtacccgaagtcagggtaaaatcggaagcggggcaggacggtcggattgtcctgacggtttgcgacaacggcaaagggttcggcaaggaaatgctgcacaacgccttcgagccgtatgtaacggacaaaccggcgggaacgggattgggtctgcctgtggtgaaaaaaatcattgaagaacacggcggccgcatcagcctgagcaatcaggatgcgggtggcgcgtgtgtcagaatcatcttgccaaaaacggtaaaaacttatgcgtag

SEQ ID NO: 66687 - DNA, 996 bp, Neisseria meningitidis
atgaaaacatctatccgatacgcactgcttgccgcagccctgaccgccgcaacccccgcgctggcagacattaccgtgtacaacggccaacacaaagaagcggcacaagccgttgcagatgcctttacccgggctactggcatcaaagtcaaactcaacagcgccaaaggcgaccagcttgccggtcaaatcaaagaagaaggcagccgaagccccgccgacgtattctattccgaacaaatcccggcactcgccaccctttccgcagccaacctcctagagcccctgcccgcctccaccatcaacgaaacacgcggcaagggcgtgccggttgccgccaaaaaagactgggtggcactgagcggacgttcgcgcgtcgtcgtttacgacacccgcaaactgtctgaaaaagatttagaaaaatccgtcctgaattacgccacgccgaaatggaaaaaccgcatcggttacgcccccacttccggcgcgttcttggaacaggttgtcgccatcgtcaaactgaaaggcgaagcggccgcattgaaatggctcaaaggtctgaaagaatacggcaagccttacgctaaaaactccgtcgcccttcaagcggttgaaaacggcgaaatcgatgccgccctcatcaacaactactactggcacgctttcgcgcgtgaaaaaggcgtacaaaatgtccacacccgcctgaatttcgtccgccacagagatcccggcgcactcgttacctattccggcgcagccgtgttaaaatcctcccaaaacaaggatgaggcgaaaaaattcgtcgccttcctcgccagcaaggaaggacagcgcgccctgaccgccgtccgtgccgaatatcctttgaatccgcacgtggtatccaccttcaatttggaacccatcgccaagttggaagcaccccaagtgtccgccaccactgtttccgaaaaagaacacgccacccggctgcttgagcaagccggtatgaaataa

SEQ ID NO: 66688 - DNA, 861 bp, Neisseria meningitidis
atgaaaccctattccgccaatcccaacctgaccgaaccgcgccggctgcgcgtgttgctgattgccgccgcgctgggctttctgctgctgatgctggtcgtgccgctcgtcgccgtgttttacgaagccttaaaaggcggttgggatttgtacctgaaatccttaaacgatcccgaagcgtggtctgccatcaaattgacgctgattaccgcgctgattgtcgttcccgtcaatgctgtattgggtgtggcgatggcgtggctgctgacccgttttgattttcgcggcaagcagttgctgaccaccctgctcgatttgccgttttccgtatcgcccgtggtggccggtttgatgttcgtcttattgttcggctcgcacacggcactgggcggctggctggaagcgcaaggcatacagattatcttcgccatccccggtattgttttggcgacgctgttcgttaccttcccctttgtcgcacgcgaaatcatcccgctgatgcaggcacagggcgacagcgaagaacaggcggcattgatactcggcgcaagcggctggcagatgttttggcgcgttaccctgcccaacatcaaatgggcgttactctacggcatcatcctcaccaacgcccgcgcgatgggcgagttcggcgcggtcagcgtggtatcgggacacatacgcggcgaaaccaacaccgtcccgcttttggtcgaaatcttctacaacgaatacaacttcaccggcgcattcgccctctccggcgtattggcacttttagcactggcgacgctggcggtgcagaacatcattaccaaattacaagacaaaaaactcgccgccgccgaaaggaacgcagtatga

SEQ ID NO: 66689 - DNA, 1092 bp, Neisseria meningitidis
atgagtttgaaatgcggcatcgtcggtttgcccaacgtcggcaaatccaccctctttaacgcgctgacccagtcgggtatcgaagcggcaaactatcctttctgtaccatcgaacccaacgtcggcatcgtcgaagtgcccgacccgcgtatggctgaattggcaaaaatcgtcaatccgcaaaaaatgcagcctgccatcgtcgaatttgtcgatatcgccggtttggttgcaggcgcgagcaaaggcgaaggtctgggcaaccagttccttgccaacatccgcgagactgacgcgattgttaacgtcgtacgctgctttgacgacgacaacatcgtccacgttgcaggccgcgtcgatccgattgccgacatcgaaaccatcggtacagagttggcgcttgccgacttggcaagtgtggaaaaagccatcgtccgcgaagaaaaacgcgcccgttcaggcgacaaagacgcgcaaaagctggtcgatttgtgcaaaaaactgctgccgcatctggacgaaggcaaacccgtgcgttccttcggtttggacgcggaagaacgcgcgatgctcaaaccgctgttcctgctgaccgccaaaccggcgatgtatgtgggcaacgtcgccgaagacggttttgaaaacaatccgcacctcgaacgcctgaaagaattggcggcaaaagaaaacgcccccgtcgtcgccgtttgcgccgcaatggaaagcgaaatcgccgaattggaagacgacgaaaaagccgagttcctcgccgaaatgggcttggaagaaccgggcctgaaccgcctgatccgtgccggctacgaccttttggggctgcaaacctactttaccgccggcgtgaaagaagtccgcgcttggacgatacacaaaggcgacaccgccccgcaagccgccggcgtgattcacaccgactttgagcgcggcttcatccgcgcccaagtcatttcttacgacgactttgtctcgctcggcggcgaagccaaagccaaagaagccggcaaaatgcgtgtggaaggcaaggaatacgtcgtgcaggatggggatgtgatgcactttttgtttaacgtgtaa

SEQ ID NO: 66690 - DNA, 345 bp, Neisseria meningitidis; identical to SEQ ID NO: 43851

SEQ ID NO: 66691 - DNA, 330 bp, Neisseria meningitidis
atggatgtgcaaaaacaatatccctttgaaaccgtcgccgtatgcgtgctgccaaaccacattcacgccatttggacgctgccgcccgacgatgcggattattccctactccggcggctgattaaaaccaaattctccgcatattccccttatactaaaaacttatccgccggcaaacagcggcagcacgaacgcggtatttggcaacggcgtttttacggacacaccgtgcgcgacgaaacggatttgcagcgttgcgcggactacatccattccaatcctatcaaacaaaaaatgtcgcgtgctaaaacagaatcctgcaaaaaataa

SEQ ID NO: 66692 - DNA, 435 bp, Neisseria meningitidis; identical to SEQ ID NO: 43084

SEQ ID NO: 66693 - DNA, 207 bp, Neisseria meningitidis
atgtccgcgctgctgctgactgcctgccaacacgtttcggacaggcatgaggcagtcggtatggcaaattccgcttccaaattctgcattgccaaaggcggcggacgggaagcaaaaaaagacgaaagcggcggcggatatgccctgtgccatttgccggacagcaggattgtcgaggagtgggaatatttccgttcacaacattga

SEQ ID NO: 66694 - DNA, 165 bp, Neisseria meningitidis; identical to SEQ ID NO: 61794

SEQ ID NO: 66695 - DNA, 1275 bp, Neisseria meningitidis
atgaaaacactgcaagactggctctcgcatttggaaaccgcccacagcggcggcttgatcgatatgggcttggaacgcgtaggcgaagtgaaaaaacggatgaagctcgagccgcaatgccccgtcgtcgtcgtcgcgggaactaacggcaaaggttcggtctgcgcctacctgacacagatttacaaacaggcgggctacaaaaccggcacattaaccagcccccatttattgcgttacaacgaacgcatcgccatcaacgccgaacccgtttcggacgatacgattattgcctctttcgagcgcatcgaagcggcgcgcggcgaaatatcgctgacttattttgaattcaatacgttggcggccgtcgacatcttcatgcgcgaacaggttgacgtgatgatattggaagtcggcttgggcggacgcttggacgcggtcaacgcgtttgacggcgattgcgcggtggttaccagcgtggatttggaccatcaggcatttttgggcgatacggtcgagcaggtcggctttgaaaaagcaggcgtgttccgcagcggcaaacccgccatctgcggtcaaaaccccgcgcccaaatcgttgctttcacacgccgaagccataggcgcgaaactgctgatggtgcagcgcgatttcgagtttcacgcgatggaaaacatccaatggaactaccgcttccggccgcaacattcagacggccccgcacgcaaccgcaatgccctgcctttccctgcattacgcggcacataccagctttccaacgccgcctgcgcgttgaccgtattggaatgcttgaacgacaaattgcctgtggacatcggcgccatcaaacgcggtttgctgctggttgaaaaccccggccgcttccaagtcctgcccggccgtccgctgaccgttttggatgtcggacacaatccccacgctgcccgcgccctgcgccgcagcctgattaatttggcgtttgcgcaaaaacgcaccgccgtattcagtatgctgtccgacaaagacatagacggcgtgttggaaatcgttaaagaccagtttgacgagtggtatatcgcaccgttggacgtaccgcgcggcatgacgctcgagagcctgcaaaacaaactgcacgaacacagcatcgaaaacatacagacattcgccgccgtccgcgaagcataccgggcggcagcctcaaaagcgggcgagaacgacagaatcgtcgttttcggctcatttcataccgttgccgatgtcatgtcggtactttaa

SEQ ID NO: 66696 - DNA, 1839 bp, Neisseria meningitidis
atgttacccgcccgtttcaccattttatctgtgctcgcggcagccctgcttgccgggcaggcgtatgccgccggcgcggcggatgcgaagccgccgaaggaagtcggaaaggttttcagaaagcagcagcgttacagcgaggaagaaatcaaaaacgaacgcgcacggcttgcggcagtgggcgagcgggttaatcagatatttacgttgctgggaggggaaaccgccttgcaaaaggggcaggcgggaacggctctggcaacctatatgctgatgttggaacgcacaaaatcccccgaagtcgccgaacgcgccttggaaatggccgtgtcgctgaacgcgtttgaacaggcggaaatgatttatcagaaatggcggcagattgagcctataccgggtaaggcgcaaaaacgggcggggtggctgcggaacgtgctgagggaaagaggaaatcagcatctggacggactggaagaagtgctggctcaggcggacgaaggacagaaccgcagggtgtttttattgttggcacaagccgccgtgcaacaggacgggttggcgcaaaaagcatcgaaagcggttcgccgtgcggcgttgaaatatgaacatctgcccgaagcggcggttgccgatgtggtgttcagcgtacaggggcgcgaaaaggaaaaggcaatcggagctttgcagcgtttggcgaagctcgatacggaaatattgccccccactttaatgacgttgcgtctgactgcacgcaaatatcccgaaatactcgacggctttttcgagcagacagacacccaaaacctttcggccgtctggcaggaaatggaaattatgaatctggtttccctgcacaggctggatgatgcctatgcgcgtttgaacgtgctgttggaacgcaatccgaatgcagacctgtatattcaggcagcgatattggcggcaaaccgaaaagaaggtgcttccgttatcgacggctacgccgaaaaggcatacggcagggggacggaggaacagcggagcagggcggcgctaacggcggcgatgatgtatgccgaccgaagggattacaccaaagtcaggcagtggttgaaaaaagtgtccgcgccggaatacctgttcgacaaaggtgtgctggcggctgcggcggctgtcgagttggacggcggcagggcggctttgcggcagatcggcagggtgcggaaacttcccgaacagcaggggcggtattttacggcagacaatttgtccaaaatacagatgctcgccctgtcgaagctgcccgataaacgggaggctttgagggggttggacaagattatcgaaaaaccgcctgccggcagtaatacagagttacaggcagaggcattggtacagcggtcagttgtttacgatcggcttggcaagcggaaaaaaatgatttcagatcttgaaaaggcgttcaggcttgcacccgataacgctcagattatgaataatctgggctacagcctgctttccgattccaaacgtttggacgaaggcttcgccctgcttcagacggcataccaaatcaacccggacgataccgctgtcaacgacagcataggctgggcgtattacctgaaaggcgacgcggaaagcgcgctgccgtatctgcggtattcgtttgaaaacgaccccgagcccgaagttgccgcccatttgggcgaagtgttgtgggcattgggcgaacgcgatcaggcggttgacgtatggacgcaggcggcacaccttacgggagacaagaaaatatggcgggaaacgctcaaacgtcacggcatcgcattgccccaaccttcccgcaaaccccggaaataa

SEQ ID NO: 66697 - DNA, 798 bp, Neisseria meningitidis; identical to SEQ ID NO: 38316

SEQ ID NO: 66698 - DNA, 2277 bp, Neisseria meningitidis
atggcacaaactacactcaaacccattgttttatcaattcttttaatcaacacacccctcctcgcccaagcgcatgaaactgagcaatcggtggatttggaaacggtcagcgtcgtcggcaaaagccgtccgcgcgccacgtcggggctgttgcacacttcgaccgcctccgacaaaatcatctccggcgataccttgcgccaaaaagccgtcaacttgggcgacgctttagacggcgtaccgggcatccacgcttcgcaatacggcggcggcgcgtctgctcccgtcattcgcggtcaaacaggcaggcggattaaagtgttgaaccatcacggcgaaacaggcgatatggcggatttttcgcccgatcacgccattatggtagataccgccttgtcgcaacaggtcgaaatcctgcgcgggccggttacgctcttgtacagctcgggcaatgtggcggggctggtcgatgttgccgatggcaaaatccccgaaaaaatgcctgaaaacggcgtatcgggcgaactcggattgcgtttgagcagcggcaatctggaaaaactcacgtccggcggcatcaatatcggtttgggcaaaaactttgtattgcacacggaagggctgtaccgcaaatcgggggattacgccgtaccgcgttaccgcaatctgaaacgcctgcccgacagccacgccgattcgcaaacgggcagcatcgggctgtcttgggttggcgaaaaaggttttatcggcgtagcgtacagcgaccgtcgcgaccaatatggtctgcctgcccacagccacgaatacgatgattgccacgccgacatcatctggcaaaagagcttgattaacaaacgctatttacagctttatccgcacctgttgaccgaagaagacatcgattacgacaatccgggcttgagctgcggcttccacgacgacgatgatgcacacgcacacacccacagcggcagaccgtggatagacctgcgcaacaaacgctacgaactccgtgccgaatggaagcaaccgttccccggttttgaagccctgcgcgtacacctgaaccgcaacgactaccgccacgacgaaaaagcaggcgatgcagtcgaaaacttttttaacaaccaaacgcaaaacgcccacatcgagttgcgccaccaacccataggtcgtctgaaaggcagctggggcgtgcaatatttacaacaaaaatccagtgctttatctgccatatccgaagcggttaaacaaccgatgctgcttgacaacaaagtgcaacattacagctttttcggtgtagaacaggcaaactgggacaacttcacgcttgaaggcggcgtacgcgtggaaaaacaaaaagcctccattcagtacgacaaagcattgattgatcgggaaaactactacaaccaccccctgcccgacctcggcgcgcaccgccaaaccgcccgctcattcgcactttcgggcaactggtatttcacgccacaacacaaactcagcctgaccgcctcccatcaggaacgcctgccgtcaacgcaagagctgtacgcacacggcaaacacgtcgccaccaacacctttgaagtcggcaacaaacacctcaacaaagagcgttccaacaatatcgaactcgcgctgggctacgaaggcgaccgctggcaatacaatctggcactctaccgcaaccgcttcggtaactacatttacgcccaaaccttaaacgacggacgcggccccaaatccatcgaagacgacagcgaaatgaagctcgtgcgctacaaccaatccggcgccgacttctacggcgcggaaggcgaaatctacttcaaaccgacaccgcgctaccgcatcggcgtttccggcgactatgtacgaggccgtctgaaaaacctgccttccctacccagcagagaagatgcctacggcaaccgtcctttcatcgcacaggacgaccaaaatgccccccgtgttccggctgcgcgcctcggcttccacctgaaagcctcgctgaccgaccgtatcgatgccaatttggactactaccgcgtgttcgcccaaaacaaactcgcccgctacgaaacgcgcacgcccggacaccatatgctcaacctcggcgcaaactaccgccgcaatacgcgctatggcgagtggaattggtacgtcaaagccgacaacctgctcaaccaatccgtttacgcccacagcagctttctctctgatacgccgcaaatgggccgcagctttaccggcggcgtgaacgtgaagttttaa

SEQ ID NO: 66699 - DNA, 366 bp, Neisseria meningitidis
ttggactgccgcttcggaaggcagtaccgcttgttgaaaacggatgatttttcatccgtttttgcattcagaaaccgccgcagccgcgacctgctgcaagtttcgcgttcaaacggcaacgggctggaccatccccgcatcggtctggtggtcggcaaaaaaaccgccaaacgcgccaacgaacgaaattatatgaagcgcgtcatccgcgactggttcagattgaacaaaaaccggctgccgccgcaggatttcgtcgtgcgcgtccaccgtaaattcgacagggctaccgcaaaacaggcaagggcggaactggcacaactcatgttcggcaaccccgcaaccggatgcaggaaacaggcatga

SEQ ID NO: 66700 - DNA, 1116 bp, Neisseria meningitidis; identical to SEQ ID NO: 60911

SEQ ID NO: 66701 - DNA, 702 bp, Neisseria meningitidis
atgtcagcacaaacaattgccgtgatcggcgcaatggaacaggaaattgagcttttgcgtgaaagcatggccaatgtcaaacatgtatccttcggtaaattctcagcatatgaaggcgaattggccgggaaacgcatggtattggttttgagcggtatcggtaaagtcaatgcggcggtttcgacttcttgggtcattcatcagtttgcaccggattgcgtcatcaataccggcagtgcaggcggtttgggaaagggcctgaaggtcggcgatgtggttatcggcgaaactgtggcgcatcacgatgttgatgtaacggcttttggttatgtttgggggcagataccgcaacttcctgctgtgtttgcatcggatgaaaacctgattcgccaagcagaaaaggcggcgcaagtgtttgaaggtgcggccgtaacgcaaggcctgattgtcagtggcgaccgttttgtgcacagcagtgaaggtgtcgcggaaatccgcagccatttccctgacgttaaagcagtggaaatggaagctgcggcgattgcgcagacttgccaccagttggaagtgccgtttgtgattattcgcgccgtatccgattcggcagatgagaaagcggacatcagctttgaagagtttttgaaaacggcggccgttagctcggcgaagatggtgactgagattgtcaaatcgctataa

SEQ ID NO: 66702 - DNA, 669 bp, Neisseria meningitidis
atgaaccacaacatcactttcctcaccctgttcctactcggtttcttcggcggaacgcactgcatcggtatgtgcggcggattaagcagcgcgtttgcgctccaactccccccgcatatcaaccgcttttggctgatcctgctgcttaacacaggacgggtaagcagctatacggcaatcggcctgatactcggattaatcggacaggtcggcgtttcactcgaccaaacccgcgtcctgcagaatattttatacacggccgccaacctcctgctgctctttttaggcttatacttgagcggtatttcttccttggcggcaaaaatcgagaaaatcggcaaaccgatatggcggaacctgaacccgatactcaaccggctgttacccataaaatccatacccgcctgccttgcggtcggaatattatggggctggctgccgtgcggactggtttacagcgcgtcgctttacgcgctgggaagcggtagtgcggcaacgggcgggttatatatgcttgcctttgcactgggtacgctacccaatcttttggcaatcggcattttttccctgcaactgaaaaaaatcatgcaaaaccgatatatccgcctgtgtacgggattatccgtatcattatgggcattatggaaacttgccgtcctgtggctgtaa

SEQ ID NO: 66703 - DNA, 786 bp, Neisseria meningitidis; identical to SEQ ID NO: 44566

SEQ ID NO: 66704 - DNA, 336 bp, Neisseria meningitidis
atgttcggaaaagccggattaggcggcctgatgaaacaggcgcagcaaatgcaggaaaatatgaaaaaagcgcaagccaaacttgccgaaaccgaaatcgaaggcgaagcaggcaacggcttggtcaaaatcacaatgacctgcgcgcacgaagtacgcaaaatcgacatcagccccgatttgattcaagaagccgccgacgacaaagaaatgcttgaagacctcatcctcgccgccctcaaatccgcccgtggcaaagccgaagaaaccgcaaacaaaacaatgggcgcattcgcccaaggactcccccccggagtgggcgacttcttccgctga

SEQ ID NO: 66705 - DNA, 1050 bp, Neisseria meningitidis
atgtcatctaaccaatatatccagtcgcttgagttgacaaactttaccgttcttccaaacgatacttttgaattttctgaaaatctcaatgttattgttgccgaaaacggttgtggcaaaacacatttgttaaaaattttatacagcctgctagaagtaacatctaacaccaaaaacagattactgaaaacagaattgcaaaaaagttttgccgataaattactgaatgttttccgtcccgattccttgggcaggttgagcaaacgtttgcagggacgcgggcgtacggaaatcgttttaaaactgcaaaacggcactacgcatagtagtctgaatttttccagtaactcatcatcgcaagtcaatgttcaaagcatcggattgaaagaaaatgaatatactccgacacctatcttcttacccagccgcgaattaattacactttgcccttggttcacttctttgtatcaaaaccaaagcatccctttcgaagaaacttggtttgatacctgtatgcaattaaatcacccgcttgccaaaggccccagagaaacaaaaattcgagaattgctcgaacctattgagaacgcgatgggcggaaaagtatctgaagaacaaggaaggttttatctatcgctgacaaatacgggcggtaagattgaagcacctttggtagcagagggtttgcggaaatttgtcatgattgcccggttaatcgcaacaggggcattgctggataaaggctatctattttgggatgaaccggaagctaatctgaatcctaaattgatcaaagtggctgcccgtattatttggtctttatctcaacagggtattcaggtttttattgcaacacactctttattcttattgagagaattggaacttttgaagcttgaaaataacacggatttacctgtacgttttttctcgttgattgcttccgatgatggaacaaaagtggagcaagggaacagtattaatgatttgaacacattgatattgttagatgaaaacattatgcaggcagacaggtatctgaatatttga

SEQ ID NO: 66706 - DNA, 480 bp, Neisseria meningitidis; identical to SEQ ID NO: 36216

SEQ ID NO: 66707 - DNA, 432 bp, Neisseria meningitidis; identical to SEQ ID NO: 50919

SEQ ID NO: 66708 - DNA, 693 bp, Neisseria meningitidis
atgaacgaaatcctcaggcagcccagcgttctgcttttcctcacgcttgccgtgtacgcgcttgcgattatcgtgcgcacgcgcacgggcaatatcttctgcaaccccgtactcgtcagcactatcgtgctgattgcctacctgaaaatcctcgacatcgattatgcggtgtaccacaacgccgcgcaattcattgatttttggctaaaacccgccgtcgtcgtgcttgccgtgccgctctaccaaaaccgccgtaaaatcttcaaccagtggctgcccgtcatcgtttcacagcttgcgggcagcgttacgggcattgttacggggatgtattttgccaaatggctgggcgcggaacgcgaagtcgtcctctcgctcgcgtccaaatctgttaccaaccccatcgccattgaaatcacccgctccatcggcggcattcccgccattaccgccgccaccgtcatcattgccggtctggtcggacagattgccggttacaaaatgctgaagaacacagtcgtcatgccctcgtccgtgggtatgtcgctcggcacggcttcgcacgcgatggggattgccgcctcgctcgaacgcagccgccgtatggcgtcatacgcggggctggggctgacgttcaacggcgtactgaccgcgctgattgcgccgctgctcatccccgttttgggattttga

SEQ ID NO: 66709 - DNA, 408 bp, Neisseria meningitidis
  misc_feature 393, 394, 395, 396, 397: 'n' is a, c, g or t
atgattgaatttgtccgagccaaaaaacggctgctttgggcatttgtgcttttgcttgtgtggacgtgcggttaccgatacgccgccgacaaggccgaagcggaacaaaccgccctgattgccacctatcggcattcttctatggttgcggcggaacaatatgccttgcagcttaaaaaagcgcaggacgaaaggcagcggtggtacgacttttcccaaaaacaaggaagaaagcccgtgaaaaaacagtatccgccgcaaacgaaaaaagccggctatctgaaaaccaaggaagaactgcttgcggaattggcttgctttacagcggaaatggctgccctaaaaaagcccgatgccttaatccatgggaaagaagtgcggcagaaagaacgnnnnncacacacttaa

SEQ ID NO: 66710 - DNA, 561 bp, Neisseria meningitidis
atgagctatcaagacatcttgcggggtctgttgccccccgtgtcgtatgcccgcaatgccccgcgtgtgcgggcgcaggcagaaatagacggcgcagcgctggatgcggtggcggaatcggctcaaagcgttgccgatgccgtcgacccgcgcagcgccggccaaatgctggccgattgggagcgcgtattaggtttggacggtacgggcaaaaaccgccagcgccgtgtgttggccgtcatggccaagctaaacgaaacaggcggcttgagtattccttattttgtgcgtttggccgaggcggcgggctatcaaatccaaatcgacgaaccgcagccgttccgcgccggtgtcaaccgtgcgggcgaccgtcttgcgccgcaggaaatcatgtgggtgtggcacgttaacgtgcgcggcggcaacaaccgcattacccgattccgcgccggtatctcggcggcgggcgacaggctgaccgattacagcgatgccgtgatcgagagcctgttcaaccgcctcaagcccgcccacaccgctatccgatttacctaccgataa

SEQ ID NO: 66711 - DNA, 501 bp, Neisseria meningitidis
atggcggatttgcagaaaacttttcaaacttcgttccgtgatgcgatggcatcctgtgcggcaggcgttcatgtcatcacgacagacggtgcggcagggcgttacggcattacaatgacggcggtcgcgccggttaccgacgagccgccgaccgtgatgctgtgcatcaaccggagtgcgcgaatcattccgatcctgtcggaaaacggcagcctctgcatcaatatgctggcggacgaacatcaggatgttgccgaacattttgccgggctgaccggcctgtcgcccgaagagcggtttgcctaccatatttggcatcgcggcaaaacgggacaacttgaaatagaaggcgcgttggcgcacctgcacgggcatattgtcggcaaacatgaaatcggcacgcattttgtgttttacgtcaggctcgacgaaattaaaaattgcgtgggcaaacgtcccgcgctgctttatttcagacggcagtttagatctttagactga

SEQ ID NO: 66712 - DNA, 603 bp, Neisseria meningitidis; identical to SEQ ID NO: 36499

SEQ ID NO: 66713 - DNA, 1644 bp, Neisseria meningitidis
atggatgcttttacccgtgcatggtatgcgctcgaacgccacaatcaggatacgcgtcatgtccttttgcgcgaccgctttgcctgcgaacccgaccgttttgagcgtatgcatgagcgtttggacgggatgttgttcgattacagcaaaaaccgtttgggcgaagatacgctgcaactgctctgccgtcttgcggagacggcggatttggaagggaaaatgcgtgctttgcggacgggtgcgaaagtcaacggcagcgaggggcgtgccgcgctgcatacggctttgcgcctacccgacggtgcggatgccgtttatgcggacggcagggacgtgttgcccgaaatccgccgcgagttaaatcgtgcgttggagtttgcacacagtttggacgacggttcgtatcaggggataaccggaaaacggattacggattttgtccacatcggcataggcggatccgacctcgggccggcaatgtgcgttcaggcactcgagccgttcagacggcatatcgccgtccattttgccgccaacgccgatcctgcctgcctggatgcggttttatgccgtctgaaccccgaaacgacagtgttttgcgttgccagcaagtccttcaaaacaccggaaaccctgctcaatgcacaggcagtcaaggcgtggtatcgcggtgcggggttctcggaatccgaaacggcgtgccatttttgcgcggtgtctgccgacactgcggcagctgcggctttcggtatcgcggcggaacgcgtgtttgcgatgtacgactgggtgggcggacgctattccgtctggtcgtccgtcggtttgcccgtgatggttgcggtcggcggggcgcgtttccgcgagttgttggcgggggcgcacgcgatggacagccattttttccacacgccgccgcgccgcaacattcccgttctgatggcactgattgccgtgtggtataacaatttccagcacgcggacgggcagaccgccgttccgtacagccacaacctgcgcctgctgccggcgtggctgaaccagctcgatatggagagtttgggcaaaagccgcgcttcagacggcagtcccgccgtgtgcaaaacgggcggcatcgtgttcggcggtgaaggggtcaactgccagcacgcctatttccaactgcttcatcaaggcacgcgcctgattccctgcgactttatcgtcccgatgacggcgcagggcgtggaggacggacgcagccgttttaccgttgccaacgcctttgcccaagcggaagccctgatgaaaggcaaaaccttggacgaagcacgcgccgaactggcagatttgcccgaagcggaacgcgaacgcctcgcgccgcacaaagaattccccggcaaccgccccagcaacagcatcctgctcgaccgcctcacgccctacaatctgggtatgctgatggcggcttacgaacacaaaaccttcgtccaaggcgcgatatggaacgtcaaccccttcgatcagtggggggttgagtacggcaaacagttggcgaaaaccatcatcggcgaactggaaggcggcacgtccgtacacgatgcctcgaccgaagggctgatggcgttttaccgcgaatgccgtctgaaaggcggcggcgcggcataa

SEQ ID NO: 66714 - DNA, 1503 bp, Neisseria meningitidis
atggcaaaagtactcatcgtacccgtatctgccggactggacgcctccgccgccgcacaagcctttgcaaaagcactggacgcacaaattttccaagccgttgacgcaaccgccgaaaccctgctcgcgcaaggcaaaagcgacgactggttcgacgcactggtcggcaaagttgccgcactcgatgccgccaacctcgtcatcgaaggcatcgcgcccgatgccgacaaaatctacctcgcaggcaaaaacgtcgaactggcattgtcccttgacgcggcagccgtcttcgccgtccgttccgacaacgccgatgccgacgaactggcaaatcggctgaaccttgccaaacagttcttcgccgccgcgccgggcgtattggaaggttttgtcgtggacggcacggcagcctccgttgccgaagcggcagccgaaaaaaccggcctgaccttcttcggttcgagcgacgcgctgaaagacgtatccgtattggcaggccgcgaagcaaaacgcctgtcgccggcgcaattccgctacaacctgatcgacttcgcccgccaagccgacaaacgcatcgtcctgcctgaaggcgcagaaccccgcaccgtccaagccgccgccatctgccacgaaaaaggcattgcccgctgcgtcctgcttgccaaacgcgaagaagtcgaagccgttgccaaagaacgcggtatcagcctgcccgactctttggaaatcatcgatcccgcctcattggtcgaacaatacgtcgagccaatgtgcgaactgcgcaaatccaaaggcctgacacccgaagacgcgcgcaagcaactgcaagacaccgtggtactcggtacgatgatgatggcgcaaaatgatgtggacggtttggtatccggtgcggttcacaccaccgccaacaccatccgccccgctttgcaactgattaaaaccgcaccgggcgcaagcctcgtgtccagcgtattctttatgctgctgcccaaccaagtcctcgtcttcggcgactgcgcggttaatccgaacccgaccgcgcaacagcttgccgacatcgccatccagtctgccgattccgcaaaagccttcggcatcgacccgaaagtggcgatgatttcctactccaccgtcaactccggcagcggccccgatgtcgataccgtcatcgaagcaaccaaacttgcccgggaaaaacgccccgacctcgccatcgacggcccgctgcaatatgatgcggcaaccgtgccgggcgtgggcaaatccaaagctccgggcagcccggtggcaggacaggcaaccgttttggtcttccccgacctgaacaccggcaactgcacctataaagccgtccaacgcagtgccaacgtcttaagcgtcggcccgctgctgcaaggcctgcgcaaaccggtcaacgacctctcccgcggcgcgctggtggaagacatcgtgttcaccatcaccctaactgccgttcaggcaaaacaaatggaaggctga

SEQ ID NO: 66715 - DNA, 243 bp, Neisseria meningitidis
  misc_feature 6, 7, 8, 9, 10: 'n' is a, c, g or t
gtgtgnnnnntcaatgcggcttcgcagcaggagctggaggcgctgccgggcataggccctgcgaaggcgaaggccattgcggaataccgtgcgcaaaacggtgcgttcaagtctgtagacgatttgaccaaggtaaagggcatcggccctgcggtgctggcgaagctgaaggaccaggcttcggtcggcgcgcccgcaccaaaaggcccagccaaaccggtgctgcccgcggataaaaaataa

SEQ ID NO: 66716 - DNA, 1554 bp, Neisseria meningitidis
atgaaccggacttatgccaatttctacgaaatgctcgccgccgcctgccgcaaaaacggcaacggcacggcagtgttcgacggcaaggaaaaaaccgcctaccgcgcgctcaagcaggaagccgaagccgttgcggcgtatctgcaaaatatcggcgtgaagttcggcgacacggtcgcgctggccgtttccaattccacagaatttattaccgcctatttcgccgtgtccgccatcggcgcggtcgccgtaccgatgaacacatttttgaaaaacagcgaatacgcgtatatcctgaacgactgcaaggcgcactgcctgttcgcctcggtcggcctgtcaaaagaattggcgggcttgaaggcgcaaacgcccgtcgaaaaaatcatttggacggacaaaagccgtccggccggcgaaatggcggaaggcgatgccttttttgaagacgtgcgccgcttccccgaaaaacccgacttgggccgccaaccccggataaatgatttggcacacatcatctacacctccggcacgacggggcatcccaaaggcgcgctaatcagttacgccaacctgttcgccaacctgaacggcatcgaacgcatctttaaaatctccaagcgcgaccgctttatcgttttcctgccgatgttccacagcttcacgctgacggctatggtgctgctgccgatttatatggcgtgttcgattattttggtcaaatccgttttccccttttccaacgttttgaaacaggcactgctcaaacgcgcgaccgtgtttttgggcgtgcccgcgatttacaccgcgatgagcaagacgaaaatcccttggtatttcagatggttcaaccgcatccgcctgtttatcagcggcggagcacctttggcggaacaaaccatcctcgatttcaaagccaagttcccccgcgccaaattgctggaaggctacggactgagcgaagcctcgcccgtcgtcgccgtcaatacgcccgagaggcaaaaagcccgcagcgtcggcatccccctgcccggtttggaagtcaaagccgtcgatgaagaattggtcgaagtgccgcgcggcgaagtgggcgaactgatcgtcaggggcggttcggtgatgcggggctacctcaatatgcctgccgccaccgatgaaaccatcgtcaacggctggttgaaaacgggcgatttcgttaccatagacgaagacggctttatctttatcgtcgaccgcaaaaaagatttgattatttccaaaggtcaaaacgtctatccgcgcgaaatcgaagaagaaatctacaaactcgatgccgtcgaagccgccgccgtcatcggcgtgaaagaccgttatgccgacgaggaaatcgtcgccttcgtccaattgaaggaaggtatggatttgggcgagaacgaaatccgccgccacctgcgtaccgtgctggcaaatttcaaaatccccaaacagatccactttaaagacgggctgccgcgcaacgctacgggcaaggtattgaaacgggtgttgaaggagcagtttgacggaaacaaatga

SEQ ID NO: 66717 - DNA, 471 bp, Neisseria meningitidis
atgtacgatgtcaatacccacgatgtccgccgctttttcgcccgcgtgtggcagcagcggctcaatccgctgcaactgagcgcactggaacagaaagccctccgcattatcgaagcccatcccgaataccaccgttatctcgaacgcatcgaagaccatctggacaccgactggctacccgaaaacggcgaaagcaaccccttcctgcatatgtcgctgcatttgtccgtccaagaacaggcgggcatagaccagccgcacggcatacgcgcaatccacgacaccctgtgcgccaaacgcggctggctggaagccgaacacgaaatgatggaggcactggcggaaacactgtggacggcgcaacgctacggcaccggtttggatgtcaatttctacatgacccgactgcgcaaactcatcggcttgggtgcagaagatcaagccagattgaacccgcatgaaatcgcctga

SEQ ID NO: 66718 - DNA, 1596 bp, Neisseria meningitidis
atgtcccaagaaatcctcgaccaagtgcgccgccgccgcacgtttgccatcatctcccaccctgacgcaggtaaaaccacgttgactgaaaaactcttgctgttttcaggtgcgattcaaagcgcgggtacggtaaaaggcaagaaaaccggcaaattcgccacctccgactggatggacatcgagaagcagcgcggcatttccgtggcatcaagcgtgatgcagttcgactataaagaccacaccgtcaacctcttggacacgccgggacaccaagacttctccgaagacacctaccgcgttttaaccgccgtggacagcgcattaatggtcatcgacgcggcaaaaggcgtggaagcgcaaaccatcaagctcttaaacgtctgccgcctgcgcgatacgccgattgttacgtttatgaacaaatacgaccgcgaagtgcgcgattcgctggaactcttggacgaagtggaaaacatcctgcaaatccgctgcgcgcccgttacctggccgatcggtatgggcaaaaacttcaaaggcgtataccacatcctgaacgacgaaatctatctctttgaagcgggcggcgaacgcctgccgcacgagttcgacatcatcaaaggcatagaaaatcccgaattggaacaacgctttccattggaaatccaacagttgcgcgacgaaatcgaattggtgcaggcggcttccaacgagtttaatctcgacgaattcctcgccggcgaactcacgcccgtattcttcggctctgcgattaacaacttcggtattcaggaaatcctcaattcattaattgactgggcgcccgcgccgaaaccgcgcgacgcgaccgtacgtatggtcgagccggacgaggctaagttttccggatttatctttaaaatccaagccaatatggatccgaaacaccgcgaccgcatcgccttcttgcgcgtctgctccggcagattcgagcgcggtatgaagatgaaacacctgcgtatcaaccgcgaaatcgccgcctccagcgtggtaaccttcatgtcccacgaccgcgagctggttgaagaagcctacgccggcgacattatcggtatcccaaaccacggcaacatccaaatcggcgacagcttctccgaaggcgaacaactgacgtttaccggcatcccattcttcgcgcccgaactgttccgcagcgtccgcatcaaaaacccgctgaaaatcaagcaactgcaaaaaggtttgcaacaactcggcgaagaaggcgcggtacaggttttcaaaccgatgagcggcgcggatttgattttgggcgcggtcggcgtgttgcaatttgaagtcgttacctcgcggctggccaacgaatacggcgtagaagccgtgttcgacagcgcatccatctggtcggcgcgctgggtatcgtgcgacgacaagaaaaaactggcggaatttgaaaaagccaatgcaggcaacctcgccatcgacgcgggcggcaacctcgcctacctcgcccctaaccgcgtgaatctgggactcacgcaagaacgctggccggacatcgtgttccacgaaacgcgcgagcattcggtcaaactttaa

SEQ ID NO: 66719 - DNA, 894 bp, Neisseria meningitidis
atggcgaaaatcattacgccgctgtcggcaaatcaggttaaaaatgcgaagccgcgcgataagctgtataagttgtcggacgggggcgggttggctttgtggatctacccgacgggcgggcggagttggaagctgtcgtttgtgcaggatggaaggcagcagacaatttcgctggggcggtatcctgatttttcgctggccgatgcgcgggaatggcgggaggaggtgcgccgaaaacgggcgcacggggaaaatgtcgtcaataagaaggtgcgggcggattttgcttttgagaaggtggcgcgtgattggtttgtgcgttggtcgaagggtcggtctgaaaagtatgccggacaggttatgcggaattttgaacggtgggtttttccggctatcggcaatcttgatattcgtcaagtcaggacggcggatgtggtcggctgtctgcgtgtgatggaggcgcgcggtatcgttgatacgttgcgcaaaacgaaaaacagtctgaagatggtgtttgcgtttgcggtcggttcgggaatgatggaaatcaacactgtcgcgcaaatcggttcgggtgtgtttgaacgggcaaaaacggggaatatggcggcgttaagtccgtctgaattgccgcgtctgattgattttttggagcagcgcaatgaatttgcggtttatgcgggcagggtgcgtatccatcctgtaacgcggctttgtatctattggctgctgttgacaatgacgcggattcaggaggcggcgttgatggagtggtcggagttttggacggggaggtttggcgtatccccgccgaacggaaaaaggagcggcgggggcatgatgtgccgctgtcgcgggcgatgcagtgggtgttggatcaggcgcgggcgttga

SEQ ID NO: 66720 - DNA, 564 bp, Neisseria meningitidis
  misc_feature 545, 546, 547, 548, 549: 'n' is a, c, g or t
gtgaaccgaactgccttgtgctgcctttttttgaccgccgccctgattttgaccgcctgcggcagcggaggcggcggtgtcgccgccgacatcggcgcggggcttgccgatgcactaaccgcactgcccgaccataaagacaaaggtttgcagtctttgacgctggatcagtccgtcaggaaaaacgagaaactgaagctggcggcacaaggtgcggaagaaacttatggaaacggcgacagcctcgatacgggcaaattgaagaaggacaaggtcagccgcttcgactttatccgtcaaatcgaagtggacgggcagctcattaccttggagagcggagagttccaagtgtacaaacaaagccattccgccttaaccgcccttcagaccgagcaagtacaagattcggagcattccgggaagatggttgcgaaacgccggttcagaatcggcgatatagcgggcgaacatacatcttttgacaagcttcccgaaagcgacagggcgacatatcgcgggacggcgttcagttcagacgatgatgnnnnncacacacttaattaa

SEQ ID NO: 66721 - DNA, 387 bp, Neisseria meningitidis; identical to SEQ ID NO: 39754

SEQ ID NO: 66722 - DNA, 159 bp, Neisseria meningitidis
atggcaaaggcggggataggggcggacgcagtgcgcgatatgtgccacgccgagctgtcggcatggtttgaagacatcctgtcgagcctgggcataaaaacgccgaaggaagagggagtgattgtgtcgaaacggctgagaaagccggagggaaaataa

SEQ ID NO: 66723 - DNA, 201 bp, Neisseria meningitidis
atggaaaccatcaccatccctaaagaaaatttcgacgctttgctaaatctcgcaagaaccgccgtcgccctgaacgaaaattttattccaaaaatcaattacggagcatccaccataccagcagccggctttgccgcacttaacgagtttggaatagcccgctccaccgtggaatctttggaaattctcaaaattaaataa

SEQ ID NO: 66724 - DNA, 627 bp, Neisseria meningitidis
atgaacgttaacgttatcaaccatccgctcgtccgccacaaactgaccctgatgagggaggcggattgcagtacctacaaattccgtacgctgaccaccgagttggcgcgcctgatggcatacgaggcaagccgtgattttgaaatcgaaaaataccttatcgacggatggtgcggtcagattgaaggcgaccgcatcaaaggcaaaaccctgaccgtcgtccccatcctgcgcgccggtttgggtatgctcgacggcgtgctcgacctgattccgactgccaaaatcagcgtggtcggtttgcagcgcgacgaggaaacgctgaaacccgtttcctacttcgagaaattcgtggacagtatggacgaacgtcctgccctgattatcgacccgatgctggcgacgggcggttcgatggttgccaccatcgaccttttgaaagccaagggctgccgcaacatcaaagccttagtcttggttgccgcgcccgagggcgtgaaggctgttaatgacgcacaccccgatgttacgatttacaccgccgcgctcgacagccacttgaacgaaaacggctacatcatccccggcttgggcgatgcgggcgacaagattttcggcacgcgctaa

SEQ ID NO: 66725 - DNA, 666 bp, Neisseria meningitidis
atgacgtttaccgcagtgctcttcgatctcgacggcgtcatcaccgacaccgccgaataccactaccgcgcatggaaaaagctcgccgaagaactgggcatcggcatagaccgcaagtttaacgagcagctcaaaggcgtgtcgcgcgacgattcgctcaaacgcatcctcgcgcacggcggcaaaaccgtcagcgaagccgagttcgccgaactgacccgccgtaaaaacgacaactacgtcgagatgattcaggcagtcaaacccgaagacgcgtatcccggcattttgcccctgctggaaacattgaaagcaaacggcaaaaaaatcgccctcgcgtccgccagtaaaaacggcccgttcctgctcgaacgcatggggctgacccacttcttcgacgccattgccgaccctgccgccgtcgcgcattccaaacccgcccccgacatcttcctcgccgctgccgagggcgtgggtgcggacatccgccgctgcatcggcattgaagacgctgccgcaggtgtcgccgccatcaaagcctccggcgccttacccatcggtgtgggcaaagccgaagacttgggtagtgacatcgcgctggtgtccgacaccgccgggctgacctacgcctacctgcaaaacgtgtgggcgcagtcgggcaggtaa

SEQ ID NO: 66726 - DNA, 738 bp, Neisseria meningitidis
atgggcggacaaaaaacgcatttcggattcagtacggtcaacgaagatgagaaagccggaaaagtggcggaagtgttccactccgtcgccaaaaactacgacattatgaacgatgtgatgtcggcagggctgcacagggtgtggaagcatttcaccatcaacacggcgcacctgaaaaaaggcgataaagtgttggacattgcgggcggtacgggcgatttgtcgcgcggttgggcgaaacgggtcggcaaggaaggcgaggtttggctgaccgatattaattcctctatgctgaccgtcgggcgcgaccgtctgttgaacgaaggcatgattttgcccgtatcgcttgccgatgcggaaaaactgcctttccccgacaattatttcaacttggtttccgtggcgttcggcttgcggaacatgacgcataaagatgccgcgctgaaagagatgtaccgtgttttgaaaccaggcggcacgttgctggtgttggagttttccaaaatctacaaacctttggaaggcgcgtatgatttctattcgttcaagctgctgccggtcatgggcaggctgattgccaaagatgcggagagttatcaatatcttgccgaatccatccgtatgcaccccgatcaggaaactttgaaacagatgatgttggatgcgggctttgacagcgtggattatcacaatatgagtgcgggcatcgtcgcgctacataagggcgtaaaattttaa

SEQ ID NO: 66727 - DNA, 153 bp, Neisseria meningitidis
atgcccgaccgcatcaaaccaagccgaaacggcggcggtgcagacgacatagcccgacagcaaggcacggcgcagacgggcgcgaaacccgaaacatccccgaccgcgaggcacggggattttttgagcccgttgcagggggattggatttaa

SEQ ID NO: 66728 - DNA, 168 bp, Neisseria meningitidis
ttgcgtataggcaatgacctctttgtcaaacgtgtgcaacgtataccgggcaaactgcttgtaacgtccgaaaattcacgttacgcaccgtttgaaatagacctaagccatacagacgacatcgccatcgtcggtcgcgtagaatggttcggccgctccgtgaactga

SEQ ID NO: 66729 - DNA, 1809 bp, Neisseria meningitidis
atgaaaaccgcgctgccctcaagggtagttgcagaatcagccaacctccaatcgggctgggataccaaactgcaaggcacacagtttgaaaccacactgggtggcgcaaccatacgcgcaggcgtaggtgagcaggcacgggcagatgccaagattatcctcgaaggcatcaaaaccacgatccacaacgaaaccgtgagcagcagcaaatctgctctatggcaaaaacaggcaggacggggcagtaacatcgaaaccttgcaattgccgagtttcaccggtcccgttgcgcccgtactgtccgcacccggcggttacattgtcgatattcccaaaggcaatctgaaaacccaaatcgaaaagctggccaaacagcccgaatatgcctatctgaaacagcttcagacggtcaaggacgtgaactggaaccaagtacagctcgcttacgacaaatgggactataaacaggaaggcctaaccggagccggagccgcaattatcgccctggcagtagcggcggtaaccggaggagtaggcgcaggccttatcggagcggcacagggtaccgcatcggcagccgtggccgatgctgcctttaccgcattggtgagccaggcttccatttccctgatcaacaacaaaggcaatatcggtaacaccctgaaagagctgggcagaagccgcacggtaaaaaatctggttgtagcggcggcaacggcaggcgtatccaacaaactcggtgcctcttcccttgccacttggagcgaaaccccttgggtaaacaacctcaacgttaacctggccaatgcgggcagtgccgcgctgatcaacaccgctgttaacggcggcagcctgaaagacaatctggaggcaaatatcctggcggcattggtgaataccgcgcatggggaggctgcgagtaagattaagcaattggatcagcactatatcgcccacaaagttgcccatgccgtagcaggctgtgcagcagcgacggcgaataagggtaagtgtcaggacggtgcgattggcgcagccgtgggtgagattgttggggaagctttggttaaaaataccgattttagcgatatgaccccggaacaattagatttggaagttaagaaaattaccgcctatgccaaatttgcggcaggtacagttgcaggcgtaacgggaggagatgtcaatactgctgcacaaaccgcacaaaacgcggtagaaaataatgcggttaaagctgttgtaactgctgcaaaagtggtttataaggtagccagaaaaggattaaaaaacgggaaaatcaacgttagagatttaaaacagacgttgaaagacgaaggttataatttagccgacaacctgaccaccttattcgacgaaacattggattggaacgatgccaaagccgttattgatattgtcgtcggaacagagctgaatcgcgctaataaaggggaagcggcacaaaaggtcaaggaagttttagaaaaaaatcgtccttatatccctaataaaggtgctgtaccgaatatgagtacatacatgaaaaataatccttttggaaaacagctggctcaaatttcagaaaagacaacgcttccgacgcagcaagggcagtctgtcttcttggtaaaaagaaaccaagggttattaaaaaccggtgataggttttatttagatggccaacataaaaatcatttagaggtttttgataaaaatgggaactttaagtttgttctaaatatggatggttcgcttaaccaaatgaaaactggggcagcaaaaggtcgtaaattaaacttaaaatag

SEQ ID NO: 66730 - DNA, 1065 bp, Neisseria meningitidis
atggcactcgtatccatgcgccaactgcttgatcatgctgccgaaaacagctacggcctgcccgcgttcaacgtcaacaacctcgaacaaatgcgcgccattatggaagccgccgaccaagtcaacgcgcccgtcatcgtacaggcgagcgcaggtgcgcgcaaatacgcgggcgcgccgtttttgcgccacctgattttggcggctgtcgaagaatttccgcacatccccgtcgtgatgcaccaagaccacggcgcatcgcccgacgtgtgccaacgctccatccaactgggcttttcctccgtgatgatggacggctcgctgatggaagacggcaaaaccccttcttcttatgaatacaacgtcaacgccacccgtaccgtggttaatttctcccacgcctgcggcgtatccgttgaaggcgaaatcggcgtattgggcaacctcgaaactggcgaagccggcgaagaagacggtgtaggcgcagtgggcaaactttcccacgaccaaatgctcaccagcgtcgaagatgccgtgcgtttcgttaaagataccggcgttgacgcattggcgattgccgtcggcaccagccacggcgcgtacaaattcacccgtccgcccacaggcgacgtgttgcgtatcgaccgcatcaaagaaatccaccaagccctgcccaatacacacatcgtgatgcacggctccagctccgttccgcaagaatggctgaaagtcatcaacgaatacggcggcaatatcggcgaaacctacggcgtgccggttgaagaaatcgtcgaaggcatcaaacacggcgtgcgtaaagtcaacatcgataccgacttgcgccttgcttccaccggcgcggtacgccgctaccttgccgaaaacccgtccgacttcgatccgcgcaaatatttgagcaaaaccattgaagcgatgaagcaaatctgcctcgaccgctacctcgcgttcggttgcgaaggtcaggcaggcaaaatcaaaccggtttccttggaaaaaatggcaagccgttatgccaagggtgaattgaaccaaatcgtcaaataa

SEQ ID NO: 66731 - DNA, 1224 bp, Neisseria meningitidis
atgtctgcgcaatcacaaaacaatcatacgtccccattggtcgtcttgaccacgctgttcttcatgatgggttttattacctgcatgaacgacatccttatccctcatttgaaagaaattttcgacctgtcttacgttcaggcgatgctgatccaattctgtttctttaccgcctatgcggtgatgtccatcccgatgggggcttttgtcggcaaagtcggctacaaaaacggcgttatcggcggctttctgctgacggcggtcggatgcctgctgttttatcctgctgcgggtagccattcttacgcggtatttttgggcgcgttgtttattttggcttccggcgtaacgctgcttcaggtcgccggtaatccttatgttaccctgctggcgaaacccggcaaggaatcggcaacactgacgctggttcaggcgtttaacgctttgggtacgaccattgcgccgcaaatcggcgcgttcctgattctggcggacgcaacccaaaccgtcagcaaggcggaacagatttcttccgtacagattccctatttgggactggcggggctgctgattatccttgccgttttcgtgaaaatgatccggctgcccgacgcgcgcaaaattgccgccgaggaaagcgcgcacaaccacgacggcaaaaccagcgtatggcaatacaaacatctcgtgttcggtacggcaggcattttctgctatgtcggcgcggaggtgtctatcggttcgttgatggtcaacgtattgggttatctgaaagggctggatcatgcttctgccgcgcattacctgtcgttctattggggcggcgcgatggtcggacgtttcctcggttcggcggtgatggcgaaattcgcgcccaaccgttatttggcgtttaacgcatcggctgcggtcgtactgcttgccgtcgcgatggcgacgggtagcggcaatgcggatgtggcgatgtggtcgctgcttgccatcggttttttcaactcgattatgttcccgacgattttctctttggcaaccaaaggattgggaaaatttaccaacgcggcttccggtgtgctgtgtaccgcgattgtcggcggtgcggtcgttcctgtcgtgcagggctgggtggcagatacttacaccctgatgtcttcgtttgtcgtttccgtcatctgttatctgtatatcgtgttttttgcggtgtacggatatagggcggacaaataa

SEQ ID NO: 66732 - DNA, 348 bp, Neisseria meningitidis; identical to SEQ ID NO: 39706

SEQ ID NO: 66733 - DNA, 552 bp, Neisseria meningitidis
gtgaactattgcgaatttgccgcctcacttcccgaaaacaccgacaacccgaacaaacattaccacgacacgcaatacggttttccgattgaggacgacaatgaattgtttgagcggctggtgttggaaatcaatcaggcaggattaaactggacgctgatgctgaagaagcagcaggcgtttcagacagcatttgaagggttcgacatcaataccgttgccgccttcgacgacaccgaccgcgaacgcctgcttgccgacgcgggcatcgtccgcaaccgcctgaaaatcgatgccgccattttcaatgcacggcaaatccaagcgttgcaacaagaatacggctcgttcaagaactggctcgacgcgcaccatccgcgaagcaaagacgaatgggttaaactctttaaaaaacatttcaaattcgtcggcggcgaaatcgtcggcgaatttctgatgagtaccggctacctcaaaggcgcgcacgccgaaagctgtccggtttaccgtgaaaccctgaaataccacccgaaatggctcgatgccatctga

SEQ ID NO: 66734 - DNA, 768 bp, Neisseria meningitidis
atggcactggcaaaacgcatcatcccctgtctcgacgtaaaagacgggcgcgtcgtcaaaggggtgaacttcatcggtttgcgcgacgcgggcaaccccgtcgaagccgccaaacgctacaacggcgaaggcgcggacgaattgaccttcctcgacatcaccgcctcatccgacaaccgcgacaccatcctgcacatcatcgaagaggttgccggacaagtcttcatccccctgaccgtcggcggcggcgtacgcaccgttgccgacatccgccgcctgctcaatgccggcgcggacaaagtcagcatcaacaccgccgccgttacccgtcccgacctgattgacgaagccgccggatttttcggttcgcaagccatcgtcgccgccgtcgatgccaaagccgtcaaccccgaaaacacacgctgggaaatctttacccacggcgggcgcaatccgaccggtttggatgcggtggaatgggcggtcgaaatgcaaaaacgcggcgcgggcgaaatcctgctcaccggtatggacagggacggtacgaaacagggtttcaacctgccgctgacccgcgccgttgccgaagccgtcgacatccccgtcatcgcctccggcggggtcggcaatgtccggcacctgattgaaggcataaccgaaggcaaagccgatgccgtacttgccgccggcattttccatttcggggaaatcgccatccgcgaagccaaacgcgctatgcgcgaagccggcatcgaagtgcgcctctga

SEQ ID NO: 66735 - DNA, 1539 bp, Neisseria meningitidis
atgttccattccatcgaaaaatacagaacgcccgcccaagtccttttgggcctgattgcattaaccttcgtcggcttcggggtcagcacggtatcccatccgggtgccgactacatcgtccaagtgggcgacgaaaaaatcagcgaccactccatcaacaacgccatacagaacgaacaggcggacggcggcggtctttcgcgcgacgcggtgttccaatccctgctgcaacgcgcctacctgaaacagggctcgaagctgatgggcatttcggtttcttccgaacaaatcaagcagattatcgtggacgatcccaatttccacgacgcaaacggcaaattcgaccacgcgcttttaaaccgctacctttcccaacgccatatgtctgaagaccagtttgtcgaagaaatccgcgatcagtttgccttgcagaatttggtaaacctcgtccaaaacggcgtattggtcggcgacgcgcaggcggaacagctgatcaggctgacgcaggtcaaccgcaccatccgttcgcacactttcaaccccgacgagttcatcgcccaagtcaaagtgtctgaagccgatttgcagaaattttataatgcgaacaaaaaagactatctgctgccgcaggcggtcaaattagaatatgtcgccttgaatctgaaggattttgcagacaaacagaccgtcagtgaaacggaagtgaaaaatgcgtttgaagagcgcgtggcgcgtttgccgacaaatgaagccaaaccttctttcgagcaggaaaaagccgccgtcgaaaacgaattgaaaatgaaaaaggcggttgccgacttcaataaggcaaaagaaaagctgggcgatgacgcgttcaaccatccttcctcgcttgccgaagccgccaaaaacagcggtttgaaagtcgaaacccaagaaacttggctgagcaggcaggatgcgcaaatgtccggcatgcccgaaaacctaatcaatgccgtattcagcgacgacgtattgaagaaaaaacacaattccgaagtgctgaccatcaacagcgaaaccgcgtgggtcgtccgcgccaaagaagtccgcgaagagaaaaccctgccgtttgccgaagccaaagacgcggtacgtcaggcttatatccgtaccgaagccgccaaacttgccgaaaacaaggcaaaagacgtgcttacccaactgaacggcggcaaggctgttgacgtgaaatggtcggaagtgtccgttttgggcgcacagcaggcaaggcagtccatgccgcccgaggcttatgcggaactgctgaaagcaaaaccggcaaacggcaaacccgcctacgtcaggctgatcggtctgccggcacccgtgattgtcgaagtacaggctgtaaccccgccggatgatatcgccgcacagcttccgcttgcaaaacaggctttggcgcaacagcagtctgccaatactttcgacttgttgatacgttatttcaacggcaaaatcaaacagaccaaaggagcgcaatcggtcgacaacggcgacggtcagtaa

SEQ ID NO: 66736 - DNA, 774 bp, Neisseria meningitidis
atgaacactattgcagacgtgcaatccagccgagatttgcgcaatctgccgatcaatcaggtcggtatcaaagacctgcgctttccgattaccctgcaaactgcagaaggcatccagtccaccgttgcccgtctgaccatgacggtttacctgcctgctgagcagaaggggacgcatatgtcgcgttttgtcgcattgatggagcaacatgccgaagccttggattttgcacaattgcacaggctgactgccgaaatggtcgcgcttttagattcccgcgccggcaaaatcagcgtttcttttccgtttttccgcaagaaaaccgcgccggtttccggtattcggtccttactggattatgatgtctgtctcacgggcgaaatcaaagacggggcatacggctacagtatgaaggtcatgattcccgtaacctcgctttgcccgtgttccaaagaaatttcccaatatggcgcgcacaaccagcgttcgcatgttaccgtcagcctgactgccgatgcagaagtcggtatcgaggaagtcattgattatgtggaggcgcaggcaagctgccaactctacggtttgctcaaacgccccgatgaaaaatatgttaccgaaaaagcctacgaaaacccgaaattcgtggaagatatggtgcgtgatgtcgctacttcgctgatcgccgacaaacgcatcaagagtttcgttgtcgagagcgagaatttcgagtctatccacaaccattcggcttatgcctatatcgcctacccgtag

SEQ ID NO: 66737 - DNA, 564 bp, Neisseria meningitidis; identical to SEQ ID NO: 54839

SEQ ID NO: 66738 - DNA, 1614 bp, Neisseria meningitidis
gtgaactggaaccaagtacagctcgcttacgacaaatgggactataaacaggaaggcctaaccggagccggagccgcaattatcgccctggcagtagcggcggtaaccggaggagtaggcgcaggccttatcggagcggcacagggtaccgcatcggcagccgtggccgatgctgcctttaccgcattggtgagccaggcttccatttccctgatcaacaacaaaggcaatatcggtaacaccctgaaagagctgggcagaagccgcacggtgaaaaatctggtggttgccgccgctaccgcaggcgtagccgacaaaatcggcgcttcggcactgaacaatatcagcgataagcagtgggtcaatgacctaaccgtcaacctggccaatgcgggcagtgccgcgctgattaataccactgttaacggcggcagcctgaaagacaatctggaagcgaatatccttgcggctttggtcaataccgcgcatggagaggcagcaagtaaaatcaaacagttggatcatcattacattacccacaagattgcccatgccatagcgggctgtgctgcggcggcggcgaataagggcaagtgtcaggatggtgcgatcggcgctgcggtcggtgagattgttggtgagactttggttaagaatactgatttcagtcgtatgagtgcgaccgaaatcgaaaaagctaaagcgaagattactgcctattcaaaactggttgccggcactgcgtctgccgttgtaggcggggatgtgaatacagcggcgaatgcggcacagatagcggtggagaataatactttgtatcctagatgcgttggtgcaaagtgtgatgaatttcaaaaggaacaacaaaaatggatacgtgaaaatcctgaagaatatcgagaagttttgctttttcagacaggatttattccaattatcggtgatatacagagttttgtacaagcacagaccgctgccgatcacctgtttgctttgctgggtgtggttccgggtatcggtgaatcgatacaggcctataaagtagcgaaagcggcaaaaaatttacaaggcatgaaaaaagccttggacaaggcagtaaccgttgccactgcacagggctatgtcagtaaaaccaaaatcaaagtcggtcaaactgaattaagggttactgcagcaactgacaaacaattgctgaaaaccattagcgaaggaagggacacgacaggtaaaatgactgagcagttatttgactctttagctaaacaaaatggcttcagagtgctttcgggcggcaaatacggcggaaataacggttttgatcatgtatggcaggctgccgatggtagtgtcgttttgattgtagaaagtaagcagattaggaacggtacggtacagctgaatccgaatggtgcgggtggatatacgcaaatgagtgaggattggattaaacaagttgcaaatagcttacctgatggtagtcctgctaaagctgctgtcttcaaagcggagcgggaaggcaaattaaaaacggcaatagcaggcgttgatcgtcaaacaggtaaggccgttattctttctgtcaaagttccttctaaaaccaatataaggagataa

SEQ ID NO: 66739 - DNA, 600 bp, Neisseria meningitidis
atgagcgagttggataacatccttgcccataaccggcagtttgtcgagtcgggcgaatatgaaaaatactttaccgacaaataccccgaacgcgggctggcagttttgtcctgtatggatgcgcggattatcgggctgctgcccgacgcgttgggtttgaaaaacggcgatgccaagctgattaaaaatgccggcgcgctggttacgcacccgtggggttcggtgatgcggagtcttttggttgccgtgtttgaattgaaggtcagagagattatggtcatcgcccatcacgattgcggtatgcaggggctgaatgccgaagaattcctcgggcgcgtccgggaaagccggattcccgaagaccgtatcgaaaccctgcgttatgcaggtgtcgacctcgacggctggctgaccggtttcgacaacgtcgaagacagcgtgcgccatactgtcgaactcatccgccgccatccgctgatgccgcgccatattgccgttcacggattggtcatccatcccgttaccggcaaactgacgctggttgtggacggcagtgtttcagacggcatggacttatcggaaggaatggaaacatcatga

SEQ ID NO: 66740 - DNA, 531 bp, Neisseria meningitidis
  misc_feature 516, 517, 518, 519, 520: 'n' is a, c, g or t
atgaatttgcctattcaaaaattcatgatgctgtttgcagcagcaatatcgttgctgcaaatccccattagtcatgcgaacggtttggatgcccgtttgcgcgatgatatgcaggcaaaacactacgaaccgggtggtaaataccatctgtttggtaatgctcgcggcagtgttaaaaatcgggtttacgccgtccaaacatttgatgcaactgcggtcggccccatactgcctattacacacgaacggacaggatttgaaggtgttatcggctatgaaacccatttttcagggcacggacatgaagtacacagtccgttcgataatcatgattcaagaagcacttctgatttcagcggcggtgtagacggtggttttactgtttaccaacttcatcggacagggtcggaaatccatccggaggatggatatgacggaccgcaaggcagcgattatccgccccccggaggagcaagggatatatacagctactatgtcaaagaacttctacaaaannnnncacacacttaa

SEQ ID NO: 66741 - DNA, 1077 bp, Neisseria meningitidis
atgcccctcatccaaaccccgacttccgcctgccaaatccgtcaggcgtgggcgaaggttgccgacacgcccgaccgcgagacggcaggccgtctgaaagacgaaatcaaggctttgctgaaggagaaaaacgcggtcttggtggcgcattattacgtcgatccgctgattcaggatttggctttagaaacgggcggatgcgtgggcgattcgctggaaatggcgcgcttcggcgcggaacacgaagctagtacattggtggtggcgggtgtgcgcttcatgggcgagagcgcgaaaatcctctgccctgaaaaaacagtgctgatgcctgatttggaggcggaatgttctttggatttgggctgtccggaagaagcgttttcagcgttttgcgaccaacaccccgaccgcacggtcgtagtgtacgccaacacttccgccgccgtgaaagcgcgtgccgactgggtggtaacgtcttcggtggcgttggaaatcgtatcgtatttgaaatcgcgcggcgagaagctgatttggggacctgaccgccacctcggcgactacatccgccgcgaaacgggcgcggatatgctgctgtggcagggttcgtgcatcgtccacaacgaattcaaagggcaggagctggcggcgttgaaggcggaacaccccgaagcggtggtgctggttcatcccgaatcgccgcaaagcgtcatcgaactgggcgacgtggtcggctcgaccagcaaactgctgaaagccgccgtatcgcgccctgaaaaaaaattcatcgtggcgaccgatttgggcatcctgcacgaaatgcaaaagcaggcacccgacaaagaattcatcgccgcgccgacggcaggcaacggcggaagctgcaaaagctgcgcgttctgcccgtggatggcgatgaattcgctgggcggcatcaaatacgccctgacaagcggacgcaacgaaatcctgttggacaggaagctgggcgaagccgccaaactgcctttgcagcgtatgctcgacttcgcggcaggactcaaacgcggagatgtgttcaacggcatggggcccgcctga

SEQ ID NO: 66742 - DNA, 1557 bp, Neisseria meningitidis
atggatttcagttggttggcagaaccgcatacctggataggttttgccacgcttttggtgttggaagtcgtattggggatagacaatcttgtctttgtggcgattttggcaaacaaggtccagcccgcacggcgcgaccgcgcacggattatcgggctggggctggcagtcgtcatccgcatcattatgcttgcttttatggcgcacatcatcacgctgaccgagccgctgttccaaatcggcggcctcgccgtttccggcaaggacatgattatgctcgcgggcggtattttcctgctttacaaagccaccaccgaactgcatgaacgcctcgaagggcacaaccgttttaccgttgccgacagccaaaaaaaacacgcgccgttttggggcgtggtcgcgcaaatcctgatactggatgccgtgttttccatcgattcggtcattactgcggtggcgatggtcgatcatatcgtcgtggcgatgggtgcggtcgtcgtcgcaatggctgtaatgatttctgccagcaaactcttgaccgaatttgtcgacagacaccctaccgtcgtgatgctctgccttggttttttgttgatgatcggtttcagcctgattgccgaagccttccatttccacattcccaaaggctacctctacgccgccatcggcttctcgattttaatcgaactgtttaaccagatttcccagcgcaacagccgcaaaaacgactacatcggcagctcgtggcgcaagcgcaccgccgaaaacgttttgggtatgatgggcatacgcgaaagcgtgcttgccgacgcgggcggcgaatccggggacgacgcgcattttgaagaaaacgaaaaatcgatgatacgcagcgtgctgacgcttgccgaacgcccgattatgggggtgatgatcccacgccgcgacatcgaacggctggacatttcccaaagccgcgaagaacagtgtgcccaactgcaaaacacgccttacagccgcctgctcgttgtcggtaaggcgggcgtggacgaacctttgggctacatcaacaaaaaagacctgctgtcccaactgctggaaacaggcggtctcgacattcagacggcattgcgccagccgctcgttttgcccgacagcactaccgcgctgggcgcaatcgaactcttccgccaaagcagcgcggattatgctttggtggtggacgagttcggcgcggtattgggcatggtaaccatgaaagacctgctcgaaaccatcgcaggcgagttccccgaagaatttgagcgcgaagaagaaccagccgttcaggggaatcccgatgaaagcctgacggtggaaggcgcgttggaatatgtggaactcgcaccgcaactcaacctgccgcagcagcaggaagatgccgatttccatacggttgccgggctgattatggaagaattgcaaaccatccccgatgtcggtgattttgccgatttccacggttggcggtttgaagtggtcgaaaaagaagggcagcgcatcgagcgggtcaaaatcaccaaattgcccgaagaataa

SEQ ID NO: 66743 - DNA, 453 bp, Neisseria meningitidis
atgaatattgaagtagaaatgaaagtattggacgagaggatggcggattttatccctgcctatgcaacggagggttctgcaggtttagatttgcgcgcctgtttggatgaggaagtcgttttgcagccgggtgaaacgtttcttgtgccgacgggtttggcaatttatttggcgaatcccgcatatgccgccgttttgctgccccgttccggcttggggcataaacacggcattgttttgggcaatttggtcggtttgattgactccgattatcaaggggaattgaaggtgtcgttatggaacagaagcagcgaaccgtttactgtcaaaccgttcgagcgtatcgcacagatggttatcgttccggtcgtacaggcgggcttcaaacgtgtcgaggaatttgtcggaagcagccggggtgagggcggcttcggcagtacgggtttgcattga

SEQ ID NO: 66744 - DNA, 510 bp, Neisseria meningitidis; identical to SEQ ID NO: 45486

SEQ ID NO: 66745 - DNA, 1995 bp, Neisseria meningitidis
atgaaacgacattttatgcctaaaattttacaacaaacaaccttacatcgcttttttcgcgcaaacacgcaccatccgatcagcccgtccgttttgcagcaggctggcgatttgataagatggttatgtttttcagacggcatttcagatttccgtccatgccgtctgaagccgcaaaacccgattggaggaactgttatgaataccgtatcgaattacctgtccgcattgcgcgaagccatgaaggcgcaaggcttggacgcgctcgtcatcccttccgccgacccccacctgtccgaatacctgcccgagcattggcaggcgcggcgcgaattgtcgggctttaccggctcggtcggcacattcgtcgttaccgccgacgaagcgggcgtatgggtggacagccgctattgggaacaagccgccaagcagcttgcgggcagcggcatcgagctgcaaaaaagcggtcaagtgccgccgtacaacgaatggctcgcggcaaacctgcccgaaaacgccgccgtcggcatcccttccgatatggtgtcgcttaccggcaaacgcactttggcgcaatcgctcgccgccaaaaacatccgcatcgaacaccccgacggcctgcttgaccaagtgtggacaagccgcccggccattcctgccgaaaccgtgttcgtccacgaccccgcctacgtctccgaaaccgccgccgaaaaactcgcccgcgtgcgcgccgtgatggcggaaaaaggcgcggattaccacttggtttcctcgctcgacgacatcgcctggctgaccaacctgcgcggcagcgacgtgcctttcaatcccgttttcgtgtcctatctattgattggcaaagacaacgccgtcctgtttaccgaccgatgccgtctgaatgccgaagccgccgccgcgctgcaaaccgcaggcatcacggtcgagccttacgcccaagttgccgacaaactcgcgcaaatcggcggcgcgttgcttatcgaaccaaacaaaaccgccgtcagcacgcttgtgcgcctgcccgaaagcgtacgcctaatcgaaggcaccaacccgtccacctttttcaaatccgtcaaatccgaagccgacattgcccgcatccgcgaagcgatggaacacgacggcgcggcgttgtgcggtttcttcgccgagtttgaagacatcatcggcaaggacggcagcctgaccgaaatcgacgtggatacgatgctctaccgccaccgcagcgcgcgcccgggttttgtgtcattgagtttcgacaccatcgcgggcttcaacgccaacggcgccctgccgcattacagcgcgacacccgaaagccacagcaccatcagcggcaacgggcttttgctcatcgactccggcgcacaatacaaaggcggcacaaccgacatcacccgcgtcgtccccgtcggcacacccaccgccgaacaaaaacgcgacaacacgctcgtcctcaaagcccatatcgcgcttgccgaagccgtattccccgaaaacatcccctcgccgctgatcgacgcgatttgccgcaaacccctgtggcaggcgcaatgcgactacggccacggcaccggacacggcgtaggctatttcctcaacgtccacgaaggcccgcagcgcatcgccttcgccgcccccgccacgcccgaaaccgccatgaaaaaaggcatggttacctccatcgaacccggactctaccgcccgggaaaatggggcatccgcattgaaaaccttgccgccaaccaagccgtcgccgcccctcaagaaaccgaattcggcagcttcctctgttttgaaaccctgaccctctgccccatcgacacccgcctgatggacaccgccctcatgaccgacggcgaaatcgactgggtcaaccgctaccacgccgaagtccgccgccgcctcgagccgctgaccgaaggcgcggcaaaagcgtggctgatcaaacgcaccgaaccgctggcgcgttaa

SEQ ID NO: 66746 - DNA, 402 bp, Neisseria meningitidis
ttggctgaaggtcaaaaatcagccgttaccgagtattacctgaatcacggcacatggcccagcaacaacagttctgccggcgtggcatcctcctctaaaatcaaaggcaaatatgttaaggaagttgaagtcaaaaacggcgtcgttaccgccacaatgctttcaagcggcgtaaacaaagaaatccaaggcagaaaactctccctgtgggccaagcgtcaagacggttcggtaaaatggttctgcggacagccggttacgcgcaacaacgccaaagccgacgacgtcgccaagaccggtaccgccaacatcgacacaaagcacctgccgtcaacctgccgcgacgcttcatctgccgtttgcatagaaacaccacctacggctttctataaaaatacctaa

SEQ ID NO: 66747 - DNA, 1020 bp, Neisseria meningitidis
atgaacactatgctaatgtcgggcgcggctgccgcgctgcttgccggcatcatcctttatttcaaaagcgacaaaaagcggcaggaaaacggtgaatggagttccggtctggaatacgcctatatcctgacggcggtcggcgtgtttgccgctttgtccctgtttatgagctttaccgccgttttcctgattttcgttgtattgtgcggtacggcttggggggtatacaaataccgcctgaagactcatcccgaaatctcggaaagcagccacttcggcgattatttcggcagtttcttccctaccgttttggtattgttcctcatccggtcgtttattgccgaaccgttccaaatcccgtccagctcgatgcgcccgggcctgattaagggcgatttcattttggtcggcaaattttcctacggcctgcgcgtacccgttttaaacaatatatttattcctacaggcaaaatcgaacggggcgatgtcgttgtttttaattatcctctgcagccggagatgacctacatcaagcgtattgtcggcattccgggcgatgtggtcgaatatcgggataagattttgacggtaaatggcaaacccacttccgatattcctaacggcacataccgttatcccgacgacaccgacccatccgaaatccacaatacggatatgttccacagcggtttggacggcaaatccttcaatattctgaaaaaagaaggacagcctgccgtttccctgcccgtattgggcaaatatacctccgatattatgtctgaaaacggatattccatagagcaaagcggtttggaacactgccaatatgccgacgacggcagcggtttcgtgtgcaaagttcccgaaggacgctatttcgctatgggcgacaaccgcgacaacagtgccgattcgcgctactggggatttgtggatgacaagctggttgtcggcaaggcaatgttcattttgatgaacttcggcgatttcggcagggccggtacggcaatccgttag

SEQ ID NO: 66748 - DNA, 720 bp, Neisseria meningitidis
atggcgacactgtccgacaaaaccatcttaattaccggcgcatcgcaaggtctgggcgaacaggtcgccaaagcctatgcggcggcaggcgcaaccgtgattctggtggcacgccatcagaaaaaactggaaaaagtctatgacgcgattgtcgaagccagacaccccgaacccttcgccatccgtttcgacctgatgagtgcggaagaaaaagaattcaatcagttcgccgccaccattgccgaagccacgcaaggcaaactggacggcatcgtccactgcgccggctatttttacgccctctcgccgctggatttccaaaccgtcgccgaatgggtcaaccaataccgcatcaacaccgtcgcacctatggggctgacccgcgccctgttcccgctgctgaagcagtcgcccgacgcgtccgtcatcttcgtcggcgaaagccacggcgaaacacccaaagcctactggggcggcttcggcgcgtccaaagccgcgttgaactacctgtgcaaagtcgccgccgacgaatgggaacgcttcggcaacctgcgcgccaacgtcctcgtccccggacccatcaattccccgcaacgcatcaaatcccatccgggcgaagccaaaagcgaacgcaaaagctacggggacgtgctgcccgcatttgtctggtgggcaagtaccgaaagcaaagggcggagcggcgaaatcgtttacctctaa

SEQ ID NO: 66749 - DNA, 519 bp, Neisseria meningitidis; identical to SEQ ID NO: 50393

SEQ ID NO: 66750 - DNA, 786 bp, Neisseria meningitidis; identical to SEQ ID NO: 37852

SEQ ID NO: 66751 - DNA, 1272 bp, Neisseria meningitidis
atgttccaatggctttatgatgtattgtggctgcttgcgccgatatggatacggcgttatttggacaaacgctccggaagtgccccggcatatcgggcgcatcgggacgagcgtttcggcaagccgtatccgaatcccgttaccggagcggtttggatacacgccgtttcggtcggggaaacgcgtgccgcccaacctttgatacgcgagttgcggcagcgttttcccgatgcgccgctgctgatgacgcagatgaccccgacgggacgggaaaccgcgcaagttctgtttcctgatgcacaatgccgctatcttccgtatgacaaaaaaacgtgggtacggcagtttttgcgcgaacaccgcccgatgttcggcattttgatggaaaccgaaatctggcccaatctgatgaaggaatgccggcgcacgggtgtgccgctgtttttggcgaatgcgcggctgtcggaaaaatcgctaaacggttatctgaaagtccgcagcctgatccgtcctgccgccgcttcgctgacgggctgtctggcacagacggaggcggatgcggcgcggttggcgaaattgggcgcggcatccgtgcaggtgtgcggcaataccaaatacgacctgatgccgtcggaacagatgaaaacgctggcggggcagtttgaaaaacgcatcggagaccggcaggttgccgtgtgcggcagcacgcgcgtttatcggggtgaagacgaggcggaaaaactgctggcggcgtggcaacaatatcgcggcgatgccctgctggtcgtcgtgccgcgccatcccgagcattttcagacggtatttgaaacggtaaaacgcttcgggtttaaggttcagcggcgcagcgacggtttgccggtcgaacccgatacgcaggtgtggataggcgacagtatgggcgagctgtatgcgtattacctgtgcgccgatgtcgcttttgtcggcggcagtctggtcgattcgggctgtcagaacatcatcgaaccgctttcctgcggcgttccgacgatattcggcttttcgacctacaatttttccgaagcctgccggcacgccttggcatcgggtgcggcggttcaagtcgaatcggcggatgcgtggcgtgaagccgttgaaaaaaccttatcgtccgaggggggcggaatgcagatgcaggcgcgcgtggacggctttatcgcacaacatcgcggagcgagcgcgagaatcgccgaggcggtgcgggaagcggtatgcggacatcgggggcgatag

SEQ ID NO: 66752 - DNA, 1407 bp, Neisseria meningitidis
atgaacgattacgcagccatgccgtctgaagaccgtgaggtcggcgcattgtcgctgcctccacattcgatggaggcggaacaatccgttttgggtgggttgatgctggaaaatccggcttgggacaggattgccgatgtggtttccggtgaagacttctaccgccacgaacaccgcctgattttccgatccattgccaaattaatcaatgagagccgtcccgcagatgtgattacggttcaggaagatttgcagcggaacgaagaattggaagcggcaggcggatttgaatatctgattacgctggcgcaaaacaccccgtctgccgccaacatccgccgctatgccgaaatcgtgcgcgagcgttccatcatgcgccagctcgccgaagtggggacggaaatcgcacgcagcgcatacaatccgcaaggcagggacgcggggcagcttttggacgaggcggaaaacaaagtattccaaatcgccgaaagcacggccaaatccaagcagggctttttggagatgcccgatttgctgaaagaagtcgtacagcgcatcgatatgctctactcgcgcgacaatcccgatgaagttaccggcgtgccgacggggttcatcgacctcgacaaaaaaacctcgggcctgcaacccggcgacctgattatcgtcgccggtcgtccttctatgggtaagaccgccttttctatcaatatcgccgaacacgttgccgtagaaggcaagctgccggttgccgtcttctcaatggagatgggcggggcgcaactggtcatgcgtatgctcggctcggtcggacgcttggatcaaagcgtcctgaaaaccggcaggctcgaagacgaacactggggtcgtctgaacgaagcagtcgtcaaactctccgacgcgcccgtgtacatcgacgagaccccgggtttgactgcgctcgaactgcgcgcccgcgcccgtcgtctcgcccgtcaatttaacaataagcttggattaatcgtcatcgactacctgcaactgatgtcgggttcggggcgttcggacaaccgagcttcggagctgggagagatttcacgttcgctcaaagcgttggcgaaagaattgcaagtccccatcatcgccctgtcgcaattgagccgtaccgtcgaatcgcgtaccgacaaacgcccgatgatgtccgaccttcgcgagtccggcgcaatcgagcaggatgccgacctgattatgtttatgtaccgcgacgaatactacaaccaagactcgcccatgaaaggccttgccgaatgtatcatcggcaaacaccgcaacggtcccgtcggtaaaatcttcctcacatggacgggacaattcaccaaattcgacaatgctgcctatattcccgaggaggcaaagatagaagattaa

SEQ ID NO: 66753 - DNA, 801 bp, Neisseria meningitidis; identical to SEQ ID NO: 53459

SEQ ID NO: 66754 - DNA, 687 bp, Neisseria meningitidis
atggcagacttaacattccaacaagccgtttccaccatcgtcggcatgaaagacgaaatcttccgcgccttgggcgaaaccttcgtcatggtcggcttatccaccacattcgccgtcatcttcggcacgctgctgggcgtgctgctcttcgtaacctccagccgccaactgcattacaacaagctggtgaacttcctgctcgacaacctcgtcaacctcatgcgcgccttccccttcgtcatcctgatgattgcgatgatacccgccacacgcgccatcgtcggcagcaccatcggtccggttgccgcctcgctggtgttgagcgtgtcgggattgttttattttgcccgtttggtggaacaaaacctgcgcgaagtccccaaaggcgtgattgaagccgccgccgctatgggtgcgccgccggttgccatcatccgcaaagtcctcttaaacgaagcgcgcgcgggcatggtttccagcattaccgtgcttgccatcgggcttttgtcatacagcgcggcggcagggatgataggcggcggcggcttgggcgacctcgccatccgctacggctactaccgctaccaaaccgaagtcatcgtcttcatcgtcgccctcctcgtgctgctggtcatcctgattcaaagcaccggcaacgcgttggcgcggaaactcgacaaacgttga

SEQ ID NO: 66755 - DNA, 498 bp, Neisseria meningitidis; identical to SEQ ID NO: 45274

SEQ ID NO: 66756 - DNA, 3204 bp, Neisseria meningitidis
atggctaaattttttatcgaccgccctatttttgcgtgggttatttcgattttcattattgcggcgggtattttcggcatcaaaagcctgcctgtttcgcaatatccgtctgtcgccgccccgaccattactttgcacgccacttatccgggtgcgtccgcgcaggtaatggaagacagcgtgctttccgtgatcgagcggaatatgaacggcgtggaaggtttggattatatgtccacttccgccgattcgagcggcagcggcagcgtgagcctgacctttacgcccgataccgacgagaatctggcgcaggtggaagtgcagaacaagctttccgaagtattgagcacgctgccggcaaccgtccagcaatacggcgtaaccgtatccaaggcgcgttccaatttcctgatgattgtgatgctttcgtcggatgtgcagtcaaccgaagagatgaacgactacgcgcagcgtaatatcgttcccgagttgcagcgtatcgaaggcgtggggcaggtacgcctgttcggcgcgcaacgcgcgatgcggatttgggttgatcctaagaaactgcaaaactacaatttgtcgtttgccgatatcggcagcgcgctgtccgcccagaacgtccagatttcagcgggttctatcggttcgcttcccgccgttcgcggacagacggttacggctaccgtaacggcgcaagggcagttgggtacggcagaagaattcggcaacgtcatcctccgcgccaataccgacggttctaatgtttacctgaaggatgtggcaagggtcggactgggtatggaagactattcttcctcaacccgtctgaacggtgtaaataccaccggtatggcggtgatgctgtccaacagcggcaatgcgatggcgacggcaaaggcggttaaagaacgcatggcgacgttggaaaaatactttcctcagggtatgagctggaaaaccccttacgatacttccaaattcgtcgaaatttcgattgaaaaagtgattcacactttaatcgaagcgatggtgctggtgtttgtcgtaatgtatctcttcctgcaaaacatccgttatacgctgattccgaccatcgtcgtaccgatttcgctgttgggcggtttcgccttcatctcttatatgggcatgtcgattaacgtactgaccatgtttgcgatggttttggtcatcggcatcgtggtcgatgacgcgattgtggtggttgaaaacgtcgagcgcattatggcgggtgaaggcttgccgcccaaagaagcgaccaaaaaagcgatgggtcagatttcgggcgcggtcatcggtattaccgccgttctgatttccgtgttcgtaccgttggcgatgttcagcggggcgacgggcaatatttacaaacagtttgccctgacgatggcgtcatcaatcgcattctccgccttccttgcgctgacccttacccctgctttgtgtgccacaatgttgaagacaatcccgaaagggcatcacgaagagaaaaaaggtttcttcggctggtttaacaagaaattcaacagttggacgcacggttacgaaggccgggttgccaaagtgctgcgtaagactttccgcatgatggttgtctatatcggcttggcggttgtgggcgtgttcctgtttatgcgcctgccgacttcattcctgccgaccgaagaccaaggcttcgtcatggtcagcgtgcaactgcctgcaggagcgacccaagagcgcaccaatgcgactttggcgcaagttacccaactggcgaaaagcattcctgaaatagaaaacatcattaccgtttccggcttcagcttttcgggcagcggtcagaatatggcgatgggttttgccatattgaaagattggaacgagcgtaccgcgcccggcagcgatgccgttgcgattgccggcaagctgacgggtatgatgatggggacgcttaaagacggttttggcatcgccgtcgtcccgcctccgattctggagttgggcaatggttcgggcctgagcatcaacctgcaagaccgcaataataccggccataccgcattgctggcgaagcgcaacgagttgattcagaaaatgcgtgccagcggtttgtttgaccccagcaccgtccgtgctggcggtttggaagactcgccgcagttgaaaatcgacatcaaccgtgccgccgcggcggcgcaaggcatttcgtttgccgacatccgcaccgcattggcaagtgcgctgagttcgtcttatgtcagcgacttcccgaaccaaggccgtctgcaacgcgtgatggtgcaggccgacgaggatgcccgtatgcagcctgccgatattttgaacctgaccgtgccgaacaaatccggcgtcgccgtaccgctttccaccattgctactgtttcttgggaaaacggtacggaacagagcgtacgcttcaacggttatccttcgatgaagctgtccgcttcgcctgcaaccggcgtttccaccgggcaggctatggcggcggttcaaaaaatggttgacgaattgggcggcggttacagcttcgaatggggcggacagtcgcgcgaagaggcaaaaggcggctcgcaaaccctgattttgtacggtttggcggttgcagccgtatttttggtacttgccgcgctttatgaaagctggtcgattccgctggcggtcatccttgtgattccgttgggtttgatcggtgcggctgcgggcgtaaccgggcgcaacctgtttgaaggactgttgggcagcgttccctcgttcgccaacgacatctactttcaagtcggtttcgttaccgtgatgggtttgagtgcgaaaaacgcgattttgattatcgagtttgccaaagaccttcaagcgcaagggaaaagcgcggtcgaagccgctttggaagccgcccgcctgcgtttccgtccgattatcatgacctcgttcgcctttattttgggcgtggttcccctgtatattgccggtggtgcaagttctgccagccagcgcgccatcggcacgaccgtattctgggggatgctcatcggcacgctcttgtccgtgttccttgttccgcttttctatgtggtggtgcgcaaattcttcaaagaaaccgcgcacgaacacgaaatggcagtaaaacacgccgccgaagcgggcatcaccggttcggacgacagccaacattaa

SEQ ID NO: 66757 - DNA, 1227 bp, Neisseria meningitidis
atgacctttttacaacgtttgcaaggtttggcagacaataaaatctgtgcgtttgcatggttcgtcgtccgccgctttgatgaagaacgcgtaccgcaggcggcggcaagcatgacgtttacgacgctgctggcactcgtccccgtgctgaccgtgatggtggcggtcgcttcgattttccccgtgttcgaccgctggtcggattcgttcgtctccttcgtcaaccaaaccattgtgccgcagggcgcggacatggtgttcgactatatcaatgcgttccgcgagcaggcgaaccggctgacggcaatcggcagcgtgatgctggtcgttacctcgctgatgctgattcggacgatagacaatacgttcaaccgcatctggcgggtcaattcccagcgtccgtggatgatgcagtttctcgtctattgggctttactgacgttcgggccgctgtctttgggcgtgggcatttcctttatggtcggctcggtacaggatgccgcgcttgcctcaggtgcgccgcagtggtcgggcgcgttgcgaacggcggcgacgctgaccttcatgacgcttttgctgtgggggctgtaccgcttcgtgccaaaccgcttcgttcccgcgcggcaggcgtttgtcggggctttggcaacagcgttttgtctggaaaccgcgcgctccctcttcacttggtatatgggcaatttcgacggctaccgctcgatttacggcgcgtttgccgccgtgccgttttttctgttgtggctgaacctgttgtggacgctggtcttgggcggcgcggtgctgacttcttcactctcctactggcagggagaagcgttccgcaggggcttcgactcgcgcggacggtttgacgacgtgttgaaaatcctgctgcttctggatgcggcgcaaaaagaaggcaaagccttgcctgttcaggagttcagacggcatatcaatatgggctacgacgagttgggcgagcttttggaaaagctggcgcggcacggctacatctattccggcagacagggttgggtgttgaaaacgggggcggattcgattgagttgaacgaactcttcaagctcttcgtttaccgtccgttgcctgtggaaagggatcatgtgaaccaagctgtcgatgcagtaatgatgccgtgtttgcagactttgaacatgacgctggcagagtttgacgctcaggcgaaaaaacagcagcaatcttga

SEQ ID NO: 66758 - DNA, 621 bp, Neisseria meningitidis
atggcacagtttttcgccgttcatcccgacaacccccaagaacgcctcatcaagcaggcggtcgaaatcgtcaataaaggcggcgtggtcgtttatccgaccgattcctgttatgccttgggttgcaaactcggcgataaggcggcgatggaacgcatactctccatccgaaaaatcgatttgaaacaccacctgaccctgatgtgcgccgatttgagcgagttgggcacatacgccaaaatcgacaacgtacagtttcgtcagcttaaggccgccacgcccggaccttatacctttatcttgcaggcgacgaaggatgtgccggcgcgcacgctgcacccgaaacgcaaaaccatcgggctgcgtattcccgataatgccattgcacaagccctgctgggggaattgggcgaaccgcttttaagctgcaccctgatgctgcccgaagacggcgaaccattgaccgatccttatgaaatccgcgagcgtttggaacacgccgtcgatttggtgattgacggcggctggtgcggaaccgagccgaccaccgtcatcgacatgaccgacggtacggaattggtgcgccaaggttgcggcgatacggcggtgttcggtttgtag

SEQ ID NO: 66759 - DNA, 1116 bp, Neisseria meningitidis
atgaagattgtaattgcaccggattcgtttaaggaaagcttgacagctcaacaggtagctgaagcaataaaaagaggcttccaacaatcgatagcagatgtggaatgtctcctctgtcctgtcggtgatgggggagaaggcactgtagatgctatccgacattctcttgacctagaagaaaaatgtctccaagtgacaggaccttttggacaaaaagaagtcatgcgctattttcaaaaagaacaactagccctattcgaagttgctgatttggttggtcttggaaaaatcccgctagagaaacgaaatccattacaaatccaaactcgtggtattggagaattgattcgccacctcattagtcaagaaattaaagaaatctatattggcgttggcggtacggccagtaatgatggaggtattgggattgctgctggtttaggtgatcaattttatgatgaggatggaaataccttacccgcttgcggtcaatccttactaaacctagcttctgtttcaacagaaaatcgctataaaattcctgaagatgttcacattcgtattttagcagatgttgtgagtcccttatgtggacaccaaggtgcgacttatacgtttggcaagcaaaaagggttggattctactatgtttgaggccgtagatcaggcaatacaagatttttatgaaaaagtctcccctgcaacattaaaacttaaaggagcaggagctggtggaggcatcgctggtggtttgtgcgcctttgctcaggcaagtatcgtatctggaattgacacctgcctggacttgattgactttgataagaaagtgtcagatgttgacttggttatcgttggtgaaggaagactagattgtcaaagtttagcagggaaagcgcctattggtgtagcaaaaagaacccctgtcggagttcctgttgtcgctatttgtggcagtctcgttgaagatttgccttccctgccatttgaaaatatccaagctgccttttctattttggagaaaagtgaacctttagaagatagtttgaaaaatgccagtctctatttggagcatacggcttctaatattggacacttattaaatatgcctaagatttag

SEQ ID NO: 66760 - DNA, 1503 bp, Neisseria meningitidis
atgagtcgtgaaatgttacagctggcagaagcactggcaagcgaaaaaaacgttgatgcggaagtcgtcttccaagcactggaattcgccctgtctaccgccgccaagaaaaaggcagaccgcgaacacatggacgtgcgcgtccaaatcaaccgcgacaccggcgaataccaaaccttccgccgctggctgattgtcgccgatgaagactatacctatcccgatgtcgaaaaaaccatcgaggaaatccaagaggaaattcccggcactaccatccaaatcggcgaatactacgaagagcagctacccaacgaaggcttcggccgccaagccgcgcaaaccgccaaacaaatcatcctgcaacgcatccgcgatgcggagcgcgagcaaaatctgaacgagtttctcgccgtcaaagaagacatcgtgtccggtacggtcaaacgcgtcgaacgccacggcatcatcgtcgaagtcgttgccggcaaactggacgcgctgattccgcgcgaccaaatgattccgcgcgaaaacttccgctgcggcgaccgcatccgcgccctcttcctgcgcgtcgaagaaatcggcaacaccggccgcaaacaagtcatcctgagccgtacttccggcgatttcctcgtcaaactgtacgccaatgaagtacctgaaattgcagacggcatgcttgaaatccgcgctgtcgcccgcgacccgggccaacgtgccaaagtcgccgtcaaagccaacgaccagcgcatcgatccgcaaggcacctgtatcggcgttcgcggttcgcgtgtcaatgccgtcagcaatgaattatccggcgagcgcatcgacgttgtcctttggtcgcccgagcctgcccaattcgtcatgagcgcgctctcacccgccgaagtcagccgcatcgtgattgacgaagacaaacacgccgttgacgtgattgttgatgaaaaccaactggcgctagccatcggacgcggcggtcaaaacgtgcgccttgcttccgacctgaccggctggcagctcaacatcatgacttccgccgaggcagacgaacgcaatgcggcagaagatgccgccatccgccgcctgtttatggatcacttgaacgtggacgaagaaaccgccgacgtactggttcaagaaggttttgcaaccttggaagaagtcgcctatgttcctgccgccgaactgcttgccattgaaggatttgacgaagaaatcgtcgatatgctccgcaaccgcgcccgcgatgccatcctgaccatggcgattgccgccgaagaaaaactgggcgaagtatccgacgatatgcgcaacctcgaaggcatagatgccgatatgctccgcagccttgccgaagcaggcattaccacccgcgacgacttggcagagcttgctgtggacgaactgattgaaatcaccggtgtaaacgaagaaaccgcaaaagccgtcatcctgaccgcacgcgaacactggtttaccgaagacaaataa

SEQ ID NO: 66761 - DNA, 1008 bp, Neisseria meningitidis
atgtatccacttgcccgccgcatcctgtttgcactcgatgccgaaaaagcccaccacttcacgctcgacgcgctctacacggtttataaattgggtctgattcccgtaaccggcaaccgtaccaaacctgtaaaattgatgggtatggatttgcccaaccctgtcggacttgccgccggactcgacaaaaacggcgaatacatcgacgcattgggcgcgctcggctttggtttcatcgaaatcggcacggtaacgcccaaaccgcagcccggcaacccgcagccgcgcctcttccgcgttcccgaacaccaaggcatcatcaaccgcatgggtttcaacaaccacggtatcgacaccatgatacgcaacatcgaaaaaagtaaattcagtggcgtattgggcatcaacatcggtaaaaacgcggttacacccatcgaaaacgctgccgatgattatttaatctgccttgaaaaagcctacgcacacgcaagttacattaccgtcaatatttcctcgcccaacaccaaaaacctccgcgcgctgcaaggtggcgacgagttgagcgcattgcttgaggctttgaaaaacaaacaggcacagcttgcctctgtatacgggaaatacgttccgctcgccgtcaaaatcgcccccgatttggatgaagcacaaatcgaagacatcgcccacgttgtcaaatccgtcgaaatggacggcatcatcgctaccaataccaccatcgacaaatcaagtctcggcagccatccgctcgcaggcgagcagggcggtttgagcgggctgcccgttcatgaaaaaagtaatcgggtgttgaagctgttggcagaccacatcgacggcaagctgccgattatcggcgtaggcggcattatggaaggcaaggatgcggcagataaaatccgcttgggcgcgaccgccgtccaagtgtacagcggattgatatacaaaggtccggcattggtcaaagaatgtttgaaggctttggcgcgatga

SEQ ID NO: 66762 - DNA, 465 bp, Neisseria meningitidis
atgaaagaactagataaaatcgatttccgcatccttaagatcctccaacagaatgcccgcatcccgatgacggagcttgccgagaaggtaggcttgtccaccacgcccgttacagagagggtgcgccgtttggagcgggaacattatatttccggctatcacgcccatctcaatccccatctgttgggcaaaccactattggtttttgtcgagctgaagctgcaatccaaatcgggcaatattttcgaagatttcaaaaaagaagtgctgaaaattccgcaaattatggaatgccacttggtgtcgggcgaatacgactatctgattaaagtacgtttgcccgatatgtctgcctatcgggatatgctaggcaatatcctattgcaactgcctgccgcttcggagagtaggagttatgttgtgatggaggaggtcaaagaaaatccggttttggatttggattga

SEQ ID NO: 66763 - DNA, 1419 bp, Neisseria meningitidis
atggaaaatatattgtctgttctggtgggtacagtcaatcggttcctttgggactacctgctgatttacgcgcttttgggtatcggcctgttttttacgctgtatcttggtgcgccgcagattaccaagctgggcgcgggattcaaatccgtattcggcggcttgtttgccaaaggcgataaagacgacaagtctttatcgcagtttcaggcgttggcggttgccatatccgcgcaaatcggtacgggcaacgtcgccggcgtggcgaccgccatcaccgcaggcgggccgggcgcgattttttggatgtgggtttctgccgttttggggatgtccacgatttttgcggaggcactgctggcgcagaaataccgcgtcgtcagccacggcaaatacatcggcgggccggcgttctacatcacccacggtctgactccgaaaatcggcaggggcgcggcgcgttttttgtccggtttcttttccattgcgttgattatcgcattgggctttatcggtaatgcgacacaggcaaactccattgcttctgccgttaccattgcatttgatgtgccttctttggcagtcggtattgtgcttgccgtccttgcgggcatggttgtgattggcggcgtgaaccgtattgccaatattgcccaatttgtcgtgccgtttatggcggttgtttatattttgtgcgccgtcgttatcctgtttgaattttccgaccatattgtgccgatgttcaaccacatctttaccgccgccttcaatcccgaagccgttttgggcggtgcggcgggtatcggtatgcgcgaagcgatacgtttcggcgtggcgcgcggtctgttttccaatgaggcggggatgggttcgactccgcacgcccacgcgactgcggatgtgaagcatcctgtgcagcaaggtatggcggcatttgtcggtgtgtttatcgatacgattttggtatgtacggcaactgcgctgattatcctgctgaccgatgccaacctttcgggcgaacagggcgcggcggttactcaatttgcctttaacaaggcatttccgggcttcggttcgcaattgcttgccgtgtgtctgaccttcttcgccttgacgaccattatcggctggtattatttcggtgagtccaacatccgttttcttttcaggggaagacacttgggcatctatcgcgcattggttctgcttgccatcgttttaggtacgctcggcaaagtcgatttggtttggagcctgtccgatatgttcaacggctttatggttatcccgaacttgatagccctgtttttgttgcgtaaggaaatccgtgccatttatgatgattatttggcacagaaaaaagcgggtcgggatttgtcttatccgtatgaattccacgagttccacgacaagggctga

SEQ ID NO: 66764 - DNA, 930 bp, Neisseria meningitidis
atgattcacgtttcggcagtgcaggcaccggcgcatattcaggatactggacgctacggacaccggcgttacggcatcggtcatgccggtgcgatggacacggttgctttggcggcgggtaatattttattgggcaacgacgaaggcacggccgcaatcgaaatcgctttgggcgggataatgctggtgtttgaacgggatacgccgttttgtctcaccggtgccgtgtatcaggcggaattggacggcgaatcggtctattcgtattggcgttataccgcccgcaaagggcagaccttgaaaatggtgcgtgccgtgcagggcatgtacggctatgtgtgcgtggcgggcggatttgatgtgccggaagtgatgggttcgagaagcaccgacctgaaagccggtttcggcggccatcagggcagaatgctgcaaaaaggtgattgtctccccatcggcaaaggtgcgcaggaattgtccaaagtcggcattgccccgataccgtttaccgataccgtccaccttgttccttcgtcggaatatgccgctttcagtgaaaaagggcgtctgaatctggaacgggaaacgtggacgctgcaaagcgatagcaaccgcatgggctaccgcttcgacggacagccgctgaccctgtcgcaacctttggaaatgctgtcccacgctgttcaggcaggaaccgtgcaggtgccgcccggcggcaaaccgattatcctgctggccgatgcgcaaaccaccggcggttatccgaaaatcgctaccgttgccgccgccgatttgggcaggctggcacaggtgcgcttcggcagcaaagtcaaattcaaaataatcggcttgaaagaagccaccgccctgcggcgcaaaaaccaagtctatctgaaccaaatacggagaatcacccatgaagcaggttga

SEQ ID NO: 66765 - DNA, 1377 bp, Neisseria meningitidis
atgcacgacaaaacctggtccggacgtttcaacgaacccgtttccgaactcgtcaaacaatacaccgcctccatcggtttcgaccgacggcttgccgaatgggacatccaaggctcgctcgcccacgcgcaaatgttgaaagaaatcggcgtgttggacgaaggcgatttggcggacatccgtcggggcatggcggaaatcctcgaagaaatccgcagcggcaaaatcgaatggtcactcgatttggaagatgtccacatgaacatcgaacgccgcctgaccgacaaaatcggcgatgccggcaaacgcctgcacaccggccgcagccgcaacgaccaagtcgctaccgacatccgcctgtggctgcgcgatcagattaccgttattcaaaacctgattcaaagccttcagacggcattgctggatttggcggaacaaaacgccgaaaccgttatgcccggctttacccacctgcaagtcgcccagcccgtcagcttcggacaccacatgctcgcctacgtcgaaatgctcggccgcgataacgaacggatggctgactgccgccgccgcgtcaaccgtatgccgctcggcgcagccgcactggcggggacgacctatccgattcggcgcgaaattaccgccgaactgcttggctttgaacaaatctgccaaaactcgctcgatgccgtatccgaccgcgattttgccatcgagttcaccgccgccgcctcgctggttatggttcacctgagccgcctgtctgaagaattgattttgtggatgagcccgcgtttcggctttatcgacattgccgaccgtttctgcaccggctcgtccatcatgccgcaaaagaaaaatcccgacgtgcccgaactcgtgcgcggcaaatccggccgcgtcatcggacaccttatcggtctgattaccctgatgaaatcccaacccttggcgtacaacaaagacaatcaggaagacaaagaacccttgttcgacaccgccgacacgctcatcgacacgttgcggatttacgccgatatgatgcgcggcgtaaccgtcaaacccgacaatatgcgcgccgccgtgatgcagggcttcgctaccgccaccgacttggcggattatctggtcaaaaaaggcatgcctttccgcgatgcccacgaagtcgtcgcccaagccgtgcgccacgccgaccaagcgggcgtcgatttgagcgaactgccgctcgaagtcttacaaggtttcagcgatttgattgccgacgacgtttacggcgtgctgacacccgaaggcagcttaaacgcgcgcaaccacttgggcggcaccgcgcctgaacaagtccgtttccaagtcaaacgctggcgggaaatgttggcttaa

SEQ ID NO: 66766 - DNA, 714 bp, Neisseria meningitidis
ttgggcgcgtgcagcacttcctaccgcccctcgcgggcagaaaaagccaatcaggtttccaatatcaaaacccagttggcaatggaatatatgcgcggtcaggactaccgtcaggcgacggcaagtattgaagacgccctgaaatcggaccctaaaaacgagcttgcctggctggtccgtgccgaaatctaccaatacctgaaagttaacgacaaggcgcaggaaagtttccggcaagccctctccatcaaacccgacagtgccgaaatcaacaacaactacggttggttcctgtgcggcaggctcaaccgccctgccgaatctatggcatatttcgacaaagccctggccgaccccacctacccgaccccttatattgccaacctgaataaaggcatatgcagcgcaaaacaggggcaattcggattggcggaagcctatttgaaacgttccctcgccgcccagccgcagttcccacccgcatttaaagaactggcgcgcaccaaaatgctggccgggcagttgggcgatgccgattactactttaaaaaataccaaagcagggtagaagtccttcaggccgatgatttgctgctaggctggaaaattgccaaagccctcggcaacgcacaggcggcatacgaatatgaagcacaattgcaggcgaatttcccctactcggaagaattgcaaaccgtcctcatcggtcaataa

SEQ ID NO: 66767 - DNA, 3963 bp, Neisseria meningitidis
atgtctgtcgttttgcccttgcgcggcgttaccgccctttccgatttccgtgtcgaaaaactcttgcaaaaagccgccgcactcggtctgcccgaagtcaaattaagcagcgaattttggtatttcgtcggcagcgagaaagcacttgatgccgcgactgtcgaaaaactgcaagccttgttggcggcgcaaagcgttgaacaaacgccaaaagcgcgcgagggcttgcatttgtttttggtcacgccccgtttgggtacgatttcgccgtgggcttccaaggcgaccaatatcgcggaaaactgcggtttggcaggcattgagcgtatcgaacgcggcatggcggtgtggctggaaggtgcgcttaccgacaggcaaaaacaacaatgggcagccctgttgcacgaccgcatgaccgaaagcgtgttgaccgacatcgatgcggcggcgcaactgttccaccacatccaatccgaaactttctccagcgtcgatgttttgggcggcggtaaagaggctttggtcaaagccaataccgaaatgggcttggcactctccgccgacgaaatcgattatctggttgaaaactatcaggctttgcagcgcaatccgtccgatgttgaattgatgatgttcgcgcaggcaaacagcgaacactgccgccacaaaatcttcaacgccgatttcatcctcaacggcgaaaaacaaccgaaatccctgttcggcatgatacgcgacacgcacaacgcgcatcccgaaggtacggtcgtcgcttataaagacaattcgtccgtaatcgaaggcgcgaaaatcgagcgtttctatccggatgcggcggaaaaccaaggctaccgtttccacgaggaagacacgcatatcatcatgaaagtggaaacgcacaaccacccgaccgccatcgcgccgtttgcgggcgcggcgacgggcgcgggcggcgaaatccgcgacgaaggtgcgacgggcaaaggttcgcgtccgaaagcgagcttgaccggctttaccgtgtccaacctcaacatccccggcctcaaacagccgtgggaacaagattacggcaagccggaacatatttcctcgccgctggacattatgattgaaggtcccatcggcggcgcggcgttcaacaacgaattcggccgccccaacctcttgggctacttccgcacctttgaagaaaaatttgacggtcaggttcgcggctaccacaaaccgattatgattgccggcggtctgggcagcattcaggcgcagcagacgcataaagacgaaatccccgaaggcgcattgctgattcaactgggcggcccgggcatgcttatcggcttgggcggcggcgcggcttcttcgatggataccggcacgaacgacacgtctttagacttcaattccgtacaacgcggcaaccccgaaatcgaacgccgcgcgcaggaagtcatcgaccgctgctggcagctcggcggcaaaaacccgattatctccatccacgacgtgggcgcgggcggtttgtccaacgccttccccgaactcgtcaacgatgccggacgcggcgcggtattcaagctgcgcgaagtgccgctggaagaacacggtttaacgcctttgcaaatctggtgtaacgaatcgcaagagcgttatgtgttgtcgattttggaaaaagatttggataccttccgcgccatctgcgaacgcgaacgctgcccgtttgccgtagtcggcacggcgaccgacgacggtcatttgaaagtgcgcgacgatttgttcgccaacaaccccatcgatttgccgctgaacgtcttgctcggcaaaccgcccaaaaccacgcgcagcgacaaaacggttacgccatctaaaaaaccgtttcacgccgacgatatcgacatcaccgaagccgcctaccgcgttttgcgcctgcctgccgtagccgccaaaaacttcctgattaccatcggcgaccgcagcgtcggcggcatgacccaccgcgaccaaatggtcggcaaataccaaacccccgtagccgactgcgccgttaccatgatgggcttcaatacctatcgcggcgaagcaatgtctatgggcgaaaaaccgaccgttgccctgtttgacgcgcccgcctcgggcagaatgtgcgtcggcgaagccatcaccaacatcgcggcggtcaacatcggcgacatcggcaacatcaaactctccgccaactggatggcggcgtgcggcaacgaaggcgaagacgaaaaactctaccgcaccgtcgaagcggtttccaaagcctgtcaggcattggatttgagcattcccgtgggcaaagacagcctgtcgatgaaaaccgtgtggcaggacggcgaagagaaaaaatccgtcgtttcgccgttgagcctgattatctccgcgttcgcgccggttcaagacgtacgcaaaaccgttacgcccgaattgaaaaacgtcgaggacagcgtattgctgtttgtcgatttgggcttcggcaaagcgcgtatgggcggctctgcattcggtcaggtatacaacaacatgagcggcgacgcgcccgatttggacgacacaggccgtctgaaagcgttttacaacgtgattcaacagcttgtcgccgaagacaaactcttggcataccacgaccgcagcgacggcggcttgtttgccgttttggtagaaatggcgtttgcagggcggtgcggcttggatatagatttaaatttattgcttgcacaaacatttattaccaaccataccgctctgtctcaatcattgcggactgaagaggtaaaagcgttggctgaatggcaagaaaccattgcccgcacattatttaatgaagagttgggtgctgttatccaagttagaaaacaagatgttgccgatattatcaatttattctatcaacaacagctgcatcataatgtctttgaaatcggtacgttaactgatgagaacacgttaatcatccgcgacgggcaaacgcaccttatttctgacaacctaatcaaactgcaacaaacctggcaagaaaccagccatcaaatccaacgcctgcgcgacaaccctgcctgcgccgacagcgagtttgccctgattggcgacaacgaccgcagcgcattgtttgccaacctgaaattcgacgtgaacgaagacatcgccgcgccgtttatcaacagcggcgcgaaacccaaaatcgccatcctgcgcgaacagggcgtaaacgggcaaatcgaaatggccgccgccttcacccgtgccggtttcgatgcctacgacgtgcatatgtccgacctgatggcaggccgcgtccaccttgccgacttcaaaatgctggcggcgtgcggcggcttcagctacggcgacgtactcggcgcgggcgaaggctgggcgaaatccatcctgttccaccccgccttacgcgaccagttcgccgccttcttcaccgacccgaacacgctgacattgggcgtgtgcaacggctgccagatggtcagcaacctcgccgaaatcatccccggcacggcaggctggccgaagttcaagcgcaacctgagcgaacagttcgaagcgcgcctgagcatggttcacgtccccaaatcagcctccctgattctgaacgaaatgcaaggctccagcctgcccgtcgtcgtcagccacggcgaaggccgcgccgacttcgcgcttcacggcggcaacatttctgccgatttgggcattgcgttgcaatatgtggacggacaaaaccaaattacccaaacctacccgctcaaccccaacggctcgccgcaaggcatcgccggcgtgaccaacgccgacggccgcgttaccatcatgatgccgcatcctgaacgtgtataccgcgccgcacaaatgagctggaaaccggaagactggacggaattgtccggctggtaccgcctcttcgccggcgcacgtaaagccttgggctaa

SEQ ID NO: 66768 - DNA, 549 bp, Neisseria meningitidis
  misc_feature 6, 7, 8, 9, 10: 'n' is a, c, g or t
gtgtgnnnnnactttatccgtcaaatcgaagtggacgggcagctcattaccttggagagcggagagttccaagtgtacaaacaaagccattccgccttaaccgcccttcagaccgagcaagtacaagattcggagcattccgggaagatggttgcgaaacgccggttcagaatcggcgatatagcgggcgaacatacatcttttgacaagcttcccgaaagcgacagggcgacatatcgcgggacggcgttcagttcagacgatgctggtggaaaactgacctacaccatagatttcgccgccaagcagggacacggcaaaattgaacatttgaaatcgccagaactcaatgttgacctggccgccgccgatatcaagccggatgaaaaacaccatgccgtcatcagcggttccgtcctttacaatcaagacgagaaaggcagttactccctcggcatctttggcgggcaagcccaggaagttgccggcagcgcggaagtggaaaccgcaaacggcatacaccatatcggccttgctgccaagcagtaa

SEQ ID NO: 66769 - DNA, 891 bp, Neisseria meningitidis
atgagcgtattgattaataaagacaccaaagtattggttcaaggtttcaccggtaaaaacggtactttccactccgaacaagctctggcttacggcactaaagttgtcggcggcgttaccccgggcaaaggcggtcaaacccacctgaacctgcctgtattcaacaccatgaaagaagcggttaaagaaaccggcgcggatgcatctgtaatttacgttcccgctccgtttgtgttggattctatcgttgaagccgttgattcaggcgtaggcttggtcgttgtgattaccgaaggcgtgcctactctggacatgctcaaagccaaacgttatttggaaaccaacggcaacggtacccgtttggtcggccctaactgcccgggcgtgattactccgggcgagtgcaaaatcggtattatgccgggccacatccacactccgggccgcatcggtattatttcccgttccggtacattgacttacgaagccgtggcacaaaccaccaaactgggcttgggtcaatcaacctgtatcggtatcggcggcgacccgattcctggtatgaaccaaatcgacgcactgaaacttttccaagaagacccggataccgacgccatcatcatgatcggtgaaatcggcggtactgcggaagaagaagcagccgaatacatccaatccaacgtaaccaaacctgttgtaggttacattgctggtgttaccgctcctaaaggcaaacgtatgggccacgcaggtgcgattatctccggcggtaaaggtactgccgaggaaaaattcgccgctttcgaaaaagccggtatcgcttacacccgcagccctgccgagttgggcactaccatgctggaagtgttgaaaacaaaaggtttggcataa

SEQ ID NO: 66770 - DNA, 1809 bp, Neisseria meningitidis
atgcgtaccaactattgcggtctgatcagtgagcaatacttagaccaaaccgttaccgtcaaaggctgggtacaccgtcggcgcgaccacggcggtgtgatttttatcgacctgcgcgaccgcgaaggcatcgtccaagtcgtgatcgatcccgacacgcccgaagcgtttgccgctgccgattcctcccgcaacgaatacgttttgagcattaccggccgcgtacgcaaccgtcccgaaggcacgaccaacgacaaaatgatttccggcaaaatcgaaatccttgccaaagaaatcgaagtcttgaacgccgccgccacgccgccgttccaaatcgacgatgaaaacatcagcgaaaacgttcgcctgaccaaccgcgttatcgacctgcgccgtccggtgatgcagcgcaacctgcgcctgcgttaccaagtcgctatgggcgttcgccgttatctggatgcgcaaggcttcatcgacattgaaacgccgatgctgacccgctccacgcctgaaggcgcgcgcgactacctcgtaccaagccgcgtccatccgggcgagtttttcgcgctgcctcaatcgccgcaattgttcaaacaactgttgatggtagccggtttcgaccgttactaccaaatcaccaaatgtttccgtgacgaagacttgcgtgccgaccgtcaacctgaattcactcaaatcgacttggaaacctcgttcttaaacgaggatgaaatcatggacatcaccgaaggtatggcgaaacaagtcttcaaagacgcgctgggcgtggacttgggcggttttccgcgtatgccttacgccgaagcgatgttctattacggttctgacaaaccggatatgcgtatcggcttgaaatttaccgagttgaccgacctgatgaagacggaagagtttaaagtcttccgtggcgcagccgatatgaaaggcggccgcgtagtcgctctgcgtgtaccgaacggtgcgaaattcagccgcaaagaaatcgacgaatacactaaatttgtcggcatctacggtgcgaaaggtctggcatacatcaaagtaaacgatgtgggcaacctttccaacggcgaagacagcggcctgcaatctccgattgtgaaattcctgtccgaaaacgccctgaaggaaatcattgcgcgtaccggcgcggaaaacggcgacatcatcttcttcggtgcggacaaagccaaagtcgtgaacgaagccatcggcgcattgcgtatcaaagtcggcttggaacacggcgcggaaaacggctatttcacagacgaatggaaacctttgtgggttgtcgatttcccaatgttcgaatacgacgaagaagccgaccgctacgttgccgtacaccatccgtttaccgcgcctaaagaaggtcatgaagacctgatggtttccgaccctgcaaactgcctggcccgtgcctacgacatggtattgaacggctgggaaatcggcggcggctctatccgtatccaccgtgcagacgtacaagagaaagtgtttgccgcgctgaaaatcagccctgaagagcaacaagagaaattcggcttcctcttggacaacctgaaattcggtgcgcctcctcacgggggtttggcgttcggcctcgaccgtctggttacgctgatgaccggtgccgaatctatccgcgacgtgattgccttcccgaaaacacaacgtgcccaatgcctgctgaccaacgcgcccaacagcgtggacgacaagcagttgcgcgaattgagcttgcgcctgcgtcaaaaggcggctgaaaccaaagaagcataa

SEQ ID NO: 66771 - DNA, 1431 bp, Neisseria meningitidis
atgacctgggaaaccgtaatcggcttggaaatccacgtccaattgaacaccaaatccaaaatcttcagcggcgcatcgaccgcattcggcgcagaacccaacgcgcacgccggcgtagtggaatgtgctttgccgggcgtactgccggtaatgaaccgagaagtcgttgaaaaagccatcaaattaggcttggctttggatgcgaaaatcaaccggaaaaacgtgttcgaccgtaaaaactacttctatcccgacttaccaaaaggctatcaaatcagccagttggacttaccgattgtcgaacacggcaaattggaaatcgtagtcggcgacgatgtgaaaaccatcaacgtaacccgcgcccatatggaagaagacgcgggcaagtccgtacatgaaggcttgaacggcgcgaccggtatcgatttgaaccgcgccggcacgcctttattggaagtcgtatccgaacccgaaatgcgctccgccgccgaagccgttgcctacgccaaagccttgcacagcttggtaacctggctgaacatttgcgacggcaatatggcggaaggttcgttccgcgtcgatgccaacgtatccgttcgcccgaaaggtcaagcggaattcggcacgcgccgcgagattaaaaacctcaattccttccgtttcttggagcaggcgattaattacgaagcagaagcgcaaatcgagattttggaagacggcggcaaagtacagcaagcaacgatgctgtttgatcccgaaaaaggcgaaacccgcgtaatgcgcctgaaagaagacgcgcaagactaccgctacttccccgaccccgatttgctgcccgtcatcatttcagacgctcaaatgcaaaaagccaaagcagaaatgcccgagctgccgaaagaaatggcagcgcgtttcgtggcggactacggcgtgtccgaatacgacgcgcgcctgctcaccgcaagccgcgcacaggccgcctattttgaagaagccgccaaagagagcggacaaggcaagccgactgccaactggatgaacggcgaactcgccgccgcactgaacaaagaaggcatggaacttgccgacagcccgattaccgctccgcgcctcgccgcgctggtaggcaaaatcgccgacggcacattaagcagcaaattagcgaaaaaagcctttgaagccatgtgggcagaacccgaagccaccattgccgaaatcatcgaaaaacacggtttgcaacagatgaccgataccggcgcggttgaagcgatggtggacgaagtgctggcaaacaacgccaaagccgtggaacagtttaaatccggcaacgaaaaagccctgaatgcgattgtggggcaagtgatgaaggccagcaaaggcaaagccaaccccgcgcaggttcaagagctgattaaagccaaacttgcctga

SEQ ID NO: 66772 - DNA, 1026 bp, Neisseria meningitidis
atggattatcagggtaagaaagaccgattggaagaagttatcggtctttccgaagaccccgaactttggaacgacccgaaacgcgcccaagaaatcggcaaagagcgcaaaatcctcgaaggcatcgtgttgacgctcgacaacatcgcttcgggcatcgaagacaaccgcatgctgattgaaatgaccgtcgaagaaaacgacgaagaaggttttgccgccgtgcaggaagacgtggcggggctggaaaaacagatggcggatttggagttcaaacggatgttcaaccagcctgccgatccgaacaactgctttatcgacatcaccgcaggcgcgggcggtacggaagcggaagactgggcggggatgctgttccgtatgtacagccgctacgccgagcgcaaaggcttcaaaatcgaaatccttgaggaagacgacggcgaaatcgcgggcatcaaccgcgcgactatccgagtggaaggcgaatacgcctatggtttgctgcgtaccgaaaccggcgttcaccgcttggtgcgctattcaccgtttgactcgaacaacaaacgccatacttcgtttgcctccgtgttcgtttaccctgaaatcgatgattccattgaaatcgaaatcaaccccgccgatttgcgtatcgacacctatcgcgcatcgggcgcgggcggtcagcacatcaacaaaaccgactccgccgtgcgtattacccacgagccgacggggattgtggtgcaatgtcaaaacgaccgttcgcaacacgccaacaaagcggccgcgatggaaatgttgaaatccaaactgtatgaattggaaatgcgcaaacgcaatgaagagaaacaggcgttggaagaaggtaaatccgatgtaggttggggcagccaaatccgttcgtatgttttggattcctcacgtatcaaagacttgcgtacaggctacgaagtcggcaacaccaaagccgtattggatggcgatttggacggctttatcgaagccagcctgaaacagggcgtgtag

SEQ ID NO: 66773 - DNA, 390 bp, Neisseria meningitidis
atgaaaaacgttcaaaaaggcttcacgctgaccgaactgctgattgccgtcgccatcctcagcatcctgacgctcatcgcctacccctcctataaaacctacacccgccgcatccgcctgtcggaagtcaaatccaccctgctgatgaacgcgcaaaacttggaacgttactacctccaaaaaggaacgtttgacaactacgacgaaaccaaactgaaacaaaacaaatatttcgacattaccttaagcaaagtcagccccgaccacttcacccttcaggctgcccccaatcgggcgaccaacgaaggcgaaacctgcatcgttacgctcaacgacggcggcacgctttccgccgccggcagcgggcaggactgcccggacttcgactga

SEQ ID NO: 66774 - DNA, 402 bp, Neisseria meningitidis
atgcagcaacatattgaaaaatggcaacacttgagccgggaagaacagaaaatccttgccgaagtatggggtctcgtgcaaaacgatgatcaggaggttcactatgaaatgcttaaattgaacgcacccgacgaagccagtggcgaattttggttcagaatggcagaaacactcagcaccctgccgcccaaccgttccctcgaccttagaatgaacggcggcaggctggcgaccgccgtatccatcctttccgtcatgattgaagacaatcccgacataccgcagctttgggcgcaaaaaattaccgccctcaattatagtggattaaatttaaaccagtacggcgttgcctcgccttgtcgtactatctgtactgtctgcggcttcgtcgccttgtcctga

SEQ ID NO: 66775 - DNA, 582 bp, Neisseria meningitidis; identical to SEQ ID NO: 50944

SEQ ID NO: 66776 - DNA, 237 bp, Neisseria meningitidis; identical to SEQ ID NO: 39540

SEQ ID NO: 66777 - DNA, 300 bp, Neisseria meningitidis; identical to SEQ ID NO: 37288

SEQ ID NO: 66778 - DNA, 798 bp, Neisseria meningitidis
atgaaccgtctttacccccacccgattatcgcccgtgagggctggccgattattggcggcggtttggctttgagcctgctggtgtcgatgtgttgcggctggtggtctttgccgttttgggtgtttaccgtatttgccctgcagtttttccgcgaccctgcgcgtgagattccgcaaaatcctgaagcggtgttgagccctgttgacggccgcattgtggtggtcgaacgcgcacgcgatccgtatcgtgatgtcgatgctttgaaaatcagtatttttatgaacgtgttcaacgtgcattcgcaaaaatcgcctgccgattgtacggtaacgaaagtggtctataacaaaggcaaattcgtgaatgcggatttggacaaagccagcacggaaaacgaacgtaatgcggttttggcgactacggcttcaggtcgtgaaattacttttgttcaagtggccggtttggtggcgcgccgtattttgtgctacacccaagcaggtgcgaaactgtcccgcggcgaacgctatggctttattcgcttcggttcgcgcgtggatatgtatctgccggttgacgcgcaggcgcaagtggcgattggcgataaagtaaccggcgtaaaaactgtattggcgcgtctgccgctgactgcgccgcaaatcgaatccgagcctgaatctgagccagcttcacaagcggcttcggttgaaacagcggcaaacccatctgccgaacaacggcaaatcgaggcagcggcggctaagattcaggcggctgtgcaagatgtgttgaaagattaa

SEQ ID NO: 66779 - DNA, 1728 bp, Neisseria meningitidis
atgcagttatcaggcgcgcaaatcatagtgcagagtctcaaagccgaaggtgtcgagtacgttttcggttatcccggcggtgcggttatcgaaatctacgatgcccttttccaactcaataaattcaagcacattctgacccgtcacgagcaggcggcagtacacgcggcagatgcgtatgcgcgcgtcagcggtaaggtgggcgtggcattggttacatccggcccgggcgttaccaatgcactgaccggtattgctactgcctatacggattcgattccgatggtggtcatcagcgggcaggtaggcaattccctgattggtacggatgcgttccaagaagttgatacggtgggtattacccgtccgtgcgtcaaacacaatttcctggttacggacatcaatgagttggcggaaaccattaaaaaggcgttccaaattgccgcaagcggccgaccggggcccgtggtggttgatgtcccgaaagatgttacgcaggcgatggcgaaattcagctatcctcaggaagacatttttatccgttcgtatcaaccggttgttcaagggcatatcggtcagattaaaaaggccgtgcagatgttggcatctgccaaacgtccggtcgtctattttggcggcggcgtggtgttgggtaatgcttctgaagagctgacccgatttgtccgaatgacgggtgctccgtgcacgggtacgctgatgggcttgggcgcttatccttccggcgaccgccaattcctcggtatgctcggtatgcacggtacttacgaggcaaaccttgccatgcagaatgcggatgtcgttcttgccgtaggtgcgcgttttgacgaccgtgtggtttccgtaccgtccaaatttttcgagaaggcgaagaaggttatccatatcgatgtcgatccttccagcatcgccaaacgcgtgaaggcggacattccgattgtcggcgacgtgaaaaacgttttgtccgagatggttgcgctgtggcaaaaacaagagtccgtgccgtctgaagatgctttgggcaaatggtggaaaaccatagaggaatggcgttcccgcgattgcttgtggtttgacaacggcagcgaaattatcaagccacaatatgtgattcagaagcttgccgagattaccggcaattcggcaatcatcacatcggatgtagggcagcatcaaatgtttgcggctcaatattatcccttcgaacgtccgcgccaatggctcaactccggcggtttgggtacgatgggcgtgggtctgccttatgcgattggtgcaaaacttgccgccccggatcaagacgtattctgtatcaccggcgacggctcgatccagatgaacatccaagagctgtccacctgtttccaatatcggattccggttaacgtcattacactgaacaacggttatctcggtatggtacgccagtggcaggaaatatattacggcggacgagagtcggaaacctatttcgattctttgcccgatttcgtcaaacttgccgaggcatacggccatatcggtatccgcgtggacaagaagtctgatgtggaaggtgccttgttggaagcattgaaccaaaaagacagtctggtgtttatcgacttcctgaccgaccagaaacagaatgtgatgcctatggttggcaacggcaaaggtttggacgaaatggtacttccgccgcatatgcgtgcggacggaaaggcgtaa

SEQ ID NO: 66780 - DNA, 933 bp, Neisseria meningitidis
atgaagcagaaccgcacctttaccttccccgattttcgcaccgtttacagctatgcgcctttatatcggctgcaacatttaaaatacacattgcgaaaatttttcggaaaaaaagaaatttacgccttcgagcagtttgtcaacgcctcccctatccgtcaggggctgttcctccactgcccgcaaaatgcctatccgctgctgcgcgaatttgttgacaggcgttttaactgcaaacgccgtttagatgcgatgacggcagattttctcatggcggaaaaactgttcggcacagacattctgcaccaaatggaagactaccgcttccatctggtcttggcgcacctttcagacggcatcagcttgtggctcaaccgcaacgacaactgcgtcgaagaaggcgcgtggtctttatctttgcgcgacgaagcaggcaaccggctgtatatggcgactttcgcctttgtcggcacacacctgctgacagcctccgtacaagggccggcgggtgaagaagccaaagacaccgtccgccgcataaccaaacaactccacggcttgcgtccccaacaactgatggtaaccgccctgcaatatttcgccgccgtactcggcttggacggcgcaatgggcattgcacaaaaacatcaggtcaaactgcgctggaaacttaaaaagcgtgtcaaaatgaattacgacgcattctggcaggaatacggcgcaagtttggaacgggacggctactggcatctcccccaaacccccgcccgcaaagaccttaccgacatcgaaagcaaaaaacgctcgatgtaccgcaagcgttatgaaatgctggacaacatggttgcagagatgaaggacggtctgaaaacagaagcacgcggcatttcagacggcatccaaacggaaaaaccgctccgccggacagcctga

SEQ ID NO: 66781 - DNA, 543 bp, Neisseria meningitidis
gtgtcggtcggctacgacttcggcggctggagaatagcggcagattatgccagttacagaaaatggaacaacaataaatattccgtaaacacaaaagagttggaaaacaagaataacaataagagagacctgaagacggaaaatcaggaaaacggtacgttccacgccgtctcttctctcggcttatccgccatttacgatttcaaactcaacgataaattcaaaccctatatcggtgcgcgcgtcgcctacggacacgtcagacacagcatcgattcgactaaaaaaacaacagaggttcttacctccacccatactcctagcacagcacctacgatttataatgggaaaagtacgcaaaacgcctatcacgaaagccacagcatccgccgcttgggtcttggtgtcgtcgccggtgtcggtttcgacatcacgcccaagctgaccctggacaccggataccgttaccacaactggggacgcttggaaaacacccgcttcaaaacccacgaagtctcattgggcatgcgctaccacttctga

SEQ ID NO: 66782 - DNA, 795 bp, Neisseria meningitidis
atgaccacgattttggctttcgatattgaaaccgtacccgatgtgcagggtatccgaacattgtacgagctgccgtcctcgctgcccgacgatgaagtggtgctgtttgcccagcaaaaacgccgtgctcagacgggtggggattttatgcagcatcatcttcatcagattgtggcgatttcgtgctgcatgcgttggggacaggataaagtccatgtcggtacaatcggcgagatggacgatggcgaagaagtcgtgattgccaaatttttcgagttgattgaaaaacatacgccgcaactggtcagttggaacggcggcggtttcgacctgccggttctgcattaccgttcgctgctacacggcatcaacgccgcgcgctattgggatatgggcgacggcgatttcggcgacagccgcgatttcaagtggaacaactacatcagccgctaccaccaacgtcattgcgatttgatggatttgctcgcgctttaccagccgagggcaaacgtgccgctggacgatatggcgaaactgtgcggttttccaggcaagctgggtatggacggcagcaaggtgtgggatgcgttccacgcgggcaggctgaaggaaatccgcaattattgcgaaaccgatgccgtgaatacgtatttgatgtatctgcgtttctgtctggtcagcggcagattcgacgcggacgaatacgaaatggaaatcaagcggatcagaaactatctttccgcccaaacagaagacaaaccgcattgggcagaatttgtccaagcgtggaaataa

SEQ ID NO: 66783 - DNA, 213 bp, Neisseria meningitidis; identical to SEQ ID NO: 36410

SEQ ID NO: 66784 - DNA, 954 bp, Neisseria meningitidis
atgggttttctgattggtttgagccgcaacctgacgcggtttacggctttggtcattttgtttgcgtcggcggttgcgtttatcggaccggcttcgtttgcgtgggttaagggcgatgttcaggtcttggtgctgggcatcattatgctgggtatggggatgactttgggcagggaggactaccggattttggcgcagcgtcctttggatgtgtttatcggtgcggcggcgcaatataccgtgatgccgttgctcgccatcggtattgccaagctgttcgacctttcgccggggctgactttggggctggtgttggtggggacgtgtccgggcggcgtgtcgtccaacattatgagtttccttgccaaaggcgatgtggcgttttcagtcggtatgacgacggtgtctacggtgctggctccggccgttacgcctttgtggatgacctgcctggtcggtcagacggtggatatggacggttgggggatgttccggtttatgctgctggtcacgcttttgccggtggtgctgggttcggcggcaaatatcctgctgcacggaaaacattggtttgaaaatgtccgtgccgttatgccgggcgtggcggtattggcatttgcctgcattgtcggcggtgtggcttcggttcacggacaccgttttgccgaatcggcgttggtaatggtgttggcgattgcggtacacaatatcgccggctatgtgtcaggctattacgccgccgcgctgtttggtatggatacggcaaaaaaacgcaccttggcaatcgaagtcggcgtgcagaatgccggtttggcaacaggattgagcgcgaaatttttcccaggcaaccccgaatcggcggttgcggcggcggtcgcctgcgtgtggcattcggtttcggggacggtattgggcaacttgttcgctctgtgggacaagcgtcgggacgcttag

SEQ ID NO: 66785 - DNA, 480 bp, Neisseria meningitidis
  misc_feature 4, 5, 6, 7, 8: 'n' is a, c, g or t
gtgnnnnnatcccgtatcggcgattgggaagccgacaccattgtcggcaaaggacagaaaagcgcattattgaccttggtcgaacgcgttacccgctacaccatcatctgcaaattggatagcctcaaagccgaagacactgcccgggcagctgttagggcattaaaggcacataaagacagggtgcacaccattaccatggataacggcaaagagttctaccaacacaccaaaataaccaaagcattgaaagcggagacttatttttgtcgcccttaccattcttgggagaaagggctgaatgagaacaccaacggactcatccggcaatacttccccaaacaaaccgatttccgtaacatcagtgatcgggagatacgcagggttcaagatgagttgaaccaccgaccaagaaaaacacttggctacgaaacgccaagtgttttattcttgaatctgttccaaccactaatacactag

SEQ ID NO: 66786 - DNA, 249 bp, Neisseria meningitidis; identical to SEQ ID NO: 37411

SEQ ID NO: 66787 - DNA, 258 bp, Neisseria meningitidis; identical to SEQ ID NO: 40560

SEQ ID NO: 66788 - DNA, 567 bp, Neisseria meningitidis; identical to SEQ ID NO: 41138

SEQ ID NO: 66789 - DNA, 396 bp, Neisseria meningitidis
atgatgtattcgtttgaagcgaatgcaaatgcagtaaaaatatctgaaactgtttcagttgataccggacaaggtgcgaaaattcataagtttgtacctaaaaatagtaaaacttattcatctgatttaataaaaacggtagatttaacacacatccctacgggcgcaaaagcccgaatcaacgccaaaataaccgccagcatttcccgcgccggcgtattggcggggggcggcaaacttgcccgcttaggcgcgaaattcagcacaagggcggttctctatgtcggaacagcccttttagcccatgacgtatacgaaactttcaaagaagacatacaggcacgaggctaccaatacgaccccgaaaccgacaaatttgcaaaggtctcaagctag

SEQ ID NO: 66790 - DNA, 729 bp, Neisseria meningitidis; identical to SEQ ID NO: 60476

SEQ ID NO: 66791 - DNA, 186 bp, Neisseria meningitidis; identical to SEQ ID NO: 38793

SEQ ID NO: 66792 - DNA, 621 bp, Neisseria meningitidis
atgaaaccgcacaacctgttccaattcctcgccgtttgctccctgaccgtctccgtcgcttccgcacaggcgggcgcggtggacgcgctcaagcaattcaacaacgatgccgacggtatcagcggcagcttcacccaaaccgtccaaagcaaaaagaaaacccaaaccgcgcacggcacgttcaaaatcctgcgcccgggcctcttcaaatgggaatacacttcgccctacaaacagactattgtcggcgacggtcaaaccgtctggctttatgatgtcgatttggcacaagtgaccaagtcgtcccaagaccaggccataggcggcagccccgccgccatcctgtcgaacaaaaccgccctcgaaagcagctacacgctgaaagaggacggttcgtccaacggcatcgattatgtgctggcaacgcccaaacgcaacaacgccggctaccaatacatccgcatcggcttcaaaggcggcaacctcgccgccatgcagcttaaagacagcttcggcaaccaaacctccatcagtttcggcggtttgaataccaatccccaactctcgcgcggcgcgttcaagtttaccccgcccaaaggcgtggacgtgttgagcaactga

SEQ ID NO: 66793 - DNA, 1008 bp, Neisseria meningitidis
atgagcaccttctttcaacaaaccgcgcaagccatgattgccaaacacatcgaccgtttcccactattgaagttggaccaggtgattgattggcagccgatcgagcagtacctgaaccgtcaaaaaaaccgttaccttagagaccaccgcggccgtcccgcctatcccctgctgtccatgttcaaagccgtcctgcccggacaatggcacagcctctccgatcccgaactcgaacacagcctcatcacccgcatcgatttcaacctgttttgccgtttcgacgaactgatcatccccgattacagtaccttatgccgctaccgcaactggctggcgcaagacgacaccctgtccgaattactcaaactgattaactgccaactgaccgaaaaaggcctaaaaatagagaaagcatccgccgccgtcgttgatgccaccattatccagaccgccggcagcaaacagcgtcaggccatagaagttgacgaagaaggacaaatcagcggtcaaaccacaccgagtaaggacagcgatgcccgttggataaagaaaaacggcctctacaaactcggttacaaacaacatacacgtaccgatgcggaaggctatatcgagaaactgcacattacccccgccaatgcccatgagtgcaaacacctgtcgccgttgttggaagggttacccgaaggtacgaccgtctatgccgacaaaggctacgacagtgcggaaaaccggcaacatctggaagaacatcagttgttggacggcattatgcgcaaaacctgccgcaaccgtccgctgtcggaggcgcaaaccaaacgcaaccggtatttgtcgaagacccgttatgtggttgaacaaagcttcggtacgctgcaccgtaaattccgctatgcgcgggcagcctatttcggactgattaaagtgagtgcgcaaagccatctgaaggcgatgtgtttgaacctgttgaaagccgccaacaggctaagtgcgcccgctgccgcctaa

SEQ ID NO: 66794 - DNA, 756 bp, Neisseria meningitidis
atggattcttttttcaaaccggcagtttgggcggttttgtggctgatgtttgccgtccgccccgcccttgccgacgagttgaccaacctgctcagcagccgcgagcagattctcagacagtttgccgaagacgaacagcccgttttacccatcaaccgagcccccgcccagcgggcgggcaatgccgacgaactcatcggcagcgcgatggggcttaacgaacagcccgttttacccgtcaaccgagtccccgcccggcgggcgggcaatgccgacgaactcatcggcaacgcgatggggcttaacgaacagcccgttttacccgtcaaccgagcccccgcccggcgggcgggcaatgccgacgaactcatcggcaacgcgatgggacttttgggtattgcctaccgctacggcggcacatcggtttctaccggttttgactgcagcggcttcatgcagcacatctttaaacgcgccatgggcatcaacctgccgcgcacgtcggcagaacaggcacggatgggtacgccggttgcccgaagcgaattgcagcccggagatatggtgtttttccgcacgctcggcggcagccgcatttcccatgtcggactttatatcggcaacaaccgcttcatccacgcgccgcgcacggggaaaaatatcgaaatcaccagcctgagccacaaatattggagcggcaaatacgcgttcgcccgccgggtcaagaaaaacgacccgtcccgctttctgaactga

SEQ ID NO: 66795 - DNA, 786 bp, Neisseria meningitidis
gtgaaacacatcagttcgaccaataatgaacacatccggcacctgcaccgcctgttgtcgcaaggaaagttcagacggcaatacgcccaaaccgttttggagggcgtgcacctgcttcaggttttcctgcaatccggcagaaaaccggtcggggtatatattcccgagggcaaaatgccgtctgaagaagtccgcaggctgagggcggttgtgccggaaggcaaggttttttccgtttcagacggcatattgaaaaaaatcagcagcttgacttgtgcggatgatgtgcttgcgctgattgatattccggatgcgggtgctttgcctgccggcggcgactgcgtggttttggacggcgtgcaagacccgggcaatgtcggcacggtgttgcggagcgcggcggcggcaggggtaggtacggtcgttttgggcaggggttcagcggatgtttggtcgcccaaggtattgcgcgcggggatgggcgcgcatttcttgttggacatttattcgcaggcggatttggaaatatggttggcgagctataaaggccgtgtgtttgccaccgccttgcgagaggaaaagcaggcggttttgtacggcgaagatttgtgcgaaccgacagcctgggtgtttggcaacgaaggcgcgggggtcggtaaagcggttttggacagggcggacaagtgtgtcaggattccgatgcacgatgcaaccgagtctttaaatgtcgcgatggcggcgacaatctgcctgtttgaacagatgcggcagcggtcggcgtattga

SEQ ID NO: 66796 - DNA, 1092 bp, Neisseria meningitidis; identical to SEQ ID NO: 38959

SEQ ID NO: 66797 - DNA, 669 bp, Neisseria meningitidis
gtgaaccagcttattttcgactttgccgcacacgactatccgagtttcgacaaattcctcggcacggaaaacgcggaactggtctatgtcctccgacacaaacacggacagtttatctatgtctggggtgaagaaggtgcgggcaaaagccatcttttgcaggcgtgggtcgcacaggcgctcgaagccggcaaaaacgccgcctatatcgatgccgcctccatgccgctgaccgatgccgcgttcgaggcggaatacctcgccgtcgatcaagtcgaaaagctgggcaacgaagaacaagccctgcttttttccatcttcaaccgcttccgcaacagcggcaaaggctttttgctgctcggttcggaatacacgccccagcagctcgtcatccgcgaagatttgcggacgcgtatggcgtactgcctcgtttacgaagtcaagcccttaaccgaccaagaaaaaatcgacgcgctcgccagtatggcggcggcacgccaagtaaccgtcgattccgaaattttcgaatacctgctcaaacactggcggcgcgatatggacagcctgatgatgatgctcgacacgctggacaactacgccgtcacaatgggcaaacgcatcaccctgccgcttttgcgccagcttttgaaacaacaggaaacccaatga

SEQ ID NO: 66798 - DNA, 1575 bp, Neisseria meningitidis
atggctcaaatccaaatgagcgcaaatgttaaaaccatcaacgccgtctttgccgccatgctggtaggtacagtcggctattttatttattggggcttgggttatacccattacaattacgccgccttattcactattgccacgatgttcggcgtgtttatggcgttcaacatcggcggcaacgatgttgccaattctttcggcaccagcgtcggtgcgggtacgctgaccatcccgcaggctttgctgattgcggcggtatttgaggtcagcggcgcggtcatcgcgggcggcgaggtaaccaataccatacgcaaaggcatcgtcgatttgaagggtgttgatttcgaacccatacagtttgtgtttattatgatgtccgcgcttttggcggcggcgttgtggctgttgtttgcctcgaaaaaagggcttccggtatctaccacccattccattatcggcggcattgtcggcagcgcggtatgtatggcggtaatgaacgatgccgcatcgggcgatttgatacgttggggcaagctgggcggtattggtgtttcttgggtattgtcgcccgtgttgggcggcgcggtgtcctattttctgtttttgcgcgtcaagaaaaacgtcttagattacaacgcttgggcggaaggcacgctcaaggccatcaagcaggaaaaaaaggcctataaagaacggcaccgcctgtttttcgagggtttgtccgaagccgaaaaagtcgagtacgccaccaaaatggcgcacgacgcgcaaatttacgacgaacccgaattcgatccgcaagagctgcaatcggagtattaccgcggtctttatgcgttcgacaaccgtaaaaacaatgtcgattcctacaaggcactgcattcttggattccctttatcgcttcgttcggcgcgatgatgatttccgctatgctgattttcaagggcttgaaaaacctgcatttggggatgagcaacgtcaacagcttcctgaccatctttatgataggcgcggcggtgtggatggggacgtttgtttttgccaaaagcctcaagcgtaaagacttgggcaaatcgacctttcagatgttttcatggatgcaggtctttaccgcctgcggcttcgcattcagccacggtgcgaacgatatcgccaacgccatcggtccgtttgccgcgattatggatgttttgcgtaccaacagcgttgccgcgcaaaatgtcgtccccccgattgcgatgctgactttcggcatcgcgctgattgtcggtttgtggtttgtcggtaaagaggtgattaaaaccgtcggtacgagtttggccgaaatgcaccccgcctcgggttttaccgccgaactgtccgccgcatccgtcgtgatgggcgcgtcgctgatggggctgcccgtgtccagtacgcatatcttggtcggcgcggtactcggcatcggtctggtcaaccgcaatgccaactggaaactgatgaagcccatcggtttggcgtgggtcattaccctgcctgccgccgccgtattgtcggttgtctgctacttggttttacaggcagtattctga

SEQ ID NO: 66799 - DNA, 198 bp, Neisseria meningitidis; identical to SEQ ID NO: 51876

SEQ ID NO: 66800 - DNA, 372 bp, Neisseria meningitidis; identical to SEQ ID NO: 39277

SEQ ID NO: 66801 - DNA, 1302 bp, Neisseria meningitidis
atgccgtctgaacatcaacacacatcatcattgcttgatttcgaccgcgcccatctgctccatccctatacttccatgaccgatccgcttcccgtttatcctgtcaaacgtgcagaaggggtgtttatcgaattggcggacggcacgcggctggttgacgggatgtcgtcctggtggtgtgcgatacacggttacaatcatcctgttttgaatcaggcggttgagacgcagatgaaacagatgtcgcatgtgatgttcggcggtttgacgcatgagccggcggtggagctaggcaaattattggtcgggattttgccgcaggggctggaccgtattttttatgcggattcgggttcggtttcggtggaagtcgcgttgaagatggtggtgcaatatcagcaggcgcggggtttgcgtgcaaaacaaaatatggcgacggtacggcgcgggtatcacggcgatacttggaacgcgatgtccgtctgcgatccggaaacggggatgcaccatattttcggcagcgcgttgccgcagcgttattttgtcgataatccgaaaagccgtttcgacgatgaatgggacggggcggatttgcagcctgtccgcgccttgtttgaagtgcatcatgcggatattgccgcctttattttagagccggtcgtgcagggcgcgggcggcatgtatttttatcatccgcagtatcttcgcggattgcgcgatttgtgcgacgagtttgatatcgttttgatttttgatgaaatcgccaccggattcgggcgcacgggcaagatgtttgcctgcgaacacgcggaggtcgtgccggatattatgtgcatcggcaagggtttgagcggcggctatatgacgctggcggcagcaatcacttcgcaaaaagttaccgaaacgatttcgcgcggcgaagcgggcgtgtttatgcacggcccgacgtttatggcaaacccgctggcgtgtgccgttgcctgcgcttcggtcaaactgcttttgtctcaagactggcaggcaaatatccgccgcattgaaagcatcttaaaaggccgtctgaaagccgcgtgggacattcgcggcgtgaaagacgtacgcgttttgggtgccatcggcgtgatcgagctggataaaggcgtggatatggcgcgttttcaagcagattgcgtggcgcagggcatttgggtgcgcccgttcggcaggctggtgtatctgatgccgccgtatattatttcagacggcgttttgaccaaacttgccgacaaaaccgtgcaaatcttgaaggaacacagcaaatga

SEQ ID NO: 66802 - DNA, 729 bp, Neisseria meningitidis
atgcctgattacatccgcacctcacgcgccgccgacagcctgcgcgatatcaaaatcacccctcatttcctgccgcatacggacggttcgtgccttattgaatgcggcaataccaaagtgatttgtaccgcttccatagatgaaaacgtcccgccgtttctgcgcggtaaaaaccaaggctgggtaacggcggaatacgggatgctgcctgcctcaactgcttcccggatgcgccgcgaagcttcggcgggcaaacagtccgggcgcacacaagaaatccaacgccttatcgggcgttcgctgcgcgcggtcgtggatatggaaaaactcggcgaacgacaaatcttgattgactgcgatgtgattcaggcagacggcggtacgcgcacggcttcgattaccggtgcgtttgtcgcgctgcaaatcgccgtcggcaaactggtttcagacggcattttgagtgaaaaccccatccgcgaagccgttgccgctgtgtcagtaggcgtagtgaacggcgtgccgcttttggatttggattatcccgaagactccggttgcgacagtgatgtgaatatcgtcatgaccgcatcgggaaaaatcatcgaaatacaggggacggcggaagacgcgccgttcagtttggacgaattgggcaaactggttgcactggcgcaaaaaggcataggcgaactgctgcaacaccagcaaaatgcgttgtccgccgcctga

SEQ ID NO: 66803 - DNA, 456 bp, Neisseria meningitidis; identical to SEQ ID NO: 40384

SEQ ID NO: 66804 - DNA, 552 bp, Neisseria meningitidis; identical to SEQ ID NO: 40702

SEQ ID NO: 66805 - DNA, 366 bp, Neisseria meningitidis
atgttcaaacgacctgaagaaatcattgtcctgatacttgccgtcctctggattgccggtacgtattttctcgccgccctgtttggagcggatgcttataccgtgttaaaaatcactgcccttaccctgctttggtctgccgcctcattcctcctttggcaaaaaaacctcagccggcatatctggccgctgctgctcggctgcctgactgcctgttggtggccgtatctgaatcaatcggtcgcacccggttctttaccttggtatgcatcatggacgttcaaaaccatcttagccctgattcccgtaaccgcaggttatctgtttaaatggaaacaataccggcagcgcaaaacaaagccgtaa

SEQ ID NO: 66806 - DNA, 1419 bp, Neisseria meningitidis
atgaatattcacaccctgctctccaaacaatggacgctgccgccattcctgccgaaacggctgctgctgtccctgctgatactgcttgcccccaatgcggtgttttgggttttggcactgctgaccgccaccgcccgcccgattgtcaatttggactatcttcccgccgcgctgctgatcgccctgccttggcgtttcgtcaaaattgccggcgtattggcgttttggctggcggttttgtttgacgggctgatgatggtgatccaactcttcccttttatggatctcatcggcgccatcaacctcgtccccttcatcctgaccgcccccgccccttatcagataatgaccgggctgttgctgctgtatatgctggcgatgccgtttgtgttgcagaaagccgccgccaaaaccgacttccggcacattgccgtctgcgccgccgttgtggcggcagccggctatttcaccggccatttgagttactacgaccggggtcggatggccaatatcttcggcgcaaacaacttctactacgccaaaagtcaggcgatgctctacaccgtcagccagaatgccgactttattaccgccggcctggtcgatcccgtcttcctccccttgggcaatcaacagcgtgccgccacgcatctgaacgagccgaaatctcaaaaaatcctctttatcgtcgccgaatcttgggggctgccggccaatcccgaacttcaaaacgccacttttgccaaactgctggcgcaaaaagaccgtttttcggtttgggaaagcggcagttttccctttatcggcgcgacggtcgaaggcgaaatgcgcgaactgtgcgcctacggcggtttgcgcgggttcgcactgcgccgcgcgcccgacgaaaaatttgcccgctgcctccccaaccgtttgaaacaagaaggttacgccacctttgcgatgcacggcgcgggcagttcgctttacgaccgcttcagctggtatccgagggcgggctttcaagaaatcaaaaccgccgaaaacctgatcggtaaaaaaacctgtgccattttcggcggcgtgtgcgacagcgagctgttcggcgaagtgtcggcatttttcaaaaaacacggcaaaggactgttttactggatgacgctgaccagccacgccgactatcccgaatccgacattttcaaccacaggctcaaatgcaccgaatacggcctgcccgccgaaaccgacctctgccgcaatttcagcctgcacacccaattcttcgaccaactggcggatttaatccaacgccccgaaatgaaaggcgtggaagtcatcatcgtcggcgaccatccgccgcccgtcggtaacctcaatgaaaccttccgctacctcaaacaggggcacgtcgcctggctgaacttcaaaatcaaataa

SEQ ID NO: 66807 - DNA, 1053 bp, Neisseria meningitidis; identical to SEQ ID NO: 52344

SEQ ID NO: 66808 - DNA, 828 bp, Neisseria meningitidis
atgaaaaaaaccgcctatgccttcctcctgctgatcgggttcgcttccgcccctgcatttgccgaaacccgccccgccgacccttatgaaggctacaaccgcgccgttttcaaattcaacgaccaagccgaccgctacattttcgcccctgccgcgcgcggctaccgcaaagttgcgccgaaacccgtccgcgccggcgtgtccaatttttttaacaacctgtgcgacgtggtcagcttcggtagcaatatcttgcgcttggacatcaaacgcgcaagcgaagaccttgtccgcgtcggcatcaacaccactttcggtttgggcgggcttatcgacatcgccggcgcgggcggcattcccgacaataaaaacaccttgggcgacacgtttgcttcgtggggatggaaaaacagcaattatttcgtgttgcccgtcttagggccgtccaccgtccgcgacgcgctcggcacgggtattacctccgtttattcgcccaagaatatcgtcttccgcacccctgtcggacgctggggcatgactgccgtatccgccgtcagtacgcgcgaaggcctgctcgatttgaccgacagtctggacgaagccgccatcgacaaatacagctacacgcgcgacctctatatgaaagtccgtgcgcggcagaccggtgcaacacctgccgaaggtacggaagataacatcgacatcgacgaattggtcgaaagtgccgaaaccggcgcggcggaaactgccgttcaagaagattccgtatccgaaacacaggcagaagcagcaggggaagccgaaacgcaacctggaacacaaccttaa

SEQ ID NO: 66809 - DNA, 1107 bp, Neisseria meningitidis
atgtctctttatccgatttacaatttttccgccggccctgccgtattgcccgaagccgtgttggaaacggcgcggcaggaaatgttggactacaacggtacgggttttcccgtgatggcgatgagccaccgttcggaaatgtttttgagcatcctgcatcatgcggaacaggatttgaggcagcttttgaaagtgcctgacaactataagatattgtttctgcagggcggagcaacaacccaatttaatatggcagccatgaatctggcacacggtttccgcactgccgacgcggtggtaacgggcaactggagccgtatcgcttatgaacagatgagccgtttgaccgatacggaaatccgtttggcggcgcatggcggcgagcagttcgactatctcgacctgccgcctgtggaaacgtgggatgttgcacccgattcggcgtttgtccattttgccgtcaatgaaacggtcaacgggctgcaataccgtgaagtgccgcgcctttcagaaggcatgccgccgctggtgtgcgatatgtccagcgagattttgtcgcgcgagtttgatgttgccgactacggactgatttacgcaggcgcacagaaaaacatcgggccggcaggggttacggtggtgattgtgcgtgaggatttgctcgagcgttgtccgaacgatattcccgatgtgttcaactaccgttcgcacatcaaccgcgacggtatgtacaacacgccgtcaacttacgcgatttatatgtcggggctggtgttccgctggctgcaggcgcagggcggtgtgaaaaaaattgaagcggtcaatcggctgaaggcgcaaaccttgtatgagacgatagatggcagcggcggtttctatatcaaccgtatccgtccgaatgcgcgttctaaaatgaatgtcgtgttccaaacggaggatgaggagcttgaccgccgttttgtgctggaagccgaattgcagggcttgtgcctgcttaagggctataaaaccgtcggcggtatgcgtgccagcatttataatgcgatgccgcttgaaggcgtgcgggctttggcagattttatgcgcgatttccaacggcgttacggttga

SEQ ID NO: 66810 - DNA, 390 bp, Neisseria meningitidis
  misc_feature 367, 368, 369, 370, 371: 'n' is a, c, g or t
atgagcaccttcttccggcaaaccgcacaagccatgattgccaaacacatcgaccgtttcccactattgaagttggaccaggtgattgattggcagccgatcgagcagtacctgaaccgtcaaaaaaaccgttaccttagagaccaccgcggccgtcccgcctatcccctgctgtccatgttcaaagccgtcctgcccggacaatggcacagcctctccgatcccgaactcgaacacagcctcatcacccgcatcgatttcaacctgttttgccgtttcgacgaactgatcatccccgattacagtaccttatgccgctaccgcaactggctggcgcaagaccacaccctgtccgaattactcaaannnnncacacacttaattaattaa

SEQ ID NO: 66811 - DNA, 330 bp, Neisseria meningitidis
atgggtggcctgattattgaagacttgcaggaaggcttcggaaaagaagcagttaaaggcaaagagattaccgtgcattacacaggttggctggaaaacggaaccaaattcgactccagcctcgaccgccgccagccgctgaccatcacgctcggcgtcggacaagtcatcaaaggctgggacgaaggcttcggcggaatgaaggaaggcggcaaacgcaagctgaccatcccttcggaaatgggctacggcgcacacggcgcgggcggcgtgattcccccgcacgccactttgatatttgaagtcgagctgctgaaagtgtacgaataa

SEQ ID NO: 66812 - DNA, 1182 bp, Neisseria meningitidis; identical to SEQ ID NO: 41183

SEQ ID NO: 66813 - DNA, 1476 bp, Neisseria meningitidis
atgatcagcaaacaagaataccaagcccaagccgcccaaggctacaaccgcatcccgctcgtgcaagaactccttgccgacttggatacgccgctttccctctatctcaaactcgccaaccgcccctatacctacctgctcgaatccgttgtcggcggcgaacgtttcggccgctattcctttatcggcctgccttgcagccactatctcaaagccggcggcaaacacgtcgatgtttatcaaaacggcgaaattgtcgaacaacacgacggcaatccgctgccctttatcgaagccttccacaaccgcttcaaaacacccgaaattccaagcctgccgcgctttaccggcggactggtcggctacttcggttacgaaaccatctacaattttgaacacttcgcccaccgcctgaaacatacggccaaagccgatcccctcggtacgcccgacatcctcctgatgctctcgcaagagcttgccgtagtggataatctaagcggcaaaatctacctgattgtttatgccgatccgtctcaagccaacggctacgaacgcgcacgcgaacgtcttgaagacatccgtacccggttgcgccaaagctgcgccatcccgctctcgctcggcagcaaacacaccgaagccgtcagcgaatttggcgaagagccgttcaaagcctgcgtcgataaaatcaaagactacatcttcgcaggcgactgcatgcaggttgtccccagccagcgcatgagcatggaattcaccgacagcccgctcgccctctaccgcgccctgcgtacactcaacccttcgccttatctcttttactacgatttcggcgatttccacatcgtcggctcctcgcccgaaatcctcgtccgccgcgaacgcgacgatgtcatcgtccgccccatcgccggcacgcgcctgcgcggcaaaacccccgccgaagaccttgccaacgaacaagatttgttaagcgatgccaaagaaatcgccgaacacgtcatgctcatcgatttaggacgcaacgacgtcggccgcatcagtaaaaccggcgaagtcaaagttaccgacaaaatggtgattgaaaaatactcccatgtgatgcacatcgtttccaacgtcgaaggccgtctgaaagagggcgttaccaatatggacatcctcgccgccacgttccctgccggcacactttccggcgcacccaaagtccgcgccatggaaatcatcgaagaagtcgaaccaagcaaacgcggcatctacggcggcgccgtcggcgtatggggtttcaacaacgacatggatttggcaatcgccatccgcaccgccgtggtgaaaaacaacacgctatacgtccaaagcggcgcaggtatcgtcgccgactccgacccgacctccgaatggcaggaaacacaaaacaaagcccgagccgttatacgcgccgcgcagatggtgcaggaagggttggataaatga

SEQ ID NO: 66814 - DNA, 303 bp, Neisseria meningitidis; identical to SEQ ID NO: 43286

SEQ ID NO: 66815 - DNA, 1701 bp, Neisseria meningitidis
atgtccgtcaaaatccaaacccgctccgtcaataccgacgtttttaatcatttgctcaccgccggtgccgatcctttaatcgcccggctttgtgcttcgcgcggtgtgcaaagtcctgccgaattggacgacaaactcgcttccctcctgccttatcaatcgctgacgaattgcgaagccgccgcccgccgtttggcggatgcggttgagcgtcaggaaaaaatcctgattgtcgccgactatgatgccgacggcgcgacggcgtgtgccgtcggtttggacggtttggcggcgatgggcgcgaaagtggatttcctcgtgcccaaccgctttgaacacggctacggcttaacgcccgagctggctgaaatcgcggcagagcaaggtgtggatttgctgattacggttgataacggtatcgccagcatcgcaggcgtggcgagggcgcaggaattgggtttggatgtcatcgttaccgaccaccatctgcctgccgagaccgtgcccgactgcatcatcgtcaatccgaaccaaaaaggctgcggttttccaagcaaaagcttggcgggcgtgggcgtgattttttatgtattgatggcgttgcgtgccgaattgcgccgccgcaattatttttcagacggcatcaaagagccgaatctgggcgaacttttggatttggtcgcactcggcacggttgccgatgtcgtccctctcgaccacaacaaccgcatcctcgtgtcgcaaggtttgaaacggatgcgctccggcaaaatgcgccccggtatccgcgccttgtttgaagtggcgcggcgcgattggcgcaaggcgcagccgtttgatatgggttttgcgttgggcccgcgcatcaacgccgccggacggctggacgatatgtcggtcggtattgcctgcctgttggcgcgagatgataccgaggcgcaggaactggcggcgcagttaaacaacctcaatatcgagcgtcgcgaaatcgagcagtctatgctgcaagacgcgctgaatgcttttcctgaaaccctgccttcaggtcagacgactttggcggtgtatcgcgacgacttccatcaaggcgtggtcggcatcgttgccagccgcctcaaagaccgtttttatcgtccgaccatcgtgtttgctccggcggacaacggcgaagtgcgcggttcgggacgctccattcccaatttgcacctgcgcgatgctttggacttggtgtccaaacgccatcccgatttgattttgaaattcggcggacacgcaatggcggcgggcttgagcatacttgaacacaatattcccgcgtttcagacggcctttgaagaagccgtgcgcgagatggtgcgcgaagacgatttgtcgcaaaccttcatcaccgacggcagcctgaaagcctgcgacatcacgctggaacaggctcaaaaccttgcccgacacgtttgggggcagggcttcgcgccgccaagctttaccgacgagttccacgtcgtccgccagcagcctttgggcgcggagggtaaacacaaaaaagcgtggctgcaaaaagacggctgcgaatttgaagccatgttttggcgttgcagcgaagacatccccgaatacatccgcacggtttaccgccccgttgccaacgaatggcgcaacaatctcgaattgcagctgtatatcgattactgggaagcggtgtag

SEQ ID NO: 66816 - DNA, 2853 bp, Neisseria meningitidis
atgaaactgtccgaactgttcaaccccgacgaatttgccgcgcggcatttgagtttcggcgacgaagcggcgctgcttgccgctgtcggcgagaaaagtatggacgaatttgtcggcaataccgtgccgcaaagcatccgtatgccgtctgaactcgatttgcccgaggccttgaccgaggcggacgcattggcgaaattgaaaggcattgcgtcgaaaaacgtgatcaacaagtcctatatcggtttaggctattacccgacccgcgtgccgaatgtgattttgcgcaacgtattggaaaatcctggctggtataccgcctacacgccgtatcaggcggaaatcgcgcagggtcgtttggaagcattgttgaacttccaacaagtgtgcatcgatttgaccggtttccctgtggcgggcgcgtctttgctggacgaggcaactgccgccgccgaagcgatggcgatggcgcaccgcgtgggcaaggtaaaatccgagcgtttcttcgtggacgagcgcgtgtatccgcaaactttggacgtgatgaaaacccgcgccaagtatttcggctttgaattggtggtcggcgattttgccaaagcggatgaaggcgaatacttcggcgcgctgttccaatacgtcggcaaagacggcgacgtgcaagacttgcaaagcgttataggccgtctgaaagccaaaggcacgattgtcgccgtttccgccgacatcatgagcttggttttgctgaagtctccggctgaattgggtgcagatattgctttgggcaacacgcaacgcttcggcgtgccgatgggcttcggcggtccgcatgctgcttatttcgcctttaaagacgagttcaaacgttccgccccgggccgtatcatcggtgtatccaaagacgcatcgggcaaacctgccttgcgtatggcgttgtccacccgcgagcaacacatccgccgcgaaaaagccacgtccaatatttgtaccgcgcaggcattgctggcgaatttggctggtatgtatgccgtttaccacggccctgaaggcgtgaaacgcatcgccaaccgcattcacgcgctggcttctgcctttgccgatgcactggtttcagacggcatcaaagtggttcacgaagtcttcttcgataccgttaccgtcgatttcggcaacaaagagaaagcagaccaagtgtttgccgctgctttagagtcgggttacaacctgcgccgcgtcaacgatactcaagttgcggctgcattccatgaaacgtcggcatacgaagatttggtcgatttgtaccgcgcgtttacaggcaaggatacggctgcatttgccgatgatgtcaaaggccgtctgaacgccgaattgctgcgtcaggacaacattctgcaacatcctgtgttcaaccgttaccacaccgaacacgaaatgttgcgctatctgaaaaaactcgaagaccgcgacttggcgatgaaccgcagtatgatttcgctgggcagttgcaccatgaaactcaatgccactgcggaaatgttgccgattacttgggcggagttctccgacatccacccttacgctcccgaagcgcaaaccgccggctaccgcgaattgcttgccgacatggaaaacagcctgaaagccatcaccggctttgacgcaatttccttccagcccaactccggcgcgcagggcgaatacagcggtatgcttgccatccgccgctatcaggaagcgcaaggcgaagcgcagcgcaacatctgcctgattcccaaatccgcccacggcaccaaccccgccaccgccgccatgctcggtttgaaagtcgtcgtcgtcgataccgacgaacacggcaacgtcaacatcgacgatttgaaagccaaagccgagcaacaccgcgacgctttgtccgccatcatgattacctatccgtccacccacggcgtgtacgaagaaggcatccgcgacatctgccgcatcatccatgaaaacggcggacaggtttatatggacggcgccaacctcaacgcccaaatcggcatcatgcagcctgccgaagtcggcgcggacgtgttgcacatgaacctgcacaaaaccttctgtatccctcacggcggcggcggtccgggcatgggtccgattggcttgaaagcccatctggctccgttcgcaccgggacacgctttgaccgacacccacagcgccagtgccgaccaaaccgccgttgctgctgcggccttcggttctgcgtccatactgccgattacttggatgtatctgaccatgatgggcaaacaaggcatggaacaggcgacacgctgggcattgctcaacgccaactacgttgccaaacgcctgagcgaagactatccgattctgtatacaggcaaaaacggccgcgtcgcgcacgaatgtatcgtcgatttgcgtccgctcaaagccgaaagcggcattaccgaaaccgacatcgccaaacgcctgatggactacggcttccacgcgccgacggtttccttccctgttgccggtacgctgatgatcgagccgaccgagagcgaaagcaaagccgaactcgaccgctttatcgccgccctgaaatccattcgccgcgaagtgcagaaagtcatcgacggcgaatggccgaaagacgataatccgctggtgaatgctccgcacaccgccgcagatataaccggcaactgggcgcatccgtattcccgcgaagaagccgtcttcccgttgccgttcgtccgcgaacacaagttttggcccttcgtcaaccgcgtggacgacgtgtacggcgaccgcaatctcgtgtgcagctgcccaccgatggaaaattatgaagactga

SEQ ID NO: 66817 - DNA, 279 bp, Neisseria meningitidis
atgtcccgaaacctgcttgtccgctggcttgtcgtctgcctgatacccttggcgacgcttgccgttttcgccgccaatccgcccgaagacaaaccccagcatctgattaacggcatcatccttgcctgcgaagcgacgtttttgttcaaattcgtccttttcgacaccatcaagcatcatttgaagcaagagtttgatttgaaacgtcaaactatgttgctgtttattccgattattttgctgattgtgtatttgttccactattttggcgcgttttag

SEQ ID NO: 66818 - DNA, 366 bp, Neisseria meningitidis
gtgattaccgtcaaactgacccacgggctgacctacaatggcaaagtcgtatctgaattacgcctcaagccactgactgtcggcggcgaactggcggcgttcgccctgattgatgacttgcccgagctgcccgaaaacgccacaaaagccgaactgctgcaacgcgacgtcctagagacgctgacctactggtcgcagcagattgaagcccaaggtatcccatccgacatcctgacggcgcagtggctgatggaaaacctctctaccgaagactaccataccgtgatggcggctcaggaggatttgcgcctaaaaccgtccgccgctacggcgagccccgacgcgccgtcggcggcggagcagtaa

SEQ ID NO: 66819 - DNA, 276 bp, Neisseria meningitidis
atgaatatggaaaattatttttctaacttaaatttagacatcagaacacataaactcggcacatttaccgatcaaaaagtaaccccggatgtattatgtgccgtagcagaatgtatcatcgaatatattgaaaatattggagaaatatttagcattaacgatattcgttattcagattatgccgaatatatcgccaccgccgtatttaaaaaaccatccattgaaaatgccggtagcgaatacaataaatttttttcacaaccgattaaatgctga

SEQ ID NO: 66820 - DNA, 483 bp, Neisseria meningitidis
atgccgtctgaaaatccgtgttcggacggcattcccttctgtcggaacggacagtccgaaaccacagattgggctataatctcttttttgcgcataccgcgcgacagcaaaggaaaaaccatgtacgaagtcaaccgcagcgtattcgtcctcatccctttagaacctttttggaactggctgcaaaccctgccgggcaaccaccttgacggactgaccctcgaagacatccaagccgacgcgaattcctaccttgtccgcccgtgcgaaaccgccgacgaagtatgggacgaaatcgaaacccgttttgaagacattttcgccgccgaacttgccgactggtgcgaagacgaacgcgagtggcctgcgctcgatgccgacattttcaacgaatggttcgacatccagctttctaccgtcatcaccgacctcgaacacgaaccgcttgcccgcgaagccttccaacccatcaacctgaactga

SEQ ID NO: 66821 - DNA, 1356 bp, Neisseria meningitidis
atgtcggaatatacgcctcaaacagcaaaacaaggtttgcccgcgctggcaaaaagcacgatttggatgctcagtttcggctttctcggcgttcagacggcctttaccctgcaaagctcgcagatgagccgcatcttccagacgctcggtgccgatccgcacagcctcggctggttctttatcctgccgccgctggcggggatgctggtgcagccgattgtcggccattactccgaccgcacttggaagccgcgtttgggcggccgccgtctgccgtatctgctttatggcacgctgattgcggttattgtgatgattttgatgccgaactcgggcagcttcggtttcggctatgcgtcgctggcggctttgtcgttcggcgcgctgatgattgcgctgttagacgtgtcgtcaaatatggcgatgcagccgtttaagatgatggtcggcgacatggtcaacgaggagcagaaaggctacgcctatgggattcaaagtttcttagcaaatacgggcgcggtcgtggcggcgattctgccgtttgtgtttgcgtatatcggtttggcgaacaccgccgagaaaggcgttgtgccgcagaccgtggtcgtggcgttttatgtgggtgcggcgttgctggtgattaccagcgcgttcacgattttcaaagtgaaggaatacgatccggaaacctacgcccgttaccacggcatcgatgtcgccgcgaatcaggaaaaagccaactggatcgaactcttgaaaaccgcgcctaaggcgttttggacggttactttggtgcaattcttctgctggttcgccttccaatatatgtggacttactcggcaggcgcgattgcggaaaacgtttggcacaccaccgatgcgtcttccgtaggttatcaggatgcgggtaactggtacggcgttttggcggcggtgcagtcggttgcggcggtgatttgttcgtttgtattggcgaaagtgccgaataaataccataaggcgggttatttcggctgtttggctttgggcgcgctcggctttttctccgttttcttcatcggcaaccaatacgcgctggtgttgtcttataccttaatcggcatcgcttgggcgggcattatcacttatccgctgacgattgtgaccaacgccttgtcgggcaagcatatgggcacttacttgggcctgtttaacggctctatctgtatgcctcaaatcgtcgcttcgctgttgagtttcgtgcttttccctatgctgggcggcttgcaggccactatgttcttggtagggggcgtcgtcctgctgctgggcgcgttttctgtgttcctgattaaagaaacacacggcggggtttga

SEQ ID NO: 66822 - DNA, 840 bp, Neisseria meningitidis
gtgaaacgaatttttctgtttttggctaccaatatcgctgttttggtcgtaatcaacattgttttggcggttttgggcatcaacagccagggcggcacgggcagcctgttggcgtattccgccgtcgtcggcttcactggttcgattatttcgctgctgatgtccaaattcatcgccaaacaatcggtcggcgcggaagttatcgacacgccgcgcaccgaagaagaagcctggcttttgaacactgtcgaagcccaagcgcggcaatggaacctgaaaacgcccgaagtcgccatctaccactcccccgaacccaatgcctttgccacgggcgcatcgagaaacagctccctgatcgccgtcagcactggtttgctcgaccatatgacgcgtgacgaagtggaagccgtattggcgcacgaaatggcacacgtcggcaacggcgatatggttacgctgacgctgattcaaggcgtggtcaatacctttgtcgtgttcctgtcgcgcattattgccaacctgattgcccgaaacaacgacggcagccagtcccagggaacttatttcctggtcagcatggtattccaaatcctgttcggcttccttgccagcttaattgtcatgtggttcagccgacaacgcgaataccgcgccgacgcgggcgcggcaaaactggtcggcgcgccgaaaatgatttccgccctgcaaaggcttaaaggcaacccggtcgatttgcccgaagaaatgaacgcaatgggcatcgccggagatacgcgcgactccctgctcagcacccacccttcgctggacaaccgaatcgcccgcctcaaatcgctttaa

SEQ ID NO: 66823 - DNA, 588 bp, Neisseria meningitidis; identical to SEQ ID NO: 39526

SEQ ID NO: 66824 - DNA, 312 bp, Neisseria meningitidis
atggcttccatccacgaccaaatcaaagaagtagtaacgacacaccgcgtcgtattgtttatgaaaggtacgaagcagtttccgcaatgcggtttctcttcccgcgccgtgcaaatcctgaacgcggcaggctgcaccgattacgttaccgtcaacgtattggaaaatcccgaagtacgccaaggcattaaggaatacagtgactggccgaccattccccaactttatgtgaacggcgagtttgtcggcggttcggacatcctgatggaaatgtatgaggcaggcgagctgcaagagctgctgaaagcctga

SEQ ID NO: 66825 - DNA, 519 bp, Neisseria meningitidis
atgcgccttttcccaattgccgccgccctgacgcttgccgcctgcggtactgtgcaaagcacacaatatttcgtgttgcccgacagccgctacatccgtcctgcaacgcaaggcggcgaaaccgccgtcgaagtccgtcttgccgaaccgctcaaacgcggcggactggtctatcaaaccgacccctaccgcatcaacaccgcacaaaaccacgtttgggcggacaccttggacgatatgctcgaagcggcgttgagcaatgcattcaaccgtttggacagcacacgcatctttgttcctgcctcacgcagcggcagtaccgaaaaatggacggtctatatcgacgcattccaaggcagctacacgggcaaaaccctcatcagcggctacgccgtcctacccgacggtatgaacagacccttccatatcgaaaccgaacagcagggtgacggctacgccgccatgaccgccgcactcgaacagggactgaaacaggcggcgcaacagatggtcgagtaa

SEQ ID NO: 66826 - DNA, 1146 bp, Neisseria meningitidis
atgaccgaaacccgatccctagaactcgccaaagaattgattgcccgaccgtccgttacgccagatgaccaaaattgccaaaaactgcttgccgaacgcctgcacaaaatcggttttgcggctgaagcactccatttcggcgataccaaaaacatctggttgcgacgcggcacgaaagcacccgtcgtctgttttgcagggcataccgacgttgtgccgaccggtcccattgaaaaatgggattcgcccccgttcgagccgaccgaacgcgacggaagattatacgggcgcggcgcggcggacatgaaaaccggcatcgcctgcttcgttaccgcctgtgaacgcttcgttgccgaacatcccgaccaccaaggcagcattgcgcttctgattacttccgacgaagagggcgacgcgttggacggcacgaccaaagtcgtcgatgtattgaaagcgcgcggcgagttgattgactactgcatcgtcggcgaaccgacagccgtggacaaattgggcgatatgattaaaaacggccggcgcggctcgctgtcgggcaacctgaccgtcaaaggcaagcaaggccatattgcctatccgcatttggcaatcaatcccgtgcatacttttgccccggccttgttagagctgacgcaggaagtctgggacgaaggcaacaaatacttcccgccgaccagctttcaaatttccaatatcaacggcggtacaggcgcgaccaatgtcattcagggcgagctgaacgtcaaattcaatttccgcttctccaccgagtccaccgaagcagggctgaaacaacgcgttcacgccattttggacaaacacggcgtgcaatatgatttgcagtggtcttgctcaggccaacctttcctgactcaggccggaaaactgaccgatgtggcacgcgcagccattgccgcaatctgcggcgtagaggccgaattgtccaccaccggcggcacttcggacggacgctttattaaagccattgcgaaagaactcatcgaattaggcctgtccaatgccaccatccaccaaatcaatgaaaacgtgcggctaaacgacattccgaagctgtctgcggtgtatgaggggatattggcgcgcttgttggctggaaatgccgtctga

SEQ ID NO: 66827 - DNA, 618 bp, Neisseria meningitidis; identical to SEQ ID NO: 36899

SEQ ID NO: 66828 - DNA, 360 bp, Neisseria meningitidis
atggaaacccaagaaaagaaatttgttcctgcctccaagcaaataccgaccgtaaatagcggctggttagaccgtgaattaggcgaagccatgagtgaagcggtgcgcgcctgccttgctcacggtaaacagtcagaaattactgtcaagctcaaaatccaaccccaaaacatccaaagcggaacggtaaaaatcagccacgatgtagcaaccaaactacccaaagaaaaacgcgaaggcggcatcgtctttgctacacctgacggcaacatccaagccgacgatccggcacaaggaaaattgaaactcaaacaagttcccaatacgtcaagcacgttgaaaatggtcagatccaactaa

SEQ ID NO: 66829 - DNA, 279 bp, Neisseria meningitidis
atgtactaccaagtcggaaataaatgtcttgagaagcaccaggctgaaaacctttatttcagcttggtagtaccaagaatcaaagaaaacggacagattgtcagaccggaatataacggcagtctgtggaagatgtcggacggtcagccgctaaggcttttattggcggaatgcagtccgaaagacaacctgcaaagcggtcttgaaacaggctggatagtattcggcatcctcgcgtccgtttactttgtttccctgctgaaaaaggttttgaaatga

SEQ ID NO: 66830 - DNA, 876 bp, Neisseria meningitidis; identical to SEQ ID NO: 58909

SEQ ID NO: 66831 - DNA, 330 bp, Neisseria meningitidis
atgtcattacccccatgcccacaatgcgcctccgaatacacttatgaagacggcggacaatacatctgccccgaatgcgcccacgaatggaatgaaaccgaatccgccgccgaccttgcggctcaagtgcgcgatgccaacggcgcggcactgcaaaacggcgataccgtcatcctcatcaaagacctcaaggtaaaaggcagctcgatggtgatcaaacaaggtacgaaagtcaaaggcatacgcctgcaggaaggcgatcacaacatcagctgcaaaatcgacggcagcgcgatgaatttaaaatccgaattcgtcaaaaaagcctga

SEQ ID NO: 66832 - DNA, 354 bp, Neisseria meningitidis
atgtctgaaatcaaaattttccacaacccccgttgcagcaaatcgcgtgccgccttgtccttattggaagaacgcggcattgctgccgaagtggtcaaatatttggatacgccgcccgacttgtccgaattgaaggatattttcaacaaattgggcttggagtcggcgcgcgggatgatgcgtgtgaaagatgatttgtacaaggaattgggtttggacaaccctgatttggacaatgacgcgctgctgcgtgccatcgccgatcatcccgccctgttggagcgtccgattgttttggcgaacggtaaggcggctgtaggcaggcctttggaaaatatcgaagcggtattgtga

SEQ ID NO: 66833 - DNA, 486 bp, Neisseria meningitidis
ttgttgattcaatcggcattatgttttgaggcggaagcccatgaatatactaatattcaagagatggaatgggtgtctttattttctgatccgcaaagagacgatgatagtcttataacccttaaagatgaaaaaatcactgtaaaaaactatattgtgccttggtggaaaaaaggtgaaaactttagaaaattagaacttattaccactggtaaaaatgataatggaaatttaacggtaaatggaatttacggcatccaatcttttgcagactctcaattgggatatacgcctgaattattggtaaaaagcaataatgatattctatttaaaaataatctccaatctgttgacgtgaagccccattccggaaatatccatttggatgccaaaggaaaaattcaatttaatttgaatgttcccgatgttgatggggtacaagatgtagccagtggaaaaaaataccgacaaacaatagtgccttag

SEQ ID NO: 66834 - DNA, 1011 bp, Neisseria meningitidis
atgagcaaaaaacgagttctgaccggcgtaaccaccaccggcatcccgcatctgggcaactacgtcggcgccatccgccccgccgtccgcgcggcgcaaaacctcgataccgaatccttcctcttcctcgccgactaccacggcatcatcaaatgccacgagccggagatgattcaccaatccacccaagccgttgccgccacttggcttgcctgcggactcgaccccgagcgcaccaccttctaccgccaaagcgacattcctgaagtgatggaattgaactggattctgacctgcatcaccgccaagggtttgatgaaccgcgcccacgcctacaaagccgccgtgcaggcaaatgcggaaaacgggcaggaagaccctgatttcggcgtggaaatgggtttgttcagctatccgattctgatgaccgccgacatccttatgttcaacgccaacgaagtccccgtcggacgcgaccaaatccaacatgtcgaaatggcgcgcgacattgccggccgcttcaaccaccgcttccaagaactcttcaccctgcccgaagtgaaaatcgacgaaaacgttgaactcttggtcggcttggacggacgcaaaatgtccaaatcttacggcaacaccattccgctttgggaaaacgacaaaaaaacccaaaaatcggtcaacaaaatcatcaccaatatgaaagagccgggcgagccgaaacagcccgacgaaagcccattgtttgaaatctacaaagccttctccacgccgtctgaaaccgcagcgttcacgcaaatgcttgccgaaggcttggcttggggcgaggcaaaaaaacttttggcggcgaaaatcaacgccgaactcgccgaaccgcgcgaacgctacaacgagctgaccgccgacccttcgcaaatcgaagagattttgcaggcaggcgcgcaaaaagcgcgtaaagaagcacgcgaattgttggacaaagtacgcgatgcggtcggcatccgcccgttgaaataa

SEQ ID NO: 66835 - DNA, 1035 bp, Neisseria meningitidis; identical to SEQ ID NO: 66567

SEQ ID NO: 66836 - DNA, 1281 bp, Neisseria meningitidis
atgaaatccctttttattcggctgctcctgttgggttcggcggcaggcgttttctatcatacccaaaaccaatccctgcccgcgggcgaacttgtctatccgtccgcaccgcaaatcagggacggcggcgatgcgctgcactacctcaaccgcatccgcgcccaaatcggtttgcacaagctggcacacgcgccggttttggaaaattccgcccgcaggcacgcacgctatctcacgctcaatcccgaagacggacacggcgaacaccatcccgacaatccgcactacaccgcacaaaagctgaccgaacgcacacgccttgccgggtatctctacaacggcgtgcatgaaaacatcagcacggaagaggaagccgccgaatcgtccgacagcgacatccgcacgcagcaacgccaagtggacggattaatgagcgcaatctaccaccgcctttccctacttgaccgccatacggatgaggcaggagcggcatttgtgcgcgaaaacggtaaaaccgttctcgtattcaatcagggcaacggcaggtttgagcggcattgcgcccaaggcagaaatcagccggaagcaggacggaaatattaccgcaacgcctgccataacggtgcggtcgtgtacaccgacgaagccatgcccgcacaggagctgctctatacagcctatcccgtcggcaacggcgcactgccttatttccacggcgagcgtccagaccccgtgccggaatatgaaatcacgggcaatcctgccagcattgatttttccgaggcggcaggcaaaattacgatgaaaagtttcaagctgtatcagggtaaaaacgaaatccgccccgtcagggttttaaccgccggcaacgaccccaacggcaggctgaccgcgtaccaattcgcgcttttcccgctcaagcctttggaatacggtacgctttatacggcggtattcgactatgtccgcaacggacggcgcgcgcaggcgaaatggcagtttagaacccgaaaacccgattacccttattttgaggtaaacggcggcgagacacttgcggttagaaaaggcgaaaaatatttcatccactggcgcggacgctggtgtttggaagcgtgtacccgttatacctaccggcagcgacccggcagccgcctgtccataggaaggcacgaggcgggcggcatcgttttcagcgttggcggaatggcgggcagccgcatcacgcttgcaccggaaggagaaacggaacgaggcgtaaccctttatttacaggattga

SEQ ID NO: 66837 - DNA, 1311 bp, Neisseria meningitidis
atgaacacgccgcatccgcgcccgaaaatcgccgtcatcggcgcaggctgggccggcttgtccgccgccgttaccttggcgcggcacgccgacgttaccctgtttgaagccggccggcaggcgggcggcagggcgcgcgcactggccggaaataccgacggtttcggttttttggacaacgggcagcatattttactcggcgcataccggggcgtgttgcgcctgatgaaaaccatcggttcagacccccatgccgcctttttgcgcgtaccgctgcactggcatatgcacggcggtttgcagttccgcgccctccccctgcccgcgcccctgcatattttgggcggcgtgctgcttgcccggcgcgtaccgtccgcattcaaagccaaactgcttgccgatatgtccgatttgcagaagtccgcacgcctcggacagcccgacacgacagtggcgcaatggctgaaacagcggaacgtgccgcgtgccgccgtaatgcagttttggcagcccttggtttggggcgcgctcaacacgcctttggaaaccgcaagcctgcgcgtgttgtgcaacgttttgtccgacggcgtgctgacgaaaaaatccggcagcgactatctcctacccaaacaggatttgggcgcaatcgtcgccgaacccgccttggcggagcttcaacggctcggcgcggacatccgcctcgaaacgcgcatatgccgtctgaacaccctcccggacgggaaagtgctcgtcaacggcgaacctttcgatgccgccgtccccgccaccgcgccctaccacgccgccgcgctcctgcccgaaggcacgcccgaacacgttcagacggcatatcaaaaccttcgctatcacgccatcaccaccgtctatctgcgctatgccgaacccgtccgcttgcctgccccgctgaccggacttgccgacggcacggtgcaatggctgctttgccggggcaggctcggactgcctgaaaacgaagtgtccgccgtcatcagcgtttccgaccgcgtcggcgcgtttgcaaaccgggcgtgggcggacaaagttcacgccgacctcaaacgcatccttccgcatttgggcgaacccgaagccgtgcgcgtcatcaccgaaaaacgcgccacaaccgcagccgatgccccgccgccggatttgtcgtggttgcaccggcaccgcatcttccccgccggcgactacctccacccagactaccccgccacgctcgaagccgccgtacaatcaggtttcgcgtcggcggaagcctgcctgcaaagcctgagcgatgccgtctga

SEQ ID NO: 66838 - DNA, 759 bp, Neisseria meningitidis
atgattaccatccgcaacgtcagctaccgcatcggcacgcaccccatcctcgacaacatcagcctcgacatccccgaaggcggcattaccgcgctaatcggcccgaacggcgcaggcaaatccaccctgttttcctttatggcgcggctgcgcccgcttgaaagcggcagcatcgcctaccgcggcaaaaaccttgccgacacccccaccgccgaactcgcccgcacgctctccatcctcacccaagaaaacagcatcatgagccgcatcaccgtgcgcgacctgctgatgttcggccgttacccctaccatcaaggcagaccgactgccgaatgccgccgtatcgttaacggtgcaatcgaagaattccacctgcaagacctctccgaccgctatctgaccgagctctccggcggccaacgccaacgcgccatgattgcgatggtgttctgccaaagcaccgactacgtccttttggacgaaccgctgaacaacctcgatatgtatcacgcccgctcgctcatgcagattctgcaaaagctcacgcgcgaacacaaatgcaccaccgtcgccgtattgcacgacatcaaccaggccgccgcctacgccgaccacgtcgtcgccatgaaaaacggcaaagccgccctgaccggcacgcccgaagaagtgttcaccgtacacaacatcaaagaactgttcgacatggacgtggacgtactcgactacgaaggcaaaaaactcatcgtccaccatatctga

SEQ ID NO: 66839 - DNA, 2163 bp, Neisseria meningitidis
atgcaacaaaaaatccgtttccaaatcgaaggcatgacctgccaggcctgcgcttcgcgcattgaaaaagtgttgaacaaaaaagattttgtcgaatcggcgggggtaaacttcgccagcgaagaggcgcaggtagtgtttgacgacagcaaaacctcagtagccgacattgccaaaatcattgagaaaaccggttacggcgcgaaggaaaaaacggaagatacattgccgcaacccgaagcagaacaccatatcggctggcggctgtggctgctgttcaccatcaacgtcccgttccttatcggcatggcggggatgatgatcggcagacacgattggatgattccgccgttgtggcagttcgcattggcgagtgtggtgcaactttggctggcggtgccattttacaaaagcgcgtgggcgagcattaaaggcgggctggcgaatatggacgtgctggttaccatcggcacggtctcgatttacctgtattccgtctatatgctgtttttcagcccgcacgcggcgtacggtatggcgcatgtgtattttgaagtgggcgtgatggtgatcggttttgtgtcactgggtaaatttttggaacaccgtaccaaaaaatctagcctcaacagcttgggcttgctgctcaaacttacaccaacccaagtcaacgtgcaacgcaacggcgaatggaaacagcttcccatcgaccaagtgcaaatcggcgaccttatccgcgccaaccacggcgaacgcattgccgcagacggcatcattgaaagcggcagcggttgggcggacgagagccatcttaccggcgaatccaaccctgaagagaaaaaggcaggcggcaaagtgttggcaggtgcactgatgaccgaaggcagcgtggtttaccgcgccacccaactcggcagccaaaccctgctcggcgatatgatgaacgcgctatccgaagcgcaaggcagcaaagcaccgattgcgcgcatggcggacaaggcggcggcggtgttcgtgcctgccgttgtgggcatcgcacttttgacttttatcgctacttggctgattaagggcgattggacgctcgcattgatgcacgccgtcgccgttttggtgattgcctgcccgtgtgcgctcggtctggctacacccgccgcgattatggtcggcatgggtaaagcagtgaaacacggcatttggtttaaagacgcagcggcaatggaagaagccgcccacgtcgatgccgttgtgttggacaaaaccggtacgctgaccgaaggcaggccgcaggttgccgccgtttattgtgttcccgacagcggctttgacgaagacgatttgtaccgcatcgccgctgccgtcgaacaaaacgccactcatccgcttgcccgtgccatcgtttccgccgcccaaacgcgcagcttggaaatccctgccgcacaaaacgctcaaaccgttgtcggcgcaggcattgccgccgaagtggaagacgtgggtttggtgaaagcaggcaaagccgaatttgccgaacttaccttgcccgagttttcagacggcgtttgggacattgcaagcattgttgcagtctcggtcgataacaaacccataggcgcattcgcacttgccgacgcgctgaaagccgataccgccgaagccataggccgtctgaaaaaacacggcatcgacgtttacatcatgagcggcgacaaccaaggcacggtcgaatacgtcgccaaacaactgggcatcacacacgctttcggcaacatgagtccgcgcgataaagctgccgaagtgcaaaaactcaaagccgccggtaaaaccgtggcgatggtcggcgacggcatcaacgacgcgcctgcactcgccgccgccaacgtcagcttcgccatgaagggcggcgcggacgttgccgaacacaccgcgtccgccacgctgatgctgcattcggtcaaccagctcgccgatgcgctatcggtatcgcgagcgacgttgaaaaacatcaagcaaaacctgtttttcgccttcttctacaatattttgggcattccgctcgccgcgctcggctttttaaaccccgtcatcgcaggcgcggcaatggcggcaagctcggtttccgtgttgagcaacgccttgcgcctgaaacgggtaaaaatcgattga

SEQ ID NO: 66840 - DNA, 234 bp, Neisseria meningitidis; identical to SEQ ID NO: 63361

SEQ ID NO: 66841 - DNA, 600 bp, Neisseria meningitidis
atgaacaatttaatcaaaatcaacctcctcccctacagggaagagatgaacaagcgcaaacagcagcagtttaaaacgctgatgtacggtgccgtgctgacgggcgttgccgccgttgcggcaacctacctgtttatcgacaatatgatcaataaccagtcggaaagaaacacgctgctggaaacctccatcgcacacttggataccgagctgtcggaaatacaaaagctcaaacaggaaaaagatgccttcctgattaaggaaaacaaaatcgaggagctccagctcaaacgcctccaagccgcaaaaatcctcgacagcctgaatgaggccgtccccggaagcacctacctgacctcgctggatgccgttaccgccgactcttatcggctcagcggcaggacatccagcgacaaccgcgttgccgccatgatgagggcgatgcccaataccggcatattcaagcaacccgaattgttaagcatcaagaaaaacaattcgcatcaagaatttacccttcaggcaacattacaacccatcgtaaaggcggccgaatccaaagagaatccggcttcgggaaacgcacaggaggcaaactga

SEQ ID NO: 66842 - DNA, 222 bp, Neisseria meningitidis; identical to SEQ ID NO: 36405

SEQ ID NO: 66843 - DNA, 648 bp, Neisseria meningitidis; identical to SEQ ID NO: 36887

SEQ ID NO: 66844 - DNA, 1410 bp, Neisseria meningitidis
atgaatttccccaaaacagcggcctccctgctgctgcttctcgcctccctcgccgcacacgcgctcgatacgggtcgcattccgcaaaacgaaatcgccgtatatgtccaagagcttgacagcggaaaagtcatcattgaccaccgctcggatgtccccgtcaaccccgcctccacaatgaaactcgttaccgcgtttgccgccttcaaaaccttcggcagcaattaccgctgggcgaccgagtttaaaagcaacggtacggtaaacgacggcacgcttgacggaaacctgtattgggcgggcagcggcgaccccgttttcaatcaggaaaacctgcttgccgtccaacgccagttgcgcgaacaaggcatacgcaatatcacgggacacctgatgctcgaccacagcctgtggggcgaagtcggcagccccgacgatttcgaagccgacagcggttcgccgtttatgacgccccccaatccaactatgctgtctgccggtatggttatggtgcgcgccgaacgcaatgccgccggcagtaccgacatcctcaccgatccgcctttgccgcatattttcgcccaaaacaacttgaaaattaccgcctcccaagctgcctgcccttcgatcaaaaaactgatgcgtgcatctttttcggacaatacgctgaaattgcgcggcaatattcccgagagctgtttgggcaagcctgtcggtgtccggatgttcgcgcttgacgaactgatccggcaaagttttaccaaccactggctgctcggcggcggacggatttcagacggcatcggcatatccgacacgccggaaggcgcgcagacgcttgccgttgcacactcaaagccgatgaaggaaattttgacggacatgaacaagcgttcggacaatctaattgcgcgttccgtcttcctcaaactcggcggcgacggcaaactgcccgccgtttccgaacaggcagcgtctgccgtccggcgtgaacttgccgtgtcgggcatcgatgttgcggatttggttttggaaaacggttcaggtctgtccagaaaagaaagggtaacggcgagaatgatggcgcaaatgttggaaacggcttatttcagcccgtttgcacaagatttcatcgacacgctgcccatcgccggcacagacgggactttacgcaaccgcttcaaacaaagcggcgggctgttgcgcttaaaaaccggcacgctcaacaatgtccgcgcattggcaggctactggctgggcgacaaaccgatggtggtggtcgtcatcatcaacagcggtcgcgccgtttccctgctgcccgacttggacaacttcgttgccaacaacatcatctccggcggcgatggctggctggatgcgaaactgatgtgcaaagaacgccgagcctga

SEQ ID NO: 66845 - DNA, 615 bp, Neisseria meningitidis
  misc_feature 592, 593, 594, 595, 596: 'n' is a, c, g or t
atgaaaaccaagttaatcaaaatcttaaccccctttaccgtcctcccgctgctggcgtgcggtcaaacgcccgtttccaacgccaacgccgaacccgccgtcaaagccgagtccgccgcccccgtacaaggaaaagtcggcgaagccttgaaagcacgcctcgaaaaaatttacgaatcccaaggtctgaaagtcatcagcgtcagcgaaacaccggtcagaggcatttacgaagtcgtcatcagcggaaggcagattatctacaccgatgcaaacgccgattatctattttccggcgaacttcttgacatcaataaccggaaaaacctcaccgaacagcgtatggcagatttgaacaaaatcgacttcgcttccctgcctttggacaaagccatcaaagaagtacgcggcaacggcaagctgaaagtcgccgtcttctccgacccggactgtccgttctgcaaacgcttggaacacgagtttgaaaaaatgaccgacgtgacggtttacagctttatgatgcccattgccggcctgcaccccgatgccgcacgcaaggcgcaaatcttatggtgccagcccgaccgcgccnnnnncacacacttaattaattaa

SEQ ID NO: 66846 - DNA, 405 bp, Neisseria meningitidis
atgaccgcccaaccctgccccatctgcacggcgcaaaatgaagacgttttgctgcaaacccccaagctgcgcgtcatcaccgtccataacgacagcggttcgcctgcattctgccgtgttatctggcatgaacacatcgccgaaatgaccgacctttcggcagcggaacgcggcgaattgatggaaatggtgtacaaagtcgaagccgctatgcgccaagtgttccggccggcaaaaatcaacctcgccagcttgggcaatgtcgtgccgcacctgcattggcatattatcgcccgctttgaaaacgatgcgtctttccccgcgccgatttgggcaaaccccgtccggaaacacggtatgaccctgccgcaagattggacggaacagcttaaaaagctgctttaa

SEQ ID NO: 66847 - DNA, 876 bp, Neisseria meningitidis
atgaacctctacgacctgctccttgccccctttgcagaatttgactttatgcgctacgccctcgtatccgtcttctgcctgtccctcagtgccgcacccgtcggcgtattcctcgtcatgcgccgtatgagcctgataggcgacgcattgagccacgctgtcctgcccggtgccgccgtcggctacatgtttgccggcttgagcctgcccgccatgggtttgggcggcgtagccgcaggcatgctgatggcactgcttgccggacttgttagccgcttcaccaccctgaaagaagatgccaactttgccgccttttatctcagcagcctcgccataggcgtagtcctcgtcagcaaaaacggcagcagcgtcgatctgctgcatctgcttttcggctctgtacttgccgtcgatattcctgccctgcagctcatcgccgccgtatccaccctcacactgcttacccttgccgtcatctaccgcccgctcgtactcgaaagcatcgaccccctgtttctcaaatctgtcggcggcaaaggcgggctttggcacgtcctctttctcgtcctggtcgtcatgaacctcgtatccggctttcaagccctcggcacactcatgtccgtcggactcatgatgctgccagccattaccgcccgcctgtgggcgaagcacatgggcgcactcatcctcctatccgttctgacagccctgctgtgcggcttgagcgggctgctcatttcctaccacatcgaaatcccttccggccccgccatcatcctctgttgcagcgtcctttatctcttttccgtcatactcggcaaagaaggcggcattctgaccaaatggctcaaaaaccaccgccaccacaccacctga

SEQ ID NO: 66848 - DNA, 876 bp, Neisseria meningitidis
atggaagaaggtttgatcgacaggctgcttgaaacgctgtggttggacaggcggctcagtcagaatactttaaacggttaccggcgcgatttggaaaaaatcgcccgccgcctgtcccaatcgggcagaacgctgaaggatgcggacgaagcggatttggcggcggcggtttatgttgacggagagcaacggagttcgcaggcgcgcgcattatcggcgtgcaaacgcctgtatatatggatggagcgtgaaggcataaggacggacaatcccacctgcctgctgaaaccgcccaaaatcgacaagaatattccgaccctgattacagaacagcagatttcccgactgcttgccgcaccggataccgacacgccgcacggtttgcgggacaaggccctgcttgaattaatgtacgcgaccggcttgcgcgtcagcgaggcggtcgggctgaacttcggcaatgtggatttggacaggggctgtattaccgcgctgggcaagggcgacaagcagaggatggtcccgatggggcaggaatcggcgtattgggtgggacgctattacacggaggcgcgtccggccttgttgaagggcaggagttgcgatgccttgtttgtcagtcagaaaaaaacaggtatttcccgtcagttggcatggatgattgtcaaagaatatgcaagtcaggcaggcatcgggcacatcagcccgcacagcctgcgccatgccttcgccacgcacttggtgcagcacggattggatttgcgcgtggttcaggatatgttgggacatgccgatttgaatacgacgcagatttatacccatgttgccaatgtatggttgcagggtgtagtgaaggaacaccattcccgaaactga

SEQ ID NO: 66849 - DNA, 1335 bp, Neisseria meningitidis; identical to SEQ ID NO: 50513

SEQ ID NO: 66850 - DNA, 1773 bp, Neisseria meningitidis
atgatactgccagcccgtttttcagacggcatcagcctttccctacgcctgaaactcctgaccggagtgtgggtcgggttggcggcattgtctgtcgttttgacactgctgctctctttgcgtctggaaaacgcggcctccgtcatcgaagaggcgggcaacttgagaatgcaggcataccgtctggcatacatggcgggtgaaggatctccccgctcccaaatagacaatcaggttgacgaatttgaaaaaagcctgaatcgtatttcacaaagtgatgccatccatccgctgattccttcggacacccctcttgcttatgatttgatacaatccatgctgattatagattggcaggcacacatcctccccccgctccagtcctaccggcgaccgactcaggtcgatctctaccgctttgccggaaacatcgaactgtttttgcaggcattggaaaatgccaacgaaaaaaacacatggtggctcaggcgttttcaatgggcaattatgttgatgacgctggtgtcgtctgtactgatgctgttttggcaccagatttgggttatccggccgctgcaggcgttaagggaaggtgcggaacgcatcggacggaggtgtttcgatattccggttcccgaaggcggtacgccggaattcaaacaggtcgggcgttgtttcaatcaaatgggcggcaggttgaaaattttatatgatgatttggaaggacaagtcgccgagcagacacgcagtctcgaaaaacaaaatcaaaacctgaccctgctgtaccaaactacacgggacctgcaccaatcctacataccgcaacaggctgcagaacattttctaaaccgtatcctgcccgccgtaggagcagattccggcagagtttgtttggacggcggatccgatgtttatgtttccattcatcatgcggattgcggcacagcagcttcggatttggggaagtaccatgaggaaatcttccccattgagtaccagaacgaaacattgggcaggctgttgctcagctttccaaacggcatttctcttgatgaagacgaccgcatcctgcttcaaacactaggcaggcaattgggcgtatcgcttgccggcgcaaaacaggaggaagaaaaacgcctgcttgcagtattgcaggaacgcaacctgattgcgcaaggattacatgacagcatcgcacaagcattaacgttcctaaacctacaggtacagatgctggaaaccgcctttgccgaaaacaaacgggaggaagccgcagaaaacatcggcttcatcaaaacaggcgtgcaggaatgttatgaagatgtccgcgaactgctgctcaacttccgtaccaaaatcagcaataaagaatttcccgaagccgttgccgacctattcgcccgctttacgcaacaaaccgggataacggtcgaaaccgcctgggaaaacggttcgttcctgccgcctcaggaagcgcagctccaaatgatttttatcctgcaggaaagcctgtccaacatccgcaaacacgcccgcgccacccatgtaaaattcaccctttccgaacacggcggacgctttaccatgaccatccaagacaacggacaaggtttcgacacggagaaaataggagaacccacgggcagccatgtcggactgcacatcatgcaggagcgtgccaaacgcatccatgccgttttagaaatccgttcccaagctcaacagggaaccaccgtctcattgacggttgcatctgaagaaagcttgaaatga

SEQ ID NO: 66851 - DNA, 435 bp, Neisseria meningitidis; identical to SEQ ID NO: 42997

SEQ ID NO: 66852 - DNA, 417 bp, Neisseria meningitidis
atgccgtctgaaccgccttcagacggcattgcccgacaccccaaaagcacaatcaaaatggcaaaaaaaccgaacaaacccttcaggctgacccccaaactcctgatacgtgtcgtattgctcatctgtatcaccgccatcggcgcattggcaataggcatcgtcagcacattcaacccgaacggcggcaaaaccctccaaaccgaaccgcaacacaccgacagcccccgcgaaaccgaattctggctgccaaacggcgtagtcggacaagatgccgcccaacccgaacaccaccacgccgcctcatccgaacccgcacagccggacggcacagacgaaagcggcagcggactgccgtcccctgccgcacccaagaagatcgctgagataggtgcctcactgattaagcattggtaa

SEQ ID NO: 66853 - DNA, 1293 bp, Neisseria meningitidis
atggctgtcttcccactttcggcaaaacatcggaaatacgcgctgcgcgcgcttgccgtttcgattattttggtgtcagcggcatacattgcttcgacagagaggacggagcgcgtcagaccgcagcgcgtggaacaaaatctgccgccgctgtcttggggcggcagcggtgttcagacggcatattgggtgcaggaggcggtgcagccgggcgactcgctggcggacgtgctggcgcgttcgggtatggcgcgggacgagattgcccgaatcacggaaaaatatggcggcgaagccgatttgcggcatttgcgtgctgaccagtcggttcatgttttggtcggcggcgacggcggcgcgcgcgaagtgcagttttttaccgacgaagacggcgagcgcaatctggtcgctttggaaaagaaaggcggcatatggcggcggtcggcttctgaggcggatatgaaggttttgccgacgctgcgttcggtcgtggtcaaaacgtcggcgcgcggttcgctggcgcgggcggaagtgcccgtcgaaatccgcgaatccttaagcgggattttcgccggccgcttcagccttgacggtttgaaggaaggcgatgccgtgcgcctgatgtacgacagcctgtatttccacgggcagcaggtggcggcgggcgatattttggcggctgaagtcgttaagggcggcacaaggcatcaggcgttctattaccgttcggacaaggaaggcggagggggcggcaattattatgatgaagacggcagggtgttgcaggaaaaaggcggcttcaacatcgagccgctggtctatacgcgcatttcttcgccgttcggctaccgtatgcaccccatcctgcacacttggcggctgcacacgggcatcgattatgccgcaccgcagggaacgccggtcagggcttccgccgacggcgtgattacctttaaaggccggaagggcggatacggcaacgcggtgatgatacgccacgccaacggtgtggaaacgctgtacgcgcacttgagcgcgttttcgcaggcacaaggcaatgtgcgcggcggcgaggtcatcggttttgtcggttcgaccgggcgttcgacggggccgcacctgcattacgaggcgcgcatcaatgggcagcccgttaatcctgtttcggtcgcattgccgacacccgaattgacgcaggcggacaaggcggcgtttgccgcgcagaaacagaaagcggacgcgctgcttgcgcgcttgcgcggcataccggttaccgtgtcgcaatcggattga

SEQ ID NO: 66854 - DNA, 1770 bp, Neisseria meningitidis
atgaccgtacagaccaagacaaaaggtttggcgtggcaagaaaaaccgctatccgacaacgaacgtctgaaaaccgaaagcaattttttacgcggcacgattttggacgatttgaaagacccgctcacgggcggcttcaaaggcgacaacttccaactcatccgcttccacggtatgtatgagcaggacgaccgcgacatccgcgccgaacgcgccgaggcaaaactcgagcccttgaaatttatgcttttgcgctgccggctgccgggcgggatcatcaaaccgtcccaatggatagaactggacaaatttgcccggaaaaacagtcattaccgctccatccggctgaccaaccggcaaaccttccaatttcacggcgtgccgaaaaccaagttgcagacaatgcaccgcctcttgcacaaactgggtttggattccatcgccacggcggcggatatgaaccgcaacgtgctttgcacctccaatcccatcgagtcggcactccaccaacaggcttacgaatacgcaaaaaaaatttccgaacacctattgccgcgcacgcgcggttatctggatgtttgggtggacggcaaaaaagttcaaagttccgacgacttccttcaagaagacgagccgattttaggcaaaacctatctgccgcgcaaattcaaaaccgcagtcgtcattccacccttaaatgatgtggactgctacggcaacgatttggattttgtcgccatttcagacggcggcggacagcttgccggcttcaatgttttggcaggcggcgggctttcgatggaacacggcaacaccaaaacctatccgaacatttcactggaactgggtttcgtgcctccggaacacgcgctgaaggccgccgaagcggtggtaaccacgcagcgcgacttcggcaaccgcagcgaccgcaaaaacgcccgcacccgctacaccattcaaaatatgggcttggacaacttccgcgcggaagtcgaacgccgtatgggtatgccgttcgaacccatacgcccgttcaaatttaccgggcgcggcgaccgcatcggctgggtgaaaggcatagacggcaactggcatttgacccttttcatcgaaagcggccgtttggttgacgaaggcgggaaacagcttctgaccggcgtgttggaaatcgccaaaatccacaaaggcgatttccgcattaccgcaaaccaaaaccttatcgtggcaaatgtcgccgaagcagacaaagcaaaaatcgaagaacttgcccgaacatacggattaatccgcaacgatgtcagcaaactgcgcgaaaatgcgatgtcgtgcgtttcctttccgacctgtcccttggcaatggcggaagccgaacgcgtgctgccggacttcatcgacgagctggataagattatggcgaaacacggcacgtcggacgactacatcgttacccgcattaccggctgcccgaacggctgcggacgggcgatgttggcggaaatcgggctggtcggcaaagccgtcggacgctacaacctccatatcggcggcgaccgtgaaggcgtacgcatcccccgcctttacaaagaaaacatcaccctgcccgaaatccttgccgaattggacgacctgatcggcaaatgggcggcgggacgcaatatcggcgaaggtttcggcgatttcgccatacggacgggcatcgtcaaacccgtattaaatgcacccgttgatttttgggacgcatccaaagccgtcgcgattgcccgcgcctaa

SEQ ID NO: 66855 - DNA, 525 bp, Neisseria meningitidis
ttgaggtcgtctgaaatggatattttattgaaatactggaagccggtaggcgtattgctgctaatcgtcctgatttttaccgcatggcatttcgaccgtgccgaaaaataccgcatgggacgggaggctgctgctgccgaaatttcgaatcgtctgaaagacggctatatcgagcaggcaaagcaggcgcgttctgccgagcagaaggccgctgccgcgtttgccgaacgacaaaccaaattagaagaggaaaaacaaaatgctgaaaaaactgttgccgctatgcgtcttgagcttaaccgcctgcgccactacgccgccgcccaaaatcgcagcagaaacctgcccgcaaccactaccgccgccaccgcatctgatggcgcgtcagattcccaaggctggctattattcgggcagtgcgctgaaaaatatgcaggactggcagaaacagccgacggacatgcggccgatttaagggaatggcaggcatatggtcatgcaataagcagtcagcgtgccgaataa

SEQ ID NO: 66856 - DNA, 1785 bp, Neisseria meningitidis
atgagcttagttgaattgaaagtgcccgacattggcggacacgaaaatgtagatattatcgcggttgaagtgaacgtgggtgacaccatcgccgttgacgacaccctgattaccttggaaaccgacaaagcgacgatggacgtgcctgccgaagttgcgggcgtagtcaaagaagtgaaagtcaaagtcggcgacaaaatctccgaaggcggtttgattgttgtcgttgaagctgaaggcacggctgccgctcctaaagccgaagcggctgccgcctcggcgcaagaagcccctaaagctgccgctcctgctccgcaagccgcgcaatttggcggttctgccgatgccgagtacgacgtggtcgtattgggtggcggtcccggcggttactccgctgcatttgccgctgccgatgaaggcttgaaagtcgccatcgtcgaacgttacaaaactttgggcggcgtttgcctgaacgtcggctgtatcccttccaaagccttgttgcacaatgccgccgttatcgacgaagtgcgccacttggctgccaacggtatcaaataccccgagccggaactcgacatcgatatgcttcgcgcctacaaagacggcgtggtttcccgcctcacgggcggtttggcaggtatggcgaaaggccgtaaagtggatgttatccaaggcgacggccaattcttagattcgcaccacttggaggtatcgctgactgccggcgacgcgtacgaactggcagcccctaccggcgagaaaaaaatcgttgccttcaaaaactgtatcattgcagcaggcagccgcgtaaccaaactgcctttcattcctgaagatccgcgcatcatcgattccagcggcgcattggctctgaaagaagtaccgggcaaactgctgattatcggcggcggcattatcggcctcgagatgggtacggtttacagcacgctgggttcgcgtttggatgtggttgaaatgatggacggcctgatgcaaggcgcagaccgcgatttggtaaaagtatggcaaaaacaaaacgaataccgttttgacaacattatggtcaacaccaaaaccgttgcagtcgagccgaaagaagacggcgtttacgttacctttgaaggtgcaaatgcgcctaaagagccgcaacgttacgatgccgtattggttgccgccggccgcgcgcccaacggcaaactcatcagcgcggaaaaagcaggcgttgccgttaccgatcgcggcttcatcgaagtggacaaacaaatgcgtaccaatgtgccgcacatctacgccatcggcgacatcgtcggtcaaccaatgttggcacacaaagccgttcacgaaggccacgttgctgctgaaaactgcgccggccacaaagcctacttcgacgcgcgcgtgattccgggcgttgcctacacttcccccgaagtggcgtgggtgggcgaaaccgaactgtccgccaaagcctccggccgcaaaatcaccaaagccaacttcccgtgggcggcttccggccgtgcgattgccaacggttgcgacaacggctttaccaagctgatttttgatgccgaaaccggccgcatcatcggcggcggcattgtcggtccgaacggtggcgatatgatcggcgaagtctgccttgccatcgaaatcggctgcgacgcggcagacatcggcaaaaccatccacccgcacccgaccttgggcgaatccatcggtatggcggcggaagtggcattgggtacttgtaccgacctgcctgcgcaaaagaaaaaataa

SEQ ID NO: 66857 - DNA, 1332 bp, Neisseria meningitidis; identical to SEQ ID NO: 42871

SEQ ID NO: 66858 - DNA, 186 bp, Neisseria meningitidis; identical to SEQ ID NO: 37303

SEQ ID NO: 66859 - DNA, 876 bp, Neisseria meningitidis; identical to SEQ ID NO: 61876

SEQ ID NO: 66860 - DNA, 795 bp, Neisseria meningitidis
  misc_feature 772, 773, 774, 775, 776: 'n' is a, c, g or t
atggctaaggaaaaattcgaacgtagcaaaccgcacgtaaacgttggcaccatcggtcacgttgaccatggtaaaaccaccctgactgccgctttgactactattttggctaaaaaattcggcggtgctgcaaaagcttacgaccaaatcgacaacgcacccgaagaaaaagcacgcggtattaccattaacacctcgcacgtggaatacgaaaccgaaacccgccactacgcacacgtagactgcccggggcacgccgactacgttaaaaacatgattaccggcgccgcacaaatggacggtgcaatcctggtatgttccgcagccgacggccctatgccgcaaacccgcgaacacatcctgctggcccgccaagtaggcgtaccttacatcatcgtgttcatgaacaaatgcgacatggtcgacgatgccgagctgttggaactggttgaaatggaaatccgcgacctgctgtccagctacgacttccccggcgatgactgcccgattgtacaaggttccgcactgaaagccttggaaggcgatgccgcttacgaagaaaaaatcttcgaactggctgccgcattggacagctacatcccgactcccgagcgtgccgtggacaaaccgttcctgctgcctatcgaagacgtgttctccatttccggccgcggtacagtagtaaccggccgtgtagagcgcggtatcatccacgttggtgacgagatcgaaatcgtcggtctgaagaaacccaaaaaccacctgtaccggnnnnncacacacttaattaattaa

SEQ ID NO: 66861 - DNA, 990 bp, Neisseria meningitidis
atgaaacagcctgtttttgccgttacttccggcgagcctgccggcatcggccccgatatttgtttggacttggcgtttgcacgcctgccctgccgctgcgcggtattgggcgacaaacacctgttgcgcgcgcgcgccgaagccttgggcaaaagcgtcgtcttgcgcgacttcgatccggaatcaggcggcgcggcatacggcgagctggaagtgctgcacatccctgccgtcgaagcggttgaggcgggcaaactcaatcccgccaacgccgcctatgtgctgcaacttttggacaccgcgctcgcaggcatttcagacggcattttcgacggcatcgttaccgcgccgctgcacaaaggcatcatcaacgacgcgcgcgcaagcacaggttttttcagcggacacaccgaatatctggcggaaaaaagcggcacggggcaggttgtgatgatgcttgccggcaaaggcctgcgcgtcgccctcgtaacgacccacctgccgctgaaagacgttgccgccgccatcacgcaaccgctaattgaaagcgtcgcacgcattctgcatcacgacttaaaacacaaattcggcatcaaaaatcccaaaatcctggtcgccggactcaacccccacgccggcgaaggcggacacctcggacacgaagaaaccgacaccattatccccgcgctcgaaaacctgcgccgcgaagggataaacctcgccggcccgtatccggcagatacgctgttccaaccgtttatgctcgaaggcgcggatgccgtattggcgatgtaccacgaccaagggctgcccgtgttgaaataccacagcttcgggcagggcgtgaacatcacgctgggtctgccctttatccgcacctccgtcgatcacggcaccgcgctcgatttggcggcaaccggcagggcggattccggcagcctgataactgccgtggagaccgccgtcgagatggcgcgcggcagcctttaa

SEQ ID NO: 66862 - DNA, 315 bp, Neisseria meningitidis
ttgcaagaatttaaattatggttggagaaggttgtcttagatatgcctattgataatatacctttttatatttttgatttaattgatcttaaagaaggagtaggagatatttataatattttggattttgttccgaattcagacttatctaaagaccaagatgacgcattaacaggcattgccttcttaagggggatagatgtctatgaccctcccgtttcaaaagaaaaagcattaaaagccttaaagaaacatcctgaaatttatcagaggtttcagcatttctttccgtttgtagaactgcccccgctttaa

SEQ ID NO: 66863 - DNA, 492 bp, Neisseria meningitidis
atgaattccctctttgtagacaatactgttttcattacacggctgaaagccgtgcatatcggcaggttggttcaggcgttgtttgaggagtggcacggatttgaaccgtggtcttctgtggataagattcatgcctattacggcaggtgtttgaaggatggcgaactgccactggcatttgcggctgtggatgactccggaatcctgttgggttcggctacggtcaagcggcatgatatggaaagttttccacagtatgaatattggttgggtgatgtctttgttttacctgaatatcgcggaaaaggcattggcaggaggctggtcgcccactgcataggcgcagcgcgttcgctggggataaagttcttgtatctttatacgcctgatgtgcaaatattttatgaatcattcggctgggtggttgtcgggcaacatttccataacggtgaatgggttacggttatgcgtttggatgtggataaggtttaa

SEQ ID NO: 66864 - DNA, 1044 bp, Neisseria meningitidis
atgcagattaccgacttactcgccttcggcgctaaaaacaaagcatccgaccttcacctgagttcgggcatatcccctatgattcgggttcacggcgatatgcggcgcatcaaccttcccgaaatgagcgcggaagaggtcggtaatatggtaacttcggtgatgaacgaccaccagcggaaaatctaccagcaaaacttggaagtcgacttctcgttcgaactgcccaacgtcgcccgattccgcgtcaacgccttcaacaccggccgcggtcccgccgccgtattccgcaccattcccagcaccgtcttatcgctggaagaattgaaagccccgagcattttccaaaaaatcgcagaatcgccgcgcggcatggtattggttaccggccctaccggttcgggcaaatcgaccacgcttgccgcgatgatcaactacatcaacgaaacccagccggcacacatcctgaccatcgaagacccgatcgaattcgtccaccaaagcaaaaaatccctgattaaccagcgcgagctgcaccagcacaccctcagcttcgccaacgcgctgcgttccgcattgcgcgaagaccccgacgttatccttgtcggcgagatgcgcgaccccgaaaccatcggcttggcactgaccgccgccgaaaccggacacttggttttcggcacgctgcacacgaccggcgcagcaaaaaccgtcgaccgtatcgtggacgtattcccggcgggagaaaaagaaatggtgcgctctatgctgtccgaatcgctgaccgccgtcatctcccaaaacctgctgaaaacgcacgacggcaacggccgtgtcgcctcgcacgaaatcctgatttccaaccccgccgtccgcaacctcatccgcgaaaacaaaatcacacaaatcaactccgtcctgcaaaccgggcaggcgagcggtatgcagacaatggaccaatcgctgcaatcgctggtgcgccaagggctgatcgcaccggaagtcgcacgcagacgcgcgcaaaacagcgaaagtatgagtttctga

SEQ ID NO: 66865 - DNA, 1341 bp, Neisseria meningitidis
atgttgaatccatcccgaaaactggttgagctgatccgtattttggacgaaggcggttttattttcagcggcgatcccgtgcaggcgacggaggctttgcgccgcgtggacggcagtacggaggaaaaaatcatccgtcgggcggagatgatcgacaggaaccgtatgctgcgggagacgttggaacgtgtgcgtgcggggtcgttctggttgtgggtggcggcggcgacgtttgcgttttttaccggtttttcaggcacttatcttctaatggacaatcagggtctgaatttctttttggttttggcgggcgtgttgggcatgaatacgctgatgctggcagtatggttggcaatgttgttcctgcgcgtgaaagtggggcgttttttcagcagtccggcgacgtggtttcggggcaaagaccctgtaaatcaggcggtgttgcggctgtatgcggacgagtggcggcaaccttcggtacgttggaaaataggcgcaacgtcgcacagcctgtggctctgcacgctgctcggaatgctggtgtcggtattgttgctgcttttggtgcggcaatatacgttcaactgggaaagcacgctgttgagcaatgccgcttcggtacgcgcggtggaaatgttggcatggctgcctgcgaaactgggttttcccgtgcctgatgcgcgggcagtcatcgaaggccgtctgaacggcaatattgccgatgcgcgggcttggtcggggctgctggtcggcagtatcgcctgctacggcatcctgccgcgcctcttggcttgggcggtatgcaaaatccttttgaaaacaagcgaaaacggcttggatttggaaaaaccctattatcaggcggtcatccgccgctggcagaacaaaatcaccgatgcggatacgcgtcgggaaaccgtgtccgccgtttcgccgaaaattgtcttgaacgatgcgccgaaatgggcggtcatgctggagaccgaatggcaggacggcgaatggttcgagggcaggctggcacaggaatggctggataagggcgttgccaccaatcgggaacaggttgccgcgctggagacagagctgaagcagaaaccggcgcaactgcttatcggcgtgcgcgcccaaactgtgccggaccggggcgtgctgcggcagattgtccgactttcggaagcggcgcagggcggcgcggtggtgcagcttttggcggaacaggggctttcagacgacctttcggaaaagctggaacattggcgtaacgcgctggccgaatgcggcgcggcgtggcttgagcctgacagggcggcgcaggaagggcgtttgaaagaccaataa

SEQ ID NO: 66866 - DNA, 1527 bp, Neisseria meningitidis
atgaacacgccccttccttattccaattacctcatccgcatcctgacggcatctgtctatgatgtcgcggtcgaaacgcctttggaaccggcacgcagcctttctgtacgtttgaaaaacaacatccttttgaaacgcgaagatttgcagccggttttttcgttcaaaatacgcggcgcgtacaacaaaatgtccaagttgccgaaagatgcgctcgcttgcggcgtgattgcggcaagcgcgggcaatcacgcacaaggcgtggcattgtccgcacagcgtttgggttgccgtgccgttatcgtcatgccggagactacgccgaaaatcaaagtggatgcggtcaaaagccgtggcggcgaggtggttttgcgcggtgtttcatacaacgatgcttacgattatgcgatggagctggcggaacaggaagggctgacctatatcgcaccgtttgacgatcctgatgttattgcaggacaagggacggtaggcatggaaattgtcagccagcatcccgatccaatccgcgccgtattcgtaccgataggggggggcggtttggcggcgggcgtggcggcatttatcaagcaggtccgtcccgaaatcaaagttataggcgttcagaccaacgattcctgctgtatgaagcagtcggtcgaagcgggtgaaatcgtccatttgaaagatgtcgggctgttttcagacggcacggcggtcaaagtcgtcggaaacgaaaccttccgcctctgcaaagaacttttggatgaaatcattacagtcgataccgatgcggtttgcggcgcggtcaaggatattttcgatgacacgcgcagcattaccgagccggccggcgcgttggcgttggcgggtctgaaagcctatattgcccgagaaggcgcggaaaaccaaaccctgattgccgttaccagcggtgcgaatatgaattttcaccgtttgcgccacgtttcggaacggagcgaattgggcgagggcaacgaaggtatttttgccgttaccatccccgaagaacgcggaagttttcttaagtttatcaatatattgggaaataggaatattaccgagttcaactaccgttacggagatgatgaaaaagcgcatatctttgtcggtcttcaagcggcaggcccgcaggatttggcggttatcggtagccggttggatgaggcgggattgcccaatgtcgacctgaccgatgatgagattgccaaaatccatatccgttatatggttggaggacggacggacaaagtagaaaacgagcgtttggtcagttttgagtttccggagcgtccgggggcattggcacgctttttgaaccatatgcagggagggtggaacattacgctcttccattaccgcaaccacggtgcggattacgggcggattttggtcggtatcgatgtgccgccgcacgatgccgccgcatttgacggtttcttggaaagtctgggatacagctatcacgaggaaacgcaaaatgccgcgtacaagctgtttcttgcctga

SEQ ID NO: 66867 - DNA, 2838 bp, Neisseria meningitidis
atgttagacaaatacaatccagccgaaatcgaatccaaacattatcaaaactgggaagagcagggctatttccaacctgatatggatttgaccaaaccgtctttctccatccaactgccgccgcccaacgtaaccggcacgctgcatatgggacacgccttcaatcaaaccattatggacggcctgacccgctactaccgcatgaaaggctgcaacaccgcctggattccgggcaccgaccacgcgggcatcgccacgcaaatcgtggtcgagcgtcagcttgccgcgcaaaacgtgtcccgtcatgacttggggcgcgaaaaattcttggaaaaagtgtgggaatggaaagaagtttccggcggtacgattacccagcaaatgcgccgcgtgggttgttctgccgactggacgcgcgagtatttcacgatggacgacgtgcgcgccgaaaccgtaaccgaagtgttcgtgcgcctgtttgagcaaggtttgatttaccgtggcaaacgcttggtgaactgggatccggttttgggtacggcagtatcggatttggaagtggaaagcgtggaagaacaaggctctatgtggcacatccgctatccgctggcggacaatcctgccgaagccgtgattgtggcgaccacccgccccgaaacgctgctgggcgacgtggccgttgccgtcaatcccgaagacgaacgttatacccatttgattggcaaggaattaatcctgccgctgaccggtcgtaccattcccgtgattgtcgacgaatacgttgaaaaagatttcggcacaggctgcgtgaaaatcacgcctgcacatgacttcaacgactacgaagtcggcaaacgtcacgacacgcgcctgattaacgtgttcgatttggaagccaaagtgttggcaaacgccgaagtgttcaacttcaaaggcgaagcgcaaccaggttttgccctgcctgaaaaatacgctggcttggaccgctttgccgcgcgcaaacaaatggttgccgacttacaggaacaaggcttgttggtcgaaatcaaaccgcacacgctgatgccgccgaaaggcgaccgcacaggttcggtgattgagccgatgctgaccagccaatggtttgtcgctatgtccgccacgccaaacggcggcgagcctgacagcgaattcaaaggcttgagcctcgccgacaaagccaaaaaagccgtcgacagcggcgcggtacgctttatccctgaaaactgggtcaatacctacaaccaatggatgaacaacatccaagactggtgtatttcgcgccaactgtggtgggggcatcaaatccccgcgtggtacgacgaaacaggcaatgtgtacgtcgcccgcaatcaggctgaagccgaaaaacaagccggcaaaacaggcttgacccgcgaagaagacgtattggacacttggttctcctccgcgctcgtgccgttttccacgctcggctggccgtctgaaaccgacgaactcaaagccttcctgccgtccaacgtcttggtaaccggctacgaaatcatcttcttctgggtggcgcgcatgattatgatgaccacccactttaccggcaaagtaccgtttaaagacgtgtacatccacggcatcgtgcgcgaccacgaaggcaaaaaaatgtccaaatccgaaggcaacgtcatcgatcctgtggatttgattgacggcatcggcttggacaagctgctggtaaaacgtaccaccggcctgcgcaaacctgaaaccgcgccgaaagtggaagaagccaccaaaaaactctttcccgaaggcattccgagtatgggcgcggacgcattgcgtttcaccatggcgagctacgccagcttggggcgcagcgtgaacttcgacttcaaacgcgccgaaggctaccgcaacttctgcaacaaaatctggaacgccaccaacttcgtcttgatgaacaccgaaaaccaagactgcggctacggcgcaaccgccaccgaaccgcgcggctattccttccccgatatgtggattgtaggccgtctgaatcagaccatcgagcaggttacgcaagcctacgaaacctaccgctttgatttggcggcggaaaccctgtacagcttcgtgtggaacgactattgcgactggtatttggaacttgccaaagtgcagcttcaaaccggctgcgccagccgccaacgcgccacacgccataccttattgcgcgtactcgaagccgccctgcgcctgctgcacccgattatcccgctcatcaccgaagaactgtggcaaaccgtcgcccctatgtgcgacgcgaaaaccgccgacagcatcatgctcgcccgcttccccgaagccgacggcggcgagattgttcagacggcattcgagcaaatgaccgtgttgcaggatttgattggcgcagtccgcaacctgcgcggcgaaatgggcatccagcccaacgtaaaagccccgctgtttgtcgaaagcacggacgacttggcggactacctcaaatacctgccgatgatgacccgactgaccgaagcacagcaagtcgccgccctacccgaaagcgaagacgcgcccgtcgccgtctgcaacggcgcgcgcctgatgttgaaagtcgaaatcgacaaagctgccgaaaccgcccgtttgagcaaagaagccgagaagctgcaaaaagccttggacaaactcaacgccaaactctccaaacccggctacaccgaaaaagccccggcgcatttggtggaaaaagacaaagccgatttggcggaattggaagacaaaatggcaaaagtgcaaactcagttgtcgaagttgaaagactga

SEQ ID NO: 66868 - DNA, 1179 bp, Neisseria meningitidis; identical to SEQ ID NO: 36454

SEQ ID NO: 66869 - DNA, 312 bp, Neisseria meningitidis; identical to SEQ ID NO: 66550

SEQ ID NO: 66870 - DNA, 3486 bp, Neisseria meningitidis
atgcgcctgacccatatcaaactctccggcttcaaatcttttaccgacccgaccacgatttatgtgccggggcagcttgtcgcggttatcgggcccaacggctgcggcaagtcgaatgtgattgacgcggtgcgctgggtgttgggcgaggcttcggcgaagcagcttcgcggcgagagtatgcaggacgtgatttttaacggtgcggcgacgcgccgtcctgcgccgagggcttcggtggagctggtgtttgacaacagcgaccacagtttgcagggcgcgtgggggcagtatgccgaggtgagcatcaagcggcagttgacgcggcagggcgaatcgacttatttcatcaacaatcagaccgtgcgccgccgcgacattactgatttgtttctgggtacgggcgtgggcgcgcgcggttatgccgttatcgagcaggggatgatttcgcgcatcatcgaagcgcggccggaggaattgcgcgcctatatcgaggaggcggcgggcgtgtccaaatataaggaacgccgcaaggagacggaaggccgtctgaaagacacgcgcgagcatttgcagcgtttgggcgatttgcagaacgaattggcgcgtcaggtggaaaagctggagaaacaggcggaaaccgccgaacgctacaaatccctgaccgcgcagttgaaccaacaacaggatttgctcgattacgcccaatggcagcaatcgcttgccgccgccgacaaggcgaccgcgcagcatcagtctttgcaggcgcagcaggacgaaaccgccgcgcaggttcaggcgttaaacgatgaagtacacgccttgcagaccgccgaacagtcgcagcagcaggcggtgcatgaattgagcaacaaacgcggcgtgttgcgcgagcagattgcccgtttggaagaacaaatccgccaccggcaaaacctgcaccaacgcatcgaacgctacaagcaggcggcgcaggcgcagatgcagcgcatccatcaggaacagcagcaaatccgcgttcagcttgaagaaaacgagttgcagaccgaagaaaagcaaaccgaattggcggaatgggcgatgcaggttgccgaacacgaagagcgtctgcccgaattggaagaagcccaagccacgctcaacgccgccttccaaatccagcaggatgaggcaaaccgcatccgccgcgaactggcgttgaagcagcagcagcttgcccatgccgaacaaaccgttgccaagcacgaagagcgcaaaggccgtctgaaacaggaaaaccaagccctgaacctgcccgacgaagccgaaaccgccgccgcgcaggaagccgccgccctgttgcaaaaccggcaagagcattacgaagaacaaatcatcgccgccgaagaagccttacacgccgcccgcgaggcgtttcagacggcctcaaaccgcttccaaagcctgaagcagcaacacatcaccttgcaggcgcagcagcaggcgttgtcgcaaatcctgtcgcaacagcaggaagccgccgacttctggcaggcaagcgaccacgccgccgcgccgcaactgtggcaacacatcaccgcgcccgccgagtggcagcacgccttgtccgtcatccttgccgaacgcctgcaagcccgtagcgtaccgcatggtttcgttccccccgcgcctttgccgcaggggcaggcggcgtggctttcagacggtctctccggcggcatcaaaaaatccctgcccgtacaggcattgctgaaccaaatccaagcgcagccgccgtttcagacggcattgcaccactggctcgacggcgtattgtgcgcgcccgatttgagctatgccctcgcgcatcaaaacgatttgggcgcacaccaaatctggctcacgcccgaaggtcatcaggtcgataaggtcagcgtcctgctctatgccaagcccgcgcaggaaagcctgattgcccaaaaagcgcacctcgacggcatcgcatccgaactggacaacctagcccccgaactctccgctgacgaagccgcgttcaaacaggcagaagtcgccgtgcgctcgtccgaagtgcaacataaaaacctgatgcagcagcaacagcagcacacgcgccaatacagccaagcgcagcaacgcgccgccgaactcttggcgcgcaccaaccaagggcaaatccgccgcgaacacatcgagcgcgaactggcgcagttggcggaagagcagaccgtgttgcaacacacgtccgacgggctttcagacgacatcgctactttgcaggaagccgccgccgaactcgaacaccaacagcagaccaccgcacacagccgccaagagcagcaaggccgtctgaaacaggcgcagcttgccctgttggaagccaaccgccaatacgggctggccgaagtcgccgtccacaagctcaaccagcaaaaacaaaactaccaacagcaaatcgcccgactcgaacagcaaaccctagactggcaggaacgccagcaagagcttgcccttgcctatgaaaccgagtttcaaaacgatgagcagcacatcaagctcgaagagttgagcgaagccgtacagactttggacgaagaatatattgtcgtacaggagaaactcgcgcagattcaggagcagggcagggaacaatacgctaaagtgcaaaccctgcaaaccaagctgcctcagcttcaggccgcgacccaaaccgccctgttgcagcagcaggaagccctgatcaacgccaaacgctaccatcaaaacctgaccgaacgcgccgccgatttggatgcgctcgaagcgttggcgaaagaatcgccgaaagtattgaacagcagcatcggcagcctctcgcaacaaatcgaagccctcggcgcggtcaacctcgccgccctgcaagaactcgaagaagcgcgcgaacgcgacggctactaccgcagccaaagcgaagacgtgcaggccgccatcacccttttggaagaagccatcgcccaaatcgacgataaaaccaaagcgcgtttcaaagaaaccttcgatgccgtcaacagcaaagtccaaaccttcttcccgaccctgttcggcggcggcgaagccaccctcaaaatgataggcgacgacctcctgaccgccggcgtgtccatcatggcgcgcccgcccggcaagaaaaacagcaccatccacctcctttccggcggagaaaaagccctcaccgccatgagcctcgtgttcgccctgttcagcctcaaccccgcacccttctgccttctggacgaagttgatgccccgctggacgacgccaacacctcgcgtttctgcaggctggtcaaagaaatgtcggcgcaaacccagttcctctacatctcccacaaccgcctgaccatggaaatggcagagcagctggtcggcgtaaccatgcaggaaaaaggcgtatcgcgcgtcgtcgccgtggacatcaaacaggcgttggaaatggcggaagccgtttga

SEQ ID NO: 66871 - DNA, 231 bp, Neisseria meningitidis
gtgagcggttttatccattaccgcatcaaccattccaaggaatttgcagaccgtcagaaccacattaacggcattgagaacttttggaatcaggcaaaacgcgtcttgcgaaaatacaacggaatcgatcgtaaatctttcccgctgttcttgaaagaatgcgaatttcgatttaacttcggcacaccgtctcaacagcttaaaatcctgcgggattggtgtgggatttag

SEQ ID NO: 66872 - DNA, 825 bp, Neisseria meningitidis
atgttgaaaaaattcgtactcggcggtattgccgcattggttttggcggcctgcggtggttcggaaggcggcagcggagcatcttccgcgcctgcacaatcggcagtttccggttctttaatcgagcgcatcaacaataaaggcacggttaccgtcggcacggaaggcacttacgcaccgtttacctaccacgacaaggacggcaaactgaccggttacgatgtggaagtaacccgcgccgtggcggaaaaactgggcgtgaaagtcgagtttaaagaaacgcaatgggattcgatgatggcgggtttgaaggcggggcgtttcgacgtggtggcaaaccaagtcggtctgaccagccccgaacgccaagcgacattcgacaaatccgatccttacagctggagcggtgccgtattggttgcccgtaacgacagcaacatcaaatctatcgacgacatcaaaggcgtgaaaaccgcacaatccctgaccagcaactacggcgaaaaagccaaagctgcaggcgcagatttggtggctgttgacggtttggcgcaatcgctgaccctgattgaacaaaaacgtgccgatgcaaccctgaacgacgaattggcggttttggactatctgaagaaaaacccgaatgcgggcgtgaaaatcgtttggtccgcacctgccgatgaaaaagtcggttccggcctgattgtcaacaagggcaatgacgaagccgtggcgaaattcagtacggcaatcaacgagctgaaagccgacggtacgctgaaaaaactgggcgaacaattcttcggaaaagacatcagtgttcaataa

SEQ ID NO: 66873 - DNA, 291 bp, Neisseria meningitidis
atgaacatccaacttcaaggccacatcgtcggcgttaaaaaattcaacggacaaatcgaaggcaagagcttcgactattgccgcctgattgtcgccacacccttagacagctcccaaggcaacgcattgggcagctctactactgaatacgatttcggcggctctgccaatttcgagcagttccgaaacgcccaatttcccatcgaagcaaacctgaacgtggaaatagttactacgggcaaaacccaaaaactgaaagtcatcggttttcaactcgtgaaaaaaggctga

SEQ ID NO: 66874 - DNA, 1473 bp, Neisseria meningitidis
atgaaccagacaagccgcgatctgacccgcatcagccacaacaccaaaatcgtcgccacccttgggccgggcagcaacaacgtcgaactgttggaagatatgatccgcgtcggcggcctgaacgtcgtccgcttcaacttcagccacggcacgcccgaattccatcaggaaaacgcccgcatcgtgcgcgaggcggcaaaacgcgccggacaggaaatcgccatcattgccgacctgcaagggccgaaaatccgcgtgggcaaaatcgccggcggcggcattgaattgaacaaaggcgaaacgctggtactggatgccgcgctcgaaggcgaaggcacgcgcgaggcggtcggtttggactaccgcgacctgcccgacgacgttgccgcaggcgatgtcttgtggctggacgacggcctgctgaccctgaccgtggaatccgtcgaaggcagcaggattatcacaagggtggaaaacagccacgtcctgaaaagcaacaagggcatcaacaaacgcggcggcggtctgtccgcaggcgcgttgaccgaaaaagacttccgcgacctgaaaaccgcgattgccatcggttgcgactacctcgccatcagctttgtgaaatccgccgaagatttgcatatcgcgcgcgccaaagtcgaagaagaaatgaagggcagcactgccgtgcgccccggtttggtttccaaaatcgaacgcgtggaagcgattgaaaacttggacgaaatcatccttgccggcgacggcattatggttgcgcgcggcgacttggcggtcgaagtcggacacgccgccgtccccgccctgcaaaaacggatgatccgccgcgcccgcgagttgcgccgcttcagcattacggcgacgcaaatgatggaatcgatgattaccaaccccgtgccgacccgcgcggaagtcagcgatgtggcaaacgcggtattggacggtaccgatgcggtgatgtgttccgccgaaaccgccgtcggcgcgtatccgtttgaaaccgtcagccaaatggcaattatctgcgcggctgcggaaaaagagcaggattcgctcaacggcgttgccgaacaggcggagtatcccgaagcggtcagcaccaacctggcggttgccggcggcgcggtcagcgtggcgcgcgcggttcacgccaaagccatcgtcgccctgaccgaaagcggctcgaccgcctttgaaatcagccgccacaacatcaccctgccgattttcgcgctgaccccgagcgtttccgcccaacgccgtatggcgatgtaccggggcgtgcgcccgctgattttggcaaccagtaccgaccacgacacggcgttgaacgaagtcgaaacgatgctggtggaacacaacatcctgcattccggcgaccagtacatcatcaccagcggttcgcaaatgcgcgaatccggttcgaccaacacactggaagtgctgcacgtcaaataa

SEQ ID NO: 66875 - DNA, 486 bp, Neisseria meningitidis
atggacgcgctgcacaccatcgcccgaaacctgacgaaaaaacgtcaaaccgtaagctgtgccgaatcctgtacgggcggaatgcttgccgccgcattcacaagcgttgcaggcagttcgcaatggttcgaccagagttttgtaacatacagcaacaaagccaaagaagaccgcttgggcgtgttgcccgaaaccctgctcgaacacggcgcggtcagccgccaaaccgtctatgagatggcgcgcggcgcgaaagccgtggcgcaggcggattacgccgtcggtatttccggcatcgccggaccgggcggcggcagcgaaagcaaacccgtcggcacggtttggttcgggtttgcctttccgggcggaagttgcgaagcaatgcgccgttttgacggcaaccgcgaatccgtccgcgcgcaggcggtcgccttcgcgttggaacggttggcggggctgattgaaaacggcggcgatgccgtctaa

SEQ ID NO: 66876 - DNA, 459 bp, Neisseria meningitidis; identical to SEQ ID NO: 44367

SEQ ID NO: 66877 - DNA, 684 bp, Neisseria meningitidis
atgcaacacgacgtttacgactacaccgcgcatacggtttctaaaaacaccgtcctgcagaaaacctaccgcctgctcggattttcattcattccggctgccgcaggcgcggcacttgccgccaatgccggtttcaatttttacgccgccttcggttcgcgctggatagggtttgccgtcgtgttggcgtttttctacggtatgatccacttcatcgagaaaaaccgttacagcaataccggcgttaccctgctgatggtattcacattcggtatgggcgtattgatcggccccgtgctgcaatacgcgctccatattgccgacggtgcgaaaatcgtcggcattgccgccgcgatgaccgccgccgtctttttaacgatgtccgctttggcgcgccgaacccggctcgatatgaacgcgctcggacgcttcctgaccgtaggtgcggtcattctgatggtcgccgtggttgccaatctgtttttgggtattcccgcactcgccctgaccatttccgccggttttgtcttgttcagttccttaatgattatgtggcaggtacgcaccgtcatcgacggcggcgaagacagccacatcagcgcggcactgacactgtttatctcgctttacaacatcttcagcagcctgctgaacatcctgttgtctttaaacggcgaggattga

SEQ ID NO: 66878 - DNA, 864 bp, Neisseria meningitidis
atgaaaaccttcttcaaaaccctttccgccgccgcactcgcgctcatcctcgccgcctgcggcggtcaaaaagatagcgcgcccgccgcatccgcttctgccgccgccgacaacggcgcggcgaaaaaagaaatcgtcttcggcacgaccgtcggcgacttcggcgatatggtcaaagaacaaatccaacccgagctggagaaaaaaggctacaccgtcaaactggtcgagtttaccgactatgtgcgcccgaatctggcattggctgagggcgagttggacatcaacgtcttccaacacaaaccctatcttgacgacttcaaaaaagaacacaatctggacatcaccgaagtcttccaagtgccgaccgcgcctttgggactgtacccgggcaagctgaaatcgctggaagaagtcaaagacggcagcaccgtatccgcgcccaacgacccgtccaacttcgcccgcgtcttggtgatgctcgacgaactgggttggatcaaactcaaagacggcatcaatccgctgaccgcatccaaagcggacattgccgaaaacctgaaaaacatcaaaatcgtcgagcttgaagccgcgcaactgccgcgtagccgcgccgacgtggattttgccgtcgtcaacggcaactacgccataagcagcggcatgaagctgaccgaagccctgttccaagaaccgagctttgcctatgtcaactggtctgccgtcaaaaccgccgacaaagacagccaatggcttaaagacgtaaccgaggcctataactccgacgcgttcaaagcctacgcgcacaaacgcttcgagggctacaaatcccctgccgcatggaatgaaggcgcagccaaataa

SEQ ID NO: 66879 - DNA, 1089 bp, Neisseria meningitidis
atgtcccaaactatcgacgaactcctcatcccgcaccgcaacgccatcgacaccattgatgcggaaatcctgcgcctgctcaacgaacgcgcgcaacacgcacacgccatcggcgaactgaaaggcacgggcgcagtgtaccgtcccgaacgcgaagtcgccgtgttgcgccgcattcaggatttgaacaaaggcccgctgcccgacgaatcggtagcacgcctgtttcgggaagtgatgagcgagtgcctcgccgtagaacgcccgctgaccatcgcctatctggggccgcagggcacgtttacccaacaggcggcgattaagcatttcggtcatgccgcgcacaccatggcgtgtccgaccatagacgactgcttcaagcaggttgaaacgcgtcaggcggattatctggtcgcccccgtggaaaattcgaccgaaggctcggtcggtcgcacgttagacctgcttgccgttaccgcgttgcaggcgtgcggcgaaatcgttttgcgcatccaccacaaccttttgcgtaaaaacaacggcagcaccgaaggcattgccaaagtcttttcccacgcgcaggcgttggcgcagtgcaacgactggttgggcagacacctgcccaacgccgaacggattgccgtgtccagcaatgccgaagccgcaaggctggttgccgaatcggacgacggtacggttgccgccatcgccggacgcacggcggcggaaatctacggactcgatatggttgccgagtgcatcgaagacgaaccgaacaacaccacgcgcttcttggtgatgggacatcacgaaaccggtgcaagcggcagcgacaagacttcgctggccgtttccgcgcccaaccgggcaggcgcggttgcctcgctgctgcaaccgctgactgagtcgggtatttccatgaccaagtttgagagccgtccgagtaaatccgttttgtgggaatacctgttcttcatcgacatcgaaggacaccgccgggacgcgcagattcagacggcattggaacgcttgggcgaacgcgcttcgttcgtcaaagtcatcggttcgtacccgaccgccgttttgtag

SEQ ID NO: 66880 - DNA, 822 bp, Neisseria meningitidis
atgacgtttgacgaatggttgggcttgtcaaaactgcctaaaattgaagcaagaatgctgctgcaatatgtttcggaatatacgcgcgtgcagttgttgacgcggggcggggaagaaatgccggacgaagtccgacagcgggcggacaggctggcgcaacgccgtctgaacggcgagccggttgcctatattttaggtgtgcgcgaattttatggcagacgctttacagtcaatccgagcgtgctgattccgcgccccgaaaccgaacacttggtcgaagccgtattggcgcgcctgcccgaaaacgggcgcgtgtgggatttggggacgggcagcggcgcggttgccgtaaccgtcgcgctcgaacgccccgatgcgtttgtgcgcacatccgacatcagcacgcccgcccttgaaacggcgcggaaaaatgcggcagatttgggcgcgcgggtcgaatttgcacacggttcgtggttcgacaccgatatgccgtctgaagggaaatgggacatcatcgtgtccaacccgccctatatcgaaaacggcgataaacatttgtcgcaaggcgatttgcggtttgagccgcaaatcgcgctgaccgacttttcagacggcctaagctgcatccgtaccttggcgcaaggcgcgcccgaccgtttggcggaaggcggttttttattgctggaacacggtttcgatcagggcgcggcggtgcgcggcgtgttggcggagaatggtttttcaggagtggaaaccctgccggatttggcgggtttggacagggttacgctggggaagtatatgaagcatttgaaataa

SEQ ID NO: 66881 - DNA, 711 bp, Neisseria meningitidis
atgctgtttgaaggcttgccgtgtttggcggtttggtgcaaaaaccggctgtctgccgttttgcctgttggaggattgaacgtgtctgaaaatctgcttgaaatcgaaacccatcccttcgattccgtgttgccgccgaaggctgcggtcatgatgatggggacgtttccgcccaaggaagacaaacgcgcgatgcagtttcattatccgaatttccaaaacgatatgtggcgcgtttacgggctggtgtttttcggcgatgcggattatttcaaagtgccgtccaacggggaggctgcgcactctgaaaaagcgtttgacgcggagaaaatcaaaacgtttttgcacgaacgggggattgcgtcctgtccgaccgtgttgaaggcggcaagggaacacggcaatgcgtccgacaagtttttaaaggtagttgaaaccgtcgatttggcggcggtgttggcaaaaatacccgagtgccgccatatttgtacgacaggcggcaaggcgacggaaatcctgctcgatattcagggtggcggcatcaaaatgccgaaaacgggcgaaaccgtgctgtttccgtttgccggacgggatttgacgctgacgcgcctgccttcgacttcgcgcacctatcctttgagtttggcgaaaaaagcggcggcgtatcgggcgtttttcgaaatggcgggcttgtgtgaaaagcagttataa

SEQ ID NO: 66882 - DNA, 3219 bp, Neisseria meningitidis
atgaataacgaaaccaagatttatattaccgccgaaactggcggtgtcgtcagcggcgtagaaaaggcaaaacaatccatcaagtctttgggggatgtggcatcttcccaggggcggcgtatttctgacggattggtacatagtggcgacggcgcagagaaatcatcgacggtagtgtcggcggcatcgaagcggacggaacggtctttggcttctctggagaatgccatccgccgcgatatagccgttaagattgcaggcggtaaggcaaaccgagagtattacgaagagcttgcgcgccagcgcggtatcgatattgcacggcttaatccgctactgtcccaattggacaggcataatacgcagaccaatcgcgctacgcagtctgtcaagcagttcaataacgcattgcggcaaaccccggcacaaattaccgacatcgttacccagcttgcaggcgggcaaagcccgtttctgatcatgattcaacagggtgggcagttgcgtgatatgtatggcggcttcggtggtatgcttaagggactggccacggtcatttcccctatgcgccttgctgtcgcggggttgggcggcggcattgcggcattgggttatgcgatgtatcagggtgcagaggaatcgcgcgaataccgtaaagccttgatacttgccggagatgcagcagggattactgcagacaggatgcaggaaatcgctgtttcggtctgggcagcgacgggcggctatgctgatgcgcgtgctgcaattacggccttggtctcaagcggcaaggttgcagcggataattacgaacagttcgcccggagtattaccctccagtcgcaggcaacggggcaaagtattgacgatttggttgagaaatatactgaaatcgccaaagacccgctgaaagctgtggtatccctatcagccacctaccggacaatgactgccgatgtttaccagcaggtcaaggctttgcaggcacaaggtcgggaacaggacgcggttgcattggtgcagcggaaattctccgaagagtcggaggatatggcaaaacgcgtactgggtaatcttgggttgattgagcgggcgtggaaggatattaaagaaagtgcgtcggaggcatgggatgctgttaaatccataggtagggacaagaccaagctggatgaaattgccgcgctagattcgtttatttcccaaatcgaaaccagcaagaaacatccggttacacaattgttttggggtgaagagggtgagcgtaagctgcaggaagcctatgcgcggcgtgcccggttgcgtgccgaaatcgacaaggaggcagccgctgctgaaactttgcggcagaaacagaagcagaaccaaaatcgaactgaaggtatagccgaattggaggctgtttcggaacgttatgccactcgagagcagcaacggcagcgcgaactgcttaaaaacgacaaagcacggaaaaaggcgttggacggcatcactgacgcgaaaaagcggcaagaaatcattaataagcacgcggcaaatgccaagctgattaatgaaagttttgccgagaaaaaacacgaacgacagaaagaaaaaacggataaaacaagctaccccactgtttcgaacggcttgaggattaaaccgggagccgaagcgggcggcaaagcgctaggcggaacatatgccttcgcgcatgccatgcagcagatgctgggagaccgtctgttccgtttcggcgccttccgagatcgataccacattgggaaaaacagcctgcataacagtggattggcatttgatgccactccttctcccggtatggggatgaagcagaaacaggaagttgtcgcccaaatgacccgttatcttgagtcgttggggtttaaaaacgggcaggattttaaccttaaactggaacttgccggacagcgcaataaaaacggtacggtagcaaccggcgaccactggcatttcaactggcgttctcgagaggcggctgcgcgatttgccggcggtgttgagggccaggtgaaaaatatggcgcacctcgggttgtttaagggagtggagaaagaacctctttccggctacgaaaaatggcacgaggattttaaccgtcgggcggcggaggcgggagcgaagcgggtgctggaaattttaaacggcaaccgcgccatcggcgaacagttgaagttgttgtccgacccgactttcggcgattggacgctgaagcagcaggccgatgcccgcgagctggcggagaaggccgatgcgcaggatagtttgacggccgcctccaaaaaatattccgacatagtgaagcaaatgaccgacgattcgaaagaaaagttggatgacaggctgtttgaaatttcgcttatcggcaaaacccgtgaagaaatcgagaaactgacgctggcgagactgtgggacagacagatagcgaaagcccgtgaagaaggtgcgccgttggaaagtatcgatttattggagcgcggcaaggcggaagggatgagcaatctttctcaaatgcagaaggcgcgtgcagacagcgacaatgattggcgcggcggtatcgagtccggcttgaaaagctacatcgattcattcggaacgatgaggcaggcgatggaaaatgccaccgtacaaaccttcgacaaaatgggggatgcgctggcagactttgttgccacaggcaaacttgattttcgaagcctgactgtttccattttgcaggatttgtcaaaaatgctgattaaaatggcgattgtcaatgcaatgaagtcggcgttgggttatgccgacggcggtattgtcggtggaggaagtacgcagttcgacgcgttgttttccggcggcggctataccggctacggcgggaagtatgagcctgccggcattgttcacaagggcgaagtcgtattttcccagcgggacgtacgtaatcacggcggcgttgcggctgtcgagcggctgcggttgaatggttatgccggtggcggcgcagtaggactgccgtccgttttgaccggagtccgttcggccggggctggaagcatgcaggtcaacatcactataaatcgggacggtagcaccgaatcggacagcagtgccgatacggagatggcgaagcatcttgccgctgccataccgggcatggtggaacagtggtatgtcaagaatgtgtaccgtgaaaacggtacttaccataaatag

SEQ ID NO: 66883 - DNA, 1149 bp, Neisseria meningitidis
atgaatactcctccttttgtctgttggattttttgcaaggtcatcgacaatttcggcgacatcggcgtttccctgcggcttgcccgtgttttgcaccgtgaactcggttggcaggtgcatttgtggacggacgatgtatccgccttacgcgcgctttgccccgattttcccgatgttccctgcgttcatcaggatattcatgtccgcacttggcattccgatgcggcggacattgataccgcgcctgttcccgatgtcgtcatcgaaacttttgcctgcgacctgcccgaaaatgtgctgcacatcatccgccgacacaagccgttttggctgaattgggaatatttgagcgcggaggaaagcaatgaaaggctgcacctgatgccttcgccgcaggagggtgttcaaaaatatttttggtttatgggtttcagcgaaaaaagcggcgggctgatacgcgaacgcgattaccgtgatgccgtccgtttcgataccggagccctgcgtcggcggctgatgctgccggagaaaaacgcccccgaatggctgcttttcggctactggagcgatgtttgggcgaagtggctggacatgtggcaacaggcaggcagtccgttgaccctgttgctggcggggacgcaaattatcgacagcctcaaacaaagcggcatcattccgcaaaacgccctgcaaaacgacggtgatgtctttcagacggcatccgtctgccttgtcaaaatccctttcgtgtcacaacaggacttcgacaaattgctgcacctcgccgactgcgccgtgatacgcggcgaagacagtttcgtccgcgcccagcttgcgggcaaacccttcttttggcacatctatccgcaagacgagaatgtccatctcgacaaactccacgccttttgggataaggcacacggtttctacacgcccgaaaccgcccgggcgcaccgccgcctttcagacgacctcaacggcggagaggctttatccgccacgcaacgcctcgaatgttggcaaatcctgcaacaacatcaaaacggctggcggcaaggcgcagaggagtggagccgttatctttttgggcagccttccgcatccgaaaaactcgccgcctttgtttcaaagcatcaaaaaatacgctag

SEQ ID NO: 66884 - DNA, 1803 bp, Neisseria meningitidis
atgaaacggcagtcggacgagctggcggagaagatgccgaaaaccctgccccaagtcagaccggggacggcgatgtcggctcaagcactggctgaagcggccaagctgttgaacgagaaacagcggtcggtggcggatgcgcgatgtgcggtggtggcggcggtgttggggattaaataccaatacgattgctctgccaaggctgcggtggctcagtttttgggcttgctggcagaaggtaaattggacgcggtcacgcttgggaacttggaaaaggccaatgaccgcagccggtcggcgaaggttggcgaacgtactttagacggctggatttctgcttatttgaaagcggaaaacgcgacggagcggttggttgctttggctccgaagacgacgaaggcggtcaagccgattgaaagttacggatggttgccgatgtttatgcagtttcacaatattccgtccgcgccaaagctggcgcacagctaccgccggtttgtgcagtgggcggaagcggaaaatatgccggtcaatgatgtgcctaacttgagtatggtgcggtgcgtttgggacaagctgccgctgattatgcaggagcgcggcaggaaaacgggggcggcttataaatcgctgctgccttatgtgaaacgtgattggggggctttgaagccgaacgatgtttggatcggcgacggccacagctttaaggcgaaggtggctcatccggtacacggcaggccgtttaagccggaagtgacggtgattattgatggttgtacgcggtttgtggtgggtttttcggtgtcgttggctgaaagttgtgtggcggtatcggacactctgcgtatcggggtcaagcactttggtttgccgattatctactactcggataacggtggcggccaaaccggcaagacgatagaccatgaaatcacgggtattacgtcccgattgggtatccggcatgaaacgggtatcgcgggcaacccgcaaggccgaggcatcatcgagcgatggtggaaagacaatctgattgagatggcgcgccagtatgagacgtttgcgggcgcggggatggacagcagtaccaagaacctgatgtaccgcaagatggaaagtgcgtttaacgctttggaaaaaggcaaggatttgacggaggaacaacagaaatatttgaaaaaactgccgggctggtcgcgttttatcgcggatgtggtcaagtgtatcgacgaatacaacaaccgcccgcacggcgagctgccccgacatccggacggcgggcattattcgccgaaagcttatcgggaaatgaggctggaacaggacgggattgcgccggatatgttgtcggcggaagagctggcgacgatgtttatgccgcaggaagtgcgaaaggtacagcgcggttggctggatttgttcaacaactcttatttctcaaccgagctggcggagtatcacaaggacgaggtacgggtcagctacgatttggacgatgcttcggcggtcaatgtgtttgatatggacggcaagtttatcactaaggctcaggccgacggcaatacccgcgaggctttcccgacggctcgtatcgaccaactggcggaaaaacgccgaaaaggcaaaatcaagcgggcggaaaatgcaatcaagcttgcaaacgcggaagtcaatccggcactggaacaggctgcggtttgggacgagctgggacatttgggcggaaacgtcatcgaggcggagtatgcggtattgccgagaacgggcacggacgattttgtgctatttgaggcggatagataa

SEQ ID NO: 66885 - DNA, 1080 bp, Neisseria meningitidis
atgaaaatactgaccgtacacaccccgtcccacagctaccccatctttatcggcaacggactgctgccgcaggcaggaagcctgctcaaaccgcatttgggcaaacgcgccgccatcatcgccaacgaaaccgtcgccccgctctacctcggcacgcttcagacggcattggatgcggcaggcgtatcccatttcagcatcatcctgcccgacggcgaggcgcacaaaaactggcagacgctcaacctcatctttgacgggctgatgcaaaaccgcgccgaacgcaaaaccacattaatcgcactgggcggcggcgtgatcggcgacatggtcggctttgccgctgccacctaccagcgcggcgcaccgttcgttcaaataccgaccacactgttgagtcaggtcgactcatcggtgggcggcaaaaccgccatcaaccacccgctcggcaaaaatatgatcggcgcgttttaccagccgcaggcggtgcttgccgacttggacacgctgcacaccctgcccgcccgcgaattgtccgccggtatggcggaagtcatcaaatacggcgcgctcggcgacatcggcttttttgaatggctggaacagcatatgcccgaactgatgacgctcgatcgggaaaaactcgcccaagccgtgtaccgctgctgccaaatgaaggcaggcatcgtcgcccaagacgaaaccgaacagggcatacgcgcatggctcaacctcggacacaccttcggacacgccgtcgaagcggaaatgggttacggcgtatggctgcacggcgaggccgtcgccgccggctgcgtgttggcggcgcgtttgtccgaacaactgggcaaaatctccgccgcagataccgcgcggctcgccgccctgctcgaagccgccggactgccgtccgcgccacccgtgtttgcctttgaaaaatggctggaacacatgagccacgataaaaaagtcagcggcggcatcatgcgctttatcggtctgaaccggctgggcgaagccaacatcaccgaaattaccgacacggacatcctccgccgcaccctgcaaccgtatctctga

SEQ ID NO: 66886 - DNA, 369 bp, Neisseria meningitidis; identical to SEQ ID NO: 39308

SEQ ID NO: 66887 - DNA, 426 bp, Neisseria meningitidis
ttgttaatccactatactttatgccgttaccgcaactggctggctcaagacaataccctgtccgaattgctcaaactgattaaccgccaactgaccgaaaaaggcctaaaagtagagaaagcatccgccgccgtcattgacgccaccattattcagaccgctggcagcaaacagcgtcaggccatagaagttgacgaagaaggacaaatcagcggccaaaccacaccgagtaaggacagcgatgcccgttggataaagaaaaacggcctctacaaactcggttacaaacaacatacccgtaccgatgcggaaggctatatcgagaaactgcacatcacccccgccaatgcccatgagtgcaaacacctgtcgcctttgttggaaggactgcccaaaggtacgaccgtctatgccgacaaaggctga

SEQ ID NO: 66888 - DNA, 288 bp, Neisseria meningitidis
atggatgatttgattgcagcttttttaggctgtttatcaggtaaatatagcgaagggaaaataagcagattagaaatatctctaacggcaggaagcattttctttgcagtattctttattcatgaactgataatttttattgttgatggaaataaggaaaatctttggaattttattactgggataatgaaagatttatttttattttcatgttctgtttgtttattattctacttcttattatttattgcggaaactattaggaaaacaatcaataaaattaaataa

SEQ ID NO: 66889 - DNA, 924 bp, Neisseria meningitidis
atggaaaaccaaaggccgctcctaggcttcgcgttggcacttttggcggcgatgacgtggggaacgctgccgattgccgtgcggcaggtattgaagtttgtcgatgcgccgacgctggtgtgggtgcgttttaccgtggcggcggcggtattgtttgttttgctggcactgggcgggcggctgccgaagcggcgggatttttcttggtgctcattcaggctgctgctgctcggcgtggcgggcatttcggcaaactttgtgctgattgcccaagggctgcattatatttcgccgaccacgacgcaggttttgtggcagatttcgccgtttacgatgattgttgtcggcgtgttggtgtttaaagaccggatgactgccgctcagaaaatcgacttggttttgctgcttgccggtttgcttatgttttttaacgataaattcggcgagttgtcgggtttgggcgcgtatgcgaagggcgtgttgctgtgtgcggcaggcagtatggcatgggtgtgttatgccgtggcgcaaaagctgctgtcggcgcaattcgggccgcaacagattctgctgttgatttatgcggcaagtgccgccgtgttcctgccgtttgccgaaccggcacacatcggaagtttggacggtacgttggcgtgggtttgttttgcgtattgctgcttgaatacgttaatcggttacggctcgttcggcgaggcgttgaaacattgggaggcttccaaagtcagcgcggtaacaaccttgctccccgtgtttaccgtaatattttctttgctcgggcattatgtgatgcctgatacttttgccgcgccggatatgaacggtttgggttatgccggcgcactggtcgtggtcgggggtgcggttacagcggcggtgggggacaggctgttcaaacgccgctag

SEQ ID NO: 66890 - DNA, 309 bp, Neisseria meningitidis
atgtggaaaatgttgaaacacatagcccaaacccaccgcaagcgactgattggcacattttccctggtcggactggaaaaccttttgatgctggtgtatccggtgtttggcggccgggcgattaatgccgtaattgcggggaaggtgtggcaggcgttgctgtacgctttggttgtgctgttaatgtggctggtcggtgcggcgcggcggattgccgatacgcgcacgtttacgcggatttataccgaaatcgccgtgccagttgtgttggaacagcggcagcggcaagtcccgcattcagcaatatag

SEQ ID NO: 66891 - DNA, 792 bp, Neisseria meningitidis
atggcaagacatccctaccgccgcctgcgtcctgcaaaatccagctttcccgaagtcggcatttccgaagaaggcaatatccgttcgcttcacttgggcagcgacaccatccaaagctcaatgaacctcgaccacccgtccgagctggtactctcttacagccgtgccatgatgggatggctgctgtttgcggaacgcctgccgcaacatatcacccaaatcggcttgggcggcggttcgtttgcacgctggatagacacctacctgcctgacacgcgccaaaccgccgtggacatcaacccgcaggttatcgccattgcccgcaacctgtttgagttgcctttcgagggcgagaaatttgaaattattgaagcagatggtgcagagtacatcaaagtcttccgccacaacaccgatgtgattttggtggacgggttcgacggcgaacaaatcatcgatgcactggttgaagaaccgtttttccgagactgccgaaacgcactctcttcagacggcatattcgttaccaactggtggagtggcgacaaacgctatcaacgcttcatcgaacggttgttgagcgtttttgaagggcgcgtattggaacttcctgccgaaagccacggcaatgtcgcggtaatggccttccaaagcagccccaaagagcaaaacatagacaaactcaaaaaacgtgccgacaaactgagcaacgcatacggattggacttccaccgcatgctcgccgacctgaaagcatccaaccccaacaacggcaagcatttctacctttaa

SEQ ID NO: 66892 - DNA, 723 bp, Neisseria meningitidis
atgattactgtttgtctgtacggcggccttcgcgaatacggccgccgttttgttttgcacgtcgagacgccagccgaagccctgcacgctctgtttacccaaatcaaaggcttgcgtcagcggattcgggacggggtgtatcaggttcggtttgacggtaaagaccagtcggaagaaacgataggtagcgttttcagacgacctgctgacggtgtattgcacattgttccgcgcgtacagggcgcaggtaaaaatggcgggttgatccaaaccattgtcggagtggttttgattgtagtcggcgcgtatacgagttgggccggtggtgcgcagcttatcgccgtcggtatcggtatggtggctggcggtgtcgcccaaatgttgaccaagcagcccaaattgaataccggcggcaagggggtggaggagagtaagaattctgctttttccaaccttgccaatacagcggcacaggggcgtcctgtgccgttggcttacgggctttgctactgcggcagccgtgttatatcgcaaggtgtgcagtcccgccgtattgaaccttcatcgacggcggcttcatcaggtgcggtgttgaatttgagtttgtccaagacattcgttcaaggcgtagcagcaacagcgccgaacgggcagaaataccgtaccgacttttcagacgacagcgtgcgggcgcgcaattataaggcggcgttttcgggctga

SEQ ID NO: 66893 - DNA, 273 bp, Neisseria meningitidis; identical to SEQ ID NO: 44503

SEQ ID NO: 66894 - DNA, 726 bp, Neisseria meningitidis
atggaaacacaaaacaaacctaccgttaccgacattgaccgccctatactcgtcccgcccggtggacataaaaaagtcttgctgcattcctgctgcgccccgtgcagcggcgaagtgatggaagccatgctggccagcggcatcgactacaccatttatttttacaatcccaatatccatccgcacaaagagtatatgctccgaaaagaggaaaacgtgcgctttgcggaaaagttcggcattcctttcatcgataaagacgacgactacgaaaacgaccgcaaagaatggtttgccaaagccaaaggcatggagtttgagccggaacgcggcatccgctgcaccatgtgtttcgatatgcgttttgaaaaggcggcgcaatacgcgcatgaacacgggttccccgtctttaccagttcgctgggcatttcacgctggaaaaatatggcgcaaatcaacgactgcggacaccgcgccgccgcgccttacgatgatgtggtgtattgggatttcaactggcgcaaaggcggcggcagcgcgcgcatgattgaaatcagcaaacgtgaaaacttctaccagcaggaatattgcggttgtgcctattccctgagggattccaatgcccaccgcaaatcacagggcagaatccccatcaaactcagcgtgctgtattacggcgacgaatcgacacaatacgaacctgcacccatccgggtggacaaataa

SEQ ID NO: 66895 - DNA, 1209 bp, Neisseria meningitidis
atgagtgaagcagaatatttttcccatttcatatctaacggcaatgggaagttattagaaattccgcaacgtaggggcaggcaggacggcgtttttatagattggttgtcattcacactgcacgaagattccttgctgaaagtttccggatgccccttagtttccgatgccgaatatatgtttgttttaagcaaaaaattggaggaaatattagggtttggcatcacgagcagatgcaaatcgaagggcaataaattttacgattcgatgtttaggttgggattggaagaagttgactacggcgaagtccattacggaggtcagcgaaatacggttttaatcgaattgaaaggtgtaggttgcaacattgcaaatccaggttgggaattgaggcttaagcagtttttggaagattcattgaggccgaggataacgcgggtagatttggcacttgatttttttgatggggagtacacgccggaacaggcacttttggatcacgataacggttttttcgataacagtaacatgaggccgaaatctgaaatggttggaacggcttggcggagagaggacgggagcggcaagacattttatgtaggtcgcaagaaaaattctcgttttgtgcgtgtttatgagaaaggcaggcagctaggcgataaagaaagcaagtgggtaaggttcgaaattcagtttaatcatggagatatggaaatacctttggatattctgataaatcaaggttcttacttttcaggcgctttcccgatttgtcagaaatttaaaaatatgccgaatccggaaaggttcgattaccgtaaaaaagtggctaatttaacttttcagcataaattgagatacgcaaaaaacgcggtcggcaaactgattaatttcatgtttgatatgggttttgatagtgatgaaattgtcagatatctgaaggcagatttggggtatcccaaagggctagaacctgaaaaatattcgttggccggattgaaggaatctttgaaattcggctttatccacgaacaaccggatgtagatttagaggttgaattggaagaactcggaattatcaaatttaagcaatcagataaattcgatccggataaaaggcttttcgatccacatcacgatgtagaaagtgagaggcaatatcagctttatctcgacagaatgtatgatcttcatgcaaatcaaaattaa

SEQ ID NO: 66896 - DNA, 726 bp, Neisseria meningitidis
atgcgtattccgctgcttgcccctgacaattatgcctttcccgatcctgcctatgctttggcccggtgcgacgggctggtcggcgtgagcagggatttggacgcggggcggctgcttgaggcgtatcggaacggcgtgtttccgtggttttctcgggacggttggtttttttggtatgcggtcggcccgcgtgcggtgattgttcccgaacgtctgcacgttccgcgctcgctggcgaaaacgctgcgcaacggcagctatcgggttgcggtcaacggctgttttgcggaagtggtcgcgcattgtgcggcagcggcgcgcccgaatcaggacggaacttggattgcgcccgagtttcagacggcatatttgaagctgcacgaaatgggacacgcgcattctttcgagtgccattatcccgatgaaagcggtgaaacgaggttggcgggcggcttttacggcgtgcaaatcggcagggtgttttacggcgaatcgatgttcgcattacaaccggatgcgtcgaaaatcgcgtttgcctgcgccgtgccgtttttggcggatttgggtgtggaactgatagactgccagcaggatacggaacatatgcgccgtttcggttcggagttgctgccgtttgcggattttgccgaacgtctgcggatgttgaacgccgtgccgttgaaagaggaaatcgggcggcgcgaagtggcgtgcagggggctttga

SEQ ID NO: 66897 - DNA, 798 bp, Neisseria meningitidis
atggataccgcacaaaaacaacgctgggcaataaccctatcctatgacggcagccgcttttacggctggcagaaacaggctgacggcgtaccgaccgttcaggcggcattggaaaccgcgctcgcccaaatagcaggggaagcggtttccaccaccgttgccggcaggaccgataccggcgtgcatgccaccgcccaagtcgtccactttgacacaactgccgtccgtccccaacaggcatgggtgcgcggcgtaaatgcccacctgcccgaaggcattgctgttttgcacgcccgacaggtcgcccccgaatttcacgcccgcttcgacgcatacggacggcattaccgctacctgctcgaatccgcccccgtccgttcccccttgctcaaaaacagggcaggctggacacacctcaaactcgacatcgggcagatgcggcaggctgccgccttattgatcggcgaacaagacttctccagcttccgcgccgccgaatgccaggcaaaatcccccgtcaaaaccatctaccgcgccgaccttacccaaagctcaggactcgtccgcctcgatttgcacggcaacgcctttttgcaccatatggtacgcaacatcatgggcgcgctcgtctatgtcggcagcggcagactcagcgtcgaaggcttcgccgcactgattcaagaacgcagccgcctcaaagccccgccgaccttcatgcccgacggactttacctgaccggcgtcgactatcccgaggcatacggcatcatccgcccccaaatccccgaatggctttaa

SEQ ID NO: 66898 - DNA, 312 bp, Neisseria meningitidis
atggcaaaactcactttgaagcctgatgcaactttccgacataccgtgaaaatccctgttcccggtgcagaacctgcggacgtcgaatttgaatttaaggcgcgcggccgcaaggcgatgaaagaatttaccgaaaagcataaagacggctggacggcagataccgtcttggattgtgttcaaggctgggatttggaagaaacattcaaccggcagaatgtcgaaatcctgctggatagctatccgatggcggtgtttgccgtcgtcaacggctatgttgaggaagtcttcaatgcccgcgagggaaactga

SEQ ID NO: 66899 - DNA, 957 bp, Neisseria meningitidis
atgattttgataccgccggatacgccctttttcctccgcaacggcaatgccgacacgattgccgccaaattcctgcaacgccccgcacccacataccgccgcgagctgcttcccgacagcacgggtaaaaccaaagtcgcctacgacttttcagacggcatttcgcccgatgcgccactggtcgtactgtttcacggtttggaaggaagcagccgcagccattacgcggtcgaactgatgcttgcggtacgcgatcggggttggcacggcgtagtcgtccatttccgcagctgcggcggcgtagcgaacaccgccccggtgttctaccacttgggagataccgccgaaatcgcctttactttggacacgcttgccgcgcgttaccgtgaaatatacgccgtcggcgtatcgctgggcggcaacgcgctggcaaaatatttgggcgaacagggcaaaaaggcattgccgcaagccgctgccgtcatctccgcccccgtcgatgcagaggcggcaggcagccgcttcgacagcggcatcacgcggctgctctacacgcgctacttcctccgcacactgatacccaaagcacggtcgctccacggttttcagacggcatttgccgcagggtgcaaaacactgggcgagtttgacgaccgtttcaccgcaccgctgcacggctttgccgatcggcacgactactaccgccaaacttcctgcaaaccgctgctcaaacacgttgccaaaccgctgctcctgctcaatgccgtcaacgaccccttcctgccgcccgaagcgctgccgacaccggacgaagtgtccgaagccgttaccctgttccaaccggcacacggcggacacgccggctttgtcggcagcaccggcggcaggctgcacctgcaatggctgccgcagaccgtcctgtcctatttcgacagcttccgcacaaacaggcgttaa

SEQ ID NO: 66900 - DNA, 450 bp, Neisseria meningitidis
atggacgttcaactccccatcgaagccaaagacatccaaaaactcatcccccaccgctatccgtttctccagctcgaccgcatcaccgccttcgagccgatgaaaaccctgaccgccatcaaaaacgtcagcataaacgaaccccagttccaaggccatttccccgacctgcccgtgatgcccggcgtactcatcatcgaagcgatggcgcaagcctgcggcacactcgccatcctcagcgaaggcgggcgcaaagaaaacgaattcttcttcttcgccggcatagacgaagcccgtttcaaacgccaagtcatccccggcgaccaactcgtctttgaagtcgagctgctgaccagccggcgcggcatcggcaaattcaacgccgttgccaaagtggacgggcaagtcgccgtcgaagccatcatcatgtgtgccaaacgcgtggtttga

SEQ ID NO: 66901 - DNA, 291 bp, Neisseria meningitidis; identical to SEQ ID NO: 55020

SEQ ID NO: 66902 - DNA, 234 bp, Neisseria meningitidis
atggaagccaccgtctatctcgaagacaacgaatacatcgccttgtgcgacctcttgaaattggtcggacttgccgaaagcggcggacaggcgaaagcgtttattgccgaagggctggtgttgcgcaacggcgaaaccgaaacccgtaaaaccgccaaaatacgcggcggcgaagtcatcgagtttgacggcgcacgcttggaaattgccgatggatacgaccctgaagcataa

SEQ ID NO: 66903 - DNA, 225 bp, Neisseria meningitidis
atggaaacttgggttcaaaactacacggcaatcggcggcagcctgtatctgactgccgccgcactcttacccatcgtctttttctttgccgcgctgaccgtcctgaagctgaaaggctatcaggcggggctttatacgctgctgattgcgcttgccgttgccgtattcggcttcgggatgccggcgagtatggcggtttcttccctgccgccgcagccgcactga

SEQ ID NO: 66904 - DNA, 2433 bp, Neisseria meningitidis
ttggacggtgacggtatagaaactgtcgctgccaaaggctttgtaggtgcattgttcgaccaccgcaatcaaggcatccgcaccgccaccggttgggtttctgccgatgacggtttactcgtccgcgatttgaacggcaacggcatcatcgacaacggtgcggaactcttcggcgacaataccaaactggcagacggttcttttgccaaacacggctacgcggctttggccgaattggattcaaacggcgacaacatcatcaacgcggcagacgccgcattccaaaccctgcgtgtatggcaggatctcaatcaggacggcatttcccaagctaatgaattgcgtacccttgaagaattgggtattcaatctttggatctcgcctataaagatgtaaataaaaatctcggtaacggtaacactttggctcagcaaggcagctataccaaaacagacggtacaaccgcaaaaatgggggatttacttttagcagccgacaatctgcacagccgcttcaaagacaaagtggaactcactgccgaacaggcaaaagccgccaatcttgcgggcattggtcgtctgcgcgatttgcgcgaagctgccgcattgtccggcgatttggccaatatgctgaaagcttattctgccgccgaaactaaagaagcacagttggcattgttagataatttgattcacaaatgggcggaaaccgattcgaactggggcaaaaaatcgccaatgcgactttcaaccgattggacgcaaacggctaatgaaggtattgcactgacaccatcccaagtagcacaactaaaaaagaacgctttagtttccctttctgataaagctaaagcagctattgacgccgcccgcgaccgcattgccgtgcttgatgcctacacggggcaggattccagcacgctttattacatgagcgaagaagacgcgcttaatatcgtcaaagtaaccaacgatacatacgaccatctcgccaaaaacatctaccaaaacctgttgttccaaacccgtttgcagccatatttgaatcaaatcagtttcaaaatggaaaatgatacgttcactttggattttagtggtcttgttcaagcatttaaccatgtcaaagaaactaatccgcaaaaagcttttgtggatttggccgagatgcttgcatatggcgaacttcgttcttggtatgaaggccgaagactaatggccgattatgtggaggaggcaaaaaaagcaggtaaatttgaagattaccagaaagtgttgggtcaggagaccgttgcattattagctaaaacatcgggtacgcaagcagatgatatcctgcaaaatgtaggctttggtcataataaaaatgtttctttatatggtaatgacggcaacgacactctgatcggcggtgccggtaatgattacttggagggcggcagcggttcggatacttatgtcttcggcgaaggcttcggtcaggatacggtctataattacgactacgctaccggacgcaaagacatcatccgctttaccgacggtattacagccgatatgctgacttttacccgagagggcaaccatcttcttatcaaggcaaaagacggcagtggacaagtgactgttcagtcctatttccagaacgatggctcaggtgcttaccgtatcgacgagattcatttcgataacggcaaagtactggatgtcgccactgtcaaaaaactggtacagcaatccaccgacggttcggacagattgtatgcctaccaatccggaaataccttaaatggcggattgggcgatgactatctgtacggtgccgacgggaatgacctgctgaatggtgatgcaggcaacgacagtatctacagtggcaatggcaatgatacgctcaatggaggagaaggcaacgacgccctgtacggctataatggtaacgatgtactgaatggtggcgaaggcaatgatcatttgaacggcgaagacggtaacgacactctgatcggcggtgcaggcaatgattacttggagggcggcagcggttcggatacttatgtcttcggcgaaggcttcggtcaggatacggtctataattaccatgtggataaaaactctgacactatgcactttaaaggatttaaagcagcagatgttcattttatccgttccggaagtgatttggtgcttagcgcttctgaacaagacaacgtacgtatttccggatttttctatggtgaaaaccatcgtgtagatacatttgtctttgatgatgcagctatcagtaatccagattttgccaagtatattaatgctggcaataatttggtacagtctatgtctgtgttcggttctaatactgctgcgacaggaggaaatgtggatgccaatatacaatccgtacagcagccgttattggtaacgccatctgcataa

SEQ ID NO: 66905 - DNA, 456 bp, Neisseria meningitidis; identical to SEQ ID NO: 38016

SEQ ID NO: 66906 - DNA, 270 bp, Neisseria meningitidis
atgactgaaacattccgatggcgtgttgcttcggacaataaggctgtacataaattcgatgtccgttccgtccgctttggcgacggctacgagcaacggcagcctaaatctttgaaaccgaagctgcgaagctgggagatcaagatagtcggacaaaaggctttgatgggagaaatcaaagccttttttgatgcccggcgcggtgttgagccgtttaattggagaccgcccgacggcgtgcctgtattggtcaaggtatcggaatattag

SEQ ID NO: 66907 - DNA, 1200 bp, Neisseria meningitidis
atgtccgaccaactcatcctcgttctgaactgcggcagttcatcgctcaaaggcgccgttatcgaccgcaaaagcggcagcatcgtcctaagctgcctcggcgaacgcctgaccacgcccgaagccgtcattacgttcagcaaagacggcaacaaacgccaagttcccctgagcggccgaaattgccacgccggcgcggtgggtatgcttttgaacgaactggaaaaacacggtctgcacgaccgcatcaaagccatcggccaccgcatcgcccacggcggcgaaaaatacagcgagtctgttttgatcgaccaggccgtaatggacgaactcaatgcctgcattccgcttgcgccgctgcacaaccccgccaacatcagcggcatcctcgccgcgcaggaacatttccccggtctgcccaatgtcggcgtgatggatacttcgttccaccaaaccatgccggagcgtgcctacacttatgccgtgccgcgcgagttgcgtaaaaaatacgctttccgccgctacggtttccacggcaccagtatgcgttacgttgcccctgaagccgcacgcatcttgggcaaacctctggaagacatccgcatgattattgcccacttaggcaacggcgcatccattaccgccatcaaaaacggcaaatccgtcgataccagtatgggtttcacgccgatcgaaggtttggtaatgggtacacgctgcggcgacatcgacccgggcgtatacagctatctgacttcccacgccggtttggatgttgcccaagtggatgaaatgctgaacaaaaaatcaggtttgctcggtatttccgaactttccaacgactgccgcaccctcgaaatcgccgccgacgaaggccacgaaggcgcgcgcctcgccctcgaagtcatgacctaccgcctcgccaaatacatcgcttcgatggctgtggcctgcggtggcgttgacgcactcgtgttcaccggcggtatcggcgaaaactcgcgtaatatccgtgccaaaaccgtttcctatcttgatttcttgggtctgcacatcgacaccaaagccaatatggaaaaacgctacggcaattcgggtattatcagcccgaccgattcttctccggctgttttggttgtcccgaccaatgaagaactgatgattgcctgcgacactgccgaacttgccggcatcttgtag

SEQ ID NO: 66908 - DNA, 669 bp, Neisseria meningitidis; identical to SEQ ID NO: 50129

SEQ ID NO: 66909 - DNA, 819 bp, Neisseria meningitidis; identical to SEQ ID NO: 55934

SEQ ID NO: 66910 - DNA, 159 bp, Neisseria meningitidis; identical to SEQ ID NO: 43881

SEQ ID NO: 66911 - DNA, 1428 bp, Neisseria meningitidis
atgaacgagaactttaccgaatggctgcacggctgggtcggcgccatcaacgatccgatgtggtcatacttggtttatatgcttttgggtacggggcttttcttcaccgtaaccacgggctttgtccaattccgcctgttcgggcgcagcatcaaagaaatgctcggcggccgcaaacagggggacgaccctcacggcatcacgccgtttcaggcatttgtaaccggccttgccagccgcgtgggtgtgggcaacatcgcgggcgtggcaatcgccatcaaagtcggcgggccgggcgcggtgttttggatgtgggtaaccgccttaatcggtatgagttcggcgtttgtcgaatcttcgctggcgcagctctttaaagtccgcgactacgacaaccaccatttccggggcggccctgcctactacatcacgcaagggctggggcagaaatggctgggcgtgttgttcgccctgagcctgattttctgtttcggctttgtgtttgaagcggttcagaccaataccatcgccgataccgtcaaagcggcatggggttgggagcctcattatgtcggcgtcgccctggtgattttaaccgcgccgattatcttcggcggcatcaggcgcatatctaaagcggcggaaatcgtcgtccccctgatggcggttttgtacctctttatcgcgcttttcatcattttgaccaatattccgatgattccggacgtgttcggtcagattttttcgggcgcgttcaaattcgacgcggcagcaggcggcttactcggcggtctgatttcgcaaacgatgatgatgggcatcaaacgcggcctgtattccaacgaggcgggtatgggttccgcgccgaacgccgccgccgccgccgaagtgaaacaccctgtttcgcaaggtatgattcaaatgctgggcgtgtttgtcgataccatcatcgtttgttcttgcaccgccttcatcatcttgatttaccaacagccttacggcgatttgagcggtgcggcgttgacgcaggcggcgattgtcagccaagtggggcaatggggcgcgggcttcctcgccgtcatcctgtttatgtttgccttttccaccgttatcggcaactatgcctatgccgagtccaacgtccaattcatcaaaagccattggctgattaccgccgttttccgtatgctggttttggcgtgggtctatttcggcgcggttgccaatgtgcctttggtctgggatatggcggatatggcgatgggcattatggcgtggatcaaccttgtcgccatcctgctgctctcgcccttggcgtttatgctgctgcgcgattacaccgccaagctgaaaatgggcaaagaccccgagttcaaactttccgaacatccgggcctgaaacgccgtatcaaatccgacgtttggtaa

SEQ ID NO: 66912 - DNA, 765 bp, Neisseria meningitidis
atgattgccaaacacatcgaccgtttcccactattgaagttggaccaggtgattgattggcaaccgatcgaacaatacctgaaccgtcaaagaacccgttacctccgagaccaccgcggccgtcccgcctacccgctgttgtccatgttcaaagccgtcctgctcggacaatggcacagcctctccgatcccgaactcgaacacagcctcatcacccgcatcgatttcaacctgttttgccgttttgacgagttgagcatccccgattacagcaccttatgccgctaccgcaaccggctggcgcaagacaacaccctgtccgaattgctggaactgattaaccgccaactgaccgaaaaaaacctaaaaatagagaaagcatccgccgccgtcgttgatgccaccattatccagaccgccggcagcaaacagcgtcaggccatagaagttgacgaagaaggacaaatcagcggtcaaaccacaccgagtaaggacagcgatgcccgttggataaagaaaaacggcctctacaaactcggttacaaacaacatacccgtaccgatgcagaaggctatatcgagaaactgcacattacccccgccaatgcccatgagtgcaaacacctgtcgccgttgttggaagggttacccgaaggtacgaccgtctatgccgacaaaggctacgacagtgcggaaaaccggcaacatctggaagaacatcagttgttagacggcattatgcgcgggcagcctatttcggactga

SEQ ID NO: 66913 - DNA, 495 bp, Neisseria meningitidis
atgaacaacagacattttgccgtcatcgccctgggcagtaatcttgaaaaccctgcccaacaggtacgcgccgcattggacacgctgtcgtcccatcccgatattcggcttcatcaaacctcgtccctgtatgccaccgcccctgtcggctatgacgaccagcccgactttgtcaatgccgtctgcaccgtttccaccgatatggacggcatctcgctgctctccttgctcaaccgtatcgaggcggatttcgggcgcaaacgcagtttccgaaacgcgccgcgcacattggatttggacattatcgactttgacggcatctccagcgacgacccccgcctcaccctgccgcatccgcgcgcacacgaacgcagtttcgtcatacgccctttggcagaaatcctccctgattttgttttaggcaaacacggaaaagttgccgaattgtcaaaacaactgggcaatcaaggtatccgtcttttaccggacaggtaa

SEQ ID NO: 66914 - DNA, 537 bp, Neisseria meningitidis
atgacgggatttaatgatgccgccggcgtggcatccgcctccgacatcaaaggcaaatatgttgagaaagttgaagtcaaaaacggcgtcgttaccgccgaaatgaaatcaagcggcgtaaacaaagaaatccaaggcaaaaaactctccctgtgggccaagcgtcaagccggttcggtaaaatggttctgcggacagccggttacgcgcgccgacaccgccaccaacaccgccaccaacaccaccaccaacaccgccaccaacaccaccaccaacaccgccaccaacaccgccaccaacaccgccgttaccgccgccagcgacaccaacaagaaaatcaacaccaagcacctgccgtcaacctgccgcgacgcttcatctgccgtttgcatagaaacaccacgcgccgacttcaaacacttccaaaaaatcagccgttaccgagtattgcccgaatcacggcacatggccgaaaaacttcgtcattcccgcgcaggcgggaatctaggtctgtcggcacggaaacttatcgggtaa

SEQ ID NO: 66915 - DNA, 1302 bp, Neisseria meningitidis
atgaccgaatccgtccgcctccccgtcgcccgcctcaaaccttccaccgtcgccctgcccggctccaaaagcatcagcaaccgcaccctgctgctcgccgccttgtccgacaatgcttgcgaaatccattccctgctcaaatccgacgatactgaccgtatgctcgaagcactcgataaactcggcgttgaaatcgaatatcttgccgaagaccgtctgaaagtgcacggcacaggcggacgcttccccaaccgcactgccgatttgtttttaggcaacgcgggaacggcgttccgtccgctgactgccgcgcttgccgttttgggcggcgattatcatctgcacggcgtgcctcgtatgcacgaacgtcctatcggcgatttggtcgatgcgctgcggattgccggcgccgatgtcgaatatctcggcaaggaacactatccgccgcttcatatcggcaaacgtcaagacaacggcgaacgcgtgattccgattaaaggcaatgtgtccagccagtttctgaccgcccttttaatggcgttgccgctgaccgggcaggcgtttgaaatccgtatggtcggcgagttaatttccaagccctatatcgacattactttaaaactgatggcgcaattcggcgtacaggttatcaatgaaggctaccgcgtcttcaaaattcccgccgatgcgcgctaccacgcgcccgaacacttgcacgtcgaaggcgatgcctccagcgcgtcctacttcctcgcagccggtttgattgccgccacgcccgtccgcgttaccggtatcggcgcaaacagcatacagggcgatgtcgcctttgcccgcgagctggaaaaaatcggtgcggacgtggtttggggcgaaaacttcgtcgaagtctcgcgcccgaaagaacgtgccgtccaagcctttgatttggatgcaaaccatatccccgatgccgccatgaccctcgccatcgtcgcgcttgctacagggcaaacctgcacgcttcgcaacatcggttcgtggcgcgtcaaagagaccgaccgcattgccgcaatggcgaacgagttgcgcaaactcggtgcaaaagtcgccgaagaagccgaagcaattcacatcaccccgcccgaaacgccgacacccgacgccgtcatcgacacttacgacgaccaccgcatggcaatgtgtttctcgctggtttcgctgttgggcgtacccgtcgtcatcaacgatccgaaatgcacccacaaaaccttcccgacttatttcgacgtgttctcatcgctgaccgaaacagcggaataa

SEQ ID NO: 66916 - DNA, 1305 bp, Neisseria meningitidis
atgaagccgtttgccgaaaatatcccccacagccttcgcggcaactgctgcgacgaagccctgccgccgcatacggtagattgtccggaatgcggctgccgcgcggatgtaccccggttggacagtggagaagcggcgttctgcccgcgctgcggctataagctcttcagggtgggcaggcatcctttttccgccccgcccgcttatgcggcggcttcgctgattttgatggcgtttgcttacggtatgacgtatatcgaggtcgggataccgggtgcggcatccgtcctttcgctgcccgagatgatgcgcctgatggtgtttcaggattatggttttttggccgaagtgatgtttgtgctgaccttcggcgcgccggttctgtttctgctgctgtgcctgtatgtctatgccgcgctgatacggaaacaggcgtatcctgcgctgcgtttggcaacgcgtgtgatggtgcgcttgagacaggcgatgatggtggatgtgttttttgtttccactttggtggcgtatatcaagctctcgtctgtggcagaggttcgcttcggatcggcgttttatctgatgttcgcgctgtcggttatgctgattcggacttcggtatcggttccccagcattgggtgtattttcaaatcgggcggctgacgggggataatgcggttcagacggcatcggaaggtaaaacctgttgcagccgctgcctgtatttccgcgacagtgccgaatccccctgcggcgtgtgcggtgcggaactgtaccgccgacggccgaaaagtctgagtatttcgtcggcgtttctgacggcggcggttattttgtatttccctgccaatatcctgccgattatgatttcgtccaatcctgccgccacggaggtcaataccatccttaacggcatcgcttatatgtgggacgagggcgacaggctgattgcggcggttattttcagcgcgagtattttggtgccggtgctgaagattgcggcaatggcggttctgattgcgtccgcccgcttcgctttgccgacaggcgcaaagaaattgtcgcacctctaccgcattaccgaagcggtcggccgctggtcgatgattgatatttttgtgattattattttgatgtgttcgttccacacttatgccgcgcgcgtcattccgggcagtgcggcagtctatttctgcctggtcgtgattctgacgatgctgtccgcctattatttcgacccgcgcctgctttgggacaaacgcgcttcagacggcattgctttcaacgaaacggaaaaatatgactga

SEQ ID NO: 66917 - DNA, 750 bp, Neisseria meningitidis; identical to SEQ ID NO: 38184

SEQ ID NO: 66918 - DNA, 918 bp, Neisseria meningitidis; identical to SEQ ID NO: 58934

SEQ ID NO: 66919 - DNA, 498 bp, Neisseria meningitidis; identical to SEQ ID NO: 39756

SEQ ID NO: 66920 - DNA, 891 bp, Neisseria meningitidis
atgtttcccgttttccatctttcaggcgaaagccgccgccggatgcttcaggcggcatcgcgttttccctatgttttcaaagcccgtgcggaagattcgcacaaagggactttcggcacgctcgccgtagtcggcggatcggcagggatgagcggcgcgcccgtattggcggcatcggcggcgatgtatctcggctgcggcaaggtgtgggcgggtttcaatcaggatgcgcttccgtttgccgtcattgccggttttcccgaaattatgttggacacggcagacggtttgaccaagcgtcaaggcataaacgcttggatggtaggttgcggcctgggtacaggtagggcggcggtcggaacgcttgccggaattttggcggaacacacggacaagcccgtccttttggatgcggacgcgctgaacatattatcaaccgatgccgaaacccgaaatctggcgcgcgggtgtaaaaacctgattttaacgccacaccccgccgaagccgcgcgcctgcttggaacgacggttgcacaggttcaggcggatcggacggcggcagtgaggaagataagggcaattttcggcgcaaccgtggttttaaaggggcacaaaacattggttgcctcacccgatacggaaatctatgtcaacgaaagcggcaacgcgggattggcaacggcgggcagtggcgacgtattgggcggcatcatcggcagtctgctcgcacagggcgtgccggtttttgaagccgcctgcgcgggcgtgtggctgcacggcgcggcggcggatgtcataaaagaatcggcaggcattgcggcggggctgttggctggcgaaatcgccccggcggcaaggtggctgcgcaaccggataactgaaagtatgtaa

SEQ ID NO: 66921 - DNA, 546 bp, Neisseria meningitidis; identical to SEQ ID NO: 39790

SEQ ID NO: 66922 - DNA, 1677 bp, Neisseria meningitidis
atgagcgtaggtttgctgaggattctggttcaaaaccaggtggttactgttgagcaggccgagcattactacaatgagtcgcaggcgggtaaggaagtgttgccgatgctgttttcggacggtgtcatttcgcccaagtcgcttgcggcattgattgcgagggtgttcagttattcgattcttgatttgcgtcattatccgcgccacagggtgctgatgggggtgttgacggaggagcagatggtggagttccactgtgtgccggttttccgtcggggcgacaaagtattttttgcggtttccgatccgacacagatgccgcaaattcagaaaaccgtttctgccgcagggattgaggttgaattggtcattgtcgaggatgaccagttggcgggtttgctcgattgggtgggttcgcgttcgacatcgctgcttcaggagcttggggaggggcaggaggaagaggaaagccacaccctgtatatcgacaacgaggaggcagaagacggccctgttccgaggtttatccataagactttgtcggatgccttgcgcagcggggcatccgacatccatttcgagttttacgaacacaatgcccgtatccgtttccgtgtggacgggcagctccgcgaggtggttcagccgcccattgcggtaagggggcagcttgcttcccggattaaggtaatgtcgcgtttggacatttccgaaaaacggataccgcaggacggcaggatgcagctgacctttcaaaagggcggcaagcctgtcgatttccgtgtcagcacattgccgacgctgtttggcgaaaaggtcgtgatgcggattttgaattccgatgccgcgtctttgaacatcgaccagctcggttttgagccgtttcagaaaaaattgttgttggaagcgattcaccgtccctacgggatggtgctggtaaccggtccgacgggttcgggtaagacggtgtcgctctatacctgtttgaatattttgaatacggagtcggtaaatattgcaacggcggaagaccctgccgagattaacctgctgggcatcaatcaggttaacgtcaatgataagcagggcctgacttttgccgctgctttgaagtctttcctgcgtcaggacccggacatcattatggtcggtgagattcgtgatttggaaactgccgatattgcgattaaggcggcacaaacagggcatatggtgttttccaccctgcacaccaataatgcgccggcgacgttgtcgcgtatgctgaatatgggtgtcgcgccgtttaatattgccagttcggtcagcctgattatggcgcagcgtcttttacgcaggctgtgttcgagctgcaaacaggaagtggaacgcccgtctgcctctgctttgaaggaagtcggcttcaccgatgaggaccttgcaaaagattggaaactttaccgcgccgtcggttgcgaccgttgccgggggcagggttataaagggcgtgcgggcgtgtatgaggttatgcccatcagcgaagaaatgcagcgtgtgattatgaacaacggtacggaagtggatattttggacgttgcctataaggagggtatggtggatttgcgccgggccggtattttgaaagttatgcagggcattacttcattggaagaggtaacggcaaataccaacgattag

SEQ ID NO: 66923 - DNA, 2751 bp, Neisseria meningitidis
atgaccgacgcaaccatccgccacgaccacaaattcgccctcgaaaccctgccggtaagccttgaagacgaaatgcgcaaaagctatctcgactacgccatgagcgtcattgtcgggcgcgcgctgccggacgttcgcgacggtctcaagccggtacaccgccgcgtactgtacgcgatgcacgaattgaaaaacaactggaatgccgcctacaaaaaatcggcgcgcatcgtcggcgacgtcatcggtaaataccacccccacggcgataccgccgtatacgacaccatcgtccgtatggcgcaaaatttcgctatgcgttatgtgctgatagacggacagggcaacttcggatcggtggacgggcttgccgccgcagccatgcgctacaccgaaatccgcatggcgaaaatttcccacgaaatgctggcagacattgaggaagaaaccgtcaatttcggcccgaactacgacggtagcgaacacgagccgcttgtactgccgacccgtttccccacactgctcgtcaacggctcgtccggcatcgccgtcggcatggcgaccaatatcccgccgcacaacctttccgataccgtcaatgcctgcctgcgcctgctcgatgcacccgacaccgaaatcgacgaactgatcgacattatccaagcccccgacttcccgaccggggcaaccatctacggcttgagcggcgtgcgcgaaggctataaaacaggccgcggccgcgtcgttatgcgcggtaagacccatatcgaacccataggcagaaacggcgaacgcgaagccatcgttatcgacgaaatcccctatcaggtcaacaaagccaagctggtcgagaaaatcggcgatttggttcgagaaaaaacactggaaggcatttccgagctccgcgacgaatccgacaaatccggtatgcgcgtcgttatcgagctgaaacgcaacgaaaatgccgaagtcgtcttaaaccaactctacaaactgactccgctgcaagacagtttcggcatcaatatggtggttttggtcgacggacaaccgcgcctgttgaacctgaaacagattctctccgaattcctgcgccaccgccgcgaagtcgttacccgacgtacgcttttccggctgaagaaggcacgccatgaagggcatatcgccgaaggcaaagccgtcgcactgtccaatatcgatgaaatcatcaagctcatcaaagaatcgcccaacgcagccgaggccaaagacaaactgcttgcgcgtccttggcgcagcagcctcgttgaagaaatgctgacgcgttccggtctggatttggaaatgatgcgtccggaaggattggctgcaaacatcggcttgaaagagcaaggttattacctgagcgagattcaggcagatgctattttacgcatgagcctgcgaaacctgaccggcctcgatcaagaagaaattgtcgaaagctacaaaaacctgatgggtaaaatcatcgactttgtggatatcctctccaaacccgaacgcattacccaaatcatccgcgacgaactggaagaaatcaaaaccaactatggcgacgaacgccgcagcgaaatcaacccgttcggtggcgacattgccgatgaagacctgattccgcaacgcgaaatggtcgttaccctgacacatggcggctatatcaaaacccagccgaccaccgactatcaggcgcagcgtcgcggcgggcgcggcaaacaggcggctgccaccaaagacgaagactttatcgaaaccctgtttgttgccaacacgcatgattatttgatgtgctttaccaatttgggcaagtgtcattggattaaggtttacaaactgcccgaaggcggacgcaacagccgcggccgtccgattaacaacgtcatccagttggaagaaggcgaaaaagtcagcgcgattctggcagtacgcgagttccccgaagaccaatacgtcttcttcgccaccgcgcagggaatggtgaaaaaagtccaactttccgcctttaaaaacgtccgcgcccaaggcattaaagccatcgcgctcaaagaaggcgactacctcgtcggcgctgcgcaaacaggcggtgcggacgacatcatgctgttctccaacttaggtaaagccatccgcttcaacgaatactgggaaaaatccggcaacgacgaagcggaagatgccgacatcgaaaccgaaatttcagacggcatcgaagatgaaaccgccgacagcgaaaacgcactgccgagcggcaaacacggtgttcgcccgtccggtcgcggcagcggcggtttgcgcggtatgcgcctgcctgccgacggcaaaatcgtcagcctgattaccttcgcccctgaaaccgaagaaagcggtttgcaagttttaaccgccaccgccaacggatacggaaaacgcaccccgattgccgattacagccgcaaaaacaaaggcgggcaaggcaatattgccattaacaccggcgagcgaaacggcgatttggtcgccgcaaccttggtcggcgaaaccgacgatttgatgctgattaccagcggcggcgtacttatccgcaccaaagtcgaacaaatccgcgaaaccggccgcgccgcagcaggcgtgaaactgattaacttggacgaaggcgaaaccttggtatcgctggaacgtgttgccgaagacgaatccgaactctccgacgcttctgtaatttccaatgtaaccgaaccggaagtcgagaactga

SEQ ID NO: 66924 - DNA, 483 bp, Neisseria meningitidis
atgatgaaaaagatactggccgtatcggcactatgcctgatgactgcggcggcacgggctgccgatacttacggctatctcgccgtttggcagaatccgcagaatgcggacgatgttttgcaggttaaaactacaaaagaagattcgacgaaaagcgaagcgtttgccgagttggaagccttttgcaaaggtcaggacacgcttgcgggcattgccgaagacgagccgaccggatgccggtcggtcgtgtcgctgaacaatacctgtgtcgcgctggcatacccgaaagccttgggcgtgatgcgcgttgaaaacgccgtcgtgattacttctccgcgttttacgagcgttcatcaggtcgcactcaaccagtgcatcaaaaaatacggcgtacagggacaatgcggcttggaaacagtgtattgcacatcttcttcttattacgggggaactgtgcgctctttgattcaaaatctcaaataa

SEQ ID NO: 66925 - DNA, 345 bp, Neisseria meningitidis; identical to SEQ ID NO: 36580

SEQ ID NO: 66926 - DNA, 531 bp, Neisseria meningitidis
atgatacaaaagatatgtaagctatttgttttaatagcatttttttcggcatcccccgcttttgcccttcaaagcgacagcaggcagcctattcagattgaggccgaccaaggttcgctcgatcaagccaaccaaagcaccacattcagcggaaacgtcgtcatcagacagggtacgctcaatatttccgccgcccgcgtcaatgttacacgcggcggcaaaggcggcgaatccgtgagggcggaaggttcgccagtccgcttcagccagacattggacggcggcaaaggcacggtgcgcggacaggcaaacaacgttgcttattcatctgcaggcagcaccgtagtcttaaccggtaatgccaaagtacagcgcggcggcgatgtcgccgaaggtgcggtgattacatacaacaccaaaaccgaagtctataccatcagcggcagcacaaaatccggcgcaaaatccgcttccaaatccggcagggtcagcgtcgttatccagccttcgagtacgcaaaaatccgaataa

SEQ ID NO: 66927 - DNA, 1497 bp, Neisseria meningitidis
atgttttccaactacctactcagcttggcaatatggatacccatcgccgcaggcgtgctggttttggcaacggggtcggacagccgtgcgctgcttgcccgcgtgctcgcctttatgggtgcgcttgccggtttcttggtaacgctgcccctgtttaccggtttcgaccgtttgagcggcggctatcagtttaccgagttccacgagtggattccgcttctgaaaatcaactacgcattgggcgtggacggtatttcagtgctctttatcatcttgaatgcgtttattacgctgttggtggtattggccggttgggaagtcattcagaaacgtccggcgcagtatatggcggcattcctgatcatgtcgggtttgattaacggcgcgtttgccgcacaggatgcgattctgttttatgtgttcttcgagggtatgctgattccgctatacctgattatcggtgtatggggcggtccgcgccgcgtctatgcgtcggtcaagctgttcctttatacgctgatgggttcgcttttgatgctggttgccatggtttatctgtactatcaaacaggcagcttctctattgtcgatttccaaaacatcaaacagattccgttgggcgtacaacagcttttgtttgcggcgttcttcctgtcgtttgccgtaaaagtgccgatgttccccgtacacacttggctgccggatgcccacgttgaagcaccgaccggcggttcgatggtgttggctgcgattacgctgaaactgggtgcgtatggtttcttgcgcttcatcctgccgattatgccggatgcggcacgctattttgcccctgtaatcatcgtattgagcctgattgccgtgatttatatcggtatggtggctttggtgcaaaccgatatgaaaaaactggtggcgtactcttccatcagccatatgggttttgtcactttgggtatgttcctgtttgtgaacggccaactgaatgactgggcgttgaaaggcgcaatcattcaaatgatttcgcacggcttcgtgtcggcggcgatgtttatgtgcatcggtgtgatgtacgaccgcctgcatacgcgcaatattgctgattatggcggcgtggtcaatgtgatgcccaagtttgcggcgtttatgatgctgttcggtatggcgaacgcggggctgcctgcgacttccggcttcgtgggcgagtttatggtgattatgggcgcggttaaagtgaatttctgggtaggtgcgttggccgccatgaccttgatttacggtgcgtcttataccctgtggatgtacaaacgcgttatttttggtgcgatccacaatccgcacgttgccgaaatgaaagacatcaactgccgcgaatttgcgattttggcggtgttggcggttgctgttttgggtatgggtctgtatccgaacgcatttatcgaagtggtgcatcaggcggcaaacgatttgattgcccatgtagcgcaaagcaagatttga

SEQ ID NO: 66928 - DNA, 414 bp, Neisseria meningitidis
atgatgcccgcctacgcctacgccgcgctcgctttttccgccttcacttccgccaccctcctgcccggcacatccgaagccgcctttgccctgttcgtccaccgctttcccgaacacgcatacggcgcgttgctgtgcgccggccttgccaacggattgggcagtatggtttcctattggatggggcgtttgctgccctcccgaaaaatgccgtctgaaaaaacactgaatctgatgcggcgtttcggtatttggctgcttgcgtttacctggctgcccgtcgtcggcgacgcactgccgcttgccgccggctggctgcggttgaatccgtggacaagcgggctgatgctggttatcggcaaaacggcgcgttacgccttcattctgtggggaatgcaatattacgccgcctga

SEQ ID NO: 66929 - DNA, 777 bp, Neisseria meningitidis
atggctaagaaattcgataaagacagcttcagcggcacgctgattgtcgtgttggcggtcagcctgatttgctcggtcatcgttgccggtgcggtcgtcggcttgaaacccatccaagagaaacaaaaactccaagacaaacaaggctatatcttgagcgtagccggtttgatggataaaaacaccgacattagcaaaacctttgccgagcgtatcgagcaacgtgtcgtggacttggcaaccggcgaatatgtcgctgatgcgcctaaagacttcagcgcacgcgttgccggcaaagaccctgcccaaagcatccaaatcaaacctgaagacgatttggcaggcatcaaaagccgtgccaaatacaccgaggtttatttggtaaaaggcgaagacggcaaaatcggccaaatcatcctgccgatgcacggcaacggtttgtggtcggtcatgtacggctttgtcgccatccaacccgacggcaacaccatcaacggcattacctactacgagcaaggcgaaaccccgggcttgggcggcgaaatcggcaatcctttgtggcagcaaaaattcgtcggcaaaaaactgtttgacggacaaggcaaactcgccctgcacgtcggcaaaggcgcgggttcggacaaagaacacggcgtagatgccctctccggtgcatcgctgacatccaaaggcgtgcaaggttcgttcgcctactggttcggcgaaaacggctatatcccctacctgaacaaattgaaatcagcaggagcgcaataa

SEQ ID NO: 66930 - DNA, 816 bp, Neisseria meningitidis
atgtccttgacccgcctaatcttgaaattctatgcactgttgcgcctttttttgggcaaaaacgcccgcaccgcatggatttcgcatcccgcctgtgccgggcacgaacccggcgcaaaccatcccgattcgcccgaccgcatcctctgcatcgagcaggcattgcgccgcgccggtatttggcagcacctccaaaccatagaggcggaagaaatcagcgatacgcgcctcgcacttgtccactcgagcaaatatctgaaccgtttggaatcttgcctgccccaaaaaggcaagatttcccgcctggataacgacactgcaatcagcacaggctcgctgtctgccgcacgctttgccgccggttcggcagttcaggcagtcgacatggtcatgaaccgtaaagcatggcatgccttttgcgccgcccgcccgcccggacaccatgcgggcagcggcaaagccggcggattctgcctgctgaacaacgttgccgccggcgtcatgcatgccattgccgaataccgcctgaaacgcattgccgtcatcgatttcgatgtccactacggcgacggtacggcagaaatattcaaagacgatccgcgcatcctgttttcaacctgtttgaaaccgaccttttccccttccccgaaaacaacgatatgcccgacggcggcaatatggtgcacctgcccttgccgccgggaacgggcagccgcacattccgcgaagccgtccgcaggcagtggctgccccgacttgccgcattcaaacccgaactggtgctgctgtcggcaggattcgacgcacaccgtctag

SEQ ID NO: 66931 - DNA, 1035 bp, Neisseria meningitidis
atgccgaattgtttcaaatttcatactgttatcgaacggcattggcaaaaaccttatccggttttgtcttttctgcttaagccgctctccgggctgtttgccaaaattgcggcaaaacggcggacggattttttatcgggaaaacggcaaagcgaaaagctgcccgtgcctgtggtcgtggtcggcaatattcacgcgggtgggacggggaaaacgccgattgttgccgcgctggtgtcgggtttgcaggaaaagggcgtcaaggtcggcatcatcagccggggctacgggcgcaagagcaaggcggttcatgtattgaatgctgagagccgagcggaagatgcgggcgatgagcctttgctgctgttccgcaaaaccggtgcgccgacggcggtgggcagcagccgtgcagaggcaggcagggcgttgctggcggcgcatcccgacatcggactgattgtggcggacgacggtttgcagcattacgccctgcggcgagatgtggaaatcgcggtgtttccggcggcggatacggggcgcacggatttggatttactgcccaacggcagtttgcgcgaacctttgttgcggctggattcggtggatgcggtcgtcgtcagcggcggcaaggcggatgcgctgtttaggccgtctgaaaatatgtttcacagccgtatcgaagcgggacggatttaccgtttgaacaatccgtccgaaatactggacacaggccgtctgaaaaatcaaaccgtcgtcgccgtggcaggtattgccaagccggcgcgttttttcgattcgttgcggaatatgggcattaccgtgaagcgaaccgtcgcgctgcccgaccacgccgacatttcggcggcagatttgcccgatgcggacgcggtcattattacggagaaagatgcggtcaaattttcagacggcatttgcaccgataatgtttgggtgttgcccgtttgtgcgataatcgaacctgatttggcggcgtttgtgttggagcggttggaagatgtaccgaaggccgtctga

SEQ ID NO: 66932 - DNA, 1497 bp, Neisseria meningitidis
atgaccacggaaaaccaagccggcagtccggcatccggaatcggcacgtccgaacaaacaaaagccgcgccgaaagcaaaaaaaacattcgatccgcgagccagcgtgattcaaatccatcccgaaggcgaacgcatccatcccaaaaaggcggaaggacggttcgccaaactgcgtatcgccgccgtattggcgacgcagtttgtgttttacgtcattccgtggttcaactggagcggcaggcaggctgtcgttttcaatatccccgaacggcatttcttcattttcggattgtcgttgggggtgggcgatttgatttaccttgccttgctgctgatgatttgcgccttcgggctgttttggtggacgacgattgccgggcgactgtggtgcggctattcctgcccgcaaacggtttacaccgaaattatgctgtggatcgacaacctggtcgaaggcgatagaaacaaacggctgaagctggaaaaatcgccgtggaatttcactaaaatccgcatcaaagccaccaaatacctgttgattttccttgtctgcgcgtggacgggcatcacgtttgccggctggtttgtccccatccgccggttcgttcccgatttattcaccggagcagcaggcggcggcgcgatgtttgccacagcgttttacggctttatgaccttcttcttcgcccacattatgcgcgaaaaagtatgcctgcatatgtgtccgtatgcacgtttccaaagcgcgatgttcgacaaggacacgctgattgtttcttatgacgcggaacgcggcgaaccgcgcggcgcgcgcaagaaaacggtcaataaggaagaggcgggtttgggcgactgcatcaactgtgcgatgtgcgtccaagtctgccccgtcggcatcgacatccgcaacggtctgcaataccaatgcatcggctgcgccgcctgtatcgacgcgtgtgatgagattatggacaaaatgggctatccgcgcggattaatccgttatacgaccgaaagcgcgctggaacacgaatattctgaaaaagacattaaaaaacggctgctcagaccgcgcgtggcaggttacggcgcggtgttggcagtggttatcgccgcctttttggtcggtttgtccacgcgcaaaatggtcgaagtcgatattttgaaagaccgtggcgtaatggtgcgcgaaaacgccaaaggctggctggaaaacgcatacagcctgcgtatcatcaacaacagcgaaaaagaacagctgattaccgcaagtgtcaaaggctttgacgaaatcgccctgaccgggctgcccgaaggcggtatcaaggttgccccgcgcgaaacggtaacccttcccgtccaagtgtccaccattccggaatacgcggacaaaggcagccaccctatcgaatttaccttccaataccgcgaaagcggcgcgcccgacggcaagccggtcgtcttggaagaagatgcaacctttatcggagaataa

SEQ ID NO: 66933 - DNA, 147 bp, Neisseria meningitidis
ttggtagtttcaaaggaaatagaattaaatcagcatcccgttttcactaaactgactaccgcgcttgccgtattggtcggcaaattcgccattgatgatggcggagatggtaacttccatgatgattctcctgtgttttcggattga

SEQ ID NO: 66934 - DNA, 231 bp, Neisseria meningitidis
atggccgcattgtggcagatgtatgtgatgatgaccgaaacttatacgctcaaccgtttcaaagataaagaattggtttggcgcgtggcattgttgtttatcagtttcagccttgccgtttatctgctctgcccgaattcgcgtaaaaaaggcatcgtcttttttattctcgggggaggcggtgcagccatgtatctgctggcgcggatgtggttgcctttcagcaagtga

SEQ ID NO: 66935 - DNA, 201 bp, Neisseria meningitidis; identical to SEQ ID NO: 38240

SEQ ID NO: 66936 - DNA, 1389 bp, Neisseria meningitidis
atgtctattaaatttgccgatttgaaccttgataaaaacattttgtccgccgtcagcagcgagggttacgaaagcccgacgccgattcaggcgcaggcgattccgtttgctttggaaggccgcgacatcatggcttcggcgcaaaccggctccggcaaaaccgccgcctttctgttaccgactttgcagcgactgaccaaacgcagcgaaaaaccgggcaaaggcccgcgtgctttggtgttgaccccgacccgcgaattggcggcacaagtggaaaaaaacgcgctggcgtatgccaaaaatatgcgctggttccgtaccgtcagcatcgtcggcggcgcatcgttcggctaccaaacccgcgccctgagcaaaccggtcgatctgattgtcgccacgccgggccgcctgatggacctgatgcaaagcggcaaagttgattttgaacgtttggaagtgctgattttggacgaagccgaccgtatgttggatatgggctttatcgacgacatcgaaaccatcgtcgaagccaccccgaccgaccgtcagactttattgttctccgccacttgggacggcgcggtcggcaaactggcacgcaaactgaccaaagaccctgaaatcatcgaagtcgaacgcgtggacgaccaaggcaaaatcgaagaacaactgctgtactgcgacgatatgcgtcacaaaaaccgcctgctcgaccacatcctgcgcgatgccaatatcgatcaatgcgtgattttcacgtccaccaaagcgatgaccgaagtcatcgcggatgaattgtacgaaaaaggtttcgccgccaactgcctgcacggcgacatgccgcagggctggcgcaaccgcacgctgatggatttacgcaaaggccgctgcaaaattttggttgccaccgacgttgccgcacgcggtatcgacgtaccgaccattacccacgtcatcaactacgacctgccgaaacaggcggaagactacgtccaccgcatcgggcgcaccggccgcgcaggccgcacgggtattgcgattacgtttgccgaagtgaacgaatacgtcaaagtccacaaaatcgaaaaatacattaaccgcaaactgcccgaactgaccatcgaaggcatggaaccgacccgcaaacgcaaatccgcaggcggtaagccaaaaggcaaaggcggctggggcgataggaaatccggcggccggcgcggcgatcataaaccgggcaaagaaggcttcggcggcaaaacgcgcggcgaaggtttcaagaaagaaggctttaagagagacggtttcaaaaaaaccggcgaaggcttcaaaggcaaacgcaaagccggcgattcttttgcaggcagaggcgaacgccgttacaaagaccgctaa

SEQ ID NO: 66937 - DNA, 870 bp, Neisseria meningitidis
atgaaacgcatctttttgtccgccttgcccgccatcctgcctttatccgcttatgccgacctgcccttgacgattgaagacataatgactgacaagggcaaatggaaactggaaacttcccttacctacctgaatagcgaaaacaaccgcgccgaacttgccgcaccggtttacatccaaaccggcgcaacctcgtttatccccattccgaccgaaatccaagaaaacggcagcaataccgatatgctcgttggcacgctcggtttgcgctacggactgaccgggaataccgacatttacggcagcggcagctatctgtggcacgaagaacgcaaactcgacggcaacagcaaaacccgcaacaaacggatgtccgacgtatccctcggcatcagccacactttccttaaagacgacaaaaaccccgccctaatcagctttcttgaaagcacggtttacgaaaaatcgcgcaacaaagcctcgtcgggaaaatcctggctcatcggcgccaccacctacaaagccatagatccgattgtcctttccctcaccgccgcctaccgtatcaacggcagcaaaaccctttcagacggcatccgctacaaatcgggcaactacctgctgctcaaccccaacatctcatttgccgccaacgacagaatcagcctgaccggaggcatccaatggttgggcaggcagcccgaccggacggacggcaaacgggaatcctccagaaacacatccacctatgcccatttcggcgcaggtttcggtttcaccaaaaccacggctttaaacgcatccgcacgtttcaacgtttcagggcaaagcagttccgaactgaaatttggcgtacagcatacattttaa

SEQ ID NO: 66938 - DNA, 321 bp, Neisseria meningitidis
ttggggaattttgcaaaggtctcaggctatgacagtgcggaaaaccggcaacatctggaagagcgtcagttgttagacggcattatgcgcaaagcctgccgcaaccgtccgctggcggaagcgcaaaccaaacgcaaccggtatttgtcgaagacccgttatgtggttgaacaaagcttcggtacgctgcaccgtaagttccgctatgcccgggcagcctatttcggactgattaaagtgagtgcgcaaagccacctgaaggcgatgtgtttgaacctgttgaaagcgcccaacaggttaagtgcgcctgttgccgcctaa

SEQ ID NO: 66939 - DNA, 1122 bp, Neisseria meningitidis; identical to SEQ ID NO: 44832

SEQ ID NO: 66940 - DNA, 738 bp, Neisseria meningitidis; identical to SEQ ID NO: 42917

SEQ ID NO: 66941 - DNA, 477 bp, Neisseria meningitidis
atgctgacagtctgccaatccggcagcgcacctaaaaacgcgcacacggcatccgccggcacaccggccggagaatcatgcaaagtcatccgggacgacaccgcaggaagcggcaaaaacatcatttaccgttgctgcaacggtcaggcggcaataaatgcagccattgcagacggcgtattggaatcagggattcccgtcagcttcggcggcgggggcgtaccgattgcaaacggcaggaatctagttacccgtcaggcggcaaacggcataggcaaatccgactcagaagcctacgaacgcgccctaatcaatgccgcccgcaaattccaacagaccgcaggcaaactcggcgggcgccgtgttaccggcttccacagctatttcgacaagcaaccgctgcaaggcggacaatacgactgtcaggcaggctcgttccacgtccgcgtggtcatgcgcaccaatgtcgtccgttaa

SEQ ID NO: 66942 - DNA, 888 bp, Neisseria meningitidis
atgccctaccaacaaatcaccgtcaacgtcaacgatgccgtcgccgaacgcctcgccgacgcgctgatggaacacggcgcactctccgccgccatcgaagatgcctacgccggcacgcaaaacgaacaggcgattttcggcgaacccggtatgcccgccgaacaaatctggcagcagagcaaagtcatcgccctgttcggcgaacacgacgaagccgccgccatcatccaaatcgccgcacaagaatgcgggttaaaagacttggcatacaccggcgaaaccatcgaagaccaagactgggtgcgtctcacgcaatcgcaattcgaccccatccggatttccgaccgcctgtggattaccccctcttggcacgaagtccccgaaggcagcgccgtcaacctccgcctcgaccccggactcgccttcggcaccggcagccacccgaccacgcgcctctgcctcaaatggttggatacgcaactcaaaaacggcgaaagcgtcctcgactacggctgcggttcgggcatcctgaccatcgccgccctcaaactcggcgcaggttctgccgtcggcgtggatattgacgaacaagccgtccgcgccggcaaggacaacgccgaacagaacaacgtcgatgcacaattcttcctgcccgacggtctgcctcaagggcaattcgacgtagttgtcgccaacatcctcgccaaccctttacgtatgctcggcgaaatgctcgccgcccgcaccaaacaaggcggccgcatcgtgttatccggtttgttggacgaacaagccgaagaactcggcggcatttacagccaatggttcgatctcgacccggcggaaaccgaagaaagctgggcgcgcttgagcgggacaaaacgctga

SEQ ID NO: 66943 - DNA, 420 bp, Neisseria meningitidis
ttggccgcccgtttccatcccgataaattcgcttcagcttccgcctttgagcaaaagcaggcagtgatgatgtcttccaccatcaacgatgcctaccgcaccttgaaaaaccccatcgaccgcgccgcctacctgctgaaaaaatcgggcatcgatgccgacgcgccggagcataccgctttcgcccccgaattccttatgcagcaaatggaatggcgcgaaacgctgatggaggcacgggcaggcaacgaccttgaatccttgaaaaatctcgacaacgaaatccgcgacgagcaagaaaaactgttctgcggtctgaaacagtcgtttgcccgacaagattacgacacagccgcacaacaagtccgccaaggcaggtttctcgacaaactccgcaacgaaatttcctcggcattataa

SEQ ID NO: 66944 - DNA, 390 bp, Neisseria meningitidis; identical to SEQ ID NO: 39501

SEQ ID NO: 66945 - DNA, 822 bp, Neisseria meningitidis
atggattttctgattgtcctgaaagccctgatgatgggcttggtagaaggttttaccgaatttttaccgatttccagcaccgggcatttgattgtgttcggcaatctgattgattttcacagcaatcacaaggtttttgaaattgccatccagctcggtgcagttttggcggtagtgtttgaataccggcagcgtttcagcaatgtgttgcatggcgtgggaaaagaccagaaagccaaccgcttcgtcctcaatcttgccattgcttttatacctgccgccgtgatggggctgttgttcggcaaacagattaaagaacatctgttcaatcctttgagtgtggcggtcatgctggttttgggcggtttgtttattttgtgggtggagaaacgccaaagccgagcagagcctaaaattgccgatgttgatgcattgcgtccgattgatgccttgatgatcggcgttgcccaagtgtttgcactgattccgggtacgtcccgttcgggcagtacgattatgggcgggatgctttggggaatcgaacggaaaactgcgacagaattctcgtttttcttggctgtgccgatgatggttgccgcaacggcttatgatgtcctgaagcattaccggtttttcaccctgcatgatgtcggtttgattttgattggctttgttgctgcctttgtttcaggcttggtggcggtcaaagcgttgctgaggtttgtttccaagaaaaattatattccttttgcctattaccgcattgtttttggtattgccatcattatattgtggctgtcaggctggataagttgggaatga

SEQ ID NO: 66946 - DNA, 1074 bp, Neisseria meningitidis
atgagtatcaccatccaaaacttaaacaaacacttcggcaattttcacgcgctgaaaaacatcaacctcaacgtccccaccggcaaactcgtttccctgctcggcccgtccggctgcggcaaaaccacacttttacgcattatcgccggactggaaaacgccgacggcggccaaatcctctttgacgggcaagacgtaaccgccaaacacgtccgcgagcgcaaagtcggcttcgtgttccaacactacgccctcttccgccacatgaacgtgtttgacaacgtcgctttcggtttgaccgtattgcccaagtccgaacgcccgtccaaagaacaaatctgcactaaagtcgaagaattgctgaaactcgtacaactctcgcatttggcaaaatcctatccgcaccaactctccggcgggcaacgccagcgcatcgccctcgcccgtgcgcttgcggtcgaaccgaaactcctgcttttggacgaacccttcggcgcgttggacgccaaagtacgcaaagaattacgcacctggctgcgcgacatccatcacaacctgggtgtaaccagcattctggttacgcacgaccaagaagaagccctcgaagtttccgacgaaatcgtcgtgatgaaccacggcaaaatcgaacaaaccggcagcgccgaagctatttaccgcaaacccgaaaatgccttcgttaccgagttcctcggcgaaaccgacgcatttgaaggacgcatcgaaaaaggcttctggcattataacggcttcgcgtggaaattggacgcacaatacaaatggcaggagcaaaccgccatcggctacatccgtccgcacgaatggcagatcgccgccgaacacgaaacaccgatgatttgtgccgaaatcgaaaaagtccacgccgtcggggcattgacgcatattttggtgaaacacggcaaacaagacgtgcatatcacgctggctggcagcgatgccgcgcgttacccaatcgccgaaggcaaagaattgaagctgattccgaaacaggtttatgtcttctctcaaaacgaactgattgaatattcgatttaa

SEQ ID NO: 66947 - DNA, 279 bp, Neisseria meningitidis; identical to SEQ ID NO: 43450

SEQ ID NO: 66948 - DNA, 924 bp, Neisseria meningitidis
atgctgcaaagaactttggcgaaatccatcagcgttaccggagtcgggctgcattcgggcgaacgcgtcgcgctgaccctgcaccccgcgcctgaaaacagcgggatttccttccgccgtaccgatttggacggcgagatgggcgaacaaatcaagctgaccccttatttgatcaacgatacccgcctttcctccaccatcgttaccgacaaaggcgtgcgcgtcggcacgatcgaacacattatgtccgcgctgtccgcctacggcatcgacaatgcgctgattgagctgaacgcgcccgaaatcccgattatggacggctccagcctgccgtttatttaccttttgcaagatgcgggcgtggtcgatcaaaaggcgcaaaagcgttttttgaaaatcctcaagcctgtcgaaatcaaagaagcgggcaaatgggtgcgctttacgccgtatgacggctttaaggtaacgctgaccatcgaattcgaccatccggttttcaaccgcagctcgcccacttttgaaattgatttcgccggcaaatcctacatcgacgaaatcgcgcgcgcgcgcactttcggctttatgcacgaagtggaaatgatgcgcgcccacaatctgggtttgggcggcaatttgaacaacgctatcgtgattgacgacacggatgtcctgaatcctgaaggcttgcgctatcccgatgagtttgtgcgccacaaaatccttgatgccatcggtgatttgtatatcgtcggacatccgattgtcggcgcgtttgaaggctacaaatcgggacacgccatcaacaacgcactcttgcgcgcggttttggcagacgaaacggcttacgaccgggtggaatttgccgacagcgatgatttgcccgacgcatttcacgagctgaacatcagaacttgtggataa

SEQ ID NO: 66949 - DNA, 1101 bp, Neisseria meningitidis
atggcaggcaacactttcggacaactcttcaccgtgaccacgttcggcgaaagccacggcgcaggtttgggctgcatcatcgacggctgcccgcccggactggcattaaccgaatcagacatccaagccgacctcgaccggcgcaaacccggcaccagccgccacgttacccaacgccgcgaagccgaccaaatcgaaatcctctccggcgtattcgaaggcaaaaccaccggcacgcccatcgccctcttaatccgcaataccgaccagcgcagcaaagactacggcaacatcgcccaaagtttccgccccggccacgccgactatacctattggcacaaatacggcacgcgcgactaccggggcggcggcaggagttccgcccgcgaaaccgccgcccgcgttgctgccggagccgttgccaaaaaatggttgaaagaaaaattcggcacggaaatcaccgcctacgttacccaagtcggcgaaaaagaaatccggtttgaaggctgcgaacacatttcccaaaatcctttttttgccgccaaccatagccaaattgccgagctggaaaactatatggacagcgtgcgcaaatcgttggattccgtcggcgcgaagctgcatattgaagccgccaatgtccccgtcggcttgggcgaacccgttttcgaccgcctcgatgccgaaatcgcctacgcgatgatgggcatcaacgccgtaaaaggcgtggaaatcggcgcaggttttgacagcgtaacgcaacgcggcagcgaacacggcgacgaactcaccccgcaaggcttcctgtccaaccactcaggcggcatcctcggcggcatcagcaccggacaagacatctgcgtcaatatcgccatcaaacccaccagctccatcgccactccgcgccgaagcatcgacatcaacggcgaccccgtcgaactcgccacgcacggcaggcacgacccctgcgtcggactgcgcgccgcgccgattgccgaagctatgctggcattggttttaatcgaccacgccctgcgccatcgtgcgcaaaatgccgacgttcaggttaatacgcccgacattaccctttcaaacaaataa

SEQ ID NO: 66950 - DNA, 942 bp, Neisseria meningitidis
atgccgaccccgaaagcctttgccctgctcgggccgaccgccggaggcaaaaccgcgctcgccctcaaaattgccgaaaccctgcctgtcgaaatcatcagcctcgattccgcgctggtctataccggtatggacatcggcacggcaaaaccgtccgcctccgaacgcgcctttgtcccgcaccaccttatcgacatcattacgcctaccggatcatacagtgccgcccgttttgtcgaagactgcacgcgtctgatcggcgaaatcacggcgcgtgggaaatgtccgctgattgtcggcggcacaatgatgtatttccgcgccctgacccaaggtttgaacgatttgcccgaagccgatgcctgcctgcgtgccgacttggacgaacaaaaacaaatgtacggcttggatttcctctatcgcaccctgcaacaggtcgatcccgaaaccgcatgccgtctgaaaccgaacgacagccagcgcatcgaacgcgctttggaagtctattatttaaccggcaaaccgatgagtgcgcacctcggcagcccaacctcccatacgctcccttttgatttgcataccgccgccctgattcccgaaaaccgcgcccgactgcacgaaaacatcgccctgcgtttccgccaaatgctcgaacagggctttatcggcgaagtcgaaaacctgcgccgccgctatcccggcctgaccgccgactcccccgccatccgctgtgtcggctaccgtcaggcgtgggaatacctcgacggcgcaaccgacagacaaaccttcatcgaaaaaggcattgccgccacgcgccaacttgccaaacgccaactgacttggttgcgcaaaacacctttagactgcgttgccgacccgttttcagacggcacttcatgcacacgcctgattgaggcggcaaaacggtttttcggcgcataa

SEQ ID NO: 66951 - DNA, 219 bp, Neisseria meningitidis
atgcttaaaaccctgacttttgccgcactgcatttcagcaccgctttcagtgtaacctatgtactgacgggcagtataggcgtatcgggggtggtcgcgctggtcgaacccctaatcaacaccgtcgttttctatttccatgaaaaagcatggaacctttacaaaaaaaataagacaatcaaacaaacgcagctgtttcagctgcaccgatgcagctga

SEQ ID NO: 66952 - DNA, 717 bp, Neisseria meningitidis; identical to SEQ ID NO: 44750

SEQ ID NO: 66953 - DNA, 612 bp, Neisseria meningitidis; identical to SEQ ID NO: 51707

SEQ ID NO: 66954 - DNA, 1524 bp, Neisseria meningitidis
atgaccgtcatcaaacaggaagactttatccaaagcatttgcgatgccttccaattcatcagctactaccatccgaaagactacatcgacgcgctttataaggcgtggcagaaggaagaaaaccccgccgccaaagacgcgatgacgcagattttggtcaacagccgcatgtgtgccgaaaacaaccgccccatctgccaagataccggtatcgcgaccgtcttcctcaaagtcggtatggatgtgcagtgggatgcggacatgagcgtcgaagaaatggttaacgaaggcgtgcgccgcgcctacacttgggaaggcaacaccctgcgcgcctctgtcctcgccgatccggccggcaaacgtcaaaacaccaaagacaacacccccgccgtcatccatatgagcatcgtgccgggcggtaaagtcgaagtaacctgcgcggcaaaaggcggcggctctgaaaacaaatccaaactcgccatgctcaatccttccgacaacatcgtcgattgggtattgaaaagcatcccaaccatgggcgcaggctggtgtcctcccggcatcttgggcatcggcatcggcggcacgcccgaaaaagccgtgctgatggcaaaagagtccctgatgagccacatcgacattcaagaattgcaggaaaaggccgcgtccggcgcggaattgtccaccaccgaagccctgcgcctcgaactctttgaaaaagtcaacgcgctgggcatcggcgcacaaggcttgggcggactgaccaccgtgttggacgtgaaaatcctcgattatccgacccacgccgcctccaaaccgattgccatgattccgaactgcgccgccacccgccacgtcgaatttgaattggacggctcaggccctgtcgaactcacgccgccgcgcgtcgaagactggcccgatttgacttacagccccgacaacggcaaacgcgtcgatgtcgacaagctgaccaaagaagaagtggcaagctggaaaaccggcgacgtattgctgttgaacggcaaaatcctcaccggccgcgatgccgcacacaaacgcctcgtcgatatgctcaacaaaggcgaagaattgcccgtcgatttcaccaaccgcctgatttactacgtcggccccgtcgatccggtcggcgatgaagtcgtcggtccggcaggtccgaccacagccacccgcatggacaaattcacccgccaaatgctcgaacaaaccgacctcttgggcatgatcggcaaatccgagcgcggcgtggccacctgcgaagccatcgccgacaacaaagccgtgtacctcatggcagtcggcggcgcggcgtatctcgtggcaaaagccatcaaatcttccaaagtcttggcgttccccgaattgggcatggaagccatttacgaatttgaagtcaaagacatgcccgtaaccgtcgccgtagatagcaaaggcgaatccatccacgccaccgccccgcgcaaatggcaggcgaaaatcggcatcatccccgtcgaatcttga

SEQ ID NO: 66955 - DNA, 1386 bp, Neisseria meningitidis
atggacggctggacacagacgctgtccgcgcaaaccctgttgggcatttcggcggcggcaatcatcctcattctgattttaatcgtcaaattccgcatccacgcgctgctgacactggtcatcgtcagcctgctgacggctttggcaaccggtttgcccacaggcagcattgtcaacgacgtactggtcaaaaacttcggcggcacgctcggcggcgtggcgcttctggtcggcctgggcgcgatgctcggacgtctggtcgaaacatccggcggcgcacagtcgctggcggacgcgctgatccggatgttcggcgaaaaacgcgcaccgttcgcgctgggcgttgcctcgctgattttcggcttcccgattttcttcgatgccggactaatcgtcatgctgcccatcgtgttcgccaccgcacggcgcatgaaacaggacgtactgcccttcgcgcttgcctccatcggcgcattttccgtcatgcacgtcttcctgccgccccatccgggcccgattgccgcttccgaattttacggcgcgaacatcggccaagttttgattttgggtctgccgaccgccttcatcacatggtatttcagcggctatatgctcggcaaagtgttggggtgcaccatccatgttcccgttcccgaactgctcagcggcggcacgcaagacaacgacctgccgaaagaacctgccaaagcaggaacggtcgtcgccatcatgctgattcccatgctgctgattttcctgaataccggcgtatcggccctcatcagcgaaaaactcgtaagtgcggacgaaacctgggttcagacggcaaaaataatcggttcgacaccgatcgcccttctgatttccgtattggtcgcactgtttgtcttgggacgcaaacgcggcgaaagcggcagcgcgttggaaaaaaccgtggacggcgcactcgcccccgtctgttccgtgattctgattaccggcgcgggcggtatgttcggcggcgttttgcgcgcttccggcatcggcaaggcactcgccgacagcatggcggatttgggcattcccgtccttttgggctgtttccttgtcgccttggcactgcgtatcgcgcaaggttcggcaaccgtcgccctgaccaccgccgccgcgctgatggctcctgccgttgccgccgccggctttaccgactggcagctcgcctgtatcgtattggcaacggcggcaggttcggtcggttgcagccacttcaacgactctggcttctggctggtcggccgcctcttggacatggacgtaccgaccacgctgaaaacctggacggtcaaccaaaccctcatcgcactcatcggctttgccttgtccgcactgctgttcgccatcgtctga

SEQ ID NO: 66956 - DNA, 1056 bp, Neisseria meningitidis
atgattacattggccgtagatgccatgggcggcgaccaaggacttgccgttaccgtacctggcgcaaccgcattcctccaagcacaccccgatgtccgcctgattatgaccggcgacgaaacgcaactgcgccaagccctgaccgcggcaggcgcaccgatggaacgcatcgacatctgccataccacccaagttgtcggcatggatgaatcaccccagtccgccctaaagaacaaaaaagactcctccatgcgcgtcgccatcaaccaagttaaagaaggcaaagcccaagccgccgtatccgcaggcaacacaggcgcgctcatggcaaccgcacgtttcgtcctcaagaccatacccggcatcgaacgccccgccatcgccaaattcctcccgtccgacaccgaccatgttacccttgcactcgaccttggcgcgaacgtcgactgcacgcccgaacagctcgcccaatttgccgttatcggcagcgaactcgtccacgcactccatcctcaaaaaggacagccgcgcgtcgggctggtcaacgtcggcacggaagacatcaaaggtacggacaccgtcaaacaaacctacaaactgctgcaaaacagcaaactcaactttatcggcaacatcgaaagcaacggcatcctgtacggcgaagcagatgtcgtcgtcgccgacggctttgtcggcaacgtcatgctcaaaaccatcgaaggcgcggtcaaattcatgagcggagccatccgccgcgaattccaaagcaacctgttcaacaaacttgccgccattgccgccctgcccgccctcaaagggctgaaaaacaaactcgatccgcgcaaattcaacggggccatcctgctcgggctgcgcggcatcgtcatcaaaagccacggcggcacagacgaaaccggtttccgctacgcactcgaagaagcctaccacgaagccaagtccgccggcctttccaaaatcgaacaaggcgttgccgaacaactcgccgcactcgaaactgccaaagccgtccaaaacgaaaatgtcggcggtctgtaa

SEQ ID NO: 66957 - DNA, 1161 bp, Neisseria meningitidis
atgaaacgccaagccttagctgcaatgattgcttccttattcgcattagccgcctgcggcggcgaacctgccgcgcaagcccctgccgcttccgccgaagccgcaagctccgccgcacaaaccgccgccgaaacgcctgcaggcgaactgcccgtcatcgatgcagttaccacccacgctcctgaagtacctcccgcaatcgaccgcgactaccctgccaaagtccgcgtgaaaatggaaaccgtcgaaaaaaccatgaaaatggacgacggtgtggaataccgctactggacatttgacggcgacgttccgggtcgcatgatccgcgtacgcgaaggcgatacggttgaagtggaattttccaacaatccttcttctaccgttccgcacaacgtcgacttccacgccgcaaccggtcagggcggcggtgcagccgcgacctttaccgccccgggccgcacttccacattcagcttcaaagccctgcaaccgggtctgtacatctaccactgcgccgtcgcgccggtcggtatgcacatcgccaacggtatgtacggcctgattttggtcgagcctaaagaaggcctgccgaaagtggataaagagttctacatcgtccaaggcgacttctacaccaaaggcaaaaaaggcgcgcaaggtctgcaaccgttcgatatggacaaagccgttgccgaacagcctgaatacgtcgtattcaacggtcacgtaggtgctatcgccggcgacaacgccctgaaagccaaagcaggcgaaaccgtgcgtatgtacgtcggtaacggcggtccgaacctagtgtcttccttccacgtcatcggcgaaatcttcgacaaagtttatgtggaaggcggcaagctgattaacgaaaacgtacaaagcaccatcgttcctgccggcggttccgccatcgtcgaattcaaagtcgacatcccgggcagctacactttggtcgaccactccatcttccgcgcattcaacaaaggcgcgttgggccaattgaaagtagagggtgcggaaaaccctgaaatcatgactcaaaaattgagtgataccgcttacgccggtaacggtgcagctcctgctgcttccgctcccgcagcttctgccccggcagcctctgcatccgaaaaaagcgtttattaa

SEQ ID NO: 66958 - DNA, 879 bp, Neisseria meningitidis; identical to SEQ ID NO: 62835

SEQ ID NO: 66959 - DNA, 900 bp, Neisseria meningitidis
atgtggttcaagcagattagtttttatccgctcaacaaagaaaagctgcctgaggcagacgtacttgccgacaaacttgctgaagctgaatttacccattgccaaggcttagactggttcagcgaaggctttgccgcaccggtttcgttctctcccgaactcgttttccctgccgactttaccttgcgcgtcgccctgaaaaaagaagaaaaagtcctgcctgccggcgtcatccgcgatattttggaagagaaggtggcggaaatccaaaacaatgaagcccgcaatgtcggtcgcaaagaaaaacaagagcttaaagagcaaattacagacgacctgctgccccgagcgtttacccgcagcagccgtacagaagcggtgtttaacacccgccacggctacctgctcgtcaataacgcggcttccgccaaagcagaaaacatcctgaccaagctgcgcgaagctttgggcggtttggaagcctcgctgccgaataccaagcaatcgccctcttccttgatgaccggctggctgttgcaagggcattgcgaaggcggttttgaattagacagcgattgcgaactcaaaggtacgggcgatattgttcccgtcgtcaaagtatccaaacaagatttaaccgccgacgaagtggttcaacacgtcaaaaacggtaaaaccgttacccaactgggcttggtgtggcgcgaacaaattgcctttatcctcactcaagacttcacactcaagcgcatccaatacctcgacgtattgcaggaagaagccgaaagcaacggcgacgatgccgccagccttgccttcgcctcgcaaatcctgatggcggaatccgtcagcaccatgttggaagagctggtttcctatttaggcggctggcaagattga

SEQ ID NO: 66960 - DNA, 357 bp, Neisseria meningitidis
atgttgtccgcttactttcccgtctttgtctttatcctcgtcggcctcgcggccggcgtgctgtttatcctgctcggcacgattttaggcccgaaacgccactacgccgaaaaagacgcgccttacgaatgcggttttgaagcctttgaaaacgcaaggatgaagttcgacgtgcgctattacctcgtcgccatcctctttatcttgtttgatttggaggtcgcgtttatgttgccgtgggcagttgtgttcaaagatttgggcgcgtacggcttctggtctatgctggtgtttatcgtcgtcctgacggtaggctttgtttacgaatggaaaaaaggtgcgctggaatgggaatag

SEQ ID NO: 66961 - DNA, 771 bp, Neisseria meningitidis
atgaccgcgaccgaacacgacaacgacgatgcattcctgctgcggtacagccgccacatccttttggacgaaatcggcatcgaagggcagcagaaactttccgccgcgcatattttggtcgtcggctgcggcggtttgggtgccgccgccctgccctaccttgccgcttcgggtgtcggcacgctgaccatagccgattccgacacggtcgagctgcacaacctgcaacgccaagtcgcatttgacgagggcgatgtcggcaagcccaaagccgaagccttggcagaccgcctgaaacgcatcaaccataccgtcaacgtccgcgccgtcaacgaaaaactcgacggctgccgcctgaccggtttggttcaagccgccgacatcgttttagactgctgcgacaactacgccacgcggcaagccgtcaaccgtgcctgcgtgcaaacgaaaacaccgctggtttcaggggcggcggtacgctttgaagggcaacttgccgtgtaccgtcccgacttgcccgactcgccgtgttacgcctgcctgtttgacggcggatcggcttcagacggcatctgttccctcttcggcgtgttctcgccgctggtcggcatcatcggctgcacgcaggcggcggaagctctgaaaatcctgctggatgcgggcgaaccgtcgcacggcaggctggcggtttaccgtgccttggaagggggctggcaatatttcgacctgccgcacaaccccgaatgcccggtttgcggcgcggaacggtaa

SEQ ID NO: 66962 - DNA, 723 bp, Neisseria meningitidis
gtgtttcccgacaaatacaagttgagtttgaaagaaaatatttttttggcaaagaaagtattggttgcccaaattcacaacctcagccgttttgagaattgtcagacgaccttattgcagactgagcaaattatccatggcaaaaatgtagcctccgcgtcactggaagacatccaaaccatcttgaacctgaaacgtgcctatcaatatgtgatttcgcatatttcaaacggcgaaccggtcgatatttcactccttaaaaaaatcaacaacattgttgccaaggacgattctttggcacccggtgatttccgtaccggttcggtcggcgtaacgctattggacggttcccgtcatgccccgaatccagtgaaggaaattgaagtggcccgcgtgttacaaaatatcggactgcaaagcggttcgacgacggaggcagccgtccgttttatgctttattgtatgcggcagcaggttttttgggacggcaacaaacgaacggcaaccttatttgccaacggtctgatgatggcggggggctgcggcatcttggaaatctccgaaatgcagatgccgcaattcaatgaaaaactgtccgcattctatcgctccggcgacgataccgatatttccaagtttgtgtatcaaaattgtatatcgggcatagactatttcggcacggacgaagatatagatttccccgacccaccaaacatgggctaa

SEQ ID NO: 66963 - DNA, 2385 bp, Neisseria meningitidis
atggccgacaactacgtaatttggtttgaaaacctgcgtatgacagatgttgaacgcgtgggcggtaaaaacgcctcgctgggcgaaatgatcagtcagctgaccgaaaaaggcgttcgcgtccccggcggctttgccaccacggccgaagcctaccgcgcattcctcgcacacaacggtctgagcgaacgcatttccgccgcactggcaaaattggatgtcgaagacgttgccgaactggcacgcgtcggcaaagaaatccgccaatggattttggatacgcctttccccgaacagctcgatgccgaaatcgaagcggcatggaacaaaatggttgccgatgccggcggtgcggacatttccgttgccgtacgttcttccgcaactgccgaagacctgccggacgcatcattcgctggacaacaggaaaccttcttgaacatcaacggcttggataacgttaaagaagcgatgcaccatgtattcgcttccctgtataacgaccgtgccatttcttaccgtgtccacaaaggcttcgaacacgacatcgtcgccctttccgccggcgttcaacgcatggtgcgttccgacagcggcgcatccggtgtgatgttcaccctcgacaccgaatccggctacgatcaagtcgtctttgttacctcctcttacggtctgggcgaaaacgtcgtacaaggtgcggtcaacccggacgaattttatgtgttcaaacccacgctcaaagcgggcaagcccgccatcctgcgtaaaaccatgggttcaaaacacatcaaaatgatttttaccgacaaagcagaagccggtaaatccgtaaccaacgtcgatgtccccgaggaagaccgcaaccgcttctccattaccgacgaagaaattactgagttggcgcattacgcactgaccatcgaaaaacactacggccgcccgatggatatcgaatggggacgcgacggcttggacggcaaactctacatcctgcaagcccgtcccgaaaccgtaaaatcccaagaagagggcaaccgcaacctgcgccgcttcgccatcaacggcgaaaaaaccgtattatgcgaaggccgtgccatcggtcagaaagtcggacagggcaaagtgcgcctgattaaagatgcttccgagatggattccgtcgaagccggcgacgtactcgttaccgacatgaccgacccagattgggaaccggtgatgaaacgtgcttccgccatcgtgaccaaccgcggcggccgtacctgccacgccgccatcatcgcgcgcgaactgggcattcctgccgttgtcggctgcggcaatgcaaccgaattgctgaaaaacggtcaagaagttaccgtatcctgtgccgaaggcgataccggcttcatctactccggcctgctggacgtacaaattaccgatgttgctttggacaacatgcctaaagcacctgtaaaagtcatgatgaacgtcggcaatcccgaactcgcattcagcttcgccaacctgcccagcgaaggcatcggcttggcgcgtatggaatttatcatcaaccgccaaatcggtatccaccccaaagccttgttggaatttgacaaacaagacgacgaattaaaagcggaaattacccgccgtatcgccggttacgcgtcccctgtcgacttctacgtcgataaaatcgccgaaggcgtggcgacattggccgcatcggtttatccgcgtaaaaccatcgtccgtatgtccgacttcaaatccaacgaatacgccaacctggtcggcggcaacgtatacgaaccgcatgaagaaaacccgatgttgggcttccgtggtgcggcgcgttatgtcgccgacaacttcaaagactgtttcgccttggaatgcaaagccttgaaacgcgtccgcgatgaaatggggttgaccaacgttgaaatcatgattccgttcgtccgcactttgggcgaagccgaagccgttgtcaaagccctgaaagaaaacggcttggaacgcggcaaaaacggcctgcgcctgattatgatgtgcgagctgccgagcaacgcggtattggcggaacaattcctgcaatacttcgacggcttctccatcggctcgaacgacatgacccaactgaccctcggtctcgaccgcgacagcggcttggtatccgaatcgtttgacgaacgcaaccctgccgtcaaagtgatgctgcaccttgccatctccgcctgccgcaagcagaacaaatatgtcggcatctgcggtcaaggcccgtccgaccatctggacttcgccaaatggctggttgaggaaggcattgaaagcgtttccctgaacccggataccgtcatcgaaacttggctatatttggcgaatgaattgaacaaataa

SEQ ID NO: 66964 - DNA, 1269 bp, Neisseria meningitidis
atgtcgtctgaagcccttgcaaaagaaaccctcaatccgtttgaaatcgcgcgcaaacaggtcaaaaccgcctgcgaccggctgaaaaccgatccggccgtttatgaaatcctgaagagtccgacccgcgtgttggaagtcaatttccccgtcaaactcgacgacggcacggtcaaaaccttcacgggctaccgttcgcaacacaacaacgccgtcggcccctataaaggcggcgtgcgcttccatcccggagtgaatctggacgaagtcaaagccctgtcgatttggatgaccatcaaatgctgcgttgcgggtattccttacggcggcggcaaaggcggtattaccttggatccgcgcgattattccgaggcggaactggaacgcatcgctcgcgcttattccgaagccatttctccgctgattggcgagaaaatcgatattcccgcccccgatgtgaataccaacggcaaaattatgtcgtggatggtggatgcttatgaaaacgtggtgaaacattccgcgccgggcgtatttaccggaaaaccggttgagttcggcggctctttggcgcgtaccgaggctaccggttacggcgtgaacctcgccgccgtccaagctttggaaaaactgggcaaggacgtgaagggtgccacttacgccattcaaggtttcggtaatgtgggttaccacacaggttattacgcgcatcaatccggcgcgaaagttgttgcggtttctactgtcgatgttgccatttacaacgaaaacggcttggatatggaagctttgtttaaagagttccaagaaaaaggcttcatcaccaacgaagccggttacggcaaagaaattaccaacgccgaacttttggctttggatgtggacgtactcgccccttgcgcgctggaaaaccaactgacttccgaaaacgccggtaaagtccgcgcgaaaatcgtggtcgaaggcgcgaacggcccgactacgcccgaagccgacgttatcctgcgtcaaaacggcgtattggtcgtgcctgatattttggcgaactgcggcggcgtggtggtatcttattttgaatgggtacaaaacctgcaaggctattattgggagtttgacgaagttcaagagaaagaaaccgtcgtcctgcgacgcgcgttccgcgatatatggaacttggctcaagaatacgatgtcgatttgcgaaccgcgtcttacatgatgagtatccgccgtgttgaaaaagcgatgaagctgcgcggttggtattga

SEQ ID NO: 66965 - DNA, 798 bp, Neisseria meningitidis
atgcgcgcagtccccccgccccatatctccatcacaggcctaggttacctcggcctgccgctggcacaaaagttttaccaacacggcagccgcgtcgccgccataaaacgcagcctgacttcggacgacatcaacctgcccatacacctcgataccatcgacctcaatcaagacagcgcgtttcaaagcgcgaaccttgcccgagatacaagcttttggcggcaccatgccaacaaacccgtttggttctgcctcttgccgccatcatcgctgacacattacgccgataccgtcaaacaatgggcagaacttgcccgggcgtgcaacgtgcaacacctgattttcacaagcagtaccagcgtttacggcgatacagcgcgcgaatgcgacgaaatcgccctacccgatccgcaaaccgagtccgcccgccaaatcctcgccgccgaacaacacctgctcgacagcggcgttccgaacatcgacatcctgcggctgggcgggctttattgcgccgaacgccatcccgtcagccgccttgttcaaaagcaaaacatcccgggcggcaaccgccccatcaacatcgtccaccgtaatatcgccgtcgaaagcctgtttcagacggcatttaaccccggcggcaggcggctgaaaaacattatcgaaccgcgccacccgacacgacgcgaattctatacggaagaagccgccaaactcggcttgccggctcctgatttcgcacccgacgacagcatgggcaaaatcatccgtaccgtttgcgataacagcttaagcctgtaa

SEQ ID NO: 66966 - DNA, 1422 bp, Neisseria meningitidis
atgaccaccatctacaacacccttacccgccaaaaagaaccctttgcccccatcgaccctgaaaacgtgcgtatgtacgtttgcggcatgaccgtttacgactattgccacttaggccatgcccgtgtgatggttgtgttcgacatgattgcccgctggttgcgcgagtgcggttatccgctcacttatgtgcgcaacatcaccgacatcgacgacaaaatcattgcccgcgcggctgaaaacggcgagaccatcggcaaactgactgcgcgtttcattcaggctatgcacgaagatgccgatgctttgggtgtgttgcgtcccgatatcgagccgaaggcgacggaaaacatcccgcaaatgattgccatgattgaaaccctgattcaaaacggcaaggcatatcctgccgcaaatggcgacgtttactacgccgtgcgcgagtttgccgcttacggacaactgtcgggcaaatcgttggacgacctgcgcgcgggcgaacgcgtggaagtggacggtttcaaacgcgatccgcttgattttgtattgtggaaagcggcgaaagcaggcgaaccggcgtgggaaagcccgtggggcaacggccgtccgggttggcacattgaatgctctgccatgagtgaaaacctgttcggcgatacgttcgacattcacggcggcggcgcggatttgcagttccctcatcatgaaaatgaaatcgcccaaagcgtcggcgcgacggggcatacctgcggtcatcatcacgcgcaaacccaccacgggcaaagcatcgccagccacgtcaaatattggctgcacaacggctttatccgcgtggacggcgaaaaaatgtccaaatcactgggcaacttcttcaccatccgcgaagtgttgaaacaatacgaccccgaagtcgtgcgcttcttcatcctgcgcgcccactaccgcagcccgttgaactattccgacgcgcatttggacgacgcgaaaggcgcgttgacccgtctatacaccaccttgaaaaacacgcctgccgccgcgtttgatttgtctgaaaacgccaacgactacacccgccgcttctacgccgccatgaatgacgatttcggcacggtcgaagcggttgccgtgctgttcgaactggcaggagaagtgaacaaaaccaatgacgcacagctcgccggctgcctgaaagccttgggcggcatcatcggcctgctgcaacgcgacccgaccgagttcctgcaaggcagcgcagcttcagacggcctctccaacgaagaaatcgaagacttgatcgcccggcggaaacaggcgcgcgccgataaaaactgggcggaatccgaccgcatccgcgaccttctgaacgaacacaaaatcattttggaagacaacgccggcggcacgacttggcggcgcggttga

SEQ ID NO: 66967 - DNA, 1020 bp, Neisseria meningitidis
atgaaagtggacggcaaaatcacgccgattaccaatgagccgctgacctctgaaaaatgtatggaaatcgctttttcgattatgtccaccaaacaaatcgaagagttttcctccaccaacgaatgcaacttcgccatcagcctgcccgacaccagccgcttccgtgtcaatgcgatggtgcagcgcggcgcgacggcgttagtgttccgctccattaccagcaaaatcccgaattttgacagcctcaatctgccgcctgtcttgaaagacgtggtgatgaaaaaacgcggcctcgtgatttttgtcggcggtaccggttcgggcaaatccacctcgctcgccgcgatggttgaccaccgcaacgaaaattgccaagaccacatcatcaccatcgaagacccgatcgagtttgtccacgaacacaaaaactgcatcatcacccagcgcgaggtcggcgtggatacggaaaactggatggcggcgttgaaaaacacgctgcgtcaggcgccggatgtcatccttatcggcgaaatccgcgaccgcgaaacaatggactacgccattgcctttgccgaaacggggcatttgtgtatggcgacgctgcacgccaacagcaccaatcaggcactcgaccgcatcatcaactttttccccgaggagcggcgcgaacaattgctgacggatttgtcgctcaaccttcaggcgtttatttcgcaacgcctcgttccgcgagacggcggcaagggcagggtggcggcagtcgaggtgctgctcaattcgcccctgatttcggagttgattcacaacggcaacatccatgaaatcaaagaagtgatgaaaaaatccactaccctgggtatgcagactttcgatcaacacctttaccaattgtatgaaaaaggcgatatttccctgcaagaagcattgaaaaatgccgattccgcacacgatttgcgtttggcggtacagttgcgcagccgccgcgcgcaaagttccagccccgatttggaactgctctga

SEQ ID NO: 66968 - DNA, 453 bp, Neisseria meningitidis
atggcaaaaccgctcaaataccccgtttccgcactggtcgtcctttatagcggggacggcggcatcctgctcatcgaacgcacgcatccggaaggattttggcagtcggtaaccggcagcctcgaaccgggcgaaaccgtcgcccaaacggcaaggcgcgaagtttgggaagaaaccggcatcctgctggcggacgggcagcttcaagactggcacgacagcacggtttacgaaatctaccaccactggcggcaccgctatccaaaaggcgtgtttgaaaaccgcgaacacctcttctctgccgaaatcccgcgtgatacgcccatcgccctgcaacccgaagaacacgtctcctacggctggttcggcttggaagaagcggcggaaaaagtgttttccccgtccaacaggcgcgcgattctggaactgggcaggtttttgggcaaacggtaa

SEQ ID NO: 66969 - DNA, 1059 bp, Neisseria meningitidis
atgtcttcacgcaaaattatccacatcgacatggacgcattctacgcatcggtagagctgcgcgaacagccgcatttgaaagggcggccggtggtcgtcgcgtgggagggcgcgcgttcggtgatttgcgccgcatcgtatgaggcacggcagttcgggctgcattccgcgatgtcggtggcaacggcgaaaaggctgtgtccgcaagcggtgtatgtgccgccgcatttcgatttgtaccgtcaggtttccgcgcagattcacgccgtattcaggcgttataccgatttaatcgaacccttgtcgctggacgaagcctatcttgacgttacccgtaatttcaaaaacatcccttacgacagtgaagttgccaaagaaatccgtgccgccatttttgcggaaacgggtttgaccgcatccgcgggcatcgcgtcgaacaaatttctggcgaaaatcgcgtcggactggcgcaagccgaacgggcagtttgtgttgccgccgcacaaagtcatggcatttttggaaaccctgcctttgggcaaaatccccggcgtgggcaaggtaacgctgaaaaaaatgcagtcgctgggtatgcagacggcgggtgatttgcgccgtttcgagcgcggcgagctcttaaaccatttcggacgctacggctaccgcctctatgatttggcgcgcggtacggacgaacgccccgtcaaagccgaacgcgaacgcctccaaatctccacagaaatcaccctgcccgaagacctgccgctcgagcaggctgccggacacttgccccatcttgccgaagacttgtggcggcaaatcacgcgcaaaaacgtcgaagcccaaagtgtaacgctcaagctgaagacctacgatttccgcatcatcacgcgcacgctgacttattcctccgtattgcccgactgcgcctccctgcttcaggcggcgcaaatgttgatggcgcgcgtcccgccgcagacggaagacgcgttccgccttatcggtatcggcgtggggcatcttgtgccgaaaaaccagcagcaggatttgtgggcgtaa

SEQ ID NO: 66970 - DNA, 681 bp, Neisseria meningitidis
atgacttacaccatcgtccctatcgccaccgcccgatcgccctacaaacagaaattcggcatcgcccgccagcccggtttagtctccgccgcagaagtatgcatcgagctgaatcccgaatttaccgcagacagcgtgcgcgggctggaagatttcgattatgtgtggataagttttatttttcacggcgtattggatgaaggctgggcacaaatggtgcgcccgccacggctcggcggcaaacaaaaaatgggcgtattcgccacgcgcagcccccaccgccccaaccatctcggactatcactcttaaaactcaaccgcatcgaaaccggcaaacccgtccgcctttattgcagcggcgcagacctgctcgacggcacgccgattgtggacatcaagccttatatcccctttgtcgaatccaaacccgatgccgcatctggtttcgtcagcggcaaacccgtagagttggaagtcgtttggcaggaaaacatcggcgcggaaaatttatctgcaaacaccaaaaaccttatcagccaaagcattgcccaagatccgcgccccgcctatcagaatattcccgaacggatttatgtgatgaatattgcggattacgaaatcagatttcaaatcgaggaaaaccgtgcaaccgttattgatctttccccaaccccgctttaa

SEQ ID NO: 66971 - DNA, 279 bp, Neisseria meningitidis
atgcttgaaattgagattgtgtacgggctgcccgaccgacaggttttgaaaaccatgcagcttgccgagggaacaaccgtccgcgccgccgcactgcaaagcggtttggacggcatatttgaagatttaaacctgcattccgcgcctttgggcattttcggcaaagccgtcaaagacgacactccgctgcgcgacggcgaccgcatcgaagtgtaccgcccgctgttgatcgaccccaaagaagcgcgccgcaaacgcgttcaaaatcaagaagaataa

SEQ ID NO: 66972 - DNA, 1344 bp, Neisseria meningitidis
atgaaccaaaaccatactattttacaaaacctccccgtcggtcagaaagtcggcatcgccttctccggcggacttgatacctccgccgcgctgttgtggatgaaactcaaaggcgcgctgccttatgcctacactgccaacctcggccagcccgatgaagacgactacaacgccattcctaaaaaagcgatggaatacggtgcggaaaacgcccgcttaatcgactgccgcgcgcagttggcacacgaaggcatcgccgccatccaatgcggcgcattccacgtttccaccggcggcatcgcctatttcaacaccacgcctctgggccgcgccgtaaccggcacgatgcttgtttccgccatgaaagaagacgatgtgaatatttggggcgacggcagcacctacaaaggtaacgacatcgagcgtttctaccgctacggtttgctcaccaatcccgcgctgaaaatctacaaaccctggctcgaccaacaatttatcgacgaactcggcggccgccacgaaatgagcgaatttctgattgccaacggcttcaactacaaaatgtcggttgaaaaagcctactccaccgattccaatatgctcggcgcgacccacgaagccaaagacttggaatttttgaactcgggcatcaaaatcgttaagcccatcatgggcgttgccttctgggacgaaaacgtcgaagtcaaacccgaagaagtcagcgtacgctttgaagagggcgtgcccgtcgcattaaacggcaaagaatacgctgaccccgtcgaactcttcctcgaagccaaccgcatcggcggccgccacggcttaggcatgagcgaccaaatcgaaaaccgcatcatcgaagccaaatcgcgcggcatctacgaagccccgggcatggcgttgttccacatcgcctacgaacgcttggtaaccggcatccacaacgaggacaccatcgaacaataccgcatcaacggtctgcgcctcggccgcctgctctaccaaggccgctggttcgacagccaagccttgatgttgcgcgaaaccgcccaacgctgggtcgccaaagccgttaccggcgaagttaccctcgaactgcggcgcggcaacgactactcgattctgaacaccgaatcgcccaatctgacctaccaacctgaacgcctgagtatggaaaaagtcgaagacgctgcgttcactccgctcgaccgcatcggacagctcacgatgcgcaacctcgacatcaccgacacccgcgccaaactgggtatttattcgcaaagcggtttgctctcgctgggcgaaggttcggtattgccgcagttgggcaataagcaataa

SEQ ID NO: 66973 - DNA, 1059 bp, Neisseria meningitidis
atgcgccctttgaacgtgcagatcaggttgggcaaccttaggcacaattatcggattttgaaggaaatgcacggaggcaagctgttggcggtagtgaaggccgacgcatacggacacggtgcggtcagatgtgctttcgcgctggcagacttggcagacggctttgccgtggcgacaatcgacgagggaatcaggctgcgggagagtggcattacccatccgattgtccttttggaaggcgtatttgaagcatcggaatacgaagcggtcgaacaatactcactttggccggcagtcggaaaccaatggcagcttgaggctttgctggtccgccattggaaaaaacccgtcaaagtctggttgaaaatggattcgggaatgcaccgtaccggttttttccctcatgattacgcttcggcatatgcggcattgaagcagtcggaatatgtggacagtattgtcaaattctcgcatttctcctgtgcggacgaacccgaaagcggcatgacggaaatacagatggaagcattcgatttgggtacgaaagggctggaaggcgaagaaagccttgccaattcggcggctattttgaatatccccgaagcacgcagggactgggggcgcgccggtctggcgttatacggcatttccccgttcggaggaggcgatgacaggctgaagcccgtgatgaggctttccacccgtattttcggcgaacgcgttttacagccgcactcccctatcggttatggcgcaacattttataccagcaaatctacgcgcgtcggcctgattgcatgcggttatgcggacggttatccgcgccgcgccccaagcaattcccccgtcgccgtcgacggtaaattgacccgggtcatcggcagggtctctatggatatgatgaccatcgagctggacgcttcgcaagaaggtttgggacacgaggtcgaactgtggggcgatacggttaatatcaataccgttgccgaagcggccggaaccatcccttacgaattgatgtgcaatatcaaacgtgcaaaattcacttatatcgagtaa

SEQ ID NO: 66974 - DNA, 846 bp, Neisseria meningitidis
atgaatattgcggacggacggcaggcgtttcccgcacctgcaaaactgaatctcgatttgaggattaccggcaggcgggaagacggttatcacaatatcgaaagcatattctgcctgatagatttgcaggataccgtatatttgaaaccgagggacgacggcaaaatcatcctgcacaatcctgtcggcggaataccgcaggaagccgatttgagctaccgtgccgcatcgttgctgcaaaaatatgcgcgcaaccccgccggcgtggaaatatggctggacaaaaaaatcccgacaggggcgggtttgggcggcggaagctcggatgcggcaaccgttttgctggtgttgaaccgttggtggcagtgcggtctgacgcagcggcagctcattgattcgggcgcggctctgggggcggacgtaccgttttttattttcggcaaaaatgcgtttgcgcggggtataggcgacaggctggacgaaatggatattccgaaacagtggtatgtcatcgtcaaaccgcccgtccacgtttccactgcaaaaattttcacacacgaaggcttgacacgaaattccgcctcaagcataatgccgactttccaaaacctgcaaccgtttagaaatgatatgcaggcagttgtatttaaagaataccctgaagtttggaaagcctattccgagttgtcccgatatggatttgccttaatgacaggttctggtgcgtgtgtattcacggcgtgtcaagataggaatagcgcatacaatatataccgacaagtttcagatttgtacgaggcatatttggcagagggtctttcaaaacatccttggttgtccgtataa

SEQ ID NO: 66975 - DNA, 165 bp, Neisseria meningitidis
atgggacaggttgcgttttacgaaaagatgattgggctgtggtcggccaaaagccgcgaggcaagcgaacaggcagacttggcggcgtttgaatttgcggagggcgaactggccaattatcaggaaatgctgaaacggcacctgcaaaccaaaagtgtggaatag

SEQ ID NO: 66976 - DNA, 204 bp, Neisseria meningitidis; identical to SEQ ID NO: 36264

SEQ ID NO: 66977 - DNA, 117 bp, Neisseria meningitidis; identical to SEQ ID NO: 51210

SEQ ID NO: 66978 - DNA, 246 bp, Neisseria meningitidis
atgctcaaatccatcgaactcaattcacacatccgcaaccggcttgctgaatatctgaaaagccgcggtttggattttcagacggcaatgcaggaagaagaaggcaacaaagaaatcgccgccatcgtccacagcggtctgcccactctggtacgcaaactgtattccgaacaaaaaatgcagaagtttttttgggaaaagcgggatttgattgccgactacatcagccgccggatgcagggatag

SEQ ID NO: 66979 - DNA, 750 bp, Neisseria meningitidis; identical to SEQ ID NO: 42320

SEQ ID NO: 66980 - DNA, 561 bp, Neisseria meningitidis
atgaaaatactcgctttattaattgccgctacctgtgctttatctgcgtgtggcggccaagctgaagaacaaccggcatctgcccaacctcaagagcaggcacaatccgaattaaaaaccatgccggtaagctataccgactatcaatcagtagccaataaagggcttgccgaccaaaaaactggtctgacccttccagaacatgttgttcctgccgacaatgcggaagggaagaatctgctgcatgacttttcagacggcctcacattaaccgttgataccgataaagccgacaaaattactgccgtccgagtagtttggaatacagatgcagtgcctcaaaaagcggaaaaactgtccaaagccgccgcagccttgattgcggcaaccgccccgggagaccgcacactgctgcgtgataccggcgaccaaatcaaaatggcaattgacagccataatgcgcaaaaagagccaacccgagaatgggcgcgtggtgggattgcttataaagtcactgttactaatttgccgagcgtggttttgacagcaaaagctgaataa

SEQ ID NO: 66981 - DNA, 933 bp, Neisseria meningitidis; identical to SEQ ID NO: 36892

SEQ ID NO: 66982 - DNA, 1974 bp, Neisseria meningitidis
atgcaccccatcgaaacccccgacaagaccttccacgacggcgacggcgtgtccgaattgggcaccatcctacccgcgtggtggctcaaccaagtgcaatccgagctgctggccgtgctgactgcggccggtatccagccggataagtcgcagcctaatcaattactggcagcactaaataggctggctgtagttatcaccggcgaccaaaccgtcaacggccaaaaaacctttaccgcccaaacccagttcccaagcggcattcacctgtccgccaaccagacgaactggaacggcggccacaaagcctacatcggcgcggatgccgacaacgcccacatcgtcttcggcgacgacaccctccgcctgcacggcgcaaacaaccgcatttcctacaacaaccacgacatcttccacaaagccaacaaaccgcgttttgccgaagacatcgaaggtaagccgaacacactgtccggatacggcatcggcaatttcaaagtcgaaaccttccggggcgatttgaacaccctcaaaacagacggcatctattccctgccgacggcgggcggcagctccaacctgcccgttgaaaacaccgcctgccacatccaagtcatagcaggcacgaaacacggctggtgcaggcagttgggttatcccgcctacacgtccgacgtgtacgaacgccaccaaacgagcagcgcaaacgacaactggtccgcatggaaaaaactcaattcggacggcatccccgtcggcgcgatcgtatcctttcccaaagccgtacaaaaccccgcaggctatctcaaagccaacggcacgacctttgcacaaaacaccttccccgacctctaccgcgccctgggcaacagcaaccgcctgcccgatttaagccgtaccgacatcggcatgaccgcgtggtttccgtccgaccaaatcccgaccggctggctggcgtttgacgacatccgcacgcgcgtagccgaaaccgcttatcccgagctgtaccgtctgctgaccggaaaatacggcagcatccaaaacgtcccgcaggcggaagaccgctttatccgcaacgcgggcaacagcttggcagtcggaacgaagcaggaagacgaaatcaaacggcacgtccacaaagtattttcacactggacaaaccacacagacgcggcagccctcggttacgaagaccacaacgaaaggcagagaagcgcgctcgtatcgacttggacggacggcgatttaaacgacaacggctttttaaccccgcgcctggacagcaaaatggcgacaggcggcgacgaaaaccgccccaaagccctggttttaaaactgtgcatcaaagccgccgacaccttgggcgaagccgtgttttggataaagtcccacggcgaaaccatcaacgccggcgcgctggacgcgggcacgctggcgcaaggtttgcaagacaaagccgaccgcgaccacacccacaccgccgcccaaatccaagggctggacgaaaaaatcagcaccgccgttgccgcgcaattcacacgccaaaccatcggcggcgtggatattgtcagattccccgacggcacaatgatacagaccggcagttacaggtttacaagaagcggcggccccatagaaaacgaagtcgtcttccccgtcgcctttgccgacggcaacgtcaaatgcttcgtatccgaacgccattcgggacgcgttaccggcgatcgaaggcaacacaactggctgtttatccgcgcaaaaaaccacgccgccgccattattaccaactggtacgaaggcagttgcgactggatggccatcggcaaagccgcctcgggaaacgccgccagctccccgataggccccgaaatacctgaaaccaacgaagaaccgcaaagagagagtggaagaacatcaaccggaccccgaaaccgccgccaccgagacggcttgctcgaggcactgcaagactag

SEQ ID NO: 66983 - DNA, 525 bp, Neisseria meningitidis
atgaatatgaaaaaattgatttccgcaatttgtgtttcaattgttttatcagcctgcaaccaacaatcaaaaacggcacaagccgaagaacctgtccaaagtatccaggctgctgattgtaccgccccaatggacatcacagttgaacaatatctcatcaatttggagcaagcatttaaaactcagaacgtctcaacaaaaatccataataaaaatattgtcaagaccgattgtggttatgaccttactttggtaatggattttggggcgattgcgctcaaactggacgagcagcaaaaaattagagctatctcagtaggctacattttaaaaaccgacggagagaaaggacaaaatctagtcaataatgccataaatggattacacagtattcaggcagttctgtctttaactaccacagacaaattgggcgaatcggaagcaggaaaacaacttcgtcaaagaatccaatcagacaggagcaacagcgcaaaaagacgttccggcagatggtattttatatag

SEQ ID NO: 66984 - DNA, 378 bp, Neisseria meningitidis
atgagcgacgctacctataccggcgcggtgattatggaggtgaacggccgcgatatcgagattgtgagcatcaagccgcaaaccactacaggccgcaagccggtcaaaacgatgaaccgcaacggccgagtcaacggttattgtgacggcgtaaccgaacacaaattaagcgttaccgccgccattccgatcgacggtacggaaatcgactgggacaacatcaccaaggcgaaaatcacgatttaccccatcaacgacgaaggtcgccgcacttcctacctcgactgctttaccgtcgattccggcgagcaatatgaagtcgataacgaggcacgcatcgacattgagatgattgctttgcacaaaatcaaggagtaa

SEQ ID NO: 66985 - DNA, 939 bp, Neisseria meningitidis
atggatgcctaccccgaagccgaagccccgccgcaaagcatcgtcgagctggttcccgtattgattgccgttaccgacggcggcctgcgggtattaaccgtcgcccaaggcacactcctgcccaacggcccgctctcccctctgcgcaattccctgcaggcgggcgtgaagctgtgggttgccaagcagacttcgcagcctatgggctatgtggaacagctttacacctttgtcgatacccaccgccgcaacgaacacggcatgcccgtcttgtacgtcagctacttggggctggtgcgcgaggcagccgacagcatcctgcatcccgacgcgaaatggcaggactgctacgactatttcccgtgggaagacttgcgcaccgacggcggacagcgcgacgccgtcgtcggccgactgcgcatttgggcaaactcggcggacacggaggaagtgcgtcaaatgcggctcaagcgcattcatttgtgttggggggtcgaaccggaaaactggtcggaagaatacgttttgcaacgctatgaaatgctgtatgaaagcggcctgatagtggaagccgccgagccgcaggcaaacttcgatttcgcgctcacagggcagcccatgcgccacgaccaccgccgcgtattggcgaccgccctgtcccgcctgcgcgccaaaatcaaataccgccccgtgattttcgaactgatgccgcccgaattcacgttgctgcaactgcaaaacagcgtcgaagccatcagcggcagattgctgcacaagcaaaacttccgccgccagattcagcagcaaaaccttatcgagccgtcggataccggcgtatcgggcagcaaaggccgtcccgcgcagctttgccgcttccgcgacgacgtcctgcccgacaggctgatttcggacatcggattgccgctgggcagccgttag

SEQ ID NO: 66986 - DNA, 2262 bp, Neisseria meningitidis
atgttacaaatcgaaatcgacggcaaacaagtatctgtggagcagggcgcgacggtgattgaagccgcgcacaagctcggtacttatattccgcatttctgttaccacaaaaaactttccatcgccgccaactgccgtatgtgtctggtgaacgtagaaaaagccccaaaacccctgcctgcctgtgccacgccggttacagacggcatgattgtgcgtacgcattcggcaaaagcccgagaggcgcaggaaggcgtgatggagttcctgctcatcaaccatccgcttgattgtccgacctgcgaccaaggcggcgaatgccagttgcaggatttggcggtgggctacggcaaaaccaccagccgctacaccgaagaaaaacgttccgtcgtcggcaaagacatgggtcctttggtttccgccgaggaaatgagccgttgtatccactgtacccgttgcgtccgtttcactgaagaaatcgccggcgtgcaagaaatcgccatggccaatcgcggcgaacactccgaaatcatgccctttatcggcaaagcggtggaaactgaactgtcgggcaacgtcatcgatttgtgtcctgttggcgcattgaccagcaaaccgttccgcttcaacgcgcgtacttgggaattgaatcgccgcaaatccgtttccgctcatgacgctttgggcagcaacctgattgtacaaaccaaagaccataccgtccgccgcgtgttgccgttggaaaacgaagccatcaacgaatgctggctgtccgaccgcgaccgttttgcctacgaaggcctgtatcacgaaagccgtctgaaaaacccgaaaatcaaacagggcggcgagtggatggacgtggattggaaaaccgcgttggaatatgtccgcagcgcgattgaatgtatcgccaaagacggcaaccaaaaccaagtcggcgtttgggccaatccgatgaatacggttgaagagctgtatctggccaaaaaatttgccgacggcttgggtgttaaaaactttgccacccgtttgcgccaacaagacaaacgtctttcagacggccttaaaggtgcgcaatggttgggacaaagcattgaatctttggctgacaacgatgccgtattggtagtcggcgcgaacttgcgcaaagagcagccgctcctgaccgcccgcctgcgccgcgccgccaaagaccgtatggcattgagcgtattggccggcagtaaagaagaattgtttatgccgcttctgtctcaagaagccgcacatcccgacgagtgggcaggccgtctgaaaaacctgtctgccaatgcggaacacaccgttaccgccagcctgaaaaacgctgaaaaagcagcggtgattttgggtgcggaagtacaaaaccatcctgattacgccgccatttatgccgctgcgcaagagctggcagacgcgaccggcgcagtgctgggcattttgccgcaagccgccaacagcgttggtgcggatgttttgaatgtaaactccggcgagagtgttgtcgaaatggcaaacgcgccgaaacaggcagtcttgctgctcaacgtcgagcctgaaattgatacggttgacggtgcaaaagccgtagccgcgttgaaacaggcaaaaagcgtgatggcgtttacaccgtttgtcagcgaaacgctgctggacgtgtgcgacgtgttgttgccgattgcgccgtttaccgaaacctcaggcagcttcatcaatatggaaggccgtctgcaatctttccacggcgtggtacaaggcttcggcgattcgcgtccgatgtggaaagtgttgcgcgtattgggcaatctgtttgacctgaaaggttttgaataccacgataccgctgcgattttgaaagacgcgctggatgcagaaagcctgtcgtccaaactggacaaccgcagtacatggacaggggagggcgttcagacggcatcagaccgcctcgtccgtgtcggcggcgtcggtatttatcacaccgatgccatcgtacgccgttccgcaccgttgcaagaaaccagccatgccgccgtgcctgccgcgcgtgtaaatccgaacacattggcacgcttgggcctgcaagacggacaaaccgctgttgccaaacaaaacggcgcaagcgtatcggttgccgtcaaagccgatgccggtttgcctgaaaacgtggtgcatctgtcgctgcataccgaaaatgccgcgctgggtgcgttgatggacactattgaactggcgggagcttga

SEQ ID NO: 66987 - DNA, 282 bp, Neisseria meningitidis; identical to SEQ ID NO: 49862

SEQ ID NO: 66988 - DNA, 2595 bp, Neisseria meningitidis
atgtccaaatccgccgtttccccaatgatgcagcaatacctcggcatcaaagcgcaacataccgacaaactggtgttttaccgtatgggcgatttttacgagatgtttttcgacgatgcggtagaagcggcaaaacttttggatattaccctgaccacgcgcggacaggtggatggcgagccggtcaaaatggcaggcgtgccgtttcacgccgccgaacaatatctggcgcgcctggtcaagttgggcaaaagcgtggcgatttgcgaacaggtcggcgaagtcggcgcgggcaaagggcctgtggagcgcaaagtcgtgcgcatcgtaacgcccggcacgctgaccgattccgcattgctggaagacaaggaaaccaaccgtatcgttgccgtgtcccccgacaaaaaatacatcggtttggcgtgggcatcgctgcaaagcggcgaattcaaaaccaagctgacaactgtggataaattggacgacgaactggcgcgcctgcaggcggcggaaattctgttgccggacagtaaaaacgcaccgcaacttcagacggcatcgggtgttacgcgcctgaacgcgtggcagtttgccgccgacgcgggggaaaaactgctgacggaatatttcggctgccaggatttgcgcggcttcggtttggacggcaaagaacacgccgttgcgattggcgcggcaggtgcgctgttgaactatatccgcctgacgcaaaacctgatgccgcaacatttggacggcctgtcgctcgaaaccgacagccaatatatcggcatggacgccgccacgcgccgcaatctcgaaatcacgcaaaccctctccggcaaaaaatcgccgaccctgatgtccacgctcgacctttgcgctacccatatgggcagccgcctcttggctctctggctgcaccaccctttacgcaaccgcgcccacatccgagcgcgccaagaagccgttgccgcgctggaaagccaatacaaacccctccaatgccgtctgaaaaacattgcggacattgaacgcattgctgcccgcatcgccgtcggcaacgcccgcccgcgcgatttggcatctttacgcgacagtctgttcgagttggcacaaatcgacttgtccgcaaacggcagcagcctgttggaaaccctcaaagccgttttcccggaaaacctatccacagccgaacagctccgccaagccattttgcccgaaccttccgtctggctgaaagacggcaatgtcatcaaccacggttttcatcccgaactggacgaattgcgccgcattcaaaaccatggcgacgaatttttgctggatttggaagccaaggaacgcgaacgtaccggtttgtccacactcaaagtcgagttcaaccgcgttcacggcttttacattgaattgtccaaaacccaagccgaacaagcacctgccgactaccaacgccggcaaaccctcaaaaacgccgaacgcttcatcacgccggagttgaaagcctttgaagacaaagtgctgactgctcaagagcaagccctcgccttagaaaaacaactctttgacggcgtattgaaaaaccttcagacgacattgccgcagcttcaaaaagccgccaaagccgccgccgcgctggacgtattgtccacattttcagccttggcaaaagagcggaacttcgcccgccccgagtttgccgactatccggttatccacatcgaaaacggccgccatcccgttgtcgaacagcaggtacgccacttcaccgccaaccacaccgaccttgaccacaaacaccgcctcatgctgctcaccggccccaatatgggcggcaaatccacctacatgcgccaagtcgcgctgattgttttattggcacacaccggctgttttgtgcctgccgatgccgccacaatcgggcccttcgatcaaatcttcacccgcatcggcgcatcggacgacctcgcctccaaccgctccactttcatggtcgaaatgagcgaaaccgcctacatcctgcatcacgccaccgaacaaagccttgttttaatggacgaagtcggacgtggtacttccactttcgacggcctcgccctcgcgcacgccgttgctgaacacctgctgcaaaaaaacaaatccttcagcctgtttgccacccactatttcgagctgacctacctgcccgaagcccacgccgccgccgtcaatatgcacctttccgcgctcgaacagggacaggacatcgttttcctgcaccaaatccaaccgggtcccgccggtaaaagctacggcattgccgtcgccaaactcgccggcctgcctgtacgcgcattgaaatccgcccaaaagcatttgaacgaactggaaaaccaagccgccgcgaaccgtccccaactggatattttcagtaccatgccgtctgaaaaaggagatgaaccgaatgtggacagctttgtggacaaagcagaggaaaaacattttgaaggtatattggcagcagccctggagaaactcgatcccgacagcctgaccccgcgcgaagcattgtcagaactgtaccgtctgaaagatttgtgcaaatccgtatcttaa

SEQ ID NO: 66989 - DNA, 843 bp, Neisseria meningitidis; identical to SEQ ID NO: 37032

SEQ ID NO: 66990 - DNA, 963 bp, Neisseria meningitidis; identical to SEQ ID NO: 59038

SEQ ID NO: 66991 - DNA, 828 bp, Neisseria meningitidis
atgcaaaaccacgttatcagcttggcttccgccgcagaacgcagggcgcacattgccgataccttcggcgcgcacggcatcccgtttcagtttttcgacgcactgatgccgtctgaaaggctggaacaggcaatggcggaactcgtacccggcttgtcggcgcatccttatttgagcggagtggaaaaagcctgctttatgagccacgccgtattgtggaaacaggcattggacgaaggtctgccgtatatcgccgtatttgaagatgatgtcttgctcggcgaaggcgcggagaaattccttgccgaagacgcttggctgcaagaacgctttgaccccgattccgcctttatcgtccgcttggaaacgatgtttatgcacgtcctgacctcgccctccggcgtggcggactactgcgggcgcgccttcccgctgttggaaagcgaacactgggggacggcgggctatatcatttcccgaaaagcgatgcggtttttcctggacaggtttgccgccctgccgcccgaagggctgcaccccgtcgatctgatgatgttcagcgattttttcgacagggaaggaatgccggtttgccagctcgatcccgccttgtgcgcccaagagctgcattatgccaagtttcacgaccaaaacagcgcattgggcagcctgatcgaacacgaccgcctcctgaaccgcaaacagcaatggcgcgattcccccgccaacacattcaaacgccgcctgatccgcgccttgaccaaaatcagcagggaaagggaaaaacgccggcaaaggcgcgaacagttcattgtgcctttccaataa

SEQ ID NO: 66992 - DNA, 3216 bp, Neisseria meningitidis
atgcccaaacgtaccgacctaaaatccatccttatcatcggcgccggccctatcgttatcggtcaggcctgcgaatttgactattcgggcgcacaggcctgcaaggctttgcgtgaagaaggctataaagtcattctggtgaattccaaccccgccacgattatgaccgaccctgaaatggcggatgttacctacatcgagccgattatgtggcagacggtggagaagattatcgccaaagagcggcctgatgcgattctgcccacgatgggtggtcagaccgcgctgaactgtgcgctggatttggcgcgcaacggcgtgctggcgaaatacaatgtcgagctgatcggcgcgaccgaagacgccatcgacaaagcagaagaccgcggccgctttaaggaggcgatggagaaaatcggcctctcctgcccgaaatcttttgtctgccacacgatgaacgaagctttggcggcgcaagaacaggtcggcttccctaccctgattcgtccttctttcaccatgggcggttcgggcggcggcattgcctacaataaagacgagtttttggcgatttgcgaacgcggtttcgatgcgtcgcccacgcacgagctgttgattgagcagtccgttctcggctggaaagagtacgagatggaagtggtgcgcgataagaacgacaactgcatcatcatctgctcgattgaaaacttcgacccgatgggcgtgcatacaggcgactcgattacggttgcgccggcgcaaacattgaccgacaaagaataccaaatcatgcgtaattcttcgttggcagtgttgcgcgaaatcggcgtggataccggcggttcaaacgttcagtttgcggtgaaccctgaaaacggcgagatgattgtcattgagatgaacccgcgcgtgagccgttcttccgcgttggcatctaaagcaaccggcttcccgattgcgaaggtggcggcgaaactggcggtcggctttaagctggacgagttgcgcaacgacatcaccggcggcaaaacccccgcgtcattcgagccgtccatcgactatgtggtaaccaaaatcccgcgttttgcgtttgaaaaattccctgccgcagacgaccgcctgaccacgcagatgaaatccgtgggcgaagtgatggcgatgggccgcacgattcaggaaagcttccaaaaagccctgcgcggcttggaaacaggcttgtgcggcttcaatccgagaagctccgacaaagcggaaatccgccgcgaactggcaaaccccggccccgaacgtatgctgtttgtggcagacgcgttccgcgccggcttcacgctggaagaaatccacgaaatctgcgccatcgacccttggttcctggcgcaaatcgaagacttgatgaaggaagaaaaagcggtttcagacggcattttgagtgatttggatttcgccgccctacgccgtctgaaacgcaaaggcttctccgacaaacgtttggcacaattgttgaacgtaagcgaaaaagaagtgcgcgaacaccgctacgcgctgaagctgcatccggtttacaaacgcgttgacacctgcgccgccgagttcgccaccgaaaccgcctatctttactccacttacgaagaagaatgcgaatcccgtccttccgaccgtaaaaaagtgatgattctcggcggcggcccgaaccgcatcggtcagggcatcgagtttgactactgctgcgttcacgccgcactcgccctgcgcgaatcgggctttgaaacgattatggtgaactgcaacccagaaaccgtgtccaccgacttcgacaccagcgaccgcctctatttcgagccgctgacattggaagacgtgttggaaatcgtccgcaccgaaaacccgtggggcgtgattgtgcattacggcggtcaaaccccgctgaaactcgccaacgcgttggttgaaaacggcgtaaacatcatcggcacgtccgccgacagcatcgatgccgccgaagaccgcgaacgcttccaaaaagtgttgaacgacttaggcctgcgccaaccgcccaaccgcatcgcccacaacgaagaagaagccctcgtcaaagccgaagaaatcggttatccgctggtcgtgcgcccgtcttacgtcctcggcggacgcgcgatgcagattgttcactctgccgaagagttgcaaaaatacatgcgcgaagccgtgcaggtttccgaagacagccccgtgttgctcgatttcttcctcaacaacgcgattgaagtcgatgtggactgcgtttcagacggcaaagacgtggttatcggcggcatcatgcagcacgtcgaacaggcgggcatccactccggcgactccggctgctcgctgccgccctactccttaagcgaagaaatccaagacgaaatccgccgccaaaccaaagcgatggcgtacgcgctgggcgtggtcggactgatgaacgtgcagtttgccgtacaagacggcgtggtgttcgtattggaagtgaacccgcgcgccagccgcaccgtgcccttcgtctccaaagccaccggcgtgccgctcgccaaagtcggcgcgcgctgcatggcaggcatttccctgaaagaacaaggcgtggaaaaagaagtcgtccccgatttctatgccgttaaagaggccgtgttccccttcatcaaattcccgggcgtggatacgattttgggaccggaaatgcgctccaccggcgaagtgatgggcgtgggcgcaagcttcggcgaagcctactacaaagcccaactcggcgcaggcgaacgcctcaacccgaccggcaaaatcttcctctccgtgcgcgaagaagacaaagaacgcgtcattaaaaccgctaaaaacttccaagttttaggctacggcatctgcgccacgcgcggcacggcgcaatacctgaccgaacacgggctgattgtacaaaccatcaataaagtccccgaaggccgcccgcacatcggcgacgcgctgaaaaacggcgaaatcgcactggtcgtgaataccgtttccagcgatccgcaatccgtgtccgacagccacatcatccgccaaagcgcattgcagcaacgtgtgccgcaatacaccactactgcgggcggcgaagcgatgagcgaaggcgcgaaaagccgcgaccacttgggcgtgtacagcgttcaagaactgcacgggcgtttgaaaaaccgcagctga

SEQ ID NO: 66993 - DNA, 375 bp, Neisseria meningitidis
atgatagtccttcacggcatcccaaattgcgatacggtcaaaaaagccaaaaacaggcttgccgaatatggtatggaatttgaatttcgggattttaaaaaacaggtgccttccgaagcggaaatctgctcgtggctggaacaagtgcctttggcaaccctgctcaacaaacgcgggacaagctggcgcaaactcgatgccgaaacacagcaaaaagtgctgtcctcgacggcggaggccgtcaaactgatgtccgaaatgccgagcctgatcaagcgtcccgtattggagtgcggcggcaaggtttacgccggcttcagcgaagaaacctacgacggcatcttcaaccggcaagccccgtgcagacagggataa

SEQ ID NO: 66994 - DNA, 186 bp, Neisseria meningitidis; identical to SEQ ID NO: 39217

SEQ ID NO: 66995 - DNA, 687 bp, Neisseria meningitidis
atgtacgcatttaccgacgcacagcaacagaaggcactcttccggctggtgctttttcatatccttatcatcgccgccagcaactatctggtgcagttccccttccaaattttcggcatccacaccacttggggcgcattttcctttcccttcatcttccttgccaccgacctgaccgtccgcattttcggttcgcacttggcacggcggattatcttttgggtgatgttccccgcccttttgctttcctatatcttttccgttttgttccacgacggcggttggacgggcttgggcgcgctgtcccaattcaacacctttgtcggacgcatcgcgctggcaagttttgccgcctacgcgctcggacaaatcctcgatattttcgtattcgacaaattacgccgtctgaaagcgtggtgggttgccccgactgcatcaaccgtcatcggcaacgccttagatacgttggtatttttcgccgttgccttctacgcaagcagcgatggatttatggcggcaaactggcagggcatcgcttttgtcgattacctgttcaaactcaccgtctgcggtctgtttttcctgcccgcctacggcgtgattctgaatctgctgacgaaaaaactgacgaccctgcaaaccaaacaggcgcaagaccgccccgcgccctcgctgcaaaatccgtaa

SEQ ID NO: 66996 - DNA, 1410 bp, Neisseria meningitidis
atgacagcacaaaccctctacgacaaactttggaacagccacgtcgtccgcgaagaagaagacggcaccgtcctgctctacatcgaccgccatttggtgcacgaagttaccagccctcaggcatttgaaggcttgaaaatggcggggcgcaagctgtggcgcatcgacagcgtcgtctccaccgccgaccacaacaccccgaccggcgattgggacaaaggcatccaagacccgatttccaagctgcaagtcgatactttggacaaaaacattaaagagtttggcgcactcgcctattttccgtttatggacaaaggtcagggcatcgtacacgttatgggccccgaacaaggcgcgaccctgcccggtatgaccgtcgtctgcggcgactcgcacacttccacccacggcgcattcggcgcactggcgcacggcatcggcacttccgaagtcgagcacacgatggcgacccagtgcattaccgcgaaaaaatccaaatccatgctgattgccgttgacggcaaattaaaagcgggcgttaccgccaaagacgtggcactttacatcatcgggcaaatcggcacggcgggcggtacaggctacgccgtcgagtttggcggcgaagccatccgcagcctttctatggaaggccgcatgactttatgcaatatggcgatcgaagccggtgcgcgctcaggcatggttgccgtcgaccaaaccaccatcgactatgtaaaagataaacccttcgcacccgaaggcgaagcgtgggacaaagccgtcgagtactggcgcacgctggtgtctgacgaaggtgcggtattcgacaaagaataccgtttcaacgccgaagacatcgaaccgcaagtcacttggggtacctcgcctgaaatggttttagacatcagcagcaaagtgccgaatcctgccgaagaaaccgatccggtcaaacgcagcggtatggaacgcgcccttgaatacatgggcttggaagccggtacgccattaaacgaaatccccgtcgacatcgtattcatcggctcttgcaccaacagccgcatcgaagacttgcgcgaagccgccgccatcgccaaagaccgcaaaaaagccgccaacgtacagcgcgtgttaatcgtccccggctccggtttggttaaagaacaagccgaaaaagaaggcttggacaaaattttcatcgaagccggttttgaatggcgcgaaccgggctgttcgatgtgtctcgccatgaacgccgaccgcctgaccccggggcaacgctgcgcctccacctccaaccgcaattttgaaggccgtcaaggcaacggcggacgtacccacctcgtcagccccgctatggcagccgccgccgccgttaccggccgctttaccgacatccgcatgatggcgtaa

SEQ ID NO: 66997 - DNA, 1185 bp, Neisseria meningitidis
atgacaccacaagtcctgaccatattaggcagtaccggcagcataggcgaaagcacgctggacgttgtctcccgccaccccgaaaaattccgcgtattcgcgctggcagggcataagcaggtcgagaaactggcggtgcaatgccggacgttccgccccgaatatgccgtcgttgccgatgccgaacacgccgcccggcttgaagctttgttgaaaggcgacggcacggcgacgcaggttttacacggcgcgcaggcattggttgacgttgcctctgccgacgaagtcagcggtgtcatgtgcgccatcgtcggggcggtggggctgccttccgcgctcgcagcggcgcaaaaaggcaaaaccatttatctggcgaacaaagagacgctggtggtttccggcgcgttgtttatggaaaccgcccgtgcaaacggcgcggcagtgctgcccgtcgacagcgaacacaacgccgttttccaagttttgccgcgcgattacgccggccgtctgaacgaacacggcatcgcttcgattatcctgaccgcttccggcggcccgtttctgaccgccgatttaaacacgttcgacagcattacgcccgaccaagcggtcaaacaccccaattggcgtatgggacgcaaaatctccgtcgattccgccaccatgatgaacaaaggtttggagctgattgaagcgcattggctgttcaactgtccgcccgacaaactcgaagtcgtcatccatccgcaatccgtgatacacagcatggtgcgctaccgcgacggctccgtgttggcgcaactgggcaatcccgatatgcgaacgcccatcgcttattgtttgggtttgcccgagcgcatcgattcgggtgtcggcgacctggatttcgacgcattgtccgcgctgaccttccaaaagcccgactttgaccgcttcccctgcctgaagctcgcctatgaagccatgaacgcaggcggagccgcgccctgcgtattgaacgccaccaacgaaaccgccgtcgccgcctttttggacggacagattaagtttaccgacattgccaaaaccgtcgcccattgtctcgcacaagacttttcagacggcataggcgatataggggggctcttggcgcaagatgcccagacacgcgcacaagcgcgggcatttatcggcacactgcgctga

SEQ ID NO: 66998 - DNA, 492 bp, Neisseria meningitidis
atgcgacatatcttatctgttctgatcgaaaacgaatcaggtgcgatgagccgcgtggtcggtttgttctctgcacgcgattacaatatcgattctttggcggttgcgccgaccgaagacaaaaccctgtcccgtatgaccatcgttacacacggcgacgagcaggttatcgaacaaatcaccaagcaactcaataaattgattgaagtgattaaagtggtcgatttgaatgaaagccgttttgtcgaacgcgaactgatgttggtaaaagtccgtgccgccggcaaagaccgcgacgaatttttacgcttgaccgaaatctaccggggcagcatcatcgacgtaaccgaccgcagctatacgattgaaattaccggctcgaccgacaagctggattcctttttggaaacggtcggacgcgcccaaattttggaaaccgtacgtacaggcgcggccggcatcggtcgcggtgagcgtattttgaaaatttaa

SEQ ID NO: 66999 - DNA, 783 bp, Neisseria meningitidis
atgaccgacatcctcaataaaatccttgccgccaaagcacaggaagttgccgcccaaaaagccgccgtttcccccgaacacatccgcacgcttgccgcaaaagccgcgcccgtccgcagctttatcggttcgatacgcggcaaacaccgcctaaacctgcccgccgtcattgccgaaatcaaaaaggcaagcccgagcaaaggcctgatccgtccggacttccgaccggccgagattgcccgcgcctatgaaaacgccggagcggcgtgtttgtccgtactgaccgacgaaccctatttccaaggttcgccagaatacctcaaacaggcgcgcgaagccgtatcgctgcccgtgctgcgcaaagacttcatcatcgacgaatatcaggtttatcaggcgcgcgcatggggggcggatgccgtcctgctgattgccgcagcactggaacaggaacaattggaacgctttgaagcggtggcgcacgaattgggcatgaccgtcctgctcgagctgcacgacgaaaccgaattggaaaaatgccgcaacctgaccacgccgttgtggggtgtaaacaaccgcaacctgaggacttttgaagtctccctcgaccaaaccctgtcgctgctgcccgcgctggaaggcaaaaccgtcgttaccgaaagcggcattacgggtaaggcggatgtggaatttatgcgggcgcgcggcgtgcacaccttcctgatcggcgaaacgttcatgcgtgccgacgatattgaggcggaagtgggcaaactcttctaa

SEQ ID NO: 67000 - DNA, 606 bp, Neisseria meningitidis; identical to SEQ ID NO: 36469

SEQ ID NO: 67001 - DNA, 1296 bp, Neisseria meningitidis
atggcacaaaaaatccaatccgtcaaaggcatgaacgaccttctgcctgtcgagcaaaaagatttcaaactgacggctgcgttttggcaggcgtttgaagatacggtcggccgctggacacgcgcttacggttatcggcaaatccgtacgccgattgtcgagcaaaccggtttgtttgtccgctccatcggcgaggaaaccgatgtggtcggcaaggaaatgtacaccttttccgattcaaacgattctttgagtttgagcctgcgtcctgaaggtacggcttcttgtctgcgcgcggtggtcgaacacaaccttctctacaacagcccgcaaaagctgtggtatatggggccgatgttccgccgtgagcgtccgcaaaaaggtcgttatcgtcagttccatcaggtcggtatcgaggctttgggttttgaagggccggatatcgatgcggaaatcgtcgcgatgtctgccgacttgtgggaaaaattgggtattcgcgaatacctgactttggaaatcaacagcttgggcaaccgtgaggaacgcgcggcacaccgtgcggcattggttgaatatctgacccgttatgaagataaattggatgaagacagcaaacgccgtctgaaaaccaatcctttgcgcgttttggatacgaaaaaccctgatttgcaggaaatctgcaacgcggcgccgcgtctggtggattacttgggtgaggcttcgcaaaaccactatgcacgcttcaaggcgatgttggatggtttgggtattcaatatattgaaaatccgcgcttggttcgcggtttggattattacaatcagacggtttttgagtggacgaccgacaaactcggcgcgcaggcaactgtgtgcggcggcggccgttacgatggtttgattgaggaacttggcggcaaacctgcgccgtccatcggctttgcgatgggcatcgaacggctgctgcttttggtgagcgaatacggctcgctggaagtgaacgctgcgcctgatgtctatgcaatgcaccaaggcgaaagggcggacttgcaggtgatgaaatacgcgcaagccttgcgcacgcaaggtttcaatgtaatgcagcattccggctatcaaagcctgaaagcacaaatgaaaaaagccgacaacagcggcgcgcgctttgccctgattgtcgcgcaagacgaactggcgaacggtacggttacgctcaaagacatgaacggcgcacacggtcagcaaactgtcgccgccgaggatttaacccatactttacaacaatggaagaacgcataa

SEQ ID NO: 67002 - DNA, 252 bp, Neisseria meningitidis; identical to SEQ ID NO: 45697

SEQ ID NO: 67003 - DNA, 669 bp, Neisseria meningitidis
atgaaaaacctcgccatcttcgacctcgacaacaccctcatcaacaccgattccgaccacgcctggccgcaatacctcatcaaaaaaggcttggttgacgctgccgaaaccgaagcgcaaaacgaaaaattctaccgcgactaccaaaacggctgcctcgacatcgacgcattcctcaaattccacctcgccccgctcgcccgctacagcaaagaagagctggcagagtttcaccgcgaatttatggcggaatacatcatcccccacatctcgcctatgcagcgtatgctggtgcagagccaccaaatggcaggcgacgaaacccttgtgatttcctcaaccaacgagttcatcatcacccccgtctgccgccttttcggcatcaccaacatcatcggcacacaactcgaaaccggttctgacggccgctacaccggcaattacatcggcacgcccagcctcaaagaaggcaaaatcacccgcctgaaccaatggcttgccgaacgcggcgaaacgctcgaaagctacggcaaaacctatttttacagcgactccaaaaacgacctgccgctgctgcgccttgtcagcgaacccgtcgccgtcaaccccgatgccgagctggaagaagaagccaaagaaaaaggctggccggttttaaatttcaaatga

SEQ ID NO: 67004 - DNA, 852 bp, Neisseria meningitidis; identical to SEQ ID NO: 51235

SEQ ID NO: 67005 - DNA, 960 bp, Neisseria meningitidis
atgtccaaaaaaaccaaacaagaactggaaaacaacaaactcagcaaacgcctgcgccacgccgtcggcgacgcgattaacgatttcaacatgatcgagccgggcgacaaaatcatggtctgcctctccggcggaaaagacagctatgccctcttggacatcctgcgccagctccaagccagcgcgccgattgatttccaactggttgccgtcaatctcgaccaaaagcagccgggcttccccgaagaagtattaccgacctatctcgaaagcatcggcgttccctacaaaattgttgaagaagacacctactccaccgtcaaacgcgtattagacgaaggcaaaacgacttgttcgctgtgcagccgcctgcgccgcggcatcctctaccgcactgcaaaagaattgggctgcaccaaaatcgccttgggacaccaccgcgacgacatcctcgccaccttgtttttaaatatgttttacggcggcaaactcaaagccatgccgcccaagctggtgagcgacaacggcgaacacatcgtcatccgtccgctggcgtatgtaaaagaaaaagacttaatcaaatacgccgaattaaaacaattccccatcatcccgtgcaacctctgcggctcgcaacccaacctgcaacgccaagtcatcggcgatatgctgcgcgattgggacaaacgctttcccggccgcatcgaatcgatgttctccgccctgcaaaacgtcgtcccttcccaccttgccgataccgaactcttcgactttgccggattggaacgcggtcaaaccctgaaacacggcggcgatttggcgtttgacagcgaaaaaatgcccgaacgtttttcagacggcagcgaagaagacgaaagcgaaatcaaaatcgcgccgcaaaaagccgaacgcaaagtcatcaacattctggcgaacaagccgaaaacctgcggcgcgtaa

SEQ ID NO: 67006 - DNA, 399 bp, Neisseria meningitidis
  misc_feature 380, 381, 382, 383, 384: 'n' is a, c, g or t
atgagctacacgcaactgacccaaggcgaacgataccacatccaatacctgtcccgccactgcaccgtcaccgaaatcgccaaacagctgaaccgccacaaaagcaccatcagccgcgaaatcagacggcaccgcacccaagggcagcaatacagcgccgaaaaagcccagcggcaaagccagactatcaaacagcgtaagcgacaaccctataagctcgattcgcagctgattcagcacatcgacacccttatccgccgcaaactcagtcccgaacaagtatgcgcctacctgtgcaaacaccaccagttcacgctccaccacagtaccatttaccgctaccttcgccaagacaaaagcacggcagcacgttgtggcannnnncacacacttaattaa

SEQ ID NO: 67007 - DNA, 141 bp, Neisseria meningitidis; identical to SEQ ID NO: 45809

SEQ ID NO: 67008 - DNA, 231 bp, Neisseria meningitidis
ttggaacaccgtgtcgccgtattggaaagcggcggcaataccgtcaaaatcgaccttttcggttcaaattccaccatgtatgtatgcagcgttacgccttttcagaagacgtttgaggcaagcgatcggaatgaaggcgtggcgcggcagaaagtgcgtcaggcgtgcaaccgcgaaacttcggcaatgttttgcgaagatgaggcaatccgatgcagaaaattcgattga

SEQ ID NO: 67009 - DNA, 429 bp, Neisseria meningitidis
atgatgttttcttggttcaagctgtttcacttgttttttgtcatttcgtggtttgcagggctgttttacctgccgaggattttcgtcaatatggcgatgattgatgcgccgcgcggcaatcccgagtatgtgcgcctgtcgggtatggcggtgcggctgtaccgttttatgtcgccgttgggcttcggcgcggtcgtgttcggctcggcgataccgtttgccgccggttggtggggcagcggttgggtacatgtcaaactgtgtttggggttgatgcttttggcttaccagttgtattgcggcgtgctgctgcgtcgttttcagaattacagcaatactttctcacaccgctggtatcgcgtatttaacgaaatccctgtactgctaatgataggtgcgctttacctggttgtgttcaaaccgttttga

SEQ ID NO: 67010 - DNA, 1527 bp, Neisseria meningitidis
atgaatcccatgtacattacttttgcaatctatctagttgcagtccttctcatcgggcttgccgcctatttttccacgcgcaatttcgacgattatattttgggcgggcgcagcctaggcccgtttgttaccgcgatgtcggcaggcgcgtccgatatgtccggctggctgctgatgggtctgccgggcgcgatttacctgagcggtttgaatgaggcttggattgccatcggcctcttggtcggcgcgtatttcaactggctcttggtggcgggccgcctgcgcgtgcataccgaatacgccaacaatgcgctgacgctgccggattatttcttccaccgcttcggcgcgggcggacacttgatgaaagtggtttccgcactgattatcctgttcttcttcacgatttattgcgcctcgggcattgtggcgggcgcaaccctgttccaaagcctgtttgaaggtatgacttacaatcaggcaatgtggctgggcgcgggcgcgaccatcgcctataccttcttgggcggtttcttggcggtcagctggacggatacgctgcaggcttctttgatgattttcgccctgattttaacgccggtgatggtctatctgggcttgggcggcgcggaacagatgtctgccgcgattcaaagcgtcgccgcaggcacgggcaaagaatacggcagcctgtttgccggtacgaccgtcatcggcatcatttccaccgccgcatggggcttgggctatttcggacagccgcacattttggcgcgctttatggcggccgaaagcgcgaaatcgctggtatccgcacgccgcatcggcatgacttggatggcgttgtgccttgcgggcgcggtggcggtcggttatttcggcattgcgtatttcggtgcaaatcccgacaaagtttcttctatgagcggcaaccacgaacgcatcttcatcgcgctttccaccctgctgttcaacccttggatcgccggcatcattttgagcgcgattttggcggcggtgatgtccaccctgtcctgccagcttttggtttgctccagcgcgattaccgaagacttctacaaaggctttttgcgtaaaaacgcgcaacagtcggaactggtatgggtcggccgcctgatggtcttggcgattgccgtgatttccatcctgattgcttccgatccgaacagcaaagtattgggactggtgtcttatgcgtgggcaggtttcggtgcggcgttcggcccgattgtgattctgtccgtattgtggaaacgcatcactgcctacggcgcgttgtcgggtatggttgcaggtgccttaaccgtagtcgtatgggcggaatggataaaaaaaccggctcaagcagcaggcgaaagcggcttgttgacgatgtacgaaatcgtcccgggctttattgtttgcttaatcattgccgtgttggtttccctgttcaacaaagaaccttcgcgcgaaatccaaaaacgctttgaaaaagccgacgcagattaccgcgccgcccgataa

SEQ ID NO: 67011 - DNA, 372 bp, Neisseria meningitidis
atgagaaaaccccaacgcggctatgcccgccaagaccgtgtcaaagaacaaattatgcgcgagcttgccgaactcgtccgtaccggactgaaagacccgcgcgccggcttcattaccgtcaacgaagtcgaagttacccgcgattacagccacgccaccgtgttctacaccattttaaaccaagacgcgcgcgaaattacggaagaagtgctggaacacgcgcgcggacacctccgcagcgaattggccaaacgcatcaagctgttcaaaatccccgaactgcatttcaaatacgacgaatccttggaacgcggtttgaacctgtccgcccttatcgaccaagtagcggcggaaaaaccggttgaagactga

SEQ ID NO: 67012 - DNA, 951 bp, Neisseria meningitidis
atgtcccaacaccgcaaactgattattttgggttccggccccgccggatacaccgccgctgtctatgccgcgcgtgccaatttaaaccccgtcattattacaggtatcgcgcaaggcgggcaactgatgaccaccaccgaagtggacaactggcctgccgatgccgacggcgtgcaagggccggaattgatggcgcggtttctcgcccacgccgaacgtttcggaacggaaatcatttttgaccaaatcaacgccgtcgatctgcaaaaacgcccgtttacactcaaaggcgatatgggcgagtacacttgcgatgccctgattgtcgcaacaggcgcgtccgccaaataccttggtttgccgagtgaggaagcgtttgcagggaaaggcgtttccgcttgtgccacctgcgacggtttcttctacaaaaaccaagatgttgccgtagttggcggcggcaatacggcagttgaagaggcactctaccttgccaatatcgccaaaaccgttaccctgatccaccgccgcagcgagttccgtgccgaaaaaatcatgatcgacaaactgatgaaacgcgtggaagagggcaaaatcatcctcaagctggaaagcaacctgcaagaagtactgggcgacgatcggggcgtaaacggcgcattattaaaaaacaacgacggttctgagcaacaaattgccgtcagcggcatttttatcgccatcgggcacaagccgaataccgatattttcaaaggtcagttggaaatggacgaagccggttacctgaaaaccaaaggcggcacggcggacaatgtcggcgcaaccaatatcgaaggcgtatgggcggcgggcgacgtaaaagaccatacctaccgtcaggcgattaccagcgcggcttccggctgtcaggcggctttggacgcggaacgctggctgggcagccaaaacatttga

SEQ ID NO: 67013 - DNA, 1863 bp, Neisseria meningitidis
atggctcttttgcagatttcagaaccgggtatgtccgccgccccgcaccggcaccgtttggcggcaggcatcgatttgggtacgaccaacagcttggttgccaccgtccgcagcggcagtgccgcctgcctgcccgatgccgaagggcgcgttaccctgccttccgtcgtccgctatctggaaaacggcggcattgaagtcggcaaaaccgccctgtccgcccaaaaaaccgacccgctgaacaccgtcagctccgccaaacgccttatcgggcggacgcttgccgctctgcatcaaaatacgcactacctgccttaccgtttcggcgacaatcaacgcgttatcgaactgcatacgcggcagggggtgaaaacgcctgtcgaagtgtcggcggaaatcctcaaaacccttaaatcgcgcgccgaagaaaccttgggcggcgatttggtcggcgtggtgattaccgtccccgcctatttcgacgatgcccaacgccaggccaccaaagatgccgcgcgtctggcgggtttgaacgtattgcgcctgctcaacgaacccaccgccgccgcaatcgcctacgggctggacaacgcctcggaaggcacgtttgtcgtgtacgacttagggggcggcacattcgacgtatccgtattgcaactgaccaaaggactgtttgaagtcaaagccaccggcggcaacagcgcgttgggcggcgacgatttcgaccaccgcctgttctgccgcctgctcgaacaaaacggactctcccaactcaacgaacaagacagccaactcctgctctcgctcgtccgcgccgccaaagaacaattaaccacgcaaaccgaagcgcgcattcaggcgacgctttcagacggcatggcaatcgacacaagcatcagtcgcgccgagttccacaacctgacgcagcatttggtgatgaaaacgctcgaaccggtcacacaggcgttgaaagatgccggtgtcggtaaaaacgaagtcaaaggcgtgattatggtcggcggttcgacccgtatgctgcacgtccaacaggcagtcgccaccttcttcggacaaaccccgctgaacaacctcaatcccgacgaagtcgtcgcgctcggcgccgccatacaggcaaacgtcctcgcaggcaacaaaaccgacggcgaatggctgctgctggacgttacacctttgtcgctcggtttggaaacctacggcggcttggcggaaaaaatcatcccgcgcaattccaccatccccaccgcgcgcgcgcaggactttaccaccttcaaagacggtcaaaccgcgatgacgatacacgtcgtgcaaggcgagcgcgagctcgtttctgactgccgcagccttgccaaattcaccctgcgcggcattccaccgatggcggcgggtgcggcgcgtatccgcgtaaccttccaaatcgatgcggacgggctgctgtccgtttccgcccaagaacaaagcaccggcgtacaggcgcaaatcgaagtcaaaccttcctacggcttggacgacggcgcgattacccgaatgcttaaagacagtatggacaacgccgccgaagatatggcggcacgcgcccgcgccgaagccgtagtcgaagccgaaagcctgaccgatgccgtcaacgccgccctcgagttggacagcgatttgctggatgccaaagaattgcaacagattcggcaaggcatcgccgatttgcaaggccgtctgaaagacggaaaagccgaagacatccgtgtcgccgccgccaaactcggcagcatcaccgacaatttcgccgccaaacgcatgaaccgcaacatccaacgcgcgttgactggtcaaagcgttgataatatttga

SEQ ID NO: 67014 - DNA, 423 bp, Neisseria meningitidis
atgcaggttacatcaaaatggatagacggaatgtgctttgtcggcacgacggaaggcgggcacagcgtcgttatggagggatcggcggcagaaggtgcggccaagcgcgggcccagcccgatggaaatgctgctgttgggcgtggcgggctgttcgagcatcgatgtggtgatgattgccgaaaaacagcgtcagaaagtgactgactgccgtgcgacggttacggcgaaacgggcggacgatgcgccgcgcgtgtttaccgaaatccacatccatttcaaagtattcgggcatgatttgaaagaatcggccattgagcgcgccgttcagatgtctgccgaaaaatactgttcggcttcgattatgttgggcaaagcggcaaagattacccacagttttgaaattgccggggcagataaatag

SEQ ID NO: 67015 - DNA, 693 bp, Neisseria meningitidis
atgaccgcctttgtccacaccctttcagacggcatggaactgaccgtcgaaatcaagcgccgtgccaagaaaaacctgattatccgccccgccggcacacataccgtccgcatcagcgtcccaccctgcttctccgtctccgctctaaaccgctggctgtatgaaaacgaagccgtcctgcggcaaacactggcgaaaacaccgccgccgcaaactgccgaaaaccggctgcccgaatccatcctcttccacggcagacagcttgccctcaccgcccatcaagacacgcaaatcctgctgatgccgtctgaaatccgtgttcccgaaggcgcacccgaaaaacagcttgcgctgctgcgggactttttggaacggcaggcgcacagttacctgattccccgcctcgaacgccacgcccgcaccacacaactgttccccgccccctcctcgctgacctctgccaaaaccttctggggcgtgtgccgcaaaaccacaggcatacgcttcaactggcggctggtcggcgcaccggaatacgttgccgactatgtctgcatacacgaactctgccacctcgcccacgccgaccacagccgcgcgttctgggcactgacccgccgcttcgcaccctacacgcccgaagcgaaacagtggctcaaaatccacggcagggaacttttcgccttaggctga

SEQ ID NO: 67016 - DNA, 693 bp, Neisseria meningitidis
atgaaacttatcaaatacctgcaatatcaaggcataggaagccgcaagcagtgccaatggctgattaggggcggctacgtctccatcaacggaacctgtatggacgacaccgatgcagacatcgattcctcatccgtcgaaacgttggatcttgacggggaagcagtaaccgtcgttcccgaaccctatttctacatcctgctcaacaagcctgaagattacgaaacttcgcacaaaccgaaacactaccgcagcatattcagcctgttccccgacaatatgcgcaatattgacatgcaggcagttggcaggctggatgcagatacgaccggcgtattgctgattaccaacgacggcaaactgaaccacaacctgacttcgccgagcagaaaaattcccaagctatacgaagtaacgctcaaacaccccacaggagaaacgctctgcgaaaccttgaaaaacggcgtgctgctccacgacgaaaacgaaaccgtttgtgccgccgatgccgttttggaaaacccgaccaccctgctgctgaccattaccgaaggaaaataccaccaagtcaaacgcatgatcgccgccgccggcaaccgcgtgcaacaccttcatcgccggcgattcgcacatttggaaacagaaaacctgaaacccggcgaatggaaatttatcgattgtccgaaattctaa

SEQ ID NO: 67017 - DNA, 552 bp, Neisseria meningitidis
atgaaggttttgaacggttggtcggacaggaagatgtggcgggttttgagtgctttgccgataggcgtggtgttttttgatttgatctacggttttgtgttgaatgtgttgcagggtttggatttgcagcgtgccgtgccggatttggaaggcgtgttggcggttacgcccgatattgcattcaacagtttgcagattgtcgccaacggcggtatggcggcggtggtctgtttcgggttggcggttgtgtttttgctcaaccgttcggtgcggcggcggcaggtgttggaaatcggggtgttccggatgttggggctggtggcggtattggcgttcagcgcgccgtcggtgtgggagtgggcgaacgcgctaccgctgctgctgaagggcgcggacgtggtcaatacggggaatgcgcgttatgtgctgacggctttgtgtatgccctttccggcggtgtcgtgcgtcatcgggctggtggggcggttcaggcttcagacggcatcgggcagggcggcaaagtcagggggtgcgggcaaggcggacggatag

SEQ ID NO: 67018 - DNA, 198 bp, Neisseria meningitidis
atgaaatggaccgatacccggcgcatcgccgaagaactctacgacctgcacggcgaaaccatcgatcccagaaccgtgcgctttacccaactgcgcgacctgattatggcattgcccgaatttgacgacgaccccgcccgttgcggcgaacgcatcctcgaggccgtgcagcaggcatggatagacgaggcggaataa

SEQ ID NO: 67019 - DNA, 705 bp, Neisseria meningitidis
atgacggtgttgcaagaacgttatcgggaggtgtccgaccgtattggaaaattggttctgcaggcgggaaggaagccgcattccgtcagcctgattgccgtcggtaagactttcccttcagacggcatccgcgaagtttacgccgccggacagcgtgatttcggcgagaactatattcaggagtggtacggcaaaacggaagagttggcggatttgaccgacatcgtgtggcacgtcatcggcgatgtgcagtccaacaaaaccaagtttgtcgccgaacgcgcgcattgggtgcataccatatgccgtctaaagaccgccgtccggctgagcgggcaacgtccttcctcaatgccgcctttgcaggtgtgtatcgaggtgaacattgcgggcgaggcggtgaagcacggtgtcgcgcccgaagaagcagtcgcgcttgctgtggaagtggcgaagctgccgaatatcgtcgtacgcggactgatgtgtgttgccaaagccaacagcagtgaaacggagttgaaggtgcaatttcaaacgatgcggaaactgcttgccgacctcaatacggctggcgttaaggcggacgtgctgtctatggggatgtcggacgatatgcctgccgctattgagtgcggtgcgacacatgtccgtatcggcagcgcgattttcgggaaaaggagtagattggaatgcgtacaataa

SEQ ID NO: 67020 - DNA, 480 bp, Neisseria meningitidis
atggctaacttagtaaaaacctttctgctcggcgagttggtaaaaggcatgggcgtaacgctcaaaaacttttttgcccgcaaagacacaatttattttcccgaagagaaaacgccgcaatccgtgcgtttccgcggtctgcacgcgcaacgccgttatccgaacggcgaggaacgctgcatcgcgtgtaaattgtgtgaagccgtttgccccgcaatggcgatcaacatcgaatcggaagaacgcgaagacggcacgcgccgcaccaagcgttacgacatcgacctgaccaagtgcatcttctgcggtttctgcgaagaagcctgcccgaccgatgcgattgtggaaacccatatttttgaataccacggcgagaaaaaaggcgacttgcatatgaccaagccgattcttttggccattggcgataaatacgaagctgaaatcgccaaacgcaaagccgctgacgcgccgtatcgttaa

SEQ ID NO: 67021 - DNA, 1545 bp, Neisseria meningitidis
atgtgcggcgtattaggtttggtcagtcatgaacccgtgaaccagcttctgtacgacggcttgcagatgttgcagcacagggggcaggatgcggcgggcattgcaacggcggaaggcggtaccttccatatgcacaaaggcaaaggcatggtgcgcgaagtgttccgcacacgcaatatgcgcgatttgaccggcaacgccggtatcgcccacgtccgttatcctactgcgggcaacgcgggcagcagcgcggaggcgcagcctttctacgtcagctcgccgttcggcatcgttttggcgcataacggcaacctcaccaacacggccgaactttatgaaaacgtgtgcaacaaacacctgcgccacgtcaacaccagctccgattccgaagtcttgctcaacgtattcgcgcacgaattgcgccgcgaagtctctaaaaacgccgacccgcaccggctcaatgccgacaatattttcaacgccgttgccgaagtccaccgcctggtgcacggcgcatacggtgtggttgccatgattgcgggctacggtatgcttgccttccgcgacccttacggcatccgcccgctggtattgggttcgcaaaccgacagcgaaggcaggaaatcctatgccgtcgcctccgaatccgtcgccttcaacgcgcttgcctacgatttggaacgcgatatccggccgggcgaagcggtatttgtcggctttgacggcacaatcatcgcccgacaatgcagcgataaggccaaactcagcccctgcctttttgaatacgtctattttgcccgtcccgactccgtgattgacggcgtgtccgtttaccagtcgcgcttggatatgggcgtgtccttggcggaaaaaatcaaacgcgagctgcccgtggacggcatcgatgtcgtgatgcccatccccgacaccagccgccccagcgcgatggagcttgctgtccacctcaaaaagccttaccgcgaaggtttgattaaaaaccgctatatcggccgcacctttattatgcccggccaggcgacgcgcaaaaaatccgtgcgccaaaaactcagcccgatggaaaccgaatttgcaggcaaaagcgtgttgctggtggacgactccatcgtgcgcggtacgaccagccgtgaaatcgtcgaaatggtacgcgcggctggcgcgcgcaaagtctatatcgcctccgccgcgcccgaagtgcgctatcccaacgtatacggcatcgatatgcccacgcgcgaagagttgattgccaatgggcgcagcgcggcggaaatcgccgccgaaatcggcgcggacggcatcgtgtttcaagacttgggcgatttggaagccgtcgtcaaagcactcaacccgaaaatcgaatccttcgattcgtcctgtttcaacggcatttatcagaccggcgacatcgatgatgcctacctcgaccgcctgtctgccgagaaatccggctgcggcggtctgaaaatccacccgagcaggatggaacacagcatcagcatcagcgatgcgggcgacgaagaataa

SEQ ID NO: 67022 - DNA, 1104 bp, Neisseria meningitidis
atgttgattttacaagccgaacgcgacagcctgctcaagccgctgcaagccgttaccggcatcgtcgaacgccgccacaccctgcccatcctgtccaacgtcctgattgagggaaaaggcggtcagaccaaactcttggcaaccgatttggaaatccaaatcgacactgcgggtcccgagggcggcgcgggcgacttccgcatcaccaccaatgccaagaaatttcaggatattttacgggcactgcctgccggtgcgctggtgtcgctggattgggacgacagccgtctgacgctgaaggcgggcaaatcgcgttttgccctgcagaccctgcctgccgccgattttccgatgatgaatgtcggcgaggacatcagcgcgactttctcgctggagcaggagcgtttcaaaaccatgctgtcgcaagtgcagtacagcatggcggtgcaggacatccgctattatctcaacggtctgctgatgcaggttgagggcagccagttgcgccttgtggcgaccgacggacaccgccttgcctatgcagcctgcgcgattgatgcggatttgccgcgcgccgaagtgattttgccgcgcaaaacggtgctggaactgttcaaactgttgaacaaccccgacgatccgattcaaatcgagctgctggacaaacaggtgcgtttccaatgcaacggcacgaccatcgtcagcaaggtcatcgacggcaaattccccgatttcaaccgcgtcatccctttggacaacgacaagattttcgttttgtcccgtgccgaacttttgggcgcgctggaacgtgtgtccattcttgccaacgaaaaattccgtggcgcgcgcctgttcctgcaacccggcctgttgagcgttgtgtgcagcaacaacgagcaggaagaagcgcgcgaagaaatcgaaatcgcctatcagggcggcgaactcgaagtcggtttcaatatcggctatctgatggacgtgttgcgcaacatccattccgacgatatgcagcttgccttcggcgatgccaaccgctcgacgctgtttaccgtgccgaacaatccgaatttcaaatatattgtgatgccgatgcggatttga

SEQ ID NO: 67023 - DNA, 4599 bp, Neisseria meningitidis
  misc_feature 4576, 4577, 4578, 4579, 4580: 'n' is a, c, g or t
atgaacaaaggtctgcatcgtaccgttttcagcaaaaagcacaacactatggttgcagttgccgaaaccgccaacagtcagggtaaaggcaaacaggcaggaacttccgctccggcttcgccacaaatttcagacggcctttacagtaaactcaaaaccacccttaaaaccttggtctgctctttggtttccctgagtatggtattgcctgcccatgcccaaatcaccaccgacaaatcagcacctaaaaaccagcaggtcgttatccttaaaaccaacactggtgcccccttggtgaatatccaaactccgaatggacgcggattgagccacaaccgctatacgcagtttgatgttgacaacaaaggggcagtgttaaacaacgaccgtaacaataatccgtttctggtcaaaggcagtgcgcaattgattttgaacgaggtacgcggtacggctagcaaactcaacggcatcgttaccgtaggcggccaaaaggccgacgtgattattgccaaccccaacggcattaccgttaatggcggcggctttaaaaatgtcggtcggggcatcttaactaccggtgcgccccaaatcggcaaagacggtgcactgacaggatttgatgtgcgtcaaggcacattgaccgtaggagcagcaggttggaatgataaaggcggagccgactacaccgagatacttgctcgtgcagttgctttgcaggggaaattacagggtaaaaacctggcggtttctaccggtcctcagaaagtagattacgccagcggcgaaatcagtgcaggtacggcagcgggtacgaaaccgactattgcccttgatactgccgcactgggcggtatgtacgcagacagcatcacactgattgccaatgaaaaaggcgtaggcgtcaaaaatgccggcacactcgaagcggccaagcaattgattgtgacttcgtcaggccgcattgaaaacagcggccgcatcgccaccactgccgacggcaccgaagcttcaccgacttatctctccatcgaaaccaccgaaaaaggagcggcaggcacatttatctccaatggtggtcggatcgagagcaaaggcttattggttattgagacgggagaagatatcagcttgcgtaacggagccgtggtgcagaataacggcagtcgcccagctaccacggtattaaatgctggtcataatttggtgattgagagcaaaactaatgtgaacaatgccaaaggcccggctactctgtcggccgacggtcgtactatgatcaatgatgctactattcaagcgggtagttccgtgtacagctccaccaaaggcgatactgaattgggtggaaatacccgtattattgctgaaaacgtaaccgtattatctaacggtagtattagcagtgctgctgtaattgaggctcaagacactgcacacattgaatcgggcaaaccgctttctttagaaacctcgaccgttgcctccaacatccgtttgaacaacggtaacattaaaggcggaaagcaggtggtactgatggctgatggcgacattcaggcaaaagcctccaatctgaatgcatccggcaatctgtatattcatgcaggtaaggatctggatttgaatgccgataaagacttatcaacacaaagtatcagcctgagggcagacaacaccgccctcatcagcagcaacggtaacaccttgactgcagaaaagaatctggatattcaggcaggtagcttgagtgtgcgtcaaagtaatctgcaatccagtggcggtaatgtgcagatgagcgcgactaaaggcaacatcagcttgaatcagagttggataaatgccagtcagaatattgatacggcagcacttcaaggcaatattatttcagacggtctgactgctgttgccgaagttggacgcgtatctcttcttgccaacggcaatgttgatttcaacggtctaaataccttgattgcggaaggagacattaatgctggttcagtcggtaaaggccgtctgaaaatggacaataccgatatttatgcttctgcaggcgatgtgaaactggttgccggaggtcaattagatttaggcaacggcaccgttaacggcggtcatatcagcttagacagcaataaaggcagcatggtggtgcaggatgtacacctgaatgcccgcgcatcactgaaagtggatgcggatcaaactttaaccattaataacagcaagctcaattccggtcacaatacccagattaatacaaatcatggtcatatgacgcttaatcagcttgatgctcattcacgtcgtcatatgagtatcagtgcacagggtaaaggcaaaggaaaagacagcggtcaaattttacaaaacgaccagcaaaacagtaaaagtactttggcggcagatggtgtattgtcattgaacagcagcgcattacaggttttggacaatactaccctgcgcggtggcgcgataaacatcaaagctggcggaggcatcatcaaacggagccatatcgattgggaaacccaagatacggcaactatgcgttcagcggaactgaaaccactgtccggtatgatgtcgatagaatcgggcggtgataaccctttaaccgttgaacccggtaaccgtatcgtttctgcaggtgatttggccgtgaaccacaacggcacattccaaatcagtgccagagcaggaaataacggcaatccgagtgcgcaaacagccagcgtttcagctaaaggcaatatcgggattgtggcgggagaggtggatattgatgcagcaaatattgccgcagggaaagatttggctttagtggcaactaaagggaatatttcactaaacagtattaggaatacgtttagtaactatcaattgaaaacagataaacacaatatcacacagcaacttactgatgtagagcaggagcttagtaagttaacgagcgatcctaaatatcgtaaagcacaggatcttccacaaatgttgaggcgtaaatataagaggcgtgacaaagtattcggtgatagtgaggccagattacgtggtttacgagcaaagataaatgctgctgatgaggcttgggcagaactccaatccccagtaaaagcgttacttgaacgtaaacaattgttacaacaagcccttttaacagtttcccaaccgggtagtggtcacgaaaaccaaggtagcacccttagcggtcaaaatatcaaactgctcgctgcaggtggtatccgtatccagggctccaaagttgctgccacccaacaggcaaatatccaagctgcaggatttttacctgcaccagccgcagaggaactgcaagaaggtcgacttcaatcagccattgacatcagcggtgtatttgatacttttgaatatggtcagcaaggcagcgataaatacggctatgccattttcagcaggccatctgaaatttcaggaaaaacaggtgttaccctctctgcaccaaatgccaatgagaacagccgcatcagtctgagtgcggcaaacatcgaagctgaaaacggcaaaatcaaaattcaatcttacggtgaccaatattactatgcgagacagagcgaactctatacctttgaacgccgcagctacaaaactggcaaatggtacaaccgcaaacacattaccgaagtcaaagaacacaaaaacgccaagcccgacgcagtaaccctcagcgcatcccaaggcatcgacatcaaatctggtggcagcatcgacgcctacgccaccgcattcgatgcccccaaaggcagcattaacatcgaagccgggcggaaattgacactctatgccgtagaagagctcaactacgacaaacttgacagccaaaaaaggcgcagatttctcggcatcagctacagcaaagcacacgacaccaccacccaagtcatgaaaaccgcgctgccctcaagggtagttgcagaatcagccaacctccaatcgggctgggataccaaactgcaaggcacacagtttgaaaccacactgggtggcgcaaccatacgcgcaggcgtaggtgagcaggcacgggcagatgccaagattatcctcgaaggcatcaaaaccacgatccacaacgaaaccgtgagcagcagcaaatctgctctatggcaaaaacaggcaggacggggcagtaacatcgaaaccttgcaattgccgagtttcaccggtcccgttgcgcccgtactgtccgcacccggcggttacattgtcgatattcccaaaggcaatctgaaaacccaaatcgaaaagctggccaaacagcccgaatatgcctatctgaaacagcttcagacggtcaaggacgtgaactggaaccaagtacagctcgcttacgacaaatgggactataaacaggaaggcctaaccggagccggagccgcaattatcgccctggcagtagcggcggtaaccggaggagtaggcgcaggccttatcggagcggcacagggtaccgcatcggcagccgtggccgatgctgcctttaccgcattggtgagccaggcttccatttccctgatcaacaacaaaggcaatatgnnnnncacacacttaattaattaa

SEQ ID NO: 67024 - DNA, 369 bp, Neisseria meningitidis
ttggtcgtgtatttttatccgaaagacagtacgcctggctgtacgacggaaggcttggatttcaatgcgcgtttagaacagtttgaggcattgggttataccgtggtcggtatttcccgcgacggcgtaaaggcgcatcagaatttttgcgccaagcagggtttccggttcgagctgttgagcgacaaggatgaaacagtgtgccgcctgtttgatgtcatcaaattgaagaaactgtacgggaaagagtcgttaggtatcgagcgcagtacgttcgtcttgaataaggatggagaaatcgcccatgaatggcggaaagtcaaagtggcgggtcacgcgcaggaagtattggaaacgctttcccgataa

SEQ ID NO: 67025 - DNA, 999 bp, Neisseria meningitidis
atgagcagacccgtacccgccgtattcggcagcgtttttcacagtcaaatgcccgtcctcgcctaccgcgaaggcaaatggcagccgaccgaatggcaatcttcccaagacctctccctcgcaccgggtgcgcacgccctgcactacagcagcgaatgtttcgagggactgaaagccttccgtcaggcagacggcaaaatcgtactgttccgtccgactgccaacatcgcgcgtatgcggcaaagtgcggacattttgcacctgccgcgccccgaaacccaagcctatctcgacgcgctaatcgaattggtcaaacgcgccgccgatgaaattcccgatgcgcctgccgccctgtacctgcgtccgaccttaatcggtaccgatcccgttatcggcaaggccggttctccttccgaaaccgccctgctgtatattttggcttcccccgtcggcgactatttcaaagtcggatcgcccgtcaaaattttggtggaaaccgaacacatccgctgcgccccgcatatgggccgcgtcaaatgcggcggcaactacgcttccgccatgcactgggtgctgaaggcgaaagccgaatacggcgcaaaccaagtcctcttctgcccgaacggcgacgtgcaggaaaccggcgcgtccaactttatcctgattaacggcgatgaaatcattaccaaaccgctgaccgacgaatttttgcacggcgtaacccgcgattccgtactgacggttgccaaagatttgggctataccgtcagcgaacgcaatttcacggttgacgaactcaaagctgcggtggaaaacggtgcggaggcgattctgaccggtacggcagccgtcatctcgcccgttacttccttcgtcatcggcggcaaagaaatcgaagtgaaaagccaagaacgcggctatgccatccgtaaggcgattaccgacatccagtatggtttggcggaagacaaatacggctggctggttgaagtgtgctga

SEQ ID NO: 67026 - DNA, 876 bp, Neisseria meningitidis
atgttacaaggtagcctggttgccctgattaccccgatgaatcaagacggcagcatccattacgaacaactccgcgatttgatcgactggcacattgaaaacggcacggacggcatcgttgccgtcggcacgacaggcgaatccgccaccctctccgtcgaagaacacaccgccgtcatcgaagccgtcgtcaaacacgttgccaaacgcgtccccgtcatcgccggcacaggggcaaacaacaccgtcgaagccatcgccctttcccaagccgccgaaaaagccggggcggactacaccctctccgtcgtcccctattacaacaaaccttcgcaagaaggcatgtaccgccatttcaaagccgttgccgaagccgccgcgattccgatgatactctacaacgtacccggcagaaccgtcgtcagcatgaacaacgaaaccatcctgcgccttgccgaaatccccaacatcgtcggcgtgaaagaagccagcggcaacatcggcagcaacatcgaactcatcaaccgcgcgcccgaaggcttcgtcgtcctttccggcgacgaccataccgccctgccgttcatgctgtgcggcggacacggcgttattaccgtagccgccaacgccgcacccaagctctttgccgatatgtgccgcgccgcgcttcaaggcgatatcgccctcgcacgcgaactcaacgaccggttgattccgatttacgacaccatgttctgcgaacccagccccgccgcaccgaaatgggcggtatccgccctaggcaaatgcgaaccgcacgtccgtttgccgctcgttccgctgacggaaaacggacaagcaaaagtccgcgccgccctgaaagcctcaggacaactttaa

SEQ ID NO: 67027 - DNA, 462 bp, Neisseria meningitidis; identical to SEQ ID NO: 38683

SEQ ID NO: 67028 - DNA, 822 bp, Neisseria meningitidis
atgagcagtccgcgccatgtgttttacatttccgaccgtaccggtctgactgccgagaatatcggcgaggcgttgctgaaccagtttggcaatctgtcgttcaaacgccatacgcatccgtttgtcgatacgccggaaaaggcgcgcgcggtggtggagaaggtcaatcggagccggcaggaaaacggtcagcgtccgattgcgtttgtcagtgtggttgatgacgaaatccgtcggattatcaaaggggcggatgcttttcagattaatttctttgagacttttttgggattgttggagaaggaactcaataccgaagccacggcatccgggcaggggcatcacagtatcggtaatacgaagcgttacgatgcgcgtatggaggcggtcaatttttctttgaaccacgacgacggggtcagcgataagaaccttcaggaagcggatgtaatcttgatgggtgtatcgcgttcgggcaaaacgccgacctgcctttacctcgccctgcaatacggcatccgtgcggcaaactatccgctgattcccgacgatttggaatcggccgatctgccgcgtatggtcaagccttatagggataagctgttcgggttgaccatccagccggaacgtttgcaggccatccgccaagagcgccgcccgaattcaacttatgccaaaatcgatacatgccgcagcgaggtggcggacgcgcagagtatgttcagacggcatggcattccgtttgcgaatacgacggataaatcggttgaggaattggcggtacacatccttcaggcgtgcaagctcaaacgcaggttttga

SEQ ID NO: 67029 - DNA, 444 bp, Neisseria meningitidis; identical to SEQ ID NO: 38367

SEQ ID NO: 67030 - DNA, 966 bp, Neisseria meningitidis
atgagctacacgcaactgacccaaggcgaacgataccacatccaatacctgtcccgccactgcaccgtcaccgaaatcgccaaacagctgaaccgccacaaaagcaccatcagccgcgaaatcagacggcaccgcacccaagggcagcaatacagcgccgaaaaagcccagcggcaaagccagactatcaaacagcgtaagcgacaaccctataagctcgattcgcagctgattcagcacatcgacacccttatccgccgcaaactcagtcccgaacaagtatgcgcctacctgtgcaaacaccaccagttcacgctccaccacagtaccatttaccgctaccttcgccaagacaaaagcaacggcagcacgttgtggcaacatctcagaatatgcagcaaaccctaccgcaaacgctacggcagcacatggaccagaggcaaagtccccaaccgtgtcggcatagaaaaccgacccgctatcgtcgaccagaaatcccgtatcggcgattgggaagccgacaccattgtcggcaaaggacagaaaagcgcattattgaccttggtcgaacgcgttacccgctacaccatcatctgcaaattggatagcctcaaagccgaagacactgcccgggcagctgttagggcattaaaggcacataaagacagggtgcacaccattaccatggataacggcaaagagttctaccaacacaccaaaataaccaaagcattgaaagcggagacttatttttgtcgcccttaccattcttgggagaaagggctgaatgagaacaccaacggactcatccggcaatacttccccaaacaaaccgatttccgtaacatcagtgatcgggagatacgcagggttcaagatgagttgaaccaccgaccaagaaaaacacttggctacgaaacgccaagtgttttattcttgaatctgttccaaccactaatacactag

SEQ ID NO: 67031 - DNA, 465 bp, Neisseria meningitidis
atgcaaggcaatcaagctgttgttgattatatgaacgaattgctgtctggcgagctggcggcacgcgaccaatactttatccactcccgcctctactccgaatggggctacaccaaactttttgaacgtctcaatcacgagatggaagaagaaaccacacacgccgaagacttcatccgccgcatcctgatgctgggcggcacgccgaaaatggcacgcgccgaactgaatatcggcacggacgtggtttcctgcctcaaagccgacctgcaaaccgaatatgaagtacgtgatgcgttgaaaaaaggcatcaaactgtgcgaagaggctcaagactatgttacgcgcgacctgatggttgcccaactgaaagataccgaagaagaccacgcccactggctggaacagcagcttcgcctgatcgagttaattggcgaaggcaactactaccaaagccaactgtaa

SEQ ID NO: 67032 - DNA, 735 bp, Neisseria meningitidis; identical to SEQ ID NO: 44023

SEQ ID NO: 67033 - DNA, 861 bp, Neisseria meningitidis
ttgcccgtcttcccgataagccttaaaatacacgccgtcaaacctaccgtccgtccgtacatgagcccatccccctttatcgaaatgaaagacgtcgccttcgcgtatggcgaccgcccgattctgaagaacatcaatttcagcattccgcaaggcaattttgctgccgtaatgggcggttcgggcagcggcaaaaccacgctgatgcgactgattacaggacagattcgtccgcagtcgggcaaagttctgatagaagggcgcgatttggcgggcttttcggctgacgaactctacgaacaccgccgccgtatgggcgtattgttccaacacggcgcgctgtttaccgatttgtctgtattcgacaatatcgcttttccgatgcgcgaactgacgcgcctgccggaagcggtgattcgagatttggttttgttgaaactgaacgcggtcgggctgcgcggcgtggaaaacctgatgccgtccgagttgtccggcgggatgtcgcgccgcgtcgcgcttgcccgcacaatcgcgctcgatcccgaaattatgttgtacgacgagccgtttaccggtctcgatccgatttccttgggcgtgattgcccacttgatcagccgtgtcaacaaggctttgcgttcgaccagtattatggtcacgcacgacattgaaaaatctttggaaatcgtcgatcaggtgattttcttggcgcacggcgaaattatgttctccggctcgccgcaggaaatgcgcgaactggattcgccttgggtgcgccagtttgtcggcggcttggcagacggccccgtggcataccgttatccggcgcaaacgtcgttgcagcaggatttgctcgggtaa

SEQ ID NO: 67034 - DNA, 483 bp, Neisseria meningitidis; identical to SEQ ID NO: 59760

SEQ ID NO: 67035 - DNA, 138 bp, Neisseria meningitidis
ttgcctcgccttgccgtactatctgtactgtctgcggcttcgtcgccttgtcctgatttaaatttaatccactatatcataaaacaacagatttccaagccggaacatcttttacggagcctgaaaatcatttcatga

SEQ ID NO: 67036 - DNA, 1209 bp, Neisseria meningitidis
atgaccggcatcatacattcgttgcttgacaccgacctctacaaattcactatgctgcaagtagtcctgcaccagtttccgcagacgcacagcctttacgaattccgatgccgcaacgcctcgaccgtctatccgcttgccgacatcaaagaagacttggaagtcgaactcgacgcgctctgccaactacgcttcacccacgacgaactcgactacctccgcagcctgcgtttcatcaaaagcgactttgtcgattatctcgaactcttccagctccaacgccgctttgtcgaagtcggcacagacgataaaggccgtctgaacatccgcatcgaaggtccgatgatacaggcgatgttttttgaaatcttcatcctcgccattgtcaacgaactttacttccgccggctggaaacccccgccgttatcgaagaaggcgaacgccgccttcaagccaaagccgcgcgcctgaaagaaatcgccgccgcacaaaaccccgacgaaccgcccttcctgatttccgacttcggcacgcgccgccgctacaagctcgcgtggcaggaacacgtcatccgcaccctgctcgaagccgccccaagcatcgtgcgcggcaccagcaatgtctttctcgccaaaaaactcggcattacccccatcggcaccatggcgcacgaattcctccaagccttccaggccctcgacgtacgcctgcggaatttccaaaaggccgcgctcgaaagctgggtgcacgaataccggggcgatttgggcgttgccctgaccgacgtggtcggtatggatgccttcctgcgcgatttcgacctctatttcgccaaacttttcgacgggctgcgccacgacagcggcgacccttacgtttggggcgacaaagcctacgcccactatcaaaagctcaaaatcgacagccgcaccaaaatgctgaccttctccgacgggctggacatcgaacgctcttgggcattacaccaatatttcaaagaccgcttcaaaaccggcttcggcatcggcaccaacctgaccaacgatatggggcatacgcctttgaatatcgtgttgaaactggtcgaatgcaacgggcagtccgtcgccaagctgtccgactctccgggcaaaaccatgaccaacaacagcaccttcctcgcctacctgcgccaagtgttcgacgtacccgaacccgaaacgccgtaa

SEQ ID NO: 67037 - DNA, 1116 bp, Neisseria meningitidis
  misc_feature 1097, 1098, 1099, 1100, 1101: 'n' is a, c, g or t
atggcagcaaaagacgtacagttcggcaatgaagtccgccaaaaaatggtaaacggcgtgaacattctggcaaacgccgtgcgcgtaaccttgggccccaaaggccgcaacgtggtggttgaccgcgcattcggcggcccgcacatcaccaaagacggcgtaaccgtcgccaaagaaatcgaactgaaagacaagtttgaaaatatgggcgcgcaaatggtaaaagaagtcgcgtccaaaaccaacgacgtggcaggcgacggtacgactaccgccaccgtattggcgcaatccatcgttgccgaaggtatgaaatacgttaccgccggtatgaacccgaccgacctgaaacgcggtatcgacaaagccgttgccgctttggttgaagagctgaaaaacatcgccaaaccttgcgatacatccaaagaaatcgcccaagtcggctcgatttccgccaactccgacgaacaagtcggcgcgattatcgccgaggcgatggaaaaagtcggcaaagaaggcgtgattaccgttgaagacggcaaatctttggaaaacgagctggacgtggttgaaggtatgcagttcgaccgcggctacctgtccccttacttcatcaacgacgcggaaaaacaaatcgctgctttggacaatccgtttgtattgttgttcgacaaaaaaatcagcaacatccgcgacctgctgcctgttttggaacaagtggcgaaagccagccgtccgctgttgattatcgctgaagacgtagaaggcgaagccttggcgactttggtggtgaacaacatccgaggtattctgaaaaccgttgccgtgaaagctccgggcttcggcgaccgccgcaaagccatgttgcaagacatcgctatcctgaccggcggcaccgtaattgccgaagaagtcggcctgtctctggaaaaagcgactttggacgacttgggtcaagccaaacgcatcgaaatcggtaaagaaaacaccaccatcatcgacggcttcggcgacgcagcccaaatcgaagcgcgtgttgccgaaatccgccaacaaatcgaaaccgcaaccagcgattacgacaaagaaaaactgcnnnnncacacacttaattaa

SEQ ID NO: 67038 - DNA, 783 bp, Neisseria meningitidis
  misc_feature 768, 769, 770, 771, 772: 'n' is a, c, g or t
atggaaaatatcggcaggcagcgacccatcggcgtttttgactcgggaatcggcggtttgaccaatgtgcgtgcgctgatggaacggctgccgatggagaacatcatttatttcggcgacacggcgcgcgtgccttacgggacgaaatctaaggcgaccatcgaaaatttctcgatgcagattgtcgattttttattggaacacgatgtcaaggcgatggttatcgcgtgcaatacgattgcggcggtggcgggtcagaaaatccgtcaaaagacgggcaatatgccggttttggacgtgatttccgccggcgcgaaagccgcgctggcaaccacgcgcaacaacaaaatcggcattatcgccaccaatacgacagttaacagcaatgcctatgcgcgcgccatccacaggaacaaccccgatacgctcgtccgcacgcaggccgcgccgctgcttgtccctttggtggaggaaggttggttggaacacgaagttacccgcctgaccgtatgcgaatatctcaaaccattgcttgcagacggcatcgatacgctggtgttgggctgcacgcactttcccttgctcaagcccttaatcggcagggaagcgggcaatgtcgcgctggtcgattccgcgattacgactgccgaagaaaccgcacgcgtccttgctcaggaaggattgctcaataccgacaacaacaatcccgactaccgtttttacgtcagcgatattcctttgaaattcagaaccatcggcgagcgtttnnnnncacacacttaa

SEQ ID NO: 67039 - DNA, 600 bp, Neisseria meningitidis
  misc_feature 585, 586, 587, 588, 589: 'n' is a, c, g or t
atgagctacacgcaactgacccaaggcgaacgataccacatccaatacctgtcccgccactgcaccgtcaccgaaatcgccaaacagctgaaccgccacaaaagcaccatcagccgcgaaatcagacggcaccgcacccaagggcagcaatacagcgccgaaaaagcccagcggcaaagccagactatcaaacagcgtaagcgacaaccctataagctcgattcgcagctgattcagcacatcgacacccttatccgccgcaaactcagtcccgaacaagtatgcgcctacctgtgcaaacaccaccagatcacgctccaccacagcaccatttaccgctaccttcgccaagacaaaagcaacggcagcacgttgtggcaacatctcagaatatgcagcaaaccctaccgcaaacgctacggcagcacatggaccagaggcaaagtccccaaccgtgtcggcatagaaaaccgacccgctatcgtcgaccagaaatcccgtatcggcgattgggaagccgacaccattgtcggcaaaggacagaaaagcgcattattgaccttggtcgaacgcgttacccgctannnnncacacacttaa

SEQ ID NO: 67040 - DNA, 633 bp, Neisseria meningitidis; identical to SEQ ID NO: 39614

SEQ ID NO: 67041 - DNA, 1284 bp, Neisseria meningitidis
atgaaccgtaacgaaattttattcgaccgcgccaaagccatcatccccggcggcgtgaattcccccgtccgcgcattcggcagcgtcggcggcgtgccgcgcttcatcaaaaaagccgaaggcgcgtatgtttgggacgaaaacggcacgcgttataccgactatgtcggctcttgggggcctgcgattgtcggacacgcgcaccccgaagtcgtcgaagccgtgcgcgaagccgcgttgggcggtttgtcgttcggcgcgcccaccgaaggcgaaatcgccattgccgaacaaatcgccaaaatcatgccgtccgtcgaacggctgcgccttgtcagctccggtaccgaagccactatgaccgccatccgtctggcacgcggttttaccggccgcgacaaaatcatcaaatttgaaggctgctaccacggccattccgacagcctgttggtgaaagccggcagcggtctgctgacgttcggcaacccgtcttccgccggcgtgcctgccgactttaccaaacacactttagtcctcgagtacaacaatatcgcccaactggaagaagcctttgctcaaagcggcaatgacattgcctgtgtgattttggagccttttgtcggcaatatgaatctggttaggccgtctgaagcctttgtcaaagccttgcgcgaattgaccgaaaaacacggcgcggtgttgatttacgacgaagtgatgaccggtttccgcgtcgcgctcggcggcgcacaatcgctgcacggcatcacgcccgacctgaccacgatgggcaaagtcatcggcggcggtatgccgcttgccgcgttcggcgggcgcaaagacattatggaatgtatttccccactgggcggcgtgtatcaggcaggtacattatcaggcaacccgattgccgtcgccgccggtttgaaaacgctggaaatcatccgccgcgaagggttttatgaaaacctgacggcgcgtaccgaacagttggttcaaggttttcagacggcagcggatgcggcgggcatcgagttcgccgccgacagcgtgggcgggatgttcggcctgtattttgccagccatacgccgcgaaactatgccgatatggcgcgatccaatatcgacgctttcaaacgcttcttccacggcatgctcgaccgcggcattgcctttggcccgtccgcttatgaagcaggtttcgtttctgccgcgcatacgcccgagctgattgacgaaacggttgcggttgcggttgaagtgttcaaggcgatggctgcatga

SEQ ID NO: 67042 - DNA, 1233 bp, Neisseria meningitidis; identical to SEQ ID NO: 36624

SEQ ID NO: 67043 - DNA, 1836 bp, Neisseria meningitidis
gtgaacactactcctatccactccaaactcgccgaaatcaccgggcgcattattgaacgcagccgtccgacgcgtgaaaaatatctggcgaaaatccgtagtgccaaacagatgggacgcttagagcgcaaccaactcggctgcagcaatttggcgcacggctacgcctccatgcccaaaagcatcaaaatcgaaatgcttcaggacaccgttcccaacttaggcatcatcaccgcctacaacgacatggtttccgcacaccagccgtttaaagacttccctgaccaaatcaaagacgaagcgcagaaaaacggcgcaaccgcgcaagttgccggcggtacgcccgccatgtgtgacggtattacccaaggctatgccggcatggaattgtcgctgttctcccgcgacgtaattgccatgagtactgctgtcggtctgtctcatcaaatgtttgacggcagcctgtttatgggcgtgtgcgacaaaatcgttcccggtttgatgatcggtgcgttgtctttcggccatattccgggtatcttcgtccccgcaggcccgatgtccagcggtatcggcaacaaagaaaaagcccgcacccgccagcttttcgccgaaggcaaggtcggacgcaacgaacttttgaaaagcgaaatgggttcttaccacagcccgggcacctgcactttctacggcacggcaaactccaaccaaatgatgatggaaatgatgggcgtgcacctgcctgccgccgccttcgtccacccttacaccgacctgcgtgaagccctgacccgctatgccgccggacacctcgcacgcggcatcaaaaacggcacgattaaaccattgggcgaaatgttgaccgagaaatccttcattaacgccctaatcggcctgatggcaaccggcggctcaaccaaccacaccatgcacctcgttgccatggcacgcgccgccggcgtgattttgaactgggacgactttgacgaaatttcttccatcatcccattgctgatccgtgtgtaccccaacggcaaagccgacgtaaaccactttaccgctgccggcggtctacctttcgttatccgcgaattgctggacgcaggcctgttgcacgacgatgtcgataccgttgtcggacacggtatgcgccactacaccaaagagcctttccttatcgacggcaaactcgaatggcgcgaagcccccgaaaccagcggcaacgacgacatcctgcgcaaagccggcaacccgttctcccccgacggcggtctgcgcctgatgaaaggcaacatcggtcgcggcgtgattaaagtgtccgccgtgcgcgaaggctgccgcatcatcgaagcacctgccatcgtgttcaacgaccaacgcgaagtattgtccgcatttgaacgcggcgagttggaacgcgatttcgtctgcgtcgtccgctaccaaggcccgcgtgccaacggtatgcccgaattgcacaaactgaccccgcctttgggcatcctgcaagaccgcggcttcaaagtggcactgctgaccgacggtcgtatgtccggcgcgtccggcaaagttccagcctccatccacatgacacccgaagccctgatgggcggcaacatcgccaaaatccgtaccggcgacctgatccgcttcgattccgtgaccggcgaactcaacgtcctgattgacgaagccgaatggaatgcccgcgaagtcgaacacatcgacttgggcgcgaaccaacaaggctgcggccgcgaactcttcgccggcttccgcagtttgaccggcggcgcggaaaccggcgcgatgagcttcggcggcgaatttgcctga

SEQ ID NO: 67044 - DNA, 435 bp, Neisseria meningitidis; identical to SEQ ID NO: 53650

SEQ ID NO: 67045 - DNA, 1410 bp, Neisseria meningitidis
atggatacacaaatcaaaactgaagccggtcagcagaataaccggcgttatctgaccgtttggcggtggcatttttatgccggtctgctggttatgccttttcttaccctgcttgccgttacgggtttgggtatgctgctgtttgccaatattaccggtaaggagggcgagcggattcatgttgtgccgcaggcaacggtacaacctctgtctgttcaggcggaagcggcacgcagtgccgttaatccggaaacttcgtccgtcgttcagtatattgcgccgcgtgccgatgatatggttgccgtgttccgtgtcaacaatgagggtaaggcaacgatggtcgcggtcgatccttatacggcaaaagtggtcagtaccatgccgcgcaatcagggttggtattacgcgatggatgaaatccacagcgatatgatgctcggttcgacaggtgattatcttttggaaacgactgcatcgctgacgattatcatgataatcagcggtttgtacctttggtgggtgaaacggcgcggcatcaaggcgatgctgctgccgccaaaaggcagggcgcgttcttggtggcggaatctgcacggcgcgtttggaacttgggtgtcgttgattttactgttgttctgcctgtcgggtattgcttgggcaggtatttggggcggcaagttcgtgcaggcttggagtcagttcccggcaggcaaatggggtgtcgaaccgaaccctgtttcagtcgtgccgacccatggcgaggtattgaacgacggcaaggttaaggaagtgccgtggattttggagcttacgcctatgcctgtttcagggacgactgtgggcaaagacggcattaaccccgacgagccgatgacattggaaaccgtcgaccgttttgcgcgggaaatcggtttcaaagggcgttatcagttgaatttgcccaaaggcgaggacggcgtatggactttgtcgcaagactctatgagttacgatatgattagtccgtttgccgaccgcacggtgcatatcgaccagtacagcggcaagattcttgccgacatccgttttgatgattacaacccgttcggcaaatttatggcggcgagcattgcgctgcatatggggactttgggctggtggagcgtgttggcgaacgtcgtgttctgccttgccgtcatttttatcggtatcagcggctgcgtgatgtggtggaaacgccgtccgtccggcgcggtgggcatggttccgccggcgcaaaaaatcaagctgcccgtctggtgggcaatggcggtgccgctgctgctgattgcattgcttttcccgaccgcgctgcttgccattgccgtgatttggctgttggatacgctgctgttgtcgcggattcctgttttgaggagatggtttaaatga

SEQ ID NO: 67046 - DNA, 3435 bp, Neisseria meningitidis
atgaccgagccgacctacatccccctgcgcctgcataccgagttctcaattaccgacggtatggtgcggattaaaaaactgattgccaaagcgcaggaatacggtttgcctgctttgggcatcagcgatttgatgaacgaattcggtttggtgaaattctataaagcctgccgcggcgcagggattaagcccatcggcgcggcggacgtgtggataggcaatccgaatgcgcccgacaagccgttccgtgccatgctgattatccgcaacgatgcgggctatctgcgtttgagcgagcttttgacagaggcctatgtcggcaaagaccgcaatatccatcatgcggaactcaaccccgaatggctggaaaacggcgacaacagcggcttgatttgtttgagcggcgcgcattacggcgaagtgggcatgaatctgttgaacggcaatgaagacgcggcgcgcgcggcggcgttgaaatatgcggcatggtttcccgatgcgttttatttagagctgcaacgcctgcccgaacgccccgaatgggaggcttgcgtttccggcagcgtgaagctggcggaggaactgggtttgccggtggtggcgacgcatccgacgcagtttatgaaccgcgacgatttcaacgcgcacgaggcgcgggtgtgtatcgcgggcggctgggtattgacggacaaaaaacgtccgcgcgatttcacgccggaccagtttttcattccgccggaaacgatgctggagcgtttcgccgacttgcccgaagccttggaaaacacggtggaaatcgccaaacgctgcaacctgcacatcacattgggcaaaaacttcctgccccttttccccacgcccgacggtttatcgcgtgatgactatctcatcaaactctcaaacaagggcttgcaggaacgcatggttcagctttatcccgacgaggcggagcgtgcggcaaaaatgccggaatatcaggaacgtttggattttgagctgaacatcatcatccagatgaaattccccggctatttccttatcgtacaagactttatcaactgggcgaaaacgcacggctgtccggtcgggccgggacgcggttcgggcgcgggttcgctggtggcgtattcgctgaaaattaccgacctcgacccgctgaaatacgcgctgctgtttgaacgtttcttaaaccccgaacgcgtctccatgcccgacttcgacgttgacttctgtcaggcaaaccgcggccgcgtgatcgaatatgtgcgcgataaatacggcgctcaggcggtcagccagattgttaccttcggcacgatgtcgtccaaagcggtcatccgcgacgtggggcgcgtgttggagctgccgtttatgctgtgcgacaaactgtccaagctgattccgttggaagccaacaaacccctgagtttggacgacgcgatgaaggcggagccgcagattcaggaattaatcgaagcggaagaagcggacgaactcattacgctggcgaaaaagctggaagatttgacgcgcggtctgggtatgcacgcgggcggcgtgttgattgcgccgggcaagatttccgattacagccccgtgtatcaggcggatgaatccgcctctcccgtatccatgtacgacaagggcgacgtggaagacgtgggtttggtgaaattcgactttttaggtctgcgtaacctgaccattatcgaaatggcgcagaacaacatcaaaaacaccaccggcgatatcatcgatgtcggcaagattccgctcgacgaccaagccgcctaccaaatcttccgagatgcgaacaccaccgccgtgttccagttcgagtcgaccggcatgaaaaaaatgctgaaaacggcgcacacgaccaagtttgaagaactgattgccttcgtatcgctctaccgccccggcccgatggacaacatccccgacttcgtcgcgcgcatgaaaggccaggaattccaatacatccatccgctgctcgaaggcatcctcgcgccgacctacgggattatggtgtatcaggaacaagtgatgcaggcggcgcaaattatcggcggctactcgctcggcggcgcggacctgctgcgccgcgcgatgggtaagaaaaagcccgaagaaatggtgaaacaccgcgaaatctttgccgaaggcgcggcgaaacaaggcatttcgcgcgaaaaatccgacgaaatcttcaactacatggaaaaattcgccggctacggtttcaacaaatcccacgccgccgcctacgccctgatttcctaccagaccgcatggctcaaagcccactaccccgccgaatttatggcggcgaccatgtcgtccgaattggacaacaccgaccagctcaagcatttctacgacgactgccgcgccaacggcatcgagttcctgccgcccgacatcaacgaatccgactaccgcttcacgccgtatccggacatgaaaatccgctacgcactcggcgcgattaaaggcacgggcgaggccgccgtcgaatccatcatcgccgcgcggcaaagcggcggcaagtttaccggcctcttggacttctgcgagcgcgtcggcaaagaacacatgaaccgccgcaccctcgaagccttgatacgcggcggcgcgttcgacagcatcgaacccaaccgcgccatgctcttggcaaacatcgaccttgccatgaacaacgccgaccaaaaagccgccaacgccaatcagggcggacttttcgacatgatggaagatgccatcgaaccggtgcggctcgtcgatgcacccatgtggagcgaatcggaaaaactcgccgaagaaaaaaccgtcatcggcttttacctctccggccacccgttcggcccgtatgcccaagaagtccgccaaatcgcaccgaccaaattagaccgtctgaagccgcaagacagcgtgcgcctcgccggattcgttaccgccgtgcgtacgatgatgggcaagcgcggcaaaatcgccttcgtcagccttgaagatttgagcgggcaggttgaaatcatggtcggcggtcagacgttggaaaactgcgccgactgcctcaaagccgaccaagtgctgattatcgaatccaaagtcagccgcgacgactacggcggcggcgacgggctgcgtattctggcaaaccaagtcatggccctgcaaacggcgcgcgaacgctacgcccgcagcctcagcctcgccctcgccccgcatcacgacatcggcggactggtacaactgcttgccgcccaccaactgcccgacacgccgcgcatcccgctgcaactgtcgtatgccaacgaaaaagcgtcgggcaggcttcaagtgccgccgaaatggacggttacgccgagttccgcattgttcggcgaactggaaacattgctcggcagccggtcggtgcgcgtgaattggtaa

SEQ ID NO: 67047 - DNA, 135 bp, Neisseria meningitidis; identical to SEQ ID NO: 44583

SEQ ID NO: 67048 - DNA, 168 bp, Neisseria meningitidis; identical to SEQ ID NO: 38803

SEQ ID NO: 67049 - DNA, 993 bp, Neisseria meningitidis
atgattgccagacacatcgaccgtttcccgctattgaagttggatcaggtaattgattggcagccgatcgaacaatacctgaaccgtcaaaaaacccgttaccttagagaccaccgcagccgtcccgcctacccgctgttgtccatgttcaaagccgtcctgctcggacaatggcacagcctctccgatcccgaactcgaacacagcctcatcacccgcatcgatttcaacctgttttgccgtttcgacgaactgagcatccccgattacagcaccttatgccgctaccgcaaccggctggcgcaagacgacaccctgtccgaattgctggaactgattaaccgccaactgaccgaaaaaggtttaaaagtagagaaagcatccgccgctgtcgttgatgccaccattattcagaccgccggcagcaaacagcgtcaggccatagaagtcgatgaagaaggacaagtcggcggccaaaccacaccgagtaaggataaagatgcccgttggacaaagaaaaacggcctctacaaactcggttacaaacaacatacccgtaccgatgcagaaggctatatcgagaaactgcacatcacccccgccaatgcccatgagtgcaaccacctgttgcctttgctggaaggtatagccgaaggcacgaccgtctatgccgacaaaggctatgacagtgcggaaaaccggcaacatctggaagagcgtcagttgttagacggcattatgcgcaaagcccaccgcaaccgtccgctgacggaagtgcaaaccaaacgtaaccgatatttgtcgaagacccgttatgtggtcgaacaaagcttcggtacgctgcaccgtaaattccgctacgcccgggcagcctatttcggactgattaaagtgagtgcgcaaagccatctgaaggcgatgtgtttgaacctgttgaaagcggccaacaggttaagtgcgcccgctgccctaaaaggcagcccggatgcctga

SEQ ID NO: 67050 - DNA, 1839 bp, Neisseria meningitidis
atgtgcggtatcgtcggcgccatccgcgcccatcacaacgtcgtcgattttctgaccgacggcctcaaacgcctcgaataccgggggtatgactcatcaggcattgccgtcaacaccgacggcaaaatcaaacgcgtgcgccgcgtcggacgcgtgcagcttatggaggacgcggcacgcgaaaaaggcatcagcggcggcatcggcatcggacatacgcgttgggcgacacacggcggcgttactgagccgaacgcccacccgcacatcagcggcggtatgattgcggtcgtacacaacggcatcatcgaaaactttgaaagcgaacgcaaacgtttggaaggtttgggataccgttttgaatcgcaaacggataccgaagtcatcgcacacagcatcaatcacgaatacgcgcaaaacggcggcaggctgtttgaagcggtacaagaagcggtcaaacgtttccacggcgcatacgccatcgcggttattgcccaagacaagcctgatgaattagttgtggcgcgtatgggctgcccgcttttggtcgctttgggcgacgatgaaacctttatcgcttcggacgtatccgccgtcatcgcctttacgcgccgcgtggcgtacctcgaagacggcgacatcgcgctgctggcttcagacggcatcaaaaggctgaccgataaaaacggcctgcctgccgaacgcaaagtcaaggtatccgaactctcgctcgcctctttggaactgggaccgtacagccactttatgcaaaaggaaatccatgagcagccgcgcacgattgcagacacggcggaggttttcctcgacggcggcttcatccccgaaaacttcggcaaaaacgccaaaagcgtgtttgaaagcatccgcagcgtcaaaatccttgcctgcggcacgtcctattacgccgcgctgaccgccaaatattggttggaatccatcgccaaaatcccggccgatgtcgaaatcgccagcgaataccgataccgcagcgtgattgccgatccggaccaactggtcattaccatttcccaatccggcgaaacgctggacacgatggaggcgttgaaatacgcaaaatccttgggacaccgccacagcctctccatctgcaacgtgatggaatccgccctgccgcgcgaaagcagcctcgtgctttatacccgtgccggtgcggaaatcggcgtcgcctcaaccaaagcatttaccacgcagctggttgcgctgttcggtttggcggtaacgctggcgaaagtgcgcggtttggtttccgaagaagacgaagcacgttacaccgaagaactccgccagcttcccggcagcgtgcagcacgctttaaacctcgaaccgcaaattgccgcctgggcgcaacagtttgccaagaaaaccagcgcgctgtttttggggcgcggcatccattacccgattgccctcgaaggcgcgttaaaactgaaggaaatcacctacatccacgccgaagcctatcctgccggcgaactgaagcacgggccgcttgccttggtggacgaaaacatgcccgtcgtcgtcatcgcacccaacgacagcctgttggacaaagtcaaagccaatatgcaggaagtcggcgcgcgcggcggcgaacttttcgtctttgccgacctcgacagcaattttaatgccaccgaaggtgtgcacgttatccgcgcaccgcgccacgtcggcaaactgtcccccgtcgtgcatactatccccgtgcagctcctttcctaccatgtcgccctcgcacgcggcaccgatgtagacaaaccgcgcaacctggcgaaatccgttacggtcgaataa

SEQ ID NO: 67051 - DNA, 501 bp, Neisseria meningitidis; identical to SEQ ID NO: 40961

SEQ ID NO: 67052 - DNA, 408 bp, Neisseria meningitidis; identical to SEQ ID NO: 39722

SEQ ID NO: 67053 - DNA, 1392 bp, Neisseria meningitidis
atgagcggtcagttgggcaaaggggcggattcgcctgatttggtgtacggtttggaagacaggccgccgttcggtaatgcgctcttgagtgccgttacccatcttttggcgatttttgtgccgatgattacgcccgcgctgattgtgggcggcgcgctggaactgccggtggaaatgacggcgtatctcgtgtcgatggcgatggttgcgtcgggtgtcggcacttatttgcaggtcaaccgcttcgggccggtcggttcggggatgctgtccatccagtcggtgaatttctcgttcgttaccgtcatgattgcgctcggcgcggggatgaaagagggcggtttgactaaggatgcgatgatttcgacgctcttgggtgtatcgtttgtcggcgcgtttttggtgtgtttctcggcgtggctgctgccgtatttgaaaaaagtgattacgccgacggtcagtggcgtggtcgtgatgctgattggcttgagtttggtacacgtcggtattaccgatttcggcggcggcttcggcgcgaaggcggacggcacgttcggctcgatggaaaacctggggctggcttcgctggtgttgctgattgtgttgatattcaactgcatgaaaaacccgctgttgcggatgagcggcatcgcggtcggtctgattgccggttacattgtcgcgctgtttttgggcaaggtggatttttccgcgctgcaaaacctgccgctggttacgctgcccgtaccgtttaaatatggttttgcttttgactggcacgcgtttattgtggcgggcgcgattttcttgttgagcgtgtttgaggcggtcggcgatttaaccgcgacggcaatggtgtccgaccagccgattgaaggcgaggaatacaccaaacgcctgcgcggcggcgtgttggctgacggcttggtgtcggtgattgcgacggctttgggttcgctgccgctgacgacgtttgcgcaaaacaacggcgtgattcagatgaccggcgtggcttcgcgccatgtgggcaaatatattgccgtgattttggtgctgttgggtctgttccccgttgtcggacgcgcgtttacgacgattccgagtccggtgttgggcggcgcgatggttttgatgttcggcttgattgcgattgcgggcgtgcggattttggtcagccacggcatccgcaggcgcgaagcggtaattgcagcaacgtcggtcggtttgggcttgggtgtcgcgtttgagccggaagtgtttaaaaacctgcccgtcttgttccaaaactctatttccgccggcggcattacggcagtcttgctgagtttggtcttgcccgaagataaaaccgaggcggcggtcaagtttgataccgaccacttggaacactga

SEQ ID NO: 67054 - DNA, 648 bp, Neisseria meningitidis
atgcctgaattgccggaagtggaaacgacgttgcgcggcatcgcgccgcatattgaagggaaaacggtggaagccgtggtattgcgccaattgaagctgcgctggcagattaatcccgatttgggggagattttgtccggccggcaggtgttgtcctgcggcaggagggcgaaatacctgcttatccgctttcaaacgggcgtgctgctgattcacttggggatgtcgggcagcttgcggatttttacgccgtcggacggacgtatcggcaggccggacagacacgatcacgtcgatattgtgttttcagacggcacggtcatgcgttaccgcgatccgagaaagttcggcgcgatactttggtatgagggaatcgaagaacatcatccgctgttggaaaaactggggccggagcctttgtcggaggcattttgcacggattatctgtatgtgaggctgaaggcgcagaaacgcgcgctcaaacttgccctgatggacaatgcggtcgtggtcggtgtgggcaacatttatgccaacgagagcctgttcagagcgggcatttcgccccaccgtcctgccaaccgcctgaaaaagaaagagtgtgcgctttggttgaaccgtcaaagcggtgttgcagcgcgccattga

SEQ ID NO: 67055 - DNA, 717 bp, Neisseria meningitidis
atgaactttgaaaacgacgacattatccatgcgccgaccacgtcttccctgattctcgaagagcggcacgattcggagctgttccgtgtttacgccctgattttggacggcattaccgatcaggtgctgctgcccggcaaaaagctgaccgagtccgaactttgccgccagatggtgtgttcgcgcaacaccgtccgcggcgcgctgtcgcttttggcgcacgacaagattgtcgatttgcaacccaacaggggcgcgttcgtccacgttcccgatttgaaagaaatgcaggatgtgttcaatgcgcgcatcgaaatggagacgatgattttgaatatcctcgcagatttgccggatttggaaacgcgcctcaagccgctttatgcgatgatacggcgcgaagaagaggcctccggcaggggcgaccgcgttggctggaaccgcctgtccaatgccttccacgtcgaactggcgcgcctggtgggcaacgatgtgctgttcgacattatgaacacgctgtgcgcgcggtcttccctgattgtcgccgtggcgggcgtgcatcgcgaggaaaaacacgccatcaatacgcatacgcattcagaacaccgcgaaatcctcgacctgctgctggcgggcaggcgcaaccgcgtggtcaaaatcctgcgccgccatttgggcaactgtatggagcgtttggaaaagactttggaagattga

SEQ ID NO: 67056 - DNA, 306 bp, Neisseria meningitidis
atgattaccttgacgcattatctggtactgggtgcgctcctgttcggtatcagcgcaatgggtatctttatgaaccgcaaaaacgtgctggtattgctgatgtccatcgagctgatgcttttggcggtgaacttcaactttatcgccttctcgcaacatttgggcgatactgccggacaaattttcgtattcttcgtattgaccgttgccgctgccgaatccgccatcggtttggcgattatggtgctggtgtaccgcaatcgacaaacaatcaacgttgccgatttgaacaaacttaaaggctga

SEQ ID NO: 67057 - DNA, 804 bp, Neisseria meningitidis
atgaaaaaaattcttttaacggtttcattaggtttggcactgagtgcctgtgccactcaaggtacggtcgataaagatgctcagattacccaagattggagtgtggagaagctctatgccgaagcccaggacgaattgaacagcagcaattatacgcgggctgtcaagttatacgaaatcttggaatcgcgcttccccaccagccgccatgcccggcagtcgcaactggataccgcatacgcctattataaagacgatgaaaaagacaaagctctggcggcaatcgaacgcttccgccgccttcacccgcaacacccgaatatggattacgcgctgtatctgcgcggcttggtgctgttcaacgaagaccagtccttcttgaacaaactggcctcgcaagactggtccgaccgcgacccgaaagccaaccgcgaagcgtaccaggcgtttgcggaactcgtccaacgcttcccgaacagcaaatacgccgccgatgcaaccgcacgcatggtcaaactggtcgatgcactgggcggcaatgaaatatcggtggcgcgctactacatgaaacgcggtgcatacatcgccgccgccaaccgcgcccaaaaaatcatcggcagctaccagaatacgcgttatgtcgaagaatcgctcgccatattggaacttgcctaccaaaaactcggcaaaccacagcttgccgccgatacgcgccgcgtgttggaaaccaacttcccgaaaagcccgtttttgacgcacgcttggcagcccgacgatatgccctggtggcgttactggcattaa

SEQ ID NO: 67058 - DNA, 360 bp, Neisseria meningitidis; identical to SEQ ID NO: 38354

SEQ ID NO: 67059 - DNA, 834 bp, Neisseria meningitidis
  misc_feature 6, 7, 8, 9, 10: 'n' is a, c, g or t
gtgtgnnnnnggcagcaatacagcgccgaaaaagcccagcggcaaagccagactatcaaacagcgtaagcgacaaccctataagctcgattcgcagctgattcagcacatcgacacccttatccgccgcaaactcagtcccgaacaagtatgcgcctacctgtgcaaacaccaccagatcacgctccaccacagcaccatttaccgctaccttcgccaagacaaaagcaacggcagcacgttgtggcaacatctcagaatatgcagcaaaccctaccgcaaacgctacggcagcacatggaccagaggcaaagtccccaaccgtgtcggcatagaaaaccgacccgctatcgtcgaccagaaatcccgtatcggcgattgggaagccgacaccattgtcggcaaaggacagaaaagcgcattattgaccttggtcgaacgcgttacccgctacaccatcatctgcaaattggatagcctcaaagccgaagacactgcctgggcagctgttagggcattaaaggcacataaagacagggtgcacaccattaccatggataacggcaaagagttctaccaacacaccaaaataaccaaagcattgaaagcggagacttatttttgtcgcccttaccattcttgggagaaagggctgaatgagaacaccaacggactcatccggcaatacttccccaaacaaaccgatttccgtaacatcagtgatcgggagatacgcagggttcaagatgagttgaaccaccgaccaagaaaaacacttggctacgaaacgccaagtgttttattcttgaatctgttccaaccactaatacactag

SEQ ID NO: 67060 - DNA, 240 bp, Neisseria meningitidis
  misc_feature 225, 226, 227, 228, 229: 'n' is a, c, g or t
atgaaaaaacaaatcaccgcagccgtaatgatgctgtctatgattgcccccgcaatggcaaacggcttggacaatcagacatttgaaaaccaagtgttccacacgcaggcagatgcgccgatgcagttggcggagctttctcaaagagatgaaagaactgacgggctgcgcacgttggtgcataggaatttgcatgcggcagattcttgcgcagcgttgggttannnnncacacacttaa

SEQ ID NO: 67061 - DNA, 999 bp, Neisseria meningitidis
atgtccgaaaacaaacaaaacgaagtcctgagcggttacgaacaactcaaacggcgcaaccgccgccgcctcgtaacggcaagttgcctggttgccgcctcctgcatcctgctggcagccgccctcagttccggccctgccgaacagactgccggcgaaacaagcggcgtagaaaacaaagcggcaggtgcggcacaaacccctgccttgaaatccgccgccgacaaaccgcaggacttggcaggcgaagacaagccttctgccgccgacagcgaaatcagcgagcctgaaaacgtaggcgcgccgctggtgctgattaacgaccgcctcgaagacagcaacatcaaaggtttggaagcatccgagaaactgcaacaggcagaaaccgccaaaaccgcaccgaagcaggcaaaacaacgcgctgccgaaaaagtgccggcaactgccgacagtacggatacggtagcggttgaaaaaccgaaacgcactgccgaaacaaaaccgcaaaaagcggaacgcactgccaaagccaagcccaaagccaaagaaaccaaaaccgccgaaaaagttgccgacaaaccgaaaactgccgccgaaaaaaccaaaccggatacggcaaaatccgacagcgcggtaaaagaagcgaaaaaagccgacaaggctgaaagcaaaaaaacagccgaaaaagaccgttcggacggcaaaaaacacgaaacggcacaaaaaaccgacaaagcggacaagaccaaaaccgccgagaaggaaaaatccggtaaaaaagccgccattcaggcaggttatgccgaaaaagaacgcgccttaagcctccagcgcaaaatgaaagcggcgggtatcgattcgaccatcaccgaaattatgaccgacaacggcaaagtttaccgcgtcaaatcaagcaactataaaaacgcaagggatgccgaacgcgatttgaacaaattgcgcgtacacggtatcgccggtcaggtaacgaatgaataa

SEQ ID NO: 67062 - DNA, 360 bp, Neisseria meningitidis
  misc_feature 6, 7, 8, 9, 10: 'n' is a, c, g or t
gtgtgnnnnnccgaataccaccgttatctcgaacgcatcgaagaccatctggacaccgactggctacccgaaaacggcgaaagcaaccccttcctgcatatgtcgctgcatttgtccgtccaagaacaggcgggcatagaccagccgcacggcatacgcgcaatccacgacaccctgtgcgccaaacgcggctggctggaagccgaacacgaaatgatggaggcactggcggaaacactgtggacggcgcaacgctacggcaccggtttggatgtcaatttctacatgacccgactgcgcaaactcatcggcttgggtgcagaagatcaagccaggttgaacccgcatgaaatcgcctga

SEQ ID NO: 67063 - DNA, 660 bp, Neisseria meningitidis
atggacacttggcacgatgcactcggcggcgaaaaacagcagccgtattttcaggaaattttaaatgcagtcaggcaggaacgtttgtcgggacaaatcatctatccgccggaggctgatgtattcaacgcattccgcctgacagcgttcgaccgggtcaaagccgttattctcggacaagacccgtatcacggggcagggcaggcgcacggtttggcattttccgtcaggcagggcgtccgcatacccccgtctttactcaatatctacaaagaattggaaaccgacatcgaaggtttttccattcccgcgcacggctgtctgacagcgtgggcggagcagggcgtattgcttctgaacacggttttgacggtgcgtgcaggacaggcgcattcgcacgcccttttaggctgggaacgctttaccgataccgtcatcaggcagcttgcgacacaccgcaagcaccttgtcttcatgttgtggggtgggtatgcacaacaaaaagggaggctgatagacagtcaaaatcatttgatattgaccgcaccgcatccatctcctctgtcggcatatcgcggttttttcggctgccgccatttttcacaggcaaacagctatttgagccggcacggtatcgatccgataaactggaagctgtga

SEQ ID NO: 67064 - DNA, 834 bp, Neisseria meningitidis
atgccgcacgccctcgtcctccaatttccctccgccgaagccctgccttccgacttcccctcacgcctgcccgaacctgattacgccgatgaaaagcgtatgcgttttatcgttgaagaagggttttctttaagcggggcggacgcggcgttgcttggcagccgtcaaatcgaccacgccgtgttgtcggatatggattttggcgaactcggtttgattgtcagcgatatggattcgacgctgattaccatcgaatgcgtcgatgaaattgcggcaggcgtgggtttaaaagacaaggtagcggaaattaccgagcgttcgatgcgcggagagttggatttcgagcagtcgttgcgcagccgcgttgcgctgttggcgggattggacgaacagattttggcggacgtttatgaaaacgttttgaagctctcgcccggtgcggaatttttgttggacgaatgcaaaaggcacgatgtgaaattcctgctggtgtcgggcggcttcacgttttttaccgaaaggctgcaacaacgcctcggcttcgaataccaacacgccaatgttttggaaattgaaaacggcaggctgaccggccgtctgaaaggcagaatcatcgacgcgcaggcaaaggcggatttattgcgcgaataccgcagccgcctcggattgcagccgcatcaggtgttggcgatgggcgacggtgcgaacgatattccgatgctcaaagaagcgggcataggcgtggcttaccgtgccaaaccgaaagcgcgggccgccgccgatgcctgtatcaacttcggcggtttggagcgtgtacgcggcctgttcggatag

SEQ ID NO: 67065 - DNA, 267 bp, Neisseria meningitidis; identical to SEQ ID NO: 42299

SEQ ID NO: 67066 - DNA, 594 bp, Neisseria meningitidis
ttgtggcaacatctcagaatatgcagcaaaccctaccgcaaacgctacggcagcacatggaccagaggcaaagtccccaaccgtgtcggcatagaaaaccgacccgctatcgtcgaccagaaatcccgtatcggcgattgggaagccgacaccattgtcggcaaaggacagaaaagcgcattattgaccttggtcgaacgcgttacccgctacaccatcatctgcaaattggatagcctcaaagccgaagacactgcccgggcagctgttagggcattaaaggcacataaagacagggtgcacaccatcaccatggataacggcaaagagttctaccaacacaccaaaataaccaaagcattgaaagcggagacttatttttgtcgcccttaccattcttgggagaaagggctgaatgagaacaccaacggactcatccggcaatacttccccaaacaaaccgatttccgtaacatcagtgatcgggagatacgcagggttcaagatgagttgaaccaccgaccaagaaaaacacttggctacgaaacgccaagtgttttattcttgaatctgttccaaccactaatacactag

SEQ ID NO: 67067 - DNA, 984 bp, Neisseria meningitidis
atgagtgaaatcaaaaccgacgaccccaaacgcggcatcaaactcagaggcgcggacaaaaccgcgcgcatccccatcaaagtcgtcccccttcaggaaaaactgaaaaagcccgaatggatacgcgccaaactcccatcgcgcaaattctttgaaatcaaagacattttgcgcgaacaaaagatgcacaccgtttgcgaggaagcctcctgccccaacatcggcgaatgcttcagcaaaggcacggcgaccttcatgattatgggtgacatctgcacccgccgctgcccgttctgcgacgtgggacacggtcggcccaatatgctcgaccccgacgaaccgagaaacctcgccgaatccgtcaaagccatgaacctgcgttacgtcgtcatcacctccgtcgaccgcgacgacctgcgcgacggcggcgcacagcatttcgccgactgcatcaaagccatccgcgaaaccagcccgaacaccaaaatcgaaatcctcgtccccgacttccgaggacgcttggacatcgcactcaaaatccttgccgaaaccccgcccgacgtgatgaaccacaacctagaaacccatccgagcctgtacagaaaagcccgtcccggtgccaattatcaacattctttagacttattaaaacgttataaagaaatgatgccgcacatcccgaccaaatccggcatcatggtcggcttgggcgaaacagacgaagacgtgcgtgaaattatgcgcgatatgcgggcgcacaatatcgaaatgattaccatcggacagtacctccagccttcagacggacacctgcccgtcctgcgctacgttacgcccgagcagttcaaaatctttgaaaaagaagcatacgaactgggcttcagcaatgccgccatcggcgcgatggtacgttccagctaccacgccgacgaacaggctgccgaagccttacgcgaaagccacggcggttgcgggcatcattaa

SEQ ID NO: 67068 - DNA, 1116 bp, Neisseria meningitidis
atgcttaaatttactttacacaaaaaagacggatacgcccgacgcggcacgctggagttgaaccacggcaaaattgaaacgccggtatttatgcctgtcggtacttacggctcggttaaggcgatgaacccgcaaaacctgcacgacatcaaggcgcaaattattttgggcaacacttatcatttgtggctgcgtccgggcttggaggtcgtcgaacagtttggagggcttcacggctttatcggctgggacaaaccgattctgaccgactcgggcggttttcaggttttttctttgtcggatatgcgcaagctgacggaagaaggctgtacgttcaaaagcccgatcaacggcgacaagctgtttttatcgcctgaaatttccatgaaaatccaaacggttttgaactcggacatcgcgatgcagctggacgaatgcacgccgggcgaagcaacgcgcgaacaggcgaaaaaatcgctgcaaatgagcctgcgctgggcggaacggagcaaaaaagcctttgaagatttgaaaaacccgaacgcgctgttcggcatcgtgcaaggcgcgatgtatgaggatttgcgcgaagaatcgctgcgcggtttggaacagtttgattttcccggccttgccgtcggcggcttgtccgtcggcgaacccaagcccgaaatgtaccgtatgctgcgcgccgtcggtccgatactgcctgaacacaaaccgcattacctgatgggcgtaggcacgccggaagacctcgtgtacggcgtggcgcacggcatcgatatgttcgactgcgtgatgcccacccgcaatgcacgcaacggctggctgtttacccgttttggcgatttgaagatcaaaaacgccaaacacaagctcgacaagcgtccgatagacgaaagctgcacctgctacgcctgccaaaacttcagccgcgcctacctgcaccatctgcaccgcgccggcgaaatcttgggcgcacagctcaacaccatccacaacctgcatttctaccaagtcattatggcggaaatgcgcgatgccatagaacaaggcaaatttgccgactggcaggcgcgattccacgaaaaccgtgctcgcggcacagactga

SEQ ID NO: 67069 - DNA, 198 bp, Neisseria meningitidis; identical to SEQ ID NO: 36305

SEQ ID NO: 67070 - DNA, 762 bp, Neisseria meningitidis; identical to SEQ ID NO: 44538

SEQ ID NO: 67071 - DNA, 1629 bp, Neisseria meningitidis
atgatttctaccaacggtattaccatgcagttcggcgcgaagccgctgtttgaaaacgtatccgtcaaattcggcgaaggcaaccgctacggcttgatcggcgccaacggctcaggcaagtccaccttcatgaaaatcctcggcggcgatttggaacagactgccggcgaagtcgcgattgaaaacggcgtgcgtttgggtaaattgcgccaagaccagtttgcctacgaagagatgcgcgtgctggacgtggtgatgatggggcataccgaaatgtgggcggcgatgaccgaacgcgatgcgatttacgccaacctcgaagccaccgaagacgattacatgaaagccgccgaactggaagccaagttcgccgaatacgacggctacaccgccgaagcacgcgctgccgaattgttgagcggcgtgggcatttccgaagatttgcacaatgcgaccatggcagaagttgccccgggcttcaaactgcgtgtattgctggcgcaagccctgttctccaagccggatgtgctgctgcttgacgaaccgaccaacaacttggacatcaacactatccgctggttggaaggcgtgttgaaccaatatgattctacgatgattattatttcgcacgaccgccactttttgaacgaagtctgcacccatatggcggatttggactacaacactatcaccatctatccgggcaactacgacgattacatgctcgcttctgcccaatcgcgtgagcgcgccctgaaagacaatgccaaggcgaaagaaaaattgcaggaattgcaagaatttgtggcgcggttcagtgccaacaaatccaaagcccgtcaggcgaccagccgtctgaaacaggcagacaaaatcaaatcggagatggtcgaagtcaaaccttccacccgccaaaacccgtatatccgttttgaagccgacgaaaaagccaagttgcaccgtcaggctgtggaagtggaaaaactggcgaaacgctttgaaacccagttgtttaaaaacctgaacttcatcctcgaagcgggacaacgccttgccatcatcggcccgaacggcgcaggtaaatctaccttgctgaaactcttggcaggcgcgtacaaccccgaatattcagacggcctgttaccggacgaaggcaccatcaaatgggcggaaaaagccagtgtcggctactatccgcaagaccatgaaaacgacttcgacgtcgatatggacctgagcgaatggatgcgccaatgggggcaggaaggcgacgacgaacaagtcatccgcggcactttggggcgtttgctcttcggcagtaacgatgtcgtgaaaaaagtgaaggttctctccggtggtgaaaaaggccgtatgctttacggcaaactgttgctgttgaaacccaatgtcttagtcatggacgaaccgaccaaccatatggacatggaaagcatcgaatccttgaacatggcactggaaaaatacaacggcacgctgatttttgtctcccacgaccgtcagttcgtttcctccttggcaacccaaatcatcgaactggacggcaaaggcggatatgaacactacttgggcgattacgaaagttacttggagaaaaaaggcgtagcataa

SEQ ID NO: 67072 - DNA, 357 bp, Neisseria meningitidis
  misc_feature 8, 9, 10, 11, 12: 'n' is a, c, g or t
gtgtgtgnnnnngattgtccgttctgcaaacgcttggaacacgagtttgaaaaaatgaccgacgtgacggtttacagctttatgatgcccattgccggcctgcaccctgatgccgcgcgcaaggcgcaaatcttatggtgtcagcccgaccgcgccaaagcgtggacggattggatgcgtaaaggcaaattcccggtcggcggcagcatctgcgacaatcccgtcgcggaaaccacttccttgggcgaacaattcggcttcaacggcacgccgaccctcgtcttccccaacgggcgcagccaaagcggctacagcccgatgccccaactggaggaaatcatccgcaaaaatcaataa

SEQ ID NO: 67073 - DNA, 144 bp, Neisseria meningitidis
  misc_feature 121, 122, 123, 124, 125: 'n' is a, c, g or t
atgagcaccttcttccagcaaaccgcccaagccatgattgccaaacacatcgaccgcttcccgctattgaagttggaccaggtgattgattggcagccgatcgaacagtacctgaatcgtnnnnncacacacttaattaattaa

SEQ ID NO: 67074 - DNA, 1371 bp, Neisseria meningitidis
atgttagacaatttaaccggccgcttcagcaatgtcttcaaaaacatccgggggcaggccaaactgaccgaagacaatattaaagaggccttgcgcgaagtccgcctcgccctgcttgaggcggatgtcgccctgcctgtcgtcaaagagttcgtcaacaacgtcaaagaaaaggccctcggtcaggaagtggcgggcagcctgacgccggatcaggcatttatcggcgtggtcaacaaagccctgaccgaactgatgggcagggaaaacaaaacgctggatttgtcggttgcgccgcccgccgtcgtgttgatggcaggtttgcagggcgcgggcaagacgacgaccgccggcaaactcgcccgcctgctgaaaaacgatcagaagaaaaaggttttggtggtatctgccgacgtttaccgccctgccgcgattgaacaactgcgcctgttggccgaacaggtcggcgtggactttttcccatccgataccaaccaaaaaccggttgaaattgcaactgccgccgtcgattacgccaaaaaacatttttacgatgttttgatggtcgataccgccggccgtctggcaatcgatgaagagatgatgaacgaaatcaaagcccttcacgcggcggttaacccggtggaaactttgttcgtcatcgatgcgatgctgggtcaggatgcggtgaacactgctcaggcatttaatgaagccctgccgctgaccggagtcgtattgaccaagatggacggcgactcgcgcggcggtgcggcattgtccgtacgccatgtaaccggcaaaccgattaaatttatcggtgtcggcgaaaaaatcaacggcctcgaacctttccaccccgaccgtcttgccagccgtatcctcggcatgggcgacgtattgaccctgattgaagacgttcaaaaaggtattgatgaagaagccgccgccaaaatggcgaaaaagctgcaaaaaggcaaaggcttcgacctcaacgactttaaagaacaaatccagcaaatgcgcaatatgggcggtttggaaaacctgatgtcgaaaatgccgggcgaactgggtcaaatatcgaaacaaatccccgaaggaacggctgaaaaagcgatgggcaaagtggaagccatcatcaactcgatgactccaaaagaacgcgccaaccctgccctgctcaaagccagccgcaaacgccgtattgcaatgggtgcgggcacgaccgtacaggaagtgaacaaattgctcaaacagtttgaacaaatgcaacaaatgatgaagatgttcagcggcaacggcttgggcaaactgatgcgtatggcgaaaggaatgaagggaatgaaaggaatgttcccgggtttgtaa

SEQ ID NO: 67075 - DNA, 2037 bp, Neisseria meningitidis
atgactgacaacgcactgctccatttgggcgaagaaccccgttttgatcaaatcaaaaccgaagacatcaaacccgccctgcaaaccgccatcgccgaagcgcgcgaacaaatcgccgccatcaaagcccaaacgcacaccggctgggcaaacactgtcgaacccctgaccggcatcaccgaacgcgtcggcaggatttggggcgtggtgtcgcacctcaactccgtcaccgacacgcccgaactgcgcgccgcctacaatgaattaatgcccgaaattaccgtcttcttcaccgaaatcggacaagatattgccttatacaaccgtttcaaaaccatcaaaaactcccccgagttcgacaccctctcccccgcacaaaaaaccaagctcgatcacgacctgcgcgatttcgtattgagcggcgcggaactgccgtccgaacagcaggcagaactggcaaaactgcaaaccgaaggcgcgcaactttccgccaaattctcccaaaacgtcctagacgcgaccgacgcgttcggcatttactttgacgatgccgcaccgcttgccggcattcccgaagacgcgctcgccatgtttgccgccgccgcgcaaagcgaaggcaaaacaggctacaaaatcggcttgcagattccacactacctcgccgtcatccaatacgccgacaaccgcgaactgcgcgaacaaatctaccgcgcctacgttacccgcgccagcgaactttcagacggcggcaaattcgacaacaccgccaacatcgaccgcacgctcgcaaacgccctgcaaaccgccaaactgctcggcttcaaaaactacgccgaattgtcgctggcaaccaaaatggcggacacccccgaacaagttttaaacttcctgcacgacctcgcccgccgcgccaaaccctacgccgaaaaagacctcgccgaagtcaaagccttcgcccgcgaaagcctgaacctcgccgatttgcaaccgtgggacttgggctacgccagcgaaaaactgcgcgaagccaaatacgcgttcagcgaaaccgaagtcaaaaaatacttccccgtcggcaaagtattaaacggactgttcgcccaaatcaaaaaactctacggcatcggatttaccgaaaaaaccgtccccgtctggcacaaagacgtgcgctattttgaattgcaacaaaacggcgaaaccataggcggcgtctatatggacctctacgcccgcgaaggcaaacgcggcggcgcgtggatgaacgactacaaaggtcgccgccgtttttcagacggcacgctgcaactgcccaccgcctacctcgtctgcaacttcgccccacccgtcggcggcagggaagcccgcctgagccatgacgaaatcctcaccctcttccacgaaaccggccacggcctgcaccacctgcttacccaagtggacgaactgggcgtgtccggtatcaacggcgtagaatgggacgcggtcgaactgcccagccagtttatggaaaatttcgtttgggaatacaatgtattggcgcaaatgtccacccacgaagaaaccggcgagcccctgccgaaagaactcttcgacaaaatgctcgccgccaaaaacttccaacgcggaatgttcctcgtccgccagatggagttcgccctcttcgatatgatgatttacagcgaagacgacgaaggccgtctgaaaaactggcaacaggttttagacagcgtgcgcaaagaagtcgccgtcatccaaccgcccgaatacaaccgcttcgccttgagcttcggccacatcttcgcaggcggctattccgcaggctattacagctacgcgtgggcggaagtattgagcgcggacgcatacgccgcctttgaagaaagcgacgatgtcgccgccacaggcaaacgcttttggcaggaaatcctcgccgtcggcggatcgcgcagcgcggcagaatccttcaaagccttccgcggccgcgaaccgagcatagacgcactcttgcgccacagcggtttcgacaacgcggcttga

SEQ ID NO: 67076 - DNA, 1677 bp, Neisseria meningitidis
atgtcccaacaatacgtctattctatgctgcgcgtgagcaaggttgtgccgccgcagaaaaccatcattaaagatatttccctttctttcttccccggcgcgaaaatcggcctgctcggtttgaacggcgcgggcaagtccaccgttttgcggattatggcgggcgtggataaggaatttgagggcgaagccgtgccgatgggcggcatcaaaatcggctacctgccgcaagagcctgagcttgatccggaaaaaaccgtgcgcgaggaagtggaaagcggtttgggcgaagtggctgccgcgcagaaacgtttggaagaagtgtatgccgagtacgccaatcctgatgcggattttgacgcgttggcagaagagcagggccgcttggaagcgattattgcggcaggttcgtccacgggcggcggtgcggaacacgaattggaaatcgccgccgacgcgctgcgcctgccggaatgggatgccaaaatcgataatttgtccggcggtgaaaaacgccgcgttgccttgtgcaaactcttgttgagcaagcccgatatgcttttgctggacgagccgaccaaccacttggatgcggaatcggtcgagtggctggagcaatttctcgtgcgcttccccggcacagtcgttgcggtaacgcacgaccgctacttcctcgacaacgccgccgaatggattttggaactcgaccgcggccatggtattccgtggaaaggcaattactcgtcttggctggagcagaaagaaaaacgcttggaaaacgaggcaaaatccgaagccgcgcgcgtgaaggcgatgaagcaggaattggaatgggtgcgccaaaatgccaaaggccgccaagccaagtccaaagcgcgtttggctcgttttgaagaaatgagcaactacgaataccaaaaacgcaatgaaacgcaggaaatcttcattcccgtcgccgagcgtttgggtaacgaagtgattgaatttgtgaatgtttccaaatcgttcggcgacaaagtgctgattgacgatttgagcttcaaagtgcctgcgggcgcgattgtcggcatcattggtccgaacggcgcgggtaaatcgacgctgtttaaaatgattgcgggcaaagagcagcccgattccggtgaagtgaaaatcgggcaaaccgtgaaaatgagcctgattgaccaaagccgcgaaggtttgcaaaacgacaaaaccgtgttcgacaacatcgccgaaggccgcgacattttgcaggttggtcagtttgaaattcccgcccgccaatatttgggacgcttcaactttaaaggcagcgaccaaagcaaaatcacggggcagctttccggcggcgaacgcggacgtttgcacttggcaaaaaccttgttgggcggtggcaatgtgttgctgctggacgaaccgtctaacgacctcgacgtggaaaccctgcgcgcgctggaagacgcattgttggaatttgccggcagcgtgatggtgatttcgcacgaccgctggttcctcgaccgtattgctacgcatatcttggcttgcgaaggcgactccaaatgggtgttcttcggcggcaactatcaggaatacgaagccgataagaaacgccgactcggcgaagaaggcgcgaaaccgaaacgcatcaaatacaaaccggtaacgcgttaa

SEQ ID NO: 67077 - DNA, 771 bp, Neisseria meningitidis
gtgtccgaaacacaaaacgaacaacccgtccaaccgcttgtcgagcatctcatcgagctgcgccgccgcctgatgtggatggttatcggcattctcgtctgctttttcggcatgatgccgtttgcccaacaactctatacttttatcgccaacccgctgatggcaaacctgcccaaagacaccagcatgattgccaccgatgtcatcgcaccgtttttcgtgccggtcaaagttaccctgatggcggcatttttaatttcgctgccgcatacgctctaccaaatctgggcatttgtcgcccccgcactctaccaaaacgaaaaacgcctgattacgccgctcgtcctctccagcgtcagcctgtttttcatcggtatggcatttgcctactttttggttttccccgtcattttcaaattccttgccggcgttacccctgtcggggtcaatatggcgacagacatcgacaaatacctctccttcatcttggggatgtttgtcgcattcggtacaacgtttgaagtccccattgtcgttatcctgttaaccaaaattggtgtggtaacaaccggacagctcaaacgcgcccgcccctatgtgattgtcggcgcgtttgtcattgccgccatcatcacgccgcccgatgtgatttcacaaaccctgcttgccattccgctgattctcttatacgaagcaggtatttggttcggacgctttttcacgccacgttcagaacaggatggcgacatacagccgcctgcaacaacctga

SEQ ID NO: 67078 - DNA, 285 bp, Neisseria meningitidis
ttgcttgcagacggcatcgatacgctggtgttgggctgcacgcactttcccttgctcaagcccttaatcggcagggaagcgggcaatgtcgcgctggtcgattccgcgattacgactgccgaagaaaccgcacgcgtccttgctcaggaaggattgctcaataccgacaacaacaatcccgactaccgtttttacgtcagcgatattcctttgaaattcagaaccatcggcgaacgtttcttgggcaggacgatggagcagattgaaatggtgtctttgggttaa

SEQ ID NO: 67079 - DNA, 591 bp, Neisseria meningitidis
atgggtttggaactgcctttgattttgggtacgagttcggttttccgccgcgaacagatggaaatgctcggcattgcctttcaggcggcgtcccccgattttgacgaaacgccgatgttgggggaatccgcccctcagacggcattgcgccttgccgagggtaaggcgcggtcgttggccgggcgtttcccagaggcgttgattgtcggtgcggaccaggtggcgtggtgcgacggcaggcagtggggcaagccgatgaaccttgctaatgcgcacaagatgttgatgcatttgagcggcagggagattgagttttacagcgcggtcgttctgctaaatacggttacgggcaggatgcagcggcatatcgataagacggtggtcgtgatgaggaagttggacgagctacacatcctccgctatttggagcgcgagcctgatgcggtttattgctcgtgtgcgttgaagagcgaggctttgggtgcattgttgatcgaaaggattgagagtaccgatccgaatgctttaatcggtttgccggttttccgtctggttgattttttgaaaaatgagggcgtggaggttctgtaa

SEQ ID NO: 67080 - DNA, 666 bp, Neisseria meningitidis; identical to SEQ ID NO: 40408

SEQ ID NO: 67081 - DNA, 1515 bp, Neisseria meningitidis
atgactacctccaaatgccctgtaacccatctgaccatgaacaacggcgcgcctgttgccgacaatcaaaacagcctgaccgccggtcctcgcggccctctgctggcgcaggatttgtggctgaatgaaaaactcgccgacttcgtgcgcgaagtcatccccgaacgccgtatgcacgccaaaggttcgggcgcgttcggtacgtttaccgtaacgcacgacatcaccaaatacacccgcgccaaaatcttcagcgaagtcggcaaaaaaaccgagatgttcgcccgtttcaccaccgtggcaggcgaacgcggcgcagccgatgcagaacgcgacatccgcggttttgccttgaaattttataccgaagaaggcaactgggatgtggtcggcaacaacacgcccgtgttcttcctgcgcgacccgcgtaagttccccgacctgaacaaagccgtcaaacgcgacccgcgcaccaatatgcgctctgccacaaacaactgggacttctggacgctgctgcccgaagcactgcaccaagttaccatcgtgatgagcgaccgcggcatccccgccggctaccgccatatgcacggcttcggttcgcatacctacagcttctggaacgaagcaggcgagcgtttttgggtgaaattccatttccgcacccaacaaggcattaaaaacctgaccaacgaagaagccgccaaaatcatcgccgacgaccgcgaaagccatcagcgcgacttatacgaagccatcgaacgcggcgagtttccgaaatggacgatgtacatccaagtcatgcctgaagcagacgcggaaaaagtaccttatcatccgtttgacttgaccaaagtttggccgaaaaaagactatccgctgattgaagtgggcgaattcgagttgaaccgcaatcccgaaaacttcttcgccgatgtggaacaatccgccttcgcaccgagcaacctcgttcccggtgtcggcgccagcccagataaaatgttgcaagcccgtttgttcaattacgccgacgcgcaacgctaccgcttgggcgtgaacttccgccaaatccctgtcaaccgtccgcgttgccctgttcacagcaaccagcgcgacggacaaggacgcgccgacggcaactacggcagcctgccgcactacgaacccaacagcttcggccaatggcagcagcagcccgacttcgccgaaccgcctttgaaaatcaacggcgacgcggcacactgggactaccgccaagacgatgacgactatttcagccaaccgcgcgccctgttcaacctgatgaacgacgcgcagaaacaggcattgttcggcaacaccgccgccgcaatgggcgacgcgcccgacttcatcaaataccgccatatccgcaactgctaccgttgcgatccggcatacggcgaaggcgtggcaaaagccctcggactgactgtcgaagacgcacaagccgcccgcgcgaccgaccccgcactcggccagcccggtttgctgtaa

SEQ ID NO: 67082 - DNA, 393 bp, Neisseria meningitidis
atgtattcgtttgaagcgaatgcaaatgcagtaaaaatatctgaaactgtttcagttgataccggacaaggtgcgaaaattcataagtttgtacctaaaaatagtaaaacttattcatctgatttaataaaaacggtagatttaacacacatccctacgggcgcaaaagcccgaatcaacgccaaaataaccgccagcatttcccgcgccggcgtattggcggggggcggcaaacttgcccgcttaggcgcgaaattcagcacaagggcggttccctatgtcggaacagcccttttagcccatgacgtatacgaaactttcaaagaagacatacaggcacgaggctaccaatacgaccccgaaaccgacaaatttgcaaaggtctcaggctaa

SEQ ID NO: 67083 - DNA, 1077 bp, Neisseria meningitidis
atgaagccgtctattttagaaaaactgcaacaactcggcgaccggttggaagaagttacccaccttttagggcaacccgaagccacggcagatatggacaactaccgcaaactcacgcgcgaacacgccgaactgtcccccgtcgtcgaagtgttccaacattaccggcgggcgcaaagcgacttggcggatgccgaagaaatgttgtccgaccccgaaatgaaagactttgccgccgaagaaatcgaagcggcaaaagccaaaatcaacacgctcgataccgaactgcaaaaactgctgctgcccaaagatgccgacgacgacaaaaacatctttatcgaaatacgcgccggcacgggcggcgacgaagccgcgctgtttgcaggtgatttgctgcgtatgtacagccgctacgccgagcgcaaccgctggcaggttgaaatcgtttccgccaacgaaagcgagttgggcggctataaagaagtcatcgcccgtattgtcggtttgggcgcgtacagccgtctgaaattcgaatcgggcggtcaccgtgtgcaacgcgtccctgcaaccgaaagccaaggccgtatccacacttcagcctgtaccgtcgccgtcatgcccgaagcggacgaactggaagacatcgaactgaaccccgccgacctgcgcatcgacaccttccgcgcatccggcgcgggcggtcagcacatcaacaaaaccgactccgccgtccgcatcacccacctgcccaccggcatggtggtcgaatgccaagacggccgcagccaacatgccaacaaagcgcaggcaatgaaagtcctcgccgcccgcctgaacgacgcgcaaaaacgcgaagcccaagccaaagaagccgccgagcgcaaatccctcatcggcagcggcgaccgcagcgaacgcatccgcacctacaactatccccaaggcagggtaaccgaccaccgcatcaaccttaccctgcacaagctggattttgtgatggacggcgacttggaagaaatcaccaatgccctgattgccgagcatcaggccgagcttctggcggcaatgggcgattga

SEQ ID NO: 67084 - DNA, 183 bp, Neisseria meningitidis; identical to SEQ ID NO: 38466

SEQ ID NO: 67085 - DNA, 606 bp, Neisseria meningitidis
atgaagaaaatcggactgttcggcggcactttcgacccgatacacaacgggcatctccacatcgcccgcgcctttgccgacgaaatcggcttggacgcggttgttttcctgccgacaggcggcccgtatcacaaagacgcagcctccgcttccgccgccgaccgccttgccatggtcgaactggcgacggcagaagacgcgcgttttgccgtcagcgattgcgacatcgtccgagaaggtgcaacctatacttttgataccgtccaaatcttccgccagcagttcccatccgcgcaactttggtggctgatgggcagcgacagcctgatgaagctgcacacatggaaaaaatggcagatgctcgtgcgcgaaaccaatatcgccgtcgccatgaggcagggcgacagcctgcaccaaaccccgcgcgaactgcacgcgtggctgggcaagtcccttcaggacggcagcgtccgcatcttgtccgccccgatgcataatgtgtcgtcaacggaaatccgccgcaaccttgccagccaaggcgtttcagacggcatcccgcctgccgccgcacgctacatccgcgaacacggtttgtatgaaaaataa

SEQ ID NO: 67086 - DNA, 828 bp, Neisseria meningitidis
atgaaacccgatatttatgctttgctggaacgcgccctgctttcgggcgaccccgatgaaaaaggacggctgacggatgaggcgtttgccgccgttcagaacatggacggtgctgaaacaaacacgccgccgctggatttcccccgcgcagggcggccggacaagccggttttggtcgcgccgtcacaactgaccccgcgcaaaatgaacacgaccgaaggctatgcggcgatgctgcacgcgattgcgcatatcgagttcaatgccgtcaatctggctttggacgcggcataccgtttccgcacgctgccgtttcagtttgtccgcgactgggtgaaagtggcgaaggaagaggtgtaccacttccgcctgatgcgcgaaaggctgcgcgctttcggcttcgattacggcgatttcgaggcgcacaatcatttatgggatatggcatacaaaaccgcctacgatcctttgttgcgtatggctttagtgccgcgcgtattggaagctcgtgggctggacgttacgccggggatacgcgcgaaggtggcgcagcgcggcgattcggaaacctgcggcgtattggacatcatttaccgcgacgaagtgggccatgtcgccatcggcaaccattggtatcaacacctctgccgcgaacgcggtttggaacctgtcgccctgttccgcagtctgattacccgttacgatatgtttatcttccgtggctatgtgaacatcgaagcgcgggaaaaagcgggcttcagccgctttgaattggatatgttggaagatttcgagcagggtttgaaacagaacaaaaataccgtctga

SEQ ID NO: 67087 - DNA, 1332 bp, Neisseria meningitidis
atggattcgggaattctgaaattacgggtatcagcaggcgaaataggggatatccgctatgaagaaaaacgggatgggaagtctgccgaaggcagtattagtacattcaataacaaatttcccttatataggaacaaaattctcaatcttcgcgatgtagagcagggcttggaaaacctgcgtcgtttgtcgagtgttaaaacagatattcagattataccgtccgaagaagaaggcaaaagcgatttacagatcaaatggcagcagaataaacccatacggttcagtatcggtatagatgatgcgggcggcaaaacgaccggcaaatatcaaggaaatgtcgctttatcgttcgataaccctttgggcttaagcgatttgttttatgtttcatatggacgcggtttggtgcacaaaacggacttgactgatgccaccggtacggaaactgaaagcggatccagaagttacagcgtgcattattcggtgcccgtaaaaaaatggctgttttcttttaatcacaatggacatcgttaccacgaagcaaccgaaggctattccgtcaattacgattacaacggcaaacaatatcagagcagcctggccgccgagcgcatgctttggcgtaacagacttcataaaacttcagtcggaatgaaattatggacacgccaaacctataaatacatcgacgatgccgaaatcgaagtgcaacgccgccgctctgcaggctgggaagccgaattgcgccaccgtgcttacctcaaccgttggcagcttgacggcaagttgtcttacaaacgcgggaccggcatgcgccaaagtatgcctgcaccggaagaaaacggcggcgatattcttccaggtacatctcgtatgaaaatcattactgccggtttggacgcagccgccccatttattttaggcaaacagcagttttcctacgcaaccgccattcaagctcaatggaacaaaacgcctttggttgcccaagacaagttgtctatcggcagccgctacaccgttcgaggatttgacggtgaacagagcctttccggagagcgtggtttctactggcagaacactttgggctggcatttccatccgcgccatcaattctatctcggcgcggactatggtcgggtatcgggcgaaagtgcccaatatgcctcgggcaagcggctggcgggtgcagtggccggcttcagaggcagccataaagtaggcggtatatttgcttatgacttatttgccggcaagccgctgcacaagcccgaaggttttcagacggccaacaccgtttacggcttcaatttgaattacagtttctaa

SEQ ID NO: 67088 - DNA, 228 bp, Neisseria meningitidis; identical to SEQ ID NO: 36999

SEQ ID NO: 67089 - DNA, 465 bp, Neisseria meningitidis; identical to SEQ ID NO: 38444

SEQ ID NO: 67090 - DNA, 774 bp, Neisseria meningitidis
atgagtgcgaacatccttgccatcgccaatcagaagggcggtgtgggcaaaacgacgacgacggtaaatttggcggcttcgctggcatcgcgcggcaaacgcgtgctggtggtcgatttggatccgcagggcaatgcgacaacgggcagcggcatcgacaaggcaagtttgcagtccggcgtttatcaggtcttattgggcgatgcggacgtgaaatcggcggcggtacgcagcaaagagggcggatacgctgtgctgggtgcgaaccgcgcgctggccggtgcggaaatcgagttggtgcaggaaatcgcccgggaagtgcgtttgaaaaacgcgctcaaggcggtggcggaagattacgactttatcctgatcgactgcccgccttcgctgacgctgttgacgcttaacggcttggtggcggcaggcggcgtgattgtgccgatgttgtgcgaatattacgcgctggaagggatttccgatttgattgcgaccgtgcgcaaaatccgtcaggcggtcaatcccgatttggacatcacgggcatcgtgcgcacgatgtacgacagccgcagcaggctggttgccgaagtcagcgaacagttgcgcagccatttcggggatttgctttttgaaaccgtcatcccgcgcaatatccgccttgcggaagcaccgagccacggtatgccggtgatggcttacgacgcgcaggcaaagggtaccaaggcgtatcttgccttggcggacgagctgatggcgagggtgtcggggaaatag

SEQ ID NO: 67091 - DNA, 657 bp, Neisseria meningitidis
atgaaaaacaaaagcaaagtctgggacttccccacccgccttttccactggctgcttgccgcatccctaccctttatgtggtatagcgcgaaaaccggcggcgatatgctgcaatggcacacgcgcgtcgggctgtttatccttttcctgctcgtattccgcctctgctggggcatttggggcagcgataccgcccgtttctcccgtttcgtccgcggatggtcgggtatcagagagtatatgaaaaacggtattcccgaacacgtccaacccggacacaaccccttgggcgcactgatggtcgtcgcgcttttggccgccgtctcatttcaagtcggcacagggctttttgccgccgatgaaaacaccttcagcaccaacggctacctcaaccatttggtttccgagcatacgggcagccttatgcggaaaatccaccttaactttttcaagctgctcgccgttttttccgccattcatatcgccgccgtcgccgcataccgcgtgttcaaaaagaaaaacctcgtcctcccgatgataaccggcttcaaatacatcgaaggcaaaacctcaatccgctttgccggcaaaaccgcgcttgccgccgcattatcggttgccgcgcttgtcgcagccgccatcctgctcctgtcctga

SEQ ID NO: 67092 - DNA, 2058 bp, Neisseria meningitidis
atgacacgcaaaatcctcgttacctccgccctgccctatgccaacggcagcatccacctcggacacatggtcgaacacatccaaaccgacgtttgggtgcgcttccaaaaactgcgcggccacgaatgctactactgctgcgccgacgacacccacggcacgcccgtgatgcttgccgcgcaaaaacaaggcattgcccctgaagacatgattgccaaagtgcgcgaagagcacctcgccgactttaccggtttcaacatcggctacgacaattattacagcacccattcccctgaaaacaaacagttttcccaagatatttaccgcgcgctgaaaaccggcggcaaaatcgagagccgcgtcatcgagcagcttttcgaccccgaaaaacaaatgtttctgcccgaccgcttcgtcaaaggcgaatgccccaaatgccacgctcaagaccaatacggcgacaactgcgaagtctgcggcacgacctactccccgaccgaactgatcaacccgtattccgccgtttccggcgtgaaacccgaattgcgcgaatccgaacacttcttcttcaaactgggcgaatgcgccgacttcctcaaagcttggacttccggcaacaacccgcacgacggcaagccccatctgcaaccagaagccctcaacaaaatgaaagaatggctgggcgaaggcgaagaaaccacactgtccgactgggacatttcccgcgacgcgccgtatttcggttttgaaatccccgatgcgccgggcaaatacttctacgtctggctggacgcgcccgtcggctacatggcgtcgtttaaaaacctgtgcgaccgcatcggcgtcgattttgacgaatacttcaaagccgacagccaaaccgagatgtaccacttcatcggcaaagacatcctctatttccacgccctgttctggcctgccatgctgcatttctccggccaccgcgccccgaccggcgtgtacgcacacggcttcctaaccgtcgacggacaaaaaatgtccaaatcgcgcggcacgtttatcaccgccaaatcctatctggaacaaggtttaaaccccgagtggatgcgctactacatcgccgccaaactcaacagcaaaatcgaagacatcgatttgaacctgcaagactttatcagccgcgtaaacagcgaccttgtcggcaaatacgtcaacatcgccgcccgcgcctcaggttttatcgccaaacgctttgaaggccgtctgaaagacgttgccgacagcgcattgctggcaaaacttgccgccgaaagcgacaccatcgccgagcaatacgaaagccgcgaatacgccaaagccctgcgcgacatcatggccttggcagacattgtcaacgaatacgttgatgccaacaagccgtgggaactggcgaaacaagaaggccaagacgcacgcctgcacgaagtatgcagcgagctcatcaacgcctttaccatgctgaccgcctacctcgcccccgtgttgccgaaagtggccgaaaatgccgccaaattcctgaatttggaagccatcacttgggcaaatacacgcgaaaccttgggcaaacacgccatcaacaaatacgaacatttaatgcaacgagtggagcaaaaacaagtggacgatttaatcgaagccaacaaacaaagcatcgccgccgcagccgtgcctgccgccgaagagagcaaatacgaaaaagttgccgaacaggcgagtttcgacgactttatgaaaatcgatatgcgcgtcgccaaagtattgaactgcgaagccgtcgaaggcagcaccaaactcttaaaattcgacctcgatttcggttttgaaaaacgcatcatcttctccggcatcgccgcgtcttatcccaaccctgccgagttaaatggaaggatggtcatcgccgtcgccaacttcgccccgcgcaaaatggcaaaattcggcgtatccgaaggcatgattttgagtgccgccacggcagacggcaaactgaagctcttagatgtggatgcaggcgcgcaaccgggcgacaaagtcggttaa

SEQ ID NO: 67093 - DNA, 1008 bp, Neisseria meningitidis
atgagcaccttcttccagcaaaccgcccaagccatgattgccaaacacatcgaccgcttcccgctattgaagttggaccaggtgattgattggcagccgatcgaacagtacctgaatcgtcaaagaacccgttacctccgagaccaccgcggccgtcccgcctaccccctgctgtccatgttcaaagccgtcctgctcggacaatggcacagcctctccgatcccgaactcgaacacagcctcatcacccgcaccgatttcaacctgttttgccgttttgacgaactgagcatccccgattacagcaccttatgccgctaccgcaactggctggcgcaagacaataccctgtccgaattgctggaactgattaaccgccaactgaccgaaaaaggtttaaaaatagagaaagcatccgctgccgtcgttgacgccaccattattcagaccgccggcagcaaacagcgtcaggccatagaagtcgatgaagaaggacaagtcagcggccaaaccacaccgagtaaggacagcgatgcccgttggataaagaaaaacggcctctacaaactcggttacaaacaacatacccgtaccgatgcggaaggctatatcgagaaactgcacattacccccgccaatgcccatgagtgcaaacacctgccgccgttgttggaaggggtacctagaggtacgaccgtctatgccgacaaaggctacgacagtgcagaaaaccggcaacatctggaagaacatcagttgcaggacggcattatgcgcaaagcctgccgcaaccgtccgctgtcggaaacgcaaaccaaacgcaaccggtatttatcgaagacccgttatgtggtcgaacaaagcttcggtacgctgcaccgtaaattccgctatgcgcgggcagcctatttcggactgattaaagtgagtgcgcaaagccatctgaaagcgatgtgtttgaacctgttgaaagcggccaacaggctaagtgcgcccgctgccgcctaa

SEQ ID NO: 67094 - DNA, 2028 bp, Neisseria meningitidis
ttgtccctgtctgaatttatagaacgccgaacgtcatttaatccgatggttattttgacgactttgttttttgtgtgtgttttggtggtattggttttaaccgtgccggatcaggtgcagatgtggctcgatcgggcaaaagaagtcatttttaccgagttcagctggttttatgttttaacgttttccatttttctgggtttcctgctgatactctcggtcagcagtttgggaaacatcaggctcggacgagatgaagatgtgccggaattcggcttcctgtcgtggctggcgatgctgtttgcggccgggatgggcgtgggtctgatgtttttcggcgtggcagagccgttgatgcattatttttcggacattacggccggcacgccggaacacaggcagcagcaggcattgctgcacacggtgttccattggggcgttcacgcttggtcggtgtacggtacgattgcattggctttggcttatttcggtttccgctacaagctgccgcttgccctgcgctcttgtttttaccccctgttgaaagaaaaaatttccggaaggttcggcgatgccattgatattatggcgttgcttgctacttttttcggcatcatcaccacattggggttcggggcttcgcaactgggcgccggattgcaggaaataggctggattgccgaaaacagcttcagcgtgcaggttttgattatcgccgccgtcatgtccctcgccgtcgtttcggcaatatccggcgtggggaagggcgtgaaggtgttgagcgagttgaacctgggtcttgcgtttttgctgctgttttttgttttggcggcgggtcccactgtttacctgttgtcggcattcggcgacaacatagggaactacctcggaaatctggtgcgcctcagttttaaaacttatgcgtacgaacgggaacacaagccgtggtttgaatcttggacggtgctttattgggcgtggtggtgttcttgggcgccgtttgtgggtttgtttatcgcgcgcatttcaaaggggcgcaccatccgcgagtttgtcttcggggttttgctcatccccggcctgttcggcgttttgtggtttaccgtcttcggcaatacggcgatttggctgaatgacggggttgcggggggaatgctcgaaaagatgacctcctctccggaaacgctgctttttaaattctttaattacctccccctgcccgaattgacgagcatcgtcagcctgctggtcatttctctgttttttgtaacttctgccgattccgggatttatgtcctgaacaatattacctctcgggacaaaggcttgagcgcgccacggtggcaggcggttatgtggggcgtgctgatgtctgccgttgccgttttgctgatgcgctcgggcggactcggcaacctgcagtctatgaccctgattgtttccctgccgtttgccctgctgatgctgataatgtgtttcagcctgtggaaaggcttgagtgcggataagaaatattttgagacccgggttaaccctaccagtgtattttggacgggcggcaagtggaaagaacggctggtgcagataatgagccagacgcaggagcaggatattttaaaattcctcaaacataccgcatcgcccgctatgcacgagttgcaacgggagctttcggaagaatacggcttgagcgtccgggtcgataagatgtttcatcaggacgagcccgcaatcgagttcgtcattcggaaagagacgatgcgcgattttatgtacgggattaagtctgtcgggcaggatgtatccgaccagttgattaacgacggcaagctgccgcatatccggcatcagacaacttacaaaccctacgcttattttttcgacgggcgcgtcgggtacgatgtgcagtatatgaacaaggacgagctgattgccgacattttgaaaaactacgaacgttatttgatgttgttggatgatgtcggtcaggaactgatggcgcacgagcaggtggaattggcagagtaa

SEQ ID NO: 67095 - DNA, 129 bp, Neisseria meningitidis; identical to SEQ ID NO: 45231

SEQ ID NO: 67096 - DNA, 780 bp, Neisseria meningitidis
atgaaactggtaaggcctcagaaaatcagcgatcaggtattgtcggtattggaaggccgcatcgtggaaggggtttacgcggaagggggcaagattccgcccgaacgcgttttggcggaagagttcggcgtgtcccgcccgtcggtcaggtcggcattgaatgttttggtcgcccgtcaggttttggaagcgaggcagggagacggttattatgtttcggtcaagccacagcaggattttttgcaaagttggcaggagcttttgggcaagcattccaattgggaacaggatgtttttgatttcagctgccacatcgagggctgtatggcggcattggcggcagaacgccggacggatgccgatttgaagcggattgggttttggcttgaaaagtttgaggaggcgtgcgaaagcggcaatctggaacatcagagcgaagccgatgtcagcttccatcagacgattgcggatgcggcgcacaatttgttgttcagccatttgtcgggcggtttgttgaaaatgctgtaccggcagacgcgcagcagccttatttatctgaatcaggaagaagatccgcgtccgaaactgatggcgcagcaccgcgtgctgtatgaggcgatatcgaaccgtcggccgggcgaggcttcggaggcggcaaaggcgcatttgaattatgtggcgagcagtatattgaaagacagggaatatcagagccgtaaccgccacgcggatactttggcgcaaaacgatttgaagcgcgtgcaggattgggaggtatga

SEQ ID NO: 67097 - DNA, 768 bp, Neisseria meningitidis; identical to SEQ ID NO: 43234

SEQ ID NO: 67098 - DNA, 963 bp, Neisseria meningitidis
atgcccagtatttccgtccgccgactgtttgacgacaaccaatacaagttacaacttgcctgggccgccggcaattcgggtgcggacaaccgtatcggcgtagaggcggacaagcccgtcctcgctttggtcggacacctgaatttcatccaccccaaccaaatccaagtggtcggtttggcggaatcggaatatctgaaccgtctcgaatcgggggaaacgggttatcagttcggcgacctgttcgacatttctatgtctttggttattgtggcaaacggcttgccggtttccccggggctgcgcgactattgccataaaaacgatattccactgctgacttccaaactcgaaagcccctatctgatggacgtgttgcggatttacctgcaacgcaccctggcggcatcgtccgtcaaacacggcgtatttctcgatgtgtttgaaatcggcgtgctgattaccggacattccggcttgggcaagagcgaattggcgttggaactgatttcgcgcggccacagcctgattgccgacgatgcggtcgagctgttccgcatcggtccggaaacattggaagggcgttgttcgcctatgctgcgtgattttttggaagtgcgcggcttggggatactcaatatccgccatattttcggcgaaacttccatccgccccaaaaaaatcctgcaactcattatcaatttggtcgaggcagacgacgagtatatgaagcagctcgaccggttgagtatccgcaccgaaaccgaatccatcctcaacgtcaacgtccgttcggttacgctgcccgtcgccgtcggacgcaacctcgccgttttggttgaggcggcggtacgcaattacattttgcagttgcgcggtaaggacagtacgcgcgaatttttggaacgccatcagacgcaacttaaagaaaacgaacagaatcatgaaaatcgtcctgattag

SEQ ID NO: 67099 - DNA, 279 bp, Neisseria meningitidis; identical to SEQ ID NO: 36597

SEQ ID NO: 67100 - DNA, 1338 bp, Neisseria meningitidis
atgactttccaaaacaaaaaaatcctcgtcgccggacttggcggcacgggtatttccatgattgcctacctgcgcaaaaacggcgcggaggttgctgcgtatgatgcggagctgaagccggaacgcgtgtcgcaaatcggtaagatgtttgacgggctggtgttttacacgggccgtctgaaagatgcgctggacaacggtttcgatattctggcgctcagtcccggcatcagcgagcggcagccggatatcgaggcgttcaagcaaaacggcggacgcgtgttgggcgacatcgaattgctggcggacattgtgaaccgccgcggcgacaaggtaattgcgattaccggcagcaacggcaaaaccacggtaacgagcctggtcggctatctctgtatcaagtgcgggctggataccgttatcgcgggcaatatcggcacgccggttttggaggcggaatggcagcgcgaaggcaaaaaggcggacgtgtgggtgttggagctttccagcttccaactggaaaacaccgaaagcctgcgcccgactgcggcgacggtgctgaacatttccgaagaccatctcgaccgctacgacgacttgctcgactacgcgcataccaaagccaagattttccgtggcgatggcgttcaggttttgaattcagacgacgtgttctgccgcgccatgaaacgggcagggcgtgaagtgaaatggttttcgttggaacacgaagccgatttttggttggaacgcgagacaggccgcctgaaacaaggcaatgaagatttgattgccacgcaagatattccgttgcaaggcttgcacaacgccaccaacgtgatggctgccgttgccttgtgcgaagctgtcggtttgccgcgcgaagcattgctcgaacacgtcaaaacctttcaaggcctgccgcaccgcgtggaaaaaatcggcgagaaaaatggcgtggtgtttatcgatgacagcaaaggcacgaacgtcggtgcgaccgccgccgcgattgccggtttgcaaaatccgctcttcgtgattttaggcggcatgggcaaagggcaggacttcacgcccctgcgcgacgcgcttgccggcaaggcaaaaggcgtgttcctgattggtgtcgatgcgccgcaaatccgccgcgatttggacggctgcgatctgaatatgaccgactgcgccactttggaagaagcggttcagaaggcatatgcccaagccgaagcgggcgatatcgtgctgctcagccccgcctgcgcgagcttcgatatgtttaaaggctatgcgcaccgttcggaagtgtttatcggggcgtttaaggctttgtga

SEQ ID NO: 67101 - DNA, 432 bp, Neisseria meningitidis; identical to SEQ ID NO: 55943

SEQ ID NO: 67102 - DNA, 795 bp, Neisseria meningitidis
atgaccttacctatgcaggaaacccgtttttccatactgctagacgaattggcggcaaaacaggaggcagccatcgccccccacctgcttgccgacggaaccaaggtatggatacgcaaagcaggcaggcacaatgcgcgatggcgttacgcgctgctcggtatggttgcccgatatttgaaactgggggtgttgaagccggttcccagcctcggcggcgagcctgccattacaaccgaatcaaaacgcctgtacgaattgcgcgcggcggggatagccgttcccgaattgctcgccgtccggaaaaatgcccttatgttcggcaatttggaaggcatcccgctcgatacgcaaatccgccaagaagccgaggctggaaagtcggacgcttggcttgccggtttggaagccattgcacgcgtgcataaaaaacggcagttcctcagtcaggcgtttgcgcgaaatatgatgtcggacggaaaaaacatcagctttttggattttgaagacgacccttccgaagtcctgaccatagcgcaatgccaagcccgcgattggctctgctacatccattcgaccgcgctgatattgaaaaacggcggactgctggaagcggctgcggaaaaatggggcggcgtattgtcggatcagcctgccgaaatacaaaagctgattgccgccaccgtcaaaccgatcctcccgatacgcaggctggaacacccacgctggggacgggacgcgctcaggctggcagcctcgatttccctgatttcccttgccgatatgccgccgtaa

SEQ ID NO: 67103 - DNA, 1185 bp, Neisseria meningitidis
ttgatcttggttttgaactgcggcagctcgtccctcaaaggcgcggtcctggataacggcagcggcgaagtcctgctcagctgccttgccgaaaaactcaacctgcccgatgcctacatcacattcaaagtaaacggcgaaaaacacaaagtcgatctgtccgcacatcccgaccacaccggcgcggtcgaagccctgatggaagaactcaaagcccacggcctcgacagccgcatcggcgccatcggccaccgcgtcgtcagcggcggcgaactgtacagcgaatccatcctcgttgacgacgaagtcattgccggcatcgaaaaatgcatcccgctcgcccccctgcacaaccccgcccacctcttgggcctgcgtgccgcgcaaagcattttcaaaggcctgcccaacgtcgtcgtattcgatacctccttccaccaaaccatgcccgaagtcgcctacaaatacgccgttccgcaggagttgtatgaaaaatacggcctgcgccgttacggcgcgcacggtaccagctaccgcttcgtcgccgacgaaaccgcgcgcttcctcggcaaagacaaaaaagacctgcgtatggtcattgcccacttgggcaacggcgcgtccatcaccgccgtcgccaacggcgaatcgcgcgacaccagtatgggcctgactccactggaagggctggtaatgggtacgcgcagcggcgacatcgatccttccgtattcggcttcctcgccgaaaacgccaatatgaccatcgcccaaatcactgaaatgctgaacaaaaaatccggtctgctcggcatttccggcctgtccaacgactgccgcaccattgaagaagaagccgccaaggggcataaaggcgcgaaattggccttggatatgtttatctaccgccttgccaaatacatcggcagtatggcggttgccgcaggcggtttggacgcactggtctttaccggcggcatcggcgaaaactccgacatcatccgcgaacgcgtgatcggctacttgggcttcctcggtctgaacatcgaccaagaagccaacctgaaagcccgcttcggcaacgccggcgtgattaccactgccgacagcaaagccgttgccgtggtcattccgaccaacgaggaattgatgattgcacacgataccgcccgcttgagcggtctgtaa

SEQ ID NO: 67104 - DNA, 1098 bp, Neisseria meningitidis
atgaaccagacatttaccttgcccgatacgcgcccgtatccccaaaatccgattaagaaccacctgctgctcaatgcctaccagttggcgcacaattcttcccaggcttcgcgcaaactctcgtccggccaacttcaaaccgaaatcagggggatgcttgaacaaaaccactatatcaacctttccctcgcgctgacgatgtcgcccgatgccggaacttatgccgcgctgctttccagcgtgaacgcggtactcgattgcgagaaagaaggcgaagtgcagtggttcgccctgccggtcgtgctggtgtccggctgcaagaaagaacgggcaatcgagatgaagctgccgacggaggcattgtttgcctgcctgcaaaactatccgcacctgcgcgttttgacgcaagagacgcaatggctgccttatcttgtgcattcttccgatttgagcgcggtcgcgccggatgagtggtggcgtgccaaacaaaataccgaagcggcggcgcaacacttgcgccgtttcgccccgcgccctttgctgttgcccgaagggcagtccgtccgcgtcgtttacgcgctgggtttcggcagcggcaaggttcagacggcattgggtcagaaccttcttcaggcaggcctgcccttaatgcaggtatggcaggaaaatcttgcatcggaaggcgttacgctgtttgccaatccgctttccccggattctccggtacgcgcgctttcagacggcagccacacgcgccaacgtatggcgatggatgtgtttgcggcaaacgcgatacgcgccgtccgtatgcagagtccgcgcgtcggcgtggtcgctgcggcaaaggcgggcgggcaggttttatttgggtttaatgcgaccgacggcgcgtttgaagtcgtgccgcaggtgttttcgtggcagctttcctttaccgacaatattggcgttattcagcaaaattttttggatttaatggcagaatgccgtgtagaacacgtttacctgttgcacaatcccttgggcgaacaggaaagcatcccgagctatgcggaagcattgaaacgggaagggcacaatccgtttttcagcgtatag

SEQ ID NO: 67105 - DNA, 906 bp, Neisseria meningitidis
atgcttaccttccaacaaatcatcttcaaactgcaaacattctgggcagacaaaggctgcaccgtcatccaacccttcgacatggaagtcggtgcaggtacttcccatcccgccacctgcctgcgcgcgctcgggcccgagccttggtttgccgcctacgtccaacccagccgccgccccaaagacggccgctacggcgacaaccccaaccgcctgcaacactattaccaattccaagtcgccctcaaacccgcccccgccaatatccaagacctttatctcgactccctgcgcgaattgggcatcgaccccaaagtgcacgacatccgctttgtcgaagacgactgggaaaaccccaccctcggtgcgtggggtttgggctgggaagtctggctcaacggtatggaagtaacccagttcacctatttccaacaagtcggcggcatcgactgcacccccgtactcggcgaaatcacctacggcatcgaacgcttggcgatgtacctgcaaggcgtggaaaacgtctatgacctcgtttgggcaaaaacgctggacggtaatacagtaacttacggcgacgtgtaccaccaaaacgaagtcgaacaatccacctacaacttcgaatacagcgatgccgattggctgctgcgccagttcaacgactacgaagcgcaagccaaacgcctgcttgccgaagaaaacgccgccctcgccttgcctgcctacgagctggttctcaaagcggggcatacgttcaatcttttagacgcacgcggcgcgatttccgtaaccgagcgggcaacttatattggacgtattcgtgcattgagccgcgccgtggcgcaaaaatatgttgaaagccgcgaaaaactgggcttccctttaatgaaggcaaatgctgcctaa

SEQ ID NO: 67106 - DNA, 621 bp, Neisseria meningitidis
atgaattcgaccgcaagtaaaaccctgaaaggattgtcgctggtgtttttcgcctctggcttctgcgccctgatttaccaggtcagctggcagaggcttctattcagtcacataggtatcgatttgagttcgattactgtcattatttctgtatttatggtcggcttgggtgtaggtgcgtatttcggtggacgcattgctgaccgttttccttcaagtatcatccccctgttttgcatcgctgaagtatccatcggtctgttcggtttggtaagcaggagtctgatttccggcttggggcatcttttagttgaggctgatttgcccatcatcgctgctgccaatttcctcttattgctgcttcctacctttatgatgggcgcgaccttgcccttgctgacctgtttttttaaccggaaaatacataatgttggcgagtctatcggtaccttatattttttcaacactttgggtgcggcactcggatcgcttgccgccgccgaatttttctacgtcttttttaccctctcccaaaccattgcgctgacagcctgctttaaccttctgattgctgcttcagtatggctgcgttacagaaaggatggatatagtgaacactaa

SEQ ID NO: 67107 - DNA, 381 bp, Neisseria meningitidis
atgcctttaaaattccaaccaagggaacgttcggttatcatgtgcgactttcgcggttatgaagaatcggaaatggtcaagaaacgccctgtcgtcgtcatagcgcgaaacaggcacaacggcaaactggtaacggtcgtacccttaagcagcacagaacctgtccctttggcggactaccaccacaaaatgagtggaaaccccttaccggacaagccgcacatccaatgttgggcaaaatgcgacatgacggcaacagtcggattggcacgattagaccgatacaaacccaaagggcgcgaccgctgcattccaataatcagtgaagaggattttcaggcgattaaaacagccgttgccaaggcattcaaactgtactag

SEQ ID NO: 67108 - DNA, 1161 bp, Neisseria meningitidis
atgcgaaaaaaacttaccgccctcgtattgtccgcactgccgcttgcggccgttgccgatgtcagcctgtacggcgaaatcaaagccggcgtggaaggcaggaacatccagctgcagttgaccgaaccgctccaaaatattcaacaacctcaggttactaagcgcaaaagccgcatcaggacgaaaatcagcgatttcggctcgtttatcggctttaaggggagcgaggatttgggcgaagggctgaaggctgtttggcagcttgagcaagacgtatccgttgccggcggcggcgcgtcccagtggggcaacagggaatcctttatcggcttggcaggcgaattcggcacgctgcgcgccggtcgcgttgcaaatcagtttgacgatgccagccaagccattgatccttgggacagcaataatgatgtggcttcgcaattgggtattttcaaacgccacgacgatatgtcggtttccgtacgctacgattcccccgaattttccggttttagcggcagcgtccaattcgttccggcccaaaacagcaagtccgcctatacgccggctcattttgttcagaataagcaaaatcagccgcctactctcgttccggctgttgtcggcaagccggggtcggatgtgtattatgccggtctgaattacaaaaatggcggttttgccgggaactatgcctttaaatacgcgaaacacgccaatgtgggccgtgatgcttttgagttgttcttgctcggcagcgggagtgatgaagccaaaggtaccgatcccttgaaaaaccatcaggtacaccgcctgacgggcggctatgaggaaggcggcttgaatctcgccttggcggctcagttggatttgtctgaaaatgccgacaaaaccaaaaacagtacgaccgaaattgccgcgactgcttcctaccgcttcggtaatgcagttccacgcatcagctatgcccatggtttcgatttgatcgaacgcggtaaaaaaggcgaaaataccagctacgatcaaatcatcgccggcgttgattatgatttttccaaacgcacttccgccatcgtgtctggcgcttggctgaaacgcaataccggcatcggcaactacactcaaattaatgccgcctccgtcggtttgcgccacaaattctaa

SEQ ID NO: 67109 - DNA, 279 bp, Neisseria meningitidis
atgtactaccaagtcggaaataaatgtattgagaagcaccaggctgaaaacctttatttcagcttggtagtaccaagaatcaaagaaaacggacagattgtcagaccggaatataacggcagtctgtggaagatgtcggacggtcagccgctaaggcttttattggcggaatgcagtccgaaagacaacctgcaaagcggtcttgaaacaggctggatagtattcggcatcctcgcgtccgtttactttgtttccctgctgaaaaaggttttgaaatga

SEQ ID NO: 67110 - DNA, 900 bp, Neisseria meningitidis
atgaaaaccaattcagaagaactgaccgtatttgttcaagtggtggaaagcggcagcttcagccgtgcggcggagcagttggcgatggcaaattctgccgtaagccgcatcgtcaaacggctggaggaaaagttgggtgtgaacctgctcaaccgcaccacgcggcaactcagtctgacggaagaaggcgcgcaatatttccgccgcgcgcagagaatcctgcaagaaatggcagcggcggaaaccgaaatgctggcagtgcacgaaataccgcaaggcgtgttgcgcgtggattccgcgatgccgatggtgctgcatctgctggcgccgctggcaacaaaattcaacgaacgctatccgcatatccgactttcgctcgtttcttccgaaggctatatcaatctgattgaacgcaaagtcgatattgccttacgggccggagaattggacgattccgggctgcgtgcacgccatctgtttgacagccgcttccgcgtagtcgccagtcctgaatacctggcaaaacacggcacgccgcaatctacagaagagcttgccggccaccaatgtttaggcttcaccgaacccggttctctaaatacatgggcggttttagatgcgcagggaaatccctataagatttcaccgcactttaccgccagcagcggtgaaatcttacgctcgttgtgcctttcaggttgcggtattgcttgcttatcagattttttggttgacaacgacatcgctgaaggaaagttaattcccctgctcgccgaacaaacctccgataaaacacacccctttaatgctgtttattacagcgataaagccgtcaatctccgcttacgcgtatttttggattttttagtggaggaactgggaaacaatctctgtggataa

SEQ ID NO: 67111 - DNA, 1416 bp, Neisseria meningitidis
atgaacctgcatgcaaaggacaaaacccagcatcccgaaaacgtcgagctgctcagtgcgcagaagccgattaccgactttaagggcctgctgaccaccattatttccgccgtcgtctgtttcggcatttaccacatcctgccttacagccccgatgccaataaaggtatcgcgttgctgattttcgttgccgcactttggtttaccgaagccgtccacattaccgttaccgcgctgatgatccctatcctcgccgtcgtactcggtttccccgacatggacatcaaaaaggcgatggctgatttttccaacccgattatctacatttttttcggcggtttcgcactcgccaccgccctgcatatgcagcgtctcgaccgcaaaatcgccgtcagcctgctgcggctgtcgcgcggcagtatgaaggccgccgtgctgatgttgttcctcgttaccgcctttctgtccatgtggatcagcaacaccgccaccgccgcgatgatgctgcctctggcaatgggtatgctgagccacctcgaccgggaaaaagaacgcaaaacctacgtcttcgtcctgctcggcatcgcctattgcgccagcatcggcggcttgggcacgctcgtcggctcgccgcccaacctgattgccgccaaagccctaaatctggacttcgtcggctggatgaagctcggcctgccgatgatgctgttgattctgcccttgatgctgctctccctgtacgtcatcctcaaacctaatttgaacgaacgcgtggaaatcaaagccgaatccatcccttggacgctgcaccgcgtgatcgcgctgttgattttccttgccacagccgccgcgtggatattcagctccaaaatcaaaaccgccttcggcatttccaatcccgacaccgttatcgccctgagtgccgccgtcgccgtcgtcgtcttcggcgtggcgcaatggaaggaagtcgcccgcaataccgactggggcgtgttgatgctcttcggcggcggcatcagcctgagcacgctgttgaaaacatccggcgcgtccgaagccttgggacagcaggttgccgccaccttttccagcgcgcccgcatttttggtgatactcatcgtcgccgccttcattatttttctgaccgagttcaccagcaacaccgcctccgccgcattgcttgtaccgattttctccggcatcgctatgcagatggggctgcccgaacaagtcttggtattcgtcatcggcatcggcgcatcttgtgccttcatgctgccggttgccacaccgcctaacgcgattgtgttcggcacgggcttaatcaagcaacgcgaaatgatgaatgtcggcatactgctgaacatcctctgcgtagtattggttgctctgtgggcttatgctgtactgatgtaa

SEQ ID NO: 67112 - DNA, 534 bp, Neisseria meningitidis
atgtttccccccgacaaaacccttttcctctgtctcagcgcactgctcctcgcctcatgcggcacgacctccggcaaacaccgccaaccgaaacccaaacagacagtccggcaaatccaagccgtccgcatcagccacatcgaccgcacacaaggctcgcaggaactcatgctccacagcctcggactcatcggcacgccctacaaatggggcggcagcagcaccgcaaccggcttcgattgcagcggcatgatccaattcgtttacaaaaacgccctcaacgtcaagctgccgcgcaccgcccgagacatggcggcggcaagccgcaaaatccccgacagccgcctcaaggccggcgacctcgtattcttcaacaccggcggcgcacaccgctactcacacgtcggactctacatcggcaacggcgaattcatccatgcccccagcagcggcaaaaccatccgaaccgaaaaactctccacaccgttttacgccaaaaactacctcggcgcacatactttctttacagaatga

SEQ ID NO: 67113 - DNA, 1779 bp, Neisseria meningitidis
ttgggcgtcgatcctgatgccagcgagtggaaaaaagtgctgctgccttggacggttcgtgcttccaatgatgacgatcaatttaacacattcaacaaagaagaaaacaacggcaagccaaaatacagtcaaaaataccgcagccgcgacaacggcaagcacgagcgcaatttgggcgacatcgtcaacagccccatcgtggcggtcggcgagtatttggctacttccgccaacgacgggatggtgcatatcttcaaaaaaggcaacggcggggacgagcgcaactatagtctgaagctcagttatatcccgggcacgatgccgcgcaaggatattgaaagcaaagactccacccttgccaaagagctgcgcgcctttgccgaaaaaggctatgtgggcgaccgctacggcgtggacggcggctttgtcttgcgcaaagttaacaacttaaacgggcaagaccgcgtgtttatgtttggtgcgatgggttttggcggcagaggcgcgtatgccttggatttgaccaaagccgacagcagtaacccgaccggcgtttccctgtttgatgtcaaaaatgacaataataacggcaaaaacggcaataatagcgtggaattaggctacaccgtcggcacgccgcaaatcggcaaaacacacaacggcaaatacgccgccttccttgcctccggttatgcgactaaagagattaacaacaacgacaataaaaccgcgctgtatgtgtatgatttggaaaacagcaacggtaacggtacgctgattaaaaaaatcgaagtaccaaacggcaagggcgggctttcgtcccccacgctggtggataaagatttggacggcacggtcgatatcgcctatgccggcgatcgcggcgggaaaatgtaccgctttgatttaagcagtcaaagtcctgatcaatggactgtacgccctatttttgaaggcacgaagccgattacttccgcgcccgctatttcccaactgaaagacaaacgcgtggtcatcttcggcacgggcagcgatttgagtgaagaggatgtggacaatatggaagaacaatatatttacggtatcttcgacgacgatacggcgacgacgggtactgtaaacttcagcggttcgggaggcgggctgcttgagcaagtgcttcgtagggataacgacaataaaaccttattcctgaccgattacaagcgatccgacggatcgggcaataagggctgggtagtgaaattgaaggacggacagcgcgttaccgtcaaaccgaccgtggtattgcgtaccgcctttgtaaccatccataaatatacgggtacggacaaatgcggcgcggaaaccgccattttgggcatcaataccgccgacggcggcaagctgaccaagaaaagcgcgcgcccgattgtgccggaagccaatacggctgtcgcgcaatattccggccataagaaaggcaccaacggcaaatccatccctataggttgtatgcaaaaaagcaatgaaatcgtctgcccgaacggatatgtttacgacaaaccggttaatgtgcgttatctggatgaaaagaaaacagacggattttcaacaacggcagacggcgatgcgggcggcagcggtatagaccccgacggcaagcgttccggcaaaaacaaccgctgcttctcccaaaaaggggtgcgcaccctgctgatgaacgatttggacagcttggacattaccggcccgacgtgcggtatgaaacgaatcagctggcgtgaagtcttctactga

SEQ ID NO: 67114 - DNA, 717 bp, Neisseria meningitidis; identical to SEQ ID NO: 54670

SEQ ID NO: 67115 - DNA, 1266 bp, Neisseria meningitidis
atgaacacactccaacgccgcaagacgcatcaagtccgcatcgatcatattaccgtcggttcagaagcacccgtcgttatccaatctatgaccaacaccgacactgccgatgcaaaagccaccgcattgcagattaaggaattgagcgacgccggatccgaaatggtgcgtattaccgtcaacagccccgaagccgcgtccaaagttgccgaaatccgccgccgcttggacgatatgggctatgccacaccgcttatcggcgatttccacttcaacggcgaacgcctgttggcggaatttcccgaatgcggcaaagcattgtccaaataccgcatcaatcccggcaatgtcggcaaaggcgtaaaaggcgatgaaaaatttgcctttatgattcggactgctgctgaaaacgataaagccgtccgcatcggcgtaaactggggttctttggatcaaagcctcgccaaacgtatgatggatgccaacctcgcttcttccgcgccgaaaccgcccgaagaagtgacgaaggaagcactgattgtctccgctttggaatctgccgaaaaagccgttctattgggactgcccgaagacaaaatcatcctgtcgtgcaaagtcagcgcggttcaggatttgattcaggtttaccgcgaactgggcagccgttgcgcctatccgctgcatttgggtttgaccgaagccggtatgggcagcaaaggcattgtcgcatcaacggcggcattatccgtcttgcttcaagaaggaatcggcgacaccatccgcatttcactgactccggaacctggcagcccgcgtactcaggaggtcgtcgtcgggcaagagattttacagactatgggattgcgttcgtttacgccgatggttaccgcctgccccggctgcgggcgtaccaccagtaccgtatttcaagagctggcacaagatgttcaaaattacctgcgacaaaaaatgagcgtatggcgtactgcttatccaggcgtggaatccctgaatgttgccgtgatgggctgcgttgtcaatgggcccggagaaagcaaattggccgacatcggcatcagcctgcccggtacgggagaaacacccgtcgcgccggtttatgtggacggggagcgcaaagtaacactgaaaggtgataatattgcaactgaattcctagctattgtagaggaatatgtcaaaaccaactatggtgaaaacggctccaaacgcaaccagaacaaaatcatccctatacagtccctataa

SEQ ID NO: 67116 - DNA, 423 bp, Neisseria meningitidis; identical to SEQ ID NO: 51460

SEQ ID NO: 67117 - DNA, 1233 bp, Neisseria meningitidis
atgccttctgcccattatcctgaaatgagcgaaaaactgatggcggttttgatggcgatgctggttacgctgatgccgttttccatcgatgcctacctgcccgcgattcccgaaatggcgcagtcgctgaacgcggatgtccaccgcatcgaacagagcctgagtttgtttatgttcggcacggcgttcggacaggtggtcggcggttcggtgtccgacatcaaagggcgcaaacccgtcgcgctgaccggactggccgtctactgccttgccgttgccgccatcgtatttgcttcgagtgccgaacagctcctcaacctgcgcgtcgtgcaggcattcggtgcgggcatgactgtggtcatcgtcggcgcaatggtgcgcgattattattccggacgcaaagccgcccagatgtttgcccttatcggcatcattttgatggttgtgccgctggtcgcacccatggtcggcgcactgttgcagggcttgggtggctggcaggcgatttttgtttttctggcggcgtattcgctggtgctgctcggtttggtgcagtatttcctgcccaagcctgccgtcggcggcaaaatcggacgggatgtgttcgggctggtggctgggcggttcaaacgcgtattgaaaacccgtgccgcgatgggttatctgttttttcaggcattcagcttcggttcgatgttcgcctttctgaccgaatcttccttcgtgtaccagcagctttaccgtgttacgcctcatcaatacgcttgggcgtttgcactcaacatcatcacgatgatgtttttcaaccgcattaccgcgtggcggctcaaaaccggcgcgcatccgcaaagcatcctgctgtgggggattgtcgtccaatttgccgccaacctgtcccaactcgccgccgtgctgtttttcgggttgcctccgttctggctcttggttgcgtgcgtgatgttttccgtcggcacgcagggcttggtcggcgcgaacacgcaggcatgctttatgtcttatttcaaagaagagggcggcagcgcgaacgccgtgttgggcgtgttccagtccttaatcggcgcgggggtgggtatggcggcgaccttcttgcacgacggttcggcaaccgtgatggcggcaacgatgaccgcgtccacctcttgcggcattgcgcttctgtggctgtgttcgcaccgggcgtggaaggaaaacgaacagagcgaatacttgtaa

SEQ ID NO: 67118 - DNA, 1257 bp, Neisseria meningitidis; identical to SEQ ID NO: 38146

SEQ ID NO: 67119 - DNA, 537 bp, Neisseria meningitidis; identical to SEQ ID NO: 37832

SEQ ID NO: 67120 - DNA, 615 bp, Neisseria meningitidis
atgaactttacccgactgctcaaccaagtcttaagcacggttcaaaaaaaaggcaacacattctccgacagcccgctcaattcattcggcggaggcgcgctggttgccggtgtcgcctccatgctgctgaacggtaaaaaccgcaaaaccatcaccaaaatcggttcgaccgccgctttgggctacctcgcctaccggggctatcagatgtggcagcaaaacaaagggcgggcaaccgtaacacaaagcgatttccaacctgccggagaaaccgaagaaacatacagccgcaccgtattgcgcaccatgatagccaccgccgcttcagacggcatgatagacgaagccgaacgccggactatcgaacaggaaagcggcacagaccccgaaactgctgcatggctcgccgccgaataccgcctgcccgcaagcatcgaagacatcgccgccgccgtcggcaacgatgaggcgttggcggcggaggcctatctggcggcaagactggtatgtgccgatttgtcgcggaaagaaaccgtcttcctcgcccgcctgtcgcaggctttggaactggatgacaatctggtggaaaacttggaaaggcaattggggttttga

SEQ ID NO: 67121 - DNA, 660 bp, Neisseria meningitidis
atgtcaaaccaaaaagccttggtcatcttttcgggcggtcaggattcgaccacctgcctgattcaggcaatccaaatctacgggcgcgaaaacgtccaagccattactttccaatacgggcaacgccatgccgtcgagctggaacgtgcccgctggattgcgcaggatttgggcgtcaaacaaaccgtactcgacttgagcctgatgcggcagattacgcacaatgccctgatggacgacaccgccgccatcgaaactgccgaaaacggcgttccgaatacctttgtagacggccgcaacgcgcttttcctgctctatgcagcgatttacgccaaagggcaggggatacggcacatcatcgcgggcgtgtgcgaaaccgacttctccggctatcctgactgccgcgacgtgttcgtcaaatccatgaacgttacccttaatctggcgatggactatgatttccaaatccacacgccgctgatgtatctgaccaaggcgcaaacttgggcgttggcggacgaaatgggcgtgctggactatatccgcgagcaaacccacacctgctataacggcatcgtcggcggctgccgcgaatgcccgagctgtatcttgcgcgaacgcgggctggcggaatatctggaaagtaaaaaggccgtctga

SEQ ID NO: 67122 - DNA, 1518 bp, Neisseria meningitidis
atgtctcctaaaaaaatacccatttggcttaccggcctcatcctactgattgccctaccgcttaccctgccttttttatatgtcgctatgcgttcgtggcaggtcggcatcaaccgcgccgtcgaactgttgttccgcccgcgtatgtgggatttgctctccaacaccttgacgatgatggcgggcgttaccctgatttccattgttttgggcattgcctgcgcccttttgttccaacgttaccgcttcttcggcaaaaccttttttcagacggcaatcaccctgcctttgtgcatccccgcatttgtcagctgtttcacctggatcagcctgaccttccgtgtcgaaggcttttgggggacagtgatgattatgagcctgtcctcgttcccgctcgcctacctgcccgtcgaggcggcactcaaacgcatcagcctgtcttacgaagaagtcagcctgtccttgggcaaaagccgcctgcaaacctttttttccgccatcctcccccagctcaaacccgccatcggcagcagcgtgttactgattgccctgcatatgctggtcgaatttggcgcggtatctattttgaactaccccacttttaccaccgccattttccaagaatacgaaatgtcctacaacaacaataccgccgccctgctgtctgccgttttaatggcggtgtgcggcatcgtcgtattcggtgaaagcatatttcgcggcaaagccaagatttaccacagcggcaaaggcgttgcccgtccttatcccgtcaaaacactcaaactgcccggtcagatcggcgcgattgtttttttaagcagcttgttggctttgggcattattatcccctttagcgtattggtacattggatgatggtcggcacttccggcacattcgcgctcgtatccgtatttgatgcctttgtccgttccttaagcgtatcggctttaggtgcggttttgactatattatgtgccttaccccttgtttgggcatcggtccgctatcgcaattttttaaccgtttggatagacaggctgccgtttttactgcacgccgtccccggtttggttatcgccctatccttggtttatttcagcatcaactacacccctgccgtttaccaaacctttatcgtcgtcatccttgcctatttcatgctttacctgccgatggcgcaaaccaccctgaggacttccttggaacaactccccaaagggatggaacaggtcggcgcaacactgggacgcggacacttctttattttcagaaccttggtgctgccgtccatcctgcccggcattaccgccgcattcgcactcgtcttcctcaacctgatgaaagagttgaccgccaccctgctgctgaccgccgacgacatccacacgctctccaccgccgtttgggaatacacatcggacgcacaatacgccgccgccaccccttacgcgctgatgctggtattattttccggcatccccgtattcctgctaaagaaatacgctttcaaataa

SEQ ID NO: 67123 - DNA, 861 bp, Neisseria meningitidis
atgtctgatttgtctgtattgtcgccgtttgccgtgcctttggcagcggtgttcgggctgctggtcggcagtttcttaaacgtcgtcatttaccgcgtgccggtcatgatggaacgcggctggacggtatttgccaaagaatatttaaacctgccgctgaccgaagaggaaagccgtaccttcaacctgatgaaaccggattcctgctgtcccaaatgccgcgtgccgatacgcgcgtggcagaacatcccgattgtcagttacctgctcctgcgcggcaaatgcgcctcctgtcaaaccaaaatcagcatacgttatcccttaatcgagctgctgaccggcgtattgttcgggctggtcgcctggcaatacggctggtcttggattacgctgggcggattggtactgaccgcgtttctgatttccctgacctttatcgatgcggacacccaatacctgcccgactcgatgacactgcccttgatttggctggggctgatatttaatttggacggcggcttcgtgcctttgcagtctgccgttttaggtgcggttgccggctatggttcgatatggcttttatgcgcggtatataaactgattaaaggcgaaatcggtatgggcaacggagatttcaaactgattgccgcattgggcgcgtggctcggcatatccgcattgcccgtgctgatttttgtttcctcgctgatcggtttggtcgcggcaatcgttatgcgcgtcgccaaggggcagcattttgccttcggccccgcactgacagtttcgggctggataatttttacggcaaacgattccgtatggcgggcggtcaactggtggctgacccatccggtgctgtaa

SEQ ID NO: 67124 - DNA, 1635 bp, Neisseria meningitidis
atgataaaaccgaacctgaggccgaagctcggctcttccgcgctgattgccttcctttctctgtattcctcgctggtattgaattacgccttttttgccaaagttgtcgagcttcatccttttaacggcaccggggcggatatcttcctctatacgatgccagtggtgctgttttttttaagtaatttcgtttttcacgtcattgccctgcctttcgtgcataaggtattgattccgttgatattggttatcagtgcggcagtgtcttaccaagaaatatttttcaatatctatttcaacaagtcgatgttgaataatgtcttgcaaactacggctgccgaaagcgcgcgcctgattacgccgggctatgtgctgtggattgtatgtttgggcgtattgcccgcgctggcgtatatcgccgtcaaggttaaataccgcgtttggtataaggagcttttgacgcgccttgtgcttgccgccgtttcctttttgtgcgcgttgggcatcgcaatgttgcaatatcaggattacgcctcgtttttccgcaacaataaatcagtaacccatctgattgtgccatctaatttcatcggcgcgggcgtgtcgaaatacaaagattggaagcgttccaatattccttatacgcaattggatatggcggtcgtgcaaaaccggccggccggcagcctgcgccgtttcgtggtgctggtcgtgggcgagaccacgcgtgccgccaactggggtttgaacggttacagccgccaaactacgccgctgcttgccgcgcgcggcgatgaaattgtcaatttcccgcaggtcagaagctgcggcacatcgaccgcgcactccctgccgtgtatgttctcaaccttcgaccgcacggattatgacgaaatcaaagccgaacaccaagacaacctgctggacatcgtgcagcgcgccggtgtggaagttacctggttggaaaacgattccggctgcaagggcgtgtgcggcaaagtgccgaataccgacgttacctcgctcaacctgcccgaatactgccgcaacggcgagtgcctcgacaatatcctgctgactaagttcgacgaagtcctcaataaaaacgataaagacgcggttttaatcctgcataccatcggcagccacgggccgacgtattacgaacgctataccgaagccgaacgcaaattcacgccgacctgcgacaccaacgaaatcaacaaatgcacccgcgccacgctggtcaacacttacgacaatacggttttgtatgtggaccagtttatcgacaaggttatccgcaaacttgaaaaccgcgacgatttggaaagcgtggtgcattatgtttccgaccacggcgaaagtttgggcgaaaacgggatgtacctgcacgccgcgccttacgccatcgcgccttccgggcagacgcatatcccgatggttatgtggttttccaaagccttccgccaacacgggggcatagatttccaatgcctcaaacaaaaagcggcggaaaacgaatattcgcacgaccactatttcagcacggtattggggctgatggacatttccaacagtcaaacctatcggaaggaaatggatatattggcagcctgccgccgtccgcgctga

SEQ ID NO: 67125 - DNA, 621 bp, Neisseria meningitidis
atggaattgaaagtaattgacgctaaaggacaagtttcaggcagtctgtctgtttctgatgctttgttcgcccgcgaatacaatgaagcgttggttcatcagctggtaaatgcctacttggcaaacgcccgctctggtaaccgtgctcaaaaaacccgtgccgaagtaaaacactcaaccaaaaaaccatggcgtcaaaaaggtactggtcgtgcccgttctggtatgacttcatctccgctgtggcgtaaaggtggtcgcgcgttcccgaacaaacccgacgaaaacttcactcaaaaagtaaaccgcaaaatgtaccgtgccggtatggcgactattctgtcccaattgactcgtgacgagcgtttgtttgcgattgaggcgttgactgccgaaactcctaaaaccaaagtttttgctgaacaagtgaaaaatctgggtctggagcaagtgttgtttgtaaccaaacagctcgacgagaatgtttacttggcttcacgcaacttgccaaacgtgttggttttggaagctcaacaagttgatccttacagcttgctgcgttacaaaaaagtaatcatcactaaagatgcagttgcacaattagaggagcaatgggtatga

SEQ ID NO: 67126 - DNA, 420 bp, Neisseria meningitidis
atggacaataagaccaaactgcgcttgggcggcctgattttactgaccaccgccgttttaagcctcattatcgtattgattgtcgattcctggccgcttgccatcctgcttgcagccgtcattgtcgctgccgctgcgggtggttttgtttggacatcccgccgacagcaacgccagtttatcgaacgcctgaaaaaattcgacatcgatcccgaaaaaggcagaatcaacgaggcaaacctgcgccgtatgtaccacagcggcggacaacaccaaaaagatgcgattaccctgatctgcctgtcgcaaaaatgttcggtggacgaggcgcacgctatgttcaaaaaacgcccgacacgtcaggaaatcaatcaaatggcggcaaaacagtcgcgcggtcagaaacgtccgcaccgttaa

SEQ ID NO: 67127 - DNA, 1167 bp, Neisseria meningitidis
atgaatttacacgagtatcaggctaaagaactgctggctggctacggtttgcccgtacaaggcggtattttggcacacaacggcgaagaagccgctgcagcttacgacaaattgggcggcaaattcgctgttgtcaaagcacaagtacacgccggcggccgcggtaaagcgggcggcgtaaaagtcgttaaaagccgcgaagaagctaaagaagtggctgaaagcctgattggcaccaacttggtaacttaccaaaccgatgccaacggtcaacctgtcaacagcgttttggtttgcgaagatatatatccggttcaaaccgagctgtacttgggcgcagtggttgaccgttctacccgccgcgttacattcatggcttctaccgaaggcggtgtggaaatcgaaaaagttgctgccgaaactccagaaaaaatcttcaaagtaaccgttgatccgctggtcggcctgcaaccttgccaagctcgcgaagttgccttccaactgggcttgaaagacaaacaaatcaacgagttcgtcaaactgatgaccggcgcgtacaaagcgtttgtcgaaaacgacttcgccctgtttgaagtcaacccgctggcagttcgcgaaaacggcgcactggcttgcgtggacggcaaaatcggcatcgacagcaacgcgctctaccgcctgccaaaaatcgctgaattgcgcgacaaatctcaagaaaacgaacgtgaactgaaagcttctgaattcgacctgaactatgttgccctggaaggcaacatcggctgtatggttaacggtgccggtttggcgatggccaccatggacatcatcaaactcaaaggcggtcaacctgccaacttcttggacgttggcggcggcgcaaccaaagaccgcgtggttgaagcgttcaaactgattttggaagacaaatccgttaaaggcgtattgatcaacatcttcggcggtatcgtacgttgcgacatgattgcggaagccatcgtggcagccgttaaagaaatcaacgtcgacgttcctgtcgttgttcgtttggaaggtaacaacgccgaactcggcgcgaaaatcctgaacgaatcaggcctgaaactgacttctgcagacggcctgaatgacgcagccgaaaaaattgttgcagccgtaaacgcctaa

SEQ ID NO: 67128 - DNA, 438 bp, Neisseria meningitidis
atgatagggcttttaatcatcacacacgaaaccataggcgaagcctaccgcaagctggcacatcatttttttccgggcggactgcctgaaaacgtccgcatactcggcgtgcaaccgacggaagaccaagacgacatcatcaacaacgccattgccgcgcttcaggagtttcccgacaacgacggcgtgctaattatgaccgatattttcggcgcgaccccctgcaatgcagcccgccgcctcgtgcgcgaaaacaaatcggcgattttgaccgggctgaacgcgccgatgatggttaaggccgtccaatattcgccggcggcggaagaccttgccgcctttaccgaatgcgtcagggaggcggcggtaaaaggcattttcgccatcacgtccgcgcccgaagatttggtgtgccggcgcagcggcgatgccgtctga

SEQ ID NO: 67129 - DNA, 531 bp, Neisseria meningitidis; identical to SEQ ID NO: 66022

SEQ ID NO: 67130 - DNA, 468 bp, Neisseria meningitidis; identical to SEQ ID NO: 42615

SEQ ID NO: 67131 - DNA, 1194 bp, Neisseria meningitidis
atgacagaggacgaacgtttcgcgtggctgcaattggcgtttacgccctatatcggcgcggaaagcttcctgctgctgctgcgccgtttcggcagcgcgtcaaacgccctgtccgcaccggcggaacaggtcgccctggcggtgcggcacaagcaggcggccgaggcttggcgcaatgcggaaaaacgcgcctcggcgcggcaggcggcagaagcggcgttggaatgggaaatgcgggacggatgccgtctgatgctgcttcaggatgaagatttccccgaaatgctgacgcaggggctgaccgcgccgccggttttgtttttgcgcggcaacgtgcggctgctgcacaagccttccgccgccatcgtcggcagccgccatgccacgccgcaggcgatgcggattgccaaagatttcggcagggcgttgggtgggaaaggcattcccgtcgtgtcgggtatggcttcgggcatcgacaccgccgcccatcagggcgcgttgcaggcagaaggcggcaccatcgccgtgtgggggacgggcatagaccgcatttatccgccgtccaataaaaaccttgcttatgaaattgccgaaaggggattgattgtcagcgagttccctttggacacgcgtccgtttgcaggcaactttccgcgccgcaaccgcctgattgccgcactgtcgcaagtaacgctggtggtcgaggccgccttggaatccggttcgctgattaccgccggtttggcggcagaaatggggcgcgaggtaatggcggtacccggttcgatagacaacccgcacagcaaaggctgccacaaactgattaaagacggcgcgaaactgacggaatgcctggacgacatcctgaacgaatgcccgcggctcttgcaaaatgagggtgcttcgtcatattctataaataagggaatgcctgaaaagcgcatcactgccgttcagacggcatccgaccagctgtctctgcctgaaggcaaaatgccgtctgaaaagacggagaaccgacccgtcggcggcagtatcttggacaggatgggtttcgacccagttcatcccgacgtgcttgccggacagttggctatgcctgccgcagatttgtatgccgcactgttggaattggaattggacggcagcgttgccgcaatgcccggcggcagataccagcgtatccgaacttga

SEQ ID NO: 67132 - DNA, 786 bp, Neisseria meningitidis
atgggttttctgcaaggcaaaaaaattctgattaccggcatgatttccgagcgttccatcgcttacggcatcgccaaagcctgccgcgaacaaggcgcggaactggcgtttacctacgttgtggacaaactggaagagcgcgtccgcaaaatggcggcggaattggattccgaactcgtattccgctgcgatgttgccagcgacgacgaaatcaaccaagtgttcgtcgatttgggcaaacattgggacggcttggacggtttggtgcattccatcggcttcgcaccgaaagaagccttgagcggcgacttcctcgacagcatcagccgcgaagcgttcaacaccgcacacgaaatttccgcatacagcctgcccgcattggcaaaagccgcccgtccgatgatgcgcggcagaaactccgccatcgttgccctgagctacttgggcgcggtgcgcgcgattccgaattacaacgtgatgggtatggcaaaagccagccttgaggcaggcatccgctttaccgccgcctgtctgggcaaagaaggcatccgctgcaacggcatttccgccggtccgatcaaaacgctcgccgcctccggcattgccgatttcggcaaactcttgggacacgtcgccgcccacaatccgctgcgccgcaacgttaccatcgaagaagtcggcaataccgccgccttcctgctgtccgacctgtcgtccggcattaccggcgaaatcacttacgttgacggcggttacagcatcaatgccttgagcaccgagggataa

SEQ ID NO: 67133 - DNA, 648 bp, Neisseria meningitidis; identical to SEQ ID NO: 52229

SEQ ID NO: 67134 - DNA, 1542 bp, Neisseria meningitidis
atgaagtttttagaccgtgaggcaagcattgccaagccgggtttcaaccgttggctcgtaccgcccgcagcattggcggtgcaccttgccatcgggcagatttacgcctattccgtattcaacgcgccgctgaccaaacttatcggcataaccgaatcggcggccggagattggaagctgacgaccgtaggttggattttcagtatcgcactcgcgatgctgggcgcgtcggccgccctgttcggtacgtggatggaacgggtagggccgcgcaaagccatatttgccgccgcctgctgcttcagcctgggcttcttcgtatccgcattcggcgtgcgtacgcacaacctcttcctgctctatttgggcaacggcgtcatcggcggcgtaggcttgggtttgggctacatcgggccagtttccacactgatgaaatggtttcccgacaagccgggtatggcgaccggtttggcgattatgggtttcggcggcggcgcaatgctggcctcgccgctttccgtatcactgatgaacgccttttcaaacgctgcttcggtcggggttgccgaaaccttcgccgtattgggtctgctttacctcgcactgatgatgtttggcgcgtttaccatccgcgtacctgccgacggctggaaacctgaaggctataccgcgccgaaaacgcaaaacaagctggtcagcagcaatcatgtcaacgtgtcccaagccatgaaaacgccgcagttttggctgttgttctgggtattgtgcctgaacgtaaccgccggcatcggcgtattgggtcaggcatccgtgatgattcaggaactcttttccgaaacctccgtaggcaggcagtcggcagtcggcgcaggtgcggcggcaggcttcgtcagcctcctgagcctgtttaatatgggcggacgctttttgtggtcgagcgtttccgacaaaatcggacgcaaagacacctacaccatcttcttcgtactcggttcgctgctgtatttcgccgttccctccatcggcgagggcggcagcaaagccctgttcatcatcggcttttgcgtgattatttccatgtacggcggcggatttgccgccattcccgcctacctgaaagacctgttcggcacctatcaggtcggcgcgattcacgggcgcatcctgctggcctggtcaaccgccgccgtcatcggcccggtactggtcaattacatacgccaaagccaaatcgacagcggcataccggcggcacaggcatacagcgtaaccatgtacatcatggcgggtctgctgattatcggtttgttgtgcaacctcgccgtcaaatccgtacacgaaaaacaccacgaaaaagacatcaaaaccgccgcacgcagcggcaaccccgatgacgaaaccgccatatccgacgcttaccttgtgggcgaaaaagtttccggcggcggcatatcggtctggtggcgttgggcattggccgtcataccgctcgcctacggcgtggtgatggtctttgtcaaagcactcgaccttttctcctga

SEQ ID NO: 67135 - DNA, 477 bp, Neisseria meningitidis
  misc_feature 8, 9, 10, 11, 12: 'n' is a, c, g or t
gtgtgtgnnnnnataaagaaaaacgacctctacaaactcggttacaaacaacatacccgtaccgatgaggaaggctatatcgagaaactgcacattactcccgccaatgcccatgagtgcacacacctgtcgccgttgttggaagggatagatgaaggtacgaccgtctatgccgacaaaggctatgacagtgcggaaaaccggcaacatctgaaagaacatcagttaccggacggcattatgcgcaaagcctgccgcaaccgtccgctgtcggaagtgcaaaccaaacgtaaccgatatttgtcgaagacccgttatgtggtcgaacaaagcttcggtacgctgcaccgtaagttccgctatgcgcgggcagcctatttcggactgattaaagtgagtgcgcaaagccacctgaaggcgatgtgtttgaacctgttgaaagcggccaacaggctaagtgcgcccgctgccgcctaa

SEQ ID NO: 67136 - DNA, 642 bp, Neisseria meningitidis
atgaccgatttccgccaagatttcctcaaattctccctcgcccaaaatgttttgaaattcggcgaatttaccaccaaagccggacggcggtcgccctatttcttcaatgccggcctctttaacgacggcttgtccacgctgcaactggcaaaattctatgcacaatccatcattgaaagcggcatccgattcgatatgctgttcggccccgcctacaaaggcattattttggcggcggcaaccgcgatgatgctggcggaaaaaggcgtaaacgtcccgtttgcctacaaccgcaaagaagccaaagaccacggcgaaggcggcgtgttggtcggcgcgccgcttaaagggcgcgtgctgattatcgacgacgtgatttccgccggcacatccgtgcgcgaatcgatcaaattgattgaagcggagggtgcaacccccgccggtgtcgccatcgcgctcgaccgcatggaaaaaggcacgggtgaattgagcgcggttcaggaagtggaaaaacaatacggcctgcccgtcgcccccatcgccagcctgaacgatttgtttatcctgttgcaaaacaatcccgaattcggacagttcctcgaacccgtccgagcctaccgtcggcagtacggcgtagaataa

SEQ ID NO: 67137 - DNA, 447 bp, Neisseria meningitidis
atgagactgaccaccaaagggcgttttgccgttaccgctatgctggatttggcgatgaacgcgcaaaccggcgccgtcaaactcagtgccatcagcgaacgccaaaacatatccctctcctatctcgagcaattgttcggcaaactccgccgcgccggacttgttgaaagcctgcgcgggcccggcggcggctacatcctcgccgcaccggcagcacgcatcaacatcgcccaaatcatcgccgccgccgaagaccggctggacgcaacccaatgcggcagcaaagccaactgccaccacggcgcgccctgcctgacgcacgacctttgggagaatttaaacaaaaccatcaacgactacctcggcagcgttaccctgcaaagcatcatcgaacagaaaaacaacggcgacggcagccgcgtcgtccaatttacacacatccattaa

SEQ ID NO: 67138 - DNA, 474 bp, Neisseria meningitidis
atgaaaaaattattggcggccgtgatgatggcaggtttggcaggcgcggtttccgccgccggagtccacgttgaggacggctgggcgcgcaccaccgtcgaaggtatgaaaataggcggcgcgttcatgaaaatccacaacgacgaagccaaacaagactttttgctcggcggaagcagccccgttgccgaccgcgtcgaagtgcatacccacatcaacgacaacggcgtgatgcggatgcgcgaagtcaaaggcggcgtgcctttggaggcgaaatccgttaccgaactcaagcccggcagctatcacgtgatgtttatgggtttgaaaaaacaattaaaagagggcgacaagattcccgttaccctgaaatttaaaaacgccaaagcgcaaaccgtccaactggaagtcaaaaccgcgccgatgccggcaatgaaccacggtcatcaccacggcgaagcgcatcagcactaa

SEQ ID NO: 67139 - DNA, 1824 bp, Neisseria meningitidis
  misc_feature 1809, 1810, 1811, 1812, 1813: 'n' is a, c, g or t
atgacacgcttcaaatattccctgctgtttgccgccctgttgcccgtgtacgcgcaggccgatgtttctgtttcagacgaccccaaaccgcaggaaagcactgaattgccgaccatcaccgttaccgccgaccgcaccgcgagttccaacgacggctacactgtttccggcacgcacaccccgctcgggctgcccatgaccctgcgcgaaatcccgcagagcgtcagcgtcatcacatcgcaacaaatgcgcgaccaaaacatcaaaacgctcgaccgcgccctgttgcaggcgaccggcaccagccgccagatttacggctccgaccgcgcgggctacaactacctgttcgcgcgcggcagccgcatcgccaactaccaaatcaacggcatccccgttgccgacgcgctggccgatacgggcaatgccaacaccgccgcctatgagcgcgtagaagtcgtgcgcggcgtggcggggctgctggacggcacgggcgagccttccgccaccgtcaatctggtgcgcaaacgcctgacccgcaagccattgtttgaagtccgcgccgaagcgggcaaccgcaaacatttcgggctggacgcggacgtatcgggcagcctgaacaccgaaggcacgctgcgcggccgcctggtttccaccttcggacgcggcgactcgtggcggcggcgcgaacgcagccgcgatgccgaactctacggcattttggaatacgacatcgcaccgcaaacccgcgtccacgcaggcatggactaccagcaggcgaaagaaaccgccgacgcgccgctcagctacgccgtgtacgacagccaaggttatgccaccgccttcggcccgaaagacaaccccgccacaaattgggcgaacagccgccaccgtgcgctcaacctgttcgccggcatcgaacaccgcttcaaccaagactggaaactcaaagccgaatacgactacacccgcagccgcttccgccagccctacggcgtagcaggcgtgctttccatcgaccacaacaccgccgccaccgacctgattcccggttattggcacgccgacccgcgcacccacagcgccagcgtgtcattgatcggcaaataccgcctgttcggccgcgaacacgatttaatcgcgggtatcaacggttacaaatacgccagcaacaaatacggcgaacgcagcatcatccccaacgccattcccaacgcctacgaattttcccgcacgggtgcctacccgcagcctgcatcgtttgcccaaaccatcccgcaatacggcaccaggcggcaaatcggcggctatctcgccacccgtttccgcgccgccgacaacctttcgctgatactcggcggcagatacagccgttaccgcaccggcagctacgacagccgcacacaaggcatgacctatgtgtccgccaaccgtttcaccccctacacaggcatcgtgttcgacctgaccggcaacctgtctctttacggctcgtacagcagcctgttcgtcccgcaatcgcaaaaagacgaacacggcagctacctgaaacccgtaaccggcaacaatctggaagccggcatcaaaggcgaatggcttgaaggccgtctgaacgcatccgccgccgtgtaccgcgcccgtaaaaacaacctcgccaccgcagcaggacgcgacccgagcggcaacacctactaccgcgccgccaaccaagccaaaacccacggctgggaaatcgaagtcggcggccgcatcacgcccgaatggcagatacaggcaggttacagccaaagcaaaacccgcgaccaagannnnncacacacttaa

SEQ ID NO: 67140 - DNA, 1251 bp, Neisseria meningitidis
atgtttgttccgctggcaatgcttgcaggtatgttttcctactacgaaaccttccacgaaacggaagcgttgcaggacgacctgctccgtcaggcggcattgtacgtcgcccccgattccaaacccgaaactttgcccgagggcgacggcgatacgcgtattttggtacagatgccgcagcaggaagaccctgttgtcagcctgcctgcgcatctggcggacggtctgcacacgcttcaggcggacggggacgacgattattaccgcgtctatatccgcacgaccgaacagggacggattgccgttatgcaggaaaacgaataccgtgaagatttggcggcggatgcggcacggcaaagcgtgttgcccctgctggcggcactgccgctgatgatactgctgaccgtgtggattacgcacaaagccatgcgccccgtccgcaaattgtcgcaaagtctcgaacaacgccgaatcaatgacctgtctgctttgagtgtggacaatattcccagtgaaatcagagggttcgtaaccgccatcaacctgcttttgaaacgtgcggatgaagacatccgccaccgtcagcggtttgtcgccgacgcggcacacgaattgcgtacgccgatgacagccctttcccttcaggcggaacggctcaacaatatgtcgctcccacccgatgcagcgcggcagtctgccgttttgcagcagagcatcaggcgcaacaaacacctgctcgaacagcttttggcactggcgcgttcgcagtcggatgaaacccctctgacgaaaacgacattcggtctgcaaagccgtttccgccaagtgttgcaggaactgatgccgctggctttggaaaaacgtcaggacatcggcgtggcggtcggaggcgatgtcgaagtgtctgccgacgaaacggaaatctatacgctgattaaaacctttgccgacaacgcggtacgttacacgccgcccgaaggcaggatcgatttgggtttcacggacgaagggaaatatctcgccgtgtgggtggaagataacgggaacggcattcccgaatccgaacgcgcccgcgtcctcgatccgttttaccgtattttgggaacggagcagcaggggacggggctgggtctgtccatcgccgacacgcttgccaaaaaatacggcggacatttggaactgaccgacagccgacgtttcggacacggtctgttgatacgggcgttgttggacaaggaaaccctgaaatag

SEQ ID NO: 67141 - DNA, 1692 bp, Neisseria meningitidis
atgagcgcatcacaattactgtcaagactgacccaaaccgtaggcgaaaaatacatcatcaccgaccccgcgaagaccgaacaataccgccaaggctaccgcttcggcgagggcagggcgttggcggtggtgcgccccggaaccattctggaaatgtggaaaattctgcaggcctgcgtcgaagcggacgtgattgtgattacgcaggcggcgaataccggtttgacgggcggctcgacccccgacggcaacgattacgaccgcgacatcgtgattgtgaacaccatgcggatgaacatcatccaaaccatcaacaacaacgaacaagtcgtctgcctgcccggctcgaccctgaaccagcttgaattgctgctgaaacctttggggcgcgaaccgcattcggttatcggctcttcctgcatcggtgcgtccgtcttgggcggcgtgtgcaacaactccggcggcgcattggtgcagcgcggcccggcctacaccgaaatggcactgttcgcccaaatcaacgaagaaggcaggttggaactggtcaaccacttgggcatagacttgggcgacacgcccgaagaaatcctgaccaacctgcaaggtcatcattatcaaaacaaagacatcaaacaagacgcgggcaaagggcacgaccacgcctattgcgaacacgtccgccaagtggacgaaccgaccgccgcgcgtttcaatgccgaccccgcccgccattacgaagcctcgggctgcgcgggcaaactgatggtttttgccgtccgtttggacaccttcccgcaagaaaaacaaaccgccgtgttctacatcggcacgaacgacatcaacgagctgaccgacatccgccgcgccgccttgggcgaatttgaaagcctgcctgtttccggcgaatacatccaccgccacgctttcgacattgccgacgtgtacggcaaagacacgttttacgtcatcaaaaaattcggtacgcaccaactgccgaaattatttgacttgaaggcgcgcgtggacaggttcggcaaaaaagccagcttcctgcccaaacatttttccgacaaggccatgcagttcgtcagcaaatacctgcccgaccacctgcccaaatccatgcgcgattaccgcgacaaatacgaacaccacctgattctgaaaatgggcgggaaaggcgtggatgaggcgcgcgcgttcttaaaagaatattttgcacaccacagcggcgcgtttttcgagtgcaacgccgaagaaacccaagccgcgatgctgcaccgtttcgccgtcgcctccgccgccatccgctaccgcgccgtgcatgatgacgaagtggaagacttggtcgcgctcgacatcgccctgcgccgcgacgatcgcgactggtttgaaaaactgccgtcggaaatcgacaataaaatcatccataaactctactatggacatttcatgtgccacgttttccatcaggattacatcatcaaaaaaggcaacgactgcatggcgttggaacacgaaatgctgcatcttttagaccaacgcggcgcgcaatatcccgccgaacacaacgtcggtcatttgtatgaagccaaacccgcgctcaaacagttttaccgcaaacttgacccgaccaacagcttcaacccgggcgtaggcaaaaccagcaaaaagaaaaactgggcggaataa

SEQ ID NO: 67142 - DNA, 747 bp, Neisseria meningitidis
atgaacgttttgatttccaacgacgacggctacctctccgaaggcatcgccgttttggcgcgcgttacggcggaatttgccaacgtcagggtggttgcgcccgaacgcgacaggagcggggtcagcaattcgctgacgctggaacgccctttgcagttgaaacaggcgcaaaacgggttctactatgtcaacggcacgccgaccgactgcatccacatcgggcagtctgtattttcggattttcaggccgattttgtcttttcgggcatcaaccggggcgcgaatatgggggacgacacgctttattcggggacggttgcggcggcaaccgaagcctaccttatgggcatacccgctgtggcgttttccttaaacgacgcttccggacgctattgggcaaccgcagaaaaggcactgtggacattgttggcgcattttttcaaaacccccccgcagtcccctattttgtggaacatcaatatccccgccgtcgagccggaagatgtgcggggcattaaaatcgcccgtttgggcaggaggcatcacggtcagaacgtcatccccgcgcgcaatccgcgcggcgaacagatttattggataggcccggtaggcagggtttccgacaaagaagagggaacggatttcggtgaatgcggcgcaggtttcattaccgtaacgccgctgcaaatcgacctgaccgcctatccggacatggcggaaacagcggcgttctggcatgcggactga

SEQ ID NO: 67143 - DNA, 2016 bp, Neisseria meningitidis
atgatgaaactcaatccccaacagctcgaagccgtccgctacctcggcggcccactgctcgtccttgccggtgcaggcagcggcaaaaccggcgtgattactcaaaaaattaagcatttgattgtcaatgtcggctacctgccgcataccgttgccgcaattacctttaccaacaaagccgctgcggaaatgcaggagcgcgttgccaaaatgctgcccaaaccgcaaacgcgcgggctgacgatttgcacgttccactctttgggcatgaagattctgcgcgaagaggcgaaccatatcggttacaaaaaaaacttctccattctcgattctaccgacagcgcgaaaatcatcggcgaactcttaggcggtacgggcaaagaagccgtattcaaggcgcagcaccagatttccttgtggaaaaacgatttaaaaacgcctgaagatgtcgttcagacggcatcgaacatttgggaacaacaaaccgcacgcgtgtatgcgagctatcaggaaaccttacaaagctatcaggcagtggacttcgacgacttgatccgcctgcctgccgtgctgttgcagcaaaacagcgaagtgcgcaacaaatggcagcggcggctgcgttatctgctggttgacgaatgccaagatacgaatacctgccaatttacgttgatgaaacttctgaccggcgcggaaggtatgtttaccgccgtcggcgacgacgaccagtccatctacgcatggcgcggcgcgaacatggaaaacctgcgcaaaatgcaggaaaactatccgcagatgaaggtcatcaaactggagcaaaactaccgctccaccgcgcggattctcaaaatcgccaacaaagtcatcgagaacaaccccaagctgttcaccaaaaaactttggtcgaaattgggcgaaggcgagcccgtcaaagtcgttgcctgccaaaacgagcagcacgaagccgactgggtcgtcagccaaatcgtcaaacaaaaactcatcggcggcgacaaaacccaatatgccgatttcgccgtgttataccgcggaaagcatcaggcgaggattttcgaggaagcattgcgcggcgcgcgcatcccctaccgtctctccggcggacaaagctttttcgacaaagccgaaatcaaagacgtgttgtcttatgtgcggctgcttgccaaccccaacgacgatcccgcctttctgcgtgccgttaccacgcccaaacgcggcatcggcgatgtaacgctgggcaagctcaacacttacgcgcacgaacacgaatgcagcctgtatgaagccgcgcaaaacgaagaagccctcgccacgctgaacaataccaaccgccaacacctgcaagcctttatggatatgttcggcagttaccgtgccaaagccgaaaccggcgaagcgggcgagttcatcaacagcctgctcgaagaaatcgactatgaaaaccacctgcttgccagtgaagaaggcaaagctggcgaaatcaaatggcgcaacgtcggcgatttggtatcatggtttgcgcgaaaaggcggggaagacggcaaaaacatcatcgaactcgcccaaaccgtcgccttgatgacgcttttggaaggaaaagacgaagaagaaaccgatgccgtctcgctatccacgctacacgccgccaaaggtttggagtatccgtatgttttccttgtcggttgcgaagaaggcgttttgccgcacaacgacagcatcgaagaaggcaacgtcgaagaagaacgccgcctgatgtacgtcggcatcacccgcgccaaacgccaactcacactgacccactgcgtcaaacgcaaaaaacaaggcacatggcagttccccgaacccagccgattcatagacgaaatgccgcaggaagatttgaaaatcctgggtcgcaaaggcggcgagccgattgtcagcaaagaagaaggcagacgcaaccttgccgatataatcggaaggctcgacaacctaaaaaaaagcggcgcggcggattaa

SEQ ID NO: 67144 - DNA, 1059 bp, Neisseria meningitidis
atgaccgccgccctgcacatcggacacctgtccaaaagttttcaaaacaccccggttttaaacgacatttcgctcagtctcgacccgggcgaaatcctcttcatcgtcggtgcgtccggctgcggcaaaaccacccttttacgctgccttgccggttttgaacaacccgattttggcgaaatttcgctttccggcagaaccatcttctcgaaaaataccaacctccccgtccgcgaacgccgtttgggttatgtcgtacaggaaggtgtgctgttcccccacctgaccgtttaccgcaacaccgcctacgggttgggcaacggcaaaggcaagacggcgcaagagcggcagcgcatcgaagctatgttggacttgaccggcatttccgaacttgccggacgctatccgcacgaactttcgggcggacagcaacagcgcgtcgccctcgcccgcgccctcgcacccgatcccgaactgattttgttggacgaacccttcagtgcgctggacgaacagttgcgccgccaaatccgtgaagaaatgatgtctgttttgcggcaaaacggcaagtccgccgttttcgtcagccacgaccgcgaagaagccctgcaatacgcagacaaaatagccgtcatccaacagggcaaactgctccaagccgcctcgcctgccgaactttaccgccgccccgccaaccttgatgccgccctgtttatcggcgaaggcatcgtgttccccgccgtgctcaacgccgacggcaccgccgattgcggattaggccgcctgcccgtccaaagcgccgcacccgcaggcacgcgcggcacactgctcatccgtccggaacagttcagcctttacccccattccgcacccgccgccgccattcacgccgtggttctcaaaaccacgcccaaagcacggcacaccgaaatcagcctccgggccggacaaaccgtcctcacgctcaacctccccgccgcccctaccctgtcagacggcatttccgccgtcctccatttggacggtcccgccctgttcttccccgaaaataccctctga

SEQ ID NO: 67145 - DNA, 1035 bp, Neisseria meningitidis; identical to SEQ ID NO: 59106

SEQ ID NO: 67146 - DNA, 387 bp, Neisseria meningitidis
  misc_feature 364, 365, 366, 367, 368: 'n' is a, c, g or t
atgatgaagttcaaatatgtttttctgttggcgtgtgttgtcgtttctttatcttatcgtttgaatgctgcaccgatgtttaacgataatcctgttgtttacggaaaaatcaaagtgcagagttggaaagcgcggcgggatttcaatattgtaaagcaggatttggatttttcctgtggggcggcttcggtggcgacgcttttgaacaatttttacgggcaaacgctaacggaagaagaagtgttgaaaaagctggataaggagcagatgcgcgcgtcgtttgaggatatgcggcgcattatgccagatttgggttttagaagcgaaaggctatgccctgtctttcgagcagctcgcacagttnnnnncacacacttaattaattaa

SEQ ID NO: 67147 - DNA, 702 bp, Neisseria meningitidis
atgttccgcatcgtcaaatggctgattgccctgcccgtcggcatctttatctttttcaatgcctatgtgtacggcaacatcattacctaccgcgccgtcgcgccccatcggactgcctttatgtcgatgcggatgaagcagtttgaacaggaaggtcgcgatgtcgcactggattaccgctggatgccctacaaccgcatctcggtcaacctgaaaaaagccctgattgcttccgaagatgcccgtttcgccgggcacggcggcttcgattggggtggcattcaaaacgccatcaggcgcaaccggaacagcggcaaagtgaaggcgggcggttcgaccatcagccagcagcttgccaaaaacctgtttttaaacgaaagccgcagctatatccgcaaaggcgaagaagcggcgattaccgcgatgatggaagccgttaccgataaagacaggattttcgaactgtatctgaattcaatcgagtggcactacggggtgtttggcgcggaagccgcgtcccggtatttttatcaaatacccgccgccaaactgagcaaacagcaggcggcgaaactgacggcacgcgtccccgccccgctctactacgccgaccatccgaaaagcaaacggctgcgcaacaaaaccaatatcgtgctcagacgcatgggttcggcagagttgcctgaaagcgacacggactga

SEQ ID NO: 67148 - DNA, 1104 bp, Neisseria meningitidis
atgaatacgacagcaaacccttccaatatcatcgtcgggctctccggcggtgtcgattcttccgtaaccgccgccctgctcaagcagcagggttatcaagtgcgcggtgtgttcatgcaaaactgggaagacgacgacaacgacgaatattgcagcatcaaacaggattcgttcgatgccatcgccgttgccgatattatcggcatcgatatcgacatcgttaatttcgccgcgcaatataaagacaaagtctttgcttattttcttcaggaatacagtgcggggcgcacgccgaatcccgatgtgttgtgcaacgccgaaatcaaattcaaatgctttttggattacgccgtagggcagggcgcggataccatcgccaccggacactatgcgcgcaaagaagtccgcaacggcgtgcattacctgctcaaaggtttggatcgaaacaaagaccaaagctatttcctctaccgcctcaagcctttccaactcgagcgcgcgatttttccgttgggcggtttggaaaaacccgaagtccgccgccttgctgccgagttcaaactgccaaccgccgccaaaaaagacagcacgggcatctgcttcatcggcgaacgcccgtttcgcgagtttctgcagaaatacctgccgaccgacaacggcaaaatggttacgcccgaagggaaaaccgtcggcgaacacgtcgggctgatgttttacacattgggtcagcgcaaaggtttgggcatcggcggcgggggcgaaccgtggtttgttgcggctaaagatttgacgaaaaacgaactgattgtcgtgcaaggacacgaccatccgctgctctatacccgcagcctcgtcatgaatgatttgagtttcacgcttcccgaacgtccgaaggcaggacgctatacctgcaaaacgcgttaccgcatggcggacgcgccttgtgagttgcgctatttggatgaagaaaccgccgagctggtgtttgacgaaccgcaatgggcggttacgccgggccagtctgccgtgctgtacgacggcgacatctgtttgggcggcggtatcatccaaacgaccgacaagcccgtcatcatcacacgataa

SEQ ID NO: 67149 - DNA, 1233 bp, Neisseria meningitidis
atgggcttgaaacattttctggaaaaaatcgaaccgcacttcctgccgggcggcaaacatgaaaaatggtatgccctctacgaagctgcggcgacgattttctatacatccggcgcggtaacgcgcaaagcggcacacgtccgcgacgcgctcgactccaagcgcatgatgattttggtgtggctggctttgttccccgccatgttttacggcatgtacaacgtcggcgcacaggcattcggtgccttaacgcccgatttgctgcaacaaagcatcgccaacgactggcattacacccttgccgacgctttgggcatcaatatgtcgtctgaagcgggtgtgtcgggcaaaatgctgttcggcgcgatttactttctgccgatttacgcgaccgtatttgtcgtgggcggtttttgggaagtcttgttcgccaccgtgcgcaaacacgaaatcaacgaaggtttcttcgtgacttcgattctgtttgccttaatcgttccgcccacgctgccgctgtggcaggcggctttgggtatttctttcggcgttgtggttgcgaaagaagtattcggcggtacgggtaaaaactttatgaaccctgcgctggcaggccgcgccttcctgttcttcgcctaccccgccaacttgagcggcgatgcggtttggacggcggttgacggctattccggcgcaaccgcgctggcgcaatgggcggcacacggtgcagacggtctgaaaaacgccgtaaccggtcaaaccatcacttggatggacgcgtttatcggcaaactgcccggctccatcggcgaagtctccactttggcactcttaatcggcggcgcgtttatcgtgtttgcccgcatcgcttcttggcgcattattgccggcgtgatgatcggtatgattgcgatgtcttcgctgttcaacttcatcggttcggacaccaacgccatgtttgctatgccttggtactggcatttggtcgtcggcggcttcgccatcggtatgctgtttatggcgaccgaccccgtttccgcttcctttaccaatgtcggcaaatggtggtacggcgcactgatcggtgtgatgtgcgtattaatccgcgtggtcaatccggcttaccccgaaggcatgatgttggcgattctgtttgccaacctgtttgccccgattttcgactatttcgtcgcacaagcgaacatcaaacgcagaaaggcgcgcagcaatggctaa

SEQ ID NO: 67150 - DNA, 747 bp, Neisseria meningitidis
atggaaaccccgccaaacaccccgcaacgctccctgcgtcaaaacagtatctacctgctgcccaattcctttaccatcgccgcgctgttttccgcgttttacgcaatcacccaatccatgcacggacgttatgaaaccgccgctattgccgtattcatttccatgcttttggacggtatggacgggcgcgtggcgcggctgaccaacagccaaagcgcgttcggggagcagcttgacagccttgccgacatggtcagcttcggcgttgcccccgcgcttattgcctacaaatggcaactttggcagttcggcaaaatcggttattccgtcgccttcatctactgcgcctgcgccgccctgcgccttgcgctgttcaacacgctcatcggcaaggtggacaaacgctggtttatcggcgtgcccagtccgactgccgccgcgctgattgtcgggctgatttgggtcaaccacagcgtcgaaaaattccccgccgtccactggtgggcattgggcatcacactgtttgccggcctgtcgatgattgtccaaatccctttttggagttttaaagaaatcaacatccgcagacaagtcccctttgtcggaatgctgcttgccgtcttactgctgcttctggtcacttgggaaccgtcgctcgtcctcttcctgttctttctcggatacagcctgtccggctacattatggcggcacgccgattctggaaaaaatacagaaaggcggattaa

SEQ ID NO: 67151 - DNA, 1131 bp, Neisseria meningitidis
atgattaaaatcagcacccgcttcgatgccggctcggtcgtcgtcaaagacctgaccgacccttccaacatccgcctcgccctgcgtcccgacaacgcctccgattttgcacaatggttctacttccggctgcaaggcgcggcatatcaaaactgcatcatgcattttgaaaacgcggcagaagccgcctacccgaaaggctgggaaggctatcaggcgtgtgcctcatacgaccgccgcaactggttccgcgtaccgacttcctacgaaaacggcgtactgaccgtcaatcatacgccgctgtccaacagcgtgtattacgcctatttcgaaccttactccgaagaacagcatttaaacctcctcggcgacgcgcaaggcagcggcctgtgccgcatcgacgacttgggcagcaccgtgcaagggcgcgacatcaatctgctgaccatcggcaatcaggtcgaaagcgatctgaaaatctggattaccgcccgccagcatccgggcgaaaccatggcggaatggtttgtcgaggggctgctcggcaggctgctcgatccgcaagacccgacagcgcgcaccctgctcgaccgcgccacgttctatatcgtccccaatatgaaccccgacggttcggcactgggcaaccttcgtaccaacgccgccggtgcgaacctcaaccgcgaatgggaaaatccgactttggaaaaaagccccgaagtgttcttcgtgcgtgaaagaatgctggaaaccggcgtggatttgtttttggatatccacggcgacgaagggttgccctttgtctttgttgcaggaactgaaggcgtgccgaactacaatccgcgcatttccgcgttggaaacacagttcaaaaccgcccttttgaacgccagccccgatttccaagatgaatacggttacgaaaaagatgcgcccggtcaggcaaacgtgaccttggcaacaaactgggtcggcaaccgtttcaactgccttgcctatacgttggaaatgccgttcaaagacaatgccaacctgcccgacgacgacttcgggtggaacggtcaacgttcgttgcgcctgggcgaagccgcgttgtccgccatcctcaacgtcatcggcgatttgcgctga

SEQ ID NO: 67152 - DNA, 567 bp, Neisseria meningitidis
atggctaagaaaatcagtattttggtgggcagcctgcgccgagcttcttttgcgcgcaaagtggcattgaatgcggcggagatgttccccgaaggctggcaggcggaaatcgtcgaaatcggacatctgccgctttacaatttcgattatgacgaccctgcggtggaagatgtgccgctgcccgaaagctacacggctttccgcgaaacgattaaggcttcggacggcattttgttcgttacgtccgaaaataaccgcaccattcccgcctgtttgaaaaatgcggtggacatcggctcgaaaccgaatgccgacgtggcgtggaaaaacaaaccggccggtatcatcagccattccgtcggcaagatgggcggttacagttcgcaaaaaaacctgcgccttgcgctgtcttatttcgatatgcccgtaactggacagccggaagtgtttttgggcaattcgccgacgctgtttgatgaaaacggcaaattgatcgactcggcaagggattttgttcagtcatatattaatcagtttgtcggtttgattgaaagaaatgccaaataa

SEQ ID NO: 67153 - DNA, 417 bp, Neisseria meningitidis; identical to SEQ ID NO: 50630

SEQ ID NO: 67154 - DNA, 1248 bp, Neisseria meningitidis; identical to SEQ ID NO: 39099

SEQ ID NO: 67155 - DNA, 1893 bp, Neisseria meningitidis
atgcctatccttaccatccgtgaagtgtgcaacattaatcattggggcataggttattatgatgttgacgattccggcgaaatcatcgtccgccccaatccctcgcaacacaatcaaactgtttcactgcaaaaactgactgaagccgtgcaacaaaaacatcaggcgcgcctgcctgttttgttttgttttccgcaaatcctcgaacaccgcctccgcgacattaaccgcgcctttcagacggcacgggaagagtgcggctataagggcggttattgtttggtttaccctatcaaggtcaaccaacaccgccgcgtcatcgaatcgcttatgtcaagcggacaaccgcatggtttggaagctggttctaaagccgaactgatggcggttttggcacacgccggcacccggcaaacattaatcgtctgcaacggctataaagaccgtgaatatatccgtttcgccttgatgggcgaaaaactggggcatcaggtttatttggtgattgagaagctgtccgaaatacaaatggtattggaagaggcggaaaaactcggcatcaagccccgtttgggtgtgcgcgccagactggcttcccaaggttcgggaaaatggcagtcttcgggtggggaaaaatcaaaattcggcttgtcggcttcccaagttttgcaactggtcgatattttgaaacaaaaaaacaggctggattgcctgcagcttttgcatttccatttgggctcgcagcttgggaacatccgtgatgttgccacaggtgtacatgaatcggctcggttttatgttgagttgcacaaactgggggtaaatatccgctgttttgatgtaggcggcgggcttggcgtggattacgaaggaaaccgcacacagtcggattgttccgttaattacagcctgaacgaatatgccgccacagtcgtatggggcatcagccaggcttgtctcgaacacgggctgccgcatccgacaatcattaccgagagcgggcgcggcattaccgcacatcacgccgttttggttgctaatgttataggcgttgaacgttacaaaccgcgccggctggatgcgccatcgcccgaagcgccgcgtgtgttgcacagtatgtgggaaacttggacggatatttccgcctcgcgggaaaaacgttccttacgcagctggatacacgaagggcagtttgatcttgccgatgtgcataatcagtataatgtcgggctgttgagtttggcgcaacgtgcgtgggcggagcaactgtatttaaatatctgtcatgaagtcggcgaattgtttaatgaaaaacaccggtctcaccgaaccattattgacgaattgcaagaacgttttgccgataagctgtatgtcaatttctcactcttccaatctttgcccgatgcttggggcatagatcaacttttccctgtttgtcccattaccggtttgaatgaaccgattgcgcgccgcgccgtgttgttggacattacctgcgattcagacggtacgattgaccactacatcgacggcgacggcatcgccggtacgatgcctatgcctgattatcccgaagaagagccgccgcttttaggcttttttatggtgggagcatatcaggaaatactcggcaatatgcacaatcttttcggcgacactgccactgccgatgttgttgtaggggaagacggacaatttaccgtcatcgattacgatgaaggaaacaccgttgccgatatgctcgaatacgtttatcaagatccgaaagagctgatgaaacgctatcgcgaacaaatcgaacattcagaccttcctgcctcgcaggctatgtctttcttaaaagaactcgaagcggggcttaatggttatacctatttggaagacgaatag

SEQ ID NO: 67156 - DNA, 672 bp, Neisseria meningitidis
  misc_feature 4, 5, 6, 7, 8: 'n' is a, c, g or t
gtgnnnnnccaccagatcacgctccaccacagcaccatttaccgctaccttcgccaagacaaaagcaacggcagcacgttgtggcaacatctcagaatatgcagcaaaccctaccgcaaacgctacggcagcacatggaccagaggcaaagtccccaaccgtgtcggcatagaaaaccgacccgctatcgtcgaccagaaatcccgtatcggcgattgggaagccgacaccattgtcggcgaaggacagaaaagcgcattattgaccttggtcgaacgcgttacccgctacaccatcatctgcaaattggatagcctcaaagccgaagacactgcccgggcagctgttagggcattaaaggcacataaagacagggtgcacaccattaccatggataacggcaaagagttctaccaacacaccaaaataaccaaagcattgaaagcggagacttatttttgtcgcccttaccattcttgggagaaagggctgaatgagaacaccaacggactcatccggcaatacttccccaaacaaaccgatttccgtaacatcagtgatcgggagatacgcagggttcaagatgagttgaaccaccgaccaagaaaaacacttggctacgaaacgccaagtgttttattcttgaatctgttccaaccactaatacactag

SEQ ID NO: 67157 - DNA, 561 bp, Neisseria meningitidis; identical to SEQ ID NO: 51459

SEQ ID NO: 67158 - DNA, 702 bp, Neisseria meningitidis
atgagcgcgcgcgaaaatattttggcaaaactgaaaaaagccgacgcattgccgatggaagaacctgcggtttttgattattaccgtgaaatgggtgtttcttggggcagcgaagttgagcgtctgaaacattgggctgccgctatgcgtgcggtcaaaaccgaaatttattgggtgacgaaaagcaattggatgcaggttttccgcgaagcggcagaaggcaagggtttgaaaaacatcctgctgcccttggcgaccgaacacggacaaattgcccgtgccgcattggcggacagcaatatcgaaccgattgccttcgagcgcgaaatcgatacttggaaaaccgagtttttcacgaacatcgatgcgggcttcagcggcgcgcaatgcggcatcgcccgcaccggcacgctgatgctgttttccagccccgaagagccgcgtactttaagcctcgttcctcccgtgcatttctgcctgttcgatacgtccaagatgtacaacgagtttcataatgccgtcgaaggcgaaaaactggtggaaaacggtatgccgaccaatgtattcctgatttccggcccgtccaaaaccgcagacatccaactgacgcttgcttacggcgcgcacggcccgcgcgatttggtcatcctcgccatcctgcccgaccacatttcccctgccgatttggaggaaaacgcatga

SEQ ID NO: 67159 - DNA, 681 bp, Neisseria meningitidis
atgattttccaaacagtctggttttcagatgtggtactgtcggtttcgtggattgtccttatcctgatactggcagcttccgctccgtcggcattccgctcgcttgcccgctaccgttctgcccttcccctgtgtaccgtaattttctccgcggcatggtgtctgaacgcctctgccggcggcggacagcttgcacagatgaactaccacctgctcgccgtcaatctagttgctctgatggtgggcacttccgccgccttttggcttgccgcgctgctgatgctgccctactgcctgctgtttgccggttctgtcggcgcatatccgccgaacgctttggtgctgattctgcccgcgctggccgtcaaccgcctgtcgcgtatgctggtcaaccgcctgccacccaatattttcatctttattttcgtcaacggctttctcgcttccgccgccggcattctgctgaccgggctggtgctgaccggtattttggatgccgcaaacgcttttccgtccgaaatattgtggacgaccgccctgcccgtctttattctgctggcgtgggcggaagcttttctcagcggcatttcaactgccatatttgttgcactgaagccccattggatcaacactttcgacgacaaccgctatctgaagtccgaccgcggcatatggcggtag

SEQ ID NO: 67160 - DNA, 174 bp, Neisseria meningitidis; identical to SEQ ID NO: 42248

SEQ ID NO: 67161 - DNA, 1194 bp, Neisseria meningitidis
atgaattccaaacacctcatcgcattttccgccctgttcgccgccacgcaggcagaagccctgcccgtcgcctccgtcagcctcgacaccgttaccgtttccccgtccgccccctacaccgatacaaacgggctcttgaccgactacggcaatgccgccgcctcgccttggatgaaaaaactccaatccgtcgcacaaggcagcggcgagaccttccgcatcctgcaaatcggcgactcgcataccgccggcgacttctttaccgacagcctccgcaaacgcctgcaaaaaacatggggcgacggcggcataggctgggtctaccccgccaacgtcaaagggcagcgcatggcggccgtccggcacaacggcaactggcaaagcctcaccagccgaagtgcagcagcagacttcccgctcggcggcatcctcgcccacaccggcagcggcggcagcatgaccctgaccgcatcggacggcaagaccggcaaacagcgcatttccctgtttgccaaacccctgctcgccgaacaaaccctgaccgtcaacggcaacaccgtctccgccaacggcggcggctggcaggtactggatacccgcgcggcactgcccttgaccatacagaccgaaatgccgtgggacatcggcttcatcaacatcgaaaatcccgccggcggcattaccgtttccgccatgggcatcaacggcgcacaattgacccattggtcgaaatggcgtgccgaccgtatgaacgaccttgcccaaaccggcgccgatttggttatcctttcctacggcaccaacgaagccttcggcgacaacatcgacattgccgacaccgaacaaaaatggctggataccgtccgccaaatccgcgacagcctgcctgccgccggcatcctcatcatcggcgcacccgaatccctgaaaaacacgctcggcgtatgcggcacacgccccgtccgcctgaccgaagtccaacagatgcagcggcgcgtcgcccgacaggggcagacgatgttctggtcttggcaaaacgccatgggcggcatatgcagcatgaaaaactggctcaaccaaggatgggccgccaaagacggcgtacacttctccgccaaaggctaccggcgcgcggcggaaatgctcgccgacagcctcgaagaactcgtccgcgccgccgcaatcaggcaataa

SEQ ID NO: 67162 - DNA, 915 bp, Neisseria meningitidis; identical to SEQ ID NO: 36972

SEQ ID NO: 67163 - DNA, 423 bp, Neisseria meningitidis; identical to SEQ ID NO: 40170

SEQ ID NO: 67164 - DNA, 993 bp, Neisseria meningitidis; identical to SEQ ID NO: 59213

SEQ ID NO: 67165 - DNA, 1449 bp, Neisseria meningitidis
atgtttaaacgcagcgtaatcgcaatggcttgtatttttgccctttcagcctgcgggggcggcggtggcggatcgcccgatgtcaagtcggcggacacgctgtcaaaacctgccgcccctgttgtttctgaaaaagagacagaggcaaaggaagatgcgccacaggcaggttctcaaggacagggcgcgccatccgcacaaggcagtcaagatatggcggcggttttggaagaaaatacaggcaatggcggttcggcaacaacggacaaccccaaaaatgaagacgagggggcgcaaaatgatatgccgcaaaatgccgccgatacagacagtttgacaccgaatcacaccccggatccgaatatgcctgccgtaaatatggaaaaccaagcaccggataccggggaatcggtgcagccggaaaaccaaccggatgcggcaaatgcgggggacggaatgcagggggacgatccgtcggcaggcggggaaaatgccggcaatacggctgcccaaggtacaaatcaagccgaaaataatcaagccgccggttctcaaaatcctgcctcttcaaccaatcctagcaccacgaatagtggcggcgattttggaaggacgaacgtgggcaattctgttgtgattgacgggccgtcgcaaaatataacgttaacccattgtaaagacaaggtatgcggtagcgaattcttatatgaagaagcaccgtcaaaatcagaatttgaaaaattaagtaatgaagaaaaaattaataaatataaaaaaaatggaggaaagtttactggtttggttgctacaagagttgaaaataacggattgaatcaatataccattatttatcaagctcaacccactcgttctgcacggtcgagacggtctaggaggtcgcttccggctgagatgccgctgatccccgtcaatcaggcggatacgctgattgtcgatggggaagcggtcagcctgacggggcattccggcaatatcttcgcgcccgaagggaattaccggtatctgacttacggggcagaaaaattgtccggcggatcgtatgccctcagtgtgcaaggcgaaccggcaaaaggcgaaatgcttgctggcacggccgtgtacaacggcgaagtgctgcatttccatacggaaaacggccgtccgtacccgaccaggggcaggtttgccgcaaaagtcgatttcggcagcaaatctgtggacggcattatcgacagcggcgatgatttgcatatgggtacgcaaaaattcaaagccgttatcgatggaaacggctttaaggggacttggacggaaaatggcggcggggatgtttccggaaggttttacggcccggccggcgaggaagtggcgggaaaatacagctatcgcccgacagatgcggaaaagggcggattcggcgtgtttgccggcaaaaaagagcaggattga

SEQ ID NO: 67166 - DNA, 306 bp, Neisseria meningitidis; identical to SEQ ID NO: 43025

SEQ ID NO: 67167 - DNA, 732 bp, Neisseria meningitidis; identical to SEQ ID NO: 55917

SEQ ID NO: 67168 - DNA, 750 bp, Neisseria meningitidis
atgccatccgttgaactgctgttggagattgtcggactgccacgcggcaccttttattaccaattggccgtccaatcggcagaagacaaatatgccgatttgaaacagcatatccatgatatttatcgacgacataagggaagatacggctaccggaggattgcagcagccatccttcatgcaggaacaccggtcaatcacaagaaagtcagccgtctgatggcgaagacggggctgaaggcagtgatacggcggcgcaaataccgctcgttcaaaggagaagtcggcaaaattgcgccgaatatcctgcgacgctgtttccatgcagaaaagccgaatgagaaatgggtaacggacgttaccgagttcaatgtaggcggagaaaagatatacctttctccgattatggatttgtttaacggggaaatcgtcagttaccgtattcaaatccgcccgactttcgatttggccggcgagatactgaaaggtgcgccggagaaaccgggatcgtctgaaaagccgatactgcattcggatcaaggttggcaatatcagatgtttttttatagtggattaaatttaaatcaggacaaggcgatgaagccgcagacagtacaaatagtacggcaaggcgaggcaacgccgtactggtttaaatttaatccactatacaacaacgatagaatcaagttgaaattaaaagggctgagccttgttcagtacagaattcagtccctgaaagccgcttga

SEQ ID NO: 67169 - DNA, 321 bp, Neisseria meningitidis
atgaattttcaagattatctcgccacatttccttcaatcgaccatctgggcggtttggacgttcaggatgccgacggcaaaacggttcaccatattcctgccgtacagggcaaactcggttcgctcaagctgtacaatgccttggcggaacgttttggcggaaaattggacaaagaagcggcagagcagggtttgatatggtttgccgagcacgttgacgatgctcgtgcccatccgggcaagcatccgaacatcgatctgctggaaaatgtcgtacaaagcggcgaaaccttcctgctcaagccgcttgccgcgcaataa

SEQ ID NO: 67170 - DNA, 1296 bp, Neisseria meningitidis
atggctatttaccaatcaggcgtgatttttgaccaagtggataccgccaatcccgactgctggacattggacgaatacgtcaaacgcggcggctataccgccctgcgtaaaatcctgtccggaaacatctctcaaaccgatgtgattgacgaagtcaaaacctccggcttgcgcggtcgtggcggtgcgggcttcccgaccggtttgaaatggagctttatgccccgttcctttccgggcgaaaaatacgtcgtttgcaataccgacgaaggcgagccgggtacatttaaagaccgcgacatcatcatgttcaatccccatgccctgatcgaaggcatgattatcgccggttacgcgatgggcgcgaaagccggttacaactatatccacggcgaaatttttgaaggctaccaacgctttgaggccgctttggagcaggcgcgtgccgcaggctttttgggtaaaaatattttgggttcggattttgaatttgaactcttcgcccaccacggctacggcgcatatatttgcggcgaggaaaccgcattgctcgaatcgctggaaggcaaaaaaggccagccgcgctttaagccgccattccctgcttcgttcggcctgtacggcaaaccgactaccatcaacaatactgaaacgttctcctccgttccattcattatccgtgacggtggacaggcatttgccgataaaggtattccgaatgcaggcggtaccaaattattctgtatttccggccatgtcgagcgtccgggcaactatgaagtgccattgggtacgccgtttgccgaagtcttgaaaatggtgggcggtatgcgcggcggcaaaaaacttaaagccgttattcccggcggttcgtccgcgcctgtattgcctgccgatatcatgatgcagaccaatatggactatgactcgatttctaaagcaggctcgatgttgggttccggcgcgattatcgtcatggacgaagacgtgtgcatggtcaaagcccttgaacgcctgagctacttctactatgacgagtcttgcggccaatgtacgccttgccgagaaggtacgggctggctctaccgcatcgtccaccgcatcgtagaaggcaaaggcaaaatggaagatttggatttgctggattccgtcggcaaccaaatggcaggccgcaccatctgcgcccttgccgatgccgccgttttccctgttcgcagctttaccaagcatttccgtgatgagtttgtgcattacatcgaacacggcgggccgatgaagccgaataagtggtgttga

SEQ ID NO: 67171 - DNA, 639 bp, Neisseria meningitidis; identical to SEQ ID NO: 47228

SEQ ID NO: 67172 - DNA, 1110 bp, Neisseria meningitidis
ttgttgttttttcaaataggcaaaatgaccgtattgagagaggtacacatgtccaaaaatgcacaaaaaaccctacttgccgtgtgcagtttcgaggtgcagccaaaagacgggcgaatccaactgctgccatatggcgaatttcgcgcagtagacggtcgtccgactgatgtccctgcgtggtatctgaccgaagaaaacggtcatgatgtcgcgttgttggccaacagctcgcgcaatcagttggttgtcgattatgaacaccagacgctctacaaagagaaaaacggacaacctgcacctgccgccggttggatgcgttggctggagttcacgcctaaaggcatgtttgccgaagtggagtggacggacaaggcggctgcggcaattgccgcaaaagagtatcgctacatctctgctgtgttttcctatgacacaaagggatatgtaagcaaaatttttcacgccgcgctgacaaatttccccgcgttggacggtatggacgaggtgctggcggcagcgtcggcgcaaattttaaaaccagaaacggagcaaaaccctatgaaagagttgttacagcaactgttcggtctgcctgatgcgggcgaagaagaactgaaggcggtattgtccgcgctcgtggaagccaagccgaaagacgtggcattgtctgccgacgtgttcgcgcagctggcggaaaaagacagccgcatcgcggcattgacggcgcaaaccgccaagcctgatttgactaaatacgcgcctatctcagtggttcaagagctgcaaagcaaagtcgccgcgctgactgccaagcaggaagcagacaaaggcaacgaattgattaccgccgcgctgacttcaggcaaattgctgcctgctcagaaggagtgggcagaaggcgtattgaaacagccgggcggcttggcatttttgaccggctttattgaaaacgcccagccggtcgctgcactggcaggctcgcaaacgggcggtaaagcacccgacgaacgcgtcgccgcactgactgcggaagaggcagccgcagcaaaaatgctgggcatgtccggcgaagaatttgtaaaaatcaaagaaagcgaagttaagtaa

SEQ ID NO: 67173 - DNA, 168 bp, Neisseria meningitidis; identical to SEQ ID NO: 37435

SEQ ID NO: 67174 - DNA, 759 bp, Neisseria meningitidis
atgaatccaaaaactccccccgaccatacagaagatgccgtgcgcctgtccaaacgcatggcgcaactggggctttgttcgcgccgcgaagccgacggctatatcgaacagggttgggtaacggtcaacggcaaaaccgccgtactcggtcagaaagtttcgccggcagaccgtatcgaactaaacaagaaagcccacgaacagcaggcggcacgcattaccatcctgctgaacaaacccgtcggctatgtcagcgcacaagcggaaaaaggctataaatccgccgccgaactgattacctctgaaaaccgctgggaaagtgacaccagccgcatccgtttcgatccgaaacacaaaatcggtcttgcccccgccggcaggctcgatatcgattcagtcggattactggtgttgacgcaggacggccgtatcgccaagcagcttatcggcgaaaacagcggcagtgaaaaagaatatttggtgcgcgtgcgcggaaaattggacgaaaaaggacttgccttactgaatcacggattgagtttggacggtgagaaactgcgtcccgcccaagtagaatggcaaaacgaagaccaactgcgcttcgtgttgaaacagggcaaaaagcggcaaatccgccgtatgtgcgaactggtcggactgcgcgtcgtcgggctgaaacgcatccgcatgggtaaggtcaagctcggcaggctgccgccaggcaaatggcgttatcttgctcccggcgaatcgttttaa

SEQ ID NO: 67175 - DNA, 2751 bp, Neisseria meningitidis
atgctgacaaacattgccaagaaaatcttcggcagccgcaacgaccgcttgctgaaacaataccgtaaatccgttgccagaatcaacgcgctcgaagaacagatgcaagccctaagcgatgctgatctgcaagccaaaactgccgaattcaaacaacgcctcgccgacggtcagactttggacggcattttgcccgaagccttcgccgtctgccgcgaagcgtcccgccgcaccctcggtatgcgccacttcgacgtgcagcttatcggcggtatggtgctgcacgacggcaaaatcgccgaaatgcgtaccggcgaaggcaaaaccctggtcgccaccctcgccgtctatctcaacgcgctggccggcaaaggcgtacacgtcgttaccgtcaacgactacctcgcctcacgcgatgccggcattatggagccgctctataatttcctcggtctgaccgtcggcgtgattatttcagatatgcagccgttcgaccgtcaaaacgcctatgccgccgatatcacctacggcaccaataatgaattcggcttcgactacctgcgcgacaatatggttaccgaccaatacgacaaagtgcagcgcgaactgaatttcgccgtcgttgacgaagtggactccatcttgattgacgaagcgcgcactccgctgattatctccggccaggcagacgacaacattcagttgtaccaaatcatgaacaccgttccgccccacctcgtccgtcaagagacagaagaaggcgaaggcgactattgggtcgacgaaaaggcacatcaggtcatcctgagcgaagcaggtcacgaacacgccgaacaaatcctgacccaaatggggctactggcagaaaacgactccctctattccgccgccaatatcgccctgatgcaccaccttatggcggcattgcgcgcgcattccctcttccacaaagaccaacattacgtcatccaagacggcgaaatcgtcatcgtggacgaattcaccggccggctgatgtccggccgccgctggtcggagggtctgcatcaagccgtcgaagccaaagaaggcgtggaaatcaaacgcgaaaaccaaacccttgcctccatcaccttccaaaactatttccgcctgtacaccaagctctccggcatgaccggcacagccgataccgaagctttcgagttccaaagcatctacaacctcgaaaccgtcatcatcccgaccaaccgccctgtacagcgcaaagacttcaacgaccagattttccgttccgccgaagaaaaattcgaagccgtcgtcaaagacatcgaagaatgccacaaacgcgggcagcccgtcctcgtcggtacgaccagcatcgaaaactccgaactggtctcccaccttctgcaaaaagccggactgccacacaacgtcctcaacgccaaagaacacgaacgcgaagcgctgattgtcgcccaggcaggcaaagtcggcgcgattaccgttgccaccaatatggcgggacgcggtacggacatcgttttaggcggcaacctgaagcaccaaaccgatgccatccgtgccgacgaagccttgagcgacgaagagaaacaggcacaaatctccgcactcgaagacggctggcaggcagaacacgacaaagtgatggaagcaggcggtttgcacatcatcggtacggaacgccacgaaagccgccgtatcgacaaccagttgcgcggacgttccggccgtcagggcgaccccggatccagccgtttctacctttcgtttgaagacccgctgctgcgcttattcgcactcgaccgcgccgccgccatcctcaaccgtctcgcccccgaacgcggcgttgccatcgaacacaacctgctgacgcgccaaatcgaaggggcgcaacgcaaagtcgaaggcagaaacttcgatatgcgcaaacaggttttggaatacgacgacgttgccaacgaacagcgcaaagtcatttacagccagcgcaacgaaattctgaccagcaaagacatcagcgacctgatgcaggaaatccgttctgatgtcgtcagcgacctcgtggatacctatatgcctcccgacagcatggaagaacaatgggacatcccgactttggagaaccgtctggctgccgaattcagactgcacgaagacatccaatcctggctgaaggcggacaatgcgattgacggtcaagacatcaaagaacgcctgatcgaacgcatcgaaaacgaatatgccgccaaaaccgaactggtcggtaagcaggcaatggccgatttcgagcgcaacgtgatgttgcaggtcatcgacaaccaatggcgcgaacacctcgccgctatggactacctgcgacaaggcatacacctgcgcagctatgcccaaaaaaatccgaagcaggaatataaacgtgaagcctttaccatgttccaagacctgtggaacggcatcaaattccatattgcctccctgcttacctcggttcaaatcgaacaaaaccctgtcgcggtggttgaagagcaacccatcggcaacatccagtccatccattccgaatcgcccgatatggaagaacttttgggtcagtcgcaaaccgatttggttaccgaggcctttaatcccgatggaacggatttcagccccgaagccttggaagcgcggggacaaatcgtccaccgcaacgacccctgcccctgcggcagcggtttgaaatacaaacaatgccacggcaaactggcttaa

SEQ ID NO: 67176 - DNA, 891 bp, Neisseria meningitidis; identical to SEQ ID NO: 41851

SEQ ID NO: 67177 - DNA, 345 bp, Neisseria meningitidis
atgctgccgaataaggttttgggtaaatatgattggaatgtggacggaaaaacaggaataggcgcggcatgggtcgtggcggcatttgtgctgcccatgttggtgtgggcgatatttatgttgtcgcggatgcaaggctggcttgcgccgaccaaggcaaacccgatatgggcgttggtgtggctgctgatttgcctgccctgcctgctgattgcgtccaaatgtttgggttggaaaggctggcggcgggtggtgaatatttttgcctgcctgaccgtctgcgccatattgagcgtacccgcttcgctgctcatcgcctttaccctccgggacctgctgaaatag

SEQ ID NO: 67178 - DNA, 183 bp, Neisseria meningitidis
  misc_feature 168, 169, 170, 171, 172: 'n' is a, c, g or t
atgacgacacgccaaatcatcctcgataccgaaaccaccggtctgtatgccgacggcggcgaccgcttggtcgagtttgccggtctggaaatggtcaaccgccaaatgaccgacaaaaacctgcacctctatgtccaccccgagcgcgatatgcccgaagaggcggannnnncacacacttaa

SEQ ID NO: 67179 - DNA, 645 bp, Neisseria meningitidis; identical to SEQ ID NO: 54864

SEQ ID NO: 67180 - DNA, 1056 bp, Neisseria meningitidis
gtgtttgaaacgccgacatttgagcaaatccgcgagcgtatcctgcgcgataccaaaagcctgtggccggatgccgatatcagccccgacagcgaccattatgtgcacgccagccgtttggccagctgcgccgaagggcaatatgcgcatcaaagctggattgtgcggcagattttccctgataccgccgaccgcgagtatttggagcggcatgcctccatgcgcggcttgcgccgccgcaatcctaccacggccagcggcacgctgaccgtaagcggtattgcgcaatccatgctttcagacggcctgcaagtgcgtatcggccagcgtttttaccgcactaccgcccgcgccgttatcggcagcggcggcacggcggaaataccggcaatcgccgacgagccgggcgcggccgccaatgtgcgcgacggcgaggcgcaactgatggccgcccccgccggtgtgtccaccgaatgccgccttaccgtacaaggcggcaccgaccgagaaagcgatgcctcactgctggcgcgtctgttggaaatcatccgccgaccgcccgcaggcggcaaccgttacgactataaaaactgggcgttgagtgttgacggcgtaaccagcgcatatgtttatccgctgcgccgcggcttgggtacggtggatattgccattacctccgccgacggtgtgccatcggaagaaactgtgcgccgcgtacaggcttatatcgacgagatgcgcccggtaacggcaaaaaatgcgctggtactcaagccaaccgtaacggcggtgcctgttaccgtgcaagtcaagctcgacggcatcgacttggacgatgccaagcgccgcatacggacggctctaaaagaatatttcgacaccctgatccccggcgacggcctgactgtgtcgcaaatcgaggcggctatcagcaatgtggatggtgtgatcgaccgccgtctgactgcgccgacggccaaccgtgccgccgatacggttaaccgcatcgagtggtttaaagcgggcgcgattaatgtaacggagatgccgtcatga

SEQ ID NO: 67181 - DNA, 1251 bp, Neisseria meningitidis
atgttttcaaaaagcgttaccctcgcacaatacgaccccgatttggcagcagccattgcccaagaagaccaacgccagcaagaccacgtcgagctgattgcctctgaaaactacgtcagctgcgccgtaatggaagcgcaaggttcccagctgaccaacaaatacgccgaaggctaccccggcaaacgctactacggcggctgcgaatacgtcgatattgtcgaacaattggcaatcgaccgcgtcaaaaaactgttcggcgcgcaatacgccaacgttcaaccgcactccggctcgcaagccaaccaagccgtgtacgcttccgttttaaaaccgggcgacaccattttgggtatgtctttggcgcacggcggccacctgacccacggcgcgagcgttaatatttccggcaaactctacaatgccgttacttatggtttggatgaaaacgaagtgctcgattatgccgaagtggaacgcttggctctcgaacacaaacctaaaatgattgtggccggtgcgtctgcctacgcgttgcaaatcgactgggcaaaattccgcgaaatcgccgataaagttggcgcatacctctttgtcgacatggcgcactacgccggactgattgccggtggcgaatatcccaaccccgtgccattctgcgacttcgtgaccaccaccacccacaaaaccctacgcggccctcgcggcggcgtaattttgtgccgcgacaatacccacgaaaaagcgttgaactcttccatcttcccaagcctgcaaggcggtccgctgatgcacgtcatcgccgccaaagccgtagcgtttaaagaagcgttgcaacccgagttcaaacaatacgcaaaacaagtgaaaatcaatgctgccgccatggcggaagaactggtcaaacgcggtttgcgcatcgtttccggccgcaccgaaagccacgttttcctcgtcgacctgcaaccgatgaaaatcaccggcaaagccgccgaagccgctttgggcaaagcgcacatcaccgtcaacaaaaacgccattccgaacgatccggaaaaacccttcgttacctccggcatccgcatcggttccgccgccatgaccacacgcggttttaacgaagccgacgcgcgcgtattggcgaacttggttgccgacgtattgtctaaccccgaagacgaagccaacctcgccaaagtccgcgaacaagtaactgctttgtgcaataaataccccgtttacggcgcgtaa

SEQ ID NO: 67182 - DNA, 1098 bp, Neisseria meningitidis
atggaagttcaactgccgaaaattaaaacagtacgcgtaatgttggcggggatgacggcgcagcaggaatccgttttcaaaatggcattcaaaatgcacaataccacccgttatgaaacagtatccccttcagacggcagtgccgtgcccgatttggttttggcggataccgatgccgagggcggttttgaactttggaaagagcttgccgagcgttataaggatatacccgtcgccgtctgttcggagaaagttcccgattctgaagttccctacctgcccaaaccgattcggtttgaaacattgtttcctatgctccgcaaattgttgcagggcgagaatgtttatgggaaatcgtttattgcacccgcagaccggtcggcgaaaaataacgggaatgtgcagcgtacggttacgatacgccagtttaacccgaataaaggattattgggggcgttgcggtttgcggaaaagaacaggcaggacatcgctatcttgcatggaaataagccggtccttattgttttcccctcgatacaacgggttttgctgacagaaagtgtgcaaaaactcgaagaattgtgcaaagacgaaaatttgcaggtcagctgcaagactgttcccgataacccgcaatggcgcgaaaaggctaaagtaggcattatgtcctgtatgtggcagttttccatttggacggcgcaaggcaggttgatttatccgatttctcccgatactccgtttacgttgaaatcttggccaaacctgacccggttggcaaatgtgccggggtcgatacgcttgtcggcatttctgaccaaggcatccgtcaaccttaacgtgttgtataaagtgatgcctttaaacctcaatgatattctgaattatcttgcggcaacctatacaaccgggtttttgtcggtagatttaaaaacggtttcacaacaggcatactccgatatggcggataaaataaatatcggagccgattctgcctctgatagtgaaatgatgaaaaaagcggaaaaaatcacaacaccatcccaatcccagtcgcgcggccttctgcaaaggctgatgaaaaaactgttgggcagctaa

SEQ ID NO: 67183 - DNA, 795 bp, Neisseria meningitidis
atgaaagcctatttggacttgatgcgccacgtcctcgacaacggtacggacaaatcagaccgcaccggtacgggcacgcgctccgtattcggttatcagatgcgttttgacttgggcaaaggttttccgctgctgacgaccaaaaagctgcatttgcgctcgattatccacgagctgctttggtttctcaaaggcgataccaatatcaaatacctaaaggacaacaatgtttccatttgggacgagtgggcggacgaaaacggcgacttaggcccggtttacggctaccagtggcgtaactggcccgcgcccgacggcaggcatatcgaccaaatcgccaatgtgctggaacaaatcaagaagaatcccgactcgcgccgcctgattgtatcggcgtggaatccggctttggtcgatgaaatggccttgccgccctgccacgcgctgtttcagttttacgttgccgacggcaaactgtcctgccagctttaccagcgtagtgcagatattttccttggtgtgccgtttaatattgccagctacgcattgttgaccatgatgatggcgcaagtgtgcggattggaggcgggcgagtttgtccatacgtttggcgacgcgcatttgtaccgcaaccatttcgagcaggccgcattgcagttggaacgcgaaccgcgcgccttgccagtgatgaaaatcaatcctgaagtcaaagatttgttttccttcaagtttgaagatttcgagttggaaggttacgaccctcatccgcatatcaaggcggcagtgtcggtttag

SEQ ID NO: 67184 - DNA, 1215 bp, Neisseria meningitidis
atggaatgggaattcaacagttattacacactgattgccgccacgctcgtgttgctggttggtaaatttctggttcaaaaaatcaaattcttacgagacttcaatattcccgagccggtcgctggcggtttggttgccgcgattatcctgtttgcgctgcacgaggcgtacggcgtgagcttcaaatttgagaaaccgctgcaaaatgcgtttatgctgattttcttcacgtccatcggcttgagcgcggatttttcccgtttgaaggcgggcggtttgccgctggtggtttttaccgcgattgtgggcggatttatcttggtgcaaaactttgtcggggtcggactggctacggctttgggtttggacccgctcatcggtctgattaccggttcggtgtcgctgacgggcggacacggtacgtcaggtgcgtggggacctaattttgaaacgcaatacggcttggtcggcgcaaccggtttgggtattgcatcggctactttcgggctggtgttcggcggcctgatcggcgggccggttgcgcgccgcctgatcaacaaaatgggccgcaaaccggttgaaaacaaaaaacaggatcaggacgacaacgcggacgacgtgttcgagcaggcaaaacgcacccgcctgattacggcggaatctgccgttgaaacgcttgccatgtttgccgcgtgtctggcgtttgccgagattatggacggcttcgacaaagaatacctgttcgacctgcccaaattcgtgtggtgtctgtttggcggcgtggtcatccgcaacatcctcactgccgcattcaaggtcaatatgttcgaccgcgccatcgatgtgttcggcaatgcttcgctttcgcttttcttggcaatggcgttgctgaatttgaaactgtgggagctgaccggtttggcggggcctgtaaccgtgattcttgccgtacaaaccgtggtgatggttttgtacgcgacttttgttacctatgtctttatggggcgcgactatgatgcggcagtattggctgccggccattgcggtttcggcttgggtgcaacgccgacggcggtggcaaatatgcagtccgtcacgcatactttcggcgcgtcgcataaggcgtttttgattgtgcctatggtcggcgcgttcttcgtcgatttgattaatgccgcgattctcaccggttttgtgaatttctttaaaggctga

SEQ ID NO: 67185 - DNA, 2631 bp, Neisseria meningitidis
atgcaagaacaataccggcccgccgccattgagcctgcggcgcagaaaaaatgggacgacgcccgtattttcaacgtctccgaagacgcttccaaacccaaatattattgcctctccatgttcccctatcccagcggcaagctgcacatggggcatgtgcgcaactacaccatcggcgacgtattgagccgcttcaaacgcttaaacggcttcaacgtcatgcagcctatgggttgggacgcgttcggcatgccggcggaaaatgcggcgatgaaacacaacgtcgcccccgccgcttggacctacgacaacatcgaatacatgaaaactcagctcaaaagcctgggttttgcgattgactgggaacgcgaaaccgcaacctgcaaacccgaatactaccgctgggaacaatggctgtttaccaagctgtttgaaaaaggcatcgtctatcgcaaaaacggcacggtaaactgggacccggtcgaccaaaccgtccttgccaacgagcaagttatcgacggacgcggctggcgttccggcgcattgatcgaaaaacgcgaaatcccgatgtattacttcaaaatcaccgattacgccgaagagctgctcaacgacttggacaaactggaacactggccggaacaagtcaaaaccatgcagcgcaactggatcggcaaatctcgcggtatgaccgtgcgctttgctgtttcagacgacagcaaacaaggcttggaaggcgattacgcgaaattcctacaagtttataccacccgccccgacacgctgatgggtgcgacttatgtcgccgttgccgccgagcatccgctggcaaccgccgcagccgccgacaaacccgaattgcaggcatttatcgccgaatgcaaagccggctcggttgccgaagccgatatggcgacgatggagaaaaaaggcgtgccgacaggccgctacgtcgtcaatccgcttaacggcgacaagctggaagtgtggattgccaactatgtattgtggggctacggcgacggcgcagtgatggctgttccggcgcatgacgaacgcgattttgagttcgccaccaaatacaatctgccgaaaaaacaagtcattgccgtcggcgacaacgcatttgacgaaaaccaatggcaagaatggtacggcgacaaagaaaacggcgtattggtcaacagcggcgacttggacggcttggattttcagacggcatttgatgccgttgccgccaagctgcaaagccaaggcgcgggcgaaccgaaaacccaataccgcctgcgcgactggggtatttcgcgccaacgctactggggctgcccgattcccatcgtccattgcgaaaaatgcggcgacgtccccgtcccagctgaccaactgcccgtcgtcctgcctgaaaacgtcgtacccgacggtatgggttcgccgctggcaaaaatgcccgagttttacgaaactgcctgcccatgctgcggcggcgcggcgaaacgcgaaaccgacaccatggacaccttcatggaatcgagctggtatttcttccgctatatgtcgcccaagttttcagacggcatggtatcggcagaagccgcgaaatactggggcgcggtcgaccaatacatcggcggtatcgaacacgccattttgcacctcctgtacgcgcgtttcttcaccaaactgatgcgcgacgaaggcttggtcaatgttggcgaaccgtttgaacgcctgctgacgcaaggcatggtcgtttgcgaaacctactaccgcgaaaacgacaaaggcggcaaagattggatcaaccccgccgatgtcgagctgacgttcgacgacaaaggccgccctgtttccgccgtcctcaaagccgacggtctgcccgtcgtcatcagcggcacggaaaaaatgtccaagtccaaaaacaacggcgtcgatccgcaagagctgattaacgcctacggcgcggacactgcccgcctgttcatgatgttcgccgcaccgcccgaacagtccctcgaatggagcgacagcggcgtcgaaggcgcacaccgcttcctgcgccgcctgtggcgtaccgtttacgaatacttgaagcaaggcgaagcagtcaaagcgttcgcaggcagccaagacggtttgtctaaagaactcaaagacctgcgccacaaactgcacgcgaccactgccaaagtcagcgacgactacggccgccgccagcagttcaacaccgccatcgccgccgtgatggaattgctcaaccaatacgacaaaaccgacaccggcggcgaacaaggccgcgccgtcgcccaagaagtattggaaaccgccgtacgcctgctgtggcccatcgtgccgcacatctgcgaaaccctgtggagcgaattgaacggtgcgaaactgtgggaagcaggctggccgacagtcgacgaagccgccttggtcaaatccgaaatcgaagtgatggttcaagtcaacggcaaactgcgcggaaaaatcaccgttgccgccgacgcatccaaagccgacctcgaagcagccgcccttgccaacgaaggcgcggtgaaattcatggaaggcaaaccggcgaagaaaatcatcgtcgtaccgggcagactggtgaacatcgtcgtctaa

SEQ ID NO: 67186 - DNA, 1302 bp, Neisseria meningitidis; identical to SEQ ID NO: 36246

SEQ ID NO: 67187 - DNA, 789 bp, Neisseria meningitidis
atgatggaaaacggaaaaacagtcccgagatggcgttttgccttgaaaagtgcgggctggcatctcttaatcagcctgtcggttgcagggctggcggcattgctggtttttaaggtttggtatccttatccttatgccgagctgacgggagggctgtcgctttatcagctggtggtggctgtcgatattgtatgtggtccgctgctgactttaattttggcaagcccgaagaaaaagacaaaggcacgcatggtcgatttttccatggtcggcatcatccagctggcggctttggtgtacggtctgcacagcgtttctttggcgcgccctgtgatagaggcgtttgaaaaagacaggattaatgttgtgaccgccgccgaagtggcggttgaagatttgcacaaagcgccggaagggctgcaaagcctgtcgtggttcggcatccgccgcattgcattgaaagaacctgaggatgcggatgagaagaacaagacgctggatttgtccctgaaaggtatcgagccgagtatgcgtcccgaccggtggctgccgtattccgacaaggaagcagaagaaatccgcaaacatctgaaaccgctgaaagtcttggcggatgcgagaaaaacgacggttgcggacattctgaaacaggcaggtctcgccgaaggggaggagctgtattacctgccgtttaccagcagcaggcagaaagagtggatagtcattaccgataaagagggcaacaccaaaggttacgcgccgatagacggcttcatcatcatcccttaa

SEQ ID NO: 67188 - DNA, 618 bp, Neisseria meningitidis
atgaccttcctgccactcaaatccccgctcaaattctacgccgtcgtccccaccgccgattgggtcgagcgcatggtcgaagcaggtgccgacacggtgcaactgcgctgcaaggccctgcacagcgatgaattgaaacgcgaaatcgcccgctgcgccgcagcctgtcagggcagccatacgcagcttttcatcaatgaccactggcgcgaggcaatcgaagcaggcgcgtacggcgtgcatctcggacaagaagacatggacaccgccgaccttgccgccatcgccgccgccggtttgcgcttgggtttgagtacgcactccgttgccgaactcgaccgcgccctgtccgtacaccctagctacatcgccagcggcgcgattttcccgaccacgaccaagcaaatgcccaccgccccgcaaggcttggacaaactgcgcgaatacgtcaaacaggcaggcggcacgcccgtcgtcgccattggcggcatcgatttgaacaacgcccgagccgtactcgccaccggcgtttcctcactcgccgccgtccgcgccgtaaccgaagcggcaaatcccgaagcggtggttaaagcgtttcaggctttgtgggatggataa

SEQ ID NO: 67189 - DNA, 798 bp, Neisseria meningitidis
atgctgaaacaacgggtaataaccgctatgtggctgctgccgctgatgctgggcatgctgttttacgcgccgcaatggttgtgggctgcattttgcggactgattgccctgattgccttgtgggaatatgcccgtatgggcggcttgtgcaaaatcaaaaccaaccattacctcgtcgcaaccttggttttcggcgtggttgcctatgcgggcggctggatgctgcctaatttggtttggtatgttgttttggcattttggctcgccatcatgcctttatggttgagatttaaatggaggctcaacggcggttggcaggtttatgccgtcggctggcttctgatcatgccgttttggttcgcgctcgtatccctgcgcccgcatcccgataatgccctgccgctgctcgccgtcatgggtttggtgtggattgccgatgttttcgcgtatttcagcggcaaggcgttcggcaaacacaaaatcgcaccggcaatcagccccggcaagagctgggaaggcgcaatcggcggcgcggtttgcgtggctgtgtacatgaccgccgtacgaagtgccggctggacggcattcgatacaggctggttcgataccgtgttaatcggtttggtgttgaccgttgtcagcgtatgcggcgaccttttggaaagctggctcaagcgcgcggcaggcatcaaagacagcagcaacctgctgcccggacacggcggcgtgttcgaccgtaccgacagcctgattgccgttatcagcgtctatgcggcgatgatgtcggttttaaattga

SEQ ID NO: 67190 - DNA, 783 bp, Neisseria meningitidis
atggaatcactgactgccataaataaatcgcgcattcggcaggctttccaaaaagcattaaacgattatgaccggcacgccttaatccaacaaaaaatgacgattaatctaatggcgcatttgcaagattatttgccggatatgccattggaaaacgtgttggaattgggctgcggctcaggaatgttgagtgccttgctgcaaaaacagatttcagcgaattattggttatttaatgatttgtgcgatgtgcagccccaactggctgaaaaactgccgcaatcctttgatttttattgcggcgatgcggaaaactttccttttcaacgacaatttgacttaatcgcaagcgcatctgccgtgcaatggtttcatcaacccgacgcttttatcgcccattgcaaaacaggcttgaaagcaaacggattattggcggttgcaacctttggcaaagacaatttaaaagaagtccgccaaattacaaatataggcttaaattacccgactttatcccaatggcagacttggttagccaaagattttgagcttttatggtgtgaggattttaaggtaatactagactttgatacgccgttagatgtactcaaacaccttaaatatacaggcgtaacagccacgaaccaaaaaaattggacaagaaaaaatctcaatggatttattggcgattacttgtcggcgttcggtatgccgtcgggcaaagtgcacctgacttatcatccgttattttttatcgcgcgctactctgcggcgggcaggcaataa

SEQ ID NO: 67191 - DNA, 354 bp, Neisseria meningitidis; identical to SEQ ID NO: 50832

SEQ ID NO: 67192 - DNA, 1779 bp, Neisseria meningitidis
atgaacaaaatataccgcatcatttggaatagtgccctcaatgcctgggtcgccgtatccgagctcacacgcaaccacaccaaacgcgcctccgcaaccgtgaagaccgccgtattggcgacactgttgtttgcaacggttcaggcgaatgctaccgatgaagatgaagaagaagagttagaatccgtacaacgctctgtcgtagggagcattcaagccagtatggaaggcagcggcgaattggaaacgatatcattatcaatgactaacgacagcaaggaatttgtagacccatacatagtagttaccctcaaagccggcgacaacctgaaaatcaaacaaaacaccaatgaaaacaccaatgccagtagcttcacctactcgctgaaaaaagacctcacaggcctgatcaatgttgaaactgaaaaattatcgtttggcgcaaacggcaagaaagtcaacatcataagcgacaccaaaggcttaaatttcgcgaaagaaacggctgggacgaacggcgacaccacggttcatctgaacggtatcggttcgactttgaccgatacgctgctgaataccggagcgaccacaaacgtaaccaacgacaacgttaccgatgacgagaaaaaacgtgcggcaagcgttaaagacgtattaaacgcaggctggaacattaaaggcgttaaacccggtacaacagcttccgataacgttgatttcgtccgcacttacgacacagtcgagttcttgagcgcagatacgaaaacaacgactgttaatgtggaaagcaaagacaacggcaagaaaaccgaagttaaaatcggtgcgaagacttctgttattaaagaaaaagacggtaagttggttactggtaaaggcaaagacgagaatggttcttctacagacgaaggcgaaggcttagtgactgcaaaagaagtgattgatgcagtaaacaaggctggttggagaatgaaaacaacaaccgctaatggtcaaacaggtcaagctgacaagtttgaaaccgttacatcaggcacaaatgtaacctttgctagtggtaaaggtacaactgcgactgtaagtaaagatgatcaaggcaacatcactgttaagtatgatgtaaatgtcggcgatgccctaaacgtcaatcagctgcaaaacagcggttggaatttggattccaaagcggttgcaggttcttcgggcaaagtcatcagtggcaatgtttcgccgagcaagggaaagatggatgaaaccgtcaacattaatgccggcaacaacatcgagattagccgcaacggtaaaaatatcgacatcgccacttcgatggcgccgcagttttccagcgtttcgctcggcgcgggggcagatgcgcccactttaagcgtggatgacgagggcgcgttgaatgtcggcagcaaggatgccaacaaacccgtccgcattaccaatgtcgccccgggcgttaaagagggggatgttacaaacgtcgcacaacttaaaggcgtggcgcaaaacttgaacaaccgcatcgacaatgtggacggcaacgcgcgtgcgggcatcgcccaagcgattgcaaccgcaggtctggttcaggcgtatctgcccggcaagagtatgatggcgatcggcggcggcacttatcgcggcgaagccggttacgccatcggctactccagtatttccgacggcggaaattggattatcaaaggcacggcttccggcaattcgcgcggccatttcggtgcttccgcatctgtcggttatcagtggtaa

SEQ ID NO: 67193 - DNA, 1485 bp, Neisseria meningitidis
atgtcgaaacctgtttttaagaaaatcgcactttatactttgggtgcaatcagcggcgtggccgtcagtctggcggtgcagggttttgccgccgagaaggacaggcgggataacgaagtcctgccggtgcaatccatccgcacaatggcggaggtttacggtcaaatcaaggcaaactactatcaggacaaacccgatgccgatttgtttgaaggtgcgatgaagggtatggtggccggtttggatccgcattccgaatatatggataaaaaaggttatgccgagataaaggagtccaccagcggcgaatttggcggcttggggatggaaatcgggcaggaagacggatttgtcaaagtggtttcgccgattgaggacacgcctgcggaacgggcgggggtgaaaagcggcgatttcattgtgaaaatcgataatgtttcgacacgcggcatgacggtcagcgaagcggtgaagaaaatgcggggcaagccgggtacgaagattactttgacgctgtcgcgcaaaaatgccgacaagccgatagtcgtcaacctgacccgtgccattattaaagtgaaaagcgtccgccatcacctgatcgaacccgattacggctatatccgcgtgtcgcagttccaagagcggacggtcgaaagcgtcaataccgccgcaaaagagctgctaaaggaaaataaaggaaaaccgctcaaggggctggtgttggatttgcgcgacgaccccggcgggcttttgactggcgcggtcggcgtgtcggcggcatttctgccgtctgaagcggtcgtcgtcagtacgaaagggcgggaaggtatggaaggctttgtgttaaaggcgcgtcccgaagattatatttttaaagccggcgcggatcctttggcgggtattcctgccgagttgaaaaccataccgatgacggttctgattaattcgggttcggcttccgcgtcggagattgtcgcaggtgcattgcaggatcataaacgcgcggtcatcgtcggtacgcagagcttcggcaaaggttcggttcagactttgattcctttgtccaacggcagcgcggtcaagctgacaacggcactgtattatacgccgaacgaccgttctattcaggcgcaggggattgttcccgatgtcgaagtaaaagataaggaacgcatttttgaaagccgcgaggcggatttggtcggacacatcggcaatcccttgggcggcgaggatgtgaacggtgaaacccttgccgtgccgcttgaaaaagatgcggataagcccgctgtaaaagaaaaaggtaaaaagaaaaaggacgaggatttgtcttcaaggcggattcccaaccctgccaaagacgaccagttgcggaaagctttggatttagtcaagtcgcccgagcagtggcagaagtctttggggctggcggcgaaaaagccggtttcaaataaagataagaaagataaaaaagataagaagtag

SEQ ID NO: 67194 - DNA, 273 bp, Neisseria meningitidis
ttgaatgtattcggattttcggcggacgatttttcagaagaggagaccacttttggcgtatggccgtgcaactggcaggcggtgcaactgtttattgcagtatcgacgcagtggcgtatcggaatgtcgggtgcgacggggttggattattccgcagtcgcagcagttatggaatgcggcaatatcaagtcgaagaaacggaaagcactgttggagaaagtccgcctgatggagcttgaagtgttgtcaatgtgggcaggcgaacatgaataa

SEQ ID NO: 67195 - DNA, 924 bp, Neisseria meningitidis
gtgccgtccgaacacccgttttcagacggcatttccacacccaaccccaaagaaaccatgaacgacaccgcccaaattaccgccagctacggccgccgctacatcgtgcgcacgcccgacggcacaacctacgaagccagcacccgcaaaaaacgcgtcgatttcgcctgcggcgaccgcgtccgcatcagccccgtcaacgccgaacaagttgtgattgaagattttttaccgcgccaaagcctgctctaccgccaagacgcgtggaaaaccaaactcatcgccgccaacgttacccaactcctcatcgtaaccgccgccgtcccgagtccgagcgtgcggctgctgcaacgcgccctgcttgccgccgaagccgccggcatccgcgccgtcatcgtcctgaacaaagccgacctgcccgaaaccgccctttggcgcgaaaaactcaaattctacgaaacgctgggttatcccgtcatcgaaacccgcgcgctggaaaacgccgacctcctgcgtcccgtccttcaagggcacagcaacatcctgctcggacaaagcggtatgggcaaatccaccctgaccaacgcccttttaggcagccaaaccgcccgcaccggcgacatttccgccgcactcgactcgggaaaacacaccaccacccatgcccggctttacgatttgaacggcgaaacccaactcatcgactccccgggtttgcaagaattcggactgcaccacctccaagccgccgatttgccgcgctatttccccgatttccgccaccttgtcggacaatgccgcttccacaactgcacccaccgcgccgaacccggctgcgccttcaaagccgccgccgaaaccagggcggcaagccccgaacgcctcgcctttttgcagggcatcaccgacgaactgcccgggtaa

SEQ ID NO: 67196 - DNA, 426 bp, Neisseria meningitidis
atggcgattgaacgtaccatctccatcatcaaacccgatgccgtcggcaaaaacgttatcggcaaaatatacagccgctttgaggagaacggtctgaaaatcgttgccgccaaaatgaagcagcttactctcaaagaggcgcaagaattttatgcggttcataaagaccgccccttctacgccggattggttgaatttatgaccggcggtccggttatgattcaggtattagagggtgaaaacgccgtcctgaaaaaccgcgaactgatgggtgcaactaatccttccgaagccgccgaaggcacgatacgcgcggactttgccacttcggtcagcattaatgccgtacacggttccgacagcgtggaaaatgccgctttggaaattgcctactttttcagccaaaccgaaatctgcccccgttga

SEQ ID NO: 67197 - DNA, 441 bp, Neisseria meningitidis; identical to SEQ ID NO: 36413

SEQ ID NO: 67198 - DNA, 576 bp, Neisseria meningitidis
  misc_feature 561, 562, 563, 564, 565: 'n' is a, c, g or t
atgagcaccttcttccagcaaaccgcccaagccatgattgccaaacacatcgaccgcttcccgctattgaagttggaccaggtgattgattggcagccgatcgaacagtacctgaaccgtcaaaaaacccgttaccttcgagaccaccgcggccgtcccgcctacccgctgttgtccatgttcaaagccgtcctgctcggacaatggcacagcctctccgatcccgaactcgaacacagcctcatcacccgcatcgatttcaacctgttttgccgttttgacgaactgagcatccccgattacagcaccttatgccgctaccgcaactggctggcgcaagacgacaccctgtccgaactgttggaactgattaactgccaactgaccgaaaaaggcttaaaagtagagaaagcatccgccgccgtcgttgacgccaccattattcagaccgccggcagcaaacagcgtcaggccatagaagtcgatgaagaaggacaagtcagcggccaaaccacaccgagtaaggacagcgatgcccgttggatcaagaaaaacggcctnnnnncacacacttaa

SEQ ID NO: 67199 - DNA, 324 bp, Neisseria meningitidis
atgaaaaaattattgattgccgcaatgatggcggctgccttggcagcttgttcgcaagaagccaaacaggaggttaaggaagcggttcaagccgttgagtccgatgttaaagacactgcggcttctgccgccgagtctgccgcttctgccgtcgaagaagcgaaagaccaagtcaaagatgctgcggctgatgcaaaggcaagtgccgaggaagctgtaactgaagccaaagaagctgtaactgaagcagctaaagatactttgaacaaagctgccgacacgactcaggaagcggcagacaaaatgaaagatgccgccaaataa

SEQ ID NO: 67200 - DNA, 1911 bp, Neisseria meningitidis
atgactctggaaaccctgcttgccctaccgcgcaacatcaagaaaatctgtttcctcatacacgattttctgatgattttcattgccttttggtttacccaaagcctgaaggccgactactcgaacgaatggttcgaccctgccaactggcagtctttcctattgaccgcgccgttgaccatcggcctgttcgtcagaatggggctctaccgtgccgttacacgcttcatcagcttccgcatcctctccaccgcgctggcaggcagcctcgcctccgccgtattgttcttcctcaacacattgatttttgaagaaaggctgcgcctcgccctgccgattgtctatttcttactgctgtttgtttccgtgaccggctcgcgtatggttttgcgcggactgttgtccgaacaccccaaaaaacagatgatccctgtcatcatttacggcgcgggacggtcgggcagacaactgcttgaggccgtcaaacaaatgcgcgaatattccgccgccgcctttgtagacgacgaccccaaactgtggcacaccgtcatctacgaccttgccgtttaccagcccgatgccatcgccttcctcatcgaacgctacggcgtggaaaaaatcctgctcgccatccccggcgcgacccaggaacaacgccgccgaatcatcaacaaactggaagcctatccgtgcgaagtgttgaccattcccggaatgaaagacctgatggacggaaaaatcagcatcggcacgctcaaaaaaatctctgtgtccgacctgctcgggcgtgattccgtcgcgcccgacgaccgcctgatgagtgccgacatcgaaggcaaaaccgtcatggtaaccggcgcgggcggctccatcggttcggaactctgccgccagattatccgccgccgccccgaaaagctgctgctgttcgagttatccgaattcgccctgtacgccatcgaaaaagaattgcgcgaaacctgcatccaaaaacgcctcgacaccgaaatcctgccctttctcggttcggtgcaaaaccgcacgctgctcgaacacgtcatgaccgccttttccgttgcgaccgtctatcacgccgctgcctacaaacacgtccccatggtcgagttcaacaccgtcgaaggcatacgcaacaacatcttcggcacactcgagtgcgcgcttgccgccacgacatcgggcgtaagaactttcgtcctcatctccaccgacaaagccgtccgccccaccaacaccatgggtgccagcaaacgcatggcggaactctgccttcaggcactcgccgccgaacccggacaaaaaacccgcttcagcatggtacgtttcggcaatgttttaggttcgtccggctccgttgtcccgctgtttgaaaaacagattgcagaaggcggcccgcttaccctgacccaccccgaaatcacacgttatttcatgaccatacccgaagccgcccaactcgtcatacaggcaggcgcgatgggtacgggcggcgacgtattcgtcctcgacatgggtgaatccgtcaaaatcatcgaccttgcccgccaaatgattaccctaagcggcctcaaacccaacacacccgaacaacccgacggcgacatcgaaatcctcattaccggactgcgtcccggcgaaaaactctacgaagagctgctcatcggcgacaacgtccgcaaaaccgcccatccgcgcattatgacggctgacgaggcgatgctgccgtggcacgagctctctgtcctgctcgaccgcatccgttcggcctgcgaccgttacgaccagcaggcaatccgcaccctgctcatcaacgccccgaccggctttgccccgagcgacggcatctgcgacctgctttgggtacgagaaacacacagaaaaaatgccgtctga

SEQ ID NO: 67201 - DNA, 429 bp, Neisseria meningitidis
  misc_feature 406, 407, 408, 409, 410: 'n' is a, c, g or t
atgagctacacgcaactgacccaaggcgaacgataccacatccaatacctgtcccgccactgcaccgtcaccgaaatcgccaaacagcttaaccgccacaaaagcaccatcagccgcgaaatcagacggcaccgcacccaagggcagcaatacagcgccgaaaaagcccagcggcaaagccggactatcaaacagcgtaagcgacaaccctataagctcgattcgcagctgattcagcacatcgacacccttatccgccgcaaactcagtcccgaacaagtatgcgcctacctgtgcaaacaccaccagatcacgctccaccacagcaccatttaccgctaccttcgccaagacaaaagcaacggcagcacgttgtggcaacatctcagaatatgcagcaaacccnnnnncacacacttaattaattaa

SEQ ID NO: 67202 - DNA, 792 bp, Neisseria meningitidis
atgattactgtgaacacactgcaaaaaatgaaggcggcaggtgagaaaatcgccatgctgaccgcttacgaatccagttttgccgcgctgatggacgatgccggtgtggaaatgctgttggttggcgattctttgggtatggcggttcaggggcggaaatcgacgctgccggtcagcctgcgcgatatgtgctatcacaccgaatgtgtggcacgcggtgcaaaaaatgcgatgattgtcagcgatttgccgtttggtgcatatcagcagagtaaggagcaggcgtttgccgccgccgccgaactgatggcggccggcgcgcatatggtcaaactcgaaggcggcgtgtggatggcggaaacgactgaatttttgcaaatgcgcggcattccggtttgcgcgcacatcggtctgaccccgcaatcagtgtttgcctttggcggatataaagttcaggggcgcggcggcaaggcgcaggcgttgcttaacgatgccaaggcgcatgacgatgcgggggcggcggtcgtgctgatggagtgcgtaccggcggaactggcaaaaaaggtaactgaaactgtttcctgtccgaccatcggcatcggtgcgggcgcggattgcgacggtcaggttttggtgatgcacgatatgctgggcattttcccgggtaagacggcgaaattcgtcaaaaactttatgcatgggcaaagcagcattcaggcggcggttcgggcgtatgttgccgaagtcaaagccaaaaccttccctgctgcggaacatatttttgcagactga

SEQ ID NO: 67203 - DNA, 507 bp, Neisseria meningitidis
atgaacacccttcaaaaaggttttacccttatcgagctgatgattgtgattgccatcgtcggcattttagcggcagtcgcccttcctgcttatcaagactacacagcccgcgcgcaagtttccgaagccattcttttggctgaaggtcaaaaatcagccgtcaccgagtattacctgaatcacggcgaatggcccagcaacaacacttctgccggcgtggcatccgcctctaaaatcaaaggcaaatatgttgagaaagttgaagtcaaaaacggcgtcgttaccgccacaatgctttcaagcggcgtaaacaaagaaatccaaggcagaaaactctccctgtgggccaagcgtcaagacggttcggtaaaatggttctgcggacagccggttacgcgcgctagcaccgccaccgacgccgttaccgccgacaccgccgccgccaacaagaagatcgacaccaagcacctgccgtcaacctgccgcgacgcttcatctgccagctaa

SEQ ID NO: 67204 - DNA, 879 bp, Neisseria meningitidis
gtggtcggtaacggcaaaaaatatgccgcaccattgctggtgctgggttgcgtggtgttcggtctgggcagtctgattgtcagatccgtccccgtcggttcgtatgcaatcgcattttggcggttgctgatttcggtgttcgtattttggtttttagcacggtttttcaggcaaaaattcccaaaaaacaggaaaaccgtccgatatgccctgacggcgggcgtgtttctctctttcgatttggcgttgtggcacgaaagcatacacgcggtcgggccgggtatttccaccctgctcaacagcctgcaaatcttttttttgtcggcaatcggtgttttctttttcggcgagcgtttgagcgggctgaaaaaggcaggcttaatatcggcagttgccggcgtggcaatgattgccggtgcggaattcggctacaacggtaatgcggtttggggattcgtcagcggtttggtatcgggactgatgctcgccctgtcgatggtgttcgtccgcaaaacccatgaaatcgagacggtggcgcttttcccttcaatgatgattttgagtttaggcggcgcggtatcgttggttgttccggcattgctgatggacggcggcgcgctttatccgacgacttggaaagatgcgggtttggtgcttgtgtacggcgtggtgatgcagtgcttcgcgtgggcgatggttgcctatgcgattccgctgctttcgctgtcgctgacggggctgctgcttttgtccgaaccggttgccgccctgttcatcgattatttcggattgggcaaaccgattgaaggcgtgcagtgggcaggggtggcgctgacgctttcggcaatttatctcggttcgctgaaacagcagtcttaa

SEQ ID NO: 67205 - DNA, 1311 bp, Neisseria meningitidis
atgaccgatttgtttgcccgagaacccgacgcgccgcttgccgaacgattgcgtccgcatacgcttgacgacgtggtggggcaggaacacctcatcggcgaaggtaaacctttgcgcgtggcggtagaaggcggcaagccgcattctatgttgctgtgggggccgccgggcgtgggcaagacgacgttggcgcggattttggcgcagagtttcaacgcccagtttttgcctgtttccgccgtattttccggcgtgaaggacatccgcgaggcaatcgataaagccgaaatcgctttgcagcagggacgcgcgacgattttgtttgtcgatgaagtccaccgcttcaacaaggcgcagcaggacgcgtttttgccgcatgtcgaaagcggtttgctaacctttattggtgcgacgacggaaaatccgtcgtttgaagtcaatcccgcgctgttgagccgcgctcaggtgtatgttttgcaacccttgtcttcagacgacctgaaaaagctgattgccaaggtattggctttgcctgaataccaagagtttacgattgaaacggatgcgcaaaaattactcgtgaataccgccgacggtgatgcgcgcagattgttgaatttgttggaacaacttttacgcgccgccgatacacgtcgtctgaaaaacttaaccgccgaatttctcgccgacagtctcggggcgcaaatccgccgtttcgacaaaggcggcgagagtttctacaaccaaatctccgccctgcacaaatccgtgcgcggttcgcatccgaacgccgcgctgtattggttctgccgtatgctcgacggcggcaccgacccgcgctacctcgcccgccgcatcgtgcgtatcgcttgggaagacatcgggcttgccgacccgcgcgccttccaaatcgccaacgatgccgccgccaccttcgaacgcttaggctcgcccgaaggcgaactggctttggcgcaagcggtattgtatcttgccgccgccgcgaaatccaacgcgggctacaaggcatacaaccaaatgcgccacttcgtcaaagaaaacgctagcgacgaagtgcccgtccacctgcgcaacgccccgaccaagctgatgaaggaattgggctacggacgcgaataccgctacgcccacgacgaaccgaacgcctacgccgccggcgaaagctatatgcccgacggcttggacgaaccggacttctaccaacccgtcccgcgcgggttggaaatcaaaatcggcgaaaagctggcgtggctcaaatcgctggatgaagaggcattaaaggcaaaatga

SEQ ID NO: 67206 - DNA, 1569 bp, Neisseria meningitidis
atgaatcaaaccgatacgcggcggggcgggcgatttttacgcacagtcgaatggctgggcaatatgttgccgcatccggttacgctttttattattttcattgtgttattgctgattgcctctgccgtcggtgcatatttcggactatccgtccccgatccgcgccctgttggtgcgaaaggacgtgccgatgacggtttgatttacgttgtcagcctgctcgatgccgacggtttgatcaaaatcctgacgcataccgttaaaaatttcaccggtttcgcgccgttgggaacggtgttggtttctttattgggcgtggggattgcggaaaaatcgggcttgatttccgcattaatgcgcttattgctcacaaaatccccacgcaaactcactacttttatggttgtttttacagggattttatctaataccgcttctgaattgggctatgtcgtcctaatccctttgtccgccatcatctttcattccctcggccgccatccgcttgccggtctggctgcggctttcgccggcgtttcgggcggttattcggccaatctgttcttaggcacaatcgatccgctcttggcaggcatcacccaacaggcggcgcaaatcatccatcccgactacgtcgtaggccctgaagccaactggttttttatggtagccagtacgtttgtgattgctttgattggttattttgttactgaaaaaatcgtcgaaccgcaattgggtccttatcaatcagatttgtcacaagaagaaaaagacattcggcattccaatgaaatcacgcctttggaatataaaggattaatttgggctggcgtggtgtttgttgccttatccgccctattggcttggagcatcgtccctgccgacggtattttgcgtcatcctgaaacaggattggtttccggttcgccgtttttaaaatcgattgttgtttttattttcttgttgtttgcgctgccgggcattgtttatggccgggtaacccgaagtttgagcggcgaacaggaagtcgttaatgcgatggccgaatcgatgagtactctggggctttatttggtcatcatcttttttgccgcacaatttgtcgcattttttaattggacgaatattgggcaatatattgccgttaaaggggcgacgttcttaaaagaagtcggcttgggcggcagcgtgttgtttatcggttttattttaatttgtgcttttatcaatctgatgataggttccgcctccgcgcaatgggcggtaactgcgccgattttcgtccctatgctgatgttggccggctacgcgcccgaagtcattcaagccgcttaccgcatcggtgattccgttaccaatattattacgccgatgatgagttatttcgggctgattatggcgacggtgatcaaatacaaaaaagatgcgggcgtgggtacgctgatttctatgatgttgccgtattccgctttcttcttgattgcgtggattgccttattctgcatttgggtatttgttttgggcctgcccgtcggtcccggcgcgcccacattctatcccgcaccttaa

SEQ ID NO: 67207 - DNA, 2043 bp, Neisseria meningitidis
atgatgtcgcccgaaacccgaaaacagctcaaaatcaccgatgtttccgccaagaagctcgacaaactcaacctccataccgcgtgggatttggtgttgcacctgccgctgcgttacgaggacgagacgcacattatgccgattaaggacgcgccgattggcgtgccgtgtcaggtcgagggggaggttatccatcaggaagtaacgttcaaaccgcgcaagcagctgattgtccaaatcgccgacggctccggcagcgtcctttttctgcgcttcatccacttttacgccagccatcagaaacagacggcggtcggcaaacgcatccgcgccgtgggcgaaatcaaacacggcttttacggcgacgagatgattcatcccaaaatccgcgatgccgagggcggcggtttggcggaaagcctcacgccggtttacccgaccgtaaacggtttgaaccagcccactttgcgccgtattattcagacggcgttggacgttacgccgctgcacgacacgctgcccgatgccctgctgtgccgtctgaagctgccacacctcgccgaaagcctgcgtcttttgcattcgccgccgccgagtttcacgattcatcagctttcagacggcacgctgcctgcatggcaacggctcaaattcgatgaacttttggcgcaacagctttcgatgcgcttggcgcgacagaagcgtatcggcggcacggcggcggcattgggcggcgacggcacattgacccaagccctgcgccaagccctgccgtttgccctgaccgatgcgcaagaaaaagttgtttccgaaatctgccgcgatatggcgcaaacctacccgatgcaccgcctgctgcagggcgatgtcggcagcggcaaaaccattgtggctgctttgtttgctttgacggctatcgaatccggtgcgcaggtggctgtaatggcgcccactgaaatccttgccgaacagcattttattaaatttaaacaatggctcgaacctttgggcattgaagttgtccgcctttttggcagtttgcgtaaaaaagccaaagacgaagccaaagccaaactggctgacggcagcgtcaaaatcgccgtcggcacgcacgccctgttttcagacggcgtggcgtttcacaatttgggcttgaccattgtggacgaacagcaccgtttcggcgttgcccaacgcctcgccctcaaaaacaaagggcgcgaagtccatcagctgatgatgtccgccacgcccatcccgcgcacgcttgcgatgagttttttcgccgatttggacgtgtccgtcatcgacgaattgccgcccgggcgcacaccgattaaaacgcgcctcgtcaacaacgtccgccgcgccgaagtcgaaggcttcgtcctcggcacttgccgaaaagggcggcaggcgtattgggtctgcccattgattgaagaaagcgaaaccctgcaactgcaaaccgccgccgaaaccctcgcccggcttcagacggcattgcccgaactcaatatcggactggtacacgggcgcatgaaggccgccgaaaaggccgaagtgatggcgcggttttcttcgggggggctgaacgtcttggtcgccaccaccgtcatcgaagtcggcgtagatgtgcccaatgccgccctgatggtcatcgaacacgccgagcgcatgggcttggcgcagctgcaccaattacgcggacgggtagggcgcggcgcggcggaaagcgtgtgcgtcctcctgtttgccgaacccttgggcgaactcgccaaagcgcggctgaaagtcatctacgaacacaccgacggcttcgaaatcgcccgccaagacctcaatatccgcggcccgggcgagtttctcggcgcgcgccaaagcggcgtgcctatgctgcgtttcgccaaactcgaagaagacctgcaccttttggaacaggcgcgcgaaaccgcccctttgctgattgagcaaaaccccgaaatcgtcgaagcgcatttggcaaggtggctttccggcagggaagggtatttgggcgtgtga

SEQ ID NO: 67208 - DNA, 777 bp, Neisseria meningitidis
atgaccctcatccacccgaccgccgtcatcgaccccaaagccgaactcgactccagcgtcaaagtcggcgcgtacaccgtcatcggccccaacgtccaaatcggcgcgaataccgaaatcggcccgcacgccgtcatcaacggccacaccagcatcggcgaaaacaaccgcattttccaatttgccagcctcggcgaaatcccgcaggacaaaaaataccgcgacgagccgaccaagctgattatcggcaacggcaacaccatccgcgaattcaccacctttaatttaggcacggtaaccggcatcggcgaaacccgtatcggcgacgacaactggattatggcgtactgccacctcgcgcacgactgcgtggtcggcaaccacaccatcttcgccaacaacgcctcgcttgccggacacgttaccatcggcgactacgtcgttttgggcggctacacgctggttttccaattctgccacatcggcgactacgctatgaccgccttcgccgcaggcgtacacaaagacgtaccgccctactttatggcatcgggctaccgcgccgaaccggcggggctcaacagcgaaggcatgcgccgcaacggttttaccgcagaacagatttccgccgtcaaagacgtgtacaaaaccctctaccatcgcggcattccgtttgaagaggccaaggcagacatcctccgccgcgccgaaacccaagccgagcttgccgtattccgagactttttcacacaatcgacgcgcggcatcatccgctga

SEQ ID NO: 67209 - DNA, 1362 bp, Neisseria meningitidis
atgctgaaaaaagttttaatcgccaaccgaggcgaaatcgcattacgcgtactccgtgcctgccgcgaaatgggcattgccaccgtcgccgtgcattccgaggccgacaaagacagcctgcacgtcaaactcgccgacgaatccgtgtgcatcggccctgccgcttccgcgcaaagttatctgaacattcccgccatcattgccgccgccgaagtaagctgcgcggacgctgtccacccgggctacggcttccttgccgaaaacgccgatttcgccgaacaggtcgagcagtccggctttacctttatcggcccgaaacccgacaccatccgcctgatgggcgacaaagtctccgccaaacacgcgatgatagcggcaggcgtaccctgcgtccccggttctgacggcgcattgcccgacgacggcgaagaaatcctcaaaatcgccgataaagtcggttatcccgtcattatcaaagcctctggcggcggcggcggccgcggtatgcgcgtggtcgagaaaaaagaagacctcctccaatctgtcgaaatgaccaaagccgaagcaggcgcggcattcggcaacccgatggtttacatggaacgctatctgcaacgtccgcgccacgtcgaaatccaagtgattgccgacgaacatggcaacgccgtctaccttgccgaacgcgactgttcgctacaacgccgccaccaaaaagtcatcgaggaagcacccgctccgttcatcactgaaaaagaacgcgccaaaatcggcaacgcctgtgccgacgcctgcaaacgcatcggctatcgtggcgcaggtacgtttgaattcctgtacgaagacggcgaatttttctttatcgagatgaatacgcgcgttcaggttgagcatccggttaccgagctgattaccggcgtggacatcgtgcaggagcaactccgcatcgccgccggcctgcctttgcaatacaaacaaaaggatattcaagtcgaaggccacgcgtttgagtgccgtatcaacgccgaagacccgtacaacttcatccccagcccgggcccgattgaaagctgccacctgcccggtggcttcggtatccgcgtggacagccacatttaccaaggctaccgcatcccaccgtactacgacagcctgatcggcaaaatctgcgtacacggcaaaacgcgtgaacaggcaatggcgaaaatgcgcgtcgcactcgccgagctggcggtaaccggcatcaaaaccaatacgccgcttcaccgcgacctgttcgccgatgcgggtttccaaaaaggcggcgtcagcatccactatttggaacactggctggaagatcgcaaagccaaacaggacaagtaa

SEQ ID NO: 67210 - DNA, 1194 bp, Neisseria meningitidis; identical to SEQ ID NO: 42130

SEQ ID NO: 67211 - DNA, 168 bp, Neisseria meningitidis; identical to SEQ ID NO: 50106

SEQ ID NO: 67212 - DNA, 636 bp, Neisseria meningitidis
ttgaacatcaaatattcgggcatcgaaaacaggtttgaaaccgccatcctgaagaaaaacggcgtaagatacggcttcgtctccttcgcccccaaccttgccgccgtcaaactgaacgattatgccaaagttagaaaactgattaccaaaaccaaacagaaagccgacatcgtcattgtaatgttccacggcggcgcggaagggaaacaggcggaacacctgccgttcgataccgaaatcttctatggggaaaacaggggcaacgtcgtcgagtttgcacggcttgccgtcgattccggcgcggatgtcgtattcgggcaggggccgcacgttactcgcgccgtcgaactttaccgcgaccgcttcatctcctacagcggcggcaactttgccacctacggcgcaatcaacacctccggcatcagcggcatcgcccccatttttaaaattatcaccgacaaacaggggcggttcgtttccggcaacattatccccatcactcaaatcggcgataaaatccccaaaatcgaccccgagaaaaccgttatcgggcggattatttatctgaaccgcagcgatttccccaaggggaacgggctggatgtctcgcccgacggcagcatcacgcgccggtaa

SEQ ID NO: 67213 - DNA, 1311 bp, Neisseria meningitidis
atgtacgctaaaaaaggcggtttgggactggttaaaagccgccgtttcgcacctcttttcgctacgcagtttctcggcgcgttcaacgacaatgtgttcaaaaccgcgctgtttgtgatgattgggttttacggtttggggcaaaacggcttcctgcctgccggacagatgttgaacttgggcgcgttgctgtttattttgccgtatttcctgttttcctcgctgtcggggcagttgggtaacaaattcgacaaggccgttttggcgcgttgggtcaaggtgctggaaatgatcattatggcggtggcggcatacgggttttatatccggtctgccccgctgcttttggcgtgtctgttttgcatgggcgcgcaatcgacgctgttcgggccgctgaaatacgccatcctgcccgattatctcgacgacaaagagttgatgatgggcaacagcctgattgaatcgggtacgtttgtcgccatcctgttcggtcagattttgggaacggcggtggcaggtgtaccgccttatattgtcgggatactggttttgctggtcgccgtcggaggcacggtcggcagcctgtttatgccgtctgtacccgccaaggctgccgatacacaaattgagtggaatattgtccgtggcacaaaatccctgctgagtgaaacggtgcggcacaagcccgtttttaccgccattatcggtatttcgtggttttggtttgtcggcgcggtttataccacgcaactgccgacctttacccaaatccatctgggcggcaacgacaatgttttcaacctgatgcttgccctgttttccatcggtattgccgccggttcggtactgtgtgccaagttcagcagggaacggctgatgttggcttgggtaacggttggtgcgttgggtttgacggtttgcggcctggttttggtgtggctgacgcacggacaccgttttgaagggctgaacggcattttttggtttttatcgcaaggatgggcatatcccgtgatggcggtgatgacactgatcggctttttcggcggatttttctccgttccgctctatacttggctgcaaaccgccagtagcgagactttccgcgcccgcgccgttgccgccaacaatatcgttaacggtatttttatggtttccgccgccgttttgagcgcggtgttgctgtttttgtttgacagcatttccttgttgtatctgattgtcgctttgggcaatattccgttgtcggtatttttgattaagcgcgaaaggcggtttttaggcgcggcggcaatcaggaaaaaaccttga

SEQ ID NO: 67214 - DNA, 603 bp, Neisseria meningitidis; identical to SEQ ID NO: 42830

SEQ ID NO: 67215 - DNA, 636 bp, Neisseria meningitidis
atgattgtttccattgatgttgatgcacaaaaaacttttacgcctttgtgtcctaaagagctgcctgtaaacgaggggcatttgattgtcgaagaattgaatgcccaagccgctttggcggatttgcgcgtgatgacgaaagatgcgcatcatatggtagcgaaatggcttgtggataaccctgttgatatgttgaagccgacaggtttgcctgatgcggatttgacttgggtggctcatgcgatggtcggtacgcgcggctatgaattattggacggactgccttctgccaaagaatacgattattgcgtttggaaaggtgttgatcctgaattgcatccttacggcgcgtgttttcacgatattgaggaaaagctgagcacagggctgattgaatggctgcgttgtcaaaatacggatacggttattatcggtgggttagctacggattattgtgttaaaacaacggttttgcagttactcaaaggcggtcgttggcaggttgtcgtcaatgaagcggcttgtcggggtattgcgccggaaaccatcgaaacagcatggcaggaaatgcattctgccggggcaatcatcttaaaaaacgctgatgaaataaataaatatattaataatcaataa

SEQ ID NO: 67216 - DNA, 1083 bp, Neisseria meningitidis
atgtttttatggctcgcacatttcagcaactggttaaccggtctgaatatttttcaatacaccacattccgcgccgtcatggcggcgttgaccgccttagcgttttccctgatgttcggcccgtggacgatacgcaggctgaccgcgctcaaatgcgggcaggcagtgcgtaccgacggtccgcaaacccacctcgtcaaaaacggcacgccgacgatgggcggttcgctgattctgaccgccattaccgtgtccaccctgttgtggggcaactgggcaaacccgtatatctggattctcttgggcgtattgctcgccacgggcgcactcggtttttacgacgactggcgcaaagtcgtctataaagaccccaacggcgtgtccgccaaattcaaaatggtgtggcagtcaagcgttgccattatcgccggtttggcattgttttaccttgccgccaattccgccaacaatattttgattgtcccgttcttcaaacaaatcgccctgccgctgggcgtggtcggctttttggtgttgtcttacctgaccatcgtcggcacatccaatgccgtcaacctcaccgacggcttggacggccttgcgaccttccccgtcgtcctcgttgccgccggcctcgccatcttcgcctatgccagcggccactcacaatttgcccaatacctgcaattaccttacgttgccggcgcaaacgaagtggtgattttctgtaccgccatgtgcggcgcgtgcctcggtttcttgtggtttaacgcctatcccgcgcaagtctttatgggcgatgtcggtgcattggcattgggtgccgcgctcggtaccgtctccgtcatcgtccgccaagagtttgtcctcgtcattatgggcggattatttgtcgtagaagccgtatccgttatgcttcaggtcggctggtataagaaaaccaaaaaacgcatcttcctgatggcgcccatccatcaccactacgaacaaaaaggctggaaagaaacccaagtcgtcgtccgcttttggattattaccatcgtcttggtattgatcggtttgagtaccctcaaaatccgctga

SEQ ID NO: 67217 - DNA, 1116 bp, Neisseria meningitidis
atgaaagtaggtttcgtcggctggcgcggtatggtcggttcggttttgatgcagcgtatgaaagaagaaaacgacttcgcccacattcccgaagcgtttttctttaccacttccaacgtcggcggcgcagcccctgatttcggtcaggcggctaaaacattattggacgcgaacaacgttgccgagctggcaaaaatggacatcatcgttacctgccaaggcggcgactacaccaaatccgtcttccaagccctgcgcgacagcggctggaacggctactggattgacgcggcatcctcgctgcgtatgaaagacgacgcgattatcgtcctcgaccccgtcaaccgcaacgtcatcgacaacggcctcaaaaacggcgtgaaaaactacatcggcggcaactgtaccgtttccctgatgctgatggctttgggcggcctgttccaaaacgatttggtcgaatgggcaaccagcatgacctaccaagccgcttccggcgcaggcgcgaaaaacatgcgcgaactcatcagcggcatgggcacgattcacgcccaagtagctgacgagcttgccgatccttccagcgcgattctcgacatcgaccgcaaagtgtccgatttcctacgcagcgaagactatccgaaagccaacttcggcgtaccgctcgccggcagcctgattccgtggattgacgtggatttgggcaacggccagtccaaagaagaatggaaaggcggcgtggaaaccaacaaaatcctcggtcgcagcgacaatccgactgtaatcgacggcttgtgcgtccgcatcggctctatgcgctgccacagccaagccatcactctgaagctgaaaaaagacctgcctgtttccgaaatcgaaacgattttggcaggcacgaatgactgggtgaaagtcatccccaacgaaaaagaagccagcatccacgagctgactcctgccaaagttaccggcacgctgtccgtccctgtcggacgcatccgcaaactgggcatgggcggcgaatacatcagcgcgttcaccgtcggcgaccaacttttgtggggcgcggccgaacctctgcgccgcgtgttgcgcatcgtgttgggcagcctgtaa

SEQ ID NO: 67218 - DNA, 696 bp, Neisseria meningitidis
atgaaagcgatgatactggcggcaggacgcggcgagcgtatgcgtcctttgaccgataccactccgaagccgctgctcgatgtggcgggtaagcctctaatcggttggcacttatgccgtctgaagcaggcagggtttaccgaaatcgtcatcaaccacgcttggctgggtcggcagatagaagaggctttgggcgacggctcggcttatggcgtgaacatcgcctattcgcccgaacctgaaggcggcttagaaaccgcaggcggtatcgcacgggcattgccgctgttgggtgggcagccgtttttggtggtcaacggcgacgtgctgaccgacatcgattttaccgccgcgtttcagacggcatcgtccctgccggaacatatttccgcccatctgtggctggtggaaaatccgccgcacaaccctgacggcgatttttccctgctgccggacggcagcgtacagtcggaagtatccggcggcaacggattgacatttagcggcgtgggtatttaccgtcctgaaatgtttgacggaatcgaagcgggcagtgtggcgaaactcgcgcccgtattgcggggcgaaatgcggcaaaaccgcgtgagcggacagaagcatacgggcttgtggctggatgtcggcacggtatgccgtctgaaagaggctcaagcccttgcaggggcttggaagtga

SEQ ID NO: 67219 - DNA, 618 bp, Neisseria meningitidis
atgtccgcttatcgaaaaggcaacatctttatcatttcggccgcttccggcacgggcaaaaccacgctggtgtcgcggctgttggcaaaccataacggtttgcgcgtttccgtatcgcatacgacgcgcccgccgcgtgaaggcgaagcaaacggcgtacattatcactttgtttccaaagaagagtttgagtcgcttatcgcgcaggaagcttttttggaatacgcagacgtattcggcaactattacggcacaagcgcggagggcgtgaatgcgttggcggcggcaggttatgacgtgattttggaaatcgacgttcagggcgcggcgcaggttcgagatgcgctgcccgaagccgtcggtatctttatcctgccgccttctttcgatgtgcttgccgcgcgtctcaacggacgcgggacggacagtcgggaagttatccaaaggaggcttgcgaaggcaaggcatgaaatcgaacagtccgtattgttcgactttgtcgtggtcaatgacgacttggcgcgggcggaggaggatttggttcatattgtgaatgcctgccgtctgaaaaggtcgcggcaactgggatttattgcagatttgttggaaaattcctag

SEQ ID NO: 67220 - DNA, 993 bp, Neisseria meningitidis
atgaaacagaaaatttttgtcctttataccggcggcaccatcggcatgacgcaaagcagcgaaggcctgcgccccgataccgcgttggtcgggcaggcactcgcgccgttttcaaacggcatggatttcgattggcacgtttgtgggccgctgattgattcttccgccgtccaactgcaaaactggtgcgcttggctggacatcattgccgccgcgctgccgcagtacgacggcgttttggtgctgcacggcacggacacgctcgcctataccgccaatctgttcgccctcgccctgcagggtttggacaagccaatcgtcctgaccggttcccaatggccgtacaacgccgtgggcagcgacgcgccgcgcaatctggcgactgccgttgccgcattcccactcggattgaagcagacgcttattgcctttgacggcaaactttatcccgccgtcggcagcagcaaagtcagcaccgaaaccgccgccggtttcgacaatccgcatttcggcgcactggcggagtgggacgaaacccagggctggcacaatgtccgcatcccgaatcaggacgcggcagatgtttcagacggcctcaaaatccattatcccgacccgcaggcgaaaatcgccgtccgcacgcttatccccggctttgccgtccaagaacttgcggacggactcggacagcttcccgcccaagcccttatcctgcaaagctacggacacggcaacacgcccgcagacgaaggctttatccgcgccgtgcaagacttcacgcagcaaggcaggctgctgctcaacatcagccaagtccgacaaggcaaaaccgccgccgtttacgcgcaaggcaatgcgttccgcaactcgggcatcatcaacggcggcaaatgcaacttcgaaaccgccaccgcactcatgaccctcgccgtatcgcaaggctggggtaaggaagaggtggaaaaagagttggtaagactgcaattattgtga

SEQ ID NO: 67221 - DNA, 2586 bp, Neisseria meningitidis
atgttagaagcctatcgtaaagccgccgccgagcgcgccgccctcggcattcccgccctccctttgaacgcgcagcaaaccgccgatttggttgagctgctgaaaagcccgcccgcaggcgaaggcgagttcttgatcgaactgcttgcccaccgtgttccgcccggtgtggacgatgccgccaaagtcaaagcctcattcctggctgccgttgccgaaggcagcgcgtccagcccgctgatctcccccgaatatgcgaccgaactcttaggtacgatgctcggcggttacaatatccacgccttaatcgaactcttggacgacgacaaactcgcgcccattgccgccaaaggcttgaaacatacgcttctgatgttcgattccttccacgacgttcaggaaaaagccgaaaaaggcaacaaatacgcgcaagaagttttgcaatcttgggcagatgccgaatggttcgcctcacgcgccaaagttcccgaaaaaatcaccgttaccgttttcaaagttgacggcgaaaccaatacagacgacctctcccccgcgcccgacgcgtggagtcgtcccgatattccgctgcacgcgctggcaatgctgaaaaacccgcgcgacggcatcacgcccgacaaaccgggcgaagtcggtccgattaaattgttggaagaactcaaagccaaaggccatccggttgcttacgtcggcgacgtggtcggtactggttcttcacgcaaatccgcgaccaactccgtcatttggcataccggcgaagacattccgttcgtgccgaacaaacgcttcggcggcgtatgtttgggcggcaaaatcgcgccgattttcttcaatacccaagaagattccggcgcgctgccgattgaagtcgatgtatctgctctaaaaatgggcgatgtcgtcgatatcctgccttatgaaggcaaaatcgtgaaaaacggcgagactgttgccgagtttgaattgaaatcacaagtattgctggacgaagtgcaagccggcggccgtatcaacctgattatcggccgaggtctgaccgccaaagcgcgcgaagccctgaaactgcctgcctctactgcattccgcctgccgcaagcgcctgccgaaagcaaagccggtttcaccttggcgcaaaaaatggtcggccgcgcctgcggtctgcccgaaggacaaggcgtgcgcccgggtacttactgcgaaccgcgtatgacgacggtcggctcgcaagacacgaccggcccgatgacccgcgacgagttgaaagacttggcttgtttgggcttctccgccgatatggtgatgcagtctttctgccacaccgccgcctatccgaaacctgtcgatgtaaaaacccataaagaactgcccgcctttatttccacccgtggcggcgtgtcactgcgtccgggcgacggcgtcatccactcgtggctcaaccgcctgctgctgcccgataccgtcggcaccggcggcgacagccatacccgtttccccatcggtatttccttccccgccggctccggcttggttgcctttgccgccgcaacgggcgtaatgccgctcgatatgcccgagtctgtattggtacgcttcagcggcaagctgcaaccgggcgtaaccctgcgcgatttggtgaacgccatcccgctgtacgcaattaaacaaggtttgctgaccgttgccaaagccggtaagaaaaacatcttctctggccgcatcctcgaaatcgaaggcctgcccgatttgaaagtggaacaagcctttgaattgaccgacgcatccgccgaacgctccgccgccggctgtaccgtgaagctcaataaagagccgattatcgagtacatgaaatccaacgtcgtgttgatgaaaaacatgattgccaacggctatcaagacccgcgcactttggaacgccgcatcaaagccatggaaaaatggctggcaaatcccgagttgctcgaagcggataaagatgccgaatacgccgccgtgattgaaatcaacatggacgacatcaaagagccgattatcgcctgcccgaacgacccggacgacgtgtgcttcatgtccgaacgctccggcaccaaaatcgacgaagtattcatcggttcgtgtatgaccaacatcggccacttccgcgccgcctccaaacttttggaaggcaaggcagacacccccgtccgcctgtggattgcgccgccgaccaaaatggacgcgaaacaattgtccgacgaaggacactacggcgtactcggacgtgccggcgcgcgtatggaaatgccgggttgctccttatgtatgggtaatcaggcgcaagtacgcgaaggtgcgaccgttatgtccacctccacccgcaacttcccgaaccgtttgggtaaaaacacctttgtttacctcggttcggcggaattggcagcgatttgctccaaactgggtaaaatcccgaccgttgaagaatatcaagccaatatcggcatcatcaacgaacagggcgataaaatctaccgctatatgaacttcaacgaaatcgacagctacaacgaagtagccgagaccgtgaacgtttaa

SEQ ID NO: 67222 - DNA, 297 bp, Neisseria meningitidis
  misc_feature 6, 7, 8, 9, 10: 'n' is a, c, g or t
gtgtgnnnnntcaaattcggtgtttctgaggaacagatcgcggcaggacgggcggatgcggcgtttcagcggctgatggcgtatgagtgtcggcgtgcgttccgtatgctgaaggcgggttcgcctttggcaagggaactgaatgggcgtatcggtttggaactccgtatgattgtgttgggggcgcagttgattttgcagaaactggacgcgtgccgatacgatgtgtttgcacaacgccccgttttggataagaaggattggttgattatgctgaaaaaggcgttgtggaaatga

SEQ ID NO: 67223 - DNA, 495 bp, Neisseria meningitidis
atgaaaaaaaccctgttggcaattattgccgtttccgccttaagtgcctgccggcaggcggaagaggggccgccgcctttaccccggcagattagcgaccgttcggtcggacactattgcagtatgaacctgaccgaacacaacggccccaaagcccagattttcttgaacggcaaacccgatcagcccgtttggttctccaccatcaagcagatgttcggctataccaagctgcccgaagagcctaaaggcatccgcgtgatttacgttaccgatatgggtaatgttaccgattggacgaatcccaatgccgacacggagtggatggatgcgaaaaaagccttttacgtcatcgacagcggctttatcggcggtatgggtgcggaagacgcgctgccgttcggcaacaaagagcaggctgagaaatttgcaaaggataaaggcggtaaggttgtcggtttcgacgatatgcctgatacctatattttcaaataa

SEQ ID NO: 67224 - DNA, 618 bp, Neisseria meningitidis
atgccctatacggaagatatgcgcccgggcgataccgctaatccttatggcgcatccaaagcgatggtggaacggatgttaaccgacatccaaaaggccgatccgcgttggagcgtgattttgttgcgctatttcaacccgattggggcgcacgaaagcggcttgatcggcgaacagcccaacggtattcccaacaaccttttgccctatatctgccaagtggcttcgggcaggctgccgcaactgtcggtattcggcggcgattatccgacccccgacggtacgggaatgcgcgactacattcatgtgatggatttggcagaagggcatatcgcggcaatgaaggcaaaaggcggcgttgccggcgtacatttgttcaacttgggttcggggcgcgcctattccgttttggaaatcatccgtgcctttgaagcggcttcgggtttaaccattccatttgaaatcaaaccgcgccgcgccggtgattgggcgtgttcctttgccgacccgtcccataccaaacaacaaaccggctgggaaaccaaacgcggcttgcagcaaatgatggaagattcgtggcgttgggtcagccgcaaccccaacggatatggggattaa

SEQ ID NO: 67225 - DNA, 273 bp, Neisseria meningitidis
atgaagaaaaccggcaaatatcttatctatgctgcggcatttaccgcattctgctttgccttccaagaaaaccgttctgaagccaaacagcctgacatcactttatccgcatccctgtgcgaaaaattcaacatactgaacgccaaagatatggatgcagaacaagtctccctttccaaagaatgcgacatcatcgagtcttcacacgactgggaaaaagagtacggcaacttgaacgaacaggaaatgctcgccggcatcgtctatgaataa

SEQ ID NO: 67226 - DNA, 729 bp, Neisseria meningitidis
atggcaggccatagcaagtgggcaaatatccagcataaaaaagcccgtcaggatgccaaacgcggcaaaatctttacccgtttaatcaaagaaatcaccgttgcggcgcgtatgggcggcggcgaccccggttcaaatccgcgcctgcgcctggctttggaaaaagcagccgaaaacaatatgcccaaagacaatgtgcaacgcgccatcgacaaaggcacgggcaacttggaaggcgtggaatacatcgagttgcgctacgaaggctacggcatcggcggcgcggctttgatggtggactgcctgaccgacaacaaaacccgcaccgttgcggacgtacgccacgcgtttaccaaaaacggcggcaacttgggtaccgacggctgcgtggcgttcaacttcgtgcatcagggctatttggtattcgaacccggcgttgacgaagacgcgctgatggaagcggctttggaagccggtgcggaagacgtggttaccaacgacgacggttccatcgaagtcattaccgcgccaaacgattgggcgggcgtaaaatccgctttggaggcggcaggttacaaatccgttgacggcgacgttacgatgcgcgcccaaaacgaaaccgaactctccggcgacgatgccgtcaaaatgcaaaaactgattgacgcgctggaagacttggacgacgtgcaagacgtttacacttccgccgtattgaatctggactga

SEQ ID NO: 67227 - DNA, 669 bp, Neisseria meningitidis
ttggtcagaacggcagacggctacaaagccatcgcccatattcaagccggagaccgcgtcctttccaaggacgaggcaagcggagaaacgggatacaaacctgttaccgcccaatacggcaatccgtatcgggaaaccgtttacattgaaatttcagacggcatcggtaacagccaaaccctgatttccaaccgcatccatccgttttacagtcaaggaaaatggatacaggcaggtcgtctgaaaaaaggcgacaccctgctttccgaaagcggtgcaaaacagacagttcaaaacattaccctcaaacagcagccgctcaaagcctacaatctgaccgttgccgattggcatacttacttcgtcaagggtaatcaggcggaaacggaaggggtttgggttcataatgcgtgtccgcccaaaagagctcccgaataccatgcaggaactgtatctgaatctaattttttaaatgcagctgagaaatggctaggggaaaactataagtcatatccaaatggtcgatatgtatcacaagatggaatgcgacaggtacgatatggtcatcatgaaacaaattcatctacgcatcatggtcattttgaatcatatgacaaacctaatggacgtgtaatagaaaatagtgcggtaacaattattcgggattga

SEQ ID NO: 67228 - DNA, 318 bp, Neisseria meningitidis
atggtaattatagaccgtatcctgaccgaagccttcgccgaagacataagtatccgaaccgctgccgccctccaagtaatcattgcctgcaccgccgatcagagtgtcgttaccgtcttcgccgttcaaatgatcattgccttcgccaccattcagtacatcgttaccattatagccgtacagggcgtcgttgccttctcctccattgagcgtatcattgccattgccactgtagatactgtcgttgcctgcatcaccattcagcaggtcattcccgtcggcaccgtacagatagtcatcgcccaatccgccatttaa

SEQ ID NO: 67229 - DNA, 627 bp, Neisseria meningitidis
atggctgatatgaaacgcttgaaacatttgatgttttcaccctttatcgacaacaacccgattgccttgcaggttttgggtatttgttcggctttggcggttaccaccaaacttcagacggccatcgtgatgggtatttccgtagctttggtaaccggtttttccagcttcttcatttcgctggtacgcaactacatccccaacagcatccgtattatcgtgcaaatggcgattatcgcgtcgctggttacgctggtcgaccaactcttgcaggcatttgcctacgaattgtccaaacagctttccgtattcgtcggtctgattattaccaactgtatcgtgatgggccgcgccgaagcatttgcgatgaaagagccgccgctggaaagcctgatcgacggcatcggcaacggcgcgggctacgggatgatgctgcttgtcgtcgccaccgtccgcgaactgattggctcgggcaaactcttgggctacaccgttttccaaaccgtgcaggacggcggctggtatcagaccaacggcttgttcctgctcgcccccagcgcgttcttcatcatcggctttttgatttggggactgcgtacctggaaacccgaacaggcggaggaataa

SEQ ID NO: 67230 - DNA, 936 bp, Neisseria meningitidis; identical to SEQ ID NO: 45520

SEQ ID NO: 67231 - DNA, 450 bp, Neisseria meningitidis
atgagtatttatgccgtcgcgcacatcgtccacctgtattgcgccatcgcctttgtcggcggcgtgttttttgaagtgctggttttgtccgtcctgcatacgggacgggtgtcgtgcgaggcgcggcgcgaagtggaaaaggcaatgtcttaccgcgccgtcagggtgatgccgtttgtggtcggactgctgttcgccagcggcatcgtgatggcggcaaaccgctatctttctatattgggcgaaccgtttgccacttccttcggtacgatgctgacgctgaaaatcctgttggcgttcagcgtgttggcgcacttcgccatcgccgtcgtcaaaatggcgcgttccacactgaccgtcggctggtcgaaatacatacacaccgtcgtctttacccatatgctgctgattgtctttttggcaaaagcgatgttttatatcagctggtaa

SEQ ID NO: 67232 - DNA, 633 bp, Neisseria meningitidis; identical to SEQ ID NO: 38220

SEQ ID NO: 67233 - DNA, 471 bp, Neisseria meningitidis; identical to SEQ ID NO: 39685

SEQ ID NO: 67234 - DNA, 522 bp, Neisseria meningitidis
atgtcctgtttttcaatcaaacgtatgtccgcgtttcgggcgcggataacggcgttttttgccgcctttgtctttttgacggcggcactgcccgcttatgcggagcgtctgcctgattttctggcgaaaatacagccttcggaaattgttccgggtgcggaccgttacagcaagccggaaggtaagcctatggttgcccgcgtttacaaaggcgatgagcagttgggcttggtctatatcacgaccgatgcggtcaatacgcgcggttattcgagcaaaccgattgatacgctgatggcgttggctaaagacggtacgatagccggagcgaaattggttgatcaccatgagtcgattatgctgatcggtatcccgcatttgcccgcgcccgggcgggcgatacgctcaaactggcttccggcgtatatcaaaccaaacttcacatcgacaaaccgattacgattgaagggcctgccgaccgttctgcaaccatcgaaggagacaggagcgggcgtaccatag

SEQ ID NO: 67235 - DNA, 1638 bp, Neisseria meningitidis
atggattttaaaagactcacggcgtttttcgccatcgcgctggtgattatgatcggctgggaaaagatgttccccactccgaagcccgtccccgcgccccaacaggcaacacaacaacaggccgtaaccgcttccgccgaagccgcgctcgcgcccgcaacgccgattaccgtaacgaccgacacggttcaagccgtcattgacgaaaaaagcggcgacctgcgtcagctgaccctcttgcaatacaaagcaaccggcgacgaacacaaacctttcgtcctgtttaacgacggcaaggaatacacctacgttgcccaatccgaacttttggacgcgcagggcaacaacattctaaaaggcatcggctttagcgcaccgaaaaaacagtacagcttggaaggcgacaaagttgaagtccgcctgagcgcgcctgaaacacgcggtctgaaaatcgacaaagtttatactttcaccaaaggcagctatctggtcaacgtccgcttcgacatcgccaacggcagcggtcaaaccgccaacctgagcgcggactaccgcatcgtccgcgaccacagcgaacccgagggtcaaggctactttacccactcttacgtcggccctgttgtttatacccctgaaggcaacttccaaaaagtcagcttctccgacttggacgacgatgccaaatccggcaaatccgaggccgaatacatccgcaaaaccccgaccggctggctcggcatgattgaacaccacttcatgtccacctggatcctccaacccaaaggcggacaaagcgtttgcgccgcaggcgactgccgtatcgacatcaaacgtcgcaacgacaagctgtacagcaccagcgtcagcgtgcctttagccgctatccaaaacggcgcgaaatccgaagcctccatcaacctctacgccggcccgcagaccacatccgtcatcgcaaacatcgccgacaacctgcaactggcaaaagactacggcaaagtacactggttcgcttccccactcttctggctcctgaaccaactgcacaacatcatcggcaactggggctgggcaatcgtcgttttgaccatcatcgtcaaagccgtactgtatccattgaccaacgcctcttaccgctctatggcaaaaatgcgtgccgccgcacctaaattgcaagccatcaaagagaaatacggcgacgaccgtatggcgcaacaacaagcgatgatgcagctttacaaagacgaaaaaatcaacccgctgggcggctgtctgcctatgttgttgcaaatccccgtcttcatcggcttgtactgggcattgttcgcctccgtagaattgcgtcaggcaccttggctgggctggattaccgacctcagccgttccgacccctactacatcctgcccatcattatggcggcaacgatgttcgcccaaacctatctgaacccgccgccgaccgacccgatgcaggcgaaaatgatgaaaatcatgccgttggttttctccgtcatgttcttcttcttccctgccggtctggtattgtactgggtagtcaacaacctcctgaccatcgcccagcaatggcacatcaaccgcagcatcgaaaaacaacgcacccaaggcgaagtcgtttcctaa

SEQ ID NO: 67236 - DNA, 822 bp, Neisseria meningitidis
atggctgttttaattaccggtgcttcggcaggattcggcgaagcgatgtgccgcgcgtttgtcggggcgggataccgcgttatcggtgcggcgcgccgcgcggacaggcttcaggccttggcggatgaattgggtgctttgttttaccctttggaaatggacgtgtcgcgccgcgaatcggtggaaaacgccttaaacggcatccccgatgaattttccgacatcgactgcctcatcaacaatgccgggctggctttgggtttggacacggcggacaaggcggattttggagattgggaaacaatgattcaaaccaatgttttgggtttgacgtttctgacgcgcaagattttgccgcaaatggtggaacgtggcggcggctatgtgatgaatttgggttcgattgcgggtaattatgcttatgccggcagcaacgtttacggggcgaccaaggcgtttgtgcgccagttcagcctgaatttgcgcgcggagttggcggataagaacatccgcgttaccaatatcgagccgggtttgtgcggcaatacggagttttccaacgtgcgcttcaaaggcgatgacgagaaggcagcaggcgtgtatgagggtgtggaatttatccgccccgaagatattgcggaaaccgcattgtggctgtaccgccggccggcgcatatgaatgtgaacacgattgaaattatgcccgtggcgcagacttttgcaggaatgaaagtgataaaaaaagccgtgcccgaagtgcgggaagactttgaaaaacagagtatgtcgctgttttcccgcatcaggtcctggttcaaatga

SEQ ID NO: 67237 - DNA, 915 bp, Neisseria meningitidis
atgcagaattttggcaaagtggctgtattgatgggcggtttttccagcgaacgagaaatctcgctggacagcggcaccgccattttgaatgctttaaaaagcaaaggcatagacgcatacgctttcgatcctaaagaaaccccattgtctgaattgaaggcacaaggttttcagacggcattcaacatccttcacggtacttacggcgaagacggggcggttcagggtgcattggaactgttgggcattccctataccggcagcggtgtcgccgcatccgccatcggcatggacaaataccgctgcaaactgatttggcaggcattgggattgcccgttcccgagttcgccgtcctgcacgacgacactgatttcgatgccgtcgaagaaaaattgggcctgccgatgtttgtgaaaccggcggccgaaggcagcagcgtaggcgtggtaaaagtcaaaggaaaaggccgtctgaaaagcgtttacgaagaattgaaacaccttcagggcgaaatcattgccgaacgttttatcggcggcggcgaatattcctgccccgtcctgaacggcaaagggctgcccggcatacacatcattcccgcaaccgagttttacgactacgaagccaagtacaaccgagacgacaccatttatcaatgtccttcggaagatttgaccgaagccgaagaaagcctgatgcgcgaactggcggttcgcggcgcgcaggcaatcggtgcggaaagctgcgtgcgcgtcgatttcctcaaagataccgacggcaaactctatctgttggaaatcaacaccctgcccggtatgacgagccatagtttagtaccgaaatccgctgccgttacgggcgtgggttttgccgatttatgtattgaaattttgaagaccgcacatgtgggataa

SEQ ID NO: 67238 - DNA, 459 bp, Neisseria meningitidis
atgaaaacccaaatcagccttgctgctgccgccatcacactgctcctttccgcctgcggaggcagcggaataccttcccaacccaaaggcgaaatttccgaaaaccgcaccgccgcgttcaaatctatgatgcccgacttctcgcgtatgggcaaaatggtcaaaggcgaagaaccttacgatgtcgaaaaattcaaacaggctgccgcggcgtttgccgaaagcagcaagaaaccgttcacactttttgagtccgatccgcaaggcaacggccgcgccctgcccgccgtttggtcggatggtgcaaaatttgaagccgaaaaaacaaaattcgccgccgccgtcgaaaaactcaacgccgccgcccaaaccggcaaactggacgaaatcaaagccgcctacggcgaaaccggcgcaagctgcaaatcctgccacgacagtttccgcgcacccgaataa

SEQ ID NO: 67239 - DNA, 270 bp, Neisseria meningitidis; identical to SEQ ID NO: 40667

SEQ ID NO: 67240 - DNA, 918 bp, Neisseria meningitidis
atgagcatcatccactacctctcgctgcacgtcgaatccgcgcgcaccgcgctcaaacagcttctgcgccaacctttcggcacactgcttaccctcataatgctcgccgtcgccatgaccctgccgctgtttatgtatttgggcatccaaagcgggcaaagcgtgttgggcaaactcaatgagtcgccgcaaatcaccgtctatatggaaaccgccgccgcacaaagcgacagcgataccgtccgcagcctgctggcgcgcgacaaacggctcgacaacatccgcttcatcggcaaagaagacggtttggaagaattacagtccaatctcgaccaaaatctgatttccatgcttgacggcaaccccctgccggatgtctttatcgttacccccgacccggcaaccacgcccgcccaaatgcaggcaatctaccgagacattaccaaactgcctatggtcgaatccgccaacatggatacggaatgggtacagacactgtaccaaatcaacgaattcatccgtaaaatcttatggtttctttccctgacgctggggatggcgttcgtccttgtcgcgcacaacaccatccgactgcaaatcctcagccgaaaagaagaaatcgaaatcaccaaactcttgggcgcgcccgcgtcgtttatccgccgccccttcctttatcaagccatgtggcagagcatcctttccgccgccgtcagcttggggctttgcggttggctgctctctgccgtgcgcccattggtcgatgccattttcaaaccctacggacttaatatcggctggcggttcttctacgctggcgaactcgggctggtgttcggcttcgtcatcgcgttgggcgtattcggcgcgtggcttgccaccacccagcacctgctcggcttcaaagccaaaaaataa

SEQ ID NO: 67241 - DNA, 1272 bp, Neisseria meningitidis
atgaaactgctggttatcggtaatggcggtcgcgaacacgcgctggcttggaaattggcgcagtcgcctaaagtggaaacagtatttgttgcgtctggtaatgccggtacagcgattgaacccaagctgcaaaacatcgacttgactgcgcatcaggatttgattgaattctgtcgtaaagaaaatattgtttttaccgtcgtcggccctgaagcgcctttggcggcaggtgttgtggatgatttccgtgctgcaggactaaaaatattcggtccgacacaatatgcggcgcagttggaaagttccaaagatttcgccaaagcatttatggcgaaatacaatattccgaccgcgcaatatcaaacctttgaaaacgccgatgccgcacatgattacgtcaatcagaaaggtgcgcctatcgttatcaaagccgatggtttggcggcaggtaaaggcgtgattgtggcgatgactttggatgaagcgcatgctgcgattgatgatatgctgctggacaacaaaatgggcaatgccagcgcgcgtattgtgattgaagatttcctgcaaggcgaagaagcgagttttatcgtcatggttgatggcaataatgtactgcctatggcaaccagccaagaccacaagcgtcttttagacggcgacaaaggtctgaatacgggcggtatgggtgcgtacagccctgcgcctgtggtaacgcctgttgtgtacgaacgcgcgatgaatgaaattattttgccgaccgtagcagggatgaaagcggaggggcatgagttcaccggtttcctgtacgcaggtttgatgattgatcaaagcggtgcaccccatacgattgagtttaactgccgtttcggcgatcctgaaacccagccgattatgagccgactgaacagcgacttatcggatttggttgaagcggcaatagacggcaaactcgatagcgtaaccgcggaatggagcccgcaaactgccgtgggcgtggtactggcggcgcaaaattaccccgaaacgcccaaaaaaggcgatgttatttccggtctggatgctgccaaccaagtaggcaaagttttccatgcaggtacaacggcaaacgagaaaggtgacgtattgaccaacggcggacgcgtattgtgtgttgtgggattgggcgataatgtggcgcaagcgaaagctaaggcatatggcgcgttggaaaaaatcagtttcgacgggatgcaataccgtaaagacattgccgataaagcgattaaccgttaa

SEQ ID NO: 67242 - DNA, 1374 bp, Neisseria meningitidis
atgagtaatccattttcctctttaggtttgggtacggaactcgtttccgcactgaccgcgcaaggttacgaaaacccgacgcccatccaagccgccgccattcccaaagcactcgccggtcatgatttgctagccgccgcgcaaaccggcacaggcaaaaccgccgcctttatgctgcccagtctggaacgcctcaaacgttacgccaccgccagcacctcgcccgcgatgcaccccgtgcgtatgctcgtcctcacccccacgcgcgaacttgccgaccaaatcgaccaaaacgtgcagggctacatcaaaaacctgccgctgcgccacaccgtcttgttcggcggtatgaatatggacaaacagaccgccgacctgcgtgccggctgcgaaatcgtcgtcgccaccgtcggacggctgctcgaccacgtgaaacagaaaaacatccatttgaacaaagtcgaaatcgtcgttttggacgaagccgaccgtatgctggatatgggttttatcgacgacatccgcaaaatcatgcagatgctgccccgccaacgccaaaccctgctcttttccgccaccttctccgccccgatacgcaaactggcgcaagacttcatgaacgcgcccgaaaccgtcgaagtcgccgcgcaaaacaccaccaacgccaacgtcgagcagcacatcatcgccgtcgataccattcagaagcgcaacctgctcgaacggctgattgtcgatttgcatatgaaccaggtcatcgtgttctgcaaaaccaaacaaagcgtcgaccgcgtaacgcgcgaactggtgcgccgcaacctgtccgcacaggcgatacacggcgaccgttcccaacaaagccggctcgaaacactcaacgccttcaaagacggcaacctgcgcgtcctcgtcgccaccgatatcgccgcgcgggggctggatattgccgaactgcccttcgtcatcaattacgaaatgcccgcccagcccgaagactacgtccaccgcatcgggcgcacggggcgcgcgggcgcggacggcgtggcgatttccctgatggacgaatccgaacagaaaatgtttgaatccattaaagagctgaccggcaacaagctgctcatcgagcgcatcgagggcttcgagccgcaatggtgggaacagggcggcgcaaaaccggaaaaacccgaaatgcgcgaaccaagacaacgcaaccgctacgaatccgccaaagcgcaacgcgaaaaaaacacccggccggaaaatgcggcaaacgatgcgggcgcggcttgcggaaaaattgccggacgcagccgccgaagccgccgggaacaccggacgtgcgccctgctccaaccgcgttacggcgtaaaatag

SEQ ID NO: 67243 - DNA, 693 bp, Neisseria meningitidis; identical to SEQ ID NO: 62314

SEQ ID NO: 67244 - DNA, 789 bp, Neisseria meningitidis
atggaagatttatatataatactcgctttgggtttggttgcgatgattgccggatttatcgatgcgattgcgggcgggggtggtttgattacgctgcccgcactcttgttggcaggtattcctcccgtgtcggcaattgccaccaacaagctgcaagcagccgctgctacgttttcagctacggtttcttttgcacgcaaaggtttgattgattggaagaaaggtctcccgattgccgcagcatcgtttgtaggcggcgtggctggtgcattatcggtcagcttggtttccaaagatattctgctggcggtcgtgccggttttgttgatatttgtcgcactgtattttgtgttttcgcccaagctcgacggcagtaaggaaggcaaagccagaatgtctttttttctgttcgggctgacggtcgcaccgcttttgggtttttacgacggtgtgttcggaccgggtgtcggctcgttttttctgattgcctttattgttttgctcggctgcaagctgttgaacgcgatgtcttacaccaaattggcgaacgttgcctgcaatcttggttcgctatcggtattcctgctgcacggttcgattattttcccgattgcggcaacgatggcggtcggtgcgtttgtcggtgcgaatttaggtgcgagatttgccgtccgcttcggttcgaagctgattaagccgctgctgattgtcatcagcatttcgatggctgtgaaattgttgatagacgagagaaatccgctgtatcagatgattgtttcgatgttttaa

SEQ ID NO: 67245 - DNA, 174 bp, Neisseria meningitidis
atgagtttcggacgacgtaatacggattggcaggcttggggacaacaccgcaggcgtgcgacgaagtttatggtgaagcgaaaccgcgagcaggaagtcgccgaatatcaggcgcagtttgaagataaggacggcaaaggtcgtctgaaaacggaaggaaacaaagatgaatga

SEQ ID NO: 67246 - DNA, 2439 bp, Neisseria meningitidis
atgacagaaaaatcccataaaaaaacagcaaaaggcagggcgggaagcccgtccccaacgtccgcacgcaacaagaaagccgacaacggcgcacggggcaataaagtttccgagcggctcaaggcggtcaaagagttgcagaaaaccgaaaccaaaaaggcgcgtcccgaacatgtcgtcaaccttatcggcgacgcactgtggctgatgggtttggcggcaaccttgtatttggcgatttccctgattagtttcgatatgggcgatccgtcttggtcgcacagttcgccggttgtggaagatgtcgccaattggggcggactgttcggcgcgtatgttgccgatgtcggctattatcttttcggctggtcgttctggtggtggatagcggctgcctgcgtcatgctgtataaaaattttcgtctgcacgcaaaacagacggaaaacgaggcatacaaccacaaaatcgctgccgccgcgctgtttgtcctgacggtcttcagccccgtcttggagtattttgtgctgggcggaaaatatgccgactccctgcctgtcggagcaggcggtatggtcggcatacgcgtcggcgcagtgtttgcgtggctgctggggaaatcgggcagcctgctgattatcttggttgttctgctgttgtcgttgtccctgctggtgcagatttcatggctggaatttttgaacggtgcgggcagggcggttcaaaaccgtctgagtgccttatccggcaaggtcatggctttgggaaaacgccggccgaataccaaaacagacggtgtcgatacccaaaatacacggcgcatggtaaaagaagccaagaatattacggccaaacccgttgccttgcccgaaggcagcagcagcaaccgcaaatccgtcgcggtttccgtcgcgccgccgcccaaaattcaggtttctctgtttgaagatgacgaacctcggcaggcgggcgaataccacaagcctacattgaacctattgcggattcctgacagcgaacccgtcagcatcaatcccgccgaattggagcgcactgccgaactgatcgaatccaagctggcagaattcggcatcggcgtacaagtcgtatccgccacatccggccccgtcatcacgcgctacgaaatcgaacccgcgcaaggtgttaaaggcagccaaattgttgccttgtcgaaagatttggcacgctctatgtcgctgcagtccgtgcgtatcgtcgaaaccatcgcaggtaaaaacacgatgggcatcgagttgcccaacgacaaacgccaagacgtgatgttgagcgaaatcttgttctcgcccgtgtttgccggagccaaatccaagctgaccgtcgcgctgggcaaagacattgccggtacccccgttgtcggcgacttggcgaaaatgccgcaccttttggtcgccggtatgactggttcgggcaagtccgtcggcgtgaacggcatgattatgtctatgcttttcaaagctacgcccgacgaagtccgcttcattatgatagacccgaaaatgctcgagttgagcatttacgacggcattccgcacctgctctgtcccgtcgtgaccgatatgcgcgaagcagggcaggcgttgaactggtgcgtcgccgaaatggaaaaacgctaccgcctgctttcccacgccggtgtacgcaatttggaaggcttcaaccaaaaagtcgaagccgcaaaagcggcaggcaagccgctgctcaatccgttcagtctgaaccccgacaaccccgagcctttggaaaaactgccgatgattgtggtcgttatcgacgaacttgccgacctgatgatgaccgaacgcaaagccgtcgagcagcaaatcgcccgtctcgcccaaaaagcgcgcgccgccggtatccatatgattgtcgccacccaacgtcccagtgtcgatgtcgttaccggcctgattaaagccaacatcccgacgcgtatggcgtttaccgtgcaaagcaaaatcgacagccgtaccatcctcgaccaaatgggcgcggacgaactgctcaaatatggcgattcgctgttcctccagcccggcagtgccgaaccgactcgcctgcaaggcgcgtttgtttcagacgacgaagtacatcaagtcgtcaactacgtcaaatcgcaagccccagccgactatattgaaggtctgctcagcggcgaggccgcgctggaaactgccaatatcgttaatccgaatgcagacagcgacgaattgttcgatcaggcagtcgcctatgttttggaaagcaaaaaaacctccatttcgtctttgcagcggcagttgcgtatcggctataaccgcgcggcaaacctgatggaggcactggaaaatgcgggtgtcgtttctcccaccgacctcaacggcagccgtaaaattttggcgcacaaggaccatttgtag

SEQ ID NO: 67247 - DNA, 1197 bp, Neisseria meningitidis
atgccgtctgaaccgttcagacggcataacgcaacaaacactttaatatccatcacacaggatgacacgatgacccatatcaaacccgtcattgccgcgctcgcactcatcgggcttgccgcctgctccggcagcaaaaccgaacaacccaagctcgactaccaaagccggtcgcaccgcctgatcaaactcgaagtcccgcctgatttgaacaaccccgaccaaggcaacctctaccgcctgcctgccggttcgggagccgtccgcgccagcgatttggaaaaacgccgcacacccgccgtccaacagcctgccgatgccgaggtattgaaaagcgtcaaaggcatccgcctcgagcgcgaaggcagccaacgctggcttgtcgttgacggcaaatcccccgccgaaatttggccgcttctgaaagccttttggcaggaaaacggcttcgacatcaaatccgaagaacctgccatcggacaaatggaaaccgagtgggcggaaaaccgtgccaaaatcccccaagacagcttgcgccgcctcttcgacacagtcggtttgggcggcatctactccaccggcgagcgcgacaaattcatcgtccgtatcgaacagggcaaaaacggcgtttccgacatcttcttcgcccacaaagcgatgaaagaagtgtatggcgacaaaaacaaagacacgaccatgtggcagccttccgcttccgaccccaacctcgaagcggcattcctgacgcgctttatgcaatatttgggcgttgacggacagcaggcggaaaacgcattggcaaaaaaaccgatccttcccgccgcaaacgaaatggcgcgtatcgaaggcaaaagcctgattgtctttggcgactacggcagaaactggcggcgcaccgcgctcgccctcgaccgcatcgggctgaccgtcgtcggtcaaaacaccgaacgccacgccttcctggttcaaaaagccccgaacgaaagcaatgcagttaccgaacaaaaacccggcctgttcaaacgcctgctgggcaaaggcaaagcggagaaacctgccgaacagccggaactgattgtctatgcagaacctgtcgccaacggctcgcgcatcgtcctgctcaacaaagacggcagcgcatatgccggcaaagacgcatccgcattattgggcaaactccattccgaactgcgttaa

SEQ ID NO: 67248 - DNA, 1014 bp, Neisseria meningitidis
atgcaagtctattacgataaagatgccgatctgtccctaatcaaaggcaaaaccgttgccatcatcggttacggttcgcaaggtcatgcccatgccgccaacctgaaagattcgggtgtaaacgtggtgattggtctgcgccaaggttcttcttggaaaaaagccgaagcagccggtcatgtcgtcaaaaccgttgctgaagcgaccaaagaagccgatgtcgttatgctgctgctgcctgacgaaaccatgcctgccgtctatcacgccgaagttacagccaatttgaaagaaggcgcaacgctggcatttgcacacggcttcaacgtgcactacaaccaaattgttccgcgtaccgacttggacgtgattatggttgctcccaaaggtccgggtcataccgtacgcagtgaatacaaacgcggcggcggcgtgccttctctgattgccgtttaccaagacaattccggcaaagccaaagacatcgccctgtcttatgcggctgccaacggcggcaccaaaggcggtgtgattgaaaccactttccgcgaagaaaccgaaaccgatctgttcggcgaacaagccgtattgtgcggcggcgtggtcgagttgattaaagcaggttttgaaaccctgaccgaagccggttacgcgcctgaaatggcttacttcgaatgtctgcacgaaatgaaactgattgttgacctgattttcgaaggcggtattgccaatatgaactactccatttccaacaatgcggagtacggcgaatacgttaccggccctgaagtggtcaatgcttccagcaaagaagccatgcgcaatgccctgaaacgcatccaaaccggcgaatacgcaaaaatgtttatccaagagggtaatgtcaactatgcgtctatgactgcccgccgccgtctgaatgccgaccaccaagttgaaaaagtcggcgcacaactgcgtgccatgatgccttggattactgccaacaaattggttgaccaagacaaaaactga

SEQ ID NO: 67249 - DNA, 1254 bp, Neisseria meningitidis
atgtccgaacaacatatttcgacttggaaaagtaaaatcaacgcattgggtccggggatcatgatggcttcggcggcggtcggcggttcgcacctgattgcctcgacgcaggcgggtgcgctttacggctggcagatcgcgctcatcatcatcctgaccaacctcttcaaatacccgtttttccgcttcagcgcgcattacacgctggacacgggcaagagcctgattgaaggttatgccgagaaaagccgcgtttatttgtgggtattcctgattttgtgcatcctctccgccacgattaacgcgggcgcggtcgccattgtaaccgccgccatcgtcaaaatggcgattccctcgctgatgtttgatgccggcacggttgccgccttgattatggcatcctgcctgattattttggtgagcggacgttaccgcgctttggatcgcgtttccaaaatcatcatcgttactttgagtatcgccacgcttgccgccgccggcatcgctatgtcgcgcggtatgcagatgcagcccgattttatcgagccgacaccgtggacgcttgccggtttgggcttcctgatcgcgctgatgggctggatgcccgcgccgattgaaatttccgccatcaattctttgtgggtaaccgaaaaacaacgcatcaatccttccgaataccgcgacgggatttttgatttcaacgtcggttatatcgccagtgcggttttggctttggttttccttgcactgggtgcgtttgtgcaatacggcaacggcgaagcagtgcagatggcgggcggcaaatatatcgggcaattgatcaatatgtacgccgttaccatcggcggctggtcgcgcccgctggtggcgtttatcgcgtttgcctgtatgtacggcacgacgattaccgtcgtggacggctatgcccgtgccattgccgaacccgtgcgcctgctgcgcggaaaagacaaaacgggcaacgccgaattctttgcctggaatatttgggtggcgggcagcggtttggcggtgattttttggtttgacggcgtaatggcgaatctgctcaaatttgcgatgattgctgcttttgtgtccgcccctgtgtttgcctggctgaattaccgtttggtcaaaggtgatgaaaaacacaaactcacatcaggtatgaatgcccttgcattggcaggcttgatttatctgaccggttttaccgttttgttcttattgaatttggcgggaatgttcaaatga

SEQ ID NO: 67250 - DNA, 1344 bp, Neisseria meningitidis
atgattaaaatcaaaaaaggtctaaacctgcccatcgcgggcagaccggagcaagtcatttatgacgggcccgtcattaccgaagtcgcgttgcttggcgaagaatatgccggtatgcgcccctcgatgaaagtcaaggaaggcgatgccgtcaaaaaaggccaagtgctgtttgaagacaaaaagaatccgggcgtggtgtttaccgcgccggcttcaggcaaaatcgccgtgattcaccgtggcgaaaagcgcgtacttcagtcagttgtgattgccgttgaaggcaacgacgaaatcgagtttgaacgctatgcgcccgatgcgttggcagacttaagcggcgaagaagtacgccgcaatctgatccaatccggtttgtggaccgcgctgcgtacccgtccgttcagcaaaattcccgccgtcgatgccgaaccgtccgccatcttcgtcaatgcgatggacaccaatccgctggctgccgatcccgtggtcgttatcaaagaagccgccgaagacttcaaactcggcctattggtattaagccgcctgaccgaacgtaaaatccatgtgtgtaaagcagcaggcgtagacgtgccgtctgaaaatgctgccaacatcgaaacacatgaatttggcggcccgcatcccgcgggtttgagtggcacgcacattcatttcatcgagccagtcggtgcgaacaaaaccgtttggaccatcaattatcaagatgtaattgccattggccgtttgtttgcaacaggccgtctgaacaccgagcgcgtaattgccttgggtggttctcaagtcaacaaaccacgcctcttgcgtaccgttttgggtgcgaaagtatcgcaaattactgcgggcgaattggttgacgcagacaaccgcgtgatttccggttcggtattgaacggcgcgattgcacaaggcgcgcacgattacctcggccgctaccacaatcagatttccgttatcgaagaaggccgcagcaaagagctgttcggctgggttgcaccgcagccggacaaatactcgattacgcgcacaaccctcggccatttcctgaaaaacaaactcttcaagttcacgacagccgtcaacggcggcgaccgcgctatggtgcccatcggtacttacgagcgcgtgatgccgctggacatcctgcctactttgcttctgcgcgatttaatcgtcggcgataccgacagcgcgcaggctttgggttgcttggaattggacgaggaagacctcgctttgtgcagcttcgtctgcccgggcaaatacgaatacggcccgctgttgcgtaaggtgctggaaaccattgagaaggaaggctga

SEQ ID NO: 67251 - DNA, 255 bp, Neisseria meningitidis; identical to SEQ ID NO: 39349

SEQ ID NO: 67252 - DNA, 2580 bp, Neisseria meningitidis
atgcgatacgacaaattaaccgccaaattccaacaagcccttgcagaagctcagagtttggcgttggctgcggacggcagctatctggaagcgggctttgtgttaaaagccctgcttgacgaccaaaacagcggagccgccgcgctcttggctcattcgggcgtgaacgtgccgcaggtgaaacagcgtttgcagcagcatttgaacagcctgccgaaagtgtccggccagggcggcgacattctgcccagccgcgaattgcaggcggtgttgaacctgatggacaaggctgccaccaaacgcggtgatgcctatatcgccagtgaacttttcctgcttgccttggtgcagcagaacgatgcggccggcaaaattttgaaagaagccggcgcgaccgaacaaaacattaatgccgcaatcgatgcggtacgaggaggacaaaacgtgaacgatgccaatgccgaagaccaacgcgatgcgctgaaaaaatatacgctcgatttgacccaacgcgcccgcgacggtaagctcgaccccgttatcggtcgtgacgacgaaatccgccgtgcaattcaggtattgcaacgccgcaccaaaaacaaccccgtgctgattggcgaaccgggcgtgggtaaaactgccattgtcgaaggcttggcgcaacgcatcgtcaacggcgaagtacccgaatccctgcgcaacaaacgccttttggttctggacttggcggcattgattgccggcgcgaaataccgtggcgaatttgaagaacgcttgaaaggcgtgttgaacgatttggcgaaagacgacggcaacactctgattttcattgatgaaatccatactttggtcggcgcgggcaaaaccgacggcgcgatggacgcgggcaatatgctgaaaccggccttggcgcggggcgaactgcactgtatcggcgcgaccaccttggacgaataccgccaatacatcgaaaaagacgcggcactcgaacgccgcttccaaaaagtattggtcggcgagcccagcgtggaagacaccatcgccatcttgcgcggtttgcaggagcgttatgaaatccaccacggtatcgatattaccgaccctgctatcgttgccgcagcggagttgagcgaccgctacatcaccgaccgcttcctgcccgacaaagcgattgatttgattgatgaagccgccagccgtgtcaagatggaaaaagaaaccaagccggaagcaatggacaaaatcgaccgccgtctgattcagcttcggatggaaaaggcacacgttgaaaaagaaaaagacgatgccagcaaaaaacgtttggaactgatagacgaggaaatcaacggtctgcaaaaagaatacgccgatttagacgaaatctggaaagccgaaaaagcaatttcagacggtgctgctaatattaagaaacaaattgacgaagtcaaaattaaaatcgaacaggcaaaacggcaaggcgatttggcactggcttcaaaattgatgtatgaagatttggagcatttggaaaaacagcgtgcagccgccgaacgggcagatacggacagcacaaaaccggcaaacaaactcttgcgtaataatgtcggcgcggaggaaatcgcagaagttgtttcccgtatgaccggtattcccgtgtccaaaatgatggaaggcgaacgcgacaaactgctgaagatggaagaagtattgcaccgccgcgtggtcggtcaagatgaagccgtgcgtgccgtgtccgacgctatccgccgcagccgttccggtcttgccgatccgaacaaaccttacggcagcttcctgttcttaggcccgaccggcgtgggtaagaccgaattgtgtaaggcattggcaggcttcctgtttgacagtgaagatcatctgattcgtatcgatatgtccgaatatatggaaaaacacgccgttgcccgcctcatcggcgcgcctccgggctatgtcggctacgaagagggcagttacctgaccgaacaagtccgccgcaaaccgtacagcgtgattcttttggacgaagtggaaaaagcccatcccgacgtgttcaacatcctgctgcaagtattggatgacggtcgtttgaccgacgggcaaggcaggacggtagattttaaaaataccgtgattgtgatgacttccaacatcggcagccagcacatccaacaaatgggcattcaggattacgaagcggtaaaagaagttgtgatggaggatgtgaaagaacatttccgtcctgaaatgatcaaccgcatcgacgaagtggtcgtgttccacggactggatcaggataatatccgcaacattgcgaaaatccagctcaaaggcttggaaaaacgtttggaaaaacaaaacctccgcctgactgtttccgatgccgctctggacatcatcgccaaagccggtttcgacccgatttacggcgcacgtccgctcaaacgcgccatccagtcggaaatcgaaaacccgctggcaaaagccctgcttgccggaaactatgcgcccgaaagcgaaatcagggtggaagccgacggcgacagactgaaatttgcctga

SEQ ID NO: 67253 - DNA, 300 bp, Neisseria meningitidis
atgaccgcatccatgtacatccttttggtcttggcactcatctttgccaacgcccccttcctcacgaccaggctgttcggcatcgtaccgctcaagcgcaaacatttcggacaccacttgatcgagctggcggcaggtttcgcgctgaccgccgttcttgcctacatcctcgaatcccgtgtgggagcggtacacaatcagggttgggagttctacgccaccgtcgtctgcctgtacctgatttttgcgtttccctgtttcgtgtggcggtatttttggcacacgcgcaacagggaatag

SEQ ID NO: 67254 - DNA, 342 bp, Neisseria meningitidis; identical to SEQ ID NO: 39758

SEQ ID NO: 67255 - DNA, 807 bp, Neisseria meningitidis
atgaaaagctcttttgtgcaaacgcttaccatcgccggttcggattcgggcggcggtgcgggcattcaggcggatttgaaaacgtttcagatgcgcggcgtgttcggaacgtgcgtcatcaccgccgttaccgcgcaaaataccttgggcgtgtcggcggttcatctcgtcccgaccgaaaccatcaccgcacaaatccaagcaatcagggaagactttgacatccgcgcctacaaaataggaatgctcggcacggcggaaatcatcgaatgcgttgccgacaagctgaaacactgcgacttcggcaggcgcgtactcgaccctgtgatgattgccaaaggcggtgcgccgctgttgcaggattccgccgttgcggcactgacgcgcctgctgcttcccgatacggatgtattgacccccaacctgcccgaggcggaagccctgaccggcgtgcatatcgaaaaccgtaaagatgcggaacgtgcggcaaaaatcctgcttgattacggtgtcaaaaatgtcgtcatcaaaggcggacatttgaatggcagcagcagcggacgctgcacggattggctgtttacgcaaaacgaaacgctggaattggacagcccgcgctttccgaccgcccacacgcacggcacgggctgcacgttttccgcctgcattaccgccgagttggcaaaaggcttagacgtttgcgaagccgtacagactgccaaggcatacatcacggcggcaatctcaaaccctttggaaatcggcgcgggacacggcccggtcaatcattgggcgtatcgggactag

SEQ ID NO: 67256 - DNA, 882 bp, Neisseria meningitidis
atgccgtctgaaaacaccctcttccccctgcccgacaccctgttgcgccccatggtcgaacaagccttgagcgaagacttgggcaggcgcggcgacattacgtccgccgccgttatcgcccccgataaaaccgccaaactcttcctcgtcagccgcgaagacggcgtcatcgccggcatggacttggcgcgtctcgcctttcagacgatggatccgtccgtccgcttccaagccgaaatccgagacgggcaagtcgtccgcgcaggtcagacgcttgccgccgtcgaaggcaacgcccgcgcgctgctcgccgccgaacgcaccgcgctcaactacctcacgcacttgagcggcatctccaccgccaccgcgcgtgccgttgccgaagtcgccaaatacggtacagacatcgtgtgcagccgcaaaaccatccccctgctgcgcgtcctgcaaaaatacgccgtcagggcgggcggcggcgtgaaccaccgcatgggtttggacgatgccgtactcatcaaagacaaccacctcgcctattgcgacagcatcgcccaagccgttcggcaggcaaaacaggcggtcggaccgttgacctgcgtagaaatcgaagtggacacgttggcacaactggacgaagccatcgcagcgggcgcggaacggattttgctggacaacatggacgacgaaaccctgaaagaagcggcaaaccgctgccacacgcaaaccgcccacccccacaccgtctattgcgaagcatcgggcggcatcggcttcgaccgcctgaagcgcgtggcgcaaaccggcgtggacggcatcgccctcggctatctgacccacagcagccgctcgttggacataggtttggatttcttggcatga

SEQ ID NO: 67257 - DNA, 759 bp, Neisseria meningitidis
atgggcgattccgtcatttattatgtagaacaggcagacgaaccggtaaaccgtgccggcgaacgcgcccgtaaaacattcaaatacttttggcgcgagcttttttgggaacgccgccgcatcattcccgccttagattttgccatggtcaaagccccttttttccaagacggcgaagacggcgaaatttgcgaacatatgtggatcgacgatatttattttgacggtctttacatttatggcgtgctgaacaatgaacccggcgaactgaccaatgtcgaacaaggcgaaagcatttgcgttccggttgacgacatcagcgactggatgttcgtgtgcaacggcattccctacggcggctttaccgtacaggcaatgcgcgggcagatgacggaagaggagcgcaccgaacacgatgccgcatggggaatcgatttcggcgatcccgggcagatattgctggtgtatgaagaaaaagaacatcccgaaaatctggaagagcatccgatgtgccggaactgtattgacgattttcggcaacagttgtcccaaaactcggattatctgcgggaacaggacgaagacggctatacgccgcttcatcatgaagccatcgcaggaaatgcacttatggttcaagccatgcttgaatacggcgcaaatcctgcctcaacgacatcggaaggctataccgccctcgattttgcctgcctgacgggctggcaaaatgttgccgacctgctcgaaccgcgacattag

SEQ ID NO: 67258 - DNA, 1125 bp, Neisseria meningitidis
atgctgaaaaaatggttgaataagatactgccttccggtcggagcagtaaaaaagcggaaagtaaaacggtcattcctgccgaaagacacaacatccgtgccgaaatgttgagctttgccgccgaaaacgtcatacgccgcctgaaaggggcgaggtttcaggcttatgtggtcggcggcgcgatcagggacctgctgctcggcatcgaacccaaggatttcgatgtggcaaccgatgccacgcccgaacaggtgcacaaactcttccgccgcagccgcatcatcggcaggcgttttcaaatcgtccatgtgatgaacggtgcggagattatcgaagtaacgacgtttcgcggcggtgcgaaggttcatcagaacgcgcacggcagaatcatgaaggacaacacctacggcagcatcgaagaagatgcgatgcggcgcgattttacctgcaatgccttgtattacgatccggaaaaagaagagattttggatttccacaacgggattgccgatgttgccgcccgcaggctggttatgattggcgatgccgccgaacgctatcaggaagaccctgtcaggattttgcgcgccatccgcctgtcgggcaaattgggatttgatctgtcggaagaaaccgccgcaccgattgccgaatcaatatgccgtctgaagcacgaacctgtggcaaggctgttcgacgaaattatgaaactgctgttttcagggcacgcgcgcgagtgtctaaaacgtttgaacggatttgacataccggacgacatccatccgctgctcaatgccttgcgcgtttcagacggcatcgccggaaaaatgacggtgctcgccctgaaaaataccgatgagcggctgcgtgccgacaaatcggtttcggtcggttttgtattggcggctctgatgtggcccgagttggaacgccattggaaaagcaatctgcaacagggtttgaaacccgcgcccgccctgtccgatgcaatcaatacgatgcgcgaaaccgtcgaacgcggttggggcgtgccgcaacgcttttccgccacgatgcgcgaaatttggatgttccagccgcagtttgaaaaccgcaaaggcgcacgtccgagatcgctgagatag

SEQ ID NO: 67259 - DNA, 2664 bp, Neisseria meningitidis
atgtccacccaattacacgatgttgaccctatcgaaacccaagagtggctggacgcgttaagctccgtcctcgaatatgaaggcggcgaacgcgcgcaatacctcttggaaaacctggtcaaatactgccgcgacaagggcgtacgtatgccacacggcacgaccaccccgtatttgaataccgtttcggttgaaaacgaaaaaggcattccgggcgaccaaaacatcgaacaccgcatccgcgcattcgtgcgctggaacgccgccgccatcgtattgcgcgccggcaagaaagatttggaactgggtgggcacatcgcatctttccaatctgccgccaccatgtacgaagtcggtttcaaccacttttggaaagccaaaggcgaaggcgaagaaggcgatttggtcttcttccaaggtcacgtcgccccgggcatctatgcacgcgcattcgtcgagggccgtctgaccgaagaccagctgaacaacttccgccaagaagtggacggacacggtctgccttcctatccgcacccccacctcttgcccgacttttggcagttcccgaccgtatccatgggcttggggcccatcatggcgatttatcaggcgcgtttcctgaaatacttggaatcgcgtggtttggcaaaaaccaaaggccgtaaagtatggtgtttctgcggcgacggcgaaatggacgaacccgaatctcaaggtgcaatcgcactggctgcacgcgaaggcttggacaacctgattttcgtcatcaactgcaatctgcaacgcttggacggtccggtacgcggcaacggcaaaatcatccaagaattggaaggcaactttgccggcgccggctggaatgtcgtcaaagtcatttggggccgccgctgggaccgcctcttggcgaaagacaaagacggtatcctgcgccaacgtatggaagaatgtttggacggcgactaccaaacttacaaatccaaagacggcgcgtatgtgcgcgaacacttcttcaatacgcccgaactgaaagcattggttgccgatatgaccgatgagcaactctgggcattgaaccgcggcggccacgacccgcaaaaagtgtacaacgcctacgaccgcgcagcgaaccatgccgacggcaaacctaccgtcatcttggcgaaaaccattaaaggttacggtatgggcgcatccggcgaaggtcagaacgttgcccaccaagccaaaaaaatggacaaagcgtccctgaaacaattccgcgaccgctttgacattccggttaccgacgaacaaatcgaaagcggcgatctgccttacctgacttttgcccccgatacggaagaatacaaatacctgcacgcacgccgcgatgctttgggcggctacctgccgcaacgcaaaccgacgcaggaagtattggaagtgcccgagctgtcagcattcgacgcacaactcaaatccagcggtgaacgcgagttctcgaccacgatggcattcgtccgcatcctgtccactttgctgaaagacaaaaaaatcggcaaacgcgtcgtacctatcgttcccgacgaaagccgtactttcggcatggaaggtatgttccgccaatacggtatttggaatccgaaaggtcagcaatatacccctcaagacaaagaccaactgatgttctataaagaatccgttgacggtcaaatcttgcaagaaggtattaacgaaccgggcgcgatggccgactggattgcggctgcaaccagctacgccaacagcaacttcgcgatgattccgttctacatttactattctatgttcggtttccaacgtatcggcgacttggcttgggcggcgggcgatatgcacgcgcgcggcttcctgctgggcggtactgccggccgtacgacgctgaacggcgaaggcctgcaacacgaagacggccacagccacatccaggccgacctgattccgaactgcgtatcttatgacccgactttccaatacgaagtcgccgtcatcgtacaagacggtctgcgccgtatgtatgccaataatgaagacgtgttctactacatcaccctgatgaacgagaactacacccatccggatatgcccgaaggtgcggaacaagacatcttgaaaggtatgtacctgctgaaagccggcggcaaaggcgacaagaaagttcaattgatgggctccggtacgattttgcaagaagtgattgccggtgccgagctgctgaaagccgacttcggcgtggaagcagacatttggtcttgcccatccttcaacctgctgcaccgcgacgctgtcgaggtagaacgcttcaaccgcctgcatccgctggaagccgaaaaagtacctttcgttacttcccaactgcaaggtcatgacggtccggttattgccgctaccgactatatccgcagctatgctgaccgtatccgcgcctacatcccgaacgactaccacgtcttgggtactgacggcttcggccgctccgacagccgcgccaacctgcgccgcttctttgaagtggatcgctacaacgttgccgtggcagcattgagcgcattggcggaacaaggcaaagtcagcaaagaaaccgttcaacaagccattgagaaatacggcatcaaagccgattcagctcctagctggaaacgctga

SEQ ID NO: 67260 - DNA, 585 bp, Neisseria meningitidis
atgatcagcagactgaccggcaaactggttgaaaaaaaccctccgcaaatcatcatcgatgtcaacggtgtcggctatgaggccgacgtatcgatgcagaccttctacaacctgccgcccgtgggtgaaagcgtacaactgtttacccagcttatcattcgggaagacgcacatcttttatttggttttgccactgcggaagaacgcaaaacattccgccaactgattaaggtcagcggcatcggcgcgaaaacggctttgggcattttgtcggcgatgacggcagacgagctggcgcaggcggttgcagaagaagatgtcaaacgcctctcctccgccccgggaatcggcaaaaaaaccgccgaacgcatggttttggaactgcgcggcaagctggtcgcgcatgcggtaacggacgggctgtttgccgccgcacccgccgccgacgaaacggaagacatcgtcggcacgctcctcgccctcggttacagcgaacgcgaggcaaaagcggcggtcaaaggcgttccgaaagggacggacgtgggcgaaggcgtgcgccttgctttgaaaaacctgctgaaataa

SEQ ID NO: 67261 - DNA, 498 bp, Neisseria meningitidis; identical to SEQ ID NO: 39310

SEQ ID NO: 67262 - DNA, 966 bp, Neisseria meningitidis; identical to SEQ ID NO: 46197

SEQ ID NO: 67263 - DNA, 183 bp, Neisseria meningitidis; identical to SEQ ID NO: 40813

SEQ ID NO: 67264 - DNA, 2397 bp, Neisseria meningitidis
atgattaaaaagattttaacgacttgttttggtttagtttttgggttttgtgtatttggagtgggtttggttgccattgctattttggtaacgtatccgaaactgccgtctttggattctttgcagcattaccagcctaaaatgccgttgactatttattcggcggatggggaagtcatcggtatgtatggggagcagcggcgcgaatttacaaaaatcggcgatttcccagaggtgttgcggaatgcggttatcgccgccgaggataaacgcttttaccggcattggggggtggatgtttggggtgttgcccgcgctgccgtcggcaatgtcgtgtccggcagcgtgcagtcgggtgcgagtacgattacgcagcaggtggcgaaaaatttttatttgagcagtgaaaaaacgttcacacgcaaattcaatgaggtgttgcttgcctataaaatcgagcagtctttaagcaaagacaaaatcctcgagttgtatttcaatcagatttacctcggtcagcgcgcctatggttttgcatctgccgcgcaaatctatttcaataagaatgtccgagatttgactttggcggaagccgccatgcttgcgggactgcccaaggctccgtctgcctataatccgattgttaatccggaacgtgccaagttgcgccagaagtatattttgaacaatatgctcgaggagaagatgattaccgtgcaacagcgcgatcaggcgttgaatgaggaactgcattacgagcggtttgttcggaaaatcgatcagagtgctttatatgtggcggaaatggtgcgtcaggaactgtatgagaaatacggtgaagatgcctatacgcagggttttaaggtttataccacggtccgcgctaatcatcagaaggtggcaaccgaggcattgcgcaaggctctacggaatttcgatcgcggcagcagctaccgcggtgcggaaaactatatcgatttgagtaagagtgaagatgtcgaggagactgtcagccagtatctgtcgggactctataccgtcgataaaatggttcccgccgttgtgttggatgtgactaaaaagaaaaatgtcgtcatacagctgcccggcggcaggcgggttacgcttgacaggcgcgccttgggttttgcggcccgcgcggtcaataatgaaaaaatgggggaggaccgtatccgcaggggcgcggtcatccgtgtcaaaaacaacggcgggcgttgggcggtggttcaagagccgttgctgcagggggctttggtttcgctggatgcaaaaaccggagctgtgcgcgcgctggtcggcggttatgattttcacagcaaaacattcaatcgtgccgttcaggcaatgcggcagccgggttcgacctttaagccgtttgtctattcggcggcattatctaaggggatgaccgcgtccacagtggttaacgatgcgccgatttccctgccggggaaagggccgaacggttcggtttggacacctaaaaattcagacggcagatattccggctacattactttgagacaggctctgacggcttccaagaatatggtttccatccgtattttgatgtctatcggtgtcggttacgcgcaacagtatatccggcgtttcggcttcaggtcgtccgagctgccggcaagcctgtctatggctttaggtacgggcgagacaacgccgttgaaagtggcggaggcatatagcgtatttgcgaacggcggatatagggtttcttcgcacgtaatcgataagatttatgacagagacggcaggttgcgcgcccaaatgcaacctttggtggctgggcaaaatgcgcctcaggcaatcgatccgcgcaatgcctatattatgtataagattatgcaggatgtggtccgtgtcggtacggcaaggggggcagctgcgttgggaagaacggatattgccggtaaaacgggtacgaccaatgacaataaggatgcgtggtttgtcggttttaaccctgatgtggttactgccgtatatatcggcttcgacaaacctaagagtatggggcgtgtcggctacggcggtacgattgcggtgccggtttgggtggactatatgcgttttgcgttgaaaggaaagcagggcaaggggatgaaaatgcctgaaggtgtggtcagcagcaatggcgaatactatatgaaggaacgtatggtaaccgatccgggcttgacgctggacaacagcggtattgcgccgcaaccttcccgacgggcaaaagaagatgacgggggcgcggcagaaggcggacggcaggcggcggatgacgaagtccgccaagatatgcaggaaacgccggtgcttccgagtaatactggttccaaacagcagcagttggattctctgttttaa

SEQ ID NO: 67265 - DNA, 2307 bp, Neisseria meningitidis
atggcgaaaaacctattaatcgtcgaatccccgtccaaagccaaaaccctgaaaaaatatttgggcggcgattttgaaatccttgcatcctacggacacgtccgcgacctcgtccccaaaagcggcgcggtcgatcccgacaacggctttgcgatgaaataccaactcatcagccgcaacggcaaacacgtcgatgccatcgtcgccggtgccaaagaagctgaaaacatctacctcgccaccgacccggatagggaaggcgaagccatttcctggcatcttttggaaatcctcaaatccaaacgcggcttgaaaaacatcaagccgcagcgtgtcgtgttccacgaaatcaccaaaaacgccgtgctcgatgccgttgcccatccgcgcgaaatcgaaatggacttggtcgatgcgcaacaagcccgccgtgctttggactatttggtcggctttaacctttcgccattgttatggaaaaaaatccgccgaggtttgagcgcggggcgtgtgcaaagccctgctttgcgcctgatttgtgagcgcgaaaacgagatccgcgcgtttgaagcgcaggaatattggacggtacatcttgacagtcacaaaggacgcagcaagttcaccgccaaactcgcccaatacaacggcgcgaaactcgaacaattcgacctgccgaacgaagccgcgcaagccgacgtgttgaaagaactcgaaggcaaagaggccgtcgttaccgccattgaaaagaaaaagcgcagccgcaatcctgccgcgccgttcaccacttctaccatgcagcaggatgccgtgcgcaaactcggcttcaccaccgaccgcaccatgcgtaccgcccaacagctttatgaaggtatagacgtagggcagggcgcgatcggtctgattacctatatgcgtactgacagcgtgaatttggcggatgaagcgttaaccgaaatccgccattacatcgaaaacaaaatcggcaaagaatatctgccgagtgccgccaaacaatacaaaaccaaatccaaaaacgcccaagaagcccacgaagccatccgcccgacttccgtgtaccgcacgcccgaaagcgtaaaacccttcttgagcgccgaccagttcaaactctatcaaatgatttggcagcgtaccgtcgcctgtcagatgacgcccgccaaattcgaccaaaccaccgtcgatattaccgtcggcaaaggcgtattccgcgtaaccggacaagtgcaaaccttcgcaggctttttgagcgtgtatgaagaaagcagcgatgacgaagaaggcgaagacagcaaaaaactgcccgaaatgagcgaaggcgacaaattgcccgtggacaaactctacggcgaacaacactttaccactccgccgccgcgctacaacgaagccacgctggttaaagccctcgaagaatacggcatcggccgcccctcgacctacgccagcatcatctccacgctcaaagaccgcgaatacgttacccttgagcaaaaacgcttcatgcccaccgacacaggcgacatcgtcaacaaattcctgaccgaacacttcgcccaatacgtcgactaccactttaccgccaaactcgaagaccagctcgacgaaatcgccggcggcaaacgccaatggatccctgtgatggacaaattctggaaaccgttcatcaaacaagtggaagaaaaagaaggcatcgaacgcgccaaatttaccacgcaggaacttgacgaaacctgcccgaaatgcggcgaacacaaactgcaaatcaagttcggcaaaatgggtcgttttgttgcgtgtgccggttatcccgagtgcagctacacgcgcaacgtcaacgaaactgccgaagaagccgccgagcgcatcgccaaagccgaagccgaacaggcagaactcgacggacgcgagtgccccaaatgcggcggacggctggtgtacaaatacagccgtaccggcagcaaattcattggctgcgccaactaccccaaatgcaaacacgtcgagccgctggaaaaaccgaaagacaccggcgtccaatgtccgcaatgcaagaaaggcaacctcgtcgagcgtaaatcccgctacggtaaactgttttacagttgcagcacctatccagactgcaactacgccacttggaacccgcccgttgccgaagaatgcccgaactgccattggccggtcttgaccatcaaaaccactaaacgctggggtgtggaaaaagtctgcccgcaaaaagaatgcggctggaaagaacagatcgaaccgcctgcaccgaaagagtga

SEQ ID NO: 67266 - DNA, 1005 bp, Neisseria meningitidis
atgcaacgacaaatcaaactgaaaaattggcttcagaccgtttatcccgaacgggacttcgatctgacttttgcggcggcggatgctgatttccgccgctatttccgtgcaacgttttcagacggcagcagtgtcgtctgcatggatgcaccgcccgacaagatgagtgtcgcaccttatttgaaagtgcagaaactgtttgacatggtcaatgtgccgcaggtattgcacgcggacacggatctggggtttgtggtattgaacgacttgggcaatacgacgtttttgaccgcgatgcttcaggaacagggcgaaacggcgcacaaagccctgcttttggaggcaatcggcgagctggtcgaattgcagaaggcaagccgtgaaggggttttgcccgaatatgaccgtgaaacgatgctgcgcgaaatcaacctgttcccggaatggtttgtcgcaaaagaattggggcgcgaattaacattcaaacaacgccaactttggcagcaaaccgtcgatacgctgctgccgcccctgttggcgcagcccaaagtctatgtacaccgcgactttatcgtccgcaacctgatgctgacgcgcggcaggccgggtgttttagacttccaagacgcgctttacggcccgatttcctacgatttggtgtcgctgttgcgcgatgcctttatcgaatgggaagaagaatttgtcttggacttggttatccgctactgggaaaaggcgcgggctgccggcttgcccgtccccgaagcgtttgacaagttttaccgctggttcgaatggatgggcgtgcagcggcacttgaaggttgcaggcatcttcgcacgcctgtactaccgcgacggcaaagacaaatatcgtccggaaatcccgcgtttcttaaactatctgcgccgcgtatcgcgccgttatgccgaactcgccccgctctacgcgctcttggtcgaactggtcggtgatgaagaactggaaacgggctttacgttttaa

SEQ ID NO: 67267 - DNA, 783 bp, Neisseria meningitidis
ttgcagaaagtcgtgcgccatatcgcgcaaaccgaaattatgccgcgttttttgaatacgccgtcccaccgcaaggaagacggttcgatgttgagcgaggcggacattgccgcgcagacggcttttgccgccgcgttgccgcttctgatcgattgcccgatgttgggcgaggaaatgtcgcgacaggaacagtcggctctgtgggaacaatattcgggggaaaaggggctgtggattgtcgatccgatagacgggacaaacaattttgtcaacgggctgccgcattttgccgtgtcggtggcgtttgtccgcaacgggcgcgccgaattgggcgtaatctacaatccggtcagcggcgaatgtttttatgctgaacgcgggcagggtgcgtttttaaacgggacacgcctgcctttgcgcctcgtggataagaagttgaatgaggcaatcgcgggtgtggaaatcaaatatctgcgttcgggcaaactgtccagccgcatgagtacgctcgcgcctttcgggacgatacgcagtatgggcagcagtacgttggattggtgttatctggcgtgcgggcgttatgatgtttatgttcacggtgggcagaagctgtgggactatgctgcgggtgcgttgattttcgaggaggcgggcggcaggctgacgactttggaaggcgacgggttttggagtggtgaacacgtgttcaaacgctcggtcgttgccgcgctcgaaccgaagctgtttgaacgctgggtcgggtggatacgggaaaaccaatag

SEQ ID NO: 67268 - DNA, 300 bp, Neisseria meningitidis; identical to SEQ ID NO: 43627

SEQ ID NO: 67269 - DNA, 924 bp, Neisseria meningitidis
atgcaatacagcacactggcaggacaaaccgacaactccctcgtttccaataatttcgggtttttgcgcctgccgcttaattttatgccgtatgaaagtcatgccgattgggttattaccggcgtgccttatgatatggcggtttcagggcgttccggcgcgcgtttcggtcctgaagccatccggcgcgcctccgtcaacctcgcttgggagcaccgcaggtttccatggacatttgatgtgcgcgaacgcctgaacattattgattgcggcgacttggttttttcttttggcgacagcagggattttgtcgaaaaaatggaagcgcacgccggcaaattactttcttccggcaaacgctgtttgagtttgggcggcgaccatttcattaccctcccgttgttgcgcgcccacgcccgctatttcggcaaactcgcactgattcattttgacgcgcacaccgacacctacgacaacggcagcgaatacgaccacggtacgatgttctataccgcccccaaggaaggcctcatcgacccgtcccgttccgtacaaatcggcatacgtaccgaacacagtaaaaaattgccttttactgtgttgaccgccccccaagtcaatgaagacagtgttgaagagaccgtccgtaaaatcaaagaaaccgtcggcaatatgcccgtttacctgactttcgacatagactgcctcgacccgtcgttcgcccccgggaccggtacgcccgtatgcggcggcttgagcagcgacagggcattaaaaatcctacgtgggctgacggatctcgacatcgtcggtatggatgttgtagaagttgccccctcttacgaccaatccgacattaccgctttgaccggcgccacaattgccttggaaatgctttaccttcaaggtgcgaaaaaggactga

SEQ ID NO: 67270 - DNA, 1455 bp, Neisseria meningitidis
atgagcatcgaaccaacccctccgaaccttgaaaacgacggtatcgaaaacgatgtagaacgcgtttccgccgatttcgaccgtgtccactccctctgcgaaatcctcgaacctgcttttgaacaaatcgaaaacggtacaccgctcgaagacgcgccgctgcgcgacaagctgaccgagctgaccgtcctcttgagcgagctgcaccctgccgacgtggcggcggtgttggaatcgctgccgccgcgcgaacgcaatatcgtctggattttagtgaaacccgaagacgacggcgaagtattgctggaagtatccgacgcggtgcgcgaaacgctgatcgagtcgatggacaaggacgaattgttggcggcagttgacgatttggacgcggacgaattggcggaactggcagacgatttgccgcaccaagtggtttatgaagccttgcagacgcgcgacgaggaagagcgcgcacaagtcaaagcggcaatgtcctacgaagacaaccaagtcggtgcgattatggacttcgagttggtcagcatccgcgccgatgtcgcctgtgaagtggtgctgcgctatctgcgccgcttcgacagcctgcccgaccataccgacaagatttttgtggtcgatgaaaacgacgtactgcaaggcgtgctgcccatccgcaaacttttggtcgccgatcccgaagatttggtggaaaacgtgatggcgaaagatgtcgtgcgtttccgcgccgaagacgacgtggaagaagcagcgcaggcattcgaacgctatgacttggttaccgcgcccgtcgtcgatgaaaacaaaaagctcatcggcagggtgaccgttgacgaaatggtggacgtgatccgcgaagaatccgaagcggatatgttgaatatggcgggtttgcaagaagaggaagacttattcgcccccgtcttggattccgtcaaaaaccgctggatgtggctcgccgtcaacctctgcaccgccttcctcgccagccgtgttatcggcgcgtttgaaggcagcatcgaaaaaatcgtcgcactcgccgcgctgatgcccatcgtcgccggcataggcggtaactcgggcaaccagacgattaccatgattgtccgcgcgatggcgatggggcagctgacggatatgcaggcggggcgtttgctgaaaaaagaagtcggtgtcgccttggtcaacggcatcatttggggaacggtcatgggcgcagtatcttggctgctttacggcagcctcggcatcgggctggttatgattgccgcgatgacgctcaacctcctgctggcggcaaccgtcggcgtattaattcccgtggtaatggaaaagttcggacgcgatcccgcactgggcagctcggtgctgattaccgccgttaccgactccggcggcttcctgattttcttggggctcgccaccctattcctgctttaa

SEQ ID NO: 67271 - DNA, 696 bp, Neisseria meningitidis
atgagtgagttgattttgaaatgcgaaggcgtgggcaaacgctatcgggacggcggtttggacgttcgggtgctgcacggcttggatttggaaatccgcgcgggggaaagcaccggcatcatcggctcttcgggcagcggcaaatcgacgctgctgcatattttgggcgggctggatatgccgtctgaaggcagggtgctgctgatgggcgaggatttgcgtaccttaaaccagcggcgtttgggcgatttacgtaaccgccatctcggtttcgtgtaccagttccaccatcttctgcctgaattttcggcactggaaaacgtgatgatgccgcttctgatcggcaaaaaaagccgtgaagaggcagcagaaacggcaatggcgatgctggaaaaggtcggactgaaacaccgttcgacgcaccgcgcgggcgaactttcaggcggtgagcggcagcgtgccgccattgcacgcgccttggttacgcaacccaaatgcctgcttgccgacgaaccgaccggcaatctcgatcgtgcgaacgccaggaatgttttggatatgatgctggaactgaaaacagaattgggaacggggcttgtggtcgtaacgcacgacgacgaactcgccggccgcttcgggcgcgtgatggtcatgaaagacggcaacctgcaccccaaacagggcgcaaacgcctaa

SEQ ID NO: 67272 - DNA, 945 bp, Neisseria meningitidis
atgtctgcatctaagaaatttccgattcctttgagctatttcagcatcgcgctgggcttgtttgccttggggctgtcgtggcgttacggcgcgtctgtcgggctgctgcccgccttggccgccgaatcgctgcttgcggcggcttcggtcgtctggctcttgctggtggcggcatacctgatcaaaatgtttgcgtaccgaaacgattttttgtctgatttgcgcgacttggtgcaatgctgcttcatcagcgcgattccgattaccgctatgctggagggactcgcgctgaagccctatcaggcaggcgcggcggcagtcctgatttatgccggcgttgccggacagttggcgttttcgatgtatcgggcggccggtctgtggcgcggcctgcattccttggaggcgacgacgccgattatttatctgcctacggttgcgacaaactttgtcagcgcgtcatctctggcggcgttggggcatcatgattatgcggctttgtttttcggcgcgggtatgttttcctggctgagcttggaagcctccatcttgggcaggctgcgcacggcggcaccggtcggcacggcggcgcgcggcgtggtcggcatccagcttgcgcccgcctttgtcggctgcggcgcgtattttgccgtcggcggtaaagtcgacggttttgcgttggcattaatcggctacggctgcctgcagcttttgttcttgctgcgcctgacccgctggttttgggaaggtggttttacgatgagcttttggggattttcattcggtttcgcggcaatggcaggatgcggtctgcatctggcggcttctggcgtattgtcgggcttggggctgacgcttgccaccgccggatcggcaggcgtggcgctgctgcttgtcggtacgctgcaccggatagcgacggggcgtttcttggtacgcggctga

SEQ ID NO: 67273 - DNA, 378 bp, Neisseria meningitidis; identical to SEQ ID NO: 36526

SEQ ID NO: 67274 - DNA, 774 bp, Neisseria meningitidis; identical to SEQ ID NO: 39194

SEQ ID NO: 67275 - DNA, 504 bp, Neisseria meningitidis; identical to SEQ ID NO: 44607

SEQ ID NO: 67276 - DNA, 936 bp, Neisseria meningitidis
atgaacccgaaaaaacttgttatcgccagccgcgaaagcctgcttgctatgtggcaggcaaagcatatccaaggccgtctgaaggctctgtatcccgattgcgaagtcgagattttgggcatgaccacgcgcggcgatcagattttggacaaaactttgtcaaaagtcggcggtaaaggcttgtttgtcaaagagttggaacaggctttatatgacgggcgcgccgatttggcggtgcattcgattaaagacgtaccgatggatttgcctgaaggtttcgcgcttgcggccatcggcgaacgcgccaatccgtttgacgcatttgtgtccaaccaatacacgcgtttggaagaaatgcccgaaggcgcggttgtcggcacatccagcctgcgccgcgaagcccagttgcgtgcgcgctatccgcatttgcttatcaaacctttgcgcggcaatgtgcaaacccgtttgtccaaactcgataacggcgaatacgacgcaattatcttggctgccgccggtttgcagcgtctgaaattggacggacgcatccgcatgattttgtcggaatccgacagcctgcctgccgccggacaaggcgcattgggtatcgaaattgccgcgcaccgcgaagatttgtatgaagttttgaaacccttgaaccacggtgttaccaatgcctgcgttaccgccgaacgcgccctcgcacgcgctttgggcggaagctgccaagtgcctttggccgcatattgcacggaagaaaacggcttgctgaccttgcgcggcttggtcggacaccccgacggttcggttgtgttgcgggcggacgcgcaagcccctgccgaatatgccgacgcgctcggacgcgctgtcgctaagaaattggcggacgacggtgcgcgggaattgattggagcagtattgaatacggaaaattga

SEQ ID NO: 67277 - DNA, 903 bp, Neisseria meningitidis
atggacagcctgatgacattgctttcggtattggtaccgatgtttgccggattttttatccgtgtgcccaagccttacctgcccgctttggataaggtgctatcggttttggtgtatgccgtgctgctgctgatcggcgtatcgttgtcgcgcgtggaggatttgggttcgcggttggacgatatggcgttgacggttctgtggctgtttgtttgtacggtcgggacgaacctgcttgctttggcagtgttgggaaagttattcccgtggcggataaaggggaaagggaagggcgtttcggtcggtgtgtcgggcagtgtggggcagctcggatgcgtgctgctcggatttgcatccggcaaactgatgcgcgatatttggatgccgtctgaaagcgcgggcatgtattgtctgatgctgctggtgttcctcatcggcgtacagctcaaaagcagcggcgtatcgttgcggcaggttttggtcaaccgcaggggtattcggttgtcggtctggtttatgctttcatctctttcgggcgggctgctgtttgccgcatcggcagacggcgtgtcgtggacgaaaggtttggcgatggcttccggcttcggttggtattccctctcgggtttggtgatgaccgaggcttacggcgcggtatggggcagtatcgcgcttttgaacgatttggcacgagagctgttcgcgctggcatttattccgctgctgatgaagcgttttcccgatgcggcagtgggggtcggcggcgcgaccagtatggatttcacattgcccgtgattcggggtgcgggcggcttggaagccgtaccggtagcggtcagcttcggcgtggtggtcaatatcgccgctccgtttctgatggtggtgttttccgctttgggctga

SEQ ID NO: 67278 - DNA, 1677 bp, Neisseria meningitidis
atgctgacctacactccgcccgatgcccgcccgcccgccaaaacccacgaaaagccgtggctgctgctgttgatggcgtttgcctggttgtggcccggcgtgttttcccacgatttgtggaatcctgccgaacctgccgtctataccgccgtcgaagcactggcaggcagccccacccctttggttgcccatctgttcggtcaaaccgatttcggcataccgcccgtgtatctttgggttgccgccgcgttcaaacatttgctgtcgccgtgggcagccgacccgtatgatgccgcacgctttgccggcgtgtttttcgccgttgtcggactgacttcctgcggctttgccggtttcaactttttgggcagacaccacgggcgcagcgtcgtcctgattctcatcggctgtatcgggctgattccagttgcccatttcctcaaccccactgccgccgcctttgccgccgccggactggtgctgcacggttattctttggctcgccggcgcgtgattgccgcctcttttctgctcggtacgggctggacgctgatgtcgttggcagcagcttatccggcagcatttgccctgatgctgcccttgcccgtactgatgtttttccgtccgtggcaaagcaggcgtttgatgttgacggcagtcgcctcacttgcctttgccctgccgcttatgaccgtttacccgctgctcttggcaaaaacgcagcccgcgctgttcgcgcaatggctcgacgatcacgttttcggtacgttcggcggcgtgcggcacgttcagacggcattcagtttgttttactatctgaaaaacctgctttggtttgcattgcccgcgctgccgctggcggtttggacgctttgccgtacgcgcctgttttcgaccgactgggggattttgggcgttgtgtggatgcttgccgttttggtgctgcttgccgtcaatccgcagcgttttcaggataacctcgtctggctgctgccgccgcttgccctgttcggcgcggcgcaactggacagcctgaggcgcggcgcggcggcgtttgtcaactggttcggcattatggcgttcggactgtttgccgtgttcctgtggacgggctttttcgccatgaattacggctggcccgccaagcttgccgaacgcgccgcctacttcagcccgtattacgttcccgacatcgatcccattccgatggcggttgccgtactgttcacacccttgtggctgtgggcgattacccgcaaaaacatacgcggcaggcaggcggttaccaactgggcggcaggcgttaccctgacctgggctttgctgatgacgctgttcctgccgtggctggacgcggcgaaaagccacgcgcccgtcgtccggagtatggaggcatcgctttccccggaattaaaacgggagctttcagacggcatcgagtgtatcgacataggcggcggcgacctacacacgcggattgtttggacgcagtacggcacattgccgcaccgcgtcggcgatgtacaatgccgctaccgcatcgtccgcttgccccaaaatgcggatgcgcctcaaggctggcagacggtctggcagggtgcgcgcccgcgcaacaaagacagtaagttcgcactgatacggaaaatcggggaaaatatattaaaaacaacagattga

SEQ ID NO: 67279 - DNA, 1326 bp, Neisseria meningitidis
atgaaaaaatacctattccgcgccgccctgtacggcatcgccgccgccatcctcgccgcctgccaaagcaagagcatccaaacctttccgcaacccgacacatccgtcatcaacggcccggaccggccggtcggcatccccgaccccgccggaacgacggtcggcggcggcggggccgtctataccgttgtaccgcacctgtccctgccccactgggcggcgcaggatttcgccaaaagcctgcaatccttccgcctcggctgcgccaatttgaaaaaccgccaaggctggcaggatgtgtgcgcccaagcctttcaaacccccgtccattccgttcaggcaaaacagttttttgaacgctatttcacgccgtggcaggttgcaggcaacggaagccttgccggtacggttaccggctattacgaaccggtgctgaagggcgacgacaggcggacggcacaggcccgcttcccgatttacggtattcccgacgattttatctccgtccccctgcctgccggtttgcggagcggaaaagcccttgtccgcatcaggcagacggggaaaaacagcggcacaatcgacaatgccggcggcacgcacaccgccgacctctcccgattccccatcaccgcacgcacaacggcaatcaagggcaggtttgaaggaagccgcttcctcccctaccacacgcgaaaccaaatcaacggcggcgcgcttgacggcaaagcaccgatactcggttacgccgaagaccccgtcgaactcttttttatgcacatccaaggctcgggccgtctgaaaaccccgtccggcaaatacatccgcatcggctatgccgacaaaaacgagcatccctatgtttccatcggaaaatacatggcggataagggctacctcaaactcggacaaacctccatgcagggcattaagtcttatatgcggcaaaatccgcaacgcctcgccgaagttttgggtcaaaaccccagctatatctttttccgagagcttaccggaagcggcaatgacggccctgtcagcgcactgggcacgccgctgatgggcgagtacgccggcgcagtcgaccggcactacattaccttgggcgcgcccttatttgtcgccaccgcccatccggttacccgcaaagcactcaaccgcctgattatggcgcaggataccggcagcgcgattaaaggcgcggtgcgcgtggattatttttggggatacggcgacgaagccggcgaacttgccggcaaacagaaaaccacgggatatgtctggcagcttctgcccaacggtatgaagcccgaataccgcccgtaa

SEQ ID NO: 67280 - DNA, 1044 bp, Neisseria meningitidis
atgattccggccacctacaccctgtcccaaatcaccgcgcggctcggcggcgaatggcgcggcgaggacatttccgttaccgccgtgcgcccgctcgcagacgcgcaggcggaacacatcagcttccttgccaatccgaaatacaaagccgaagtccacgacagcagcgcgggcgcggtcatcgtttccgccaaagcggcagacggatttgaagggcgcaacctgattgtcgccgacgacccctatctctatttcgccaaagtcgcccgcctgttttcacccgtcgtcaaagcgcgcggcggcatccatccgaccgccgtcgtcgaaccgagcgcgaccgttcccgcaaactgcgaaatcggcgcgaacgcctacatcggcgcaaacaccgtgctcggcgaaggctgccgcatcttggcaaacgccgtcgtccaacacgattgcaaactgggcgacgaagtcgtcctgcatcccaacgccgtcgtttattacggctgcacactgggcagacgcgtcgaaatccacagcggcgcggtcatcggcgcggacggtttcggactcgcttttgccggcgattcatggtttaaaatcccgcaaaccggcgcggtaacgctgggcgacgacgtagaaatcggctcgaacaccaacatcgaccggggcgcgatgagcgacaccaccgtcggcaacggcaccaaaatcgacaaccaagtccaaatcggacacaactgcaaaatcggttcgcacaccgtcatcgccgccaaaaccggcatctcaggcagcgtaaccataggcagctactgcatcatcggcggcggcgtcggcacggtcggacacatcgaaatcgccgacaaaaccaccatcggcggcggcacgtccgtcacccacagcattaccgaaagcggcaaacacctcgccggcatcttcccgatgtccacccataaagaatgggcgcgcaacgctgtttacatccaccgcttaagcgaaatgaacaaacgcctcaaaacgctggaacagcagctttcagacggcaaagacacgcaataa

SEQ ID NO: 67281 - DNA, 645 bp, Neisseria meningitidis
atgaagctcaaacatctgttgccgctgctgctgtcggcagtgttgtccgcgcaggcatatgccctgacggaaggggaagactatcttgtgttggataaacccattcctcaagaacagtcgggtaaaattgaggttttggaatttttcggctatttctgcgtacattgccatcatttcgatcctttgttattgaaactgggcaaggcattgccgtctgatgcctatttgaggacggagcacgtggtctggcagcctgaaatgctcggtctggccaggatggcggctgccgtcaatttgtcgggtttgaaatatcaggcaaaccctgccgtgtttaaagcagtttacgaacaaaaaatccgcttggaaaacagggctgttgccggaaaatgggctttgtctcaaaaaggctttgacggcaaaaaactgatgcgcgcctatgattcccccgaagctgccgccgccgcattaaaaatgcagaaactgacggaacaataccgcatcgacagcacgccgaccgttgtcgtcggcggaaaataccgcgttatcttcaataacggctttgacggcggcgttcatacgattaaagaattggttgccaaagtcagggaagaacgcaagcgtcagccccctgctgtacaaaaatag

SEQ ID NO: 67282 - DNA, 1764 bp, Neisseria meningitidis
atgggttttcctgttcgcaagtttgatgccgtgattgtcggcggtggtggtgcaggtttacgcgcagccctccaattatccaaatccggtctgaattgtgccgttttgtctaaagtgttcccgacccgttcgcataccgtagcggcgcagggcggtatttccgcctctctgggtaatgtgcaggaagaccgttgggactggcacatgtacgataccgtgaaaggttccgactggttgggcgaccaagatgcgattgagtttatgtgccgcgccgcgcctgaagccgtaattgagttggaacacatgggtatgccttttgaccgtgtggaaagcggtaaaatttatcagcgtcctttcggcggccatactgccgaacacggtaaacgcgcggtagaacgcgcctgtgcggttgccgaccgtacaggtcatgcgatgctgcatactttgtaccaacaaaacgtccgtgccaatacgcaattctttgtggaatggacggcacaagatttgattcgtgatgaaaacggcgatgtcgtcggcgtaaccgccatggaaatggaaaccggcgaagtttatattttccacgctaaagctgtgatgtttgctaccggcggtggcggtcgtatttatgcttcttctaccaatgcctatatgaataccggcgatggtttgggcatttgcgcgcgtgcgggtattccgttggaagatatggaattctggcaattccacccgaccggcgtggcaggtgcgggcgtgttgattaccgaaggcgtacgcggcgagggcggtattctgttgaatgccgacggcgaacgctttatggaacgctatgcgccgaccgtaaaagacttggcttctcgcgacgttgtttcccgcgcgatggcgatggaaatctacgaaggtcgcggctgcggtaaaaacaaagaccatgtcttactgaaaatcgaccatatcggcgcagaaaaaattatggaaaaactgccgggcatccgcgagatttccattcagttcgctggtatcgatccgattaaagacccgattcccgttgtgccgactacccactatatgatgggcggtattccgaccaactaccatggcgaagttgtcgttcctcaaggcgacgaatacgaagtgcctgtaaaaggtctgtatgcggcaggtgagtgcgcctgtgcttccgtacacggtgcgaaccgcttgggtacgaactccctgctggacttagtggtattcggtaaagctgccggcgacagcatgattaaattcatcaaagagcaaagcgactggaaacctttgcctgctaatgccggcgaactgacccgccaacgtatcgagcgtttggacaatcaaactgatggtgaaaacgttgatgcattgcgccgcgaactgcaacgctccgtacaattgcacgccggcgtgttccgtactgatgagattctgagcaaaggcgttcgagaagtcatggcgattgccgagcgtgtgaaacgtaccgaaatcaaagacaagagcaaagtgtggaataccgcgcgtatcgaggctttggaattggataacctaattgaagtggcgaaagcgactttggtgtctgccgaagcacgtaaagaatcacgcggtgcgcacgcttcagacgaccatcctgagcgcgatgatgaaaactggatgaaacatacgctgtaccattcagatgccaataccttgtcctacaaaccggtgcacaccaagcctttgagcgtggaatacatcaaaccggccaagcgcgtttattga

SEQ ID NO: 67283 - DNA, 555 bp, Neisseria meningitidis
atgaaaaaaatcatcgcctccgcgcttatcgcaacattcgcactcgccgcctgccaagacgacacgcaggcgcggctcgaacagcagcagaaacagattgaagccctgcaacagcagctcgcacagcaggcagacgatacggtttaccaactgactcccgaagcagtcaaagacaccattcctgccgaagcacaggcaaacggcaacaacgggcaacccgttaccggtaaagacgggcagcagtatatttacgaccaatcgacaggaagctggctgctgcaaagcctggtcggcgcggcggcaggcgcgtttatcggcaacgcgctggcaaacaaattcacacgggcgggcaaccaagacagccccgtcgcccggcgcgcgcgtgcagcctaccatcagtccgcacatcccaatgcgcgcaccagcagggatttgaacacgcgcagcctccgtgcaaaacaacaggcggcgcaggcgcagcgttaccgcccgacaacgcgcccgcccgccaattaccgccgccccgctatgcgcggtttcggcaggaggcggtaa

SEQ ID NO: 67284 - DNA, 231 bp, Neisseria meningitidis; identical to SEQ ID NO: 44466

SEQ ID NO: 67285 - DNA, 915 bp, Neisseria meningitidis; identical to SEQ ID NO: 39317

SEQ ID NO: 67286 - DNA, 204 bp, Neisseria meningitidis
atgccgtctgaagcatgtttggttttcagacggcatttccttcgcttaaaacagcgtatcggcaaccccgccctgcccgtccacggcaatctgcatctgaaaaccatctgtatcccaaaccacacccccatcccgatttccgtcatttgcaccctgcccgtattgggcaatcatcggtttttcgcttacaatagccgaatctga

SEQ ID NO: 67287 - DNA, 966 bp, Neisseria meningitidis
atgaaccttaataaactgaaaaacaaactgttccgccgcccggggcagcgtgtggtgattgccgtaccgtatatttggcttttggtgctgtttctgattccgttcgccatcgtgctgaaaatcagctttgccgaacaagaaatctccattccgccgtttacgccgctgatcagcatcgacgaagatttaggtcgtctgaatatcgccatcagttatcaaaactatgccgatattttccaaaatttttggcatacccttaacccgttcggcgacagtgaaaacagcaatatctatctgatgacctactggtcttcaatcaaaaccgcattgatgacgacagtgatttgcctgttggtcggttatccgaccgcctatgcgatttctcgtgccaatccttctgtccgcaatggtttgctgcttgccattatgctgcccttttggacatcgttcctgttgcgcgtctatgcgtggatgggtctgctcgggcataacggtattgtaaacaacctgttgattaaaatgggtattatcagcgagcctttggatttgttctacaatgccttttcgctcaatttggtgatggtttacgcctatctgccgtttatgattctgccgctatacacgcaactggtgaaactcgacaaccgcctgcttgaagcggcttccgatttgggcgcggggccggtcaaatcgttcttgacgattaccctgcctttgtcgaaaaccggcattattgcaggctccatgctggttttcgtccctgctgtcggcgagttcgtcattcccgagctggtcggcggttcggaaaacctgatgattggtaaagtcttgtggcaggcgttcttcgatcaaaacaactggccgctggcttccgccgtcgccgtcgtgatggtcgcgctgctggtcgtgccgattgccctgtttcagcattatgaaaaccgcgaattggaagaaggagccaaataa

SEQ ID NO: 67288 - DNA, 780 bp, Neisseria meningitidis; identical to SEQ ID NO: 43297

SEQ ID NO: 67289 - DNA, 936 bp, Neisseria meningitidis
atggggcacaatatgatgaccacccaaaaatggtatgagcatattactaatgtaatcataggcaatactgctaatttcaatagcggttgccctgaagctatagattatgtagatgaaagaaaaggcgttccgcttgcagcgatgagacatattttaatgtatactgaagctgcggcttcccatgcctatctatttgaacatgatcttaataaattcaagcaatatgcttatgttgcaggaaagctgggtattttgcggagtgtaaattctacagaccctgaacccttcttctttccctgtgacatgctcaacattcaagatccgatgtttctgatgctgatgagcgacagcccgcagctgcgtgagtttctggtgcgcaatatcgacaacatcgccaacgatacagaagccttcgtaaaccgctacgacctcaaccgtcatatgatttacaatactctgctgatggtggaaggtaagcagcttgatcggttgaaacaacgtagcgagaaagtcttggcgcatcccacccctagcaaatggctgcaaaagcggttgtacgattaccgcttcttcctcgctttcgccgaacaggatgccgaggcgatgaaggccgccttagagccgcttttcgataaaaaaaccgcgcgtatggctgccaaagaaacattgtcctatttcgatttctacctgcagccgcaaatcgttacctatgccaaaatcgcatccatgcacggtttcgatttgggcatagaccacgaaatcgcaccgagggatttgattgtttacgatccgctgccagcagacgaatatcaagacatcttcgattttatgaaacagtatgacttgtcttatccgtatgaatatctgcaggattggatagattactatacgttcaaaaccgataagctggtatttggtaacgcgaagcgagagtga

SEQ ID NO: 67290 - DNA, 2277 bp, Neisseria meningitidis
atgacaacattacatttctcaggcttcccgcgtgtcggcgccttccgcgaattgaaattcgcccaagaaaaatactggcgcaaagaaatcagcgagcaagaattgctggctgttgctaaagacttgcgcgagaaaaactggaaacaccaagctgctgccaacgccgattacgttgccgcaggcgatttcactttctacgaccacatcctcgacctgcaagtcgccaccggcgcgattcccgcccgcttcggcttcgacagccaaaacctgtctttggaacaattcttccaactggcgcgcggtaacaaagaccaattcgctatcgaaatgaccaaatggttcgacaccaactaccactacttggtgcctgaattccacgccaatactgaattcaaagccaacgccaaacactacgtccaacaactgcaagaagcccaagctttgggcttgaaagccaaaccgaccgttgtgggtccgttgactttcctgtgggttggtaaagaaaaaggcgccgttgaattcgaccgtctgagcctgttacctaaactgttgcctgtttacgttgaaatcctgactgctttggttgaagccggtgccgagtggattcaaatcgacgagcctgctttgactgtcgatctgcctaaagaatgggtagaagcctacaaagacgtttacgctactttgagcaaagtaagtgccaaaatcctgctgagcacttacttcggttctgttgccgaacacgccgcattgttgaaatccctgcctgttgacggcctgcacatcgacttggtacgcgctcccgagcaactggacgcatttgccgactacgacaaagttctgtctgcaggcatcatcgacggccgcaacatctggcgcgccaacctgaacaaagttttggaaactgttgagcctctgcaagccaaactgggcgaccgtttgtggatttccagctcttgctctctgctgcacactccatttgacttgtcagttgaagaaaaactgaaagccaacaaaccggacctgtactcttggttggcatttaccctgcaaaaaacccaagaattgcgcgttctgaaagccgcattgaacgaaggtcgcgattccgttgccgaagaactggccgccagccaagctgctgccgattcacgcgccaacagcagcgaaatccaccgtgcagacgttgccaaacgcctggccgatttgcctgccaacgcagaccaacgcaaatctccatttgccgaccgtatcaaagcgcaacaagcatggttgaacctgcctctgctgccgacgaccaacatcggttctttcccgcaaactaccgaaatccgccaagcacgcgcagccttcaaaaaaggcgaactgtctgccgccgattacgaagccgcgatgaaaaaagaaatcgccttggtggttgaagaacaagaaaaactggatttggacgtactggtacacggcgaagccgagcgtaacgacatggtcgaatacttcggcgaattgttgagcggttttgcattcacccaatacggctgggtacaaagctacggctcacgttgtgttaaaccaccgattatcttcggtgacgtaagccgtcctgaagccatgactgtcgcctggtctacttacgcacaaagcctgaccaaacgcccgatgaaaggtatgttgaccggccctgtaaccattctgcaatggtcttttgtccgcaacgatattcctcgctctaccgtgtgcaaacaaatcgcactggctctgaacgacgaagtattggatctggaaaaagcaggcatcaaagtcatccaaattgacgaacctgccatccgcgaaggcttgccgctgaaacgcgccgattgggatgcctacctgaactgggcgggcgaatccttccgcctgtcctctgccggttgcgaagacagcacacaaatccacactcatatgtgctactccgagttcaacgatatcctgcctgcgattgctgcaatggatgcggacgtgatcaccatcgagacttcacgttccgacatggaactcttgaccgcgttcggcgaattcaaatacccgaacgacatcggcccgggggtttacgacatccacagcccgcgcgtaccgacagaagccgaagtggagcacctgttgcgcaaagccatcgaggttgtaccagttgaacgtctgtgggttaacccggactgcggcctgaaaacacgcggctggaaagaaactttggaacaactccaagtgatgatgaacgtaacccacaaattgcgtgccgaattggcgaaataa

SEQ ID NO: 67291 - DNA, 807 bp, Neisseria meningitidis
atgtggcattgggacattatcttaatcctgcttgccgtaggcagtgcggcaggttttattgccggtctgttcggcgtaggcggcggcacgctgattgtccctgtcgttttatgggtacttgatttgcagggtttggcacaacatccttacgcgcaacacctcgccgtcggcacatccttcgccgtcatggtcttcaccgccttttccagtatgttggggcagcacaaaaaacaggcggtcgactggaaaaccgtatttgcgatgatgccgggtatgatattcggcgtattcgcgggcgcactctccgcaaaatatatccccgcattcgggcttcaaatcttcttcatcctgtttttaaccgccgtcgcattcaaaacactgcataccggccctcagacggcatcccgcccgctgcccggactgcccggactgactgcggtttccacactgttcggcgcaatgtcgagctgggtcggcataggcggcggttcactttccgtccccttcttaatccactgcggcttccccgcccataaagccatcggcacatcatccggccttgcctggccgattgcactctccggcgcaatatcgtatctgctcaacggcctgaatattgcaggattgcccgaagggtcactgggcttcctttacctgcccgccgtcgccgtcctcagcgcggcaactattgcctttgccccgctcggtgtcaaaaccgcccacaaactttcttctgccaaactcaaaaaatccttcggcattatgttgcttttgattgccggaaaaatgctgtacaacctgctttaa

SEQ ID NO: 67292 - DNA, 666 bp, Neisseria meningitidis
atggattcatggtttgaagatacggcgatggggcggtatgttgcaaaattggaacaggatttcttcgggcggtatctggattcataccgtttttcgggaatgtgtgcggttcaggtgggcggtccgtggctgagcctgtctgaagatgttgtctgtgtgccgcgagatatgtcgatgtcggcggaaaatatggctttggcggatgtttctgcggatatgctgcttttcccgcatactctggaaggcggtgttccttcgcaaatcctgtcggaagcgcaccggatattgaaaccgtccggacgtttgatgctgacgggtttcaatccgtattcgctctggggattcagccgttggtttgacggcgaacgcctgccggaaaaacggttttgtctgccgctgcccgagttgaaaaggcagcttgcggatgtcggtttcgatattgaatttgggaaatttatggtgtatctgccgcccgtttcgtcgctcgggcaaatacgcttttggcggtttatggaaaaggcgggcgaccgttggtggccgcagtgtgccgcagtgtacggtttggttttggtcaaaagggcggcgggcgtaacgcccctgcccgagtgggacgggtatttgggcggcaaagcccttgcggcgggtgcggcaagggttgcggattag

SEQ ID NO: 67293 - DNA, 969 bp, Neisseria meningitidis
atgaaactcaccctcgccattccctcgctcaatttggataaagacgaaacccgaatacctctctgcctgcacgccttcaacaaaatcctgcaatacggctcgctgcaccgccaaagctgcacggcttcggcattttacgcgcgttatttgtggtgcggcagactggcggaacgcgcggcgcaaagcctgaatatgccgtctgaaaccgtcgcgctcgccacgcccgtctggcaaaagatggggatgcatcaggcaaatgtgctgacggcggaatatttggatgtcggtacggatgaagcggaacggctctgccgcgatctgtcggcgttttacggcgatattccgtggcgtttcgttcccgtcctgcccgaattatggctggtttcccttccccgcgcgtaccgctggggcgcgaagcccgttttggacttgggcggactgttgggtgcggacgatcaaccggacggggaagacgcgttggaatggctgcgcgtccaaaccgaaatccaaatgtggctggcggcgcaccccgtcaaccataaccgcaagaaacgcgggctgcccgagttgaacggcttatggctttgggacagtctgcacggaagcagtcaaggcggcacgcttttcgccgatacggtttggagccgtttccaccccgaccgccgcgcattgcccgacaacttccgcgcctatgaagaaacggcggcacacctgcccgacacgcaccatatcctgtttatggacgatttgcgcctgaccgccctgacaggggacagggagcggtatgcatcggttttacagcagtgggaagaacactggttcgcaccgatctacgaagccgtccgtaccggcaaaatcaaacggctggacatcaccacggacggacaacacggcggtacgctgaccttcaaacccgccgacaggtggaaattttggcgcggcgcgaaaacctttgacggaatctggtga

SEQ ID NO: 67294 - DNA, 279 bp, Neisseria meningitidis; identical to SEQ ID NO: 66829

SEQ ID NO: 67295 - DNA, 1125 bp, Neisseria meningitidis
atgaccgcaaccactgcgtcttcagccaaaccttatctcaaaatccaaggtttggtgaaaaagtttggtgacaattacgctgtcgataacatcgacttggacatttatcaacacgaaatcttcgctcttttgggcagttccggcagcggaaaatccacgctgctgcgtatgctggcgggtatggaaagtcccaatcagggaaaaattatccttgatggtcaggatattaccaaacttgcaccctatgaccgccccatcaatatgatgttccaaagttacgcgctttttccgcatatgaccgtagaacaaaacattgccttcggtctgaaacaggacaaaatgcctaaaggcgaaatcgccgcgcgcgtcgaagaaatgctccgcctggttcagatgaccaaatttgctaaacgcaaaccgcaccaattgtccggcggtcagcagcagcgcattgctttggcacgcagtctggcaaaacgtccgaaaattctactgctggatgagcccctcggtgcattggacaaaaaactgcgccaacaaacccagcttgagttggtcaatacgctggaacaagtcggcgtaacctgtattatggttacacacgaccaagaagaggcgatgacgatggcgacccgcatcgccattatgtccgacggtcagttgcagcaagtcggcacacccagcgacgtgtacgactatcccaacagccgcttcactgccgagtttatcggcgaaaccaacatctttgacggtgtggtgattgaagatcatgccgactatgccgttatcgaatgcgaaggtttggaaaaccacgtccgcatcgaccacggtttgggtggtccgagcgagcaggacctttgggttagtattcgaccagaggatattgatttatataaagaaaaacccgaatatttgggcgactacaactgggcgaaaggcacggtaaaagaaatcgcctatttgggcagcttcgccatttaccatatcaaactcgccaacgggcgcgtcgtcaagagccaagtccccgccccttactggtatgtgcgcaacattacaccgccaacttgggacgaaaccgtctatatcagctggccggaaaaccaaccgactccgttgttccgttga

SEQ ID NO: 67296 - DNA, 2019 bp, Neisseria meningitidis
atgaataaatctttatccgggtcggtagaagaataccgcgaactgacgctccgaggcatgatactcggtgcattgatcactgtaatttttactgcgtccaacgtttacctcggtttgaaagtcgggctgacctttgcctcgtcgattccggcggcggtgatttcgatggcggttttaaagtttttcaaaggcagcaatattttggaaaacaacatggtgcagacccaagcttcggcggcgggtacgctttcgaccatcatcttcgtcctgcccggtttgctgatggcgggctactggagcggtttcccgttctggcagacgacgcttttatgtattgccggcgggattttgggggtgattttcaccattccgctgcgttacgcgatggtggtgaaaagcgatttgccttatccggaaggtgtggcggctgctgaaattttgaaagtgggcggtcatgaagaaggggataaccgtcagggcggcagcggcatcaaagagctggcggccggcggtgcgttggcgggattgatgagcttttgcgccggaggtctgcgcgtgattgccgacagcgcgagttattggtttaaaagcggtacggcgattttccagctgccgatgggcttttcactggcattgttgggcgcgggctatttggtcggactgacgggcggtatcgccatcctgttgggcatttcgattgcttggggcattgccgtgccgtatttctcctcacacattccgcaaccttccgatatggaaatggcggcgtttgcgatgaagctgtggaaggagaaagtgcgttttatcggtgcggggactattggcattgcggcggtttggacgctgttgatgctgctcaagccgatggtggaaggcatgaagatgtcgttcaagagttttggcggcggtgcgcccgctgcggaacgcgccgaacaggatttgtcgcctaaggctatgattttttgggtgctggcgatgatgtttgttttaggcgtgtcgttttaccactttatcggcgattcgcacattacgggcggcatggcttggcttttggtggtcgtttgcacgcttttggcttccgtcatcggctttttggtcgccgccgcctgcggttatatggcaggtttggtcggctcgtcttccagcccgatttccggcgtgggcatcgtgtccgtcgtcgttatttcactggttttgctgctggtaggcgaatccggaggtttgttggcggatgaggctaaccgcaaatttttgctggcactgactttgttttgcggctcggcagtaatctgcgtggcttcgatttccaatgacaacctgcaagacttgaaaaccggctacctgctcaaagccacgccttggcggcagcaagtcgccctgattatcggctgtatcgttggtgcgctggttatttcgcccgtgttggaactgctttacgaagcctacggctttaccggcgcaatgccgcgcgaaggcatggatgcggcgcaggctttggcagcccctcaagcgactttgatgacgaccatcgcgtcgggcattttcgcccacaacctcgaatgggtctatatctttaccggcatcgcgattggtgcggtgttgattgccgccgatttggtgttgaaaaaatcatcaggcggcaaacttgccctgcccgtccttgcggtcggtatgggtatttatctgccgccgtccgtcaatatgcccatcgtggcaggcgcggtgttggcggcggtgttgaaacacatcatcggtaaaaaagcggaaaaccgtgaaggccgtctgaaaaacgccgagcgcatcggaaccttgttctccgccggcctgattgtcggtgaaagcctgattggtgtgattatggcgtttattattgccttctccgtgaccaacggcggctcggacgcgccgcttgcgttgaatctgcaaaactgggatgccgccgcctcatggttgggtttggcgttcttcgttaccgggatgtttttctttgcacagcgcgtactgaaggcgggtaggtag

SEQ ID NO: 67297 - DNA, 264 bp, Neisseria meningitidis; identical to SEQ ID NO: 37542

SEQ ID NO: 67298 - DNA, 1812 bp, Neisseria meningitidis
atgaaacaaatccgcaacatcgccatcatcgcccacgtcgaccacggcaaaaccacattggtcgaccaactgctgcgtcaatccggcacattccgcgccaaccagcaggttgacgagcgcgtgatggacagcaacgacctcgaaaaagaacgcggcatcaccatcctcgccaaaaacaccgccatcgattacgaaggctaccacatcaatatcgtcgatacgccgggacacgccgacttcggcggcgaagtagagcgcgttttggggatggtggactgcgtcgtcttgttggtggacgcgcaggaaggcccgatgccgcaaacccgtttcgtgaccaaaaaagccttggctttggggctgaaaccgattgtcgtcatcaataaaatcgacaagccgtctgcacgtccgagctgggttatcgaccaaactttcgagctgttcgacaacttgggcgcgaccgacgagcagttggatttcccgattgtttacgcttcaggtttgagcggctttgccaagctggaagaaaccgacgagagcagcgatatgcgcccgctgttcgacaccatcttaaaacacacgcccgcaccgagcggcagcgcggacgagccgctgcaactgcaaatttcccaactcgactacgacaactacaccggccgcctcggcatcggtcgtatcttgaacggacgcatcaaacccggccaaaccgttgccgtcatgaaccacgagcagcaaatcgcccaaggccgcatcaaccagcttttgggtttcaaaggcttggaacgcgtaccgcttgaagaagccgaagccggcgacatcgtgattatttccggtatcgaagacatcggcatcggcgtaaccatcaccgacaaagacaaccccaaaggcctgccgatgttgagcgtggacgaaccgacgctgacgatggactttatggtcaacaccagcccgctggcgggtacggaaggcaaattcgtaaccagccgccaaatccgcgaccgcctgcaaaaagaattgctgaccaacgtcgccctgcgcgtggaagacaccgccgatgccgacgtgttccgcgtatccggacgcggcgagctgcacctgaccattttgttggaaaatatgcgccgcgaaggctacgaactcgccgtcggcaaaccgcgcgtcgtgtaccgcgacatcgacggtcaaaaatgcgaaccttatgaaaacctgaccgtggacgtacccgacgacaaccaaggcgcggtaatggaagaactcggccgccgccgtggcgaactgactaatatggaaagcgacggcaacggacgcacccgcctcgaataccatattccagcgcgcggcttgatcggtttccaaggcgaatttatgaccctgacgcgcggggtcgggctgatgagccacgtgttcgacgattacgcgcccgtcaaacccgatatgcccggccgccacaacggcgtgctggtgtcccaagagcagggcgaggcagtcgcttacgccttgtggaatctggaagaccgcggccgtatgttcgtatcgcccaacgacaaaatctacgaaggtatgattatcggcatccacagtcgcgacaacgatttggtggtcaacccgctcaaaggcaaaaaacttaccaacatccgtgccagcggtaccgacgaagccgttcgcctgaccacgccgattaagctgacgctggaaggtgcggtcgagtttatcgacgatgatgagctggtagaaatcacgccgcaatccatccgcctgcgcaagcgttacctgagcgaattggaacgccgccgccatttcaaaaagctagattga

SEQ ID NO: 67299 - DNA, 1404 bp, Neisseria meningitidis
atggatactacattgaaaaccaccttgacttctgttgcagcagccttcgcattatccgcctgcaccatgattccccaatacgagcagcccaaagtcgaagttgccgaaacgttcaaaaacgataccgccgacagcggcatccgtgcggtcgatttaggttggcatgactattttgccgacccgcgcctgcaaaagctgatcgacatcgcactcgagcgcaataccagtttgcgtaccgccgcattgaacagcgaaatctaccgcaaacaatacatgattgagcgcaacaacctcctgcccacgcttgccgccaatgcgaacgactcgcgccaaggcagcttgagcggcggcaatgtaagcagcagctacaaagtcggactgggtgcggcatcttacgaactcgatctgttcgggcgtgtacgcagcagcagcgaggcggcactgcaaggctatttcgccagcaccgccaaccgcgatgcggcacatttgagcctgattgccaccgttgccaaagcctatttcaacgaacgttacgccgaagaagcgatgtctttggcgcaacgtgttttgaaaacgcgcgaggaaacctacaagctgtccgaattacgttacaaggcaggcgtgatttccgccgtcgccctacgtcagcaggaagccctgatcgaatctgccaaagccgattatgcccatgccgcgcgcagccgcgaacaggcgcgcaatgccttggcaaccttgattaaccaaccgatacccgaagacctgcctgccggtttgccgctggacaagcagttttttgttgaaaaactgccggccggtttgagttccgaagtattgctcgaccgtcccgatatccgtgctgccgaacacgcgctcaaacaggcaaacgccaatatcggtgcggcacgcgccgcctttttcccatccatccgcctgaccggaaccgtcggtacgggttctgccgaattgggtgggttgttcaaaagcggcacgggcgtttggtcgttcgcgccgtctattaccctgccgatttttacctggggtacgaacaaggcgaaccttgatgtagccaagctgcgccaacaggcacaaatcgttgcctatgaatccgccgtccaatccgcatttcaagacgtggcaaacgcattggcggcgcgcgagcagctggataaagcctatgacgctttaagcaaacaaagccgcgcctctaaagaagcgttgcgcttggtcggcctgcgttacaagcacggcgtatccggcgcgctcgacttgctcgatgcggaacgcagcagctatgcggcggagggtgcggctttgtcggcacaactgacccgcgccgaaaaccttgccgatttgtacaaggcactcggcggcggattgaaacgggatacccaaaccgacaaataa

SEQ ID NO: 67300 - DNA, 846 bp, Neisseria meningitidis; identical to SEQ ID NO: 44327

SEQ ID NO: 67301 - DNA, 465 bp, Neisseria meningitidis; identical to SEQ ID NO: 42740

SEQ ID NO: 67302 - DNA, 2448 bp, Neisseria meningitidis
gtgcctgaatatgcgctgaattctatgagctttgggaatggatttagaaaatcagacgacctgatttttaaatctgttttccgcgatagctccagcgcggttttgggcggtgttgcccgatttagaaaatcagacggcggaaaaatcgatctgccttatacgttttgcgagcataagaaaacaggcgaaaagatgtggcgttggcgttgttgggataacccgcgcccattgtacggtcttgattctttggctgctgacccatcattaccggttttggttgttgagggggagaaatgtaagaacgcggcagatgctcagggttataactatgccgtcctgacgtggcatggtggttgtaataactgggataagtcggattggtcggcggtcgttgatcgtgatgtcgtcttgtggcctgattgcgattcgctgcgccaaaagctaacaaagaaagagcgcgatgatggtgttgaccctgaatccaaaccgtttctgccgcgcaatgagcagggcggaatgaaggcgatgcttggtattgctgaggtactgacaaagcagaattgccgtgtttggttggtcaatattccttctccagggatatggcctcatggtttcgatattgccgatgcgattgcagacggcgggcgcatctgcgacccttccgaagtgttgagctggatgggcgcggcggattggttggttgagtatgtgccggaagcggaaatgccgtctgaaaactctcccgcacccattcaagatatggagccggaatctgagcagttgcatgaatctctcgaagcaacaggcaaccaagggggtgcgggggatgtggatgacgaatatttggccaaattgcaaaagctgaaatcagaatttgggctggttgaaggtaaagaccacggcgtgaacagaaaaacaggggttacatatacccgaaaggcaatgactgttcatttcggcaaagacgttgtcgatgcttggtatgaatggggccgtgcgccggtgctgactatgtacgaaatcaaccgtctgaaaaaagactacgcattgattcaggcggtaaaagatgatgacacgcaagatatgatggagcgtttcatttatcttgatggttcggcatcgatttgggacaacaaactatggcgcgttgtccctgaaaaggcggctcgtctgtcgatgacgcctgatggttttaaaatttgggtcaatagcccgagccgaattgtaaaacggttcgaccgattggtctttgagcctggtcgggtgttgtctgacgactatatcaacatcttccgaggcatgccgattgaaccgaaattcccgattcccaaagaggatatgcccgaaacaaactacgaattgtatagattattccctgaaatcaagccgattctgaatttgattaatcacttatgtaatggggattaccaacaggtcgaatacattttgaattggctggcttatccgttacaaaacgtaggcgcgaagatgacgaccgccgttgtcatgcacggtcatatacacggtgcgggtaaatctttctttttcgaggaaatcgtgaagccgatgtacggcgaatacggcgcaacatatggtcaagaggacttggaaagcaactatacggcaaaccgatcaggcaaaatgttcggtatttttgaagaggtttacacaaatcagcaaaaatacaataaaacaggcagccaaaaacatatgattaccggcaagacgatgcgcgtcgagcggaaattccaggatgcttacgaagaagcaaaccatatgaattgtgtgtttttgagtaatgaatctcatcctttcaaaattgaggaaaacgaccggcgttatttcgttgtatggcctgagaaaaagttggacaaaaaattgcgcgatgaagttttagactgtatcggcaacgatggtgtccgtttgttttacagtttcctgctgtgttggaatttttatctgacttacgggcaacagggagcagaaaacgaaaaaggatacgaggtaatcaaactggaagagcctgtaagattcgatccaaacacgccgccgccgatgactgccgcgaaacaaaacgtcatttcctatggccgatatgcttggcaaaccttttattcggagtgggctggcggtggtattaaagacctgccgttttgctgttgcattacagacgacctttggttggtttacaaagagtggtgcaggcaaaacggcgagcgggaaactggtaaaacaaagtttctccaacacattgctgagaagatgccgcgggcgcggcgctggtggcggacgaaaaataaagatggcgacgtatcgtgtcaaaactggatttttaagccggctggctggcaagcggcggacggattgccggaaatggatgccctgggcaatgaggttttacgattccgcagcgctggttggaggtatcgcggcggtgaagaagtttga

SEQ ID NO: 67303 - DNA, 324 bp, Neisseria meningitidis
atggatattgtgcaacttgggtcggcggaattgaaggcgtggatggacgaagggcggatgttttgtttgttggacgtgcgtacggatgaagaaacggcggtttgttcgctgccaaatgcgctgcatatcccgatgaatctgattccgctgcggcagaacgagctgccggatgatgtgccgcttgtggtgtattgccatcacggtatccgcagcctgcatacggcgatgtatttggcggacgcgggttttgaaaacctgtacaaccttcagggcggcatcgatgcatgggcggccgagattgacggcaacatgatgcgttattga

SEQ ID NO: 67304 - DNA, 726 bp, Neisseria meningitidis
atgccccgattccacctgcccgaaaacctttccgtcggacaaaccgtcgccctgcccgacaacatcgtccgccacctcaacgtcctgcgcgtccgccccaacgaaaacatcaccctcttcgacggcaaaggcaaggcacacgccgcacggctgaccgttttggaaaaacgccgcgccgaagccgaaatcctgcacgaagacacaaccgacaacgagtccccgctcaacatcacactgatacaatccatctcctccggcgatcgcatggatttcaccctgcaaaaaagcgtcgaactcggcgtaaccgccatacagcccgtcatcagcgaacgctgcatcgtccgcctcgatggggaacgcgccgccaaacgcctcgcacgctggcaggaaatcgtcatctccgcgtgcgaacaaagcggcaggaacaccgttccccccgtactgcccatcatcggctaccgtgaagcactcgacaaaatgccgtctgaaagcaccaagctgattatgagcatcaaccgcgcccgcaaacttgccgacatacgccaaccgtccggcgcaatcgtctttatggtcgggccagaaggcggctggacagaacaggaagaacaacaggcatttgaagctggctttcaggcggttacactcggcaaacggattttacgcacagaaaccgccccactcgccgccctcgccgccatgcagacgctttggggcgatttcgcataa

SEQ ID NO: 67305 - DNA, 219 bp, Neisseria meningitidis
ttggttgaaaccgtcaaagcggtgttgcagcgcgccattgaaacgggcggcagtaccttgagggattttgtggacagcgacggcaaaagcggctacttccaacaggaatatacagtgtacgggcggcacaatcagccgtgcccccagtgcggcggtttggttgtgaaagaaactttggggcagcgcggcacgttttattgcccgaactgtcagaaatag

SEQ ID NO: 67306 - DNA, 1908 bp, Neisseria meningitidis
atgaacccaagccccctactcgacctgattgacagcccgcaagatttgcgccgtctggacaaaaaacagctgccgcgccttgccggcgagttgcgcgcctttctgctggaatctgtcgggcagaccggcgggcatttcgccagcaatttgggcgcggtcgaactgaccatcgccctgcactatgtgtacgatacgcccgaagacaagctggtatgggatgtcggacaccaaagctatccgcacaaaatcctgacaggcaggaaaaaccagatgcacaccatgcgccaatacggcggtttagctggcttcccaaaacgcagcgagtcggaatacgacgcgttcggcgtagggcattcttccacatccatcggcgcggcgttgggcatggcggcggcagacaaactcttgggcagcgaccgccgcagcgtcgccatcatcggcgacggcgcgatgacggcggggcaggcgtttgaagccttgaattgcgcaggcgatatggatgtggatttgctggtcgtcctcaacgacaacgaaatgtcgatttcccccaacgtcggcgcgctgccgaaataccttgccagcaacgtcgtgcgcgatatgcacggcctgttgagtaccgtcaaagcgcaaacgggcaaggtattagacaaaatacccggcgcgatggagtttgcccaaaaagtcgaacacaaaatcaaaacccttgccgaagaagccgaacacgccaaacagtcgctgtctttgtttgaaaacttcggcttccgctataccggccccgtggacggacacaacgtcgaaaatctggtggacgtattgaaagacttgcgcagccgcaaaggccctcagttgctgcacgtcattaccaaaaaaggcaacggctacaaactcgccgaaaacgatcccgtcaaataccacgccgtcgccaagctgcccaaagaaagcgcggcgcaaatgccgtctgaaaacaaacctgccgccaaaccgacctatacccaagtattcggcaaatggctgtgcgaccgggcggcggcagattcccgactggttgcgattacccccgccatgcgcgagggcagcggcttggttgagtttgaacaacgattccccgaccgctatttcgatgtcggcatcgccgagcagcacgccgttacctttgccggcggtttggcttgcgaagggatgaagcccgtcgtggcgatttattccacctttttacaacgcgcctacgaccaactggtgcacgacatcgccctgcaaaacctacccgttttgtttgccgtcgaccgcgcgggcatcgtcggcgcggacggcccgacccatgccggtctgtacgatttgagctttttgcgctgcgttccgaatatgattgtcgccgcgccgagcgatgaaaacgaatgccgcctgctgctttcgacctgctatcaggcggatgcgcccgccgccgtccgctatccgcgcggcacgggtacgggcgcgccggtttcagacggcatggaaaccgtggaaatcggcaagggcattatccgccgcgaaggtgagaaaaccgcattcattgccttcggcagtatggtcgcccccgcattggcggttgccgaaaaactgaacgccaccgtcgccgatatgcgcttcgtcaaaccgatagacgaagagttgattgtccgccttgcccgaagccacgaccgcatcgttacccttgaagaaaacgccgaacagggcggcgcaggcggcgcggtgctggaagtattggcgaaacacggcatctgcaaacccgttttgcttttgggcgttgccgataccgtaaccggacacggcgatccgaaaaaacttttagacgatttgggtttgagtgccgaagcggtggaacggcgtgtgcgcgcgtggctgtcggatcgggatgcggcaaattaa

SEQ ID NO: 67307 - DNA, 339 bp, Neisseria meningitidis; identical to SEQ ID NO: 39659

SEQ ID NO: 67308 - DNA, 558 bp, Neisseria meningitidis; identical to SEQ ID NO: 45978

SEQ ID NO: 67309 - DNA, 477 bp, Neisseria meningitidis; identical to SEQ ID NO: 46371

SEQ ID NO: 67310 - DNA, 561 bp, Neisseria meningitidis
atgaaaacagcacaagaactgcgcgccggcaatgtatttatggtcggcaacgatcctatggtcgttcaaaaaaccgaatacatcaaaggcggtcgctcttccgccaaagtcagcatgaaactgaaaaacctgctgaccggcgcggcttccgaaaccatttacaaagccgacgacaaattcgacgtggtcatcctgtcccgcaaaaactgtacgtacagctactttgccgatccgatgtacgtctttatggacgaagaattcaaccaatacgaaatcgaagccgacaacatcggcgacgcgttgaaattcatcgttgacggtatggaagaccaatgcgaagttaccttctacgaaggcaaccccatctccgtagaactgcccaccatcatcgtacgcgaagtcgagtataccgagcctgccgtcaaaggcgatacttcaggcaaagtgatgaaaaccgcgcgcctggtcgggggcaccgaaatccaagtgatgtcttacatcgaaaacggcgacaaaatcgaaatcgatacccgcaccggcgaattccgcaaacgcgcttga

SEQ ID NO: 67311 - DNA, 1674 bp, Neisseria meningitidis; identical to SEQ ID NO: 52173

SEQ ID NO: 67312 - DNA, 870 bp, Neisseria meningitidis
atgaaaccgataaaaaaagccgtcttccccgtcgcagggatgggaacacgcttcctgcccgccaccaaggcaagcccgaaagaaatgctgcccatcgtcgacaagccgctgatccaatacgccgtagaagaagccgtggaagccggctgcacggaaatggtgtttgttaccgggcgcaacaagcgcagcatcgaagaccatttcgacaaggcatacgaactcgaaaccgagttggaaatgcgccataaagacaaacttctggaacacgtccgcaacatcctgccaccgaacatcacctgcctctacatccgtcaggcggaagcgctgggcttgggacacgccgtcttgtgcgcccgcgccgccatcggcgatgaacccttcgccgtgattttggctgacgacttaatcgatgccccaaaaggcgcgctcaaacaaatggtcgaagtgtacgaacgcagcggcaacagcattttgggcgtagaaaccgtcgaaccgtcgcaaaccggctcatacggcatcgtcgaaaccgaacagctcaaacagttccaacgcattaccggcattgtcgaaaaacccaagcccgaagacgcgccctccaaccttgccgtcgtcggacgctacatccttaccccgcgcattttcgacttactgaccggactgccgcgcggcgcgggcaacgaaatccagcttacagacggcatcgccaagctgctcgatcacgaatttgtcctggcgcacccctttgaaggtacgcgctacgactgcggcagcaaactgggctacctcgaagccaccgtcgcctacggcctgaaacaccccgaaaccggcgaacccttccgccgccttttggaaaaataccgtaccgaataa

SEQ ID NO: 67313 - DNA, 486 bp, Neisseria meningitidis
atgaaataccgtcgtttttaccgcaatggcggcacttacttttttacggttgtagccaataaacggcagaggattttgaccgatgatgcggtgcgtttggctttgcgacaggcggtaatggctgtgcgcgaacggtatccgtttgaaattttggcatgggtgttgatgcccgatcatctgcataccatatggcggctgccggacaatgattctgcttattcggaacgctggcggcaacggcacagccaatatttaatcggcggcaatctcaggctttggcaaaaacgcttttgggaacatactatccgcgatgaggccgatttttcctgccattttgattatctgcatttcaatccggtcaaacatggctatgtaggacaaatttccgattggcggttttctacgtttcaccgttatgtcaaacagggtatttatccgcataattggggtggcggcaatgcggacttttctattggatacgattga

SEQ ID NO: 67314 - DNA, 267 bp, Neisseria meningitidis
  misc_feature 248, 249, 250, 251, 252: 'n' is a, c, g or t
atgaagaaaatgttcgtgctgttctgtatgctgttctcctgcgccttctcccttgcggcggtaaacatcaatgcggcttcgcagcaggagctggaggcgctgccgggcataggccctgcgaaggcgaaggccattgcggaataccgtgcgcaaaacggtgcgttcaagtctgtagacgatttgaccaaggtaaagggcatcggccctgcggtgctggcgaagctgaaggaccaggcttcggtcggcgnnnnncacacacttaattaa

SEQ ID NO: 67315 - DNA, 201 bp, Neisseria meningitidis
atggctaaaatatgtagcattatgttctgtatcgttgtttaccgcttccgcacctttgtccgccttaaagcaggtaaacaccgcaatgaatcgacgcaaagaaaatgtcgtctgaacatgtgttcgggcggcgttttgttggggggtatcggagcggaacgtctgaaaaagggtttcaggcgctctttgggcgtgtggtaa

SEQ ID NO: 67316 - DNA, 606 bp, Neisseria meningitidis
ttgaataccctctatttaggttcaaacagcccgcgccgaatggaaatcctgacacagttgggctaccgcgtcatccaactgcctgccggcatcgacgaatccgttaaagccggcgaaacacctttcgcttacgttcaaaggatggcagaagaaaaaaaccgaaccgccctgaccctcttttgcgaaaccaacggcacaatgcccgatttccccctgattaccgccgacacctgcgtcgtttcagacggcatcatattgggcaaaccccgctcccaagccgaagcaatcgaatttttaaaccgattgtccggcaaacaacataccgtcctgactgctgtctgcattcattatcgcggcaaaacgtcaagccgcgtccaaaccaaccgcgtcgttttcaagcccctgagttcggaagaaatttccgcctatgtgcaaagcggcgaaccgatggacaaagccggtgcctacgccgtacaaggcataggcggcatctttatccaatctatcggaggcagcttcagcggcattatggggctgcccgtttatgaaaccgtttcgatgttgcaggatttgggataccgtaccccacctttcatccgagcctaa

SEQ ID NO: 67317 - DNA, 3918 bp, Neisseria meningitidis
atgacctaccccatccccaaaccccgtgaaaaatcccgttggcccaatctttcgcaaggctcgctgccgctggctttggcgcgttatctgccgcataagcagctcaaggttgtcttgacccaagatgcggaacaggcgttgcgccttcagacggcatggcggtttttccgtccgcacgatacggcggtgttcctgccggactgggaaacgctgccttacgagcgtttttcgccgcatcaggatttggtgtcggagcgtttgtcggcgttgtggcagattaaaagcggcgcggcggacgtgttgttcgtgccggttgccacggcgatgcagaagctgccgccagtgccgtttctggcggggcgcacgttttggctgaaaacaggacagactttggatataggccgtctgaaaaccgatttggtggatgcaggctacaaccatgtttcccatgttgtcgcggcgggtgaatttgccgtgcgcggcgggattgtcgatttgttcccgatgggcagcgaaatgccttaccgcatcgatttgtttgatgatgaaatcgacagcatcaaaactttcgataccgaaacgcaacgtaccatttctcctgtttccgaaatccgcctgctgccggcgcacgagttccccaccgacagcgaggcgcaaaaaatcttccgcagccgcttccgcgaggaagtcgatggcaatccgaacgatgccgccgtgtacaaagccgtcagcaacggccatttcggcgcgggcgtggaatattacctgccgctgttttttgaaaacgaattggaaacgctgtttgactatatcggcgaagatgtgctgtttgtctctttgggcgacgttcacgccgaggcaaaccgtttttggagcgatgtcaaatcgcgttacacgatggcgcagggcgatgaaacctatccgcctttgcttccacagcatttgtatctctctgccgatgtgttcgcaggccgtttgaaaaactacggacaggtgctgcccgatgtttccggcaaggaacacactctgcccgaccttgccgtcaaccgccaatccgacgagcctttgcaggcattgaaggattttcagacgacctttgaaggacggattttgctgtgtgccgaaagtctgggacggcgcgaaaccatgctcggcttcttgcagcaaaacggcttgaaagccaaacctgtgtccgactggcagggctttttatcggcgcacgagccgctgatgattacggtcgcgccgttggcatacgggttcaaactgggcggattgcaatctccgaaccaacagcaaaccgctcccgcccccgagagagaaagtcggggagaaagcaaagcggctgccgaccaaaccgaattttccgcagccgcaacaagccctctccctagccctctcccacaggagagggaacagaataccgccgccgtttcagacaatctgaaaaccgaaagcagcctgtatctcgttgcaaataatctgtacggacaaacccgacagcagcctgccccctcccctgagagagaaagtcgaggagaaagcaaagcagtttccgctcaaactgaattttccgcagccgcaacaagccctctccctagccctctcccacaggagagggaacaaagtgcagccgtcgtttcagacagtctgaaagcagccgccgtttcaaccgaaagcagcctgccccccggtaaaagtaatctgcacgggcaaatccaacagcaacctgccccctcccccgtgggggagggttggggagagggcaaagcagttgccgctcaaagtgccatcgccgtcatcaccgaatccgatctctaccaatacgtcgcccgttcgcgcatccacaaccgccgcaagaaacacgccgccgtttcagacgggctgttgcgcgaccttgccgaaatcaatatcggcgaccccgtcgtgcacgaagaacacggcatcgggcggtatatgggcttggtaacgatggacttgggcggcgaaaccaacgaaatgatgttgctcgaatacgcaggcgaagcgcagctttatgtgcctgtttcgcaactgcatttaatcagccgctactccggtcaggcgcatgaaaacattgccctgcacaagctcggcagtggcgcgtggaacaaggcgaagcgcaaagccgccgaaaaagcgcgcgacaccgccgccgaattgctcaacctctacgcccaacgcgccgcccaatcgggacacaagtttgaaatcaacgagttggactatcaggcgtttgccgacggcttcggctacgaggaaaccgaagaccaggccgccgccatcgccgccgtgattaaagatttgacgcaagcgaagccgatggatcgccttgtgtgcggcgatgtcggcttcggcaaaaccgaagtcgccctgcgcgccgcgtttgtggcggtgatgggcggcaaacaggtcgccgtacttgctccgaccacgcttttggtcgagcagcacgcgcaaaacttcgccgaccgtttcgccgatttccccgtgaaagtcgccagcctttcgcgtttcaacaacagcaaagccaccaaagccgcgctggaaggcatggcagacggcacggtcgatattgttatcggtacgcacaaactggtgcaggacgacatcaaattcaaaaacttaggtttagtgattatcgacgaagaacaccgcttcggcgtgcgtcagaaagagcagctcaaacgcctgcgcgccaatgttgatatccttaccatgaccgccacgccgattccgcgtactttaagtatggcgttggaaggactgcgcgacttctcgctgattaccaccgcgcccagccgccgcctcgccgtcaaaacctttgtcaaaccctttagcgaaggcagcgtgcgcgaagccgtgttgcgcgaactcaaacgcggaggacaggtatttttcctgcacaatgaagtagatacgattgaaaatatgcgcgagcggctggaaaccctgctgcccgaagcccgcatcggcgtggcgcacggacaactgcgcgagcgcgagctggaacaagtcatgcgcgactttttgcagcaacgatttaacgtgttgctctgttccaccatcatcgaaaccggtatcgacattcccaacgccaacaccatcatcatcaaccgcgccgacaaattcggactggcgcaactgcaccagcttcgcgggcgcgtcggccgcagccaccaccaagcctacgcctacctgctcacgcccgaatacatcaccaaagacgcagaaaaacgtctcgacgccatcgcggcggcagacgaactcggcgcaggtttcaccctcgccatgcaggatttggaaatccgcggcgcaggcgaaatcctcggcgaaggacaatccggcgaaatgatacaggtcggcttcacgctctacaccgaaatgctcaaacaagccgtgcgcgatctcaaaaaaggccaccagcccgaccttgacgcaccgttgggcatcaccaccgaaatcaaactgcacagccccgccctactgcccgaaagctactgccccgacatccacgaacggctcgtcctctacaaacgcctcgccgtctgcgaaaccgtgcaacaaatcaacgccatacacgaagaactcgtcgaccgcttcggactgcccgaacaacccgtcaaaaccctcatcgaaagccaccacttacggcttatggcaaaagaattgggtatcaatgccattgatgcggccggcgaagcggtaacggtaacctttggcaaaaacaacaatattgatccaaccgaaatcatcctgctgattcagaacgacaaaaaataccgccttgccggcgccgataagctgcggtttaccgcagagatggaaaatatcgaggtcagaatcaacaccgtaaaaaacgttttaaaaaccttgcaaaacagatgcctgcccaaataa

SEQ ID NO: 67318 - DNA, 2061 bp, Neisseria meningitidis
atgacccaaacccttttaatcgaactccttaccgaagaacttcccccaaaagccctgaataatttaggcaaccatttcgccgcttccgttgccgaaggcttggaaaaagcgcaactggttgacggcgcagccgaatttacggcttatgcctcgccgcgccgtttggcggttcaagtcaaaaacgtcaaagccgttcaagccgatcagaaaatcgtgaaaaaaggccctgccgtggcgaatgccatgaaagacggtgcgccgaccaaggctttggaaggtttcgcacgcggtgcgggcgcgaaaatcgaagacttgaccatcgtccacgacggcaaacaggatgtgtacgcctacgaatacgtccaaaccggcaaaccgctgggcgaacttttggaagacattatcaatcaagcggttaagaaattgccgattccgaaagtgatgcgttggggcagcagcacgtttaccttcgtgcgccctgttcacgggctgattgtgctgcacggcggcgacatcgtaaacgtcagcgttttgggtctgcaaagcagcaatcaaaccttgggacaccgcttcttgtccaacggcgaaatcaccattgaaaacgccgacagctacgccgaacaaatgcgcgggcaaggcaaagtcgtcgcttcgtttgccgagcgcaaagccgcgattcagacggcattggaagggcaggcgcgccgtctgaacgcgaccgttgccgccgatgaagcattgctggacgaagtaaccgcgctggtcgaataccccgttgttttggaagccggttttgaggaacacttcctcgccgtgcctcaagaatgcttgattttgacgatgcagcaaaaccaaaaatacttcccgctgctcgaccaaaacggcaagctgatgaaccgcttcctgctggtctccaacctgcaaaccgcagacccgtcgcacatcatccaaggcaacgaacgcgttttgcgcgcgcgcctgtctgatgccgagttcttctacaaacaagaccaaaaggcgactttggaaagccgcctgcccaagctggcaaacgtggtgtaccacaacaaaatcggttcgcaagccgaacgcatcgaacgcctgcaaagcattgccgcccacatcgccaaggctttgggtgcgggtgccgccgcagccgaacgcgccgcacgtttggcaaaagccgacttggtgaccgaaatggtcggcgagttccctgaactgcaaggcacgatgggcaaatactatgcccgcttggacggcgaaaccgaagaaatcgccgaagccatcgagcagcactatcagccgcgttttgccggcgacaagctgcccgaaagcaaaattgccgccgccgtggcactggcggacaagctggaaaccctggtcggcatttggggcatcggtctgattccgaccggcgacaaagacccctacgccctgcgccgcgccgccttgggtattttgcggatgctgatgcagtacggtttggacgtgaacgaactgattcagacggcattcgacagcttccccaaaggtttgctcaacgaaaaaacgccgtctgaaaccgccgactttatgcaggcgcgccttgccgtgttgctgcaaaacgattatccgcaagacatcgttgccgccgtactcgccaaacagccgcgccgtttggacgatttgaccgccaaactgcaggccgttgccgcgttcaaacaactgcccgaagccgccgcgctcgccgccgccaacaaacgcgtgcaaaacctgctgaaaaaagccgatgccgagttgggcgcggttaacgaaagcctgttgcaacaggacgaagaaaaagccctttttgctgctgcgcaaggcttgcagccgaaaatcgccgccgccgtcgccgaaggcaatttccaaaccgccttgtccgaactggcttccgtcaagccgcaagtcgatgccttctttgacggcgtgatggtgatggctgaagatgccgccgtgaaacaaaaccgcctgaacctgctgaaccgcttggcagagcagatgaacgcggtagccgacatcgcgcttttgggcgagtaa

SEQ ID NO: 67319 - DNA, 717 bp, Neisseria meningitidis
atgtccgacaaaaaatataatgtcgatgagggggaaatcgccaaattcagccggattgccgacaaatggtgggacaagtcgggcgagttcaaaaccttgcacgacatcaatccgctccggctcgattatatcgacggacacgcggatttgtgcggcaaacgggttttggacgtgggctgcggaggcggcatccttgcggaaagcatggcgcggcgcggcgcggcgtttgtcaagggcatcgacatggcggagcagtcgctggaaaccgcccgcctgcacgcggctttgaacaatgtcgccgatatcgaatacgaatgtatccgcgtggaagaccttgccgaggcggaaccgcactcgttcgatgtggtaacgtgcatggaaatgatggaacacgtccccgatcccgccgccatcgtgcgtgcttgtgccaagctggtcaagccggacggcatggtgtttttttccaccatcaataaaaacccgaaatcgtacctgcatctgattgtggcggcggaatatctgttgaagttcgtccccaaaggcacgcacgactggaaaaaattcatcgcgcctgccgagctggcgcggatgtgccgtcaggcgggcttggatgtggcggatacgaagggtatgacttaccatgtgttgtcgcaaacttatgccctgtgcgattcgaccgatgtgaattatatgtttgcctgccgtccggcgttctga

SEQ ID NO: 67320 - DNA, 360 bp, Neisseria meningitidis
atgtattttgttgaccgcaccgccgtcgtcctcaagccgaccgtccgctttttggaatggctcaaaagcaccgacgaaaatatgcccgacctgaccatagaacagcttcgtgccaactgttccgtcttcctcgttccgcagttcgacgaaccggaagccgtcgtttcctatttcgacgaacgctaccgccagattttcgaggcggagctggcaggttgggacatcgataaggataaatggccgcaagacatgagcctgaaagtgttttgggaatttttcgataccgaaatccacgatatggttttggatatggaagaagcggatttgaacatcacgcccgtgttcgacaatatgatgtaa

SEQ ID NO: 67321 - DNA, 747 bp, Neisseria meningitidis
atgaaaagcagcacgcaggccgttttggaacacaccgccattcccaagcatatcgccgtgattatggacggcaacggccgttgggcgaaaaaacgtttcctcccgcgcataatgggacacaaacgcggtttggacgcattggaaaatatggtgaagcattgcgccaaactgggtgtgcaatatctgaccgtgtttgccttttcaaccgaaaactggcgccgccccgaagacgaagtttcgttcctgatggggctgtttttacaggctttgcaaaaacaggtacgtcgcctgcacgaaaacaatatgcgcctgaaaatactgggcagccgcgaacgcttcagccgtcaaatcctgaagggcatcgaagaggcggaggcgttgacggcaaacaataccggtctgaccctgagcattgccgccgattacggcggcagatgggatattttgcaggcggcaaacaaactgattgccgaaggcgtatccgagattacggaagacacgctggcgaaacacttgatgctgggcgatgcaccggaaccggatttgttcatccgcaccggcggagaaacgcgcatcagcaatttcctgctctggcagatggcgtatgcagaactgtatttcaccgacatcctgtggcctgatttcgacgaaaccgccttagatgccgccgtcgcttcgttccaaaaacgcgaacggcggttcggacgcacctccgagcaactgcctatcgaacagcaaaggaactaa

SEQ ID NO: 67322 - DNA, 234 bp, Neisseria meningitidis
ttgaaagcggagacttatttttgtcgcccttaccattcttgggagaaagggctgaatgagaacaccaacggactcatccggcaatacttccccaaacaaaccgatttccgtaacatcagtgatcgggagatacgcagggttcaagatgagttgaaccaccgaccaagaaaaacacttggctacgaaacgccaagtgttttattcttgaatctgttccaaccactaatacactag

SEQ ID NO: 67323 - DNA, 594 bp, Neisseria meningitidis
atgcgcaaacagaacgctttgacgggaatcccgacttctgacggacagagggggttcgcgctgtttatcgtgctgatggtaatgatcgtcgtggcttttttggttgtaactgccgcgcagtcttacaataccgagcagcggatcagtgccaacgaatcagacaggaaattggctttgtctttagccgaggcggctttgcgggaaggcgaacttcaggttttggatttggaatatgatacggacagtaaggttacatttagcgaaaactgtggaaaaggtctgtgtaccgcagtgaatgtgcggacaaataatgataatgaagaggcttttgacaatatcgtggtgcaaggcaagcccaccgttgaggcggtgaagcgtttttgccctgcaaattctaccgacctgtgcattgacaagaaagggatggaatataagaaaggcacgagaagcgtcagcaaaccaccgcgctatattatcgaatatttgggcgtgaagaacggagaaaatgtttatcgggttactgccaaggcttggggtaagaatgccaataccgtggtcgtccttcaatcttatgtaagcaataatgatgagtaa

SEQ ID NO: 67324 - DNA, 978 bp, Neisseria meningitidis
atgatttatccgtggcataatgagcaatggcggcagattgcggaacattgggagcgtcgtcccaatgcatggctgtttgccggcaaaaaagatacggggaaaactacatttgcccgctttgcggcgaaggcactgttgtgcgaaacccctgcactgggctgcaaaccctgtggcgaatgtatgtcctgccatctgtttggacagggaagccatcccgatttttacgaaatcacccccttgtcggacgaacccgaaaacggacgcaaactgttgcagatcaaaatcgatgccgtcagggaaatcatcgataatgtgtacctgacttcggtacggggcggtttgcgcgtgattctgattcatcctgcggaaagtatgaatgtccaagccgccaacagtttgttgaaagtgttggaagagccgccgccacaagtggtctttttgctggtcagccacgcggcggacaaggttttaccgaccattaaaagccgctgccggaagatggttttgcccgcgccttcccatgaagaggcattggcatatctgcgtgaaaggggtgtggcggaacctgaggaacgtctggctttccattccggagcgccgctgtttgatgaggcggacggtgtccgtgcgttgcggattaaactgttggatattttggcagaaccaaggttgttgaagattttggattacgccgcgcttttcgataaggagaaacttccgctcgccgtatttgtcgggtggatgcagaaatggctggtcgatttgggattgtgcctgcaacacatgaaacccgtctattatcccgcttatgaagacaggctgcttcagacggtatccggtttccgtccgcgcaatgtatttgcggcggaggatatgctcaaacagcttgccccctacgggtttcatactttaaatgtcaaaatgcagatcgagcatctgctcatcaactatttggaattgaagaaagagaacgggtga

SEQ ID NO: 67325 - DNA, 849 bp, Neisseria meningitidis; identical to SEQ ID NO: 37505

SEQ ID NO: 67326 - DNA, 570 bp, Neisseria meningitidis
atggcggcaggcaaacataccaaacacagcaaccgggtacgcattatcggcgggcaatgccggggcaggaaattgagtttcacatccgccgacggactgcgtccgacacccgacagcgtgcgtgaaaagctgtttaactggctgggacaggatttgacgggtaaaacggttttggatctcttcggaggcagcggcgcactcggtatagaagccgcttcgcgcaacgccaaacgcgtgctgatttcggataacaaccgccaaaccgtgcagaccttgcagaaaaacagtcgcgaactgggtttggggcaggtgcaaatcgtctgttcagacggcatcgcatatttgaagaccgtatccgaacagtttgatgttgtctttctcgacccgccgtttgcatggcaggactggcaaatcctgtttgatgccttgaagccgtgcctgaacccccgggcattcgtctatctcgaggcgggtacgctgccggatattcccgattggctgacggaatatagagaggggaaatcggggcagagtacatttgaattaagggttttccaagtggctgaataa

SEQ ID NO: 67327 - DNA, 621 bp, Neisseria meningitidis
atgctgaaacaggctgtaacaggtatgaccaagcaagagcgcatcacgacgcaagcctacaatgagatgaccaaatccgtggcaggttcaaacagcatagtccttaacgatgtccaaggcgatacgaccatcaacaaccatcatacgcatacgcacaaccgcagcgttgccgacggcaaagcactgtcgatgaggctcacaccccgtcctttgttgtcagaccgtcaggcggcggctttcgcccgtacaggcaaactcacgggcagtttcgacctgtttgcttcggtggtcgccccctcgcagtacacgtttgccgttgccatgcccgacacgtccatgtcgccggttatcgaaaagggagacttgctggtggtcgagccgcgtatgtgccctgcggacgaagacatcgcgctgattgaactgtccgacaagcggctggtcgtcgcgcaccttgttatcgatattgcgggcaggatgctgatttatcagacgggcaggccgtctgaagcctttgacctgcccgaaggcagcacgattttaggtgtggtgctggaggtcaaaaaacggtttatgtccgccgcacaggcgagaaggcgtgttgattcggattaccacccctga

SEQ ID NO: 67328 - DNA, 387 bp, Neisseria meningitidis; identical to SEQ ID NO: 45290

SEQ ID NO: 67329 - DNA, 1386 bp, Neisseria meningitidis; identical to SEQ ID NO: 55524

SEQ ID NO: 67330 - DNA, 399 bp, Neisseria meningitidis; identical to SEQ ID NO: 44864

SEQ ID NO: 67331 - DNA, 291 bp, Neisseria meningitidis; identical to SEQ ID NO: 37933

SEQ ID NO: 67332 - DNA, 1146 bp, Neisseria meningitidis
atgagcattagccttattggactacacattaccatagcaatcattttgttttttactacaaattttatgggaaaaaaatcatctatatttggctattaccaactgtcttttagcgaagaaaatcactctccggcatttaatattttttacagagcatttacccctatattatttatcgttattttttcttgggttgttactagttttgaaatccccatttctcttgaaaagataaactatgtagtaatttattattttataattagattgttatctgtatttgtttttgagaaaacacacatagttaactggtttaatcaactaacaatacccatactatccataacattatcatttatagtatataacaaaatgattttgcccaaaagttttctacttccatcctcacaagaagtagctactactttttggatagcgcttggtggttacatatataatatattaaataatgaatcagggcatttaaaatcttatgaagaaagaagagtaaattatgtaaaacacatgcacaaaaaatttgaaagttattttggtaaaattatagataaaataatcaaagaggatagttataataatgatgattttttaaccgataagaaaaaagcactaatatattcagttttaatttatgagaattttaataggggactagtttatagatattttgaaaaaatattattttgtactggtagaataaaaacatctggaataatgcaagtaacctcagcagagtacctttccaatgaggaaagtataaaaaaaggcggaaatattcttatggaaaaatacaatgaaaaatataatgaatctattgatggcaataaaactctctataaatcatattatgaatcaagaagagagagtattaaaaactacaacccagatgcaaaatacattaatgaaattgaatcaatttacatgatgcttggagaaatctatccaaatgcaccagacttcatgtcaccacattttgagggggacttggattcggatttcaagtgcaacactagtgtattagtggttggaacagattcaagaataaaacacttggcgtttcgtagccaagtgtttttcttggtcggtggttcaactcatcttgaaccctgcgtatctcccgatcactga

SEQ ID NO: 67333 - DNA, 648 bp, Neisseria meningitidis
atggcttctaaatcatctaaaaccaacttggatctcaacaaccttcacctgctcaaccttcctgccaggctttttatcgccctgctggccgttgccgccgtgctggggctcggttatgccggattgttcaaaagccagatggaatcccttgaggaatacgaagcaaaagaaaccgaactgaaaaacacctacaaacagaaaagtatcgacgctgccagcctgaacaacctgagggacgaacttgcctcaatccgctctgccttcgatatcatgttgaaacagctgccgacagatgcagaaattcccaatctggttcaagagcttcatcaggcaggttcgagcaacggcctgcgcttggacagcgttatgccccaacctcccgtagatgacggccccatcaaaagattaccctattccatttccattaccggaaattacgaacagatcagccaatttacccgcgatgtcggcagcctctcccgaatcattacccttgagtcgctgaaaatcgcccaatctccggaaaacggcggcaatcctgacggcaagagcagcatcctgaacctcagcgccattgccaccacctaccaagcaaaatccgtagaagagcttgccgcagaagcggcacaaaatgccgagcaaaaataa

SEQ ID NO: 67334 - DNA, 930 bp, Neisseria meningitidis
atggattccattatcgaattgcgccacctcaaaaccctgctggcacttgaagaaaccggcagcgtctcccttgccgccaaacgggttttccttacccaatccgccctttcccaccagatccgtatgctcgaaaaccactacggcacgccgctgttcgaacgcaaatccacgcccttgcgctttaccccggtgggcgaaaggctgctgcgcctcgcccacgaactgatacctcaagttgctgttgcagaacgagatttggcgcgaatcacagaaggggaggcgggagagctgcggattgccgtcgaatgccatacctgtttcgactggctgatgcccgccatgggcgaattccgcccgatgtggccccaagtcgaattggatatcgtatcgggattccaagcggatcccgtcggactgctgctgcaacaccgtgccgaccttgccattgtttccgaagcggaaaaacaaaacggtatttctttccaaccgctgtttgcctacgaaatggtcggcatttgcgcaccagaccatccgcttgccgccaaaaacgtttggacggcggaagactttatcggggaaaccctgattacttatcccgttcccgacgagatgctggatttgcccaaaaaaatcctgattccgaaaaacatcaacccgccgcgccgacacagcgaactgaccatcgccattatccaactggttgccagcagacgtggcattgccgcccttccctattggacagtcatgccctaccttgaaaaaggctatgtcgttcaccagcagattaccgacgacggactgcaaagcaaactgtatgctgccatccgcactgaagatacggacaagagctatctgaacaacttttgccaaatcatacgtgaacgcggttttgcagatttgcccggactgagcgaactggaatcggtctga

SEQ ID NO: 67335 - DNA, 891 bp, Neisseria meningitidis; identical to SEQ ID NO: 36250

SEQ ID NO: 67336 - DNA, 387 bp, Neisseria meningitidis
ttggctgaaggtcaaaaatcagccgtcaccgagtattacctgaatcacggcgaatggcccagcaataacacttctgccggcgtggcatccgcctccgacatcaaaggcaaatatgttgagaaagttgaagtcgcaaacggcgtcattaccgccacaatgctttcaaccggcgtaaacaaagaaatccaaggcagaaaactctccctgtgggccaagcgtcaaaacggttcggtaaaatggttctgcggacagccggttacgcgcaacaacgccaaagccaacgccgccaacgccgacgacgtcgccaagaccggtaccgacagcgaaaaaatcaacaccaagcacctgccgtcaacagcaccgacaagaaaatcgacaccaaactag

SEQ ID NO: 67337 - DNA, 450 bp, Neisseria meningitidis
  misc_feature 427, 428, 429, 430, 431: 'n' is a, c, g or t
atgagcaccttctttcaacaaaccgcgcaagccatgattgccaaacacatcgaccgtttcccgctattgaagttggatcaggtaattgattggcagccgatcgagcagtacctgaaccgtcaaaaaaaccgttacctccgagaccaccgcggccgtcctgcctatcccctgctgtccatgttcaaagccgtcctgctcggacaatggcacagcctctccgatcccgaactcgaacacagcctcattacccgcatcgatttcaacctgttttgccgttttgacgaactgagcatccccgattacagcaccttatgccgctaccgcaaccggctggcgcaagacaataccctgtctgaactgttggaactgattaaccgtccactgaccgaaaaaggtttaaaaatagagaaagcatccgctgccgtcnnnnncacacacttaattaattaa

SEQ ID NO: 67338 - DNA, 543 bp, Neisseria meningitidis
atgattaatcatattgaaaaatatacaggccctatttctcatggctcgaaaagtgattcgggaagtcagtacaaattaaatatcgcagctattccctcttcccctaacagggatttaaaaacttatattactttagggttaagcaaacatgatctgaattataaaagcagatttgaaatacttttcgtatgttctttaaaatatgatgaaaatcagattttcccatttttaagatggttggcagaaaccatcattgagaacaaaaaaatccttcttcgggggcaggttgtttatttgcccagaagcattgttgattcaacaaaaatggatgcactgtatgtttccgccccattttatttcgacgatgattttcaggtctgttatggcgaacactacaatatcgttttccctttgcttgtccccttgtataaacaggaagccgaattggtggaaaagaaaggttggaatgcttttgagcagttcttgttggataatgaagttggcaacctttcggatatgaatcggaaaccgtttacttggtaa

SEQ ID NO: 67339 - DNA, 1500 bp, Neisseria meningitidis
  misc_feature 1485, 1486, 1487, 1488, 1489: 'n' is a, c, g or t
atgaacaatccattggtaaatcaggctgctatggtgctgccggtgtttttgttgagtgcttgtctgggcggaggcggcggcagtttcgatcttgattctgtcgataccgaagccccgcgtcccgcgccaaagtatcaagatgtttcttccgaaaagccgcaagcccaaaaagatcaaggcggatacggtttcgcgatgcgcttcaagcggcggttctggttgccgcggggaaaagaagacgaggttaaactgaaagagagtgattgggaggagacgggattacctgacgatcccaaaaacttacctaagcgacagaaatcggttattgatgaagtaaaaacagacgatggcagcaataatattcattcttccccttatctcatgcaatcaaaccatcaaaacggcagcactaatggcggtgcaaaccaaccaaaaaacgaagtaacagattataaagattttaaatatgtttattccggctggttttacaaacacgcgaaaagcgaaatcaaaagagaaaacgggtcaagcagtgcaaaatctggcgacgacggctatatcttttatcacggtgaaaaaccttcccgacaacttcccgcttctgaaaaagttatctacaaaggcgtatggcattttgtaaccgatactaaaaagggacaaaaatttaacgatattcttggaacctcaaaaggacaaggagataagtacagcggattttcgggcgatgatgatgaacaatattctaataaaaacgaatccatgctgaaagatggtcaagagggttatggttttacctcaaatttagaagtggatttcaataataaaaaattgacgggcaaactgatacgcaataatagagttacaaacgctactcctaacgataaatacaccacccaatactacagccttgatgcccaaataacaggcaaccgcttcaacggtaaggcgatagcgaccgacaaaccacaagcgaatgaaaccaagccacatccctttgtttccgactcgtcttctttgagcggcggctttttcggcccgaagggtgaggaattgggtttccgctttttgagcgacgataaaaaagttgccgttgtcggcagcgcgaaaaccaaagacaaagacgcaaatggcaatactgcggcggcttcaggcggcacaggtgcggcagcatcgggcgatgcggcagatatgccgtctgaaaacagtaagctgaccacggttttggatgcggttgaattgacactaaacgacaagaaaatcaaaaatctcgacaacttcagcaacgccgcccaactggttgtcgacggcattatgattccgctcctgcccaaggattccgaaagcgggaacaatcaagccaatcaaggtacaaatggcggaacagcctttacccgcaaatttgaccacacgccgaaaagcgatgaaaaagacacccaagcaggtacggcggcgaatggcaatcaagccgcttcaaatacggcaggnnnnncacacacttaa

SEQ ID NO: 67340 - DNA, 1227 bp, Neisseria meningitidis
atgaataccgataacctgcacgacatcttggacgaaatggttcaagtgtattctcaaaaaaaacaaagccgatccgaaaccccggccgaaatcggcgcacacttccacccgctgctcgaccgcctgtgcgaaaccgcagaagcacaaaacgcgtccgacatccttatcagcaaaggattcccgccctcgttgaaaatcaacagcgcattaaccccgcagccgcaaaaggcgctgacaggcgaggaaaccgccgccatcgccgcatcgacgatgaacgccgaacaatcggaaatattccggcgcgacggcgaaatcaactactccgtccagtcgcgcagcggcacgcgctaccgcgccaacgcctaccacagccaaggccacgcaggtttggttttgcggcgcatcaaccacgtcatcccgcaaatgcaggaattgggtctgcccgaaaaactcaaagacctcgccgtcgcgccgcgcgggctgctgattatcgtcgggcctaccggttcgggcaaatccaccacgatggcgactatgctcgaacaccgcaacaaaaccctgcccggccatatcgttaccatcgaagacccgatagagtttatctacaaaccgcgccgctgcatctttacccagcgcgaaatcggcgtcgacaccataaactggcagacggcggtacaaaacgctatgcgccagtcccccgacgtggtctgcatcggcgaagtccgcagcagggaaaatatggaatacgcaatgcagctcgcccaaaccggccacctgtgcatttttacgctccacgccaacaccgcgccgcagtcgctcgaacgcatactcaacttctaccccaaagaacagcacaaccaaatactgatcgacatcgccctcaacctgaccggcatcatctgccaacgcctcgccctcaaacaagacaaaacgggcaggacggcggttgtcgacttgctcatcaacacgcccgccatccaagacttcatcctgaagggcgacctgatgaacatcagtaaaatcatggaaaccgccaaaaccgacggaatgcagacgatggatcaaaaccttttcgaactgtaccgtcacggcatcatcagttacgaagaagccctgcgccagtccgtttccgccaacaacctgcgattgcacatccaactgcacaaagaaggcaaaacgcccgaactcctttacgacagggtcaacggtctcaacctcatttcctga

SEQ ID NO: 67341 - DNA, 678 bp, Neisseria meningitidis
atgcaagctgattttaaccgtcccgtcctggtcatcgataccggtacttcctatttgtcgctcgcgctgcgcgccgacggtgaaacccgtctgttccatcaggaagtcggcagccgccagtccgaactgattctgccggaaatccgcacgttgtttcacgatgcaggcattaccgccgccgatttgggagcgattgtttatgcgaaaggccccggcgcgtttacgggactgcgtatcggcatcggcgtggcgcaaggtttggcaacgccgtttgatacgcctttaatcggcatccccacgctcgatgccgccgcctcgctgccgccgccgcaaagctgcatccttgccactacggacgcacgtatgggcgaagtgttttatgcatggttcgacacgctgaactgccgccgtttgagcgattatcaggtcgggcgggcggcagacatccggctgccggagggatgtgccttttcagacggcataggcagcgcgttcgcgttggaagaaacgccgccgttttcaggcaaacccgatatgccgactgccgccgactttctcaatctggcggcagaaggcggttttcccgccgtcgctgcggcacacgccggactgctctacgtccgcaacaaaatcgccctgaccgccaaagaacaggcggaacggagggcgcgtccgtga

SEQ ID NO: 67342 - DNA, 1143 bp, Neisseria meningitidis
atgaatactttatatacacttttcgccacctgcccgcgcggcttggaaaccgttttatcgcaagaactcgaaagcctcggctgtaccgatgttcaagcgtttgacggcggcgtttcctgccggggcggattggaacaggtttacgccgccaacctgcactcgcgtaccgccggccgcatcctgctacgcctgaccaaaggcacataccgaaccgagcgcgacatttacaaacttgccaaaaacatcaactggttcaactggtttaccttgcagcagacgttcaaagtcaaaatcgaggcaaagcgtgccaacgtcaaaagcctccaatttgtcggactgaccgtcaaagatgccgtctgcgacgctttccgcgacatttacgacgcacgtccgagcgtggacaaagccgcgcccgatgtccgcatccacgcctttttgaacgaacgcaatgtcgaaatctttatcgacacttcgggcgaagccctgttcaaacgcggctaccgcctggataccggcgaagccccgctgcgcgaaaaccttgccgccggactgctgctctcggcaggctacgacggcacgcagccgtttcaagacccgttttgcggcagcggcacgattgctatcgaagccgcttggattgccacaggccgcgcaccgggcatgatgcgccgcttcggttttgaaaaactgcaaaatttcgataaaacgctgtgggcggatttgcgccgccgcgccgaagcgcaaacccgccccgtccgcgccccgattgcaggcagcgacagcgaccgccgcatcgttcagacggcattggacaacgcacgcagtgccgaagtggacgacatcgtttccttcggcgttgccgacgcgcagtccgtccgaccgaacggcgaaaacggcattatggtgtccaatccgccctacggcgtgcgccttgaggaagtccacgctttgcaggcgctttatccgcagttgggtacgtggttgaaaaaacactatgccggctggcgggtcggcatgtttaccggcgacagggaaatgcccaaattcatgcgcctgtcgccaaaacgcaaaattccgctttataacggcaacctcgattgccgcctgttcctgattgatatggtgcagggatcgaaccgttga

SEQ ID NO: 67343 - DNA, 2133 bp, Neisseria meningitidis
atgtctatcgtatccgcaccgctccccgccctttccgccctcatcatcctcgcccattaccacggcattgccgccaatcctgctgatatacaacatgaattttgtgcttccgcacaaagcgatttaaatgaaacacaatggcttttggccgccaaatctttgggattgaaggcaaaggtagtccgccagcctgtcaaacgtttggctatggcgaccttacctgcattggtatggtgtgatgacggcaaccattttattttggctaaaacagacggtgggggtgagcatgcccaatatctaatacaggatttaactacgaataagtctgcggtattgtcttttgccgaattttctaacagatattcgggcaaactgatattggttgcttcccgcgcttcggtattgggcagtttggcaaagtttgactttacctggtttattccggcggtaatcaaataccgccggttgttttttgaagtattggtggtgtcggtggtgttgcagctgtttgcgctgattacgcctctgtttttccaagtggtgatggacaaggtgctggtacatcggggattctctactttggatgtggtgtcggtggctttgttggtggtgtcgctgtttgagattgtgttgggcggtttgcggacgtatctgtttgcacatacgacttcacgtattgatgtggaattgggcgcgcgtttgttccggcatctgctttccctgcctttatcctatttcgagcacagacgagtgggtgatacggtggctcgggtgcgggaattggagcagattcgcaatttcttgaccggtcaggcgctgacttcggtgttggatttggcgttttcgtttatctttctggcggtgatgtggtattacagctccactctgacttgggtggtattggcttcgttgcctgcctatgcgttttggtcggcatttatcagtccgatactgcggacgcgtctgaacgataagttcgcgcgcaatgcagacaaccagtcgtttttagtagaaagcatcactgcggtgggtacggtaaaggcgatggcggtggagccgcagatgacgcagcgttgggacaatcagttggcggcttatgtggcttcgggatttcgggtaacgaagttggcggtggtcggccagcagggggtgcagctgattcagaagctggtgacggtggcgacgttgtggattggcgcacggctggtaattgagggcaagctgacggtggggcagctgattgcgtttaatatgctctcgggacaggtggcggcgcctgttatccgtttggcgcagttgtggcaggatttccagcaggtggggatttcggtggcgcgtttgggggatattctgaatgcgccgaccgagaatgcgtcttcgcatttggctttgcccgatatccggggggagattacgttcgaacatgtcgatttccgctataaggcggacggcaggctgattttgcaggatttgaacctgcggattcgggcgggggaagtgctggggattgtgggacgttcggggtcgggcaaatccacactcaccaaattggtgcagcgtctgtatgtaccggagcagggacgggtgttggtggacggcaacgatttggctttggccgctcctgcctggctgcggcggcaggtcggcgtggtcttgcaggagaatgtgctgctcaaccgcagcatacgcgacaatatcgcgctgacggatacgggtatgccgctggaacgcattatcgaagcagccaaactggcgggcgcacacgagtttattatggagctgccggaaggctacggcaccgtggtgggcgaacaaggggccggcttgtcgggcggacagcggcagcgtattgcgattgcccgcgcgttaatcaccaatccgcgcattctgatttttgatgaagccaccagcgcgctggattatgaaagtgaacgagcgattatgcagaacatgcaggccatttgcgccaaccggacggtgctgattatcgcccaccgtctgtccaccgttaaaacggcacaccggatcattgccatggataaaggcaggattgtggaagcgggaacacagcaggaattgctggcgaagccgaacggatattaccgctatctgtatgatttacagaacgggtag

SEQ ID NO: 67344 - DNA, 996 bp, Neisseria meningitidis
ttgaaggctgcctatcaaaatattgcaactgtctggcagggcgatttccacaatgccaaacaggtgctttccgcaatgaagaagagggttcgcaaacctgccgccgtccgttccgatgcggacatcgccgcccttttccacgcccaccgtatgaagcaggcgcagcagagccgtattctgaatatgcttgccgttgaaatccgccccggttttgtgttggacaacaaacgcgcgcccgatatacgcgccgccctgctcgacgtgtacggagaggcggacggcaaaccgtttttcctaccgctcaatctgctgctggggtttatgggtgcgcacgagtggcataagaaaggggttgccgttccgcagctgggcggcagcatacacgttcctttcggcgtattctcgccgttgcgcggcgaatacctcgacctgctcgcccatgcgccgtcaacgggttttcagacggcattcgatatcgggacgggctcgggcgtgcttgccgccattttggcgaaacagggcattccttccgtcatcggcacggataccaatccgaaagccgtcgcctgcgcccgtgccaatattgcccgtttgggctttgaaaaacaggttgagatacgggaaaccgatctgtttcccgaagggtttgccgatctgattgtctgcaatccaccctggcttcccgccaagccgacttccgccgtcgaatccgcgttatacgaccccgaatctgcgatgctggctgcgtttttgcgggatgcgccgaaacatctgaatcccgacggagaaatccgcctgatcatttccgatcttgccgaacatctgcacctgcgtccgtccgattttctggataaggcatttgctcaggcaggtttgcgcgttgcggatgttttgaaaaccaaaccggttcacaaaaaagctgccgatccgaacaatccgctggcttttgcccgaaacagggaaactactttcctgtaccgtttgaaaaaggcataa

SEQ ID NO: 67345 - DNA, 1395 bp, Neisseria meningitidis
atgaacaaacaacccctttccctcgccgtcgtcggacacaccaacaccggcaaaacctcgctcctgcgtacccttttgcgcgacagcggtttcggcgaagtcagaaacgccccatcgaccacgcgtcatgtcgaagaagccgccatcagcgacggcgcagacacgctggttttcctgtacgacacgcccggactcgaagacgcgggcggcgtgctggaatggctggaaaaccatacggacaatcgttcagacggcatcgaacggctgcaacagtttctcggcagccacggcgcgcaccatgatttcaatcaggaagccaaagtcttacggcaagtcttgcaaagcgatatggcaatgtacgtcatcgacgcgcgcgaacccgtcctcgacaaatatcgggatgaattgattatcctttcatggtgcgccaaaccggttatgcccgtgttcaactttaccggcggacagcctcccgaatcgtggacaaccatgctggcgaggagaaacctgcacgttttcgcagggttcgacaccgtcgcctttgattttgaaggcgaactgcgcctgtgggaaaacctcgccaccatgttgcccgaacgcagcacactcgaccgcctgacagccatgcgccggcgcgaatggcagcggctggacggcgaagcgcgccgcgaaatcgccgatttcctgctcgatgccgccgccttcaggcaggaagtggacgaaaacgaggataccgccaccgtgctgcaaaccatgcaggcggaaatacgccaactcgaacggcagatgcagcagcggctgtttgccctctaccgtttctaccacagcgaaatcgacggcggcgactggatgccgcaagccttccgccaagacccgttcgacagcgaattgctcaaacaatacggcatccgcaccggcacgggcgcggcaaccggcgcgctcatcggcttggggctggacatcgccacactcggcggctcgctcggattgggtacggcaatcggcggctttttgggcggcatcctgcccaatacccgcaccatttccgacaaactctccggccgccaaaccttgcacaccgaccctgaaaccttgaccctgctcgccgcccgcgccctcgatttgctctacgtcctgcaaacgcgcggacacgcggcacagtcggatatcgagctgcacagccgcaaagccccgtgggacgccgccagactcccgcccgaactcaacaaagcccgcagtcattggaaatggtcgtcgctcaatacgcaccgccccgaaaccagccgcgccgaacgcgccggatatgtggagaaacttcaaatccgcctgtcgggaaaatatagtgaattaaatttaaatcaggacaaggcggcgagccgcagacagtacaaatag

SEQ ID NO: 67346 - DNA, 480 bp, Neisseria meningitidis
atgagcaccttcttccagcaaaccgcccaagccatgattgccaaacacatcaaccgcttcccgctattgaagttggaccgggtaattgattggcagccgatcgagcagtacctgaaccgtcaaaaaacccgttaccttagagaccaccgcggccgtcccgcctatcccctgttgtccatgttcaaagccgtcctgctcggacaatggcacagcctctccgatcccgaactcgaacacagcctcatcacccgcatcgacttcaacctgttttgccgttttgacgaactgagcatccccgattacagcaccttatgccgctaccgcaactggctggcgcaagacgacaccctgtccgaattgctcaaactgattaaccgccaactgaccgaaaaaggcttaaaaatagagaaagcatccgctgccgtcgttgacgccaccattattcagaccgccggcagcaaacagcgccaggcccgataa

SEQ ID NO: 67347 - DNA, 1101 bp, Neisseria meningitidis; identical to SEQ ID NO: 45109

SEQ ID NO: 67348 - DNA, 198 bp, Neisseria meningitidis
atgaccgctataccgtctgaaccgcctttcagacggcatttcacacatcaaaacagaaaaaccgcgcccaaaatcatcatcacaggacgcaacggcaaaccggatacaaaacccaacaccgccgccaaaatgccgtctgaagccgtcggcgcaaccatccttatctggggcataactttccttaaccatcccttttga

SEQ ID NO: 67349 - DNA, 918 bp, Neisseria meningitidis
atggaaaaagcagaacatttgaacagcagccggttcgtcaatctggtcaaaagcggcggcggcagctatgtggagggcagctaccgtttcgatactttgtccaacggcatttccatccacggcggcacggtaacggcacggtgtgatttttgcagcagccgcctcgccgaaccttatgtgtcgttcgtgctcttgctggaaggcagtttggacttcggcatcaaccgctgccgcttccaaatcgatgcggacggcggcaagattgtcctaattgctgtcggggaagaagtcctgttcagccgctatctttaccgaggcggcaaaacggtcaaaatgaccattaaaggtatggaacaatggctgctgcgtccggaatacgcgcgtttcgcacccctgctttaccgcgaaccggtcaggatatgggatttgcccccgaacctgcgcggcttggcggcatcctgcctgaaagccgtcccaaaggggcatttgggcgaaacattgcgccgcgaggcggacgttttgcggctgctgtcggacttgtgggacacggtttcagacggcatcgggccggcggcggggcaaacggcggaagcagacgctatgccgtctgaagacttcagccgcaccctgaatgccgcgtttgtcggcggcgcacaccaagtcaaccggctgacagacgcgctgaacatcagcgaaaggacgctgcaacgccgtatgcgcgaccatttcggcattacggcaagcgagtggctgcaccacaaacaaatgcagcacgcgctctatctgttgcaaaacgggggcaaaagcgtaggcgaaaccgcgtatttatgcggctaccgccacgtttccagctttactcaggcattcaggcaatatttcggcagcacgccggcggaaaccaaaaaagaaaaccggtaa

SEQ ID NO: 67350 - DNA, 447 bp, Neisseria meningitidis
atgaatttcagttttgttcccctgtttctggttacgctgattctgttgggggtggtcagcaacaacaattcgattaccatctcggcaaccatattgctgctgatgcagcagacggcattgatacagtttgtcccgttggtcgagaagcacgggttgaatctcggtatcattcttttgaccataggggttttgagtccgttggtttcaggaaaggcgcaggttcctcccgttgccgaatttttgaattttaaaatgatatccgccgtttttatcggtattttcgtggcttggctggcgggacgcggcgtgcctttgatgggacagcagcctgttttaattacaggactgttaatcgggacggttatcggggtggcatttatgggcggtatccctgtcgggccgctgattgcggccggcatcttgtcttttgtcgtcggaaagggttaa

SEQ ID NO: 67351 - DNA, 270 bp, Neisseria meningitidis
  misc_feature 6, 7, 8, 9, 10: 'n' is a, c, g or t
gtgtgnnnnncacacgcacaaggaatctacacgcacgaactggtaaatcttctgtttgagcagccatatacacgcattgccaacctagaagcggcagggatagccaaacggcagacggcctctaagtacctgaaagagctttcagacataggtgtgctgcaagaaatcgtcatcggcagggacaaactattcattcatccgcgcctaatggaactattgcggggagagggcaacagctttacctcattccaatccctcgttaaagcatag

SEQ ID NO: 67352 - DNA, 843 bp, Neisseria meningitidis
atgtgtcaactgctgggcatgaactgcaatacgccgaccgatattatgttttcctttgaaggcttccgccgcaggggcggcattaccgaccaccatgccgacggtttcggcatcggctttttcgaaggcaaaggcgtgcgcctgttccatgacgacaaacccagtgccaattcgcccgtcgccgacctcgtgcgcgcctaccagattaaatcggaaaacgtcgtcgcccatatccgcaaagcatcgcaaggacaaacctcgctggcgaacacccatccctttatgcgcgaaatgtggggcggctactggctgtttgcccacaacggacatttgattgattttttccccgaacagggcgaatttttccaccccgtcggcacaaccgattccgaacgcgcgttctgccacatcctcaaccgcctgcgcacccgctttgccgcccgtcccgacgacgacacgctgtttgacgcgattgcggggctgacgcacgaaatccgcaagttcgggctgtttaactttatgctttcagacggcattgccctgtttgcccacgccagcacgctgctgcactacatcgtccgccaagccccgttcggcaaggcgcgcctgctcgacgacgacgtgatggtcgattttgccgaagtaaccacgccctccgaccgcgtcgccgttatcgccaccctgccactgacccgcgacgaatcatggtcccaacttgccgtggacgaactggtcatgttccgcgaaggcaacatcgtccgacacgaccgtcccgaaaaccccgtctatatgagtgccgaagaaggtctggaaatcgcccgcgccgccggcgtcgccgtctga

SEQ ID NO: 67353 - DNA, 771 bp, Neisseria meningitidis
atggaacccgaacgcctgcaaaaagtgcttgccgcgtccggcgtcggctcgcgccgcgaaatggaagaatggatcaacaacggctgggtaacggtcaacggcaaaaccgcgcaactgggcgacaaagttacccccgacgaccacgttaccgtcaaaggcagtatcatcaaactcaaatgggcggaccgcctgccgcgcatcatcctgtattacaaacaagaaggcgaaatcgtttcccgcgacgatccgcaaggccgcgtcagcatattcgaccgtctgccgcaggccgccagcagccgctgggtcgccatcggacgcttggacatcaacaccagcggacttctgattctcaccacctccggcgaactcgtccaacggttcgcccaccccagctttgaagtcgaacgcgaatacgccgtgcgcgtactgggcgggctgaccggcgaacaaatccgcgtcctcaccgaagaaggcgtaatgctcgaagacggcttggcaaaagtcgaacgcatccgcgaacaaggcggcgaaggcgcgaacaaatggtacaacgtcgtgattaaagaaggccgcaaccgcgaagtgcgccgcatttttgaaagccaaggactcaccgtcagccgcctcgtgcgcgtcggcttcggccccatcggactgcccaaccgcctcaaacgcgggcagttctacgaactcaaccccgccgaagtcgccaacatcatcaaatgggcggacatgctgctgccgggcgaacgccgccgcaaaaaagcctaa

SEQ ID NO: 67354 - DNA, 303 bp, Neisseria meningitidis
atgaccgcgcaacaccaatccgacacgctcttgcgccgcctgaacaccctgccgccgaaacgttacggcgttttcctattgaacgacgattacaccacgatggaatttgtcgttgaaatcctgaccgaaatctttatgctcggacaagaacaggcggtagcggtaatgctcttggttcatcacgaaggcaaaggcctgtgcggcacttacacgcgcgatattgcccaaaccaaacagcaacaagtcatgcagcgggcaaaagccgaagggcatccgctgcaatgtattgtcgaggagatttaa

SEQ ID NO: 67355 - DNA, 567 bp, Neisseria meningitidis; identical to SEQ ID NO: 44975

SEQ ID NO: 67356 - DNA, 195 bp, Neisseria meningitidis
  misc_feature 180, 181, 182, 183, 184: 'n' is a, c, g or t
atgttaccctcgaaatatgaagataacacactgcaaattaaagaaaaaagtacagaaagaactgctccgttttttgtgctggaagttaccgcccgttctgccgccgatattttgggtatccatcccaattcggcagcactgttctaccgtaaaatccgcatggttatcaaccatcatttnnnnncacacacttaa

SEQ ID NO: 67357 - DNA, 612 bp, Neisseria meningitidis; identical to SEQ ID NO: 39736

SEQ ID NO: 67358 - DNA, 1185 bp, Neisseria meningitidis
atgaccgaaccgacctcccgccgccgttttctgaaaacctgcaccgccgctgccggcgcggggctgcttcaggcttgcggcacatccgccacatccgttccgccccttccctcttcccattccgttgtgaaagcccgaaccgtgcctctccaaacgccacgccgtcaaagttcggacggcaaccttctgcgcgttgtcgcttcgtcaggatttgccgaagacaccaaccgcgtcaacacagccttaacccgcctttacaatgtcggttttaccgtaaccaaccaacaggcgggcagccgccgtttccaacggtttgccggcacggacacgcaacgtgccgccgatttccaagaggtcgcttccggccgcgtcgccacgcctaaagtgctgatgggcttgcgcggcggttacggtgcggcgcggattctgccgcatatcgattttgcttcgctcggcgcaaggatgcgcgaacacggcacgctgtttttcggattcagcgacgtatgcgccgtccagctggcattgttggcaaaaggcaatatgatgagttttgccggcccgatggcttatagcgattttggcaaacccgcccccggtgcgtttacgatggatgcctttatcaagggtgcaacccaaaaccgcctgaccgttgatgttccttatatccaacgcgccgatgtcgaaaccgaaggcatattgtggggcggcaacttaagcgtcctcgcctcgctcgccggcacgccttatatgcccgacatcgacggcggcattttgttcctcgaagatgtcggcgaacagccctaccgcatcgaacgtatgctcaatacgctgtatctttcgggtattttgggcaaacaacgcgccatcgtgttcggcaatttccgtatgggcaatatccgcgatgtatacgattcgtcttatgatttttctaccgtggtcaaccatatttctcgtacggcaaaaattcctgtgctgacaggtttcccgttcggacatattgccgacaaaattactttccctctgggcgcgcacgcccgaatccgtatgaacggaaacggcagttattcggtcgcgtttgaaggctaccccacactcgatgcgtccgccctgactttggataccttgctcccaccgccggatttgcccatcttccccgaaagcggtgttgccgatatctcggaataa

SEQ ID NO: 67359 - DNA, 1518 bp, Neisseria meningitidis
atggtgatttccaacccccgcgaacttgaaaaactcaaagaccggattcccaatctgatcaacatcatccgcgtcgccatcgtttttccgctgatgattatgcacatcctcgggctggaaaccggcagccgtgcgaacctgcacgcttcgtggacggcgtgggcgttttatgtttggctcgccattgcctgctggctgattttcttttccatcatccatccgcattggcaatggcaggctttgagaataccgagtttcagcgcggtggcggacatcacgatgatcggcgtgctgacctacctgttcggcggcatcgactccggcttcggcatcctgattctgcccttcgtcgtctgctcctgcctgctcagctacgggcgctaccccctgctctattccagctacgccgccatcctgctgatattcaacgccattgccgacggcgatatcggcaaatacccgctcatatcggatgcccgaaccgcctcggcaaccttcatccttgtcgccgcctcctatctttccgccatcttcacctcgctgtcggtcagatacatcgaccgtgccggcaaacttgcccatgaaaaccacgccgcctaccgccgcatcaggggcttgaaccaaaccgtactcaaccgcgttcaggaagcggtcgtcgtcatcaacgtcgagcatcagaccatactgttcaataaaaaggcaaaagacctgctacccatgcttgaaatcggacagcataccgccctgttcgaccctattaccgttttatgggacaaggcctcttcgcgtactttcgaacgcaatatcgacacgcccggcctgaacgccggcatccgcgccgttccggtcaacaaagggccggacaagctgctcatcctctacatccgcccgcaaagcgaaattcaggcagaagccctgtccgtcaaacttgccgcgctcggacaactgaccgccaacctcgcccacgaaatccgcaacccgatgtccgccatccgccacgccaacgacctgctgcgcgaaaatatggaagcgggggcggcagatccgttcaacgccaaattgtgcaaaatcatcgacggcaacgtctgccgtatcgacaaaatgctcgaagatatttcctcgctcaacaagcgcaacaaaaccgaacgcgaagccatcggcctgataccgttttgggaagaattcaaacaagagttcctgctcggccatcccgatgccgccggctgcatccgcctagatatgcagggcaatcacctgaccgcctatttcgatcccgcccacctgcggcaaattatgtggaacctcgccaacaacgcgtggcggcacagccgcaaacagcccggctcgatttccgtcaccatccgccccgcgcaaaaaaacaccgtctgtatcctctttgccgaccgcccgaagtgcaggaacacctgttcgaacccttttacaccacggcggaaaacggcaccggcctcgggctgtatgtcgcccgcgaactggcgcacgccaatttcggcgatttga

SEQ ID NO: 67360 - DNA, 219 bp, Neisseria meningitidis; identical to SEQ ID NO: 40879

SEQ ID NO: 67361 - DNA, 423 bp, Neisseria meningitidis; identical to SEQ ID NO: 36840

SEQ ID NO: 67362 - DNA, 663 bp, Neisseria meningitidis
atgatacacgccgtactcttcgacctcgacggcacgcttgccgacaccgccctagacctcggcggcgcactcaataccctgctcgcccgccacggactgccgcccaaaagcatggacgaaatccgcacccaagccagccacggcgcggcaggactgatcaaactcggcgcaggcatcacccccgaccatcccgactatgcccgatggcgcaccgaatatctggaggaatacgaccgccgctacgcccaagacaccgagctctttgacggcgtgaacgaactcatcgccgaactcgacagacgcggcatcaaatggggcatcatcaccaacaaacccatgcgcttcaccgacaaactcgcccccaaactcggcttcatcatcccacccgccgtcgtcgtcagcggcgacacctgcggcgaacccaagcccagcgtcaaacccatgctgtatgcgtgcggacaaatccacgccgacccgcaacacacactctacgtcggtgatgccgaacgcgacatccaagcaggccgcaacgccggcatgaaaaccgtcctcgccgaatggggctacatctcagatgaagacgataccgactcatggcaggcggatttccacatccgaacgccgctcgatctgctcgaatgtctggacaaaatacagccctga

SEQ ID NO: 67363 - DNA, 1869 bp, Neisseria meningitidis
atgcaagctgtccgatacaggcctgaaattgacggattgcgggccgttgccgtgctatccgtcattattttccacctgaataaccgctggctgcccggagggtttttgggggtggacattttctttgtcatctcgggattcctcattaccggcatcattctttctgaaatacagaacggttctttttctttccgggatttttatacccgcaggattaagcggatttaccctgcctttattgcggccgtgtcgctggcttcggtgattgcctctcaaatcttcctttacgaagatttcaaccaaatgcggaaaaccgtggagctttctgcggttttcttgtccaatatttatctggggtttcagcaggggtatttcgatttgagtgccgacgagaaccccgtactgcatatctggtctttggcagtagaggaacagtattacctcctgtatcctcttttgctgatattttgctgcaaaaaaacaaaatcgctacgggtgctgcgtaacatcagcatcatcctatttctgattttgactgccacatcgtttttgccaagcgggttttataccgatattctcaaccaacccaatacttattacctttcgacactgaggtttcccgagctgttggcaggttcgctgctggcggtttacgggcaaacgcaaaacggcagacggcaaacagcaaatggaaaacggcagttgctttcatcactctgcttcggcgcattgcttgcctgcctgttcgtgattgacaaacacaatccgtttatcccgggaatgaccctgctccttccctgcctgctgacggcactgcttatccggagtatgcaatacgggacacttccgacccgcatcctgtcggcaagccccatcgtatttgtcggcaaaatctcttattccctatacctgtaccattggatttttattgctttcgcccattacattacaggcgacaaacagctcggactgcctgccgtatcggcggttgccgcgttgacggccggattttccctgttgagttattatttgattgaacagccgcttagaaaacggaagatgaccttcaaaaaggcatttttctgcctctatctcgccccgtccctgatacttgtcggttacaacctgtacgcaagggggatattgaaacaggaacacctccgcccgttgcccggcgcgccccttgctgcggaaaatcattttccggaaaccgtcctgaccctcggcgactcgcacgccggacacctgcgggggtttctggattatgtcggcagccgggaagggtggaaagccaaaatcctgtccctcgattcggagtgtttggtttgggtagatgagaagctggcagacaacccgttatgtcgaaaataccgggatgaagttgaaaaagccgaagccgttttcattgcccaattctatgatttgaggatgggcggccagcccgtgccgagatttgaagcgcaatccttcctaatacccgggttcccagcccgattcagggaaaccgtcaaaaggatagccgccgtcaaacccgtctatgtttttgcaaacaacacatcaatcagccgttcgcccctgagggaggaaaaattgaaaagatttgccgcaaaccaatatctccgccccattcaggctatgggcgacatcggcaagagcaatcaggcggtctttgatttgattaaagatattcccaatgtgcattgggtggacgcacaaaaatacctgcccaaaaacacggtcgaaatatacggccgctatctttacggcgaccaagaccacctgacctatttcggttcttattatatggggcgggaatttcacaaacacgaacgcctgcttaaatcttctcgcgacggcgcattgcagtag

SEQ ID NO: 67364 - DNA, 192 bp, Neisseria meningitidis; identical to SEQ ID NO: 61779

SEQ ID NO: 67365 - DNA, 492 bp, Neisseria meningitidis; identical to SEQ ID NO: 38741

SEQ ID NO: 67366 - DNA, 567 bp, Neisseria meningitidis
atgctggttcatcccgaagctatgagtgtcggcgcgcttgccgacaaaatccgcaaaatcgaaaactggccgaaaaaaggcatcttattccacgacatcacgcccgtcctgcaaagcgcggaatacttccgacttttggttgatttattggtttaccgctatatggatcagaaaatcgacatcgttgccggtttggacgcgcgcggcttcattatcggcgcggcactcgcctaccatctcaacgtcggttttgtccccatccgcaaaaaaggcaagctgccttttgaaaccgtatcgcaaagctacgcgctcgaatacggggaagctgcggtggaaatccacaccgatgccgtcaaacccggttcgcgcgtgctgctggtcgatgatttggttgccacgggcggcacaatgcttgccgggctggaactgatccgcaaactcggcggagaaattgtcgaagctgccgctattttggaatttaccgaccttcaaggcggcaagaatatccgtgcaagcggcgcgcccttatttaccctgcttcaaaacgaaggctgtatgaagggctga

SEQ ID NO: 67367 - DNA, 537 bp, Neisseria meningitidis
gtggatttgagggaagtaaaattaggcggcgaaaccatttacgagggcggtttcgtcagcatcagcagggataaggtcaggttgcccaacggcaatgaagggcaacgtatcgtcatccgccatccgggtgcggcgtgcgtgttggcggtaacggatgatgaaaaggtcgttttggtgcggcagtggcgttatgcggcaaatcaggcgacattggaacttcctgcgggcaagctggatgtggcgggtgaggatatggcagcgtgtgcgctgcgagaattggcggaggaaacgccttataccgccgacagcgtacgcctgctttacagtttttatacggcggtcggtttttgcaacgaaaaaatgtatctgttcgaagcggaaagcgtgcgtttgggcagtacgcttgccaatgacgaagacgagattacggaaaccgtattgatgtcgaaagaagaagtccgtcaggcattggcaaacgatgaaattaaagacggcaagacattaatcggtttgcaatactggctgatgaaggattga

SEQ ID NO: 67368 - DNA, 1398 bp, Neisseria meningitidis
atgactgtccgtatcgaacacgatttattgggcgaccgcgagattcccgccgaagtgtattggggcatccacaccctgcgcgccattgaaaactttaaaatctccacacaaaaaatttctgacgtgccgcagtttgtccgcagtatggtgatggtgaaaaaggcgacggcacaggcaaacggtgagttgggcgcggtcaagcccgaaatcgccgccgccattgaaaaagcctgcgacgaagttctgctgaacaaccgctgcctcgaccaattcccgtccgacgtgtatcagggcggtgcgggtacttcggtcaatatgaacaccaacgaagtcatcgccaacctcgcattggaagtcttgggatacgaaaaaggccgctacgacatcgtcaatccgatggatcacgtcaatgccagccaatcgaccaacgatgcctatcccacgggcttccgccttgccgtgtattacagcatcggcgaattgctcgacaaactgactgtcctgaaaaacgcctttgccgccaaagccgaagaatttaaagacgttttgaaaatgggccgcacccagcttcaagatgccgtgccgatgactgccggccaagaattccaatctttccaagtgttgttggaagaagaaatcctcaacctcgaccgcacccgccaactgctgttggaagtcaatttgggcgcaacggcaatcggcacgggcgtgaacacgcccaaaggctacgccgaactggtggtcaaaaaactctccgaagtcagcggcttgccttgcaaactgaccgaaaacctgattgaggcgacctccgactgcggcgcatatgtgatggtacacggcgcattgaagcgcacggcggtcaaactctccaaaatctgcaacgacttgcgcctgctctcttccggcccgcgtgccggcttgaaagaaatcaacctgcccgaattacaggccggttcttccattatgcctgccaaagtcaatcccgtgattcccgaagtggtcaaccaagtctgcttcaaagtcatcggcaacgacacgacgattaccttcgccgccgaagccgggcaactgcaattaaacgtgatggagccggtcatcgcccaatgtatgtttgaaaccatttccctcttgggcaatgccgcagtcaacctgtccgacaaatgcgtcaaaggcattacggtcaaccgcgaaatctgcgaacgttacgttttcaactccatcggtttggtgacttatctgaatccgtatatcggacaccacaacggcgatttggtcggcaaaatctgcgcccaaaccggcaaaggcgtgcgcgaggttgtcttggaacgcgggctgttgagcgaagaagaactcaaccgcatcctctctcccgagaacctgatgaacccccatctgtaa

SEQ ID NO: 67369 - DNA, 1392 bp, Neisseria meningitidis
atgtttcccgatttctcccaaaccctctccaaagaccgccacttcctgcaatccgccttcaaaaatcccaacaaatacggcggcttgtccaaagtcgaagaaaaataccgaaaatcgcacgaaatctttttgaaacgtttggcagccttgcccaaacccgaattcgacaacaccctgcccgttcacgaaaaactcgacgaaatcaaaaaagccattgccgagaatcaggtaacgattatttgcggcgaaaccggttcgggcaaaaccacgcagttgcccaagatttgcttggaactcgggcgtggggcggcaggattgatcgggcatacccagccgcgccgtttggccgcgcgctccgtagcagagcggattgccgaagagctgaaatccgaaatcggcagcgcggtcggctataaagtacgcttcaccgaccacacctcgcgcgatgcctgcgtcaagctgatgaccgacggcatcctgctggcggaaacgcagaccgaccgttatctcgccgcctacgacacgattatcatcgacgaagcgcacgagcgcagcctgaacatcgacttccttttgggctatttgaaacaactcctgccgcgccgccccgatttgaaagtcatcatcacctcggcaacgatagacgcagaacgcttctcccgacacttcaacggcgcgcccgttttagaagtgagcggacggacgtatcccgtcgaaatcctctaccgaccgctgaccggcaaagacgaagacgacgcagaagtggagttgaccgacgcgattgtcgatgcggcggacgaattagcgcgacacggcgaaggcgatattttggtattcctgccgggcgagcgcgaaatccgcgaaactgccgaagccttacgcaaatctacactgcgccgcaacgacgaaatccttcccctgttcgcacgcctgtcgcacgccgagcagcacaaaatcttccacccttcaggcgcgaaacgccgcatcgtattggcaaccaacgtcgccgaaacctcgcttaccgtgccgggcatcaaatacgtcatcgacaccggcctcgcgcgcgtcaaacgctattccgcacgggcaaaggtggagcagcttcatgtcgaaaaaatctctcaagccgccgcccgccaacgctccggccgctgcggacgcgtctccgcaggcgtgtgtatcagactgttttcagaagaagatttcaacagccgccccgaatttaccgacccagaaatcgtccgcagcaacctcgccgccgtcatcctgcgcatggcatcgctgaacctgggcgatgtggcggcattcccatttttagaaatgcccgattcgcggtatatcaatgacggttttcaggtattgctggaattgggggcggtagaggccgtctga

SEQ ID NO: 67370 - DNA, 483 bp, Neisseria meningitidis; identical to SEQ ID NO: 45182

SEQ ID NO: 67371 - DNA, 372 bp, Neisseria meningitidis; identical to SEQ ID NO: 40198

SEQ ID NO: 67372 - DNA, 624 bp, Neisseria meningitidis; identical to SEQ ID NO: 36421

SEQ ID NO: 67373 - DNA, 684 bp, Neisseria meningitidis
atgccgtctgaaaaatgttcagacggcatttcttataaccttttgtttgcagcacataaccaatcagtctttcctattccgttccgaaatgcataccatgcgcccgtacccaatatttgcgaacaaggaaagaaaatggcacgtttaaccgtacacaccctcgaaaccgcccccgaagccgccaaagcgcgcgtcgaggcggtacttcaaaacaacggctttatccccaaccttatcggcgtattggcaaacgcccccgaagccttgtcgttttaccaagaagtcggcaagctcaacgccgccaacagcctgaccgccggcgaagtcgaagtcatccagatcatcgccgcccgtaccaaccaatgcggtttttgcgtggcagggcacaccaaactcgcaaccctgaaaaaactcctgtccgaacaatccgtcaaagccgcgcgcgctttggcggcaggcgaatttgacgatgctaaactcggcgcgctcgccgcctttacccaagccgtaatggcaaaaaaaggcgcggtatccgacgaggaactcaaagcattttttgatgcgggctacaaccagcagcaggcagtcgaagtcgtgatgggcgtagccttggcaactttgtgcaactacgtcaacaacctcggacaaaccgaaatcaaccccgaattgcaggcttacgcctga

SEQ ID NO: 67374 - DNA, 747 bp, Neisseria meningitidis; identical to SEQ ID NO: 45799

SEQ ID NO: 67375 - DNA, 1407 bp, Neisseria meningitidis; identical to SEQ ID NO: 51893

SEQ ID NO: 67376 - DNA, 552 bp, Neisseria meningitidis
atgaaagcgtatctggctctgatttctgccgccgttatcggtttggctgcctgctctcaagaacctgccgcgcctgctgccgaggcaactcctgctgctgaagcacccgcttccgaagcgcctgccgccgaagctgctcctgcagatgctgccgaagcccctgctgccggcaactgtgcggcaactgtcgaatccaacgacaatatgcagttcaacactaaagacatccaagtaagcaaagcttgtaaggaattcaccatcaccctgaaacacaccggtacccaacctaaaaccagcatgggtcacaacattgtcatcggtaaaactgaagacatggacggtattttcaaagatggcgttggcgcagctgacactgactacgttaaacctgacgatgcgcgcgttgttgcccacaccaaactgatcggtggcggcgaagaatcttctttgactctggatcctgccaaactggctgacggcgaatacaaattcgcttgcaccttcccgggtcacggtgctttgatgaacggcaaagtgactttggtcgattaa

SEQ ID NO: 67377 - DNA, 174 bp, Neisseria meningitidis; identical to SEQ ID NO: 37427

SEQ ID NO: 67378 - DNA, 1245 bp, Neisseria meningitidis
atgtccaacgaaaaccgtacctgttccttttgcggaaaatccaaatcacacgtcaaacatttaattgagggcgaaaacgcctttatctgtgacgaatgcgtctcaaactgtattgaaatattgcatgaagacggaaatgacggcacgccttcggaaagtgccggaggggagccggaagaatccggcaagctgcccacgcccgccgaaatcgtcgccaacctcaacgaccacgttatcggtcaggaacaagccaagaaagccttggcggtgtcggtgtacaaccattacaaacgcctgcgccacccgaaagccggagctaatgtcgaattgtcgaaatccaacatcctgcttatcggcccgaccggatcgggtaaaaccctgctggcgcaatctttggcgcgcaaactggatgtgccgttcgtgatggcagatgcaaccacgctgaccgaagcaggttatgtcggcgaagatgtcgaacagattattaccaaactgttgggcaaatgtgatttcgatgtcgaaaaagcccaacgcggcatcgtctatatcgacgaaatcgataaaatttcacgcaaaagcgacaatccgtccatcacgcgtgacgtgtccggcgaaggcgtgcaacaagccttgctgaaactgattgaaggtacggtggccagcgttccgccccaaggcggccgcaagcatccgaatcaggaatttatcaacgtcgataccaccaacatcctgtttatctgcggcggcgcgtttgcaggcttggaaaaagtcatccgccagcgtactgaaaaaggcggtatcggtttcggtgcgtccgttcacagcaaggacgaaaatgccgacattaccaagctgttcggcatcgtcgaaccggaagatttaatcaaattcggtctgattccggaattaatcggacgtttgcctgtgattgcaacgttagaagaactggatgaggacgcgctgattaatattttgaccgagccgaaaaacgctttggtcaagcagtatcaagccttgttcggtatggaaaatgtcgagttggaatttgaagaaggcgcattgcgttccattgcgtggcaggcaatggagcgcaaaaccggcgcgcgcggcctgcgttccatcgtcgaacgctgcctgctcgatacgatgtaccgcctgcctgatttgcaaggcttgaaaaaagtggtggtcggtaaggcagtcatcgaagagggcaaggaaccggaattggtgttcgagtcctga

SEQ ID NO: 67379 - DNA, 1587 bp, Neisseria meningitidis
atggcacttttcctcagcatattccccatcgtcctgctgatttggctgatggtgaaaaaaaacagtatgccctcctacgtcgcgctgccgattaccgcagtgctgatttacgccatcaaacttttctacttcgacgatgcgggcatgctgctcaacgccaccgccgcttccggcctcgtcaaaacgctcacgccgattaccgtgattttcggcgcgattatgttcaaccgtatgatggaaaccacgggctgcatcgatgtcatccgcaaatggctggcgaccatcagccccaaccccgtagcgcaactgatgattatcggctgggcttttgcctttatgattgaaggcgcatccggcttcggcacgcctgccgcgattgccgcgccgattctgatgagcttgggcttcaacccgttgaaagtggcgattttcactttggtgatgaactccgtccccgtctctttcggcgcggtcggtacgccgacctggttcggtttcgcaccgctgaacctgagtgccgaagacatcctcgccatcggcaggcagaccggcgtaatgcacttcttcgcaggtttcgtcatccccgtcatcggcttgggcttcatcgtaccttggtctgaaatccgcaaaaacttgggcttcgtcgccattgccgtcttctcctgcaccattccttatgtcgcattggcgatggtcaacgaagaattcccgtcgctcgtcgccggcgcaatcggcctgatggtgtccgtattcgccgccaaccaaggctggggcttgagcaaagaccacgccaaagacccgaatgccgaaaaagtgccgttcgcccaagtcgccaaagcactcgcccctttgggtatgctgatcggcatgctggtggttacgcgcatcaaacagctcggcatcaaaggcattttgaccagcaaagaagaatggttcagcttccaactgccgtttgatttgtccaaaatcaccgtcagcgactccctgacgattaccttcggcaatattttcggacaagatgtcagcgcgtcttaccaaacgctgtacgtcccggcttggattccgtttgtgctgaccgtttggatttgcatcctgctgtataaaaccaaattcaaagatgcctggacgatttattccgtaactttcaatcaaaccaaaaaaccgctgcttgccctgatgggcgcgctgattatggttcagctgatgctggtcggcggcgacaattcgatggtgaaaatcatcggtaaggaatttgccgcaatggcgggcgaacactgggtttatttctcgccgtatctgggcgcgatcggtgcgttcttctccggctccaacaccgtgtccaacctgaccttcggaccgattcagcagcaaatcgccttggataccggcctgtccgttaccctgattctggcgttgcagtccgtcggcggcgcgatgggcaatatggtgtgcctcaacaacatcatcgccgtatgtaccgtattggatgtgaaaaattccgaaggtgcgattatcaagaaaaccgttatcccgatggcgatttacggcgtgattgccgtcgtcgcggcaatgattttcttcctctag

SEQ ID NO: 67380 - DNA, 1152 bp, Neisseria meningitidis; identical to SEQ ID NO: 41030

SEQ ID NO: 67381 - DNA, 264 bp, Neisseria meningitidis; identical to SEQ ID NO: 46496

SEQ ID NO: 67382 - DNA, 639 bp, Neisseria meningitidis; identical to SEQ ID NO: 61715

SEQ ID NO: 67383 - DNA, 1218 bp, Neisseria meningitidis
atggagattattttaggtatcgtgatgtttaccgtcatcgttttggttttggcactgatgattctgtttgccaaatccaaactggtcagcgaaggcgacatcaccatcaaagtcaacggcgaaaaagagctgacgatgcccgccggcggcaaactcttgggcgcgcttgccaacgaaggcatctttatcccctccgcctgcggcgggggcggttcgtgcggacaatgccgcgtcgtcgtaaaaagcggcggcggcgacatcctgccgaccgagctgtcccacatcagcaaacgcgaagcacgcgaaggctgccgtctgtcttgtcaggtcaacgtcaaaaccgacatggacatcgaagtccccgaagaagtgttcggcgtgaaaaaatgggaatgcaccgtcatttccaacgacaacaaagccacgttcattaaagaactcaagcttgccattcccgaaggcgaagaagtccccttccgcgccggcggctacattcaaattgaagccccgccgcacactgttgcctacaaagacttcgacattcctaaggaatatcacgaagactgggacaaatacaatttgtggcaatacgtttccaaagtggacgagccgattttgcgcgcctactctatggcttcgtatcctgaagaaaaaggcatcattatgctgaacgtgcgtatcgccacgccgcccccgcgcgtacctgatgcgcctccgggacaaatgtcgtcctacatctggtcgctcaaacccggcgacaaagttacgatttccggcccgttcggcgaatttttcgccaaagacaccgatgccgaaatggtatttatcggcggcggtgcgggtatggctccgatgcgttcccacattttcgaccagttgaaacgtttgaactccaaacgtaagattaccttctggtacggcgcacgttccaaacgcgagatgttctatgtcgaagactttgaccaactcgcggcagagttcccgaacttcacgtggcacgtcgccctgtccgacccgctgccggaagacaactgggacggctacacaggcttcatccacaacgtggtttacgaaaaccacctgaaaaaccacgaagcaccggaagactgcgaattttatatgtgcggtccgccaatcatgaaccagtccgtgatcaaaatgctcaaagacttgggtgtggaagacgaaaacatcctcttggacgatttcggcggttga

SEQ ID NO: 67384 - DNA, 3072 bp, Neisseria meningitidis
atgaacgagcgaaaccagctcgaggtaaaggggaatgggcaatattcaacaataaaggacaaagacagggaacgcaaatttatctataataaagacagagggggtggaggctctgtctttttcgacaataccgatacccttgtttcccaacaaagaggtactgccgtttttggcacagccacctacctgccgccctacggcaaggtttccggttttgatgccgacgggctgcaaaagcgcaacaatgccgtcgattggattcataccacccaggccgggctggcaggctacgcctacaccgacgtcatatgcagaagcaaccaatgcccccaacttgtctatgagaccaaattttccttcgacggcatcggtttggcaaaaaatgcgggcagcctggataggcacccggacccaagccgcgaaaattcgcccatttacaaattgaaagatcatccatggttgggcgtatctttcaatttgggcagcgagaataccgtcaaagatggcaaatcattcaacaaattgatatcttcttttagtgaaggcaataataatcaaaccatcgtctctacgacacgaggccactctatttcccttagcgactggaagcgcgaacataccgccatggcctattatctgaacgccaaactgcacctgctggacaaaaaagggattgaagatatcgcccaaggcaaaacagtggatttgggcaccttgagaccgcgcgtcgaggcaacggtaaggcggggggagctgctaaatttttgggctacgtggaagattgaagataaagggaacattacagtccgcctcggcctgccggaagtcaaagcaggccgctgcaccaataaatcgaaccccaatcccaaatccaaagccccttcccccgcactgactgcccccgcgctgtggttcggagctgggcaagatggtaaggcggagatgtattccgcttcggtttccacctaccccgacagttcgagcagccgcattttccttcaaaatctgaaaagaaaaaacgaccccagcaaacccggtcgctattctctcgcagacttgaatgcgtcggatattcaaagtaaagagccgactttcacaagtcggcaaaccgtcatccgattggataaaggcgtacatcagatcaaacttcaaggcaatgaggtcgccaattttaatggaaatgacggcaaaaacgaaactttcggcattgttaaggacttgggcgtcgatcctgatgccagcgagtggaaaaaagtgctgctgccttggacggttcgtgcttccaatgatgacgatcaatttaacacattcaacaaagaagaaaacaacggcaagccaaaatacagtcaaaaataccgcagccgcgacaacggcaagcacgagcgcaatttgggcgacatcgtcaacagccccatcgtggcggtcggcgagtatttggctacttccgccaacgacgggatggtgcatatcttcaaaaaaggcaacggcggggacgagcgcaactatagtctgaagctcagttatatcccgggcacgatgccgcgcaaggatattgaaagcaaagactccacccttgccaaagagctgcgcgcctttgccgaaaaaggctatgtgggcgaccgctacggcgtggacggcggctttgtcttgcgcaaagttaacaacttaaacgggcaagaccgcgtgtttatgtttggtgcgatgggttttggcggcagaggcgcgtatgccttggatttgaccaaagccgacagcagtaacccgaccggcgtttccctgtttgatgtcaaaaatgacaataataacggcaaaaacggcaataatagcgtggaattaggctacaccgtcggcacgccgcaaatcggcaaaacacacaacggcaaatacgccgccttccttgcctccggttatgcgactaaagagattaacaacaacgacaataaaaccgcgctgtatgtgtatgatttggaaaacagcaacggtaacggtacgctgattaaaaaaatcgaagtaccaaacggcaagggcgggctttcgtcccccacgctggtggataaagatttggacggcacggtcgatatcgcctatgccggcgatcgcggcgggaaaatgtaccgctttgatttaagcagtcaaagtcctgatcaatggactgtacgccctatttttgaaggcacgaagccgattacttccgcgcccgctatttcccaactgaaagacaaacgcgtggtcatcttcggcacgggcagcgatttgagtgaagaggatgtggacaatatggaagaacaatatatttacggtatcttcgacgacgatacggcgacgacgggtactgtaaacttcagcggttcgggaggcgggctgcttgagcaagtgcttcgtagggataacgacaataaaaccttattcctgaccgattacaagcgatccgacggatcgggcaataagggctgggtagtgaaattgaaggacggacagcgcgttaccgtcaaaccgaccgtggtattgcgtaccgcctttgtaaccatccataaatatacgggtacggacaaatgcggcgcggaaaccgccattttgggcatcaataccgccgacggcggcaagctgaccaagaaaagcgcgcgcccgattgtgccggaagccaatacggctgtcgcgcaatattccggccataagaaaggcaccaacggcaaatccatccctataggttgtatgcaaaaaagcaatgaaatcgtctgcccgaacggatatgtttacgacaaaccggttaatgtgcgttatctggatgaaaagaaaacagacggattttcaacaacggcagacggcgatgcgggcggcagcggtatagaccccgacggcaagcgttccggcaaaaacaaccgctgcttctcccaaaaaggggtgcgcaccctgctgatgaacgatttggacagcttggacattaccggcccgacgtgcggtatgaaacgaatcagctggcgtgaagtcttctactggatttgcacgcgaaaatgccgtccgaaaggtttcggacggcattttttgcgtttttcgggaggggcgggttcgtaa

SEQ ID NO: 67385 - DNA, 1779 bp, Neisseria meningitidis
atgacggttttgaagctttcgcactggcgggtgttggcggagcttgccgacggtttgccgcaacacgtctcgcaactggcgcgtatggcggatatgaagccgcagcagctcaacggtttttggcagcagatgccggcgcacatacgcgggctgttgcgccaacacgacggctattggcggctggtgcgcccattggcggttttcgatgccgaaggtttgcgcgagctgggggaaaggtcgggttttcagacggcattgaagcacgagtgcgcgtccagcaacgacgagatactggaattggcgcggattgcgccggacaaggcgcacaaaaccatatgtgtgacccacctgcaaagtaagggcagggggcggcaggggcggaagtggtcgcaccgtttgggcgagtgtctgatgttcagttttggctgggtgtttgaccggccgcagtatgagttgggttcgctgtcgcctgttgcggcagtggcgtgccggcgcgccttgtcgcgtttgggtttgaaaacgcaaatcaagtggccaaacgatttggtcgtcggacgcgacaaattgggcggcattctgattgaaacggtcaggacgggcggcaaaacggttgccgtggtcggtatcggcatcaatttcgtgctgcccaaggaagtggaaaacgccgcttccgtgcaatcgctgtttcagacggcatcgcggcggggaaatgccgatgccgccgtgttgctggaaacgctgttggcggaacttgatgcggtgttgttgcaatatgcgcaggacggatttgcgccttttgtggcggaatatcaggctgccaaccgcgaccacggcaaggcggtattgctgttgcgcgacggcgaaaccgtgttcgaaggcacggttaaaggcgtggacgaacaaggcgttctgcacttggaaacggcagagggcaaacagacggtcgtcagcggcgaaatcagcctgcggcccgacaacaggccggtttccgtgccgaagcggcgggattcggaacgttttctgctgttggacggcggcaacagccggctcaagtgggcgtgggtggaaaacggcacgttcgcaaccgtcggtagcgcgccgtaccgcgatttgtcgcctttgggcgcggagtgggcggaaaaggcggatggaaatgtccgcatcgtcggttgcgccgtgtgcggagaattcaaaaaggcacaagtgcaggaacagctcgcccgaaaaatcgagtggctgccgtcttccgcacaggctttgggcatacgcaaccactaccgccaccccgaagaacacggttccgaccgctggttcaacgccttgggcagccgccgcttcagccgcaacgcctgcgtcgtcgtcagttgcggcacggcggtaacggttgacgcgctcaccgatgacggacattatctcgggggaaccatcatgcccggtttccacctgatgaaagaatcgctcgccgtccgaaccgccaacctcaaccggcacgccggtaagcgttatcctttcccgaccacaacgggcaatgccgtcgccagcggcatgatggatgcggtttgcggctcggttatgatgatgcacgggcgtttgaaagaaaaaaccggggcgggcaagcctgtcgatgtcatcattaccggcggcggcgcggcaaaagttgccgaagccctgccgcctgcatttttggcggaaaataccgtgcgcgtggcggacaacctcgtcattcacgggctgctgaacctgattgccgccgaaggcggggaatcggaacatacttaa

SEQ ID NO: 67386 - DNA, 828 bp, Neisseria meningitidis
ttgtgggttgccgtatcctgcctgttcgcgggctggctgtatttcgaactcgccggcaatcccggctacggcgcggcagtcgcaaaagaaaaagtattggaattctttaccggctacattttggaaaaatcgttggcagtcgacaatattttcgtgttcctgatgatattcggctacttcaaagtcgcaccgcagtttcagcaccgcgtgctgctgtacggcgtattgggcgcattggtattgcgcactgtcatgattttcgtcggcgcggcactggttcagcagttcgagtggattctgtatctgttcggcgcgttcctgctctatactggtatacacatgatgaagcccgaaggcgatgaggaaggggatttggcaaacagcaggctgctgaatgccgtcaagaaagtcgttccggtcggcacggaatttcacggcgagaaattttttactgtcgaaaacggtaaaaaaatcgccacgccgctgtttttggtgctggtcatgattgaattgagcgatgtcgtgtttgccgtggacagcatccccgccgtctttgccgttaccaccgatccgtttatcgtgctgacttccaatattttcgctattttgggcttgcgggcgatgtatttcctgctggcggatgtggcggaacgctttatcttcctgaaatacggcttggcattcgtgttgggttttatcggtgtgaaaatgctggtaatgcattgggtgcatatcccgatttccgtttcgctgtcggtcgtgttcggcgcgttgggtgcatcgatactgacctcgttaatttatacgaaaaaacagtccgataaataa

SEQ ID NO: 67387 - DNA, 1554 bp, Neisseria meningitidis
atgacacaggccaaccgcgttatcattttcgacaccaccctgcgcgacggcgagcagtcgcccggcgccgctatgaccaaagaggaaaaaatccgcgtcgcccgccagctggaaaaattgggtgtggacatcatcgaagcgggttttgccgctgccagcccgggcgatttcgaggcggtcaatgcgattgcgaaaaccattaccaaatcaacggtctgttcattgtcccgcgccatcgagcgggacatccgtcaggcgggtgaggccgttgcgcccgcgccgaaaaaacgcatccacaccttcatcgccaccagccccatccatatggagtacaaattgaagatgaagccgaagcaggtgattgaggcggcggtcaaagcggtgaaaatcgctcgtgaatacaccgacgatgtggaattttcctgcgaagacgcgttgcgttcggaaatcgatttccttgccgaaatctgcggcgcggtgattgaagcgggcgcgaccaccatcaatattcccgataccgtcggctattccatcccgtataaaaccgaagaatttttccgcgaactgattgccaaaacgcccaacggcggcaaagtcgtttggtcggcacactgccacaacgatttgggcttggcggttgccaattcgcttgccgcattaaaaggcggcgcgcgtcaggtggaatgtactgtcaacggcttgggcgaacgtgcaggcaatgcttcggttgaagaaatcgtgatggcgttgaaagtgcgccacgacttgttcggcttggaaaccggcatcgataccacgcaaatcgtgccttcgtccaaactggtgtccaccattacgggctatcccgtgcagcccaacaaagccattgtcggtgccaatgccttttcgcatgaatcgggcatccatcaggatggggtgctgaaacaccgcgaaacttacgagattatgtccgccgaatcggtcggctgggcaacaaaccgtttgagcttgggcaaattgtccggccgcaacgccttcaaaaccaagctggcggatttgggcatcgagttggaaagcgaagaggcactgaacgccgcgtttgcccgcttcaaagaactcgccgacaaaaaacgcgaaatcttcgatgaagacctgcacgcactggtatccgacgaaatgggcagcatgaatgccgagagctacaaattcatctcccaaaaaatcagcaccgaaaccggcgaagagccgcgcgccgacatcgtgttcagcatcaaaggcgaagaaaaacgcgcttccgccacaggctccggccccgtggatgcgattttcaaagcgattgaaagcgtggcgcaaagcggcgcggctttgcagatttattccgtcaacgccgtcacgcaaggtacggaaagccagggcgaaaccagcgtccgtctggcgcgcggcaaccgcgtcgtcaacggtcagggcgcggataccgacgttttggtcgctaccgccaaagcctacctttccgccttgagcaaactggaatttagtgccgccaaaccgaaagcgcaaggcagcggtacgatttga

SEQ ID NO: 67388 - DNA, 2364 bp, Neisseria meningitidis
atgcaattctcctactcatggctgaaaacccaagccgataccgaactttcctccgataagctggaacatctgttaacgatgtccggcttggaagtggaagaggctgaaactgccgcgcctgcgtttgcgggcgtggtgattgccgaagtgaaatccgttgaaaaacatcctgatgccgaccgtttgaacgttacccgagtcgatgtgggcacgggtgagttggtgcagattgtgtgcggtgcgccgaatgtgaaagcgggcatcaaagtgccgtgttcgctgccgggtgcggtgttgccgggcaatttcaaaatcaagccgactaaaatgcgcggtgtggtgtcgaacgggatgttgtgttccaccgacgaactcggtctgcccgacgacggtgtgaacggcctgcacattctgcctgaagacgcgcccgtcggtaccaatatccgtgaatacttggatttggacgatacgctgtttacgttgaaaattacgcctaaccgcgctgattgcttgagtgttaagggcattgcgcgcgaagtgtccgcattgacggggtgcgcgttcaggcagcccgaaatccggaaaatgccgtctgaaggcggtaaaacccgggctgtgaaaattgacgcgcctgccgattgcggccgttttatcagccgcgttattgaaaatgtcaatgcgaaagcggctactcccgattggatgaaacaacgtttggagcgcagcggcatccgcagtatttccgtgctggtggacatcggcaattatgtgatgctggaaatcggccagccgatgcacgttttcgatgccgacaaactttccggcagcctgcacatccgccgcgcgcgcgaaggggaaacgctggaatgcctgaacgagaaaaccgtttccctgtctgaaaatacgctggtcgtggcagacgaaaaaggcgcgttgagtttggcgggcttaatgggcggcgcggcgagcgcggtttcagacggcacgcaaaatatcgtgctggaagcggcttggtttgcgcccgaaatcatcgccggcaaatcgcgccaatacggtttcggttcggattcgtcgttccgcttcgagcgcggcgtggattaccgtttgcaggcggatgccattgaacgcgccaccgaattggttttgcagatttgcggcggtgcggcaggagaaatggtggaagcgcaaggcgaattgcctgaagccaagcaggtcggattgcgtttggaccgtctgaaaaccgtgttgggcgtggacattcctgccgaacaggtggaaaccattttgcaacacttgggcctgcagcccgagaaaacggcggaaggcttccgcgttaccgcgccgagcttccgttttgacatcgaaattgaggctgatttgattgaagaaatcggacgcgtttacggctatgaaaacatccccgacgattacacgtcaggccgtctgaaaatgctggaactgcccgaaacacgccgcccgcgttttgccgtttacaacgaaatggcggcgcgcggctaccgcgaagtggtcagctatgccttcgttgacgagcagtgggaacaagattttgccgccaacgccgaccccatccgtctgcaaaacccgttggcggcgcaatatgccgtgatgcgttccacactcatcggcggcttggtggaaattttgcaaaacaacctgaaccgcaaacaaaaccgcgtgcgcgtgtttgaaatcgcccgcgtgttcggcaaaggttcagacggccagtttgtccaaaacgaacgcatcggcggcttgtggtacggcgcggcaatgcccgaacaatggggcgggaaaacgcgcaatgcagatttttacgacatcaaggcagatgtggaaaatctgttgaaaaacaaagcagtcgagttcgttaaaaccggacatcctgccctgcatcccggacgcgccgccaatatcgtttcagacggcaaagtcatcggctttgtcggcgaactgcatccgaaatggctgcaaaaatacgacctgccgcaagcgccgctggtatttgaaatcgatatggcggccgtgttggaatgcgggaaaacgcgctatcgggccgtatcgaaattccagccggtgcgccgcgatttggcgtttgtgatgccggaagctatgagccatgatgatttgctgcttgtcttggaaggcgcggcaaacaagttggtacaggaaatcagcgtgtttgacgtgtatcgcggcacgggtttgcccgaagggatgaagagcgtggcggtcaaagtgattttgcaggatatggaaaacacgctgacggatgaggcggtcgagccgcttatcggaaaactgattggcgcggcaacggcggcaggggcgcggcttcgcagttaa

SEQ ID NO: 67389 - DNA, 276 bp, Neisseria meningitidis; identical to SEQ ID NO: 58888

SEQ ID NO: 67390 - DNA, 3834 bp, Neisseria meningitidis
atgaccacgactaccgccccgcagcgtattcgggaaattccctataactatacttcttataccgaccgcgaaatcgtcatccgactgttgggcaacgaagcgtggcagattctgcaagacttgcgcggacagcgtaaaactggacgttcggcgcggatgctgtttgaagtgttgggcgatatttgggtggtcgtgcgcaatccgtatctggtcgatgatttgctggagcatccgaaacgccgcgccgcgttgatacgcgaaatgcgccaccgcctgaacgaaatccgcaaacgccgcgacgataatcggcaagtggatgtcttggttgccgcagcagaaaaagcagtcgagcgttttgatagcagttttgatgaaaccagccaaaagcggcggcagattttggagcgtttgagcaaaatcaccaagccgcacaatattatgtttgacggattggcgcgggtaacgcacgttaccgatgcaaccgactggcgcgtcgaatatccgtttgtcgtcgtcaatcctgataccgaggcagagatcgcgcctttggtgcgcgccttaatcgagctggatttggttattatcccgcgcggcggcggtacgggttataccggcggcgcgattcctttggacgcgatgagcgcggtcatcaatacggaaaagctggataaacataatggcgtggagtttgtcgaactggcgggcttggatggcaaacatccgattatccattgcggcgcgggcgtggtaacgcggcgggtggaagaaaccgcgcatcaggcaggtttggtgttcgccgtcgatccgacttccgccgatgcgtcctgtgtgggcggtaatgtggcgatgaacgcgggcggtaaaaaagccgtgctgtgggggacggcgttggacaacctcgcctactggcagatggtcaacccgcagggcgaatggctgcgcatcgagcgcgtgcgccacaatttcggcaaaatccacgacgaagaaaccgccgtgttcgacgttcacacgctggattcagacggcctcaatatcgttaaaaccgaacgtttggaaattcccggccacaaatttcgcaaagtcggtttgggcaaagacgttaccgacaaattcttgagcggcctgcccggcgtacagaaagaaggcacggacggcatcatcaccggcgttgctttcgtgttgcacaaaatgccgaaatacacgcgcactgtgtgtatggagtttttcggcacggtcgccaccgctacgccttctatcgtcgaaatccgcgatttcctgctcgcccacgacagcgttcggctggcaggtttggaacatttggactggcgttacgtccgcgccgtcggctacgcaaccaaagcggcgggcaagggacggccgaaaatggtcttgctggcggacgtggtttccgacgacgaagccgccgtagaggcagccgccgaacacatttgcgaacttgcccgcgcccgcgatggcgaaggctttatcgccgtgtctcccgaagcgcgcaaaaccttttggctcgaccgcagccgcaccgccgccatcgccaagcacaccaacgcctttaaaattaacgaagacgtggtcatcccgctcgaaaggctcggcgagtattcggacggcatcgaacgcatcaacattgagctttccatccaaaacaagctcaaactctgtgccgccttggagcaatatctttcgggcaaactccccatcgacaaaatgggcactgacctgccgaccgccgaactgttgggcgaacgcggcaaacacgccctagcccacgtttccgccgtcaaaacgcgttgggaatggctgctcgccaatctcgacacgccgcttgccgactacaaagcccgctacggcgcagccgtccacgccgcgcccgaagccaaagacgatgaaagttgctttattgctttccgcgatttccgcctgcgcgtttctgtcaaagcagacgtaatgaagccgcttgccgaaatcttcagcggcaaaaccgataccaagattatccaaggcttgggcaaaatccacgccaaaaccgtacgcagccgcgtctttgtcgccctgcatatgcacgccggcgacggtaacgttcacaccaatattccggtcaactcagacgatgccgaaatgcttcagacagcctaccgttcggtcgaacgcattatgaaaatcgcccgttcgctcggcggcgtgatttcgggcgaacacggcatcggcatcaccaagctcgaatttttgaccgatgaagacttgcagccgttttgggactacaaaaaccaagtcgaccccaaacacaccttcaaccgccacaaactgatgaaaggctcggacttacgcaacgcctacacgccgtccttcgagctgttgggcgcggaatcgctgattatggaaaaatcaaacctcggcacgattgccgattccgtcaaagactgcctgcgctgcggcaaatgcaaacccgtctgctccacccacgttccgcgcgccaacctgctgtacagtccgcgcaacaaaatcctcggcgtagggctgttaaccgaagccttcttatacgaagaacaaacccggcgcggcgtttccgtcaaacactttgaagaactggcagacatcggcgaccactgcaccgtgtgccaccgctgcgtcaaaccctgccccgtcaatatcgacttcggcgacgtaaccgtagccgtccgcaactaccttgccgattccggccacaaacgctttgcgccggcagcttcaatgggtatggcattcctaaacgcgaccggcccgaaaaccatcaaagtccttcgcgccgccatgatacagaccggcttccccgcgcagaatttcgcctacaaaatcggcaaactgctgcccgtcggcacgaaaaagcaaaaagccgaacccaaggcaaccgtcggcaaagccccaattaaagaacaggttatccatttcatcaaccgtcctttgcccaaaaacgtacccgccaaaacaccgcgctccttattgggcatcgaagacggcaaaagcatccccatcatccgcaaccccgccgcgcccgaagatgccgaagccgtgttctacttcccgggttgcggttcggaacgcctgttcagccaaatcggacttgccgttcaagccatgctctggcacgtcggcgtacaaaccgtcctgccgcccggctatatgtgttgcggctatccgcaagacgcgggcggcaacaaggctaaagccgaagaaatgagcaccaacaaccgcgtggctttccaccgtatggcaaacaccctcaactacctcgacattaagaccgtcgttgtcagttgcggcacttgttacgaccagctcgaaaaataccgctttgaagaaatcttccccggctgccgcatcatcgacatccacgaatacctgctcgaaaaaggcgtgaaactcgacggcgtgcaaggtcagcaatacctctaccacgacccctgccacacccccatcaaaaccatgaacgccacccaaatggccagcagcctgatggggcagaaagtcgtcttaagcgaccgctgctgcggcgagtccggtatgttcgccgtcaaacggcccgacatcgccactcaggtcaagttccgcaaacaagaggaaatcgagaaaaacctcaaagagctgccgcagggcgaacccgtcaaaatgctgacctcctgccccgcctgcctgcaaggcttgagccgctacgccgacgacaacaatatgcctgccgactacatagtcattgaaatggcgaaacacattctcggcgaaaactggctggacgagttcgtcaaaaaagccaacaacggcggcgtggaaaaagtattgctgtaa

SEQ ID NO: 67391 - DNA, 1251 bp, Neisseria meningitidis
atgaccaaactgacacgaagacaaatcatccgccgcaccgccggcacactgttcgccctaagccccatcgcatccgccgttgccaaaacggtacgcgccccgcaattcaccgccgcacggatatggccgtcgcacacctacacccgcctaacgctggaaagcaccgccgcgctcaaataccagcacttcgcgctcgacaatccgggcaggctggtcgtcgacatacaaaacgcaaacatcaataccgtattgcacggactgtcccaaaaagtggcggcggacgacccctttatccgcaatatacgcgccggtcagaacacgcccgacaccgtccgcctcgtcatcgatttgaaacagccttcctacgcgcaagttttttccctcccccccgtcggcggctttaaaaaccgcctcgtcgtcgatctctatccgcaagggatggatcccgacgatccgatgatggctctgcttaacggcagcctgaacaaaacccgtcgcggctcccctgaagccgacctcgctcaaaacactcctgcacaaaccgaacgcggcaaaaacgggcgcagacccgtcattatgatcgaccccggacacggcggcgaagaccccggcgccgtcagcccgggcggtttgcaggaaaaacacgtcgtcctctccatcgcccgcgaaaccaaaaaacaattggaagccttgggttacaacgtctttatgacgcgcaacgaagacgtgttcatccctttgggcgtgcgtgtcgccaaagggcgcgcacggcgggcggacgtattcgtctccatccacgccgacgctttcaccagcccctccgcgcgcggaacgggggtctatatgctgaacaccaaaggcgcgaccagctccgccgccaaattcttggaacagacgcaaaacaatgccgacgcggtcggcggcgtaccgaccagcggcaaccgcaacgtcgataccgccctgctcgatatgacccaaaccgccacgctgcgcgacagccgcaaactcggcaaactggtgcttgaagaattgggcaggctcaaccacttgcacaaaggcagggtggacgaagccaatttcgccgttttgcgcgcacccgatatgccgtctatcctggtcgaaaccgccttcctgtccaaccctgctgaagagaagttgctgggcagcgaatccttccgccggcagtgcgcccaatccattgcctcgggtgtccaacgctacatcaatacatccgtattgaagcggggttga

SEQ ID NO: 67392 - DNA, 747 bp, Neisseria meningitidis
atgagcacacaagatttaagcggcaaaatcgctttggtaacaggcgcctcgcgcggtatcggtgcagcaattgccgacacactggcggcagccggtgccaaagtcatcggtacggcgaccagtgagagcggtgcggcggcgattagcgagcggttggcgcaatggggcggcgaaggccgcgtattaaattccgccgaacccgaaaccgtcgaaaacctgattgccgacatcgaaaaaacgttcggcaaactcgatattctggtcaacaacgccggcatcacccgcgacaacctcctgatgcgtatgaaagaagaagagtgggacgacatcatgcaggtcaacctaaaatccgtgttccgcgcttctaaagccgtcttgcgcggtatgatgaaacaacgttccggccgtatcatcaacatcacatccgtcgtcggcgtgatgggcaatgccggtcaaaccaactatgccgcggcaaaagcaggcttaatcggtttctccaaatccatggcgcgcgaagtcggcagccggggcattaccgtcaactgcgtcgcccccggctttatcgataccgacatgacccgcgccctgccggaagaaacccgccaaacctttaccgcccaaaccgccttgggcagattcggcgacgcgcaagacattgccgatgcagtcttgttcttggcttccgatcaggcaaaatacattaccggtcaaacgctgcacgtcaacggcggcatgctgatgccctga

SEQ ID NO: 67393 - DNA, 966 bp, Neisseria meningitidis; identical to SEQ ID NO: 58694

SEQ ID NO: 67394 - DNA, 1065 bp, Neisseria meningitidis
atggaaaaagaattcaggatattaaatatcgtatcggccaagatttggggtgggggcgaacaatatgtctatgatgtttcaaaagcattggggcttcggggctgcaccatgtttaccgccgtcaataaaaataatgagttgatgcacagacgcttttccgaagtttcttccgttttcacgacacgccttcacacgctcaacgggctgttttcgctctgcgcgcttacccgctttatccgggaaaaccgcatttcccacctaatgatacacaccggcaaaattgccgccttatccatacttttgaaaaaactgaccggggtgcgcctgatatttgtcaaacacaatgtcgtcgccaacaaaaccgatttttaccaccgcctgatacagaaaaacaccgaccgctttatttgcgtttcccgtctggtttacgatgtgcaaaccgccgacaatccctttaaagaaaaataccggattgttcataacggtatcgataccgaccggttccctccctctcaagaaaaacccgacagccgtttttttaccgtcgcctacgccggcaggatcagcccggaaaaaggattggaaaacctgattgaagcctgtgtgatactgcatcggaaatatcctcaaatcaggctcaaattggcaggggacggacatccggattatatgtgccgcctgaagcgggacgtatctgcttcaggagcagaaccatttgtttcttttgaagggtttaccgaaaaacttgcttcgttttaccgccaaagcgatgtcgtggttttgcccagcctcgtcccggaggcattcggtttgtcattatgcgaggcgatgtactgccgaacggcggtgatttccaatactttgggcgcgcaaaaggaaattatcgaacatcatcaatcggggattctactggacaggcttactcctgcatctttggcggacgaaatcgaacgcctcgtcttaaaccccgaagcaaaaaacgcactggcaacggcaggacatcaatgcgtcgccaaccgttttaccatcaaccataccgccgacaaattattggatgcaatataa

SEQ ID NO: 67395 - DNA, 342 bp, Neisseria meningitidis
atgcccaaaatcaccgtacttccacacacgacattatgccccgagggtgcagtcatcgataacgcacccgaaggtaaaaccgtccttgacgtgctgctcgaccatgatatcgaagtcgatcacgcctgcgaaaaatcctgcgcctgcaccacctgccacgtcatcatccgcaaaggtttcgacagtttggaagaaccgaccgaattggaagaagacctgctcgaccaagcatggggtttggaagccgattcgcgcctgagttgtcaggcggttgtcgccggcgaggatttgattgtggaaatccccaaatacaccatcaaccacgcgcgagaagaacactga

SEQ ID NO: 67396 - DNA, 483 bp, Neisseria meningitidis
atgggaatagaaggcgttttgaaaaaaggtttcatcaccaccagcgcggatacggtgttgaactatatgcgtaccggttcgctgtggccggttactttcggcttggcctgctgcgccgtggaaatgatgcatgcgggtatggcgcgttatgaccttgaccgtttcggcatcattttccgtccgtctccccgtcaggccgacctgatgattgtggcaggtacactgaccaacaaaatggcgcccgccctgcgccgcgtatacgaccagctcgccgagccgcgctgggtattgtctatgggctcgtgtgccaacggcggcggctattatcactattcttattccgttgtgcgcggtgccgaccgcgtcgtgccggtagacgtttatgtgccaggttgtccgccgactgcggaagccctgatttatggcctgattcagctccaacaaaaaatcaagcgcacttccaccatcgcgcgtgacgaataa

SEQ ID NO: 67397 - DNA, 1011 bp, Neisseria meningitidis
atgagcgatacccccgctacccgcgattttggcctgatcgacgggcgtgccgtaaccggctatgtgctgtccaaccggcgtggtacgcgtgtctgcgtgctggacttgggcgggattgtgcaggaattttccgttttggcagacggcgtgcgcgaaaacctcgtggtgtcgttcgacgatgcggcttcctatgcggacaatccgtttcagattaacaagcagatagggcgcgtggccggacgcatccgcggtgcggcgttcgacatcaacggcaggacttaccgcgtggaggccaacgaaggcaggaacgcgctgcacggcggttcgcacgggctggccgttacccgtttcaacgcggtggcggcagacggccgttcggtggtgctgcgcagccgcctgcaacagtcggccgacggttatcccaacgatttggatttggatatttcctaccgcttggacgaggacgaccggcttaccgttagctatcgcgccaccgcgctcggcgacacggtgttcgacccgacgctgcacatttactggcggctggacgcgggcctgcacgatgcggttctgcatattccgcagggcggacatattccggccgatgccgaaaaactgcccgtctcaacggttttagacgacctcgaagtatttgatttcagccggcccaagccgctggatgccgccgttgccgccctgcgccgcgaaacgggtcgggccggttttgacgacgcttaccgcgtgccgtccgatataggccgtcccgccgctgtgttgcaagccggacgccgccgtcgtatcagcatatacagcgaccgcaacggcttggtcatctttaccgccgccccgcaggatttcgcgcggcacgatgcgggcgtttacgacgcgctggcgaccgaggcgcagacgctgcccgacagcctgaattggcccgagttcggcaatattcgtctgaacaagggtgataccagggaggcgacgattgcttacggcatcgaatccctttcttag

SEQ ID NO: 67398 - DNA, 861 bp, Neisseria meningitidis
atggcaaaagtaaaaggcggattggggcgcggtttggattcgctgctcgccaacggcgcagacaacagcagcggcgaccgattgaccacggttgcggttaaagatatccggcccggccgctatcaggcgcgtgttcaaatcgatgacgaagccttgcaggagctggcagattcgattaaggcgcaaggcgtgatacagcccgtcatcgtgcgcgaacacggactgtcccgatacgaactgattgcgggggagcggcgttggcgtgccgcacagattgccggcctgaccgaaatccccgccgttatcaaaaccatcagcgacgaaaccgcgttggcaatgggtttgatcgaaaacctccagcgcgaaaacctcaaccccatcgaagaagcacaaggcttgaaacgccttgccgacgagttcgggctgacccacgaaaccatcgcccaagccgtcggtaaaagccgaagcgcgatttccaacagcctgcgccttttaagcctgcccgaacccgtgcaggaaatgctttaccaacgccgcctcgaaatggggcacgcccgcgcactgctgaccctgcccgtcgtcgaacagctcgaattggcgcaaaaggctgtcaaaaacggctggtcggtgcgcgaagtcgaacgccgcagccaagccgcccttcaaaacaaacgtcccgagcccaaaaaaactgccgccgccgacatcggccgcctgaatgatttgctgactgaaaaactgggtgtcaacgccgaaatcaaaaccgccaaccataaaaaaggcagaatcatcctgcatttcgacacgcccgaaaccttcgaccatatcttgaagcaattgggcatagattaccgaccttaa

SEQ ID NO: 67399 - DNA, 291 bp, Neisseria meningitidis; identical to SEQ ID NO: 66873

SEQ ID NO: 67400 - DNA, 1293 bp, Neisseria meningitidis
atgcagttctcagcattcggcgaaaaattcacgcaacacagcggcatcctccaactgatggacgacctcggcgacgcgctcaaaagcgacaagcccgtcaatatgctcggcggcggcaatccggcgcgcattccggaaatcgatcgggcgttcgccgacatattctccaaactggcggcggaacacgctgtcgagaacatcggcaactactccaatccccaaggcgatgccgcgctgattgacgcgctgaccgccttcctcaaccgcgaatacggctggaacctgaccgccgacaatatcgcgctgaccaacggttcgcaaaacgcgtttttctatttattcaacctcttcggcggcaaattcaagctttcagacggcacatccgcagaaaaagccattttgttgccgctcgcgcccgaatacatcggctatgccgacgtacatatcgaagggcagcacttcgtttctgtcaagcccaaaatcgaaaacgtcgaacacgaaggcgaagcaggcttcttcaaataccgcgtggactttgacgcactggaaaacctgcccgaactcaaagcgggcaaaatcggcgcgatttgctgttcgcgcccgaccaacccgaccggcaatgtgttgaccgacggcgaaatggcgcgtttggacgctttggcgcgtgaacacgggattccgctgattatcgacaacgcctacggaatgccgttccccaacatcatttacagcgacgtaacgctgaattggcatgaaaacatcatcctctgcttcagcctttccaaagtcggcctgccgggcgttcgcaccggcatcatcgtcgccgcgccggaagtggtcaaagccgtcagcagcctgaacgcgattgtgaaccttgcccccacgcgcttcggcgcggccatcgccgccccgctactggaaagcggcgagatgaaacggcttgccgaccaagtcatccggccgttttaccgcaatcaggcgcaaaccgccgtctcgctgctcaagcgcgagctgggcgcgtacccgatgaaaatccacaaacccgaaggcgcgattttcctgtggctctggtttgaaaacctgcccgtttcttcgcaaaccctgtacgaaatgctcaaagccgaaggtacgctgattattccgggcgaacatttcttcgtcggcatcgacacgcaggattacccgcacgcgggcgagtgcatccgcatgagcatcgcgcaggacgctcaaacgctggaaaaaggcattgccgccatcggcaaaaccgtccgaaaactgtacgacaacgtttaa

SEQ ID NO: 67401 - DNA, 2112 bp, Neisseria meningitidis
atgaaaatatcatttcatttagctttattacccacactgattattgcttccttccctgttgctgccgccgatacgcaggacaatggtgaacattacaccgccacgctacctaccgtttccgtggtcggacagtccgacaccagcgtactcaaaggctacatcaactacgacgaagccgccgttacccgcaacggacagctcatcaaagaaacgccgcaaaccatcgatacgctcaatatccagaaaaacaaaaattacggtacgaacgatttgagttccatcctcgaaggcaatgccggcatcgacgctgcctacgatatgcgcggtgaaagcattttcctgcgcggttttcaagccgacgcatccgatatttaccgcgacggcgtgcgcgaaagcggacaagtgcgccgcagtactgccaacatcgagcgcgtggaaatcctgaaaggcccgtcttccgtgctttacggccgcaccaacggcggcggcgtcatcaacatggtcagcaaatacgccaacttcaaacaaagccgcaacatcggtgcggtttacggttcgtgggcaaaccgcagcctgaatatggacatcaacgaagtgctgaacaaaaacgtcgccatccgcctcaccggcgaagtcgggcgcgccaattcgttccgcagcggcatagacagcaaaaacgtcatggtttcgcccagcattaccgtcaaactcgacaacggcttgaagtggacggggcaatacacctacgacaatgtggagcgcacgcccgaccgcagcccgaccaagtctgtgtacgaccgcttcggactgccttaccgcatggggttcgcccaccggaacgattttgtcaaagacaagctgcaagtttggcgttccgaccttgaatacgccttcaacgacaaatggcgtgcccaatggcagctcgcccaccgcacggcggcgcaggattttgatcatttctatgcaggcagcgaaaatggcaacttaatcaaacgtaactacgcctggcagcagaccgacaacaaaaccctgtcgtccaatttcacgctaaacggcgactacaccatcggccgttttgaaaaccacttgaccgtaggcatggattacagccgcgaacaccgcaacccgaccttaggttacagccgcgcctttactgcttccatcgatccatacgaccgagcaagctggccggcttcgggcagattgcagcctatcctcacccaaaaccgccacaaagccgactcctacggcatctttgtgcaaaacatcttctccgccacgcccgatttgaaattcgtcctcggcggccgttacgacaaatacacctttaattccgaaaacaaactcaccggcagcagccgccagtacagcggccactcgttcagccccaacatcggcgcagtgtggaacatcaaccccgttcacacactttacgcctcgtataacaaaggtttcgcgccttatggcggacgcggcggctatttgagcatcgatacgtcatcttctgccgtgtttaacgccgaccccgagtacacccgccaatacgaaaccggcgtcaaaagcagttggctggacaatcgtttggacaccacattgtccgcctaccaaatcgaacgcttcaatatccgctaccgccccgacgcggaaaataatccctacacttgggcagtcggcggcaaacaccgttcgcgtggcgtggaattgtccgccatcgggcaaatcatccccaaaaaactctatctgcgcggttcgttgggcgtgatgcaggcgaaagtcgttgaagacaaaaaaaatcccgaccgagtgggcatccatttgaataataccagcaacgttaccggcaacctgtttttccgttatacaccgaccgaaaacctctacggcgaaatcggcgtaaccggtacaggcaaacgctacggttacaactcaagaaataaagaagtgactacgcttccaggctttgcccgagttgatgccatgctcggctggaaccataaaaatgttaacgttacctttgccgcagccaatctgttcaatcaaaaatattggcgttcggactctatgccgggtaatccgcgcggctatactgcccgggtaaattaccgtttctga

SEQ ID NO: 67402 - DNA, 1104 bp, Neisseria meningitidis
  misc_feature 1081, 1082, 1083, 1084, 1085: 'n' is a, c, g or t
atggttcatgaactcgacctgctccccgatgccgtcgccgccaccctgcttgccgacatcggacgctacgtccccgattggaacctattggtttccgaacgctgcaacagtaccgtcgccgagctggtcaaaggtgtggacgaagtgcagaaactcacccacttcgcccgggtggacagcctcgccacgccggaagaacgcgcccagcaggcagaaactatgcggaaaatgctgctggcgatggttaccgacatccgcgtcgtgttaatcaaactggcgatgcgtacgcgcaccctgcaatttttaagcaacgcccccgacagccccgaaaaacgcgccgtcgccaaagaaaccctcgacatcttcgccccgctcgccaaccgtttgggcgtgtggcagctcaaatggcagctcgaagatttgggcttccgccatcaagagcccgaaaaataccgcgaaatcgcgctgcttttggacgaaaaacgcaccgaacgcctcgaatacatcgaaaacttcctcaacatcctgcgcggtgaactcaagaaatacaatgtccatttcgaagtcgccggccgcccgaaacacatctactccatttacaaaaaaatggtgaagaaaaaactcagcttcgacggcctctttgacatccgcgccgtgcggattctggttgataccgtccccgagtgttacaccacgctgggcattgtccacagcctttggcagcctatccccggcgagttcgacgactacatcgccaacccgaaaggcaacggctataaaagtttgcacaccgtcatcgtcggcccggaagacaaaggcgtggaagtgcaaatccgcaccttcgatatgcaccaattcaacgaattcggtgtcgccgcccactggcgttacaaagagggcggcaaaggcgattccgcctacgaacagaaaatcgcctggttgcgccaactcttggactggcgcgaaaacatggcggaaagtggcaaggaagacctcgcgcgccttcaaaaccgagcttttcaacgacacgatttattgtctgacccgcacggcaagtcctctcctgccacgggcgcgaccnnnnncacacacttaattaattaa

SEQ ID NO: 67403 - DNA, 495 bp, Neisseria meningitidis; identical to SEQ ID NO: 42916

SEQ ID NO: 67404 - DNA, 285 bp, Neisseria meningitidis
atgccggatagtattgtttataccgatagtctgagcagctacgacaagttggacgtgagcggttttatccattaccgcatcaaccattccaaggaatttgcagaccgtcaaaaccacattaacggcattgagaacttttggaatcaggcaaaacgcgtcttgcgaaaatacaacggaatcgattgcaaatctttcccactgttcttgaaagaatgcgaatttcgatttcacttcggcacaccgtcccaacagctaaaaatcctgcgggattggtgtgggatttag

SEQ ID NO: 67405 - DNA, 1881 bp, Neisseria meningitidis
atgaatattttttacgaagagtccggccaattcaaagttgccgccgtcgtccaaaaaaacgatgccacctaccaagtcgatacccaacacggcaagcgcaccaaagtgaaggcaaacaatgtctttgccgagtttgacggcgatatggcggcgtttttggaaaacgcgcaggcacaggcggcggatatcgacaccgatttattgtgggaagtatgcggcgaagaagaatttgccgccgaagccatcgccgaagaatattacggacacgcgccgaccaaaaccgagctggcggcgactttgattgcgctgtacgccgcgccggtgtatttctacaaaaaagccaaaggcgtgttcaaagccgcgcccgaagaaactttgaaacaggcgcttgccgccatcgaacgcaaaaaacagcaagacgcgcaaatcgatgcttgggcggaagccttgaaacgcggcgagatgccgtctgaaatcgcggcggatttgaaaaccatcctgcacgcgcccgacaagcagtcgctgacctacaaagcctttaccaaagccgccgacgcgctgaaaacctctgcctacgaattggcgaaaaaaacgggcggcattacgtccattccccaatacctgcaagacgggtttgaaatcaaatacttccccaaaggaacaggctttcccgaccttccccttcccgaaatgcccgacctgcccaaagccgatgttaccgccttttccattgacgacgaatcgactaccgaagtggacgacgctttaagcctgaccgacttggacaacggcacgaagcgcgtcggcatccacatcgccgcgccgtcgcttgccattaaacaaggcgacaaaatggaaaaaaacatcatggaacgcttgagcacggtttatttccccggcggcaaaatcacgatgctgcccgaaaactggattgccgcgttcagccttgatgcaggcgcacaccgccctgccgtcagcatttatttcgatgtggacggcgagttcaacgtcggcgcgccgacctgcaaaatcgaagcggtcaacatctccgaaaacctgcgtatccaagccatcgaaccgcatttcaacgccgaagcgggcttggacgaagcgggcgaaatgatgttcgcccaccatcaagacctgatttggttctatcaattcgccaccgccctgcaaaaagcgcgcggcaaatacgaacccgaccgcgcgccgcaatacgattacagcatcgaattggatgaggaaggcaaggtatccgtcgtccgccgcgaacgcggttcgcccatcgatacgctggtcagcgagatgatgattcttgccaacagcacttgggcgcaaatgctccatgacaacgacctgcccggccttttccgcgtccaaccggcaggcaaagtgcgcatgagcactaaatccgagccgcacatcggcatgggcgtgcagcattacggctggttcacttcgccgctgcgccgcgccgccgactacatcaaccaaaagcagctgatcagcctgatagacgacactgccgagccgctgtatcaaaacagcgatgccgagcttttcgccgcgctgcgcgactttgatgccgcctataccgcctacgccgacttccaacgccaaatggaagcctactggagcctggtttacctgcaacagcaaggcatcagcgagctgacggcgacgattctgaaagaagacctcgtccgcatcgaaggcctgccgctggtcacgcgcgcgaccggtattccgtttgacgcactgcccaaatcgcaggcattgttcaaaatcaccgaattagatgccgagaagcagtttgtctcgctcaactacatcaaggcagtcgcacccgcgggtacaacggcaggcaatgccgtctga

SEQ ID NO: 67406 - DNA, 252 bp, Neisseria meningitidis
ttgcctgccaataacggtataattcgggcgttatcaccgccttttaccggtataaacatcagactttttgccgccttgggtctcctgtccctttccggcgcggcggcgcaagcctccgtataccattgcaacttaaatgtcaaaagcgtatatacatcagccccagcaggatcgtgcgccgatgcggatttacctaaaatcagcagccatcagggaggcggataccgcctgaaaattaaaaaactcagttaa

SEQ ID NO: 67407 - DNA, 1977 bp, Neisseria meningitidis
atgccacgcattgccgccctgcccgaccatctcgtcaaccaaatcgccgccggcgaagtagtcgaacgccctgccaacgccttgaaagaaatcgttgaaaacagtatcgatgcaggcgcaacggcgattgatgtcgagctggacggcggcggcatccgcctgattcgcgtcagcgacaacggcagcggtatccatccggacgacatcgaactcgcgctccaccgccacgccaccagcaaaatcaaaaccttaaacgatttggaacacgtcgccagcatgggctttcgcggcgaaggcttggcaagcatcgcctccgtcagccgcctgaccctgaccagccgtcaagaagacagttcgcacgcaacccaagtcaaagccgaagacggcaaactcagcagccccaccgccgccgcccaccccgtcggcaccaccatcgaagctgccgaactcttcttcaacacccccgcgcggcgcaagttcctcaagtctgaagccaccgaatacgcccactgcgccactatgctcgaacgcctcgcactggcgcatccgcacattgccttctcactcaaacgcgacggcaaacaagtgttcaaactccctgcacaaagcctgcatgaacggattgccgccattgtcggcgatgattttcagacggcatcattggaaatcgacagcggcaatggcgcattgcggctctatggcgcgattgccaagccgactttcgccaaaggcaaaaccgacaaacaatactgcttcgtcaaccatcgttttgtccgcgacaaagtgatgctccacgccgtcaagcaggcataccgcgacgtattgcacaacgcgctgacacccgctttcgtccttttcctcgacctgccgcccgaagccgtagatgtcaacgtccacccgaccaaaacagaaatccgcttccgcgacagccggcaggtgcaccaactcgtgttccatacgctcaacaaagcccttgccgacacgcgtgccgacctgaccgaaagcgtcggcaacgcaggcgaagtgctgcatgacattaccggcgttacgcctgcaccaatgccgtctgaaaacgacagcgaaaatctgtttaatcgcgcatccgactacccgacaggcaacaaacccgatacgcgcaatgcctttggtgcatcaggcaaaaccgcgcctatgccctatcagtccgcatatgcgccgcaacaacgcagcctgtccctgcgcgaaagccgcgcggcaatgaacacctatgccgaactctacaaaaaaaccgacgacatcgaccttgagttaagccgattcgagcaggcacgtttcggcaatatgccgtctgaaacgcctgctccccaaacagatacgccgctttcagacggcatcccgtccccatccgaactgccgccgctcggtttcgccattgcccaattgctaggcatctacatccttgcccaagccgaagacagcctgctgctcatcgatatgcacgccgctgccgaacgcgtcaactacgagaaaatgaaacgccaacggcaggaaaacggcaagctgcaaagccaacgcctgcttattcccgtaacctttgccgcgtcccacgaagaatgcgccgccctcgccgattatgccgaaacgctggcaggcttcggcttggaattgtccgatatgggcggcaacaccctcgccgtccgcgccgttcccgccatgctcggcaaagccgatgtcgtctccctcgccaaagacgtattaaacgaactcgcccaagtcggcagcagccaaaccatcgaggaacacgaaaaccgcatcctcgccacgatgtcctgccacggctcgatccgcgccggccgccggcttaccctgcccgaaatgaatgcgctcctgcgcgatatggaaaacacgccgcgcagcaaccagtgcaaccacggccgtccgacttgggtcaaactgactttgaaagaattggacgcactgttcttgcgcggacaataa

SEQ ID NO: 67408 - DNA, 444 bp, Neisseria meningitidis
atgaaaaaacaaatcaccgcagccgtaatgatgctgtctatgattgcccccgcaatggcaaacggcttggacaatcagacatttgaaaaccaagtgttccacacgcaggcagatgcgccgatgcagttggcggagctttctcaaaaggagatgaaagaaactgaaggggctgcggcaccgttggtggcaataggaattttgcatgcgggcagattccttgcgcagcgttgggttacgcagcgtgttgcagcacaagctttatcaagaggagctaatgtctatgcacgaacatctcaacaagcaagagcggtagcaaaccaagcttggggaagacaaaatgttattagacatggacagaaggaaatccattcaaattattctcatttccagaactcaagtcaaaaaattcgagggcatgctttttatggaaataagcatagataa

SEQ ID NO: 67409 - DNA, 297 bp, Neisseria meningitidis; identical to SEQ ID NO: 43641

SEQ ID NO: 67410 - DNA, 645 bp, Neisseria meningitidis
  misc_feature 8, 9, 10, 11, 12: 'n' is a, c, g or t
gtgtgtgnnnnntaccgctaccttcgccaagacaaaagcaacggcagcacgttgtggcaacatctcagaatatgcagcaaaccctaccgcaaacgctacggcagcacatggaccagaggcaaagtccccaaccgtgtcggcatagaaaaccgacccgctatcgtcgaccagaaatcccgtatcggcgattgggaagccgacaccattgtcggcaaaggacagaaaagcgcattattgaccttggtcgaacgcgttacccgctacaccatcatctgcaaattggatagcctcaaagccgaagacactgcccgggcagctgttagggcattaaaggcacataaagacagggtgcacaccattaccatggataacggcaaagagttctaccaacacaccaaaataaccaaagcattgaaagcggagacttatttttgtcgcccttaccattcttgggagaaagggctgaatgagaacaccaacggactcatccggcaatacttccccaaacaaaccgatttccgtaacatcagtgatcgggagatacgcagggttcaagatgagttgaaccaccgaccaagaaaaacacttggctacgaaacgccaagtgttttattcttgaatctgttccaaccactaatacactag

SEQ ID NO: 67411 - DNA, 228 bp, Neisseria meningitidis
atggcaaaaatcaaaattatcccgacccgtagttttttcgatggtgaacagacgtttgccacagggaaaaaatattcggtggacgaatctgcggtggctgtctatatccgcgaaggttgggcggcagaagcgcctgccaaagaggccgaatcccctgttgccgatggcggcgaagctgaagatagcggtaacgcatccggtgagggcggcgaggacggcagtgtttaa

SEQ ID NO: 67412 - DNA, 300 bp, Neisseria meningitidis
ttgcaaaggtctcaaccaatattttgcagttcgtatcggaacatttataaaacatcagatttccgtgtttcgcgtttccggcaattcaagattggcaaaacacgtcagcctgcttcgcaaggcaggtttttaaaactttatcaggcgttcgggcatatcggttcgaccggtccgcatttccggcaatcaacactgccgacggttgccgcatttctttttgatatacaatcacactttcaaaaaacatacgcaggcaacaaaatcatcctcccccgattggcaaacattccggcaaattaa

SEQ ID NO: 67413 - DNA, 477 bp, Neisseria meningitidis
atgccggtagaaatcgaacgccgctttttgattggaaacgacaactggcggcaatacgccgatgagccgctgctgttgaggcagggttatctgtctgttgaaaaagaacgcaccgtccgtgtccgtattgccggacaacgggcgtggctgacgctgaaaggctatatttcggaactcagccgcagtgagtttgaatacgaaatcccgcttgccgatgcggaaaagatgatggaaacgatgtgtccgtttaagatggaaaaatggcgttatccggtcagatggggcggcagcctgtttgaaatcgatgtttttcttggcgataatgcgcctttggtcgtcgcggaaatcgagttgcccgacgagaatgccgattttgaccgtccggactggctgggacgggaaatcactgccgacggtatgtttaccaatgcctatttgagcaggcatccgttctcaagctggaaaaatgccgtctga

SEQ ID NO: 67414 - DNA, 1017 bp, Neisseria meningitidis
atgtatcggaaactcattgcgctgccgtttgccctgctgcttgccgcttgcggcagggaagaaccgcccaaggcattggaatgcgccaaccccgccgtgttgcaaggcatacgcggcaatattcaggaaacgctcacgcaggaagcgcgttctttcgcgcgcgaagacggcaggcagtttgtcgatgccgacaaaattatcgccgccgcctacggtttggcgttttctttggaacacgcttcggaaacgcaggaaggcgggcgcacgttctgtatcgccgatttgaacattaccgtgccgtctgaaacgcttgccgatgccaaggcaaacagccccctgctgtacggggaaaccgctttgtcggatattgtgcggcagaagacgggcggcaatgtcgagtttaaagacggcgtattgacggcagccgtccgcttcctgcccgtcaaagacggtcagacggcatttgtcgacaacacggtcggtatggcggcgcaaacgctgtctgtcgcgttgctgccttacggcgtgaagagcatcgtgatgatagacggcaaggcggtaaaaaaagaagacgcggtcaggattttgagcggaaaagcccgtgaagaagaaccgtccaaacccacgcccgaagacattttggaacataatgccgccggaggggatgcagacgtaccccaagccgcagaaggcgcgcccgaaccggaaatcctgcatcctgacgacggcgagcgtgccgataccgttaccgtatcacggggcgaagtggaagaggcgcgcgtacaaaaccagcgtgcggaatccgaaattaccaaactttggggaggactcgataccgacgtgcaaaaagagttggtcggcgaacaacgcaagtgggcgcaggaaaaaatcagcaactgccgacaagccgccgcgcaggcagaccggcaggaatacgccgaatacctcaagctgcaatgcgacacgcggatgacgcgcgaacggatacagtatcttcgcggctattccatcgattag

SEQ ID NO: 67415 - DNA, 1248 bp, Neisseria meningitidis; identical to SEQ ID NO: 41324

SEQ ID NO: 67416 - DNA, 429 bp, Neisseria meningitidis
atgattaatcatattgaaaaatatacaggcactatttctcatggctcgaaaagtgattcgggaagtcagtacaaattaaatatcgcagctattccctcttcccctaacagggatttaaaaacttatattactttagggttaagcaaacatgatctgaattataaaagcagatttgaaatacttttcgtatgttctttaaaatatgatgaaaatcagattttcccatttttaagatggttggcagaaaccatcattgagaacaaaaaaatccttcttcgggggcaggttgtttatttgcccagaagcattgttgattcaacaaaaatggatgcactgtatgtttccgccccattttatttcgacgatgattttcaggtctgttatggcgacactacaatatcgttttccctttgcttgtcccttgtataa

SEQ ID NO: 67417 - DNA, 1980 bp, Neisseria meningitidis
atgtctcaactggcaaacgcaatccgcttcctctcggccgatgccgttcaaaaagccaattccggccaccccggcgcgcctatgggtatggcggaaatggcggaaacattgtggacgaaattcctcaatcacaaccccgccaaccccaaattctacaaccgcgaccgcttcgtcctctccaacggccacgcgtctatgctgttgtacagcctgctgcacctgaccggctacaatctgagcattgaagacttgaaaaacttccgccagctgcacagcaaaacccccggccaccccgaatacggctacaccgacggcgtggaaaccacgaccggcccgttggggcaagggattgccaacgcggtgggtatggcattggcagaaaaaatccttgccgccgaatttaataaagacggtttgaacatcgtcgatcattacacctacgtctttatgggcgacggctgtctgatggaaggcgtatcgcacgaagcctgttcgctcgccggcaccttgggcttgggcaaactgattgttttgtatgatgacaacaatatttccattgatggtaaagtggacggctggtttaccgaaaacatcccgcaacgctttgaaagctacggctggcacgtcgttcccaatgtaaacggtcatgacaccgccgccattcaagccgccatcgaagccgcacgtgccgaaaccggcaaaccgtccatcatctgctgtaaaaccttaatcggcaaaggcagtgccaataaagaaggcagccacaaaacccacggcgcacctttgggcgcggacgaaatcgaagccacgcgcaaacatttgggctggacttaccctgcctttgaaatcccgcaagaaatttacgatgcgtggaatgccaaagaaaagggagcgaaactggaagccgaatggaacgaactcttcgcgcaatatcaagccaaatatcctgccgaagccgcagaattcgtgcgccgtatggataaaaaactgccggacaatttcgatgaatacgttcaagccgcattgaaagaagtgtgcgccaaagccgaaaccatcgccacccgcaaagccagccaaaacagcatcgaaatcttggcaaaagagctgcccgaactggtgggcggctctgccgacctgaccccgtccaacctgaccgactggtcaaacagcgtttccgttacccgcgacaaaggcggcaactacatccactacggcgtgcgcgagttcggtatgggcgcgattatgaacggtttggtattgcacggcggcgtaaaacccttcggcgcgactttcctgatgttcagcgaatacgagcgcaacgccctgcgtatggcggcactgatgaaaatcaaccctgtatttgtgttcacccacgattccatcggtttgggcgaagacggcccgacccaccagccgattgagcaaaccgccaccctgcgcctgattccgaatatggacgtatggcggccgtgcgacaccgccgaatccttggtcgcttgggcagaagccgtcaaagccgccgatcacccgtcctgcctgattttcagccgtcaaaacctgaaattccaagcgcgcagcgaacaacaactggacgacatcaaacgcggcggctacatcatcagcgaagcccaaggcaacgcccaagccgtcatcattgccaccggctcagaagtcgagctggctttggaagcgcaaaaagccctcgccgcgcaaaacatcgccgtgcgcgtcgtttccatgccgtccaccaacgtattcgaccgccaagacgccgcctatcaagccgccgtcctgcccgaaagcctgccgcgcatcgccgtagaagccggccacgccgacggctggtacaaatatgtcggactgaacggcgcagtcgtcggcatcaaccgcttcggcgaatccgcccctgccgatttactcttcaaagcattcggctttaccgtggacaatgtggtcgatacagtgaaatccgtgctgtaa

SEQ ID NO: 67418 - DNA, 819 bp, Neisseria meningitidis
atgaaaaaagaccatttaaacacaaccggtttcgacctctggcacaccatccgcgaagaaaccgcggccgcggtctccgccgaaccgatgctggcaagttttttgcaccaaaccgtgttgcgccacgagtccctcggctccgtccttgcctaccacctttccagcaaactcggcagcccgattatggacgtgcgcgcgctgtttgaaatctaccagcaggcgttgggcagcgacacccaaatcggcaaatgcgtcgaagcagacttaaaagccatctacgaacgcgatcccgcctgcgacgaatattcgctgccgcttttatatttcaaaggcttccacgcgattcaggcacaccgcatcaaccatcggctgtatctcgacgggcgcaaaacgctggcgtatttcctgcaaaaccgtatgtccgaagtattcggcgtggacatccatcccgccgcccgtttcggatacgggctgatgctcgaccacgccaccggctttgttgccggcgaaaccgccgtgttgggcaacaatatttcgattttgcacggcgtaacgctcggcggttcgggcaaagaatgcggcgaccgccaccctaaaatcggcgacggcgtgatgatcggcgcaaacgcctcgatattgggcaatatccgcatcggcagcaatgccaaaatcggggcgggcagcgtcgtggtttcagacgtgccgccgtccatcacggttgtcggcgtacccgccaaacccgtggcgcgatcgctcaaaacaccgtcggcggatatggatcaaaatatccagtttaccgaaatcgactttatgatttga

SEQ ID NO: 67419 - DNA, 738 bp, Neisseria meningitidis
atgctgctgatacccgccatcgatttgaaagaaggacgctgcgtccgcctgagacaagggctgatggaagaggcgaccgtcttttccgattcgcccgccgaaaccgcgctgcactggttcgaacaaggcgcgcgccgcctgcatctggtagatttgaacggcgcgtttgccggtgttccgcaaaacctgcccgccatcaaagacatccttgccgccgtcgccaaagacatccccatacagctcggcggcggcatacgcgatttgaaaaccatcggacaatatttggatttgggcttaaacgacgtgattatcggcacggcggcagtcaaaaaccccgacttcgtgcgcgaggcgtgcaaagccttccccggcaggattatcgtcgggctggatgccaaagacggtatggccgccatcgacggctgggcaaccgtaaccgggcatcatgtaattgatttggcaaaacgctttgaagacgacggcgtcaacagcatcatctacaccgacatcgggcgcgacggtatgatgagcggcgtgaacatcgacgcgacggtcaaactcgcccaagccgtccgcattcccgtcatcgcctccggcggactgaccggcttggacgacatccgcgccctgtgtgccgccgaaaaacatggcgtagcaggcgcgattaccggccgcgcgatttacgagggcagcatcgattttgcccaagcgcagcaactggcagattccctcgactaa

SEQ ID NO: 67420 - DNA, 921 bp, Neisseria meningitidis
atgcctaatccgctttacagacagcatatcatctccatttcggatttgtcgcgcgaacagttggaatgcctgcttcagacggcattgaagctgaaggcgcatccgcgcggcgatttgttggaaggcaaacttatcggttcgtgtttctttgaaccgtccacgcgcacgaggctgtcgtttgaaacggcggtgcagcggctgggcggcaaggtcatcggcttttcggacggcgcgaataccagtgccaaaaaaggcgagacgcttgccgataccgcccgcatcatttccggctacaccgacgcaatcatccaacgccaccccaaagacggcgcggcgcgcgtggcagcggagttttcgcgcgtccccgtcatcaacgccggcgacggcaccaaccagcaccccagccagaccttgttggatctggtaacgatttatgaaacgcaggggcgtttggacaagctcaaaatcgccatggcgggcgacttgaaatacgggcgcaccgtgcattcgctttgtcaggcgttgaaacgctggggctgcgaatttgcctttgtttcgccgcccagcctcgcgatgcccgactacattaccgaagagttggacgaagccggctgccgataccgtatcctcggtagtttggaagaagcggcggaatgggcggatatcctgtatatgacccgcgtccagcgcgaacgtttcgacgaacaggaatttgccaaaatccaaggcaaattcaatctcgacgcatccatgcttgcccgcgccaaaccgaacctgcgcgtgctgcaccctttgccgcgcgtggacgaaatccatcccgatgtcgatgctacgccgcatgcctattatttcgagcaggcgaccaacggcgtttatgcgcgtatggcgatattgtcgctggtgttgaacgaagaagtgtga

SEQ ID NO: 67421 - DNA, 1173 bp, Neisseria meningitidis
atgaaacgtgatttgagcaaaatgacctgcatcgaagacttgcgccgcgttgccaagcgcaaaatgccgcgtatgttttacgattacatcgattcgggttcgtggacagaaactacctaccgtgaaaacacttcggatttcaaagacatccgcttccgacaaaaggtattggtcaatatggaaggccgaagcctggagaccaaaatgatcgggcaggatgtgaaaatgccggtggcgattgcgccgacgggtttcacgggtatggcacacgccgacggtgaaattttggcggcgcgggcggcggagaagttcggcattccgtttacgctgtccacgatgtctatctgctcgattgaagacgttgccgagaacacttccgcaccattttggtttcagctttatgtgatgcgcgaccgcgagtttatggaaaacctgattaagcgcgcgaaggatgccaaatgttcggcattggtattgaccgctgatttgcaggttttggggcaacgccacaaagacatcaaaaacggcctgtccgcgccgccgaaaccgaccatcgccaatttaatcaatctggcgaccaagcccgaatggtgtatgaaaatgctgaacacggaacgccgcacgttccgcaatatcgttggacacgccaaaaacgtcggcgatttgtcctcgctgtcttcatggacttccgaacaattcgacccgcgcctgagctgggacgacgttgcacgcattaaagatttgtggggtggcaagctgattatcaaaggcattatggaacctgaagatgcggaaaaagcagcgaaaagcggtgcggacgcattggtcgtttccaaccacggcggccgccagctcgacgataccgtgtccgccatcaaagccttgcccgacatcgttagtgcagtcggcagcgacatcgaagtttggatggacagcggcatccgcagcggtcaggatattttgaaggcgtgggctttgggtgcgaaaggtacaatgataggtcgggcgtttctgtatggtttgggtgcgtatggtgaagaaggcgtaacccgtgcgctggaaatcctgtataaagaaatggatatatctatggcgtttacgggacaccgcgatattcaagatgtcgatgcttcgattttgagaggcaaagattggggcagggaaacggtttag

SEQ ID NO: 67422 - DNA, 462 bp, Neisseria meningitidis; identical to SEQ ID NO: 36928

SEQ ID NO: 67423 - DNA, 2526 bp, Neisseria meningitidis
atgaatccaaactcaaaacataacactgaccttaccaatcttcttaaaccgtctgatagtgatataaaacaatttgccgcacaacacatccgccacctcaccgacctgctcaaccgctatgcctacgaatactacaccctcgacgcgcccagcgtacccgatgccgaatacgacaaattattccgtgaactcgaagcgttggaattaaaccatcccgagctcaaactgcccgacagcccgacccagcgcgtcggcggcgagcctttggcaggctttgccgaaatacgccacgaagtgccgatgctgtcgctgaccaacgccttctccccgcaagatgaaaacggcgtgttcgaccatgccgaaatgtatgccttcgaccaacgcgtgcgcgacggtttagacggcggcaaacccgaatacgttatcgaacccaaattcgacggcctcgccatcagcctgctctaccgcgacggcgtattgattcaagcggcaacgcgcggcgacggcacgaccggcgaagacgttacccaaaacgtcaaaaccgtcgccaacatccccttgcggctgcacggcgaaaatacgcccgaactcatcgaagtacgcggcgaagtactgatgcaaaaagccgattttgccgccctcaataaaagacaagccgaaaacgggcaaaaaccctttgccaatccgcgcaacgccgctgccggcagcctgcgccaactcgattcgcgcatcactgcgcaacgcaaactgcactttttcccctactccgtcgcccgccagcaagatggtttcgtcgcggaagaacacatccaggaactcgcctatttccaagcactcggcttcagtctgcccaatggcaatttcggctgtttcaaaaatatcgacgaagtattggcgttttacgaacacatgcagcaaaaacgccccgaactgccctacgaaatcgacggcatggtggttaaagtcaacagcttggcgcaacagcacgaactcggcttcatctcccgcgcgccgcgttgggcggttgcccacaaattccctgccgaagaagccctgaccattgtcgaagcgattgacgtgcaaatcggcaggacgggcgcggtaacgccggttgcccgattacagcccgtattcgtcggtggcgtaactgttaccaacgccaccctgcacaatcaggacgaagtatcgcgcaaagacgttcgcgtcggcgataccgtcgtcgtacgccgtgccggagacgtgattcccgaagttgtgcgcgtgatttttgaacgccgcccgatgcgggaaaccgccgttgccgtttcagacggcatcgggcatcggcaggacgatttgtttgccgaaacaccgtccgccaatcaaacccaatccgttccgctccacaagccctaccgcctgccgacccactgccccatctgccgcagcgaaatcgaacgcgaagaaggcgaagccgtcgcccgatgcagcggcggtatgctttgtcaggcacaacgcgcgcaaggcttaatccacttcgcctcgcgcaaagcgatggacatcgacggcttgggtgaaaaacaaatcgaacagcttgtcgcgcaagacctcgtccgccacttcgccgatctctaccgcctcgacatcccgaccttgcaaaaaatgaaggaaacagcggacaaaaccgttgccgaatcggatcaaatgccgtctgaaggcagttcggtcggcgcgtcgggcaaacataaaaaacaaccagtcaagtgggcggaaaacatcctcgcaggcatagaagccagcaaaacgcccgaactcgcccgcttcctgttcgcgctcggcatccgccacgtcggcgaacgcaccgccaaaacgctggcacaggcattcggcacattggaacgcgtccgccgcgcccccgaacccgtcctcgcctgcctgcccgacatcggtacggtagtggcgcgttccattgcccacttcttcgcccaagccgaacagcaggcgatgatagacgaactgctcgccgcaggcgttgccccgcaaacccaagccgttaccatcccgcccgcccgccacgccgaaccgcaacgctggatcgcccgcctgcccggtttcaaaatcagcgaaaacaaagcccaagccttatgggaactcgccggcaaaaacatagaagggctgcaaaccgacaaagccctccccaccgactggcaggcgtggcgcagcgaaccacaaaacgccgccctgctcgaaaacctgaaaaccttcttcgcgcaaatgccgtctgaagacgaggcggcgcaaggttcagacggcatcaataaagccgtggcgggcaaaaccttcgtgttaaccggcaccctgcccaccctcaaacgcgaccaagcccaatccctaatcgaagccgcaggcggcaaagtttccggcagcgtgtccaaaaaaaccgattacgtcgtcgccggagaagccgcgggcagcaagctggaaaaagccaatgccttgggcgtttccgtcctcagcgaagccgaactgcttaccctgctcggctga

SEQ ID NO: 67424 - DNA, 564 bp, Neisseria meningitidis
gtgcaggacaaaaacaacctctgctggctcgatatggaaatgacggggcttaatcccgaaaccgaccgcattatcgaagtcgcgatgattattaccgactcggatttgaatgtattggcgcaatccgaagtttacgccgtccaccaaagtgacgagctgctcgacaatatggacgagtggaacaccgccacacacggcaggacggggctgacacagcgcgtacgcgaatcgtcgcataccgaagccgaagtcgaacagaaactgctggactttatgtcggaatgggtacccggacgcgccacgccgatgtgcggcaattccatccaccaagaccggcgttttatggtcaaatatatgccgaaactggaaaactacttccactaccgcaaccttgacgtttccacactgaaagagcttgccaaacgctggaatccgcccgttgccaaaagcgtcgtcaaacgcggttcgcacaaggcattggacgacattttggagagcatcgaagaaatgcgccactaccgcgaacactttctgatttccgccccgagagccgaagcgcaataa

SEQ ID NO: 67425 - DNA, 1356 bp, Neisseria meningitidis
atgagtatccaatccggcgaaattttagaaaccgtcaaaatggttgccgaccagaattttgatgtccgcaccattaccataggcatcgatttgcacgactgcatcagcagcgacatcaatgtgttgaaccaaaatatttacaacaaaatcaccacagtcggcaaagacttggtggcaacggcgaaacacctttccgccaaatacggcgtgccgattgtgaatcagcgcatttccgttacgccgattgcccaaatcgcggcggcaactaaagccgattcctatgtcagcgtggcgcagactttggacaaggcagccaaagccatcggcgtgtcctttatcggcggcttttccgcgttggtgcaaaaaggcatgtcgccttcggatgaggtgttaatccgctccattcccgaagcgatgaagaccaccgatattgtgtgcagctccatcaatgtcggcagtacgcgcgccggtatcaatatggatgcggtcaagttggcaggcgaaaccatcaaacgcacggctgaaattacgcccgaaggtttcggctgcgcgaaaatcgtcgtgttctgcaatgcggtggaagacaatccgtttatggcgggtgcgtttcacggatcgggcgaagcggatgctgtgattaatgtcggcgtatccggcccgggtgtcgtaaaagccgcgttggaaaattcggatgcaacgacattgaccgaagttgcagaagttgtgaagaaaaccgccttcaaaattacccgcgtgggcgaactcatcggccgcgaagcctcaaaaatgctgaatatcccgtttggtattctcgacttgtcgctggcaccgacccctgccgtcggcgactcggtggcgcgcattcttgaagaaatgggtttgagcgtctgcggtacgcacggcacaacagcagctttggcattgctgaacgatgccgtgaaaaagggcggcatgatggcttcgagcgcggttggcggtttgagtggcgcgtttatccccgtttccgaagacgaaggtatgattgccgccgccgaagcaggcgtgctgacgttggataaactcgaagcgatgaccgccgtttgttcggtcggcttggatatgattgccgttcccggcgacacacccgcgcacaccatttccggcatcattgccgacgaagccgccatcggcatgatcaacagcaaaaccactgccgtgcgcattattccggtaaccggaaaaaccgtcggcgacagcgtcgagttcggcggcctgttgggctacgcgcctgtaatgccggtaaaagaaggctcatgcgaagtgttcgtcaaccggggcggcaggattcccgcaccggttcaatcgatgaaaaactga

SEQ ID NO: 67426 - DNA, 231 bp, Neisseria meningitidis
atggctcgtcaatcattcaaacgtagaaaattctgccgtttcacggctgaaaaaatccaagaagtcgattacaaacaagttgatttgctgaaagactttatctctgaaaacggtaaaatcattcctgcccgcattacagggacgaaggcattctaccaacgccaattggctgttgccgtaaaacgcgcacgcttcttggctctgctgccttacaccgaccaacacaaataa

SEQ ID NO: 67427 - DNA, 1827 bp, Neisseria meningitidis
ttgggcatttcccgcaaaatatcccttattctgtccatactggcagtgtgcctgccgatgcatgcacacgcctcagatttggcaaacgattcttttatccggcaggttctcgaccgtcagcatttcgaacccgacgggaaataccacctattcggcagcaggggggaacttgccgagcgcagcggtcatatcggattgggaaaaatacaaagccatcagttgggcaacctgatgattcaacaggcggccattaaaggaaatatcggctacattgtccgcttttccgatcacgggcacgaagtccattcccccttcgacaaccatgcctcacattccgattctgacgaagccggtagtcccgttgacggatttagcctttaccgcatccattgggacggatacgaacaccatcccgctgacggctatgacgggccacagggcggcggctatcccgctcccaaaggcgcgagggatatatacagctacgacataaaaggcgttgcccaaaatatccgcctcaacctgaccgacaaccgcagcaccggacaacggcttgccgaccgtttccacaatgccggtagtatgctgacgcaaggagtaggcgacggattcaaacgcgccacccgatacagccccgagctggacagatcgggcaatgccgccgaagccttcaacggcactgcagatatcgtcaaaaacatcatcggcgcggcaggagaaattgtcggcgcaggcgatgccgtgcagggtataagcgaaggctcaaacattgctgtcatgcacggcttgggtctgctttccaccgaaaacaagatggcgcgcatcaacgatttggcagatatggcgcaactcaaagactatgccgcagcagccatccgcgattgggcagtccaaaaccccaatgccgcacaaggcatagaagccgtcagcaatatctttacggcagtcatccccgtcaaagggattggagctgttcggggaaaatacggcttgggcggcatcacggcacatcctgtcaagcggtcgcagatgggcgcgatcgcattgccgaaagggaaatccgccgtcagcgacaattttgccgatgcggcatacgccaaatacccgtccccttaccattcccgaaatatccgttcaaacttggagcagcgttacggcaaagaaaacatcacctcctcaaccgtgccgccgtcaaacggcaaaaatgtcaaactggcagaccaacgccacccgaagacaggcgtaccgtttgacggtaaagggtttccgaattttgagaagcacgtgaaatatgatacgaagctcgatattcaagaattatcggggggcggtatacctaaggctaagcctgtgtctgatgcaaaaccgagatgggaggttgataggaagcttaataaattgacaactcgtgagcaggtggagaaaaatgttcaggaaataaggaacggtaataaaaacagtaactttagccaacatgctcaactagagagggaaattaataaactaaaatctgccgatgaaattaattttgcagatggaatgggaaaatttaccgatagcatgaatgacaaggcttttagtaggcttgtgaaatcagttaaagagaatggcttcacaaatccagttgtggagtacgttgaaataaatggaaaagcatatatcgtaagaggaaataatagggtttttgctgcagaataccttggcaggatacatgaattaaaatttaaaaaagttgactttcctgttcctaatactagttggaaaaatcctactgatgtcttgaatgaatcaggtaatgttaagagacctcgttataggagtaaataa

SEQ ID NO: 67428 - DNA, 1056 bp, Neisseria meningitidis
atgacacaccattaccccacagacgatattaagattaaagaagttaaagagttgttgccgccgattgcccatctttacgagctgccgatttccaaagaggcttcgggcttggttcaccgcacccgtcaggaaatttccgatttggttcacggcagggacaagcggctgttggttattatcgggccgtgttcgattcacgatccgaaagcggcgttggaatatgcggagcgtttgttgaaactccgcaagcagtatgaaaacgagcttttgattgtgatgcgcgtttatttcgagaagccgaggacgacggtgggttggaaaggtttgattaacgacccgcatttggacggtacgttcgatatcaatttcggtttgcgtcaggcgcgcagcctgttgttgtcgctgaacaatatgggtatgcctgcctctaccgagtttttggatatgattacgccgcaatattatgcggacttgatttcttggggggcaatcggtgcgcggacgaccgaaagccaagttcaccgcgaattggcaagcgggctgtcctgccccgtcggctttaaaaacggtacggacggcaatttgaagattgccatcgacgcaatcggtgcggcgagccattcgcatcatttcttgtctgtaaccaaggccggacattccgccattgtccataccggcggcaatcccgactgtcatgtcattttgcgcggcggaaaagagccgaattatgatgcgggacacgtcagcgaggcggcggaacaactgcgtgcggcaggggtaaccgataagctgatgatagattgcagccacgccaacagccgcaaggattacacccggcagatggaagtggcacaagatattgctgcccaattggaacaggacgggagcaatattatgggcgtgatggtggaaagccatttggtcgaaggcagacaggataagccggaagtgtacggcaaaagcattaccgatgcgtgtatcggttggggcgcgactgaagaactgttggcattgttggcaggtgcaaacaaaaaacgtatggcgcgcgccggttga

SEQ ID NO: 67429 - DNA, 300 bp, Neisseria meningitidis
atgcattatttcagtattcatgaccaatggggacggcatataggctttttcatcctgcttgccgacgacgagtcagaggcgcggccgcaaagcgggcgttttgccgtcaaacttgaaggcggaatggaaaatcatgtcctgtcgccgttcggtcagacggaaatcccccaatattggcgcgtggtcaaagaccgtatcgagctgttttttgacgaagcacccgtcggaactttgcgtaacgaatatctgaccgtgtcggggcagacttttgttttgaacgatttgacagggaatatgtga

SEQ ID NO: 67430 - DNA, 1053 bp, Neisseria meningitidis; identical to SEQ ID NO: 63121

SEQ ID NO: 67431 - DNA, 855 bp, Neisseria meningitidis
atgccgcccatccctgccccatccgcaccatccgagcacactgtcgcatgggtattcggccaacccgttaccgatttgccgcaggatttgtttatcccgcccgacgcgctgaaagtcgtattgggcagttttcaaggccctttggatttgctgctctaccttatccgcaagcagaacatcgatgttctcgatattccgatggtgaagattaccgagcagtatctgcactacatcgcccaaatagaagcctatcagtttgatttggcggcggaatacctgcttatggcggccatgctgattgaaatcaaatcgcgcctgctgctgccgcgtaccgaaaccgtcgaagacgaagaagccgacccgcgtgccgagttggtgcgccgcctgctggcttacgaacagatgaagctggcggcgcagggtttggacgcgctgccccgagccggacgggatttcgcgtgggcttacctgccgctggaaattgccgtcgaagccaagctgcccgaagtctatattaccgacttgacgcaagcgtggctgggtattttgtctcgggcaaaacacacgcgcagccacgaagtaatcaaagaaaccatctccgtgcgcgcgcaaatgacggcaatcctgcgccgtttgaacaaacacgggatatgcaggtttcacgacctgttcaatcccgaacagggcgcggcttacgtggtcgtcaacttcatcgcactgttggagcttgccaaagaaggtttggtcggaatcgtacaggaagtcggtttcggagaaatccgaatcagcctcaatcatgagggggcacattcagacggcatttccggcacacggggcgggcgcgatgtgttctaa

SEQ ID NO: 67432 - DNA, 1047 bp, Neisseria meningitidis; identical to SEQ ID NO: 43592

SEQ ID NO: 67433 - DNA, 576 bp, Neisseria meningitidis
  misc_feature 8, 9, 10, 11, 12: 'n' is a, c, g or t
gtgtgtgnnnnnccatccgccgccgtgtaccgcgcccgtaaaaacaacctcgccaccgcagcaggacgcgacccgagcggcaacacctactaccgcgccgccaaccaagccaaaacccacggctgggaaatcgaagtcggcggccgcatcacgcccgaatggcagatacaggcaggttacagccaaagcaaaacccgcgaccaagacggcagccgcctgaaccccgacagcgtacccgaacgcagcttcaaactcttcactgcctaccactttgcccccgaagcccccagcggctggaccatcggcgcaggcgtgcgctggcagggcgaaacccacaccgaccctgccacgctccgcatccccaaccccgccgccaaagcccgcgccgccgacaacagccgccaaaaagcctacgccgtcgccgacatcatggcgcgttaccgcttcaatccgcgcgccgaactgtcgctgaacgtggacaacctgttcaacaaacactaccgcacccagcctgaccgccacagttacggcgcactgcggacagtgaacgcggcgtttacctatcggtttaaataa

SEQ ID NO: 67434 - DNA, 1350 bp, Neisseria meningitidis
atggcaaaccaaaccaatagcaaagcaaaagcattgttaggctggatggacgctcgtttccccctgtctaaaatgtggaatgagcatttggctcaatactacgcaccgaaaaactttaatttttggtactacttcggctctttggccctgcttgtcctcgtgattcaaatcgtcagcggtattttcctgacgatgaactacaaaccggacggcaacctgaatgcctaccatctgcctgctgcctttactgcagtcgagtacatcatgcgcgacgtgtccggcggttggattatccgctacatgcattccaccggcgcatctttcttcttcattgttgtttatctgcacatgttccgtggtttgatttacggttcgtacaaaaaaccccgtgagttggtgtggattttcggttctctgattttcttggcattgatggcggaagcctttatgggctacctgctgccttggggtcagatgtccttttggggtgcgcaggtaattattaacctgttctccgccatccctgttatcggtccggatttgtccacttggattcgcggcgactttaacgtttccgacgttaccctgaaccgcttctttgccctgcacgttatcgcggtacctctggtattgctcggcttggttgtggcgcacatcatcgccctgcacgaagtgggttctaacaaccctgacggcgttgaaatcaagaaaaacaaagacgaaaacggtatcccgcgcgacggtatcccattccatccttactacaccgttaaagacatcttgggtgtcgttgtattcctgattgtcttctgttccgtgttgttctttgcaccagaaggcggcggctacttcctcgaagcgccgaacttcgatgctgcgaatgcgctgaaaacacctccgcacattgcaccggtatggtacttcactccgttctacgccattttgcgtgcgattccctcgttcttgggaacgcaggtttggggtgtaatcggtatgggcgcggcggtcgtgttgattgccctgctgccttggctggataggggcgaggtgaaatccgtccgttaccgcggcccgattttcaaaaccgcattggtcttgttcatcatttcctttatcggtttgggtattttgggcgcgatggtggcaaccgatacgcgtactttggtcgcgcgcatcctgtccttcgtctatttcgcattcttcctgggtatgccgttctataccaagctggataaaaacaaaccggttcccgaacgcgtaaccatgagcaccgccaaacaaaaaatcatgttctttgtttacgtcggcattaccgccgtgggtgcttacctgtttgcaaccaacatctga

SEQ ID NO: 67435 - DNA, 975 bp, Neisseria meningitidis; identical to SEQ ID NO: 60972

SEQ ID NO: 67436 - DNA, 1407 bp, Neisseria meningitidis
atgaccgccgctcctgatatcctctaccggcaagccgccgcccttttggaacaatccaataccgcccaagccctgcccctgctgcaacaggccgcagagcagggatatacggaagctgcttttgtattgggcaaccatctgctgaaaaacggtcatccggagcaggcacttccatggttggaagccgccgcggcccaacgccatcccaaggcactcttcaccctgctgcaacaacgcgaacacaacggcaccccgaccggacagcttcttaacgaatacgcctggctgagtgagcaaggtcacctcgaagcccaattaattctcatgcgttaccacacgcagcgcaacgatccacaatcgctctactgggcggagcttgccgctgcccaatatgccgcacctgcgtattaccatttggcacgccatcatcaacgccaaggcgacgttgcgacagccatcgaacaatacgaaaaagcggcagcactcggcataactgctgcctgctggcaactcggtcaaatctacttctacggtacaggtgtcagccccaaccacgcacaagccgaacactatctcgaacaagcggcgcaagccggccacatcgccgcacaaaccctgctggccgaccttcttgccgcccaacgcaaacccgaagccttagaatggtatcgtcgtgccgccaataaggagcaagcggaagcacaagccaagctggcccaatacgccctgaccggcgaactttccgaacgcgatccgttccaagcggcgcgctatgccaaagccgctgccgagaaagaccatcctgaagccctgaaaatcatgggcgacctctaccgctacggcctcggcatcaaagctgacaaccatatcgcgcacgattactaccaccgtgctgccgcgctgggttctgccgccgcagcacaaaaactcatcagcgacgccgcgctgtaccatccgcaacaatacgaacaaatcaaaactgccgccctgcaacaacaacaaaccgaaaccatctaccgtttggcggaagcacaagcctgcgccatcggccgtcccgccgactacaatgccgcgcgaaaaaattacatggaagctgccgggttccaccataaaaacgcagcggcagccttaggccgcatctaccattacggcctcggtacggcgcaagatcctcgggcggctgcacactggtacgccattgctgccgaacaaaaccacccttccgcccaataccacctcgcctgtttttactatcacgggcaaggtgtcggctgtcatgttccgaccgcctgctactggctgcaggccgccatcggcaacggccacacttcggccgaatcattaatatccctattagaacaatggcgacgcgaagcacaccatgccatcggacaaaaggccgtctga

SEQ ID NO: 67437 - DNA, 876 bp, Neisseria meningitidis; identical to SEQ ID NO: 40452

SEQ ID NO: 67438 - DNA, 876 bp, Neisseria meningitidis; identical to SEQ ID NO: 45640

SEQ ID NO: 67439 - DNA, 1326 bp, Neisseria meningitidis
atgcccgcgcctgatttgggatttgccttaagtctgccgccaaaaaaggcaatcgagtggctggaaagtaaaaaggttacggcggagagctaccgcaatctgacagcctccgaaattgccaaagtctatacgattgcccgcatgaccgacttggatatgctcaacgacatcaaaacttcgatggttgaatcggcaaaaagtggacagtcgtttgacgattggcgaaaaggtatcttgaatctgctcagcaacaagggctggctgcatccgaacgggcataacggtaaggatatcatcgacccagccaccggcgaggtattcggttcgccgcggaggttggagacgatttaccgtaccaacatgcaaactgcctacaacgccggtcaatatcaaggatatatggcaaatattgatgcacgaccttattggatgtatgacgcggtaggcgacagccgcacccgtccggcgcattcggcaatagacgggctggtgtaccgctacgacgacccgttttgggcaacgttttacccgcccaacggctacaactgccgctgctcggtcattgctttatcagagcgcgatgtcgaacgtcaggggcggattgtcgggcaaagcacggcggacaatctggtcgagacccataaaatctacaacaaaaaaggcgacagctacccgacgactgcctacaaagccccggacggcagcctctacacagctgacaaaggcttcggctacaacgccgggcgaatgaactaccgccccgatttagacaagtacgaccgcgcgttggcgcatcaatttgccaaagcggaaatgggtggtgcggattttaaaaccagctttaaacagcttgaaaaagagttttatgaagtcaagcaacgtttgaatattgatggcaagcccgataaagagcagaaaatcaaaatccgaaacgcgctatcaagacagcttaaatttgctgcgggtgtattgagcaaggaaatgcaagaactggcaggtatgactcgagcgacggtgtggctgtctgatgatacattggtcaaacaggtggacagtcgggaggggcaatcgtttggaacagatttatatgccatgctccccgatctgattcatgagcccgaatatattttttatgacaaaagcagaggaaaagaaagttttgttttgctcggaaaaccgttggaggggaacgaaaaatacagattgatggcagttttgaaatatctgccacagtacgattcgatttttttggattcgtttcgcagggcggatgaaaaagaaattgtgaaaagtaagaaacgctatgaaatgaaaaaaggctactaa

SEQ ID NO: 67440 - DNA, 312 bp, Neisseria meningitidis
atgcactttaaaggatttaaagcagcagatgttcattttatccgttccggaagtgatttggtgcttagcgcttctgaacaagacaacgtacgtatttccggatttttctatggtgaaaaccatcgtgtagatacatttgtctttgatgatgcagctatcagtaatccagattttgccaagtatattaatgctggcaataatttggtacagtctatgtctgtgttcggttctaatactgctgcgacaggaggaaatgtggatgccaatatacaatccgtacagcagccgttattggtaacgccatctgcataa

SEQ ID NO: 67441 - DNA, 1410 bp, Neisseria meningitidis
atgacctccacattcccccgccgcctcgcccgcaaaatccgccaaacccgccgcctgtcgcgcaaaagcatcgcctttctgttccttttggcaggttcggcactcgtcgccctgaccgcgctgttttttgcccatcttgccgattttgcgctggaactgaacgccaaactggttcaacaatacccgtggttcgcgtgggtcgcgcttcctttgggtttaccgcttattgcgtggctcacacgcaaattcgcccccttcaccgccggcagcggcatcccgcaggtcatcgcctcactgtcgctgccctacggcgcacagaaaacgcggctgatccgcctcgggcagacgctgctgaagattccgctaacctttttgggtatgctgttcggcgcgtccatcggacgcgaaggtccgtccgtgcaggtcggcgcggcagtgatgggcgcgtggggcgcgtggtgcaagaaacacggcttggcattcaaagggatgcaggaaaacgatttgatggcggcgggcgcggcgggcggtttggcagccgcgttcaacgcgccgctggcaggcgtgattttcgccattgaggaactcgggcgcggcatcatgttgcgctgggagaggcaaattcttttgggcgtgctcgcctccggtttcatacaggtcgccattcagggcaacaacccgtatttttcgggtttcaacggcggcgtattggaacatatctttctgtgggtcgcactgtccggcctggtttgcggcgcggcgggcggcctgttcggacgtttgctctatcgcggtgcggcggcgtttgcaccgcgcaagatacgcggcttcatccgcaaccgtccgctgctgctggcggcactgatggggctgctgctcgccctgctcggcacgttctaccaaggcaaaacctacggcaccggctaccacgaagccgcccaagccctgcacggcatctacgaagcccccttcggactcgccgccgccaaatggctcgccaccgtattcagctattgggcaggcattccgggcggcattttcactccctcgctgaccataggcgcggttttgggcgagcatatcgccgccatcgccgacatatcgcagggtgcaaacatcatcgtcctcatctgcatggcggcatttctggcgggcgcgacacaatccccgattacttccgccgtcgtcgtcatggaaatgacgggcggacaaagcctgctgttttggatgctgattgcctgcattttcgcctcgcaggtttcgcgccagttttcgccgcgtccgttctaccacgcatcgggaatgcgcttccgccagcgcgtgcttcaagaaaccaccgcccaaaccggcaatgcgcccgcaagaccgcaaacagcaaacagcaaaacgggaatgccgtctgaaaattaa

SEQ ID NO: 67442 - DNA, 183 bp, Neisseria meningitidis; identical to SEQ ID NO: 38667

SEQ ID NO: 67443 - DNA, 1380 bp, Neisseria meningitidis
atgctgctcgacctcaaccgcttttccttttccgtcttcctgaaagaagtccgcctgctgaccgctcttgccctgcccatgctgttggcgcaggtcgcgcaggtgggcatcggttttatcgatactgtgatggcgggtggtgcaggcaaggaagacttggcggcggtggctttgggcagcagcgcgtttgccacggtttatattacctttatgggcattatggcggcgctgaacccgatgattgcccagctttacggcgcgggtaaaaccgacgaagtgggcgaaacggggcggcaggggatttggttcgggctgtttttgggcgtgttcggcatggtcttgatgtgggcggcgattacgccgttccgcaactggctgaccttgagcgattatgtggaaggcacaatggcgcagtatatgctgttcaccagcttggcgatgccggcggcaatggtacaccgcgcactgcacgcctacgcctccagcctgaaccgcccgcgcctgattatgttggtcagctttgcggcgtttgtgttgaacgtgccgctgaactatattttcgtttacggcaaattcggtatgcccgctttgggcggcgcaggctgcggactggcgacgatggcggtgttttggttcagcgcgctggcattgtggatttatatcgccaaggaaaatttcttccgcccattcggactgacggcgaaattcggcaaaccggattgggcggtgttcaaacagatttggaaaatcggcgcacccatcgggctgtcttattttttggaagccagcgcgttttcgtttatcgtgtttttgattgcgcctttcggcgaggattatgtggcggcgcagcaggtcggcatcagtttgtcggggattctctatatgattccgcaaagcgtcggctcggcggggacggtgcgcatcggcttttcgcttgggcggcgcgaattttcgcgggcgcgttatatttcgggcgtgtcactggtgttaggatggatgctcgccgtgattaccgtgctttccttggtattattccgttcgccgctggtaagtatgtacaacaatgatccggcggttttaagcatcgccgccaccgtcttactgttcgccggcttgttccaaccggcagacttcacccaatgtatcgcctcctacgccttgcgcggctacaaagttacaaaggtgccgatgttcatccacgccgccgccttttggggctgcggtctgctgccgggctacctgctcgcctaccgtttcgatatgggcatttacggcttctggacggcattgattgcctcgctcaccatcgccgccatcgccttggtgtggtgcttggaattgtgcagtagggagatggtcagatcgcataaggccgtctga

SEQ ID NO: 67444 - DNA, 993 bp, Neisseria meningitidis
atgaaaacgcacgaaataagcaaagattcggtcagcttgataggggttgccgaacatgaggcgggtcaacgccttgataactatctgataaaaatcctcaagggtgttcccaagagccatatccaccgcattatccgcgccggcgaggtgcggttgaacaagaaacgctgcaaacccgacagccgtattgcggagggggatacggtgcggattccgcctgtgcgcgtggcggagaaggaaatgccgtctgaaaggcgtgccgccgtaccggcgcgtgcgtttgaggcggtgtatgaggacgacgcgcttttggtgatcgataagccttccggcgtggcggtgcatggcggcagcggcgtgagttttggcgttatcgaacagttgcgccgcgcccgtccggaggcgcgttatctcgaactcgtccaccgtttggacaaggatacgagcggtttgttgatggtggcgaagaaacgcagcgcgctcgtcaaacttcacgaagccatccgtaacgaccaccccaaaaaaatctaccttgcgctgggggtgggcaaactgccggacgacaatttccatgtcaaactgcccctgttcaaatataccggcgcacaaggcgaaaagatggtgcgcgtcagtgcggacgggcagtcggcgcatacggtgttccgtgtgttaagccgtttttcagacggcattttgcacggtgtcgggctgtcgcacctgactttggtgcgggcgacgttgaaaacggggcgcacgcaccaaatccgcgtccacctgcaatctcaaggctgtccgattgcgggcgacgaacgctacggcgattatcaggcgaaccgtcgtttgcagaagttgggtttgaagcggatgtttttgcacgcgtccgagctgcacttgaaccatccgctcacgggcgagccgctggtgttgaaggcggagctgccgctggatttggcacagtttgcggtgatgttggaaaacgggacgaaaatgtga

SEQ ID NO: 67445 - DNA, 702 bp, Neisseria meningitidis
atgacggaacctgcggccgaaggcggtaaagctgccaaggcgttaaaaaaatatctgattacgggcattttggtctggctgccgattgcggtaacggtttgggtggtttcctatatcgtttccgcgtccgatcagctcgtcaacctgctgccgaagcaatggcggccgcaatatgttttggggtttaatatcccggggctgggcgttatcgttgccattgctgtattgtttgtaaccggattatttgccgcaaacgtattgggccggcagattcttgccgcgtgggacagcttgttggggcggattccggttgtgaagtccatctattcgagtgtgaaaaaagtatccgaatcgctgctgtccgacagcagccgttcgtttaaaacaccagtactcgtgccgtttccccaatcgggtatttggacaatcgcattcgtgtccggtcaggtgtcgaatgcggttaaggccgcattgccgaaggacggcgattatctttccgtgtatgttccgaccacgccgaatccgaccggcggttactatattatggtaaagaaaagcgatgtgcgcgaactcgatatgagcgtggacgaagcattgaaatatgtgatttcgctgggtatggtcatccctgacgacctgcccgtcaaaacattggcaggacctatgccgtctgaaaaggcggatttgcccgaacaacaataa

SEQ ID NO: 67446 - DNA, 1194 bp, Neisseria meningitidis
atgtaccgacacatcgaatactatcccggcgacccgattttgagtttggtcgaaaccttcaaaaacgacccgcgccccgaaaaagtcaatttgagcataggcatttatttcgacgacgaaggcaaaatgcccgtgttggaatccgtgagccgagccgaaaccgcccgtgccgccgcgcctgcgccgtcgccctacctgccgatggaaggcttggacacttaccgcagcgcggtgcagcatttgttgttcggcaaagacaatcccgcgcttgcgcaagggcgcatcgttaccgtacaaaccttgggcggctcgggcgcactcaaagtcggggcggacttcctgcaccgctggtttcccgaagcgcgcgcctacgtcagcgacccgacttgggacaaccatcgcggcatttttgaaggcgcaggtttcgaggtcggcacttacccatattacgaccctgccactgttggcgtgaaattcgacgaaatgaccgcgtttttcaacaccctgcccgaaaacagcgtcctgatcctccatccctgctgccacaacccgaccggcgtggatatgtcggaacagcaatgggacgaagtgttgcacatcatcaaaacgcgcaaactgattccgtttatggacattgcctaccaaggcttcggcggcgatttggacagcgatgcctacgccgtccgcaaagcggtggaaatggaattgcccttgttcgtcagcaattccttctcaaaaaacctgtcgctctacggcgagcgcgtcggcggcctgagcgtggtttgcccgaataaggaagaagcggatttggtgttcggacagctcaaattcactgtccgccgcatctactccagcccgcccgcgcacggcgcgtatatcgccgccgacgtgatgaacagccccgaactttacgccttgtggcaaaacgaggtttatatgatgcgcgaccgcatccgtgcgatgcggcagaaactttatgatgtcttaactgcgcaaatccccgatcgcgatttcacttatttcatcaaacagcgcggcatgttcggctacacaggattgagcgtggaacaagtccgcaggctgcgcgacgaatttgccgtttacctgctggattccggcaggatgtgcgtcgccggactgaatacgtcgaataccgactatgttgcccgcgcatttgcggaagtcttgaaataa

SEQ ID NO: 67447 - DNA, 969 bp, Neisseria meningitidis
atgaaaattttgcttgtccgcttgtctagtatgggcgatttaattcacactttgcccgcaatcgaagatttggcgcgacaatgtcctgatgtggaactgcattggctatgtgaggctggatttgcagatattgcgcgcctgcatccgtttgtaaaaaaaatccatgtgatgaaatggcggcaatggcgcaaacatctctttcgggctgaaacttggcgggaaatgggtcatctgaaacagactttgcggcaggaagtatttgatttcgtattggacagtcaaggtctgattaaaagcgcgtgtttcgctaaaatggcaaaatccccgatttgtggtttggataaaaacagtgcgcgcgagggatgggctgctttggcgtatgtaaaaacatacgctgtaccgaagggaaaaaatgccgtttggcgcaaccgtgaactgtttgcccaagtatttgggtatgtaatgccggaaacgcaggtatttggcttgactgttcctgaagcaggccgtctgaaaaatttagcgcagccgtattatgcggctttgcatgcgaccagtcgggacagtaagttatggcctgtggaaaactggcggtcgttgctgcaaaagttgaatgaagaacagcaatgcaatatttacctgccttggggaaatgaagatgaaaaaacgcgtgccaaacaaattgcagatgggctgccgtttgctattgtgtgcgacaaaataaatttattgcaggcagcgtatctgctgaaatacgcggtcggaattgtcggcgtggataccggtttgctgcatttggcaaatgccttggaaaaacctgtggtcggcatttataccgataccgatccgattaaaacaggcgttcaggtttcgccaattgcaaaaaatttgggcaatatcgggcagattccgaccgcagatttggtttatcaagcgctgatggattgtgttgcagcagataaaggctaa

SEQ ID NO: 67448 - DNA, 1719 bp, Neisseria meningitidis
atgaacctacatcaaaccgtcgaacgcgaagccgccgccgcctttaccgccgcaggcatctccggcagccccgttgtcttgcagccgaccaaaaacgccgaacacggcaatttccaaatcaacggcgtgatgggtacggcaaaaaaagccaaacaaaatccgcgcgaattggcgcaaaaggttgccgaagcattggcgggcaacgccgtcatcgaaagcgcggaagtcgccggtcccggttttatcaacctgcgcctgcgccccgaatttctcgcgcaaaacattcagacggccttgaacgacgcgcgtttcggcatagcgaaaaccgacaaaccgcaaaccgtcgttatcgactattcttcgcccaatctggcgaaggaaatgcatgtcggtcacctgcgttccagcatcatcggcgacagcatttcgcgcgtgtcagaatttatgggcaataccgttatccgtcaaaaccacgtcggcgactggggtacgcagtttggcatgttggtcgcttatttggtcgagcagcaaaaagacaatgccgcattcgagctggcggatttggagcagttttaccgcgccgccaaagtgcgctttgacgaagaccccgcctttgccgacaccgcgcgcgaatacgttgtgaagctgcaaggcggcgatgaaaccgttttggcattgtggaaacagtttgtcgatatttcgctctcgcacgcccaagccgtttacgacacgctgggcttgaagctgcgccccgaagacgtggcgggcgaatcgaaatacaacgacgatttgcagcccgtagtcgatgatttggttcaaaaaggtctggcagtcgaagacgacggcgcaaaagtcgtgttcttggacgagtttaaaaacaaagagggcgaacctgccgcatttatcgtgcaaaaacaaggcggcggcttcctttatgcttccaccgacttggcgtgtttacgctaccgtgtcggcacgcttcatgccgaccgcctgctgtacgtcgtcgaccaccgccaagccctgcactttgagcaactctttaccacttcacgcaaagccggctatctgccggaaagcgtcggcgcggcatttgtcggcttcggcacgatgatgggcaaagacggcaaaccgttcaaaacacgcagcggcgacaccgtgaaactggtcgatctgctgaccgaagccgtcgaacgcgccaccgctttggtgaaagaaaaaaatcccgaattgggtgcggacgaagccgctaaaatcggcaaaaccgtcggcatcggctcaatcaaatacgccgatttgagcaaaaaccgcaccagcgattatgtgttcgactgggacgccatgctctcgtttgaaggcaacaccgccccctatctgcaatacgcctacacccgcgtgcaaagcgtgttccgcaaagcaggcgaatgggatgcaaatgcgccaaccgttttgaccgaaccgctggaaaaacagcttgccgccgagctgctgaaatttgaagacgtactgcaaagcgtggcggacacggcgtatccgcactacctcgccgcctacctctatcaaattgcgaccctgttcagccgcttctacgaagcctgtccgatactcaaagccgaaggcgcaagccgcaacagccgcctgcaactggcgaagctcaccggcgacacgctgaaacaaggcttggatttgctgggcatcgatgtgttggacgtaatgtaa

SEQ ID NO: 67449 - DNA, 288 bp, Neisseria meningitidis; identical to SEQ ID NO: 36916

SEQ ID NO: 67450 - DNA, 777 bp, Neisseria meningitidis
atgaactttatccgttccgtcggggcgaaaaccctcggccttattcaatccctcggcagtattacgctgtttctgctgaacatcttggcgaaatccggtacggctttcgtccgtccgcgcctgagcgtgcgccaagtgtatttcgccggcgtgctgtcggtgctgattgttgccgtttcggggctgttcgtcggtatggttttgggtttgcagggttatacgcagttgtcgaaattcaaatccgccgatattttgggctatatggtcgcggcttcgctattgcgcgagctgggtccggtattggcagcgattttgtttgccagcagcgcgggcggtgcgatgaccagcgaaatcggtctgatgaaaacgaccgaacagctcgaagcgatgaatgtgatggcggtaaaccctgtcgcccgcgtggttgcgccgcgcttttgggcgggcgtgttttccatgccgcttttggcttcgattttcaacgtggcgggcattttcggtgcgtatttggtcggtgtaagctggctgggcttggacagcggcattttctggtcgcaaatgcagaacaacatcacgatacattacgatgtaatcaacggtctgattaaatccgccgcgttcggcgtggcggtaacgctgattgccgtgcatcagggcttccattgcgtcccgacttcggaaggcattttgcgcgccagcacgcgcacggtggtttcgtccgccctgacgattttggcggtcgattttatattgaccgcgtggatgtttacagattga

SEQ ID NO: 67451 - DNA, 1011 bp, Neisseria meningitidis; identical to SEQ ID NO: 42825

SEQ ID NO: 67452 - DNA, 1539 bp, Neisseria meningitidis
atgaatatgcttggagctttggcaaaagtcggcagcctgacaatggtgtcgcgcgttttgggatttgtgcgcgatacggtcattgcgcgcgcattcggcgcaggcatggcgacggatgcgttttttgtcgcattcaaactgcccaacctgctgcgccgcgtgtttgcggaaggggcgtttgcccaagcgtttgtgccgattttggcggaatataaggaaacgcgttctaaagaggcgacggaagcttttatccgccatgtggcggggatgctgtcgtttgtactggtcatcgttaccgcgctgggcatacttgccgcgccttgggtgatttatgtttccgcacccggttttgccaaagatgccgacaaatttcagctctccatcgatttgctgcggattacgttcccctatatcttattgatttcactttcctcttttgtcggctcagtactcaattcctatcataaattcagcattccggcgtttacgcccacgttcctgaacgtgtcgtttatcgtattcgcgctgtttttcgtgccgtatttcgatcctcccgttaccgcgctggcttgggcggtttttgtcggcggcattttgcaactcggcttccaactgccctggctggcaaaactgggttttttgaaactgcccaaactgaatttcaaagatgcggcggtcaaccgcgtcatgaaacagatggtgcctgcgattttgggcgtgagcgtggcgcagatttctttggtgattaacacgattttcgcgtcttatctgcaatcgggcagcgtttcatggatgtattacgccgaccgcatgatggagctgcccagcggcgtgctgggggcggcactcggtacgattttgctgccgactttgtccaaacactcggcaaaccaagatacggaacagttttccgccctgctcgactggggtttgcgcctgtgcatgctgctgacgctgccggcggcggtcggactggcggtgttgtcgttcccgctggtggcaaccttgttcatgtaccgagaattcacgctgtttgacgcgcagatgacgcaacacgcgctgattgcctattctttcggtttaatcggtttgatcatgattaaagtgttggcacccggcttctatgcgcggcaaaacatcaaaacgcccgtcaaaatcgccatctttacgctcatctgcacgcagttgatgaaccttgcctttatcggcccactgaaacacgtcggactttcgcttgccatcggtctgggcgcgtgtatcaatgccggattgttgttcttcctgttgcgcaaacatggtatttaccggcccggcaagggttggacggcgttcttggcaaaaatgctactctcgctcgccgtgatgggaggcggcctgtatgccgcccaaatctggctgccgttcgactggacacacaccggcggaatgcaaaaggccgcccggctcttcatcctgattgtcatcggaggctgtctgtatttcgcatcactggcggcactgggcttccgtccgcgccatttcaaacgcgtggaaagctga

SEQ ID NO: 67453 - DNA, 483 bp, Neisseria meningitidis
atgaacctgctgacactgttacgccccgccaccgtgcaagactgcaaagacatcttcaaagtccacctgcactccgtccaatacacctgcatcctcagctacaacgaacacgccctaaaagtatgggaaggcttgctaaacacagaaagctacctgccgaccatttccgatcccgacaaagcactttgggttgccgaatacaaaggcaacatacagggatttttccaaatcgactgccaagaagcacaactcgatgcgctttacgtccaccccctgttccacaacctcggactgggcactgccctacttcatcaggcggaaaccatcgcccacaaatccggtttgagctttctgaaactctacgcatcgctcaactccgtcccgttttaccttctcaaccgctacgaatcgctcggttcggcagtattgcagcttgaccccagcatcaaaatcaaatgcgaactgatgcggaaacacctctga

SEQ ID NO: 67454 - DNA, 1176 bp, Neisseria meningitidis
atgctgaacacttccctttccccgtggccctgcttcacccaagaagaagccgatgccgtttccaaagtcctcttgtccaacaaagtcaattactggacgggcagcgaatgccgcgaatttgaaaaagaatttgccgccttcaccggcacgcggtacgccgtcgcccttgccaacggcacgctggcgctcgataccgcgctaaaagcaatcggcataggcgctggcgacgatgtgattgtcacttcgcgcactttcttggcttccgcgtcctgcattgtgaacgcgggcgcaaatccggtgtttgccgatgtggatttgaacagccaaaacatcagcgcggaaaccgtcaaggctgtgctgaccccgaataccaaagcgattatcgtggttcaccttgccggtatgcctgccgaaatggacggcattatggctttggcaaaagaacatgatttgtgggtgattgaagactgcgcccaagcgcacggcgcaaaatacaaaggcaaatccgtcggctctatcggacacgtcggcgcgtggtcgttctgccaagacaaaatcatgaccaccggtggcgaaggcggtatggttacgaccaacgacaaaaccctgtgggaaaaaatgtggtcgtacaaagaccacggcaaaagctacgatgccgtgtaccaccgcgaacacgcgcccggtttccgctggctgcacgaaagtttcggcacaaactggcgtatgatggaaatgcaggcggtcattggccgcatccagctcaaacgcctgcccgaatggacagcacgccgccaagaaaacgctgccaaactggctgaaagcttgggcaagtttgccagcatccgcttggttgaagtcgccgactacatcgaacacgcgcaatacaagttctacaccttcgtcaaacccgaacacctcaaagacggctggatgcgcgaccgcatcgtgaacgaactgaacgcgcgcaaagtcccctgctatcaaggcagctgctccgaagtctatttggaaaaagccttcgacaacacaccttggcggccgaaagagcgtttgaaaaacgccgtcgaactgggcgacaccagcctgatgttcttagtacatccgacgctgaccgacggcgaaatcgcgttctgcaaagaacacatcgaagccgtattgaccgaagccacacgataa

SEQ ID NO: 67455 - DNA, 1866 bp, Neisseria meningitidis
atgatagaaaaactgactttcggactgtttaaaaaagaagacgcgcgcagctttatgcgcctgatggcgtacgtccgcccctacaaaatccgcatcgttgccgccctgattgccattttcggcgttgccgccaccgaaagctaccttgccgccttcatcgcccccctgattaaccacggcttttccgcacctgccgcgccgcccgagctgtctgccgccgccggcatcatttccaccctgcaaaactggcgcgaacagtttacctatatggtttgggggacggaaaacaaaatctggaccgtccccctcttcctcatcatcctcgtcgtcatccgtggcatctgccgctttaccagcacctatctgatgacttgggtctccgtgatgaccatcagcaaaatccgcaaagatatgtttgccaaaatgctgaccctttcctcccgctaccatcaggaaacgccgtccggcaccgtactgatgaatatgctcaacctgaccgaacagtcggtcagcaacgccagcgacatattcaccgtcctcacgcgcgacacgatgattgttaccggcctgaccatcgtcctgctttacctcaactggcagctcagcattatcgtcgtcctgatgttccccctgctctccctgctctcgcgctactaccgcgaccgtctgaagcacgtcatttccgactcgcaaaaaagcataggcacgatgaacaacgtgattgccgaaacccatcagggacaccgcgtcgtcaagctgttcaacgggcaggcgcaggcggcaaaccggttcgacgcgatcaaccgcaccatcgtccgcctcagcaaaaaaatcacgcaggcaacggcggcacattccccgttcagcgaactgattgcctcgatctccctcgccgtcgtcatcttcatcgccctgtggcaaagccaaaacggctacaccaccatcggcgaatttatggcattcatcgtcgcgatgctgcaaatgtacgcccccatcaaaagccttgccaacatcagcatccctatgcagacgatgttcctcgccgccgacggcgtatgtgcatttctcgacaccccgcccgaacaggacaaaggcacgctcgcaccgcagcgtgtcgaagggcgcatcagcttccgcaacgtcgatgtcgaataccgttcagacggcatcaaagccctcgacaacttcaacctcgacatcagacaaggcgaacgcgtcgccttggtcggacgttccggcagcggcaaatccaccgtcgtcaacctgctgccccgctttgtcgaaccgtctgccggcaacatctgcatagacggtatcgacatcgccgacatcaaactcgactgcctgcgcgcccaattcgccctcgtctcccaagacgtattcctgtttgacgacaccctgtttgaaaacgtccgatacagccgtcccgacgcaggcgaagccgaagtcctatccgccctccaagccgccaacctgcaaagcctgattgacagttccccgctcggactgcaccagcccatcggatcgaacggcagcaacttatccggcggacagcggcaacgcgtcgccattgcccgcgccattttgaaagacgcgccgatattattattggacgaagccaccagcgcattggacaacgaatccgaacgcctcgtccaacaagcgctcgaacgcctgatggaaaaccgcaccggcatcatcgtcgcccaccgcctgaccaccatcgaaggggccgaccgcatcatcgtaatggacgacggcaaaatcatcgaacaaggcacacacgaacaactgatgtcccaaaacggctactacacgatgttacacaatatctcaaacaaagatgccgccgtccggacggcataa

SEQ ID NO: 67456 - DNA, 915 bp, Neisseria meningitidis
atgaaacaccccaaactcacccttattgccgcattgctaaccaccgccgcaactgccgcccccctgcccgtcgtaaccagtttcagcattttaggcgacgtagccaaacaaatcggcggagagcgcgtatccatacaaagtttggtcggagccaaccaagatacgcacgcctatcacatgaccagtggcgacattaaaaaaatccgcagtgcaaaactcatcctgctcaacggcttaggacttgaagccgccgacatccaacgtgccgtcaaacagagcaaagtatcctatgccgaagcgaccaaaggcatccaacccctcaaagccgaagaagaaggcggacaccatcatgaccacgaccatgaccacgaaggacaccaccatgaccacggcgaatttgacccgcacgtctggaacgaccccgtcctcatgtccacctatgcccaaaacgtcgccgaagccctgataaaggccgaccccgaaggcaaagtttattatcaacaacgcttgggcaactaccaaatgcagctcaaaaaactgcacagcgacgcacaagccgcatttaacgccgtccctgccgccaaacgcaaagtcctgaccgggcacgatgccttttcctatatgggcaaacgttaccatatcgaattcatcgccccgcaaggcgtgagcagcgaagccgagccttcagccaaacaagtcgccgccatcatccgccaaatcaaacgcgaaggcatcaaagccgtattcaccgaaaatatcaaagacacccgcatggttgaccgtatcgccaaagaaaccggtgtcaacgtcagcggcaaactgtattccgacgcactcggcaacgcgcccgcagacacctacatcggaatgtaccgccacaacatcaaagccttgaccaacgcgatgaagcaataa

SEQ ID NO: 67457 - DNA, 216 bp, Neisseria meningitidis; identical to SEQ ID NO: 39553

SEQ ID NO: 67458 - DNA, 621 bp, Neisseria meningitidis; identical to SEQ ID NO: 52500

SEQ ID NO: 67459 - DNA, 474 bp, Neisseria meningitidis
atgttatccgcagagtccttaaaacaaatcgacacagaactggcgaaatatcccgccgaccaacgccgttccgccatcatgggtgcgttgcgtatcgcccaaaccgaaaaaggctggcttgctcccgagaccatcgcctttgtcgcagaatatattggcatctcgcctgcacaagcctacgaagtcgctactttctacaatatgtacgaccttgagcctgtcggcaaatacaaactgaccgtttgtaccaacctgccctgcgccctgcgcggcggcatggataccggcgaatacctgaagaaaaaactcggtatcggctacggcgaaaccacgcccgacggcaaatttacccttgtcgaaggcgaatgcatgggcgcatgcggcgacgctccggtgatgctggtcaacaaccacagcatgtgcggctttatgactgaagaggcgattgagaagaaactggcggagttggagtag

SEQ ID NO: 67460 - DNA, 306 bp, Neisseria meningitidis
  misc_feature 8, 9, 10, 11, 12: 'n' is a, c, g or t
gtgtgtgnnnnnatcggcagacacagcgtcaatccgactgagggctacggcacaggcggcttgttgcaaggcaaaaaacatatgctttcactgacttggaatgcgccgattgaggcgtttacccgcgaaggcgatttctttgaaggcaaaggcgttgatgttttgtatatgcacttccacaaagccaacgagtttttgggtatgacccgcctgccgacattcttatgtaacgatgtggttaaaaatccgcaagtggaaaaatacttggcagattatcaggcacacttggaaaaagtgttcggctaa

SEQ ID NO: 67461 - DNA, 966 bp, Neisseria meningitidis
gtgaaaccgcgtttttattgggcagcctgcgccgtcctgctgaccgcctgttcgcccgaacctgccgccgaaaaaactgtatccgccgcatccgcatctgccgccacactgaccgtgccgaccgcgcggggcgatgccgttgtgccgaagaatcccgaacgcgtcgccgtgtacgactgggcggcgttggatacgctgaccgaattgggcgtgaatgtgggcgcaaccaccgcgccggtgcgcgtggattatttgcagcctgcatttgacaaggcggcaacggtggggacgctgttcgagcccgattacgaagccctgcaccgctacaatcctcagcttgtcattaccggcgggccgggcgcggaagcgtatgaacagttggcgaaaaacgcgaccaccatagatctgacggtggacaacggcaatatccgcaccagcggcgaaaagcagatggagaccttggcgcggattttcggcaaggaagcgcgcgcggcggaattgaaggcgcagattgacgcactgttcgcccaaacgcgcgaagccgccaaaggcaaaggacgcgggctggtgctgtcggttacgggcaacaaggtgtccgccttcggcacgcagtcgcggttggcaagttggatacacggcgacatcggcctaccgcctgtagacgaatctttacgcaacgaggggcacgggcagcctgtttccttcgaatacatcaaagagaaaaaccccgattggattttcatcatcgaccgtaccgccgccatcgggcaggaagggccggcggctgtcgaagtattggataacgcgctggtacgcggcacgaacgcttggaagcgcaagcaaatcatcgtcatgcctgccgcgaactacattgtcgcgggcggcgcgcggcagttgattcaggcggcggagcagttgaaggcggcgtttgaaaaggcagaacccgttgcggcggggaaagagtag

SEQ ID NO: 67462 - DNA, 957 bp, Neisseria meningitidis; identical to SEQ ID NO: 37386

SEQ ID NO: 67463 - DNA, 921 bp, Neisseria meningitidis; identical to SEQ ID NO: 44268

SEQ ID NO: 67464 - DNA, 1041 bp, Neisseria meningitidis
atggatatttcagattttgattttaccctgcccgaaaagctgattgcccagcatccgcccgaagtgcgcggcagcagccgccttttggttgcgttgcccgatatgccgctgcaagaccgggtgttcggtgatttgccggattatgtcgaggcgggcgacgttttggtgttcaataacacgaaggtgatgaaggcgcggctgtttggtcagaaagacagcgggggcagaatcgaggctttgatcgagcgtgttttagacagtcataccgcactggcgcatatccgttcgtccaagtcccccaagcccggtatggggctggtgtttgaaggcggcatccgtgccgtgatggtcgggcgtgagggcgaactgttctgcctgcgttttgaaggcggagagaccgtttacgaacttttggaacagaacggacacctgcccttaccgccttatatcgaacgtgccgccgatgcggatgacgacagccgttatcaaaccgtttatgccaaatatcagggtgcggtcgccgcgccgacggcgggcctgcattttacggaagaacttttgcgccgtctgaaagacaaaggcgcggtaaccgcagaagtaaccctgcacgtcggtgcgggaacgttccagcccatgcgtgtggacaaaatcgaagaacacaaaatgcacagcgaatggtttgaagtgccgtctgaaaccgtcgccgccgttgaggcggcaaaagcccgggggaacaaagtctgggcggtcggcacgacttccatgcgcgccctcgagtctgctgcgcgcgcgacgggtcgtctgaaagcggggcagggcgacaccgatattttcatcacgccgggctaccgttttaatgttgccgacaggctggttaccaatttccatctgccgaaatcgacgctgctgatgcttgtcagcgctttttcgggtatggggcatatccgcgccgcgtatcgtcatgcggtcgaacgcgaataccgtttcttcagctacggcgatgcgatgattttggggcggaacgaaggggtggtacgttag

SEQ ID NO: 67465 - DNA, 1215 bp, Neisseria meningitidis
atggataaatttcccaagtctgcaaagctcgatcacgtctgttacgacatacgcgggccggttcacaaaaaagcacttcagttggaagaggagggcaataaaatccttaaactcaatatcggcaaccctgcgccgttcggctttgaagcccctgatgaaatcttggtcgatgtcatccgcaacctgccgacttcgcaaggctattgcgattctaaagggctgtattccgcccgcaaagccattgttcactactatcagaccaaaggtttgcgcgatattacggtaaacgatgtctatatcggcaacggcgtgtccgagctgattacgatgtctatgcaggcattgctcaacgacggcgacgaaatcctgattcccgcgcccgactaccctttgtggacggcggcggcaacgcttgcgggcggtacggtacgccattatctgtgcgacgaagaaaacggctggttccccaaccttgccgatatggaagccaaaatcacgcccaaaaccaaagccatcgtcgtcatcaatcccaataatccgacaggcgcggtgtacagcagggaaatcctgttggaaatcgccgaactggcgcgcaagcacggtttgattattttcgccgacgagatttacgataaaatcctttatgacggcgcggttcaccaccacatcgccgcgcttgcccccgaccttttgacggtaacgttcaacggtttgtccaaatcctaccgcgtcgccggcttccgccaaggctggatggtgctcaacgggccgaaacatcacgcaaaaggttacatcgagggtttggatatgctctcgtctatgcgcctgtgtgccaatacgccgatgcagcacgcgattcagacggcattgggcggctatcagagcatcaacgaatttattttgcccggcgggcggcttttggaacagcgcaacagggcgtgggaactggtcagccagattcctggcgtgtcctgcgtcaaaccgatgggtgcgatgtatatgttcccgaaaatcgataccgaaatgtaccgcatccgcgatgacatgaaattcgtttacgatttgctggtgcgcgaaaaagtcttgctggtgcagggaacggggtttaattggatcaagcccgaccatttccgcattgttacgctgccttacgtctatcagattgaagaggcgatgggcaggctggcaagattcctgcaaacctaccgccaataa

SEQ ID NO: 67466 - DNA, 720 bp, Neisseria meningitidis
  misc_feature 8, 9, 10, 11, 12: 'n' is a, c, g or t
gtgtgtgnnnnncaaagaacggcctccctgccttggctgcgtcccgacgcaaaagcccaactgaccgtggtttacgatagcgaatccggcaaagtaaaacgcattgataccgtcgtcctctctacgcaacacgacccggaaatcggttatgaagagttgaaaaacgccgtcattgagcagattatcaagcccgtcctgccgtctgaactgctgaccgacgaaatcaaatacctgatcaacccgaccggccgcttcgtcatcggcggcccgcaaggcgactgcggtttgaccggccgtaaaatcatcgttgatacctacggcggcgcggctccgcacggcggcggcgcgttctccggcaaagacccgtccaaagtggatcgttccgccgcttacgcctgccgctacgttgcgaaaaacatcgtcgccgccggtttggcaacccaatgccaaatccaagtttcctacgccatcggcgttgccgaaccgacttcgatttccatcgacactttcggcacaggcaaaatcagcgaggaaaaactgattaccttagttcgcgaacatttcgacctgcgccccaaaggcatcgtccaaatgctcgatctcttgcgcccgatttacagtaaatccgccgcttacggacatttcggccgcgaagaacctgagttcacttgggagcgcaccgacaaagctgctgcattgagggcggcagcggggctgtaa

SEQ ID NO: 67467 - DNA, 840 bp, Neisseria meningitidis
atgaccgccacagccgccgccatagaccgcctgcttccccaaacccaatgccgcgaatgcggctacgacggctgcctgccctacgcacaggcagtcgcaacaggcgaagcgtacaacctctgcgccccgggcggagaaaccgtcattcgggacatttccgccctgctcggcaaaccctttgtcgcacctgccaaaacccaagccaaagcactcgcccggatagacgaaaccgcctgtatcggctgcaccgcctgcatccgcgcctgccctgccgatgccattatgggcgcgggcaaacttatgcacaccgtcatcgccgacgaatgcaccggctgcggactctgcgtcgccccctgccccgtcgactgcatccatatgcagcccgttgccgacaccgtcctgccccgcgcgcgccgcttcagcctgtccgccgacagccgttttgccgccgccgaacacgcgcgcacgcgctacctcaaacgcaacgaacgcaaacagcgcgaagccgacgaacgcaaggccatgcttgccgaacgcgaagccgccgtccgcaacgcgcgtccgcaaacgcccgacacaccgaaaaaaccggcgtttaaccctgccgacctcatcgccaaagccatggcaaaagcgcaaacccaacaagaccgcctcgccgccgccgacaaccgcaaagactatcaggcgaaacagatagccgaagcccgcgaacgcgccgagttgcgccgcgcccaacgcgatatgaaatacggcagcgacagcgaaaaagccgccgccctcgaatacctcaaacaatacaaagccaaacaggaagccgcacagaataccgcctcctga

SEQ ID NO: 67468 - DNA, 480 bp, Neisseria meningitidis
atgccggaaagtatttttaaacagatttcccttgatattttgaaactgcatcgggactctgtttattcgctgcttgccacttccggctgcaactgtcaggtgcatgaagcggcgtatgtcaacatcgacggcaaatattatattgcgctttcatgcgagcccgaggtgggggaagtcaaaacaggcattttgctgattgaggatgaaagccgcagcctgcgtttgagctgggtcggcagtgcgcgggagcttgaccgcaaggatagtgcctacaaacgcgccctgtccgcgttgtccagaaagatggggcggtgtaaggacaggctgcatacggcggttcagccgtttttgttggagctggtgccggagaaaggcaggttttctgtcggcgatgaagaagtttggatttctcgaaacgatttggtgagggctttatatcctgtcggatacagtatgcggcaggcagtgttgcagatttaa

SEQ ID NO: 67469 - DNA, 2814 bp, Neisseria meningitidis
atgtccaacagacctacactcctcctcgttgacggctcgtcctacctctaccgcgcgtatcacgcgatggcgcagttgaccgcgcccgatggtgcgccgacgggcgcgatgtatggtgtgttgaacatgctgcgccggttgcgggcggattatgtgcatgattattgcgcggtggtgtttgatgcgaagggcaagaatttccgccacgagatgttctccgactacaaggcgacgcgcccgccgatgcccgacgatttgcgcccgcaggcggaagcactgccggatttagtgcggctgacaggctggccggtattggtgattgggcaagtggaggcggacgatgtgatcggcacgctggcgaaacagggggcggaacatggtttgcgagtcattgtttcgaccggcgataaggacatggcgcagttggtggatgagcgcgttacgctggtgaacacgatgagcggagaaacgctggatattgaaggcgtgaaggcaaaattcggcgtgcgccccgaccaaatccgcgattatctcgcgctgatgggcgacaaggtggacaacgtgccgggcgtggaaaaatgcggcccgaaaacggcggtgaagtggctggaagcctacggctcgttgcaaggcgtgatagaacacgctgcggaaatcaagggcaaagtgggcgaaaacctgcaagccgcgctgccccaactgccgctgtcgtatgatttggtcacgattaaaaccgatgtggacttgcacgccgagctttcagacggcatcgaaagcctgcgccgtactacgccgaaatgggcgcaactggttgtcgatttcaaacgctggggcttccgcacgtggctgaaagaagcggaatcaaacatgaataccggctcgaccgatgatttgttcggcagcgacagcatcggcgagcaggcggctttaaatgcggaaatgccgtttgaaaaacaagccgaaaaagccaccgcccccgaaaaactggattatcaagccgttaccaccgaagcgcagtttgccgctttgttggacaaactgtcgcgggcggacacaatcggcatcgatacggaaaccacgtcattagacgcgatgaacgcctcgctggtcggcatcagcattgcgttccaagcaggcgaagcggtttacatccccgtaggacacagcctgaccgccgcgcccgaacagcttgatttgcaggacgtattaggtcgtctgaaaccgcatttggaaaatcccgccctgaaaaaaatcgggcaaaacctcaaatacgaccaacacgttttcgccaactacggcatcgccctgaatggcattgccggtgatgccatgctcgcttcttacatcatcgaaagccatctcggacacggtttggacgaattgtccgaacgctggctcggcttggaaaccattacctacgaatcgctgtgcggcaaaggcgcgaagcaaatcggttttgccgacgtcgccatcgaacaggcgaccgaatacgccgcccaagacgccgatttcgccttgcgcctcgaagcacacctgcgcgcgcaaatggacgccaaacagcttgaaatgtatgaaaaaatggagctgcccgtcgcgcaggtattgtttgaaatggaacgcaacggcgtgcaaatcgaccgcgccgaactcgcccgccaaagcgcggaactcggcgccgagctgatgaagctcgaacaggaagcctacgccgccgcaggccagccgttcaacctcaactcgcccaaacagctgcaagaaatcctgttcgacaaaatgggcattcctaccaaaggcctgaaaaaaactgccaaaggcggcatttccaccaacgaagccgtgcttgaacagctcgcgcccgactacccactgcccaaaatcatcctgcaaaaccgcagtttagcgaaactcaaatccacctacaccgacaaactgcccgaaatgatttcccccaaagacggccgcgtgcataccacctacgcccaagccgtcgccattaccggccgcctcgccagcaacaaccccaatctgcaaaacatccccatccgcaccgccgaaggccgccgcgtacgccgcgccttcaccgcaccgcaaggcagcgtcatcgtttccgccgactattcccaaatcgagctgcgcatcatggcgcacctctccggcgacaaaaccctcatcgccgcgttccaaaacggcgaagacgtacaccgtcgcaccgccgccgaagtattcggcatcgcccccgaaaacgtctcgcccgaacaacgccgctacgccaaaaccatcaacttcggcctcatttacggcatgggtcaatatggccttgccaaatcattgggcatcgacaacatctccgctaaaaactttatcgaccgctactttgcccgctaccccggcgtcgccgaatacatgcagcgcaccaaagaacaagccgccgcgcaaggcttcgtcgaaaccctgttcggccgccgcctctacctgcccgacatccacaacaaaaacgccaacgcccgcgccggagccgaacgcgccgccatcaacgcccccatgcaaggcaccgcctccgacctcatcaaacgcgccatgatagacgtgtcccgctggctttcagagtgcgaagcctccccgtgggacgaactcttacaaagcaaactgattatgcaggtgcatgacgaactggtgctggaagtcgttgaaaccgaactggattttgtcaaagaaaaactgccgcagattatggcgaaagtgggcggcggattattggatgtaccgctggtggctgaggttggcgtaggggagaattgggaagaggcacattga

SEQ ID NO: 67470 - DNA, 1131 bp, Neisseria meningitidis
atgaccaaacatctgcccctcatcgtactgactgcgctggcactggccggctgcggcggctcggacaaaacttctgccgacaaggcggctcaaaccgataatcaaaaggtattgagcatttacaactggtcggaatatgtcgaccccgagacggttgccgcgtttgagaagaaacacggtatcgcagtaacttacgatgtatacgacagcgatgaaacgctggaaagcaaggtattgaccggcaagtcgggttacgacattgtggctccttccaatgcgtttgtcggcaggcagattaaggcaggtgcgtatcagaaaatcgataagtcgctgattccaaattataaacacctcaaccctgaaatgatgaggctgatggacggggtcgatcccggccacgaatacgccgtgccgttttattgggggacaaataccttcgccatcaataccgaacgcgtgaaaaaggctttgggtacggacaagctgcccgacaaccagtgggatttggtgttcgaccccgaatacacgtccaaactcaaacaatgcggtatcagttatttagacagcgcggcggaaatttatcctatggtgttgaactatttgggtaaaaacccgaacagcagcaatacggaagacatcagggaggcaaccgccctactcaagaaaaaccgccccaatatcaaacgctttacttcgtccggctttatcgatgatttggcgcgcggcgatacctgcgtaacaatcggtttcggcggcgatttgaacatcgccaaacgccgtgccgaagaagcgggcggcaaggaaaaaatccgcgtgatgatgcccaaagagggcgtggggatttgggtggattctttcgtgattccgaaagatgcgaaaaacgtcgccaacgcgcacaaatacatcaacgacttcctcgacccggaagtgtcggcgaaaaacggcaatttcgttacttatgcgccttcgagcaagccggcgcgtgagctgatggaagacgaatttaaaaacgacaatacgattttcccaaccgaggaggatttgaaaaacagctttatcatggtgcctatccagccggcggcattgaagtttatggtgcgccagtggcaggatgtgaaggcggggaaataa

SEQ ID NO: 67471 - DNA, 1854 bp, Neisseria meningitidis
atgaaccgttatcctttatggaaatatctgctgattgtgttcacgattgcggttgccgcggtgtattcgctgcccaacctattcggcgaaacacccgccgtgcaggtatcgaccaaccgacaagccatcatcatcaacgaacagactcaattcaaagtggatgccgcgctgaaaaacgcaggtattcagaccgacgggatgtttgttgtggacaattcactgaaagtgcgtttcaaagacacagaaacgcagcttaaagcgcgcgacgtcatcgaaaacactttgggcgaagggtatattaccgcgctcaacctgttggcggacagccccgaatggatggcgaaaatcaaagccaatccgatgtttttgggtttggacttgcgcggcggcgtgcatttcaccatgcaggtcgatatgaaagcggcgatgcagaaaacgtttgaacgttattcgggcgacatccgccgcgaactgcgccgcgaaaaaatccgcagcggcacggtgtgtcaggctggaaacagcctgaccgtccctttgcaggatgcaggtgatgtgcaaaaggcactgccgcagttgcgcaagctgtttcctgaagcaacgctgaattcagacggcagcaatatcgtcttgacgctttcggaagaggcggtcaataaagtgcgttccgatgcggtcaaacagaacatcactaccctgcacaaccgtgtgaacgagttgggcgtggccgagcccgtcatccagcagtctggtgcagaccgtatcgtcgtgcagcttccgggcgttcaggatactgccaaggcaaaagacatcatcggccgtaccgcgactttggaattgcgtatggtggaggacgatcctgccaagttgcgcgaggcattggaaggcaacgtgccgagcggttatgagctgctttcaagcggcggagatcgtcccgaaattctgctgatcagcaaacaggtcgagctgacgggcgacaacatcaacgatgcgcaaccgagtttcgaccaaatgggcgcacctgccgtcagtctgagcttggacagcgcgggcggcagcattttcggcgaactgactgccgcaaatgtcggcaaacgcatggcgatggttttgatcgaccaaggaaaatccgaggttgtaaccgcgccggttatccgtactgccattaccggcggacgcgtggaaatttccggaagcatgacgacagccgaagccaatgatacgtctttgctgttgcgtgccggttctcttgccgcgccgatgcagattgtcgaagaacgtaccatcggtccgtctttgggtaaggagaacatcgaaaaaggcttccattcgactttatggggttttgccatcgttgctgcattcatggtggtttactatcgtctgatgggtttcttttctaccattgcattgagtgccaacatactgttcctaatcggtattttgtctgccatgcaggcaacgttgacgttaccgggtatggccgcgctggcgttgactttgggtatggcaatcgactccaacgtcttgattaacgaacgtatccgcgaagaattgcgtgccggcgtgccgccgcagcaggcaatcaatctcggtttccaacacgcatgggcgaccattgtcgattccaacctgacttcgctgattgccggtatcgcgcttttggtattcggttccggcccggtacgcggttttgcggtcgtacactgtttgggtattctgacttcgatgtattcctccgtcgtcgtattccgtgcgttggtcaatctgtggtacggacgcagacgcaaattgcagaatatttccatcggtgcggtatggaaacctgaagccgaaactgcggcaggtaaggagtaa

SEQ ID NO: 67472 - DNA, 1035 bp, Neisseria meningitidis; identical to SEQ ID NO: 66567

SEQ ID NO: 67473 - DNA, 654 bp, Neisseria meningitidis
atgttttccgtaccgcgttcctttttgccgggcgttttcgtacttgccgcgcttgccgcctgcaaacctcaagacaacagtgcggcgcaagccgcttcttcaagtgcatccgcgtcagctgcggaaaatgcggcaaagccgcaaacgcgcggtacggatatgcgtaaggaagacatcggcggcgatttcacgctgaccgacggcgaaggcaagcctttcagcctgagcgatttgaaaggcaaggtcgtgattctgtctttcggctttacgcactgtcccgatgtctgcccgacagagcttttgacgtacagcgacacgttgaagcagttgggcgggcaggctaaggacgtgaaagtggtgttcgtcagcatcgatccggaacgcgacacgcctgaaatcatcggcaagtatgccaaacagttcaatccggactttatcggtctgacggcaactggcggccaaaacctgccggtcatcaagcagcaataccgcgtggtttctgccaaagtcaatcaaaaagacgacagcgaaaactatttggtcgaccactcttccggtgcgtatctcatcgacaaaaacggtgaggttgccattttctcgccttacggaagcgagccggaaacgattgctgccgatgtaaggaccctgctctga

SEQ ID NO: 67474 - DNA, 831 bp, Neisseria meningitidis
atgcccgagtttttcactgatagcgaatccagccatttctattcatatttgactggatggctgaatgtggactttatagataatgacgatgaagatttaattgctaccgacaggacatcattagactggaagcattcaaaaacctcaaaattacgtgttttccttggggagatcgtccgagccatcgggcaagattggagaaaaagaagaaaaaaagagaaagatgacgaagtgaaaggcgaaagcggagttgatatcgaagattggaaaaacaaattgccagaaaaggaaagggaaccagtagaagttattttgaatcgtttggaagattcggagcttacaaataaagagcaagcggaagtaatctctgccttacatagtattattccagaatatccttactatcattggcggcatttgcatcaggatttgcatactgcctgtaatgatttttacaatgaaaagaaggattatttaagtgctgcaatcgaggcagttaaagttttcgaagataaggttcagaagcaaacaggtcttcatagcatagacggaagagaattgattgaacaagctttcgggagtaaaaattctatacttctattaacgaataacaaaacgaaggcggaacaaaatttagaagatggtcttgaacagcttgcatgcggaacatggactggatttagaaatcctgtacaacatgagttaagagcaaatttatctcctagtatttttaatgataaggatgctttggatttaataagcttggtttcgtatttgttaagaaaagtggaacagacaaaaaaacgatcgaaggtggtatcttccaagtaa

SEQ ID NO: 67475 - DNA, 615 bp, Neisseria meningitidis
  misc_feature 600, 601, 602, 603, 604: 'n' is a, c, g or t
atgaaggcggcgattcccgattatatgaagtttggcgcggagcgcgagatgcacggctcaaacgctgcgggaacggcaattgaaatcaacgtggaagatgacggcagaacctttttcgtggcgcatatcgtcgatcccgttgccgtgacgaaggtcaaaacaggcgtttacaagggcttttccatcggcggcagcgttaccgcccacgatgagttgaacaagtcgcaaatcacgggtttgaagctgacggaaatcagcttggttgaccgacccgccaatcccgatgcggtgtttacctgctttaaggcggacaaaggtgcggaagcggtaaacaacgatacagaacataatgctacatattttagccatttcccttccaaacaaaaaagcaccgacggcggccgatgccctttcctttacaggttcccctattttttatccgcgggcagcaccggtttggctgggccttttggtgcgggcgcgccgaccgaagcctggtccttcagcttcgccagcaccgcagggccgatgccctttaccttggtcaaatcgtctacagacttgaacgcaccgttttgcgcacggtattccgcaatgggnnnnncacacacttaa

SEQ ID NO: 67476 - DNA, 711 bp, Neisseria meningitidis; identical to SEQ ID NO: 39348

SEQ ID NO: 67477 - DNA, 1134 bp, Neisseria meningitidis
atgagcacccccgccctcctcgtcctcgctgacggcagcgtattccacggcacatcaatcggttacgaaggttcgacttccggcgaagtcgtgttcaatacttcgatgaccggctatcaggaaatcctgaccgacccgtcctactgcaaacaaatcgttaccctcacctacccccacatcggcaacaccggcaccaacgccgaagatgaagaaagccgcagcgtttatgccgccggcctgattatccgcgacctgccgctcttgcacagcaacttccgcgcctccgaaagcctgcacgactatttggtacgcaacaaaaccgtcgccatcgccgacatcgatacccgccgcctgaccacgctgttgcgcgaaaaaggcgcgcaaggcggcgcgattctgaccggtgcggatgccacaatcgaaaaagcgcaagaactcatcgccgcgttcggcagtatggtcggcaaagacttggcaaaagaagtttcctgcacggaaacttacgaatggacggaaggcgaatgggaattgggcaagggtttcgttacccctgacgaacagccttaccacgtcgtcgcctacgatttcggcgtgaaaaccaacatcctgcgtatgctcgcctcgcgcggctgccgcctgaccgtcgtccccgcccaaacgagcgcacaagacgtgttggcactcaatcccgacggcgtgttcctgtccaacggccccggcgaccccgagccttgcacctacgccatcgaagccgtgcaaaaactgatggaaagcggcaaaccgattttcggcatctgcttgggacaccagctcatcagcctcgctatcggcgcgaaaaccctgaaaatgcgcttcagccaccacggtgcgaaccaccctgtgcaagatttggacagcggcaaagtcgtcatcaccagccaaaaccacggttttgccgttgatgccgacaccctgcccgctaacgcacgcattacccacaaatccttgtttgacaacactttgcaaggcatcgagctgaccgacaaacctgtgttctgcttccaaggccaccccgaagccagccccggtccgcaagatgtcggctatttgtttgacaaattcattggcaatatgaaagcggcaaaacgggcataa

SEQ ID NO: 67478 - DNA, 726 bp, Neisseria meningitidis
atgagtgagggaatggtgtctcctgttttgtatttgattcctacgcctttgggtacgcctgacacgccgtgcctgttgccgcatgaacaacaggcgattgtcgggctgacggattttgtcgtggaagcggaaaaaacggcgcgcgcgcatttgaaacatttgggcgtgacaatgcctatccgcgaactgaatttgcaaacgctgaacgaacacacggatttgaagactttgccggaattgctgaaacctttgcaggaagggcgcagtatgggcattgtcagcgaggcgggttgcccggctgttgccgatccgggtgcgaatctggtggctttggcgcataaacacggttttgaagtgcgtccgctggttgggccttccagcctgctgctggctttgatggcttcgggtgcgaacgggcagagttttgcgtttaagggttatctgccgtctgaaaaaaacgagcggattcagagtttgaaggctttggagcaacgttcgcgccagcagaatgaaacgcagctgtttatcgaaacgccgtatcgcaacgatgtgttgttggcggatgcggtggaaaacctgcatcctgaaacgcgcttgtgcacggctacggatttgacgttgccgactcagtcggtggtcagtaaaacggttgcggattggcgcaggatgaaggaaatgcccaatctgaaaaaacgcccgacgatttttgtgatgtatgcaggttga

SEQ ID NO: 67479 - DNA, 1170 bp, Neisseria meningitidis; identical to SEQ ID NO: 44259

SEQ ID NO: 67480 - DNA, 171 bp, Neisseria meningitidis; identical to SEQ ID NO: 38357

SEQ ID NO: 67481 - DNA, 1542 bp, Neisseria meningitidis
atggatggacggcgttgggcggtatggggtgcttttgccctgctgccttcggcttttttggcggtaatggtcgttgcgcctttgtgggcggtggcggcgtatgacggtttggcgtggcgcgcggtgctgtcggatgcctatatgctcaaacgtttggcgtggacggtatttcaggcagcggtaacctgtgtgctggtgctgcctttgggcgtgcctgtcgcgtgggtgctggcgcggctggcgtttccggggcgggctttggtgctgcgcctgctgatgctgccgttcgtgatgcccacgttggtggcgggcgtgggcgtgctggccctgttcggggcggacgggctgttgtggcgcggcaggcaggatacgccgtatctgttgttgtacggcaatgtgtttttcaaccttcctgtgttggtcagggcggcgtatcaggggtttgtgcaagtgactgcggcacggcttcagacggcacggacgttgggcgcgggggcgtggcggcggttttgggacattgaaatgcccgttttgcgcccgtggcttgccggcggcgtgtgccttgtcttcctgtattgtttttcggggttcgggctggcattgctgctgggcggcagccgttatgccacggtcgaagtggaaatttaccagttggtcatgttcgaactcgatatggcgggggcttcggcactggtgtggctggtgttgggggtaacggcggcggcagggttgctgtatgcgtggttcggcaggcgcgcggtttcggataaggcggtttcacccgtgatgccgtcgccgccgcagtcggtcggggaatatgtgctgctggcgtttgcggcggcggtgttgtctgtgtgctgcctgtttcctttgttggcaattgttgtgaaagcgtggtcggccggcgaatcgtggcgtgtgttaatggaaagtgaaacgtggcaggcggtgtggaatactttgcgcttctcagcggtggcggtgtttgcggcggcggttttgggtgtggtgtatgcggcggcggcgcggcggtcggcgtggatgcgcgggctgatgtttttgccgtttatggtgtcgccggtttgtgtttcggcgggcgtgctgctgctttatccgcagtggacggcttcgttgccgttgctgctggcgatgtatgcgctgctggcgtatccgtttgtggcaaaagatgttttgtcggcttgggacgcactgccgccggattacggcagggcggcggcgggtttgggcgcaaacggctttcagacggcatgccgcatcacgttccccctcttgaaaccagcgttgcggcgcggtctgaccttggcggcggcaacctgcgtgggcgaatttgcggcgacattgttcctgtcgcgtccggaatggcagacgctgacgactttgatttatgcctatttgggacgcgcgggtgcggacaattacgcgcgggcaatggtgttgacattgctgttgtcggcgttcgcgctgggcattttcctgctgttggacggcggcgaaggcggaaaacagacggaaacgttataa

SEQ ID NO: 67482 - DNA, 699 bp, Neisseria meningitidis
ttggtcaaaacggcagacggctacaaagccattgcccatattcaagccggcgaccgcgtcttcgccaaagatgaaaccagtggaaaaacgggatacaaacctgttaccgcccgatacggcaatccgtaccaggaaaccgtttacattgaaatttcagacggcatcggcaacaaccaaaccctgatttccaaccgcatccatccgttttattcggacagcaaatggattaaagcggaagatttgaaagcgggaagcaggctgttatccgaaagcggcaaaacccaaaccgtccgcaacatcgttgtcaaaccaacaccgctcaaagcctacaatctgaccgttgccgactggcatacttacttcgtcaagggcagtcaggcggaaacggaaggggtttgggttcataattcttgtccgccatataagagaccaaataacgcaacgacaaaagcgcaacgagaaagtgtacaaggaaaaccctgcgttgaatgcggtaaattagccgaaaaaatgattgccgaccataaaaaaccattagttgtcgagtattatgaaacagggacaattgacaaatctaagatgagagcaattgaatcagtacaaccgcaatgtccgacttgttctgcaaaacaaggagggagattaagccaatattcaaaagaacagaaaaggaaactgagtaatgggaataaaaaatga

SEQ ID NO: 67483 - DNA, 2421 bp, Neisseria meningitidis
atgaacggacaaaagctgcccgaggtaaagtgggggcaatcatataattcattgccgcaaaaaagcaacccccgccaagttaactttacgacatcttttggtggatacaaaaaaaacactactttctcattcaataataccgatgaagttgttgctcaaaaaaacggtgttaccgttttcggcgcggcgacctacctgccgccctacggcaaggtttccggttttgatgaaaagaggctgaaagagcgcggcgatgtccttggttggattggtacgacccgcccggggttggtaggctacagctacgaaggtaacacatgctccagcggagactgtcctgatgttagctataaaacccaatttaccttcggtaatcaagggttgaaaagcaaggtaaacggcaagctggatatatacgaagacaaaagccgcgacaattcgcccatttataaattgccggatcagccttggttgggcgtgtctttcaatttaagcagcgagagcgtcgtcgaatcaaagaaactcaagaaagtggaatcttcttttagcgaggatgtgacgcagagcaatggtgcgcaaagcctatacaaatacaaaaacctcgtttatacgacaggcgatgttcgtaataagggtaatcaagttcatcaggacaaacaccacgctgtcgccttttatctgaacgccaagctgcacttgctggataaaaaaaacatccaaaatatcgcgcaaggcataacagttaattttggtaccttgaaaacacgcatcgagccgacggacgcgtggaagaacaagaggcatctcactcataatgttggtaattgggagttcaaagataccggatcagtcagcgtcaaactcaaattgccggaagtcaaagcaggccgctgcaccaataaatcgaaccccaatcccaaatccaaagccccttcccccgcactgactgcccccgcgctgtggttcggagctgggcaagatggtaaggcggagatgtattccgcttcggtttccacctaccccgacagttcgagcagccgcattttccttcaaaatctgaaaagaaaaaacgaccccagcaaacccggtcgctattctctcgcagacttgaatgcgtcggatattcaaagtaaagagccgactttcacaagtcggcaaaccgtcatccgattggataaaggcgtacatcagatcaaacttcaaggcaatgaggtcgccaattttaatggaaatgacggcaaaaacgaaactttcggcattgttaaggacttgggcgtcgatcctgatgccagcgagtggaaaaaagtgctgctgccttggacggttcgtgcttccaatgatgacgatcaatttaacacattcaacaaagaagaaaacaacggcaagccaaaatacagtcaaaaataccgcagccgcgacaacggcaagcacgagcgcaatttgggcgacatcgtcaacagccccatcgtggcggtcggcgagtatttggctacttccgccaacgacgggatggtgcatatcttcaaaaaaggcaacggcggggacgagcgcaactatagtctgaagctcagttatatcccgggcacgatgccgcgcaaggatattgaaagcaaagactccacccttgccaaagagctgcgcgcctttgccgaaaaaggctatgtgggcgaccgctacggcgtggacggcggctttgtcttgcgcaaagttaacaacttaaacgggcaagaccgcgtgtttatgtttggtgcgatgggttttggcggcagaggcgcgtatgccttggatttgaccaaagccgacagcagtaacccgaccggcgtttccctgtttgatgtcaaaaatgacaataataacggcaaaaacggcaataatagcgtggaattaggctacaccgtcggcacgccgcaaatcggcaaaacacacaacggcaaatacgccgccttccttgcctccggttatgcgactaaagagattaacaacaacgacaataaaaccgcgctgtatgtgtatgatttggaaaacagcaacggtaacggtacgctgattaaaaaaatcgaagtaccaaacggcaagggcgggctttcgtcccccacgctggtggataaagatttggacggcacggtcgatatcgcctatgccggcgatcgcggcgggaaaatgtaccgctttgatttaagcagtcaaagtcctgatcaatggactgtacgccctatttttgaaggcacgaagccgattacttccgcgcccgctatttcccaactgaaagacaaacgcgtggtcatcttcggcacgggcagcgatttgagtgaagaggatgtggacaatatggaagaacaatatatttacggtatcttcgacgacgatacggcgacgacgggtactgtaaacttcaggcggttcgggaggcgggctgcttga

SEQ ID NO: 67484 - DNA, 2526 bp, Neisseria meningitidis
ttgaaaaacaacagacaaatcaaactgattgccgcctccgtcgcagttgccgcatcctttcaggcacatgctggactgggcggactgaatatccagtccaaccttgacgaacccttttccggcagcattaccgtaaccggcgaagaagccaaagccctgctaggcggcggcagcgttaccgtttccgaaaaaggcctgaccgccaaagtccacaagttgggcgacaaagccgtcattgccgtttcttccgcacaggcagtccgcgatcccgtcctggtgttccgcatcggcgcaggcgcgcaggtacgcgaatacaccgccatcctcgatcctgtcggctactcgcccaaaaccaaatctgcactttcagacggcaagacacaccgcaaaaccgctccgacagcagagtcccaagaaaatcaaaacgccaaagccctccgcaaaaccgataaaaaagacagcgcgaacgcagccgtcaaaccggcgtacaacggcaaaacccataccgtccgcaaaggcgaaacggtcaaacagattgccgccgccatccgtccgaaacacctgacgctcgaacaggttgccgatgcgctgctgaaggcaaacccaaatgtttccgcacacggcagactgcgtgcgggcagcgtgcttcacattccgaatctgaacaggatcaaagcggaacaacccaaaccgcaaacggcgaaacccaaagccgaaaccgcatccatgccgtccgaaccgtccaaacaggcaacggtagagaaaccggttgaaaaacctgaagcaaaagttgccgcgcccgaagcaaaagcggaaaaaccggccgttcgacccgaacctgtacccgctgcaaatactgccgcatcggaaaccgctgccgaatccgccccccaagaagccgccgcttctgccatcgacacgccgaccgacgaaaccggtaacgccgtttccgaacctgtcgaacaggtttctgccgaagaagaaaccgaaagcggactgtttgacggtctgttcggcggttcgtacaccttgctgcttgccggcggaggcgcggcattgatcgccctgctgctgcttttgcgccttgcccaatccaaacgcgcgcgccgtaccgaagaatccgtccctgaggaagagcctgaccttgacgacgcggcagacgacggcatagaaatcacctttgccgaagtcgaaactccggcaacgcccgaacccgctccgaaaaacgatgtaaacgacacacttgccttagatggggaatctgaagaagagttatcggcaaaacaaacgttcgatgtcgaaaccgatacgccttccaaccgcatcgacttggatttcgacagcctggcagccgcgcaaaacggcattttatccggcgcacttacgcaggatgaagaaacccaaaaacgcgcggatgccgattggaacgccatcgaatccacagacagcgtgtacgagcccgagaccttcaacccgtacaaccctgtcgaaatcgtcatcgacacgcccgaaccggaatctgtcgcccaaactgccgaaaacaaaccggaaaccgtcgataccgatttctccgacaacctgccctcaaacaaccatatcggcacagaagaaacagcttccgcaaaacctgccttaccctccggactggcaggcttcctgaaggcttcctcgcccgaaaccatcttggaaaaaacagttgccgaagtccaaacaccggaagagttgcacgatttcctgaaagtgtacgaaaccgatgccgtcgcggaaactgcgcctgaaacgcccgatttcaacgccgccgcagacgatttgtccgcattgcttcaacctgccgaagcaccgtccgttgaggaaaatataacggaaaccgttgccgaaacacccgacttcaacgccaccgcagacgatttgtccgcattacttcaaccttctgaagtacctgccgttgaggaaaatgcagcggaaaccgttgccgatgatttgtccgcactgttgcaacctgctgaagcaccggccgttgaggaaaatgtaacggaaaccgttgccgaaacacccgatttcaacgccaccgcagacgatttgtccgcattacttcaaccttctgaagtacctgccgttgaggaaaatgcagcggaaaccgttgccgatgatttgtccgcactgttgcaacctgctgaagcaccggccgttgaggaaaatgcaacggaaatcactttggaaacgcctgattccaacacctctgaggcagacgctttgcccgacttcctgaaagacggcgaggaggaaacggtagattggagcatctacctctcggaagaaaatatcccaaataatgcagataccggtttcccttcggaatctgtaggttctgacgcgccttccgaagcgaaatacgaccttgccgaaatgtatctcgaaatcggcgaccgcgatgccgctgccgagacagtgcagaaattgctggaagaagcggaaggcgacgtactcaaacgtgcccaagcattggcgcaggaattgggtatttga

SEQ ID NO: 67485 - DNA, 408 bp, Neisseria meningitidis
ttgtccaacacttatctcgattgggcgaaacgcaattttgaattgaacggcatcgatacggaacggcataaaatcgtccgcgccgacgtgttccaatatcttcagacggcatatggggaaggcaggcagttcgacctcattgtgatggatccgcccagtttttccaacagcaagaaaatgtccgacatcctcgacatccagcgcgaccacaaaaagctgattgacggcgcggtgaagctgctcgcttcagacggcattttgtacttttccaacaacctgcgcagcttcgtcttagacgacttggtatcggaacaatacgccgtcaaagacatttccaaacaatccgttcccgaagatttccgcaacaaaaaaatccataggtgctgggaaatccgccacaaatcttaa

SEQ ID NO: 67486 - DNA, 1581 bp, Neisseria meningitidis
atgtccgtcatcaaacgcgccctgatcagcctgtccgacaaggcaggcgcggtcgaatttgcccaaaccctgaccaagctcggtgtcgaaatcctctccaccggcggcacggcgaaactgcttgccgatgcgggcgttcccgtgattgaagtcgccgactataccggcttccccgaaatgctcgacggccgcgtgaaaacgctgcatccgaaaatccacggcggtattttgggtcggcgcgatttgggcgaacacgtcgccaagatggaagaacacggcatcggcaatatcgaccttgtgtgcgtcaacctttatcccttcgccgccaccatcgccaaaccaaactgcacactggaagacgcgattgaaaacatcgacatcggcggcccgaccatggtgcgttctgccgcaaaaaactggaaacacgtcgccatcgttaccgacaccgccgacttccccgccatcgccgccgaactcgaagccaacaacggcgcgttgagcgacaaaacccgcttcaacctgtcgcgcaaagcgttcagccacaccgcccaatacgacggcatgatttccaactacctgacctcgctttcagacgaggtcttgagcggcacgcccgaaatcggtgaattcccgagccagttcaaccaaagctggattaaagtgcaagacatgcgctacggcgaaaacccgcatcagcgcgccgcgttctaccgcgatattgaccccgccgcaggcagcctttccgcctacaaacaactgcaaggcaaagaattgtcttacaacaacatcgccgatgccgatgccgcatgggaagccgtcaaatcctttgacgcgccagcctgcgtgatcgtcaaacacgccaatccgtgcggcgtcgccgttgcagccgatacattgaccgcctacaaactcgcctacgtcaccgacaccaccagcgcgttcggcggcatcatcgccttcaaccgcgaagtggacggcgaaaccgtcaaacagattaccgacaaccagtttatggaagtcttgatggcgccgaagtttaccgccgaagccctcgaaatcgccgccgccaagaaaaacgtgcgcgtattggaagtgccgcttgaggcaggcgcaaaccgcttcgaactcaaacgcgtcggcggcggactgttggtgcaaacccccgatattcaccgcctcaaccgcgccgatttgaaagtcgtttccaaacgccaaccgaccgagcaagaatggaacgacctgatgtttgtttggaacgtcgcaaaatacgtcaaatccaacgccatcgtcttcggcaaaggcggtcaaacctacggcatcggcgcaggccaaatgagccgcgtggacagtacccgcatcgccgcccgcaaagcgcaggacgcaggcttggacttaaacggcgcatgtgccgcctctgatgctttcttccccttccgcgacggcgtggacgtgattgccgagcagggcatcaaagccatcatccatccggcaggttcgatgcgcgatcaggaagtcttcgacgcagcggacgaacacggcatcgccatggtcgtaaccgacgtgcgccacttccgccattaa

SEQ ID NO: 67487 - DNA, 1386 bp, Neisseria meningitidis
atgatcagtatttttgatatttttaaaatcggtatcgggccttccagttcgcatacggtcggcccgatgaaggcagccgccgcctttgcggcaggtttggatgcacaggctgttcgcatcgtcatcgacatttacggctcgctcgcactgaccggatacggacacggtacatttgacgcgctgatgctcggtttggaaggcagcctgccgcacgacatcccgcttgccggcattcccgaacgcctcgaacgcatccgcacgcagcacatcctccggctcaacgggcaagaaatccgcttcatccccgaccgcgacctgaacatacgcggcaatcaagtgctgcccaaacaccccaacggcctgcgatttaccgcctatgcttcagacggcatcgtcttgaaagaacaggtttattactcgaccggcggcgggtttgtcgttaccggagaagatttcgagcggcagtcggaaacggaaaaaactgttccttatccttacaacagttgtgccgagctgcttgaccgatgccgtctgaaccggctcgacatctccgaagtcgtgttggcaaacgaagccgcgcttgccggatgcagtgcaaacgaaatccgccgccgcgttgccggcgttgccgatgtgatggaaggctgcatcaaacacggtttggcggcagacggcgagctgcccggcggattgaacgtccgccgccgcgccccgcatcttgccaccaagctcaaagtcctgcgcgaaaccgaaatcgtcaacacccagctctggccgatggtgtacgccatggcggtcaacgaagaaaacgccgccggcggacgcgtcgttaccgccccgaccaacggggcggcaggcatcattcccgccgtattgcactctttccgcaagttcaacccccacgccacacaggagcgcgtcgaaaacttcctgctcaccgccggcgcaatcggcatcctctacaaaaccaacgcctccatttccggtgcggatgtcggctgtcagggcgaagtcggcgtagcgtgttcgatggcggcgggcgcatacgccgaagtcatcggcggcacgcccaaacaagtggaaaacgccgctgaaatggcgatggaacaccatttggggctgacttgcgaccccgtcggcgggctggtgcaaatcccctgtatcgaacgcaacggcatcgccgccgaaaaagccctcaaactcggcacgctcgcgcttttggaagacggcacggacaaaaaagtctcgctcgacgaagtcatccgaaccatgctgcaaaccggccgggatatgaaggcgacctacaaagaaacctcgcttgccggactcgccgccacgctccggaaaaaagccgtccccgtatccgtgcgcgtggtcgagtgctga

SEQ ID NO: 67488 - DNA, 894 bp, Neisseria meningitidis
atgattattgtcatgagcaggcgtgccgccgaagcggacattgccggcgttgtcgcctttatccgcagcagaggtctgcgagaacacatttctcacggcgacgagcgtactgtcatcggcgcaatcggcgacgatagggttttgagcgtcagggaggtgcagacgctgccggaggtcgagaaagccgtccgcattttggatacatggaaaaccgtcagtcgggaaaatcgggcggaagacagccgcgttgccgccaaaggcgtggctttcggcggcggggaaaccgtccgtatcgccgcagaaccgtcagtatggcgcaatgcggatgcagtgtttctggatccgtttttcacttcggcaaacttatacgacacttcaagtgcggatgaagggcggggacggtgcagacggttggcggaacagaccgcatcggcgcatggcgcagggaaacccgtattggtgcgtgtccgcaacgtccgccatgtcgaagcggctttgaatgcgggggcggacatcctgtatttgggcggcgggctgatgtccgatcttgccgtattgaatgaagccggaagcctgaacattcccttggtgctgtgtaaagacaagcaccattctgccgaagattggttgaatgccgcagaatatgtcgtctcgcgcggcaaccgccacctgattctaggcgagtcgggcgtgttgagccataccaaagaccatccctaccgtttggatgtcgaatccatcgtgaaagtccgccaaatcagccatctgcccgtgattgcgaatattacgggattatggaaccgcgatatgccgcaggaaatcctgtacggcttggcaaaggcggcaggcgcgtgcggaatcgtcggaacctgttttgaaaagtcgggcggatag

SEQ ID NO: 67489 - DNA, 789 bp, Neisseria meningitidis
atgaaacaagctatgaaaaattggtttgctgccttgctgttggcagtacccatgggtgcggcatttgcttcgggcggtcatgcacactatgagaaagtcgatatcgatttgcgcgaccaagtcagcctgcagcgcggcgcacaaatctttaccaactattgcctgtcctgccactcggcaagcggtatgcgtttcaaccgtttgaaagacatcggtttgactgacgaagaaatcaagaaaaatctgatgtttaccaccgataatgtcggcgatgtcatgcattcggcgatgaacccgaaagatgcggcaaaatggtttggtgctgctccgcccgatttgacgttgattgcgcgttccaaaggtgcagactacctttacgcctatatgcgcggcttctataaagatccgacccgtccgagcggctggaacaataccgtatttgataaagtcggtatgcctcacccgctgtgggaacagcaaggcgttcaagccgttgagttggatgccaaaggtcagccggttatggtaaaagacgaacacggcgagatgaagcctaagctgtattgggaatctaccggtttgcacagccgccgtctgcctaacggcaaagtgatccaaaaagagtacgacgcatatgtacgcgatttggtcaattaccttgtgtacatgggcgaacctgcacaactgcaacgcaaacgtataggctatgtcgtgatgattttcctatttgcggttatgctgcctttggcgtatttcctgaaaaaagaatattggaaagacgtacactaa

SEQ ID NO: 67490 - DNA, 1494 bp, Neisseria meningitidis
atgttgtcaggactccccatccccaaagacatcgcgcgcccgcccgaaacgatattggtcaacatcacgccgcaggaaacgcgcgtagcggtgttggaggaaaacaatatctgcgagctgcacatcgagcgcaacagcgaacacagcctggtcggcaatatctatttgggcgtggtgcgccgcgtgctgcctgggatgcagagcgcgtttatcgacatcggcttggaacgcgcggcgtttttacacatcgtcgatgtcctcgaacaacgccgcaaccccgaagaaacccagcgcatcgaacatatgctgtttgaagggcagtctgttttggtgcaggtcatcaaagacccgatcaacaccaaaggcgcgcggctttccacccaaatctcgctggcggggcgtttcctcgtccatcttccgcaagaagaccacatcggcgtgtcccaacgcatcgaagacgatgccgaacgcagcagcctgcgcgaacgcctcgacaagctcctgccggaaaatgcctgccggggctacatcatccgcaccaacgccgaaaacgccaccgacgaacagctccagtccgacatcgactacctgaccaaagtgtgggaacacatccaagaacaggcgaaaatccggccgccggaaaccctgctttatcaggatttgcccttgagtttgcgcgtattgcgcgatatggtcggctgcgacacgcagaaaatcctcgtcgattccaccgtaaaccacggacggatgacgcgttttgccgaacaatacgtccacggcgcattgggcaggatagagctgttcaaaggcgaacgcccgctgtttgaaacccacaacgtcgaacaggaaatcagccgcgccctgcaaccgcgcgtcaacctcaacttcggcagctacctgattatcgaatccaccgaagcgatgaccacgatagacgtgaacacaggcggcttcgtcggcgcacgcaatttcgatgaaacgattttccgcaccaacctcgaagcctgccacaccatcgcccgcgaattgaggctgcgcaacctcggcggcatcatcatcatcgacttcatcgatatggcgcaggaaagccaccgcgaagccgtgttgcaggagcttgccaaagccctcgccttcgaccgtacccgcgttaccctgcacggttttaccagcctgggactggtcgagctgacgcgcaaacgctcgcgcgaaaacttaaaccaagtcctctgcgaaccctgcccttcctgccaaggcagaggccgtctgaaaacgccgcaaaccgtgtgctacgaaatccagcgcgaaatcgtccgcgaagcgcgccgttacgatgccgaaagtttccgcatcctcgccgcccccaacgtcatcgatttgtttttggacgaagaatcgcaatccttggcaatgctgatagatttcatcggcaaaccgatttctttggcagtcgaaaccgcttacacgcaggaacaatacgatatagtgctgatgtaa

SEQ ID NO: 67491 - DNA, 1497 bp, Neisseria meningitidis; identical to SEQ ID NO: 62605

SEQ ID NO: 67492 - DNA, 1407 bp, Neisseria meningitidis; identical to SEQ ID NO: 59380

SEQ ID NO: 67493 - DNA, 423 bp, Neisseria meningitidis; identical to SEQ ID NO: 38910

SEQ ID NO: 67494 - DNA, 1278 bp, Neisseria meningitidis
atgcgtagcagcgatattttaattgtagacgacgaaatcggcatccgcgacctgctgtcggaaatcctgcaggacgaaggttattcggtcgcattggcggaaaacgccgaagaggcgcgcaagctgcgccatcaggtacgcccggcgatggtgttgctggatatttggatgcccgattgcgacggcatcacccttttgaaggagtgggcgaaaaacgggcagctcaatatgccggtggtgatgatgagcgggcatgccagcatcgataccgccgtagaagcgaccaaaatcggcgcgctcgactttttggaaaaaccgatttccctgcaaaagctgctgtccacggttgaaaacgcgttgaagtacggtgcggcgcaaaccgaaacggggcctgtattcgacaagctgggcaacagtgcggcgattcaggaaatgaaccgtgaggtaggggctgcggtgaaacgtgcctctcccgtacttttgacgggcgaggcaggttcgccgtttgaaacggtggcacgctatttccataaaaacggtacgccgtgggtcagcccggcaagggtcgaatatctgatcgatatgccgatggaactgttgcagaaggcggagggcggcgttttgtatgtcggcgacatcgcccaatacagccgcaatatccaaaccggcattgcctttatcatcggcaaggcagaacgctgccgcgtcagggtggtcgcatcgggcagcagggcggcaggttcagacggcattgcctgcgaggaaaagctggcggaactgctgtcggaatcggtcgtccgtattccgccgctgcgtatgcagcatgaagatattcccttcctgatacaggggattgcctgcaatgtggcggaaagccaaaagattgcgcctgcctcattcagtgaagaggcacttgccgcattgacccgttacgactggccgggaaatttcgaccaactgcaaagcgtcgttgcaacgctgttgttggaggcggacggacaggaaatcggcgcggcggcggtttcttcccttttggggcagaatgtgcctgccgagggagcggaagatatggtgggcgggtttaatttcaacctgcccctgcgcgaattgagggaggaggtggagcggcgttatttcgagtaccacatcgcccaagaaggtcagaatatgagcaaagtggcgcagaaggtcggtttggaacgcacgcacctttaccgcaaactcaaacagctcggcatcggcgtttcgcgccgggcgggggaaaaaaccgaagaatag

SEQ ID NO: 67495 - DNA, 642 bp, Neisseria meningitidis
atgctgaaacccgaaaccatacacatatccggtcctgccggcattttagaaaccatccatatcccgtccgaacaagtaccggcacgcggtgttgccgtcatcaatcatcccaaccccctccagggcggaacaaacaccaacaaagttatccaaactgccgccaaagccttaagcaaactcggcttccactgctacctgcccaaccttcgcggcgtaggcggcagcgaaggcacacacgattacggacgcggcgaaacgcaagactgcctcgccgtcatcgactatgcccgtgcccaacatcccgaagcccccgaatttgccttatccggcttctccttcggcggttatgtcgccacatttgccgcacaagcgcacacacccgatttattgctgctcatcggcgcggcagtctgccactataccgaccgtccggaaccgtcagccgttcccgacgttgcaaaaacgctgatgatacacggcgcggaagacgaagtcgtcgaaatcgaaaaagcactgaaatgggcggaaccgcaagatttgcccgtcattaccatcgccggttccacgcatttctttcacggcaaactcatcgtcctgcgcgacaccatcctccgcttcgcgcccgtatgcctgaacggataa

SEQ ID NO: 67496 - DNA, 432 bp, Neisseria meningitidis
atgacgggatttaatgatgccgccggcgtggcatcctcctccgacatcaaaggcaaatatgttgagaaagttgaagtcgcaaaaggcgtcattaccgccacaatgctttcaaccggcgtaaacaacgaaatcaaaggcaaaaaactctccctgtgggccaagcgtcaagacggttcggtaaaatggttctgcggacagccggttacgcgcgccgacaaagccgacgacgttaacaaagccaccggcaacgaaatcgacaccaagcacctgccgtcaacctgccgcgacgcttcatctgccgtttgcacaaaacacccaagtattgcccgaatcacggcgaatggccgaaaaacttcgtcattcccgcgcaggcgggaatctaggtttgtcggcgcagaaacttatcgggtaaaaaggtttctccggtcctga

SEQ ID NO: 67497 - DNA, 732 bp, Neisseria meningitidis
gtgtcgcgcgaaatcaatgcgggcaggcatcatttcctctacggcggcatcagcggcggcggcgtgcattattgggataacaaagatttcagcgaacagagcctgcgcctgtcgttcggctataaaaaccgttcggtaacgcgctcgttcggcatcgtgccgtttgtcgagcaaaacctcttaggcggcagccgatacaatttcgtcggcggcttcaatgccgatttctcccaacgcttgagcgaacgctggcggttgacactaaacgcgggcaatatgtggaagcattatcaggaagaccgcaccgccgcccgatacgacagccatatgccgctggcgggcgcgacgctgatgtattccgcgccgaaagactggctgctttacggcggtgcggactggtcgcacaacataacgaaagaggcggaacaggcttccatccgcaagggtttgcgtgtcggcgcggtcaaaacgttcgacggcggcttgggtctgcgggcaaacctgcgctacacccgcaggacgtttgacgcgcccgggaccattgtgtaccgcttcccgcgcaaagaccacgaatatcaggcaaacctgtcgttgtggcacgacaaaatctcttggaagggctttacgccgcaactcaatttccgctacctgaaaatcgacagcaatatgaaaagtttttacacacgcaaaaacacgcagattttcatgagcgtggaaaaggatttcaaataa

SEQ ID NO: 67498 - DNA, 759 bp, Neisseria meningitidis
  misc_feature 4, 5, 6, 7, 8: 'n' is a, c, g or t
gtgnnnnntctcttctcttctcttctcttctcttccgcagcgcaggcggcaagtgaagacagcagccgcagcccgtattatgtacaggcggatttagcctacgccgccgaacgtattacccacgattatccgaaaccaaccggtacagacaaagacaaaataagcacagtaagcgattatttcagaaacatccgtgcgcattccatccacccccgagtgtcagtcggctacgacttcggcggctggagaatagcggcagattatgccagttacagaaaatggaacaacaataaatattccgtaaacacaaaagagttggaaaacaagaataacaataagagagacctgaagacggaaaatcaggaaaacggtacgttccacgccgtctcttctctcggcttatccgccatttacgatttcaaactcaacgataaattcaaaccctatatcggtgcgcgcgtcgcctacggacacgtcagacacagcatcgattcgactaaaaaaacaacagaggttcttacctccacccatgctcctagcacagcacctacgatttataatcagggaagtacgcaaaacgcctatcacgaaagccacagcatccgccgcttaggtcttggtgtcatcgccggtgtcggtttcgacatcacacccaagctgaccttggacaccggataccgctaccacaactggggacgcttggaaaacacccgcttcaaaacccacgaagtctcattgggcatgcgctaccacttctga

SEQ ID NO: 67499 - DNA, 1170 bp, Neisseria meningitidis
atggacaatgaattgtggattatcctgctgccgattatccttttgcccgttttcttcgcgatgggctggtttgccgcccgtgtggatatgaagactgtattaaagcaggcaaaaagcataccgtcgggattttataaaagtctggatgccttggttgaccgcaacagcggacgtgccgccagggaattggcagaggtcattgatcagcagcctcagtcatacgacctaaacctcaccctaggcaagctttaccgtcagcgtggcgaaaacgacaaagccatcaacatacaccggacaatgctcgattctcccgatacggtcggcgaaaagcgcgcgcgcgtcctgtttgaattggcgcaaaactaccaaagtgcggggttggtcgatcgtgccgaacagatttttttggggctgcaagacggtaaaatggcgcgtgaagccagacagcacctgctcaatatctaccaacaggacagggattgggaaaaagcggttgaaaccgcccggctgctcagccatgacgatcagacctatcagtttgaaatcgcccagttttattgcgaacttgcccaagccgcgctgttcaagtccaatttcgatgtcgcgcgtttcaatgtcggcaaggcactcgaagccaacaaaaaatgcacccgtgccaacatgattttgggcgacatcgaacaccgacaaggcaatttccctgccgccgtcgaagcctatgccgccatcgagcagcaaaaccatgcatacttgagcatggtcggcgagaagctttacgaagcctatgccgcgcagggaaaacctgaagaaggcttgaaccgtctgacaggatatatgcagacgtttcccgaacttgacctgatcaatgtcgtgtacgagaaatccctgctgcttaagtgcgagaaagaagccgcgcaaaccgccgtcgagcttgtccgccgcaagcccgacctcaacggcgtgtaccgcctgcttggtttgaaactcagcgatttggatccggcttggaaagccgatgccgatatgatgcgttcggttatcggacggcagctacagcgcagcgtgatgtaccggtgccgaaactgccacttcaaatcacaagtctttttctggcattgtcctgcctgcaacaaatggcagacgtttacgccaaacaaaatcgaagtttaa

SEQ ID NO: 67500 - DNA, 1095 bp, Neisseria meningitidis
atgaaaaccaatctgctcaactacgaccttcaagggctgacccgacattttgccgatatgggcgaaaaacccttccgtgccaaacaggttatgcgttggatgcaccaatccggcgcgcaaaattttaacgaaatgaccgatttggcaaaatcgttgcgccataaactgaacgaacaggcaggcatcgaaattcccaagctgatgatgtctcaagaatcttcagacggcactcgaaaatggcttttggatgtcggtacgggcaacggcgtggaaaccgtcttcatccccgaatcggatcgcggcacgctctgcatttcctcacaagtcggctgcgctttggaatgtacattttgttcgaccggccggcagggcttcaaccgcaacctgactgctgccgaaatcatcgggcaattgtggtgggcaaacaaagcgatgggcgttacaccgaaaaacgagcgcgttatttccaacgtcgtcatgatgggcatgggcgagccgatggcgaacttcgacaatgtcgttaccgccttaagcatcatgctggacgaccacggctacggtttgagccgccgccgcgtaaccgtttccacttcgggtatggttccccaaatggacaggttgcgcgatgtcatgccggtggctttggcggtttccctccacgcttccaatgacgaagtccgcaaccaaatcgtaccgttgaacaaaaaatatcccttgaaagaattgatggccgcatgccaacgctatctggtcaaagcacccagggatttcatcactttcgaatacgtcatgttggacggaataaacgataaggcgcaacatgcgcgcgaactgatcgaactggtcacagatgttccctgcaagttcaatctgattccgttcaatcccttcccaaactccggatacgaacgctccagcaatgagaacatccgtgtgttccgcgatattttgcagcaggcaggatttgtcgttaccgtacgaaaaacgcgcggcgacgacatcgatgccgcctgcggacagttggcggggcaggttcaggataaaacgcgccgccaacaaaaatggcagcagattttaatcggacaacaggggtaa

SEQ ID NO: 67501 - DNA, 279 bp, Neisseria meningitidis
atgaatatccgaactgcttttgctttgtgcgccatcgccttatccgccgctgcggctgcctacgccaaagaaatcaaaatcgatgccaacaacacgccttattccgaagccgacgcgcaaaagctggcggcaacggcagtcggtatgggtgttaaggaacctatcagcctgaacggcggcagcggcagcattaccgtgtccggcagcagcgcgacgcagtgcgtgttcaaagtcggcaacggaggcgcgttgcagattcaagggctcaactgcaagtaa

SEQ ID NO: 67502 - DNA, 1500 bp, Neisseria meningitidis
gtgttcaaaaaataccaatacctcgctttggcagcactgtgtgccgcctcgctggcaggctgcgacaaagccggcagctttttcggtgcgaacaaaaaagaagcatccttcgtagaacgcatcgaacacaccaaagacgacggcagcgtcagtatgctgctgcccgactttgtccaactggttcaaagcgaaggcccggcagtcgtcaatattcaggcagcccccgccccgcgcacccaaaacggcagcggcaatgccgaaaccgattccgacccgcttgccgacagcgacccgttctacgaatttttcaaacgcctcgtcccgaacatgcccgaaatcccccaagaagaagcagatgacggcggattgaacttcggttcgggcttcatcatcagcaaagacggctatattctgaccaatacgcacgtcgttaccggcatgggcagtatcaaagtcctgctcaacgacaagcgcgaatataccgccaaactcatcggttcggatgtccaatccgatgtcgcccttctgaaaatcgacgcaacggaagagctgcccgtcgtcaaaatcggcaatcccaaagatttgaaaccaggcgaatgggtcgctgccatcggcgcgcccttcggcttcgacaacagcgtgaccgccggcatcgtgtccgccaaaggcagaagcctgcccaacgaaagctacacacccttcatccaaaccgacgttgccatcaatccgggcaactccggcggtccgctgttcaacctgaaaggacaggtcgtcggcatcaactcgcaaatatacagccgcagcggcggatttatgggcatctcctttgccatccccatcgacgttgccatgaatgttgccgaacaactgaaaaacaccggcaaagtccaacgcggacaactgggcgtgattattcaagaagtatcctacggtttggcacaatcgttcggtttggacaaagccggcggcgcactgattgccaaaatcctgcccggcagccccgcagaacgtgccggcctgcaggcgggcgacatcgtcctcagcctcgacggcggagaaatacgttcttccggcgaccttcccgttatggtcggcgccattacgccgggaaaagaagtcagcctcggcgtatggcgcaaaggcgaagaaatcacaatcaaagtcaagctgggcaacgccgccgagcatatcggcgcatcatccaaaacagatgaagccccctacaccgaacagcaatccggtacgttctcggtcgaatccgcaggcattacccttcagacacataccgacagcagcggcggacacctcgtcgtcgtacgggtttccgacgcggcagaacgcgcaggcttgaggcgcggcgacgaaatcctcgccgtcgggcaagtccccgtcaatgacgaagccggtttccgcaaagctatggacaaggcaggcaaaaacgtccccctgctggtcatgcgccgtggcaacacgctgtttatcgcattaaacctgcaataa

SEQ ID NO: 67503 - DNA, 1236 bp, Neisseria meningitidis
atgactatttcgacaatggcacagacacacgatactcgattacaaaaaactttgctctttcccagtcaacaaggttggaaatctaaaacttttcttaaacctgattcacatattagattagcaaccgtattcagcgggattggtgcggttgaacaggcattccaccgattaaatttaaaccataccattgttttttcaggagatattgatccatacgttaaaaaaagttatcttggaaactataaattaaatgaagatttttggcataacgacattactcaatttgatgcgagaaagtttagaaatcaagttgatattttagttggaggcagtccttgccaagcattttccatggttggcaaacgtgcaggattagaagatacacgaggaacattattctatgaatttgctcgcgttgtggatgaagtccaaccaaagatatttatttatgaaaatgtaaagggcttgcttaatcatgataatggaaaaacttggaaagttgtaaaaagtgttttttattcacttggttatgacttatatttccaaataatgaatagtaaggattatgggattcctcaacatcgtgagcgtatttttgttgttggctttcatacccctcctataaatggttttcagtttcctgaaaagattgaattagaacatactatgcaagattttttggaggactatactgatagcaaatattttttacgtgaaaagggtgtgaaatttgttaccagttctaaaaatagacaaaaacgttatacacagattaatggagaaattgccttatgccaaaaagcaaatcaacaatttaattggcatggtgattttatttttcaggcagcccgcgaatctgaatttgatgactttatttttgatgtaaataacgttgaggaaaaatattatctttctgaaaaaatcaaaaattatgttttggcaggaggaacaaaaaattttaaaaccagtacggaaactgatttgcctgtagctcgcccattattgcaaactatgcataaaatgcatcgtgccggggttgataattatgttactcataatcgtggacgtattcgtaaattaacacctagggaatgtttgcggctaatgggttttagagatgattttaaaattttagttagtgatactcaaatgtatcgccaagcgggaaacagtattgttgttgatgtattaatcgctatattaaaacaaatggatattacgctttatggagagtaa

SEQ ID NO: 67504 - DNA, 1578 bp, Neisseria meningitidis
atgagtaaattcttcaaacgcctgtttgacattgttgcctccgcctcgggactgattttcctctcgccagtatttttgattttgatatacctcatccgcaagaatctgggttcgcccgtcttcttctttcaggaacgccccggaaaggacggaaaaccttttaaaatggtcaaattccgttccatgcgcaacgcgcttgattcagacggcattccgctgcccgacagcgagcggctcacgcccttcggcaaaaaactgcgcgccgccagtttggacgaactgcctgaattatggaatgtcttaaaaggcgagatgagcctggtcggcccgcgcccgctgttgatgcaatatctgccgctgtacgacaacttccaaaaccgccgccacgaaatgaaacccggcattaccggctgggcgcaggtcaacgggcgcaacgcgctttcgtgggacgaaaaattcgcctgcgatgtttggtatatcgaccattacagtttttggctggatatgaaaatcctgtttttgacagtcagaaaagtctttatcaaagaagggatttcggcggaaggggaagccactatgccttatttcactggaaatcaaactaatgaaaaaaataatatactgattctgtcggcaggtcgccgtgtcgaattggtgcaggacttccaaaccgaagccgcacgtttttcagacggcatcagcgtttttgccactgacctcaacccccgcatgtcttctgcctgccatgtttcggacggttcatttgaagtgccgccgattagtgccgattcatatatcgacagcattttcaatctggcggtacgcgaaaatatcggtttaatcatcccaaccatagacaccgaactgcaaaagctggcagacgagcgcgaacgctttgaagcggcaagtgtccacatcgtcgtttccgattcggacttcatcgcacaatgccgcgacaaacggaaaaccgccaccttgtttgcccgctacggcatacgctcacccgaaatttacgaccgcaagaagttggttttcccttgcttcgccaagccttatgacggcagccgcgccatcggtgcaaaacggattgacacacctgccgacctgacaccggaagtcttggcagacaccaaattaatgttctgtcagtttatcgacatcgaaaataaattttccgagtttaccgtcgatatgtattacgaccgtcaatgccgtctgaaatgcgccatcccgcgaaaacgcttggaagtgcgctccggcgaaatcagcaaaggcgttacctgcaaaaacagcctctaccaaacgctgctggaaaaaatgtcggtattgcagggcgcgcgcggctgtatcacggcgcagttcttctacaacgaagaaaccggcgaattctacggcgtggaaatcaacccccgcttcggcggtggcttcccgctgacgtatgccgcaggcggcaattatccgagccggttgatgcgcgaatacctcggcgacgaagaaatcccgttttcagacgactgggaaaacaacctcattatgttgcgctacgatgccaaggtcttggttcatgaaaacgattaa

SEQ ID NO: 67505 - DNA, 402 bp, Neisseria meningitidis; identical to SEQ ID NO: 36186

SEQ ID NO: 67506 - DNA, 2028 bp, Neisseria meningitidis
ttgaccggcatccgctcagaaaaacagattcaacgcgaaatcatgctgacacaggctgcgtttaaccgtttggcgcgcagcggcaaggcatcacaaaatgatttggcacgggcggcggtcgctacgcgtaaccgaattcgcgagctgaacgcggaactgaaacagggcacgggatttgcggacaagatgggaaaaatcggaagattcggtgcagctgcggtggctggtggcgcggcagcgtatacggtgcttaagcctgctatggacaacagaaagcagcttgatgagaacatcaaccgcgtgtccagacaggcatttattgaggataacagtaaatcggcagcgtggattgcaactgaaggtgcgcaacagatcaaggatttggcacttgaacttgtcgagaaaaatggcgggacccacgataaggctttggatttaatcagcggcatgatgaccaccagtctgaattttgcccaaaccaagaatgaagcgcaggcggcatatgcttttgcacttgcctcagaaggcagtggcgaggatacggcaaaactgattaaaaccctgaaagatggcggcatgagcggtaaagacctgcaactcgggcttgagcacgtcttgcaatcgggtttagacggcactttcgaggtgcgggatatggttcgggagctgccgagcctgctccctgccgcgcaacaggcagggatgaatggtgtcggcggtttggactacctgctctcactcttacaatctgcggcgaataaatcgggcagtcctgccgaagcggcgactaatgtgcaaaatcttttgagtaaaactctgtcgcctgacacgataggtcgtctgaagaagatggcaaatccgaatgacccgaagaaaggtgtcgattggataggctcggttgtgcaaggcaagcaaaacggcgaaaacgcagtgcaggtgttgtcccgtcttgccgatgccatgctagtaaaggataagcaataccaagattataagaaacgcgcggctgcaggcgataagacggcggcggagcaggcaaatatgcttaagggcgcgcttttggcgcaactgctgcctgatttgcaggcaaaacaaggtttgctggctgcaacggatatgacgcaaatccgtgaatatatggcttcgttggctggcgtaacgttggataacggaaaaattgctaagaacaacgaggcgcgaatgttgtcggcagcggcgcaacaagagcaacaggaatcgctggcaatgttgcgggaaagtctgacgggaacattggtggatatggaaacctcgtttaaaaagctggcagcggaataccctaatgccactctagccctgcaagcattgacgacggcggcaacagcggcgtctgccgcaatgttattaaccgccggtggcggtaaaggtgcaggctttctgaaagatgtaggtagtaaagcgttgggatggggtaaggcttccgcaggcggcgtggcagcaggtgccacagcggcaggcggtaagttgctgtcatggggaaaatctgccggtagcgggctcatgaataatccagcgttagttaaacgggcgggtttgttaggtatgttgctgtattccgagtctttgggtgacggcacattgccaaagggtttgcgtggtaccaagacaactcctgaaatgattaatcgtctgaaaaacaacggtatccgatttgaacctgcgccgaagcgggaacaggcgcggggtggtgtccctcagtatttggctgctccgtcagcgcagcctaccgataagatgttgtctccgttgttttcaactcagacggcggcgtatcaggcagccattcagcagcagacggcggcgtatcaggcagcattggcgcaggatacggctgcagttacaacaggtttggcacaagtgcaaagtgcgatggcgtcggcaagtcagaccatcaataccaatgtgagcctgaatatcgacggacgtgttatcgcgaatgaggtatcgcggtatcaagtggccatgttcggccgtggagcgggtcaataa

SEQ ID NO: 67507 - DNA, 1311 bp, Neisseria meningitidis
atggacacttcaaaacaaacactgttggacgggatttttaagctgaaggcaaacggtacgacggtgcgtaccgagttgatggcgggtttgacaacttttttgacgatgtgctacatcgttatcgtcaaccctctgattttgggcgagaccggcatggatatgggggcggtattcgtcgctacctgtatcgcgtctgccatcggctgttttgttatgggttttgtcggcaactatccgattgcactcgcaccggggatggggctgaatgcctatttcacctttgccgtcgttaagggtataggcgtgccttggcaggttgcgttgggtgcggtgttcatctccggtctgatttttatcctgttcagcttttttaaagtcagggaaatgctggtcaacgcactgcctatgggtttgaaaatgtcgattgctgccggtatcggtttgtttttggcactgatttccctgaaaggcgcaggcattatcgttgccaatccggcaaccttggtcggtttgggcgatattcatcagccgtccgcgttgttggcactgttcggttttgctatggtggtcgtattgggacatttccgcgttcaaggcgcaatcatcatcaccatcttgaccattaccgtcattgccagcctgatgggtttgaatgaatttcacggcatcatcggcgaagtaccgagcattgcgccgacttttatgcagatggattttgaaggcctgtttaccgtcagcatggtcagtgtgattttcgtcttcttcttggtcgatctatttgacagtaccggaacgctggtcggcatatcccaccgtgccgggctgctggtggacggtaagctgccccgcctgaaacgcgcactgcttgcagactctaccgccattgtggcaggtgcggctttgggtacttcttccaccacgccttatgtggaaagcgcggcgggcgtatcggcaggcggacggaccggcctgacggcggttaccgtcggcgtattgatgctcgcctgcctgatgttttcacctttggcgaaaagtgttcccgcttttgccaccgcgcccgccctgctttatgtcggcacgcagatgctccgcagtgcgagggatattgattgggacgatatgacggaagccgcacccgcattcctgaccattgtcttcatgccgtttacctattcgattgcagacggcatcgccttcggcttcatcagctatgccgtggttaaacttttatgccgccgcaccaaagacgttccgcctatggtatggattgttgccgtattgtgggcactgaaattctggtatttgggctga

SEQ ID NO: 67508 - DNA, 780 bp, Neisseria meningitidis
atgcttaaaatcatttccgccaacgtcaacggcatccgctccgcctacaaaaaaggtttttacgaatacatcgccgcatcgggcgcggacattgtctgcgtgcaggaactcaaagcgcaggaggctgatttgtctgccgatatgaaaaatccgcacgggatgcacggccattggcattgcgccgagaagcgcggttacagcggcgtggcggtgtacagcaaacgcaaacccgacaatgtgcaaatcggtatgggcattgaagaattcgacagggaagggcggtttgtgcgttgcgatttcggcaggttgagcgtcatttcgctttatttgcccagcggcagcagcgcggaagaacgtcagcaggtgaaataccgtttcctcgatgcgttttaccctatgctcgaagcgatgaaaaacgaagggcgcgacattgtcgtctgcggcgactggaacatcgcccaccaaaacatcgacctgaaaaactggaaaggcaaccagaaaaattcaggtttcctgccggaagagcgcgagtggataggcaaagtcatccatacgctgggctggacggacatgtggcgcacgctctatcccgacaatccgggctacacttggtggagcaaccgcggacaggcgtatgcgaaggatgtcgggtggcgcatcgattatcagatggttacacccgaacttgccgtcaaagccttgtccgcacacgtttataaagacgaaaaattctcggatcacgcccctttagttgtggagtatgactatgctgccgaataa

SEQ ID NO: 67509 - DNA, 1074 bp, Neisseria meningitidis
atgagcctgcccgcaatggatgccggtatttatctcgaagaaactgccccgcgcgccctgattgaacacaataatattttggataattcggtcggcgtctatctgcatggttctgccgatgcgatggtgcgggagaataaaatcgtcggcgacgcgactttgcgcgtgaacgagcgcggcaatggcgttaccgtttggaacgcgcccggcgcgcaggtcgtcggcaacgatatttccaaagggcgggacggcattttttccaataccagcacgcacaacacctataaaaacaaccgcttcagcgatttgcgtttcgccgtccactatatgtacaccaacgacagcgaaatcagcggcaatatttccgtgggcaacaatatgggctatgtgctgatgttttccgagcggctcaaagtgtttgacaatatcgccgtcggcagccgcgaccaaggcatcatgctcaactatgtcaactattccgatattcacgacaacattatcaacaaagcgggcaagtgcgtttttgcctacaatgccaactacgataaactgtccgccaatcattttgaaaactgccaaatcggcatacactttaccgccgccatcgaaggcacgtccctgcacgacaattcctttatcaacaacgaaagccaggtcaaatacgtcagcacgcgctttctcgactggagcgagggcggacacggcaactattggagcgacaacagtgcgttcgatttgaacggcgacggcttcggcgacagcgcgtaccggcccaacggcatcatcgaccaaatcatctggcgcgcgcccgtattgcgcctcttgatgaacagtctcgcaatcagcatcgtcaaatgggcgcaggcgcagtttcccgccgttctgcccggcggcgtggtggacagcaaaccgctgatgaagccttatgccccccaaaattcaaacccgttatcaggcgatgaaggacgagttgctcaaagaagccgaaacgcggcagtcggaatggggcagggcggaaaacggttctttgaactagtctgtttcagacggcatccggattcaaatgccgtctga

SEQ ID NO: 67510 - DNA, 312 bp, Neisseria meningitidis; identical to SEQ ID NO: 39965

SEQ ID NO: 67511 - DNA, 234 bp, Neisseria meningitidis
atgaaccgccgaaaaatctatctgttgtctgttgccctgttcacactggcatttatgctgctcgtcctcttgggtgcttatctgctgaccgtcggcagcaaagcctttgccgtcgcgtccttccttttcgcattcggcgcactgttcgggcaaatcggcgcactcgccctctacctgcggcacaaatccctacgcgccgcccaatccgccgcaaaggaaaaccgccatgtctga

SEQ ID NO: 67512 - DNA, 696 bp, Neisseria meningitidis; identical to SEQ ID NO: 38171

SEQ ID NO: 67513 - DNA, 837 bp, Neisseria meningitidis
atgcaaatcatacataccattcaagaactgcgcgcgtggcgtaaaaatgcgggaaaggtggcatttgtgccgaccatgggcaatctgcatgaagggcatcttgccctcgttcgcgaagccaaaaaacgcgccgacaatgttgttgtcagcatattcgtcaaccgcctgcaattcggtcagggcgaggatttcgacaaatatccgcgtactttgcaacaggatgcggacaaacttgccgccgaaggcgttgccgttgttttcgcgcccgatgagaaagaactctatccgaacgtggagcaacggtataacgtcgaaccgcccaacctgcaaaatgagttgtgcggcaagtttcgtccgggacatttccgcggggtggcaacggtagtgtccaagctgttcaatattgtcgcgccggatgttgcctgtttcggcaaaaaagactatcagcagcttgccgtgattaaaggtttgaccgaggatttgaattttgatgttgaaatagtgcctgtcgatacggggcgcgcggaagacggtttggcactctccagccgcaaccagtatttgagtgcggcggaacgcgacgaagcaccgcgcctgtcccgcgaattaaaggctgttgccgaatccttggcgcagggcagtttggattatgcaggtttggagcggcaggctgccgaccatttgaccgctgcgggctgggtggtcgattatgtcgaaatccgccgcgccgatacgctcgaagtggcgcgggcgggagataagaaactggtggtcttggccgccgcccgtctggggacgacgcgcctgattgacaatttggaaataaaactcccttaa

SEQ ID NO: 67514 - DNA, 963 bp, Neisseria meningitidis
atgttacgtttgactgctttagccgtatgcaccgccctcgctttgggcgcgtgttcaccgaaagattccgcttccaatcaggcacaaactgcttccgcttctgccgcccaaaccgaaggcgcaagcctgacggtgaaaaccacgcgcggcgatgttcaaataccgcaaaaccccgaacgtatcgccgtttacgatttgggtatgctcgatactttaaacaaactgggcgtgaaaaccggtttgtccgtcgataaaaaccgcctgccgtatttagaggaatatttcaaaacgacaaaacctgccggaactttgttcgagccggattacgaaacgctcaacgcttacaaaccgcagctcatcatcatcggcagccgcgcagccaaagcgtttgacaaattgaacgaaatcgcgccgaccatcgaaatgaccgccgataccgccaacctcaaagaaagtgccaaagagcgtatcgacgcgctggcgcaaatcttcggcaaaaaggcggaagccgacaagctgaaggcggaaatcgacgcgtcttttgaagccgcgaaaactgccgcacaaggtaagggcaaaggtttggtgattttggtcaacggcggcaaaatgtccgccttcggtccgtcttcacgcttgggcggctggctgcacaaagacatcggtttgcccgctgttgacgaagccatcaaagaaggcagccacggtcagcctatcagctttgaatacctgaaagagaaaaatcccgactggctgtttgtccttgaccgcagcgcggccatcggtgaagagggtcaggcggcgaaagacgtgttggataatccgctggttgccgaaacaaccgcttggaaaaaaggacaggtggtttaccttgttcctgaaacttatttggcagccggcggcgcgcaagagctgctgaatgcaagcaaacaggttgccgacgcttttaacgcggcaaaataa

SEQ ID NO: 67515 - DNA, 777 bp, Neisseria meningitidis
atggcagcattcaatacccaaaaagtattgtccgtacaccactggacagacgcatattttacctttacctgcacccgcgacgaatcgttgcgctttgaaaacggacagttcgttatggtcggattgatggtggacggcaagccgctgatgcgcgcatacagcgtcgcctccgccaactgggaagaacacctcgaatttttcagcattaaagtccaagacggtccgctgaccagccgcctgcaacacctcaaagtcggcgacgacgtgttaatcagcaaaaaaccgaccggaaccctggttgccggcgacctgaatccgggcaaacacctttacttgttgagcaccggtaccggcatcgctcctttcttgagcatcaccaaagaccccgaaatttacgagcaatttgaaaaaatcatcctcgtacacggcgtgcgctacaaaaaagatttggcgtactacgaccgctttaccaaagaattgcccgaacacgaatacctcggtgacttggttaaagaaaaactgatttactacccgattgtttcgcgcgaagaattcgaacaccacggtcgcctaaccgacctgatggtgagcggcaaactgtttgaagacatcggcctgcccaaaatcaacccgcaagacgaccgcgccatgctgtgcggcagccccgcgatgctgaaagatacctgcaaagttttggacgatttcggactgaccgtctctccgaaaacaggcgtacgcggcgattacctgattgagcgtgcgtttgtagatcaataa

SEQ ID NO: 67516 - DNA, 669 bp, Neisseria meningitidis
ttgttatctgatgaaagattggattgtaaactattttcttatgaatatatctatttaatttcatttgtgaaatctgctgatcagaatagctatgaaaaattagtacaagacattttggtgttacgaacatgtgctgaagtaaaaattaaacatcaattaactgcggaaaatagtcgtagtcatgcttatgtaaatgcagcacatgagtgggaatcttatttttcaaaaacattgactgatgcaggtgttttgcaaaaaacagatggtaaaattatttgccgtctaaagcatggtaagaccgaaacatatcgtaaagtaacatcaagtgagttttcgattcctaagcaacttcaggaatttgtgaaaaaattgcaaagtgcttattcgttttcagaaatgccattaaatctgaacgatagtgatcgtttgaaaattgatgtcattaaggaaatttatagcttctatccaaaagagttattggaggaaattggtgagcttaaggatgaagcagcatatgaattattgcacttacctaggttgattgaacaatatgcagataataataatggaacagaggcatatctatttgaagatgttctagaaatggggttcaatatgttttataacgtagaagctaaaaaattggtggaccaggtaatacggatttag

SEQ ID NO: 67517 - DNA, 867 bp, Neisseria meningitidis; identical to SEQ ID NO: 38666

SEQ ID NO: 67518 - DNA, 2790 bp, Neisseria meningitidis
atgaccgattacagcaaaaccgtcaacctgctcgagagcccgtttccgatgcgcggcaatcttgccaagcgcgagcctgcatggctgaaaagctggtacgagcaaaaacgctaccaaaaactgcgcgaaatcgccaaaggccgtccgaaatttattctgcacgacggccctccgtatgccaacggcgacatccacatcggtcatgccgtcaataaaattctcaaagacatcattatccgcagcaaaacccaagccggttttgacgcaccttatgtaccgggttgggactgccacggtttgcctatcgaagtgatggtagaaaaactgcacggcaaagacatgcctaaagcacgtttccgcgaattgtgccgcgaatacgccgccgaacagattgcccgtcagaaaaaagactttatccgcttgggcgtgttgggcgattgggaccgtccttacctgactatggatttcaaaaccgaagccgataccgtgcgtatgctcggcgaaatctacaaatccggctatctctaccgtggtgcaaaaccggttcaattctgcttggattgcggttcttcattggccgaagcggaagtggaatacaaagacaaagtatcgcctgcgattgatgttgcctatccgtttaaagacactgccgcgcttgccgccgcattcggtttggcaggtctcgaaggcaaagcgtttgccgtcatctggacaaccacgccttggactttgcctgcgagccaagccgtatcggccggtgcggacgtggtttaccgactgattgatacgcccaaaggcaaattggtgctggcgaaagatttggcggaagacgctttgaaacgctacggtttttcagacggcatcgccatccttgccgaaaccaccggcgacaagctggaaaacctgcatatgaaccatccgtttttggaacgcgatattcctatgctcaacggcgaccacgttaccaccgatgccggtacgggtttggtgcacaccgcccccgcgcacggtttggaagactacgccgtctgcaacaaatacggcatcgagctttacaaccccgtcaacgccgagggcaaatacattagcgaaacgccgcgcgttgccggtatgcgtgtttgggaggcgaaccccgtcatcctgcaatggctggaagaaaccggcaacctcttggcaagcagcaaaatcgaacacagctacgcgcactgctggcgccacaaaacgccgctgatttaccgtgcgacaggtcaatggtttgtcggtatggacaaagccggtgccgacggcaaaaccctgcgcgacaaagccatcaaggccgtggacgacaccgaattcttcccgtcttggggtcgcgcgcgtttggaagccatgattgaaggtcgtcctgactgggtggtttcacgccaacgctattggggcacgccgatgactttctttgttcacaaagaaacgggcgagctgcatccgaactctgccgaacttttggaaaaagttgccctgaaaatcgaagaaaaaggcatcgaagcgtggttctccctcgataagagcgaattattaagcgcggaagattgcgaacattacgacaaactccccgatacgatggacgtatggttcgattccggttcgacccattattccgttgtgaaacaacgcgaagaattggaatggccggcggatttgtatctcgaaggcagcgaccagcaccgcggctggtttcaatcgtccatgctgaccggctgcgcctcatcaatgggtcgcgcgccgtataaacagctgctgacccatggtttcgttgtcgacggcgaaggcaaaaaaatgtcgaaatccatcggcaacgtcgttgcaccgcaagaggtttataacgaattcggcgcagacatcctgcgcctgtgggcggcatctaccgattacagcggcgaattggcgatttccaaagaaatcctcaaacgcgtaaccgaaagctaccgccgtatccgcaataccttgagctttttgtttgccaacttgagcgactttaatccgattgaagatgccgtgcaacaggcggatatggtggaaatcgaccgctacgccgtggtattggcacgtcagctgcaagagcgtctggcaggcgattactattcgcgttatgccttccactttgccgtaaaagacattgtttctttctgctcggaagacttgggtgcgttctacctcgacatcctgaaagaccgcctctacaccaccaaagccgacagccatgcacgccgcagcgcacaaactgccctgtatcacatcacacgcagtttggttctcttgattgcaccgattttgtgcttcaccggcgaagaagcgtgggacatcatcggcggcggcgaagaagacagcgtcctcttccatacttggcacgagttcccgaccatcaacgaaaaaaccgaagccgaactggtgaaaaaatggacggcaatccgcgaagcccgcgaagcggtaaccgccgccatcgagcctttgcgcgccgacaaaaccgtcggttcgtccttgcaagccgaagccgaaattaccgcgccggaagaaatggccggctatctgaatgctttgggcgaagaattgcgctttgctttgctggtgtctaaagcagaagtgaaagtaggcagcgaacttgccgttgccgctaaagccagtgatggtgaaaaatgcgaacgctgctggcactacacccgcgatgtgggcgcggttgcaggctatgaaaccgtctgcaaacgctgtgcagagaatgtcggcggagaaggcgaaacgcgccattacgcctga

SEQ ID NO: 67519 - DNA, 558 bp, Neisseria meningitidis
atgaacatcattgataccgccattcctgacgtaaaactgcttgagccccaagtcttcggcgacgcgcgcggcttttttatggaaaccttccgcgacgagtggtttaaaacccaagtctgcgaacgcaccttcgtgcaggaaaaccactccaaatccggcaaaggcgtattgcgcggcctgcactatcaaactgaaaacacacaaggcaaactcgtacgcgtggttgtcggcgaagtattcgacgtggccgtcgatatgcgtaaagactcccccactttcggcaaatgggtaggcgagattctgtccgcagaaaacaaacgccaactgtgggtacccgaaggtttcgcacacggcttctatgtactgagcgatgaagccgagttcgtctataaatgcacagactattacaagccggaagccgaacaggttttaatatggaacgacccggcaataggcatagactggccgcttcaaaccgagccgaacctgtcgcccaaagatcttgccggtaaagcatgggcgcaagctgaaaagctccgccttacgctttcccgataa

SEQ ID NO: 67520 - DNA, 288 bp, Neisseria meningitidis; identical to SEQ ID NO: 36549

SEQ ID NO: 67521 - DNA, 651 bp, Neisseria meningitidis
atgccgtctgaaaacacaaaaggaaaaaccatgaccacacatcatgtcgaattgaggaaggtaaccaaacggttcggggcgcaaaaagccgtcaaccaagtcgatttggttttgaaggcaggagaaagcgtcgggcttgccggacacaacggcgcgggcaagtccaccattatgaagctgatactcgggctgattaccccgaccgaaggcgaagtgatgcttttgggcgaacgtaccggcagcaaagcgggggcgcggcttcgcagccaaatcggctacctgcccgaaaccgttgcgctgcacccttcgctgaccggcatcgaaacgctggatttttatgccaaacttaaaaaacagccgctcacgcagaaccgggggctgcttgagcgcgtcggcatttcacaggcggcacaccgccgcgtcggcacttattctaaagggatgcgccaacgccttgccttggcacaagccctgctgggcgagcccaaagtcctgctgtttgacgaaccgacaaccggtcttgaccctgcatcacgacaaatgttttacgaagtcgtgcgcgaactcaacgggcgcggcgcgaccgtattgctcagcacccacgcccttgccgagttggacggacacgccgaccgcattatcgtggattaa

SEQ ID NO: 67522 - DNA, 735 bp, Neisseria meningitidis
atgagcgcaaacgtcagccgccttgttgttcaaaacctgcaaaaaagtttcaaaaaacgccaagtcgttaaaagcttctccctcgaaatcgaaagcggagaagtcgtcggtctgctcgggcccaacggtgcgggtaaaaccaccagcttctacatgattgtcggactcatcgccgccgacgcaggcagcgtaaccctagacggacaagaattgcgccacctgcccatacacgaacgcgcccgcctcggtgtcggctacctgccgcaggaagcctcgatattccgcaaaatgaccgtcgaacaaaacatccgcgccatcttggaaatcagaaccaaagataaaaatcaaatcgacagggaaatcgaaaaactgctcgccgaccttaatatcggacacttgcgccgcagccccgcgccgtcgctgtccggcggcgaacggcggcgcgtcgaaatcgcccgcgtactcgccatgaaaccgcattttattttgctggatgagccttttgccggtgttgatcccatcgccgtcatcgacatccaaaaaatcatcggatttctcaagtcgcgcggtatcggcgtactgattaccgaccacaacgtacgcgaaaccctcagcatctgcgaccgcgcctacatcatttcagacggtgcggtgctggcatcgggaaaacctgatgatttggtcggaaacgaacaggttcgttctgtttatctgggtaagaacttcaaatattga

SEQ ID NO: 67523 - DNA, 1929 bp, Neisseria meningitidis
atgtccaaaaaccaaaatcacgaagaataccaagacgatgcccgccccctgacgattgaggaacaacgcgcgcgcctgcgccaactcatcattatgggcaaagaacgcggctacatcacctactccgaaatcaacgacgcactgcccgacgatatgtccgatgccgatcaaatcgacaacatcgtcagtatgatttccggtttgggcatccaagttaccgaacacgcccccgatgcggaagacatattgttaagcgacaatgccgccgttaccgacgatgatgccgtcgaagaagccgaggccgccctttccagtgcagattccgagttcggcagaaccaccgaccccgtccgtatgtatatgcgcgaaatggggcaggtcgacctgctgacccgcgaagacgaaatcatcatcgcaaaaaaaattgaaaacgccctgaaaaatatggttcaggccatctccgcctgcccgggatccattgcggaaatcttagaactcatcgaaaaaatccgcaaagacgaaatccgcgtcgacgaagtcgtagaagccattatcgacccgaatgaagtattgctcaacgaattgggcttggggcacttggaaaccacagcgcccgagaaaccttccaacgacaattcggacgaaaacgaagacgacgaagaatcggaagaagatgcggatgaaatctcggcagccaatctcgccgaattgaaacaaaaagtcatcggccactttgcccaaatcgaaaaagactacaaaaaaatgattggccgtttggaaaaacaccacagccggcacaaagactatctcgcctaccgcgacgcgattgccaacaaactgctggaagtccgtttcgccacccggcaaatcgacagcctcagcagcagcctgcgcgggaaagtagaaaacatccgcaaactcgaacgcgaaatccgcgacatctgcctcgaccgcgtccatatggaacgcgactacttcatccaaaacttcctgcccgaaatcaccaatctagaatggattgaagaagaaatcgccaaaggcagggtttggagcgacgcgctcgaccgcttccgccacgccatcctcgaaaaacaaaccgagttggcggatatggaaaaagaaacccgcatttccatcgaagagttgaaagaaatcaacaaaaatatggtgtcgagcgaaaaagaaaccgcagccgccaaacaggaaatgattcaggcaaacttgcgcctcgtgatttccatcgccaaaaaatataccaaccggggcttacaattccttgatctgattcaggaaggcaacatcggtttgatgaaagcggtcgataagttcgaataccgcagaggctataaattctccacctacgcaacctggtggatccgccaggcaattacacgctcgattgccgatcaggcgcgtaccatccgcattccggtacatatgattgaaaccatcaacaagatgaaccgcatctcgcgccaacaccttcaagaaaccggcgaagaacccgattccgccaaacttgccgaactgatgcagatgcccgaagacaaaatccgcaaaatcatgaaaatcgccaaagagccgatttcgatggaaacccccatcggcgacgacgacgattcgcacttgggcgacttcatcgaagatgccaacaatgttgcgccggccgatgcggcaatgtacaccagcctgcacgaagtaaccaaagaaatcctcgaaagcctgacaccgcgtgaggcaaaagtcctgcgtatgcgtttcggcatcgatatgaacaccgaccacacgctggaagaagtcggcagacagtttgacgtaacgcgcgaacgcatccgacaaatcgaggcaaaagcactccgcaagctgcggcatccgacaagaagcgaccgtttgagaagtttcttggacagcgaagacagcaagctgtaa

SEQ ID NO: 67524 - DNA, 678 bp, Neisseria meningitidis; identical to SEQ ID NO: 37180

SEQ ID NO: 67525 - DNA, 1032 bp, Neisseria meningitidis
atgccggattttcaaagaattactattgaaaacatagagtattttattgtcgatagtattcaaaatttacgtgcggaagatagttttattcacaggaataacaagttatctgtttttggtggtaatggggaagcacgcaaatatgtaggtagttatattgatgatagtggtcgaaaactaagtacattttttgagtatgaaaattgggggattactgagacaaaaaatggaaggagggtagaatatcctttcattcagaaaaattgtttttttaataagaaaaatttacagcgttatttggttgatgcaaaagttgaatatcacaaacaagaacagaaatatcatcatgatatttcaaggttttatgatgattacgttttaagtattaataatctgcctacagaaaatattttcttttcaatccatgatgtatcagaccatttggaaaattctaaaggttaccgtaggggttatatccgttcggaggatgatatatggtcaatttggcgtaagattgtattgcccaaaattagttatttatcaattcttaaactattgcctgtcaaagatatagaagattcagaaccattattttatttccgaatatttttggattatcaatttcgctctatcgtgcacccgcaactcttatcaagagaaaaattagaaataccggcttcagaatttaatcaattcgtagagcaagaaatcattaaacagaaaagtagaaaagggcagcagaaatatcgcaaggatgttataaatcatatgtcgcaatgtccatttacattaattacagatgagattttgttaagggctagtcatattaaaccttatatggtttgtattactgagaaaaatgagaaagaggcattagattatttaaatgggttagctttaacgccgacttatgattggttgttcgatcaaggttatattactttcttggatgatggtcgtttgatttgcggtactcgactaagccgttacacatgggaaaaacttaatatcaatccaaatgcaaaaaattaa

SEQ ID NO: 67526 - DNA, 753 bp, Neisseria meningitidis
atgaccgacatccttattgacaacaccgccaccgaaaccgtccgcaccctgatacgggcattcccccttgtgcccgtttcccaaccgcccgaacaaggcagttacctccttgccgaacacgataccgtcagcctcaggcttgtcggggaaaaaagcagcgtcatcgtcgattttgcctccggcgcggcacaataccggcgcacaaaaggcgggggcgaactcatcgccaaagccgtcaaccacaccgcgcaccccaccgtttgggacgcaaccgcaggattggggcgcgacagcttcgtcctcgcctcgctcgggctggccgttaccgccttcgagcaacatcccgccgtcgcctgcctgctttcagacggcatccgccgcgccctcctcaatcccgaaacgcaagacaccgccgcgcgcatcaccctgcatttcggcaacgccgcagtacaaatgcccgcacttgttcaaacacaaggcaaacccgacatcgtctatctcgaccccatgtatcccgaacgccgcaaaagtgccgccgtcaaaaaagaaatgacctacttccaccggctcgtcggtgaagcgcaagatgaggccgccctcctccataccgcacgccaaacggcaaaaaaacgcgtcgtcgtcaaacgcccccgcctcggcgaacaccttgccggacaagcccctgcctaccaatacaccggcaaaagcacccgcttcgacgtttacctgccctacgggacggacaagggataa

SEQ ID NO: 67527 - DNA, 1314 bp, Neisseria meningitidis
atgctgacgtttatcggactgctgattatcggggtcatcgtatggttgctgctgacggaaaaagtgtcgcccatcatcgcattaatcttggtgccgctgtttggggcgttgctggcggggtttgatgtatcccaattaaaagaattttattcgggcggcaccaaatcggtgatgcagattgtgattatgtttatgttttccattttgttttttggaatcatgaacgatgtggggctgtttcgtccgatgataggcggtttgattaagctgactcggggtaatatcgtggcagtgagtgtggggacggtcttggtgtcggtggtggcgcagttggacggggcgggtgcgacgacgtttttattggtcgtccccgcccttttgccgctttacaagcgtctgcatatgaatccttacctgctgtttttgctgctaacttccagtgcgggattgattaaccttctgccgtggggcgggccgactgggcgggttgcaagcgtgttgggcgcagatgtgggcgaattgtataaacctttgttgacggtgcaaattatcggtgtagtgtttatccttgcgctgtccctgcttttgggtgtgcgtgaaaaaaggcggattgtccgggagttgggcgcgttgcccgccgtggcggatttgataaagccggtgcctttgtcggaagaagaacaaaaattggcgcgtccgaaactgttttggtggaatgtcctgctgtttttggcggcgatgagcctgcttttttcgggcatcttcccgccgggttatgtatttatgctggctgcaacggcggcgttgcttttgaattaccgcagcccgcaggaacagatggagcggatttatgcccacgccggcggcgcggtgatgatggcgtccattattttggcggcaggtacgtttttggggattttgaagggtgcggggatgttggacgcgatttccaaagacattgtgcatatcctgccggacgcgctgctgccttatctgcatattgccatcggtgtgttgggcattccgcttgagttggttttgagtacggacgcttattatttcggactgtttccgattgtggagcagattacctcgcaggcgggcgtggcgcccgaagcagcaggttatgcgatgttgatcggcagtatcgtcggcacttttgttacgccgctttcgccggccttgtggatgggcttgggtttggcgaaattgtcgatgggcaaacacatccgttattcgtttttttgggcgtggggtttgtcgctggcgatattggccagttctatagcggcaggaatcgtgcctctgccgtaa

SEQ ID NO: 67528 - DNA, 894 bp, Neisseria meningitidis
atgctgagctattgtggcgtattaagcgaagaaaagttttctagatactatcggtacggcgtacagaataataaaatcctgcaatatattgccaatcgtgaaagaaatgccctaaatttcatccaagcatttagtgaaaaattattaaaagacagtggtatttatccaaaatttgccgatttttttgcccagcctaataaaaatacgtttgaaagtatgaaaacggcgtttaccgatcttgttatccaaaacacacccaaaaataccgaagtagaagttcgccgtatttttaccaaaatcattaatccattggcttataaacataatacttttggtacaagaaaagggagtatttccaatacccccattacattagacgagctttattacaatcgcctaaactggcgagataaaggcaaagaaaaatcgctcactcgcaaagaagctcaaactctatttgccgatagtgcaaatgccgcaaatttgaattatttagttaataaagccacaaaatttgtcaaaacgctacacaaaaccagcgaagttcaacgttttgatcccacagaagccaatcaggcacatcatatttttatggcaagcgaatttcctgatttagcatcgctgcctgaaaatctgatttgcctgacaccaaaccagcatttcaatttagcacacccaagcaataaaaccaccgttattgacaaacattaccagcgtatttgcctgatggcgaaattggacagtattgagcaagataaccgtgctaatacaggaaattacgattaccatgaatttattcatgtactcaatacaggatttaatacagatcagtttgatgtttctatgagttacgaaacattgaagcatcgtattttaatgtttgattttaaataa

SEQ ID NO: 67529 - DNA, 594 bp, Neisseria meningitidis; identical to SEQ ID NO: 38781

SEQ ID NO: 67530 - DNA, 999 bp, Neisseria meningitidis
gtggcggcacatatcggacgcattgatacggacacgcctttgaaacccctgtacgtcatccacggcgaggaagaactgttgcgtatcgaggcattggacgcattgagggcggcggcgaagaaacaaggttaccttaatcgggaagtttatacggcagacaatgccttcgattggaacgaactgttgcaaaccgcaggcagtgcgggtctgtttgccgatttgaagctgttggaactgcatatccccaacggaaaacccggcaaaaccggcggcgaggcgttgcaggattttgccgcccgcctgccggaagatacggtaacgctggttttgctgcccaaactggagaaaacccagctccagtccaaatggtttgccgcattggcggcaaagggggaagtgtgggaagccaaaccggtcggcgcggcggccttgccccaatggatacgcggacggctggacaaaatcggtttgggtatcgaggcagacgcattggcactgtttgccgagcgcgtggaaggcaatttgttggcggcgcgtcaggaaatcgacaagctcgcgctgctgtatccgaaagggcataccgtcaatatcgatgaggcgcaaaccgccgttgccaatgttgcccgctttgacgtttttcagcttgccggcgcatggatgaagggcgatgtcccgcgcgtatgcaggttgttggacggattgcaggaggaaggcgaagaaccggtactgcttctgtgggcggttgccgaagacgtgcggacgctgattcggcttgccgctgtcctgaaacaggggcagggtgtccaatccgtacgcaacagtctcagactttggggcgacaagcagacgctcgcgccgcttgcggtcaagcggatttccgtcgtccgcctgcttgacgcgctcaaaacctgcgcccaaatcgaccgaatcatcaaaggcgcggaagacggcgacgcatggacggtattcaaacggcttgtcgtgtcgctggcggaataa

SEQ ID NO: 67531 - DNA, 444 bp, Neisseria meningitidis; identical to SEQ ID NO: 42300

SEQ ID NO: 67532 - DNA, 1170 bp, Neisseria meningitidis
atgccgcaaattaaaattcccgccgtttactaccgtggcggtacatcaaaaggcgtgtttttcaaacgttccgacctgcccgaggcggcgcgggaagcgggcagcgcacgcgacaaaatcctcttgcgcgtactcggcagcccggacccctacggcaagcagatagacggtttgggcaacgccagttcgtccaccagcaaagccgtgattttggacaagtccgaacgcgccgatcacgatgtcgattaccttttcgggcaagtttccatcgacaaaccttttgtcgattggagtggcaactgcggcaacctcaccgccgccgtgggcgcatttgccatcgagcaaggcttggtcgataaaggcaagattccttcagacggcatctgcacggtcaaaatctggcagaaaaacatcggcaaaaccattattgcccatgtaccgatgcaaaacggcgcagttttggaaacaggcgattttgagctcgacggcgtaacgttcccggcagccgaagtacaaatcgaatttcttgatccagccgacggtgaaggcagtatgttcccaaccggcaatttggtcgatgaaattgatgtgccgaatataggccgtttgaaagccacgctcatcaacgcgggcattccgaccgttttcctgaatgccgccgacttgggctacacgggcaaagagttgcaagacgacatcaacaacgatgccgcagctttggaaaaattcgagaaaatccgcgcttacggtgcgctgaaaatgggcctgattaacgacgtgtccgaagcctccgcccgcgcgcacacgccgaaagtcgccttcgtcgcgcccgccgccgattacaccgcctccagcggcaaaaccgtgaacgccgccgacatcgatttgctggtacgcgccctgagcatgggcaaattgcaccacgcgatgatgggtaccgcctctgttgccattgcgaccgccgccgccgtgcccggtacgctggtcaaccttgcctcaggcggcggaacgcgtaaagaagtgcgcttcgggcatccttccggcacattgcgcgtcggtgcagccgccgaatgtcaggacggacaatggacggccaccaaagcggttatgagccgcagcgcacgcgtgatgatggaaggttgggtcagggtgcctgaggattgtttttaa

SEQ ID NO: 67533 - DNA, 987 bp, Neisseria meningitidis
atgcaataccgaatcagaagagaaaacgaagcacccgaagcaaaaaatgcgggggaaaccttatgggagcgcgacatcatgcgcgaagtgctgctgtccgcctatcaggacaggcgcagggagcggatgtggaaaaacatctggcgcgccgtcagcaccctgattctggttgccctgattgcaggcattttccgaaaagacgaagccgcattgcagttggcgggcaatacgccgcataccgcagtcgtcaacctgtacggcgaaatcggcaacggtgtagaagaccaggtcaaaaaactcaaagacggtatggaggccgcctacaaaaacccgcaggcaaaagccatcgtcatccgcgccaacagccccggcggttcgcccgtcgtctccaacaccgcttttgaagaaatacgccgtctgaaggcgcagcaccccggcatccccgtttatctcgtggcggaagatatgtgcgcgtccggctgctactacatcgcggcggcggcggacaaaatctatgccgacccgtccagcatcgtcggcagcatcggcgttatcggcagcagtttcgacgcgaccggcctgatggaaaaaatcggcgtgaaacgcagggttaaaattgcgggcagcaacaaaggcatgggtgatccgttttcgcccgaaacgcccgaacagtcgaaaatctgggaagaaatgctgaccggcatacacggcgagttcatcaaagccgtcaaaaccggacgcggcggccgcctcaaattccgacaatatcccgacgtgttcagcggtcgggtgtacacaggcgcggatgcgctgaaagtcgggctggtggacggactcggcaatatttacagcgtggcgcgagacgtggtcaaagcccccgatgtggtggattacactccgaaggacgatttcggcagaatcttgggcagacgcttcggcgcagaactcaaagcaagcgtgcgcgaagccctgcaggccgtccggtag

SEQ ID NO: 67534 - DNA, 384 bp, Neisseria meningitidis
atgagcaccttcttccagcaaaccgcccaagccatgattgccaaacacatcgaccgcttcccgctattgaagttggaccaggtgattgattggcagccgatcgaacagtacctgaatcgtcaaagaacccgttacctccgagaccaccgcggccgtcccgcctaccccctgctgtccatgttcaaagccgtcctgctcggacaatgggacagcctctccgatcccgaactcgaacacagcctcatcacccgcaccgatttcaacctgttttgccgttttgacgaactgagcatccccgattacagcaccttatgccgctaccgcaactggctggcgcaagacaataccctgtccgaattgctggaactgattaaccgcaactga

SEQ ID NO: 67535 - DNA, 813 bp, Neisseria meningitidis
atggacaaaatcagagttgccgccgtgcagatggtgtcgggcgtgtcgccggaaaccaacgtcgctgccatgaaacgcctggtcgcacgggcggcggagcagggtgtggattgggtgctgctgcccgaatattgggtgctgatgggcgcaaacgataccgacaaactcgcgcttgccgagcctttgggcggcggacgctttcagacggcattgagcgaaacggcgaaagaatgcggcgtggtgctgttcggcggaaccgtgccgctgcaaagccccgaggcgggcaaggtcatgaatactttattggtgtacgggcgcgacggcaaacggacggggctgtaccacaaaatgcacctcttcggcttttccggtttgggcgaacgctatgccgaagccgataccatccgcgcgggcggggatgtgccgcacttgtcggcagaaggcgtgtcggtggcggcgggcatttgttacgatgtccgctttcccgaatttttccgccgccagctgccgtttgacgtattgatgctgcccgctgcgtttacgcacacgacgggcaaggcgcattgggagctgctgctgcgcgcgcgtgccgtcgaaaaccaatgttacgtcgtggcggcggcacagggcggtttgcacgaaaacggacggcgcacgttcggacacagcatgattgtcgatccgtggggcgacgtattggacgtattacccgaaggcgaaggcatcgttacggcagacatcgatgccaaccgcctgaacagcgtccgcaaccgcctgcccgccttgaaataccgggttttggatgccgtctga

SEQ ID NO: 67536 - DNA, 966 bp, Neisseria meningitidis
atgagctacacgcaactgacccaaggcgaacgataccacatccaatacctgtcccgccactgcaccgtcaccgaaatcgccaaacagctgaaccgccacaaaagcaccatcagccgcgaaatcagacggcaccgcacccaagggcagcaatacagcgccgaaaaagcccagcggcaaagccagactatcaaacagcgtaagcgacaaccctataagctcgattcgcagctgattcagcacatcgacacccttatccgccgcaaactcagtcccgaacaagtatgcgcctacctgtgcaaacaccaccagatcacgctccaccacagcaccatttaccgctaccttcgccaagacaaaagcaacggcagcacgttgtggcaacatctcagaatatgcagcaaaccctaccgcaaacgctacggcagcacatggaccagaggcaaagtccccaaccgtgtcggcatagaaaaccgacccgctatcgtcgaccagaaatcccgtatcggcgattgggaagccgacaccattgtcggcaaaggacagaaaagcgcattattgaccttggtcgaacgcgttacccgctacaccatcatctgcaaattggatagcctcaaagccgaagacactgcctgggcagctgttagggcattaaaggcacataaagacagggtgcacaccattaccatggataacggcaaagagttctaccaacacaccaaaataaccaaagcattgaaagcggagacttatttttgtcgcccttaccattcttgggagaaagggctgaatgagaacaccaacggactcatccggcaatacttccccaaacaaaccgatttccgtaacatcagtgatcgggagatacgcagggttcaagatgagttgaaccaccgaccaagaaaaacacttggctacgaaacgccaagtgttttattcttgaatctgttccaaccactaatacactag

SEQ ID NO: 67537 - DNA, 624 bp, Neisseria meningitidis; identical to SEQ ID NO: 37513

SEQ ID NO: 67538 - DNA, 1242 bp, Neisseria meningitidis
atgcccaccaaaaccccttcactgttcggcggcgcgatgattatcgccggcacggtcatcggcgcaggtatgctcgccaacccgaccgccacatccggcgtatggtttaccggctcgctggccgtgttgctgtacacctggttttctatgctttccagcggcctgatgattttggaagtcaacacccattatccgcacggcgcaagtttcgacacgatggtcaaagacctgctcggacgcggctggaacatcatcaacggcatcgccgtcgccttcgttttatacctgcttacttacgcttatatcttcgtcggcggcgacctgaccgccaaaggcttaggcagcgcggcaggcggcgacgtttcactcaccgtcggacaactcgtcttcttcggcatcctcgccttttgcgtatgggcatccgcacgcttggtcgaccgcttcaccagcgtcctcatcggcggcatggtattaacctttatttgggcaaccggcggcctgattgccgatgccaaaatgcccgtcctgttcgacacccaagcccccgtcggcaccaactactggatttacgccgccaccgccctgcccgtctgccttgcgtcattcggtttccacggcaacgtctccagcctgctcaaatactttaaaggcgacgcgcccaaagtggctaaatccatctggacgggcacactgattgcgctggtaatttacgtcctctggcaaaccgccatccaaggcaacctgccgcgcaacgagttcgcccccgtgattgccgccgaagggcaagtctccgtcctcatcgaaaccctgtccaaattcgcccaaaccggcaatatggataaaatattgtccctattttcctacatggcgatcgccacctcgtttttaggtgtaacgctcggactcttcgactacatcgccgacatcttcaaatggaacgacagcgtgtccggccgcaccaaaaccgccgcgctgaccttcctgccgcctctaatttcctgcctgctcttccccaccggcttcgttaccgccatcggctacgtcggcctggcggcaaccgtctggacaggcatcatccccgccatgctgctctaccgttcgcgccaaaaattcggcgcaggcaaaacctataaagtttacggcggcttgtggctgatggtttgggtcttccttttcggcatcatcaacatcgccgcacaggtattgagccaaatggaactcgtccccgtatttaaaggataa

SEQ ID NO: 67539 - DNA, 2889 bp, Neisseria meningitidis
atgagtaacacaaccgtagaacaatttgccgccgagctgaaacgccccgtcgaagacctgttgaaacagttgaaagaagccggcgtcagcaaaaccggcggcggcgattccctgacgctggacgacaaacagcttctgaacgcctacctgaccaagaaaaacggcagcaacggcggcaccatcagcatccgccgcaccaaaaccgaagtcagcaccgttgacggcgtaaaagtcgaaacacgcaaacgcggacgcactgtcaacattccttctgccgaagagttggcagcacaggtaaaagccgcccaaacccaagccgcacctgtccggccggagcagacggcagaagacgcggcaaaagcccgagccgaagctgccgcacgtgcagaagcacgcgccaaagcggaagccgaagcggcaaaactgaaagcggcaaaagccggcggcaaagccaaggccgccgcacagaaacccaccgaagcaaaagccgaaaccgcacccgttgcggcggaaaccaaacccgccgaagaaagcaaagcggaaaaagcccaagccgacaaaataccgtctaaaaaacccgccgagcccaaagaaaaagccgccaagccgaaacacgagcgaaacggcaaaggcaaagatgccaaaaaaccggcgaaacctgccgcacccgccgccccgcaacccgtggtcagcgcggaagaacaggcgcaacgcgacgaagaggcgcgccgtgccgccgcacttcgcgcccaccaggaagccctgttgaaagagaaacaggaacgccaggcacgccgcgaagccatgaaacaacaggcagaacaacaggcaaaagccgcacaggaagccaaaaccggcagacagcgtcccgccaaacctgccgagaaaccgcaggcagccgcgccggccgtcgaaaacaaacctgtcaatccggcaaaagcgaaaaaagaagaccgccgcaaccgcgatgacgaaggtcaaggccgcaacgccaaaggcaaaggcggaaaaggcggacgcgaccgcaacaatgcacgcaatggcgacgacgagcgcgtacgcggcggtaaaaaaggcaaaaaactcaaactcgagccgaaccaacacgccttccaagcaccgaccgaacctgtcgtacacgaagttttggtgcctgaaaccattaccgttgccgacttggcacacaaaatggcagtcaaaggcgtggaagtggtcaaagccctgatgaagatgggcatgatggttaccatcaaccaatccatcgaccaagacaccgccctgattgtcgtcgaagaactcggacacatcggcaaacccgccgcagcggacgaccccgaagccttcttggacgagggtgcggaagcagtggaagccgaagcattgccgcgtccgcccgttgttaccgtgatgggtcacgtcgaccacggcaaaacctcgctgctggactacatccgccgtaccaaagtggtacagggcgaagcgggcggcattacgcagcacatcggcgcgtaccacgttgaaacccctcgcggcgtgattaccttcttggacaccccgggtcacgaagcctttaccgctatgcgcgcacgcggtgcgaaagcaaccgacatcgtgattcttgtggtcgccgccgacgacggtgtgatgccgcaaaccatcgaagcgattgcccacgccaaagcggcaggcgtaccgatggtggttgccgtcaacaaaatcgataaagaagccgccaacccagagcgtatccgccaagagctgaccgcacacgaagtcgtgcctgacgaatggggcggcgatgtacagtttatcgacgtttccgctaaaaaaggcctgaacatcgatgcattgctcgaggcagtcttgctcgaagccgaagttttggaactgaccgcacctgtcgatgcgcccgccaaaggcatcatcgtcgaggcgcgcttggacaaaggccgcggcgcggttgccacattgctggttcaaagcggtacgctgaaaaaaggcgacatgctgctggccggtacggcattcggcaaaatccgcgcgatggtcgatgaaaacggcaaatccattaccgaagccggcccgtccatccccgtcgaaatcctcggcttgtccgacgtaccgaatgcgggtgaagacgcgatggtattggcggacgagaaaaaagcgcgcgaaatcgccctcttccgccaaggcaaataccgcgacgtgcgccttgccaaacagcaggcggcgaagctggaaaatatgttcaacaatatgggcgaaacccaggcccaatctttgtcggtcatcatcaaggcagacgttcagggttcttacgaggctttggcgggcagcctgaaaaaactgtccaccgacgaggtgaaagtgaacgtattacacagcggcgtgagcggcattaccgaatcagatgtcaaccttgccatcgcttcgggcgcgttcattatcggctttaacgtgcgtgcagatgcctcttcgcgcaaacttgccgaaaatgaaaacgtggaaatccgctactacaacatcatctacgatgccatcgacgacgtgaaggcggcgatgagcggtatgctttccccggaagagaaagaacaggttaccggcacggtcgaaatccgtcaggtcatctccgtttccaaagtcggcaacattgcaggctgtatggttaccgacggcgtggtcaaacgcgattcccatgtccgcctcatccgcaacaacgtggtcatccacacgggcgaactggcttcgttgaaacgctataaagacgacgtcaaagaagtccgtatgggctttgagtgcggcctgatgattaaaggctacaacgaaattatggaaggcgaccaactcgaatgtttcgacatcgtcgaagtggcacgcaccctgtga

SEQ ID NO: 67540 - DNA, 456 bp, Neisseria meningitidis
atggatttgcgcaaattaaaaaaactgattgatttggttgaagaatcgggtatcgccgaaatcgaagtaaccgaaggcgaggaaaaagtccgcatcacccgaaccatcgccgccgcacccgtttacgccgcgcccgtacctgccgccgcgcaggccgtaacgcctgccgccgcacccgttgcggcatccgcgcccgccgccgcacctgccgcccgcgatttgtccgacgcgcaaaaatcacctatggtcggcacgttctaccgcgcacccggcccgaatgccgcgccttttgtcgaagtcggccaacaggttaaagccggcgacacgctgtgcatcatcgaagcgatgaagctgatgaacgaaatcgaagccgaaaaatccggcacggtcaaagaaattttggtcgaaaacggtacgcccgtcgaattcggcgaaccgctcttcatcatcggataa

SEQ ID NO: 67541 - DNA, 759 bp, Neisseria meningitidis
atgaaaatcacacccgtcaaagccttgaccgacaactacatctggatgatacaggaaggcaaccatgccgtctgcgtcgacccctccgaccccacacccgtattggaattcctcgtccgcaaccgactcatgcttgcccaaacatgggtaactcacccccaccccgaccacgaaggcggtgcggcggcactctggcgcggctacatggaatcgcccgtttacggcgaatccgacatcgaagcggcaacccacaccgtaaccgcaggcacccaatttaccttcggcgaagggttaatcaccgtttgggcaaccccgggccataccgaccgccacatcagctaccttatggaaacttcagacggcatacacgtcttttgcggcgacaccctgttttccgccggctgcggacgcgtgtttaccggcacaatcgaacagctttacgacagcttccaacgcttcaaccgcctgcctgaaaacaccctgttctatccggcgcacgaatacaccgccgccaacctgcgtttcgccgcccatatcgagccggacaacgccgacattcagacggcactgaaagcggcggcgcatacgcctaccctgcccgttaccctcgcgcacgaacgccgcgtcaatccgtttttgcgcgtcgacctgccgcacgtcagagaccgcgccgaggcattgagcgggaaaacgttaaacagcagcctcgatacctttgtcgcgctgcgtgaacttaaaaaccaataccggacgaaataa

SEQ ID NO: 67542 - DNA, 645 bp, Neisseria meningitidis
gtgcttgcctccgccatcgacttcatcctccatatcgaccaacacctgcttgcgctgtcggcgcaatacggtgtgtggatttatgcgattctgtttttgattgttttttgcgaaaccggcctgattgttacgcccttactgcccggcgattcgctgctgtttgccgccggcgggattgccgcgctgggcggtatggatattcatttgatggttgcattattaagccttgccgccatactcggcgacgcgctcaattttaccgtcggcaaatatttcggcggcaggctgttcgccaatcccgattctaaaatcttccgacgcgaatatctcgataaaacccaccgtttttacgaaaaacacggcgggaaaaccatcatcattgcccgttttgtacccatcgtccgcaccttcgccccctttgtcgccggtatggggaaaatgcactatgccaaatttatccgctacaacatcatcggtggcttgttgtgggttatcctgttttcttacgcgggctatttctttgccaacttccccgtcgtaaaaaacaatctgggcttggtgatgggcggcatcattattgtttccgtcctgccgggtgcggttgaaattgcccgcgccaaacttgcggtaaaatccaaacggtaa

SEQ ID NO: 67543 - DNA, 2607 bp, Neisseria meningitidis
atggctgccaaccaacgttaccgcaaaccgctgcccggtacggatttggaatactacgacgcgcgtgcggcgtgtgagggcatcaaacccggctcttacgacaagctgccttacacgagccgcattttggcggagaatttggtcaaccgcgcggacaaagtcgatttgccgacgctgcaaagctggctgggtcagctgattgagggaaaacaggaaatcgactttccttggtatccggcgcgggtggtgtgccacgatattctggggcagaccgcgttggtggatttggcaggtctgcgcgatgcgattgccgaaaaaggcggcgatcctgccaaagtgaatccggtggtgcaaacccagctcatcgtcgaccactcgctggcggtggaatgcagcggctacgaccccgatgcgttccgcaaaaaccgcgaaatcgaagacagacgtaacgaagaccgtttccacttcatcaactggacaaaaaccgcttttgaaaatgtggacgtgattccggcgggcaacggcatcatgcaccaaatcaatctagaaaaaatgtcgcccgtcgtccaagtcaaaaacggcgtggctttccccgatacctgcgtcggcacggattcgcacacgccacacgtcgatgcgctgggcgtgatttccgtgggcgtgggcggattggaagcggaaaccgtaatgctgggacgcgcgtccatgatgcgcctgcccgatattgtcggcgttgagctgaacggcaaacggaaggcgggcattacggcgacggatattgtgttggcactgaccgagtttctgcgcaaagaacgcgtggtcggggcgtttgtcgaattcttcggcgagggcgcgagaagcctgtctatcggcgaccgcgcgaccatttccaacatgacgccggagttcggcgcgactgccgcgatgttcgctattgatgagcaaaccattgattacttgaaactgaccggacgcgacgacgcgcaggtgaaattggtggaaacctacgccaaaaccgcaggcttgtgggcagatgccttgaaaaccgccgtttatccgcgcgttttgaaatttgatttgagcagcgtaacgcgcaatatggcaggcccaagtaacccgcatgcccgttttgcgaccgccgatttggcggcgaaagggctggcgaagccttacgaagagccttcggacggccaaatgcccgacggctcggtcatcatcgccgcgattaccagttgcaccaacacttccaacccgcgcaacgttgttgccgccgcgctcttggcacgcaatgccaaccgtctcggcttgaaacgcaaaccttgggtgaaatcttcgtttgccccgggttcaaaagtagccgaaatctatttgaaagaagcgggcctgttgcccgaaatggaaaaactcggcttcggtatcgtcgccttcgcctgcaccacctgcaacggcatgagtggcgcgctggatccgaaaatccagaaagaaatcatcgaccgcgatttgtacgccaccgccgtattatcaggcaaccgcaacttcgacggccgtatccacccgtatgcgaaacaggctttcctcgcttcgcctccgttggtcgttgcctacgcgctggcaggcagtatccgtttcgatattgaaaacgacgtactcggcgttgcagacggcaaggaaatccgcctgaaagacatttggcctgccgatgaagaaatcgatgccgtcgttgccgaatatgtgaaaccgcagcagttccgcgatgtgtatgtaccgatgttcgacaccggcacagcgcaaaaagcacccagtccgctgtacgattggcgtccgatgtccacctacatccgccgtccgccttactgggaaggcgcgctggcaggggaacgcacattaagaggtatgcgtccgctggcgattttgcccgacaacatcaccaccgaccacctctcgccgtccaatgcgattttggccgtcagtgccgcaggcgagtatttggcgaaaatgggtttgcctgaagaagacttcaactcttacgcaacccaccgcggcgaccacttgaccgcccaacgcgctaccttcgccaatccgaaactgtttaacgaaatggtgaaaaacgaagacggcagcgtgcgccaaggctcgttcgcccgcgtcgaacccgaaggcgaaaccatgcgcatgtgggaagccatcgaaacctatatgaaccgcaaacagccgctcatcatcattgccggtgcggactatggtcaaggctcaagccgcgactgggctgcaaaaggcgtacgcctcgccggcgtagaagcgattgttgccgaaggcttcgagcgtatccaccgcaccaaccttatcggcatgggcgtgttgccgctgcagttcaaacccgacaccaaccgccataccctgcaactggacggtacggaaacctacgacgtggtcggcgaacgcacaccgcgctgcgacctgaccctcgtgattcaccgtaaaaacggcgaaaccgtcgaagttcccgttacctgccgcctcgatactgcagaagaagtattggtatatgaagccggcggcgtgttgcaacggtttgcacaggattttttggaagggaacgcggcttag

SEQ ID NO: 67544 - DNA, 603 bp, Neisseria meningitidis
atgttcaacataccggctgttgccgtttcctatctgatcggctcactttctttcgccgtcatcgtttccaagtattacgggatggacgacccgcgcacctacggatcgggcaatcccggcgcgaccaatgttttacgcagcggcaaaaaaaaggcagccgcgctgacgctcttgggcgatgccgccaaaggtttgattgccgttttgcttgcacgcgtgcttcaagaaccgctcggtttatccgacagcgcaatcgctgccgtcgcactcgccgcgctggtcgggcatatgtggccggtgtttttcggatttaagggcggcaaaggcgtggcaacggcattgggcgtgcttttggcactctctcccgcaactgccttggtctgcgcgttgatttggcttgttatggcattcggcttcaaggtgtcctcccttgccgcattaaccgccacaatcgccgccccccttgctgcgctgttttttatgccccacctttcttggatttgggcgacgctccttatcgccctgctggtgttgttccgccacaaaagcaatatcagcaacctgcttaaaggcaaagaaggcaaaatcggcgaaaaacgctga

SEQ ID NO: 67545 - DNA, 1371 bp, Neisseria meningitidis
atgatcaaccccatcgcctcgctttcccctttagatggccgttatgcccaatccgttgaagcattgcgcccgattttttccgaatacggcctgatgaaagcgcgcgtcaaagtcgaattaaactggctcaaagccctcgccgccgagccgaagattgccgaagtgccgcccttcagtgccgaaacgcttgccgaaatcgacacggtgattgaaaacttttcattggaagacgcggccgccgtcaaagccatcgaagccacgaccaatcatgatgtcaaagccattgaatattggctgaaaaaacgttttgccgaagtgccggaagtcgccgccgtgagtgagttcatccacttcgcctgcaccagcgaagacatcaacaacctgtcccacgctttaatgctgcaagaagcgcgtgaggctgttttgctgccgaagctggccgaaatcatcgaaaaactgaccgctatggcgcacgaccttgccgccgtcccgatgatgagccgcacccacggccagcccgccacgccgaccactttgggcaaagaaaccgccaacgtcgtttaccgcctgcaacgccagtttaaaaacctgcaagcgcaagagttcctcggcaaaatcaacggcgcggtcggcaactacaacgcccatatggttgcttatcccgatgtggattgggaaacccactgccgcaactttgtcgaaatcagcctcggtctgaccttcaacccctacaccatccaaatcgaaccgcacgactatatggcggaattcttccaaaccctcagccgcatcaacacgattctcatcgactttaaccgcgacgtttggggttatatttcattgggttacttcaaacaaaaagtcaaagcgggcgaagtcggttcttccaccatgccgcacaaagtcaaccccatcgactttgaaaactccgaaggaaacctcggtatggcaaacgccgtattgggctttttgtccgaaaaactgccgatttcccgctggcagcgcgacctgaccgacagcaccgtcttacgcaatatgggcgtgggcgtgggctatgccgtgttgggtttcgccgcccacctgcgcggtctgaacaagctcgaacccaaccctgccgcgcttgccgccgatttggatgccacttgggaactgctcgccgagccgattcaaaccgtgatgcgccgttacggtgtcgccaatccttacgaaaaactgaaagacctgacgcgcggcaaaggcggcattacgcccgaagtgctgaaaggctttatcggatcgctggaaatccccgtcgaagccaaagcaaaattgcttgagctgacccccgcactgtatgtgggcaaggctgaagcgttggcgaaacggatttga

SEQ ID NO: 67546 - DNA, 558 bp, Neisseria meningitidis
atgatcaacgatattcaaaaaacagccgaaggcaagatgcagcgttcggtcgaagtactgaaagaaaatctggcgaaagtgcgtaccggccgcgcgcataccggcctgctcgaccaagtggaagtcgaatactggggcagcatggtccccgtcagccaagttgccaacgtaacgcttctggacgcgcgcaccatcggcgtgaaaccgtttgagggcaatatggcggccaaagtcgagaaagccatccgcgattcaaacttgggactgaacccggcagctgtcggcgacctgatccgcgtgccgatgcccatgctgaccgaggaacgccgcaaagacctgattaaagtcgtacgcggcgaagcggaagaaggccgcgtctccatccgcaacgtgcgccgcgatgccaacgaccacatcaaaaaactcctcaaagacaaagaaatttccgaagacgaggcacgtcgcggcgaagaagcggttcaaaaactgaccgacaaatacattaccgaagccgacaaactcctgactgccaaagaagaagatttgatggcaatttaa

SEQ ID NO: 67547 - DNA, 819 bp, Neisseria meningitidis
atgaaaggtatggataaattgagataccaacaggattttttaaatatccgccccatttttacagccggcgaacaagaatacctgaccggattgtccgatcggcttcctttatctgttttaacgggctccgtgcgtaatattgaagaaatcggtatcgattttgtatatagttctgccaaattggaaggaaacacttataatcaatacgatacgcaggcattgcttaaactcgggcaaaccgcaggcgggaagttatattcggatgccgtaatgttaatcaacctgagggaaagttaccggcacctgctgtccggtttggacagccccgagccgtttgactggttggatttcttaaaaaccacccacagcctgatttccgaaaacttactggaaaaaggctccggcggcgtagtccgccgcgacagcgttaccataagcgggacagactacacccctttatctaacccgcaaagtttggatacggaattaaaatggttgcttcaagaagctcccaaaatagaaaatcctttcgaccgcgccgtttatctccataataatttggcgtatcttcaatattttaaagattgcaataaacgtactgccagaaactgcatgaccctatcgctgatgcgctccggtttttttccttgcgtattcgcccccgacagttatcccgcctatgccgaggctgtcgtagcccattacgaaaccggcgattacggtttattcaagaaatattttatttcggcatacgaaaataccgtaaataagtacggcccacagcctgatatggatattttccgcaacttctccctttaa

SEQ ID NO: 67548 - DNA, 207 bp, Neisseria meningitidis; identical to SEQ ID NO: 37599

SEQ ID NO: 67549 - DNA, 906 bp, Neisseria meningitidis; identical to SEQ ID NO: 60626

SEQ ID NO: 67550 - DNA, 1176 bp, Neisseria meningitidis
atgcagaatatttttgaccctttggttattcgtggaaaatcccttacccccatcgtgcaaggcggtatgggggtcggtgtttccgcatcgggtttatccagcgcggtggcacgtgaaaacggtatcggaacgattgccagtgtggatttgcgccaccttcacgaagacctactcgccgaatcacaaatcaatccgagtgaagagaaatatacatctttgaactgtaccgcattagacagggaaatccaaaaagccaaaagcgcttcagagggaaaaggactgattgcggtcaacgtgatgaaggcagtcaaagaccacgccgcgtatgtccgccaggcttgcgaatcaggggcggatgcggttgtaatgggtgccggtctgcctttagacctgccggaaatgaccgagggctatcataaagatgtcgcgctgctgccgattctgtccgaatcgcgcggtattaatatcgtcttgaaacgttggatgaaaaaaggcatattgcccgatgcgattgtagtcgaacatcctgcccacgcggccggacatttgggtgcatcaaccgttgaaggcgtaaacgatgccaagttcgacttcaaacgcgtgattgaggaaacgtttgaagttttcaaaagtttagggctggaaagcgaaaaaatcccgcttattcttgcgggaggcatggcaaattttgaaaaagtcaaaaccgccctaaagaactggggagcatccgccgttcaaatcggtacggcttttgccgttaccgaagaaggagatgcacaccttaacttcaaaaaaacgctcgccggtgcggaaactgaaaaagtagtcgaatttatgtctgttgccggtttgccggcgcgcggtgtccgcaccaaattcctagacagctacatcaagcgtgaaagcaaacttcagacaaacgccaaagccgacccgcgccgctgtacccaaggtttaaactgcctaaccagttgcggtctgcgcgacgggctttccaaagcaggacagttctgtattgatatccagcttgccgccgcattccgtggagaagtagataaaggcctgttcttcagaggtaaagacccgctgcccttcggcaatgccatccgcaccgtccgcgagacgatacaatatctgctgacggggagcgaacctgttgcaacgctcggacgctga

SEQ ID NO: 67551 - DNA, 198 bp, Neisseria meningitidis; identical to SEQ ID NO: 36305

SEQ ID NO: 67552 - DNA, 537 bp, Neisseria meningitidis
atggctgcaagcgtccgtatcttaggcatcgacccgggcagtcgcgtaacgggtttcggtgtcatcgatgtcagggggcgggatcatttttacgtcgcctccggctgcatcaaaacgcctgccgatgcgcctctggcagacaggattgccgtcatcgtccggcacatcggcgaagtcattaccgtttacaagcctcaacaggcggcagtggaacaggtgttcgtcaacgtcaatccggcatcgacgctgatgctcggtcaggctaggggcgcggcattggcggcattggtcagccataagctgcccgtttcggaatacacggccttgcaggtcaaacaggcggtagtcggcaagggcaaggcggcaaaagaacaggtgcagcatatggtggtgcagatgttgggactttcgggaacgccccagccggatgcggcggacggtcttgccgtcgcgctgacccacgccttacgcaaccacgggcttgccgccaaactcaatccttcggggatgcaggtcaagcgcggcaggtttcaatag

SEQ ID NO: 67553 - DNA, 657 bp, Neisseria meningitidis; identical to SEQ ID NO: 39384

SEQ ID NO: 67554 - DNA, 723 bp, Neisseria meningitidis; identical to SEQ ID NO: 45345

SEQ ID NO: 67555 - DNA, 447 bp, Neisseria meningitidis
atggatcaggcaaaacgtacagcctatgttaaaattattaacgctttattcgacggagctgtcaaggtgcagcccagtcaaattaccgaaaccgtcgttgatatggtggacaagatgtttgacgaaattgcgacctgccatgagcgcatcaggccgatggcggtgttggcagacggtattgcaggaagtattgtcaaacttgcgccaaacgaaattccgcttatttttgggaattcgtcgtttggaagctatctgaaaagtaaaacccgtgatgaagtgtttaaagtgttgaagcaaagcaaggttaataatgccggtaaagtccttgaggcattttacgaaagctggttaaagtacactgcaaaagaccgccgtctgaaagtctgcatcgtaaccgcgcaatcccgttggcgttcgcgctttgaaatcgaattgctgggaatttaa

SEQ ID NO: 67556 - DNA, 1134 bp, Neisseria meningitidis
atgtttaaaaaattcaaaccggtactgttgtcattttttgcacttgtatttgccttttggctgggaacaggtattgcctatgagattaatccgcgttggtttttgagcgatacggcaactgaagtacctgaaaatccgaatgcttttgtggcgaaacttgcccgcctgttccgaaatgccgacagggcggttgtcatcgtgaaggaatcgatgaggacggaggaaagtcttgccggaactgcggatgacggtccgttgcagtcggagaaggattatctcgcgctcgctatccggctcagtcgtttgaaagaaaaggcgaaatggtttcacgtaacggagcaggaacatggggaagaggtctggctgaattaccatatcggcgagggcggtttggttgcggtttcgctttcgcaacgctcgccggaagcgtttgttaatgccgaatatctgtatcggaacgatcgtccgttttctgtaaatgtgtacggcggaacggctcacggagaaaattatgaaacgacaggagaatatcgggttgtttggcaaccggacggttcggtatttgatgcgtcggggtacgggaaaatcggggaagatgtttatgagcattgcctcgggtgttatcagatggcccaggtatatttggcgaaatatcgggatgtcgcgaatgatgagcagaaggtttgggacttccgcgaagagagcaaccggattgcgtcggactcgcgcgattctgtgttttatcagaatatgcgggaattgatgccccgggggatgaaggcgaacagtcttgtggtcggctatgatgcggacggtctgccgcaaaaagtctattggagtttcgacaatggaaaaaaacgccagagtttcgaatattatttgaaaaacggaaatctttttattgcacaatcttcgacggtagcattgaaagcggatggcgtaacggcggatatgcagacctatcatgcgcaacagacgtggtatttggatggcgggcggattgtccgcgaagagaaacagggagacagactgcctgattttcctttgaacttggaagatttggaaaaagaggtgagccgttatgcagaggctgcggcgagacgttcgggcggcaggcgcgacctttctcactga

SEQ ID NO: 67557 - DNA, 924 bp, Neisseria meningitidis
atggatattgaaaccttccttgcaggggaacgcgccgccgacggataccgttgcggcttcgtggcgattgtcggtcgtccgaacgtgggcaaatcaacgctgatgaaccatctcatcggtcagaaaatcagtattaccagcaaaaaggcgcagacgacgcgcaaccgcgtaacggggatttataccgacgataccgcgcagttcgtgtttgtcgatacgcccggctttcaaaccgaccaccgcaacgcgctcaacgacaggctgaatcaaaacgttaccgaggcactcggcggtgtggatgccgtagttttcgtcgtggaagcgatgcgttttaccgatgccgaccgcgtcgtgttgaaacaactgcccaagcacacgccggtcattttagtggtcaacaaaatcgataaggacaaggcgaaagaccgttacgcgctagaaacgtttgttgcccaagtgcgcgccgaatttgaatttgcggcggcggaggcggtcagcgcgaaacacggattgcggattgccaacctgttggagctgattaagccgtatctgcccgaaagcgtgccgatgtatcccgaagatatggttacggacaaatcggcgcgttttttagcgatggaaatcgtgcgtgaaaaattgttccgctatttgggcgaggaattgccttatgcgatgaatgtcgaggtggagcagtttgaggaggaagacggtttaaaccgcatctacatcgccgttttggtcgataaggaaagccaaaaggcgattttaatcggcaaaggcggggagcgtttgaagaaaatttccaccgaagcgcggttggatatggaaaaactgtttgataccaaagtatttttgaaggtatgggtcaaagtcaaatccggttgggcggacgacatccgcttcctgcgcgagctgggtttgtag

SEQ ID NO: 67558 - DNA, 654 bp, Neisseria meningitidis; identical to SEQ ID NO: 55457

SEQ ID NO: 67559 - DNA, 192 bp, Neisseria meningitidis; identical to SEQ ID NO: 37615

SEQ ID NO: 67560 - DNA, 513 bp, Neisseria meningitidis; identical to SEQ ID NO: 40766

SEQ ID NO: 67561 - DNA, 696 bp, Neisseria meningitidis; identical to SEQ ID NO: 44720

SEQ ID NO: 67562 - DNA, 624 bp, Neisseria meningitidis
atggaacgcaaagaacgcctgcgtgcaggcattgccgcgatggggctggatatttcggaaacggcacaggacaggcttttggcctatgtggatctgttgaaaaagtggaacaaaacttacaatctgaccgccctgcgcgacgaggaaaaaatgattgtccatcatcttttggacagcctgacgctgctgccccatatcgagggtgtgcaaacgatgctggatgtcggttcgggcggcggtcagcccggcattccggcggcggtgtgccgtccggatgtgcaaataacccttttggatgcgaatacgaagaaaacggcttttttacagcaggcggttatcgagttggggttggacaatgtgcgcgtggtatccggacgcgtggaggcggtttcggacgtgcgtgccgatgtggttaccagccgtgcgtttgcagaactggcggattttgtgtcgtggacggtgcatctgttgaaagacggcggctactgggcggcgatgaagggcgtgtatccgcaggaagaaatcggccgcctgccgcaggatgtgtgcgttgaaaaagtccaaaggctcgacgtgccgggcttggatgcggaacgccatatcgtcatcctgagcaagcgttga

SEQ ID NO: 67563 - DNA, 1434 bp, Neisseria meningitidis
atgtctcaatatgatgtagtagtgattggtgcaggcccgggcggatacgttgccgccatccgtgccgcacaactgggtttcaaaactgcctgtgtcgatgcaggcgttaacaaagcaggcaatgcccctgcattgggcggtacttgcttgaacgtaggttgtatcccttctaaagccctgttgcaatccagcgaacatttccacgctgcgcaacacgattttgccgaacacggtatcactgtcggtgacgtaaaattcgacgcggccaaaatgattgagcgcaaagatgccatcgtgaccaaactgaccggcggcgtgaaattcctgttccaaaaaaataaagtaaccagcctgttcggtacggcttcctttgccggtaaaaatggcgatgcttaccaaatcgaagtcgataacaaaggagagaaaaccgttatcgaagccaaacacgtcatcgtagcgaccggttccgtaccgcgtccgctgccacaagtcgctatcgacaatgtgaacgtattggacaacgaaggcgcattgaacctgaccgaagtacctgccaaactcggcgtgatcggttccggtgtgattggtttggaaatgggttccgtatggaaccgcgtgggtgcggaagttaccattcttgaagccgcgccgaccttcctggctgccgccgaccaacaaatcgccaaagaagccttcaaatacttcaccaaagagcaaggtctgagcatcgaattgggcgtgaaaatcggcgacatcaagtctgaaggcaaaggtgtttccgttgcttacgaaactgctgctggcgaagccaaaaccgaagtattcgacaaactgatcgttgccatcggccgtattccaaacaccaaaggcctgaacgcggaagccgtaggcttggaaaaagacgagcgcggctttatcaaagtagatggcgaatgccgtaccaacctgcctaacgtatgggcaatcggcgacgtggttcgcggcccgatgttggcacacaaagccagcgacgaaggcgttgccgttgccgaacgcattgccggtcaaaaaccgcatatcgacttcaacaacgtaccgttcgtgatttacaccgatcctgaaatcgcttgggtgggtaaaaccgaagagcagctcaaagccgaaggcgtggagtacaaaaaaggtacttcaggttttggtgcgaatggtcgcgcattggcaatgggcaaagccaaaggtacggttaaagtgttggcagatgccaaaaccgaccgcatcttgggcgtacacatgattggtccggttgtcagcgaattggttaccgaaggcgtgactgcgctcgaattcttcgccagcagcgaagacatcgcccgcattatccatgcccacccaaccttgtccgaagtggttcacgaagctgcattggcggccgacaaacgcgctttgcacggttga

SEQ ID NO: 67564 - DNA, 1446 bp, Neisseria meningitidis
atgacccaatacacattgaaacaggcaagcgtcctgttgcagtccaaacagatttccgccgtcgagctggcaagcgcataccttgccgccattgccgaaaaaaatcccgccctcaacggctacatcaccatcgaccaagataaaaccctcgcagaagcccgtgccgccgacaaacgtatcgcgcagggcaacgcttcggcacttaccggcgttcccgtcgcctacaaagacattttctgccaaaccggctggcgcagcgcgtgcgcttccaaaatgctcgacaacttcatctccccctacaccgccaccgtcgtccaaaacctgctcgacgaaggtatggtaacgctcggccgcaccaatatggatgagttcgctatgggttcgaccaatgaaaactcattctacggtgcagccaaaaacccatggaatcttgagcacgtccccggcggttcgtcaggcggttccgccgccgtcgttgccgcgcgcctcgcccctgccgcgctcggttcggacaccggcggctctatccgccaacccgcatcgcactgcggcattaccggcatcaaacccacatacggcacggtttcccgcttcggtatggtcgcctacgcctccagcttcgatcaaaccggcccgatggcgcaaactgccgaagactgcgcgattctgttaaacgcgatggcaggtttcgaccccaaagactccaccagcctcgagcgcgaaaaagaagactacacccgcgatttgaaccaaccgctcaaaggtttgaaaatcggcctgcccaaagaatatttcggcgaaggcaacagcgccgatgttctgacggcattgcaaaacaccattgatttgctgaaagcccaaggcgcggaattgattgaagtttccctgccgcaaaccaagctgtccatccccgcctactacgtcctcgcctccgcagaagccagcaccaacctttcacgttacgacggcgtacgttacggacaccgtgccgcccaattcgccgatttggaagaaatgtacggcaaaacccgcgccgaaggtttcggcagcgaagtcaaacgccgcatcatgatcggcacttatgtactgtcgcacggctactacgatgcctactatctcaaagcccaaaaactgcgccgcctcgttgccgatgattttcagacggcatttgcacggtgcgacctcatcctcgcgccgaccgcacccactgcagccccaaaaatcggagcggatgcttcgccggttgaaacctacttgagcgatatctacaccatcgccgtcaacctcgccggactgcccgcattgaccctgcccgcaggcttcagcggcggcggactgcccgtcggcgttcagcttgtcggcaactacttcgccgaagccaaaatcctcggtgcggcgcatcaaatccaactcaacagcgattggcacggcaaacgacccgaatga

SEQ ID NO: 67565 - DNA, 762 bp, Neisseria meningitidis
atgaccgaattcgtcgtattgattccggcgcggctggattcgtcgcgcctgcccggaaaagccttggcggacatccacggcaaaccgatggtcgtgcgcgttgccgaacaggcggcaaaaagtaaagctgtgcgcgtcgtcgttgccaccgaccatcccgatattcagacggcctgtcaggcgcacggcgtcgaagtcgtcatgacttcaaaccggcacgaaagcggcacgacgcgccttgccgaagcctctgccgcgctgaagctgccgccgcatctggtggttgtcaacgtacagggcgacgagccgctgattgcacctgaactcatcgaccgcaccgccgaagtactcgtcgaaaacaacgtccaaatggcgaccgccgcccacgaattgcacgatttcgacgaattgatgaatcccaatgccgtcaaagttgtcctcgacaaaaaccgcaacgccatctacttcagccgcgccccgattccctatccgcgcgatgcgatgcgtgcaggaaaacgcgaaatgccgtttgaaaccgccgtcctgcgccatatcggcatctacgcctaccgcgtcggcttcctgcaacgctacaccgaaatgagcgtttcgccgctggaaaccattgaatcgctggagcaactgcgtgtcctgtggcacggctacccgattgccgtcgaaaccgccaaagaagctcctgccgccggcgtagatacgcaggaggatttggacaggattcgcgctgtatttcagactatataa

SEQ ID NO: 67566 - DNA, 324 bp, Neisseria meningitidis; identical to SEQ ID NO: 37526

SEQ ID NO: 67567 - DNA, 1404 bp, Neisseria meningitidis
atgaacaatcccgacttaccctatcggcaggccttagaacgcctgtctcaaaaacaatataactttaccgaagtccgccgcctgcttacagaggcagcatcggcaggtcatcccgccgccgcattcgagttggcaaaacacctgcttgatacaaacagcccctaccaagactacaaacagggcatagaaatgctccgcatcgccgccgaacagggacatccctacgcgcgttacaatctggcatatatccaagaattggaaggcgcgcgcccggaaaccctgataccgctttacagaccgttggcagaggaaggactgcccgaagcacaagtccgcctgatgtaccttctgtatgcgtcccgacattttgaagaagccctgaaatgggcaaaaacaagcgcaaaaaacaacaacccccacgggcaatacctgcttgcccaatactgccgctacggcacgccgccggattttgaaacggcgcacctgctctaccgaaaagcggcggcacaaggcttgccggaagcacattggcagctcgggctgcaataccgtttcggacaagggacgaaagccgacacggcacaggccgtcaatcatttgcgcgccgccgcacaacaaggatacattcccgcctacaccccgcttgccgagctcatcctacctacggctcctgatgaagccgttcactggtttcaacaggcggcacaggaaaatgaccccgatgcccatgccgcacttgccgacatctacctgcaaggcaagcatccggaaagaaactacaaacttgccctgcatcacgccgaagcagccgccgccgaacgccatcccgaaggtttgcggatactgggcgacatctgccgctacagtttgggcatagcccccgatacggaaaaagcccggcattattatcggcaggcagccgaagccggcagcctttccgcctatcagaaactcatatccgacagcgcgttaaaccatcctaaccaatacggcggcattaaagattccgccatcaggcggcaaaggacagaacggctttatcaaaaagcccaagccctgcattacggattacaatgcgcgcccgaatacgcagccgcgctcaaactctacacagaagccgcagaactcggacacagcaaagcccaaaccaatctgggcagcatgtattacttcggacagggtatgaccgccgactacaatgaagcacgcaaatggtttgaaaaagccgccgcaaaaaaagacagtatggcgttctacaacctcgcctgcatccattacagcggacacggtgtcgggccggacaaagaaaaagcctgccgctacctgcaagaagccataaacaacggatacgggcaaaaaagcgtcctgcaagaactgctgcaacaatggcaaaatgccgtctga

SEQ ID NO: 67568 - DNA, 1179 bp, Neisseria meningitidis
atgacaggcaaaacaggccgcaacggcagtacccaagcgcaacccgaacgcgtcatgctggtgggcgtaatgttggacaaagatggtacgggcagcagtgccgcccgtctgaacggttttcagacggcattggcggaagctgtcgagctggtcaaagcggcgggcggcgattccgtgcgcgtggagactgccaaacgcgaccgtccgcacaccgcgctgtttgtcggcacgggcaaggcggcggagctgtcggaagcagttgccgcagacggcatcgatttggtcgtattcaaccacgaacttacgcccacgcaggaacgcaatttggaaaaaatcctccaatgccgcgtattggacagagtggggctgattctggcgattttcgcccgccgcgcccgcacgcaggaaggcaggctgcaagtcgagttggcacaattgagccatttggcgggacgcttgatacgcggttacggccatctgcagagccagcgcggcggtatcggcatgaaaggccccggcgaaaccaaactggaaaccgaccgccgattgatcgcccatcggatcaatgccttgaaaaaacagcttgccaacctcaaaaaacagcgcgccctgcgccgcaagtcccgcgaatcgggcacaatcaaaacgtttgcgctggtcggctataccaatgtcggcaaatccagcctgttcaaccggctgaccaagtcgggcatatatgcgaaagaccagcttttcgccacactcgacacgacggcgcggcggctgtacatcagtcccgaatgcagcattatcctgaccgataccgtcggattcgtcagcgatctgccgcacaaactgatttccgccttttccgccacgctggaagaaaccgcgcaagccgatgtgctgctgcacgtcgtcgatgccgccgctccgaacagcggacagcagattgaagacgtggaaaacgtactgcaagaaatccatgccggcgatattccgtgcatcaaggtgtacaacaaaaccgacctgctgccgtctgaagaacaaaacacgggcatatggcgcgacgctgcgggaaaaattgccgccgtccgcatttccgttgctgaaaataccggtatagacgcactgcgcgaagccattgccgagtcttgtgccgccgcaccaaacacagacgaaaccgaaatgccatga

SEQ ID NO: 67569 - DNA, 462 bp, Neisseria meningitidis
atgctgctggtgctggaattttgggtcggcgtgtcggcggtgggcatacttgcgttgtttttatggcttttgccacgttttgccgccattagcgaaaacctgtatttccgcctgaacaacagcttggaatgcgacaaccactttatccgaaaaggagaccggcggcagctgtaccgccattacggactggttgcgcgcctgcgtgtgctgatttccaaccgcgaagccttcggctatctctgcgtcggcgcggcgatgggtattttgttcggctttgcttttgtgatgatgacgctcaaaggctacagcagcgcggggcatgtctattcggtcggcacttatctgtggatgtttgccatgagtttggacgacgtgccgcgattggtcgaacaatattccaatttgaaagacatcggacaacggatagggggattggaacggaacatcaaagccggaacttga

SEQ ID NO: 67570 - DNA, 330 bp, Neisseria meningitidis; identical to SEQ ID NO: 43091

SEQ ID NO: 67571 - DNA, 759 bp, Neisseria meningitidis; identical to SEQ ID NO: 39063

SEQ ID NO: 67572 - DNA, 1860 bp, Neisseria meningitidis
atgccagaataccgctccaaaacctctacccacggccgcaatatggcaggcgcacgcgcattgtggcgtgcgaccggcgtaatggaaaccgacttcggcaaaccgatcatcgccgttgccaactccttcacccaattcgtgcccggccatgtccacctgcacaacatgggccaactggttgcccgcgaaatcgaaaaagcaggcgcaatcgccaaagaattcaacaccatcgccatcgacgacggcatcgctatgggacacagcggtatgctctactccctacctagccgcgatttgattgccgactccatcgaatatatggtcaacgcccactgcgccgacgcgctggtgtgcatttccaactgcgacaaaatcacccccggaatgctgattgccgccatgcgcctgaacatccccaccatcttcgtttccggcgggccgatggaggcgggcaaagtcatcggcgtggccaacatccagcccgaacgccgcttggacttgattgacgcgatgattgaatcggcggacgacaatgtcagcaaccggcaagtcgaagaagtcgagcaaaacgcctgcccgacctgcggctcctgctccggcatgtttactgccaactccatgaactgtctgaccgaagcactcggtttgtccctgcccggcaacggttcgtatttggcgacccacgccggccgcaaagaattgttcctcgaagccggccgcatgattgtcgaaatcaccaaacgctattacgagcaaaacgacgaaaccgtgctgccgcgcagcatcgccaccaaaaaagcgtttgaaaacgctatgacgatggacatcgccatgggcggctctaccaataccattttgcacttgctcgccgttgccaacgaagccggtgtcgatttcaaaatggccgacatcgaccgcttaagccgcgtcgtgccctgcatctgcaaaaccgcgcccaacaaccacgactactatatggaagacgtgcaccgcgcaggcggcatcttcgccatcctgaaagaactggacaaagcaggcaaattgcacaccgacgtgtacaccattcacgcgccgacactgaaagacgcaattgaaaaatgggacgtaaccaatcccgaaaacacccgcgccatcgaacgcttcaaagccgcacccggcggcgtacgcaccacacaagcgttctcgcaaaaccgtatgtggaaaaccctcgacctcgaccgcgaaaaaggctgtatccgcgatgtggcacacgcctactcgcaagacggcggtttggcggtcttgttcggcaatatcgccgagcgcggttgcgtagtgaaaaccgcaggcgtggacgagagcatcctcaaattcatcggccgcgcgcgcgtgtttgaaagccaagaagacgcagtagaaggcattttgggcaaccaaatcgtcgccggcgacatcgtcatcatccgctacgaaggcccgaaaggcggcccgggcatgcaggaaatgctgtatccgacttcctacctgaaatctaaaggcctcggcaaagcctgcgctctcttaaccgacggacgcttctccggcggcacatcaggtttgtccatcggacacgcctcgcccgaagcggcggaaggtggcgcgatcggtttggtacacgaaggcgataccgtcgaaatcgacatccccaaccgcagcatccaccttgccatttccgatgaagagcttgccgcacgccgtgccgaaatggaagcgcgcggcagcaaagcatggaagcctaaaaaccgcgaccgctacgtctccgccgcattaagagcttacggcgcgatggcgacttccgccgacaaaggcgcggtgcgcgacgtagcgcaaatcgaaagataa

SEQ ID NO: 67573 - DNA, 957 bp, Neisseria meningitidis
atgaaagaatttgacttcatcaaacggtatttgcaaacaggcacggataatgatgtcgtattgggcataggcgacgatgcggcgattgtccgcccgcgtgaaggcttcgatttgtgtttcagtgcggatatgcttttgaaggacaggcatttttttgcagatgtcaaacctgaagacttggcttggaaggttttggccgtcaatatttcagatatggcggcgatgggtgcgataccgcgttgggtgttgctgagcgcggctttgcccgaattggatgaggtatggctgaaacggttttgcggcagctttttcggtttggcaaaaaagtttggcgtaacgttaatcggcggcgatacgaccaagggcgatatggcgttcaatgtaaccattatcggcgaattgccgaagggtagggcgttgcggcgtgatgcggcggttgcgggcgacgatatttgggtgtcggggcgtgtcggtatggcggcggcggctttgaactgccgtctgaaacggtgtgtgttgccggatgatgtgtttgccgaatgcgaacaaaagctgctccgccccgagtcaagggttgggctggggcttgcgctgttgccgtttgcccgggcggcgcaggatgtttcagacggcctcgcgcaagatttggggcatatcctgaccgcttccggcgtgggggcggaaatttgggccgattcgctgccgtctttatccgtattgaaagatattttgccccgagcgcaatggctgtcttatactttggcgggcggcgacgattacgagctggtgtttaccgcgccggaaagttgccgcagccgcgtgcttgatgcggcagaacggtgcggcgtgccggtaacgcgcatcggcaaaatcaacggaggatgccgtctgaaggttttagatgccgacggcagggaattggaactacattctttaggattcgatcattttggctga

SEQ ID NO: 67574 - DNA, 1467 bp, Neisseria meningitidis
atgatgaaattgggtttcaaaccgatacccctcgccattgccgcagtattgtgcgccctggttttggcactgcccgtacccgacggggtcaagcctcaggcttggacgctgctggccatgtttgtcggtgtgattgccgccattatcggcaaggccatgccgttgggcgcgctgtcgattattgccgtcgggttggtcgcagtaaccggcgtaaccgccgacaaaccgggcgcggcgatgagcgatgcgttgagtgcgttcgccaatccgttgatttggctgattgccatcgcagttatgatttcgcgcggtttgctcaaaacagggctggggatgcgtatcggatatttgtttatcgccgtttttggaagaaaaacgctgggcatcggttacagtctcgctctttccgaactgctgctggctcccgttaccccttccaataccgcgcgcggcggcggcattatacatccgattatgcagtcgattgccggcagttacggctccaatcccgcaaaaggcacagaaggcaagatgggtaaatatttggctttggtcaactatcattccaatcccatttcgtcggctatgtttattactgcaactgcccccaaccctttaatcgtcaacttgattgccgaaaatttaggcagtagtttccgtctttcttggggggcgtgggcgtgggcaatggctgttcccggcgttatcgcctttttcgttatgcctttgattttatattttttgtatccgcctgaaattaaagaaacgcccaatgccgttcaatttgccaaagaccgtctgagggagatgggtaaaatgtcggcagacgaaatcattatggcggtcattttcggtatcttgttgctgttgtgggcagatgttcccgcccttattaccggcaatcacgcttttagtatcaacgccaccgccaccgcatttatcggattaagcctgcttttgctttctggtgtattgacttgggacgatgttttgaaagaaaaaagtgcgtgggatacgattatttggtttggcgcattgattatgatggccgcatttttaaataaactcggactgattaaatggttctccggagtgttggcggaaagtgtcggcggtttgggcgttagcggcacggctgcgggcgtaatcctcgtgcttgcttatatgtatgcgcattatatgtttgccagtactactgcacatattaccgctatgttcggcgcatttctcgctgctgccgtttcactgaatgcccctgcgatgccgaccgcgctgatgatggcggccgcatccaacattatgatgaccctcactcattatgcgaccggtacttcgcctgtgattttcggttcgggctacaccacaatgggagaatggtggaaggcgggttttatcatgagcgtagtcaattttctgatttttttcgttatcggcagcatttggtggaaagttctggggtattggtaa

SEQ ID NO: 67575 - DNA, 132 bp, Neisseria meningitidis; identical to SEQ ID NO: 48615

SEQ ID NO: 67576 - DNA, 1782 bp, Neisseria meningitidis
atgccttatttcgccctgtttgacgatgccgtaagcggccgcgcaaaacgctatcaaaatcatgtggaaagccgttttttccgtcccgaagaactcgatgctttggacggcgcgctgcaatcgggctggcaaaaagggctgcatgccgtgttgtttgcagactacggattcggtttgccgctgacgggggtcgagtccgaacgcggcggcaaccttgccctgcactggtttgccgactgcgccgacaccgatgccgcaagctggcttgcccgacactcagacggcctccccgccggcatttccacgccgcaatcctccgtatccgaagccgattacctcgaccatatccgccaaatccacgaagccatccgacgcggcgacacctatcaaatcaactacactacccgcctgcacctgcaagcctacggcaatcccgtcaaactttaccgccgcctgcgccagcccgtcccctatgccgtcttgtcccacctgcccgatgcggaggggcaatccgcgtggacgctgtgtttctcgcccgaactcttcctcaacatcgcttcagacggcaccatcagcaccgaaccgatgaaaggcaccgcgccgattttgggcgacggacaagacgaacgccgcgccgccgaattgcaagccgacccgaaaaaccgcgccgaaaacgtgatgattgtcgatttgctgcgcaacgacctcggcaaaatcgcccaaatcggcaaagtatgcgtacccgagccgtttaaagtatcacgtttcggcagcgtttggcagatgaccagcaccatccaagcccaagccctgccggacacctcgttcgccgacatcctccgcgccgccttcccctgcggcagcatcaccggcgcgcccaaaaaaatgagtatgcagattatcgaatctctcgaagccgaaccgcgcggactttatacgggcagcatcggctatttgaacccgagttctggcggcttggggtttgaaggcgcgttcaacgtcgtcatccgcaccttatcgctcacgccgctttcagacggcatttatcaaggcgtgtacggtgtcggttccggcatcgtcatcgacagcgaccccgccgccgaatatcgggaatgcggctggaaagcccgtttcctcaacgaattgcgccccgacttcagcatttttgaaaccctgcgcgtggaaaacagacaatgcgccctgctcaaccgccacctatgccgtctgaaagccgccgcccaagccctcaacctgcccctgcccgacggctgcgaaaatcaaatcaaacaatacatcgcccacttgcccgacggctcgttccgcgtcaaagccctgctcgcttcagacggcatcagcctgtcccgcgccgttttaaaccatttggctgacaaacagcgcgtcatcatttcgcccaccgtcctgtccgcacaaaactacctgcgccgcttcaaaaccacacaccgcactctcttcgaccaggcgtggcaaaccgccgaaacacaaggcgcgttcgacagcctgtttttcaattcggacggcatcctgctcgaaggcggcagaagcaacgtgttcgtcaaacatcgcggacaatggcttacgccctctttagatttagacattttaaacggcataatgcgccaagccgtattggacgaaccgcaaaaatatttgcaaacaaatcaagtaatcgaaacacacatcacacaaaaaacactgcaagaagccgaagaaatccgcctctccaacgccctgcgcggcgtatttgccgccgcccttgcctga

SEQ ID NO: 67577 - DNA, 510 bp, Neisseria meningitidis
atgaatccgtttgaaacccaaagcgttacctttgccgaaccgattgaaatgctgtatgcctgccacggcaaagtacgccgtttttgcggccaagtcgcgatgctgtcggactacatcgccgaaaacggctgcaatcagcttgttttgcaaaccatccgccaaatcacccggtatttcaacgttgccgcgccgctgcaccatgaggacgaagaagaaaactttttcccgctcctgctgcaatatgcgccgcaagcccaagaaagcgtggacgagcttttacgccaacatgtaagcctgcatggcaactgggatgccgtggctgccgaatttgccaaactcgaagcagacaatgcctatattcccgatgcggaagcgttcaaacgctttgtggcgggatatgatgtgcatttggcgattgaagaacccttgttcgacatgggcaagatgttcatccccaaagagaaactgaccgaaatcggcgaaatcatggcggcgcgccggcgcagataa

SEQ ID NO: 67578 - DNA, 198 bp, Neisseria meningitidis; identical to SEQ ID NO: 43079

SEQ ID NO: 67579 - DNA, 297 bp, Neisseria meningitidis
atggacgctaaacatcggctgaaaaaatacgtttaccacctgttggtagccatcgaccaactgttcaacgccctaaccggcggcgcggcggacgaaaccctctcaagccgcacctatcgcggcgcgcggctcgcccaaaagcccaaaacccgctggaaggttttatacaccctgattaacggcttgtttttcgaccgccaacactgccggcaggcgtacatcagcgaactgaaaggcaggcagcacgacgcgcgcttcaaccaaagccgcgccgccggggaaaaggggacgcgatga

SEQ ID NO: 67580 - DNA, 630 bp, Neisseria meningitidis; identical to SEQ ID NO: 46606

SEQ ID NO: 67581 - DNA, 423 bp, Neisseria meningitidis
atggccggctgcctaaccgacttggaaaactgtttggaaaaatacctcgaacagttcgggccggtatcggaaagtatcgaagcctgtaccgtcaaactgcaggagcaaccgtcgttcttcaataggctgatgaaaaccaacgacaagctcaataggcagattgacgtgttgcagaaacagtcggcagccatccacaacgaagcctatatcgaaatgaacacgctgctttaccgccaccgcgaagtggtttccgtccacaaccgcaaagcagattatgcggaaaagggcaaagagcggattgcgctgttcccgcgcggcttgaacggcatcaccaagctgcctgccgccgtcctgttgcccgagcgtccctaccattttgatatgaaggaggttctgcatatattctcccgaataccgaggtag

SEQ ID NO: 67582 - DNA, 294 bp, Neisseria meningitidis
  misc_feature 6, 7, 8, 9, 10: 'n' is a, c, g or t
gtgtgnnnnnatctctcgacgaccccttatagtggattaaatttaaatcaggacaaggcgacgaagccgcagacagtacaaatagtacggcaaggcgaggcaacgccgtactggtttaaatttaatccactatatgtggtcgaacagagcttcggtacgctgcaccgtaaattccgctatgcgcgggcagcctatttcggactgattaaagtgagtgcgcaaagccatctgaaggcgatgtgtttgaacctgttgaaagccgccaacaagctaagtgcgcccgctgccgcctaa

SEQ ID NO: 67583 - DNA, 225 bp, Neisseria meningitidis; identical to SEQ ID NO: 64483

SEQ ID NO: 67584 - DNA, 864 bp, Neisseria meningitidis
atgaaaaccttactgccctttttcggcgtggtacgcgtcagcggcgaagaccgccaaaccttcctgcacggacagctttccaacgacatcaataatcttcagaccgggcaggcgtgttatgcgacttacaacacgcccaaaggccgtgtcatcgccaatatgattgtcgtcaaccgaggcggcgatttgctgctgattatggcgcaagacttgcttgaagcaacggtcaaacgtttgcggatgtttgtgttgcgtgccaaagccgtttttgaaatccttgaagattacgccgtcggcgcggaattggaagcatccgccgaaccgcttgccgcgcaagaacccaaccttgcctttgccgcacaacaagattcagacggcatctgctctatcgctctgcctcatggcggcatccttcgcatcgcccccaaaaacaccttgccgccttatgatgccgccgccgaaaacgcgtggcggctgcacgaaatccgtagcggttatccgtggatatgcgcggctaccaaagaaactgccgttgcccaaatgctcaaccagcacatcatcggcggcgtacacttcaaaaaaggctgctatcccggtcaggaaatcattgcccgtgcccagtatcgcggtcaggtcaaacgcggcttggcggtattgtcgggaaattcggccgtcgaagcaggaaccctgctgacggcagacggcgaagagaccggcatcgtactcgacagcgttcaagattcggaaaactttaccgcccttgccgtgattaaattctccgccgcgcaaaaagaactgaccgccccaaacggcagtatcttcaaagcggttcatcccttctttaaaaccgaaaatgcagaataa

SEQ ID NO: 67585 - DNA, 1203 bp, Neisseria meningitidis
atgaagaactaccacgcgcccgacgagaagggctttttcggcgaacacggcgggctgttcgtatccgagaccctgattcccgccttgcaagagctggcggatgcctataaggcagcgaaaaacgatcctgaattttgggcggagttccgccatgatttgaaacattatgtcggcaggcccagccccgtttaccatgccgcgcgattgtccgagcatttgggtggcgcgcaaatttggttgaagcgcgaagacttgaaccacaccggcgcgcacaaagtcaacaacaccatcggtcaggcactgttggcaaaacgcatgggtaaaaaacgcgtcatcgccgaaaccggcgcgggtcagcacggcgtggcgagtgccaccgttgccgcacgcttcggtatgacttgcgacgtgtatatgggcgcggacgacatccaacgccaaatgcccaacgtgttccgcatgaaattgttgggcgcgaatgtcgtcggcgttgacagcggcagccgtactttgaaagacgcaatgaacgaagccatgcgcgaatgggtcgcccgcgtggatgacacattctacatcatcggtaccgccgccggccccgcgccgtatcccgaaatggtgcgcgatttccaatgcgtgatcggcaatgaagccaaagaacaaatgttggaagccatcggcagacagcccgacgttgccgttgcctgcgtgggcggcggatcgaacgccatcggtttgttccacccgtatatcggcgaagaaaacgtgcgcctcgtcggcgtggaggctggcggtttgggcgtgaacacccccgatcacgccgcgccgattacttcgggcgcaccgattggcgtattgcacggtttccgcagctatctgatgcaggacgaaaacggtcaggttttgggtacgcactctgtttccgcaggcttggattaccccggcatcggcccggaacacagccatctgcacgacatcaagcgcgtcgaatacaccgtcgctaaagacgacgaagcactcgaagcctttgatttgctctgccgcttcgagggaatcatccccgcgctcgaatccagccacgccgttgcttgggcggtgaaaaatgcgccgaaaatgggtaaagaccaagtgattttggtcaacctctcaggtcgtggcgacaaagacatcaataccgtcgcgaagctcaaagggattaaactgtaa

SEQ ID NO: 67586 - DNA, 1155 bp, Neisseria meningitidis
atggttgataaaaaaagccctttgattgctgtcagtgtcggcgaagcgtcgggcgacctgttgggggcgcacctgatacgcgccatccgaaagcgttgcccgcaggcgcgttttgtcggtatcggcggcgaactgatgaaggcggaaggtttcgagagcctttatgatcaggagcgactggcggtgcgcggctttgccgaggtggtaaaacgcctgccggaaattttacggatacgcagggggctggtacgggatttgctgtcgttgaaacctgatgtgtttgtcggcatcgatgcgcccgattttaatctgggtgtggcggagcggctcaaacgggcgggcattccgaccctgcattatgtcagtccgtcggtgtgggcgtggcggcgggaacgcgtgggcaaaatcgtgcatcaggtcaaccgcgtgctgtgcctgttcccgatggagccgcagctttatctcgatgcgggcggacgtgcggagtttgtcggtcatccgatggcgcagcttatgcccttggaagacgaccgtgaaacggcgcggaaaactttgggcgtggatgccggcatccccgtattcgccctgctgcccggcagccgcgtcagcgaaatcgactatatggcgccggtgttttttcagacggcattattgttgttggaacgctatcctgccgcacgcttcctgctgcctgccgcaacggcggcgacgaagcggcgtttggcggaagttttgcagcggccggagtttgccggattgccgctgacggtaatcgacagacagtctgaaacagtgtgcagggcggcggatgcggtgctggtaacgagcggtacggcaactttggaagtggctctgtgcaagcgtccgatggtcatcagctacaagatttcgccgctgacttatgcttatgtgaaacgcaaaatcaaagtgccgcatgtcggcctgccgaatatcctgttgggtaaggaggctgtgccggagctgcttcaacatgatgccgtaccggaaaaactggcggcggcgttggcggactggtacgaacaccccgataaggttgccgcgctgcaacaggatttcagggcgttgcacctgctgttgaaaaaagatacggcggatttggccgcgcgcgcggttttggaagaggcgggatgttga

SEQ ID NO: 67587 - DNA, 1509 bp, Neisseria meningitidis
atgcaaaccgattgcgacgtattgattgccggaaacgggctggcagcactgacgctcgccctgtctctgcctgaatcgttccgcatcgtcattttgtgcaaaaaccggctggacgacaccgcaagccgtcatgcgcaaggcgggattgcagcggcgtggtcgggagaggacgacatcgaaaaacacgttgccgataccttggaagcgggcgcgggtttgtgcgacgaagccgccgtccgcaccatcctgtcgcagggcaaaccggcaatcgaatggctgctggcgcaaggcgtggcgttcgatcggaatcctgacgacctgcacctgacgcgcgaaggcgggcatacctgccgccgaatcgcccacgtcgccgattacacgggcgaagccgtcatgcagagcctgattgcccaaatacgctgccgcccgaacatccgcgtttgcgagcggcagatggcgttggacatccaaaccgaatcaggtgcggcgtgcggactgaccgtcctcgaccgccgaacgcaagaaacctaccgtatccgcgcccgccataccgtactcgccggtggcggcttgggacagatttacgccgccaccaccacgccgcccgaatgcacgggcgacgccatcgccatggcgatacgcgcaggctgtgcagttgagaacctcgaatttatccaattccaccccacaggcttggcaagatcgtctgaaaacggccgtaccttcctgatttccgaagccgtgcgcggcgaaggcggcatcctgaccaaccaagcgggcgaacggtttatgccgcattacgaccgccgcgccgaactcgcgccgcgcgacatcgttgcccgcgccatcgccgccgaaatcgccaaacaaactccagacttcgtctcgctcgacatcagccgccaacccgaagcgttcgtccgccggcattttccgtccatccatcggcactgtttatcccaatgcggcctggacatcacgcgccaagccatccccgtccgccccgtgcaacactacacctgcggcggcatccaaaccgacccctgcggcagaacctccctgccgcagctctacgccttaggcgaaaccgcctgcaccggcttgcacggagccaaccgcctcgccagcaactccctgctcgaatgtgtcgttaccgccagacttgccgcccaaaccatcgcggacggacaagcattccaagccaaaacgtctccaaggccgtctgaaaacccctccgccgaagcaggcatctttgcagacgaccttcaaaacacattcagccgccccgtcctgcaaacgttcaaccaacgccatctcggcatcctacgcaacgataccggcctgcgccgcgccatcgcccaactgcggctttggaagcaaaaccaagccgaaccgcacaccgcgtccgaatacgaaaaccgcaacctgctcgaatgcagcctcgccgtcgcccaagccgcatacaggcggagacagaacatcggcgcgcattttaatagtgattgttaa

SEQ ID NO: 67588 - DNA, 330 bp, Neisseria meningitidis; identical to SEQ ID NO: 37077

SEQ ID NO: 67589 - DNA, 744 bp, Neisseria meningitidis
atgctcatcatccgcaacctgatttactggctgatactctgttccaccctgattttcctctttccctttatgctgctcgcctcgcctttccgagacggggcgcacaagatggcgcgggtctgggtcggcatccttaacctctcgctcaaacacatcgttgggctcaaataccgcatcatcggcgcggaacacatccccgaccgccccgccgtcatctgcgccaaacaccaaagcggctgggaaacgcttgcccttcaggacatttttccgccgcaggtttacgttgccaaacgcgagttgttcaaaatcccctttttcggctggggcttgaaactggtcaaaaccataggcatagaccgcaacaaccgccgcgaagccaacgagcagctcataaaacaggggttggcgcgcaaaaacgaaggctattggattaccattttccccgaaggcacgcgccttgcgcccggaaaacgcggcaaatacaaactcggcggcgcgcgcatggcgaaaatgtttgagatggacatcgtccccgtcgccctcaacagcggcgaattttggccgaaaaactcctttctgaaatatccgggggaaatcaccgtcgtcatctgtccgaccatcccgcacgcaagcggcagcgaagccgaattgatgggaaaatgcgaacacctcatcgaaacgcagcagccgctcatttccggcgcaggcccgtttgccgccaaaatgccgtctgaaaccgcatga

SEQ ID NO: 67590 - DNA, 1254 bp, Neisseria meningitidis
gtggacaaactgaaaatctccgcaaacggcccgctcaacggggaaataacggtctcgggcgcgaaaaacgcggcattgccgctgatgtgcgcgggtttgctgacatcgggtacgttgcgcctgaaaaacgtccctatgctggcagatgtgaaaaccacacaaaagctgcttcaggggatgggcgcgcgcgtcctgaccgacaatatcagtgaatttgaaatcaacggtggtacggtaaacaacacctgcgccccttacgaattggtccggacgatgcgcgcctcgattttggtgcttggcccgacgctggcgcgtttcggcgaggcgcaagtcagcctgccgggcggctgcgccatcggttcgcgccctgtcgaccagcatttgaaaggcttagaagcgatgggtgctgagattgttatcgaacacggttacgtcaaagccaaaggcaaactcaaaggtacgcgcgtggcgatggatgtcgttaccgtcggcggcacggaaaacctgctgatggcggcgacgctggcggaaggtacgacggttttggaaaactgcgccatcgagcctgaagtggtcgatttggcggaatgcctggtcaaaatgggcgcgaaaatcagcggcatcggtacgtccacaatgattgtggaaggtgtggacgagctgcacggctgcgaacacagcgtcgtccccgaccggattgaagcggggacgttcctgtgtgcggtggcgataaccggcggcagggtggttttgcggaatgctgcgccgaaaacgatggaagtggtgttggacaaactggttgaggcaggtgcggtgattgaggcgggcgacgattggatcgccatcgatatgcggcagcgtccgaaggcggtggacatccgcacggtcgtccaccccggcttccccacggatatgcaggcgcagtttatggcattgaatgccgtggcagagggaagctgccgcgtggtggaaacgatttttgaaaaccgctttatgcacgtccccgagttaaaccggatgggggcgaacattacaaccgagggcaatacggcatttgtgcagggtgtggaacagctttccggcgcggtcgtcaaggcgacggatttgcgtgcgtccgcaagcctcgttatcgccggtttggcggcgcgaggcgaaaccgtggtcgaacagatttaccacttggatcgcggttatgaaaatattgaaaaaaaactcggcagcgtcggcgcgaaaatcgagcgcgtatccggctga

SEQ ID NO: 67591 - DNA, 924 bp, Neisseria meningitidis
atgaaaaaacgcaataatcctcttccgctgttgaacggtgtcaaacccagttatttggtgctgccgcatgaaaagcagttttacgggctgccgctgctgcattttctgtgcatccgctttccttttgtgggcgcggacgattggcgcaggcggttgaacagcggttttgtggtcggttcggatggtgcggcgttggacgaacatactttgttcgagccgggtaaggtgatgttttattatcgggaaaccagcagtgaggatgagccgcgtattccgtttgaagaaaagattttgcatattgatgagcatttgattgtggtggacaagccgcattttctgcccgtcatccccagcgggcgttttttgaaggaaacgctgctcacacgtctgcgcctgcgtcctgaattgcagcatttgaatgttgaagacattacgccgctgcaccgcttggacaaggatacggcgggtgtgatgctgctgtcgcacaatcctgacacgcgcggggcttatcagacgatgtttcaaaacaaaacggtatggaaaacgtatgaggcacttgcgccgacaaggacggatttgccgtatccgctcgatgtggtttcgcgtttggtgaggggtgagaaattttttacgacgcaagaggcggaaggcgaaccaaacgcacatacgacggtcgaactgattgaaaacagaggggaattcagcctttaccgccttacgccgcataccggcaagaaacaccagttgcgcgtacatatgatgggtttgggtatgccgttgttgaatgacgcgctctatcccgtgccgtctgaagcgggaagcgaggattatcggaaacctttgaagctattggcaaaaaagattgcgtttgcagatcctttgtcgggtctggaaagggtgttttgcagtaggttttgcctataa

SEQ ID NO: 67592 - DNA, 810 bp, Neisseria meningitidis; identical to SEQ ID NO: 37887

SEQ ID NO: 67593 - DNA, 606 bp, Neisseria meningitidis; identical to SEQ ID NO: 62439

SEQ ID NO: 67594 - DNA, 342 bp, Neisseria meningitidis
ttgttggaaggtctgcccaaaggtacgaccgtctatgccgataaaggctacgacagtgcggaaaaccggcaacatctgaaagaacatcatttaccggacggcattatgcgcaaagcctgccgcaaccgtccgctgacggaggcgcaaaccaaacgcaaccgatatttgtcgaagacccgttatgtggttgaacagagcttcggtacgctgcaccgtaaattccgctatgcgcgggcagcctatttcggactgattaaagtgagtgcgcaaagccatctgaaggcgatgtgtttgaacctgttgaaagccgccaacaggttaagtgcgcccgctgccgcctaa

SEQ ID NO: 67595 - DNA, 573 bp, Neisseria meningitidis
atggacaatcccgctacggcaccctggcaggacggttggctgcaaagcgtgcgccacattccgtcgccgaatttcggcccgagggagtccaaagaagaggtttcccttgtcgtattgcacaatatctcgctgccgccgttcgaatatggtacggatgcggtggaaaagctgtttgccaaccggctcgaccccgacggacatccgttcttcagcctgatacacactttgcgcgtatccagccattttttaatcaaacgcgacggcgaaacggtacagttcgtttcctgcgacaatatggcataccatgccggcgtatcctcgtttcgcggacgggaaaaatgcaacgcattttccatcggcatcgaactggaaggctgcgatttcgaaccctttaccgaagcgcaataccgttcgctcgaagccttgttggacgcaatctgccgccgctaccccatcacggcggtaacggggcaccaagacatcgcgcccggccgcaaaaccgaccccggtcattttttcgactggcggcggatacgggggaaagggtttcccgtggacagaaatgccgtctga

SEQ ID NO: 67596 - DNA, 315 bp, Neisseria meningitidis; identical to SEQ ID NO: 54641

SEQ ID NO: 67597 - DNA, 738 bp, Neisseria meningitidis; identical to SEQ ID NO: 50654

SEQ ID NO: 67598 - DNA, 1068 bp, Neisseria meningitidis
atgggcggtaaaacctttatgctgatggcgggcggaacgggcggacacattttccccgcgctggcggtggcggattcattgcgcgcgcgcggccatcatgtgatttggctgggcagcaaggattcgatggaagagcgtatcgtgccgcaatacggcatacgcttggaaacgctggcgattaaaggcgtgcgcggcaacggcatcaaacgcaagctgatgctgccgtttactttgtatcaaaccgtccgcgaagcgcagcggattatccgcaaacaccgtgtcgagtgcgtcatcggcttcggcggcttcgttaccttccccggcggtttggcggcgaaactcttgggcgtgccgattgtgattcacgagcaaaacgccgtggcaggtttgtccaaccgccacctgtcgcgctgggcgaagcgggtgttgtacgcttttccgaaagcgttcagccacgaaggcggtttggtcggcaatcccgtccgcgccgatattgccaagctgcccgcgcctgccgaacgcttccaagggcgtgaaggccgtctgaaaattttggtggtcggcggcagtttgggcgcggacgttttgaacaaaaccgtaccgcaggcattggctttgctgcccgacaatgcgcgtccgcagatgtaccaccaatcgggacggggcaagctgggcagcttgcaggcggattacgacgcgctgggcgtgaaagccgaatgcgtggaatttattaccgatatggtgtccgcctaccgcgatgccgatttggtgatttgccgtgccggcgcgctgacgattgccgagttgacggcggcgggattgggtgcgttgttagtgccgtatcctcacgccgttgatgaccatcaaaccgccaacgcgcgttttatggtgcaggcggaggcgggattgctgttgccgcaaacccagttgacggcggaaaaactcgccgagattctcggcggcttaaaccgcgaaaaatgcctcaaatgggcagaaaacgcccgtacgttggcactgccgcacagtgcggacgacgttgccgaagccgcgattgcgtgtgcggcgtaa

SEQ ID NO: 67599 - DNA, 657 bp, Neisseria meningitidis; identical to SEQ ID NO: 37443

SEQ ID NO: 67600 - DNA, 2226 bp, Neisseria meningitidis
atgactcaaaaatccaccattgtttatacccataccgacgaagcccccgcgctggcgacccaatcgctgctgccgattgtgcaggcgtttgcccgccacgccgatattgatgtcaaaactgccgacatttccctgtccggccgtattttggcggcattccccgaatatctgaccgaagcgcagcgcgtacctgatgcgcttgccgagttgggcgaactggtgaaacagcccgatgcaaacgtaatcaaactgccgaacatcagcgcgtccgtaccgcaactgaccgccgcgattaaagaattgcagtctaaaggctttgccgttcccgactatcctgccgacccgcaaaccgatgaagaaaaagccgtacgcgaacgctacgaccgcatcaaaggcagcgcggtcaaccctgtcctgcgtgaaggcaactccgaccgtcgcgcccctaaagcggtgaaaaactttgccaaaaaaaatccgcacagtatgggcgcgtgggcgaaagactccaaaacccacgtcgccaccatgcaaagcggcgactttttccataacgaacaatccgttaccgtacctgaagcgacttccgtatccatcgtgttcaccgacaaacaaggcaacaaaaaagagctgcgcgcgcccgtcgccctgaaagccggcgaaatcatcgacgcgaccgtgatgagcaaaaaagccctgctcgccttccttgccgaacaagtacaagacgcgaaggcaaaaggcgtattgttctcgctgcatatgaaagccacgatgatgaaagtgtccgacccgattatcttcggacacgccgtcaaagtattcttcgcgcctgtatttgaaaaattcggcggcaaactggctgccgcaggcgttaatgtcaacaacggcttcggcaacctgcttgccaatctggacaaactggatgccgacacccgcaccgccgtcgaagccgaaatcgccgccgtttacgccgccaaccccgatttggcgatggttgattccgacaaaggcatcaccaacctgcacgttcccagcgatgtcatcgtcgatgcctctatgcccgcgatgatccgcaactccggccgtatgtgggacaaaaacggcaaagcgcaagacaccaaagccgtcattcctgacagcagctacgccggcgtttaccaagcaaccatcgacttctgccgcgaacacggcgcatttgacccgacaaccatgggtactgtgcccaacgtcggtttgatggcgcaggcagccgaagaatacggttcgcacaacaaaacttttgaaatcgaagccgacagccaggttcaagtggttgatgctacaggaaaagtcctgatgcaacacgacgttgaagccggcgacatctggcgtatgtgccaaaccaaagacgctccggttaaagactgggtacaactcgccgtcaaccgcgcccgtctgagcaacacgcctgccgtgttctggctcgacgaaagccgtccgcacgacaagagcttgctcgccaaggttaaagcctaccttgccgaactggataccaatggcctcgacatccgcgtcctcgctcctgaagaagccgccaagttcagcttggatcgtctgaaaaacggcgaagacaccatctccgtaaccggtaatgtcttgcgcgactacctgaccgacttgttcccaattttggaactcggcacaagcgcgaaaatgctgtctatcgttccattgatgaacggcggcggtatgtttgaaaccggcgcgggcggttctgcaccgaaacatgttcaacaattcctcgaagaaaaccatttgcgctgggactcgctgggcgaattcctcgcactcgccgtatcgtttgaacatttggcgcaaaaaaccggcaatgccaaagcccaagtcctcgccgacactttggatgcagccaccgaaaaactgctgttgaacgacaaatcgcctaaacgtaaagccggcgaactcgacaaccgcggcagccatttctacctcaccctctactgggcgcaagaattggcggcgcaagacaaagatgccgaactgaaagccgcatttacgccattagcagccgctttgaccgccgacgaagcgaaaatcgttgccgagctttccgccgtacaaggcaaagcggccgacatcggcggctactacgccgccaatcctgaaaaagccgcacaagcgatgcgtccgagcgtaacctttaatcaggcactaaacgccttataa

SEQ ID NO: 67601 - DNA, 816 bp, Neisseria meningitidis; identical to SEQ ID NO: 43517

SEQ ID NO: 67602 - DNA, 285 bp, Neisseria meningitidis
atgttcgtcggtcgtttgaaaaacgctccatccattaccgccaaacactttttgaaggaaaatatcatgaaatttattaacacctgccgtaaatacggcgcaaaactggctgttgtaacagctgctcccctggctttggccgcacatgcaaatgcaacgttgcccgatacggcaaaaaacgctttggaagccgcaaaagccgacggtatggaagtcggttggattgtagtgggcgttttcgccgcgctttttgtattttccatcgttaagagagtgatgaagtaa

SEQ ID NO: 67603 - DNA, 360 bp, Neisseria meningitidis
atgccacgcgtaaaacgcggtgttaccgcccgtgcccgtcaccaaaaaatcttcgcgttagccaaaggctaccgcggccgtcgtaaaaacgtttaccgcgttgccaagcaggcggtaatgaaagccggccaatacgcataccgcgaccgccgccaacgcaaacgccaattccgtcaattgtggattgtccgtatcaatgcaggtgcgcgtgaaaacgggttgtcttacagcaaatttatgaatggtctgaaacgcgcctctatcgaaatcgaccgcaaagtattggctgatttggccgtgttcgataaagccgcttttgcacaattggttgaaaaagccaaagctgctttggctgcttaa

SEQ ID NO: 67604 - DNA, 1461 bp, Neisseria meningitidis
gtgaattatttccccattttcgccaacctcgccggccgccccgtattggtcgtaggcggcggcgcagtcgccgcacgcaaaatcagcctgctgctgaaggcgggcgcagaggtcagggttgccgcaaaacacctgaatgccgaactctccgcgttggcggcggaaaacaaaatcctgtggcttgccgaagaatttcgtgccgaacacattcgcacagttttcctcatcattgcggcaagcagcgaccaagccctcaaccggcgcgttttccatcttgccgaaagctgccaaaagccggtcaacgtggtagacgaccgcgaccattgcagcttcatcttcccatcggttatcgaccgcaacccggttcagattgccgtttccagctccggcagcgcgcccgtcctcgcccgactgctgcgtgaaaggctggaagccctgctgccgccgtctttgggcgatatggcggaaatttcaggaaggtggcgcgatgccgtcaagggcaaactgaaatccgttaccgaacgccgccgcttttgggaaaagcagtttaacggacgtttcgccgccctcgtcaaaaaccggcaaaacacccttgccgaacgggaattggcaggccaattggaacaaagtcgtcaaaatgatcaaggcggctccgtctcgctggtcggcgcgggtcccggcgatgcggggctgctgacgctcaaagggctgcaggaaatccagcaggcagacgtggtgctttacgacgcgctggtttcagacggcatactgtccctcgtccgccgcgatgcggaacggatttttgtcggcaagcgcgcccggggcgagcgcaccccgcaagaggacaccaatgcgcttatggtcaggctggcccgcgaaggcaggcgcgtggtgcgtttgaaaggcggagaccctttcgtgttcggacgcggcggcgaagaattggaaaccttggcacgccatcagattccgttttcggtcgtccccggcattaccgccgccgtcggcgcgaccgcctatgccggcatcccgctcacgcaccgcgattatgcccaaagtgcggttttcgtaaccggccaccgcaaggcggatgcgcccgacatcgaatggcagaccctcgcccgcagccgccagaccttggtgatttatatgggtgcgctcaaagccgccctgattgccgaacggctgcaacagcacggacgctcgcccgacacgcctgccgccgtcatcagccacggcacgcaatcaacgcaatcaacggcaatcggcacgctcgccaatctcgcccgcctcgccgaaaacgcaccgaagccagctttaattgttgtgggcgaagtggtggaactgcacgaaaaactggcttggttcggcgaaaacgccaaaaaagaaagcaatccggccgaacacgcgtattttgcattggacggactgggcatcggacaagaacaacaagccgcataa

SEQ ID NO: 67605 - DNA, 1947 bp, Neisseria meningitidis
gtgctcctgtttctttattctaaacgagaaaacaggagcattttttatgactacgccaaaaaaactgccaaaacttccggcaacgaagcgcgcgaacttgccgacttgagcgaagacatcggcatccgcttcaaatatccgaactcggaacgcgtgtatctgcaaggcagccgcgacgacatccgcgtgcctttgcgcgaaatccgtcaggacgacacctacacggcgcaaggcacggaagccaatccgccgattcccgtctacgacaccagcggcgtgtacggcgacccggcggcgcacatcgacctgaaacacggtttgccgcacatccgcacggcgtggctggacgaacgcggcgataccgaaatcctgcccaagctctccagcgaatacggcaccgaacgcgcacacgatccgaaaaccgcccatctgcgcttcaaccaaatcacccgcccgcgccgcgcgaaaagcggcaacaacgtaacccagcttcactacgcgcgccaaggcattatcacgcccgaaatggagtttgtcgccatacgcgaacgtttaaaattagacgaattgtcccaaaaatcggaatacgccaaactcttgaaacaacacgcagggcaaagtttcggcgcgaacatcccaacccgtcccgaccaaatcacgcccgaattcgtgcgccaagaaatcgccgccggacgcgcgattatccccgccaacatcaaccaccccgaactcgaaccgatgattatcggccgcaacttccgtgtcaaaatcaacggcaacttgggcaactccgccgtcacctccagcctgaccgaagaagtcgaaaaaatggtgtggtcgctgcgttggggcgcggacacgattatggatttgtccaccggcgcgcacatccatgaaacgcgcgaatggattatccgcaacgcgcccgtccccatcggcaccgtgccgatttaccaagcgttggaaaaaaccggcggcatcgccgaagatttgacttgggatttgttccgcgacaccctcatcgaacaggcggagcaaggcgtggactatttcaccatacacgcgggcgtgttgctgcgttatgtgccgatgaccgccaaccgcctcaccggcatcgtctcgcgcggcggttcgattatggcgaaatggtgtttggcacatcatcgggaaaatttcctctacacgcatttcgacgaaatctgcgaaattatgaaagcgtatgacgtgtcgttcagcctcggcgacggcctgcgccccggctgcattgccgatgccaacgacgaatcccaattcgccgagctgcacaccttgggcgaattgaccgataaagcgtggaaacatgacgtacaagtcatgatcgaaggccccggccatgtgccgctgcaacgcgtcaaagaaaacatgaccgaagagctgcaacactgctttgaagcacctttttacacgctcggcccgctcgttaccgacatcgcacccggctacgaccacatcacctcgggcataggcgcggccaatatcggctggtacggcacggcgatgctttgttacgttaccccgaaagagcatttggggctgcccgacaaagaagacgtgcgcaccggcatcatcacctataaactcgccgcccacgccgccgatctcgccaaaggctggccgggcgcacaattacgtgacaacgccctgagcaaagcgcgtttcgagttccgctggcgcgaccaattccgcttaagcctcgaccctgaacgtgccgagagcttccacgacgaaaccctgcctgccgaaggcgcgaaaatcgcccacttctgctcaatgtgcggccccaaattctgctcgatgaaaatcacgcaggaagtgcgcgactacgccgacaagcaaaaagcccaacggcagggcatggaggaaaaagcggtcgagttcgtcaaaaaaggcgcgaagatttacagttga

SEQ ID NO: 67606 - DNA, 270 bp, Neisseria meningitidis
atgccgtctgaaacctttccgtttcagacggcatggttttacagcaatctaaacagggcggaccggagtcaaaaacacaccttcgccattcctgcacaagcacttcccctatacgctcccaaccccaatccgccgcattccagacggcattacctttccgacagccgaacaaaaccccgaatccgtctgcacggttcggggtatatctccaatacgggcatcgtgttccggaaaaccgtcaaatccgcatcggcatcacaatatatttga

SEQ ID NO: 67607 - DNA, 792 bp, Neisseria meningitidis
atgaatgtttattttctcggcggcggcaatatggcggcggccatcgcaggcggattggtcaaacaagggggataccgcatccatatagccaatcggggtgcggaaaaacgcgaacgtttggaaaaagagttgggggtcgaaacttctgaaaccttgccagaattgcattcggatgatgttttgattcttgctgtcaaaccgcaggatatggaagccgcgtgcaaaaatatccgcaccaacggtgcattggtgctttctgtcgcagccggattgtcggtcggtacgctcagccgttacctcgggggaacacgccgcattgtccgggttatgccgaatacacccggaaaaatcgggctgggcgtatccggtatgtatgccgaagcggaagtatcggaaacagaccgcaggattgccgatcgaatcatgaaatcagtcggtttgactgtttggttggaagatgaagcgcaaatgcacagcattaccggtatcagcggcagcgggccggcatatgtgttttatctgctggacgcattgcaaaatgccgccatccgacaagggtttgatatggcagaagcacgcgcgctcagtctggcaacgtttaaaggagcggttgcccttgccgagcagacgggtgaagatttcgagaagcttcaaaaaaatgtaacgtcaaaaggcgggacaacccacgaagccgtggaagccttcaggcggcatcgtgtcgccgaagccataagtgagggcgtttgtgcctgtgtgcgccgttcgcaggaaatggaacggcaatatcaataa

SEQ ID NO: 67608 - DNA, 1299 bp, Neisseria meningitidis
atggctaaaaatgttgtagtaatcggcgcacagtggggcgacgagggtaaaggtaaaatcgttgactggctggcggaagaagccggcggcgtggtgcgcttccaaggcggccacaatgcgggccataccttggttgtcggcggcaaaaaaaccattttgcgcctgattccgagcggcatcctgcatgaaagtttggactgcttcatcggttcgggcgttgtcgtctcccccgaagccctgttgggcgaaatcgacgagttgaacgcggcaggcgtgaaaaacgtcgaaggccgtctgaaaatcgcgccgacctgcccgctgatcctgccttaccacatcgcgctcgaccaagcccgagaagcatcgcgcggcaaaggcaaaatcggcacgaccggccgcggcatcggccctgcctacgaagacaaagtggcacgccgcgccattcgcgccgccgatttgctgcatcctgaaaaactgcgtgaaaaactggatgccgtccttgcttattacaacgtccaactgcaacatctgcacaatgccgagtcggtgaaagcggaagacgtgatggcggttatcgaaaaagtcgcgccgcgcattacgccgatgattaccgacgtgtcccgcgtgttgaacgaaaaaaacaaaaacggcgaaaaactgctgtttgaaggcgcgcaaggtgcgttgttggacatcgactacggcacttaccccttcgttacttcgtccaactgcctcgccggcgcggcttcggcaggcgcgggcgtaggccctcaaatgctggattatgttttgggcatcgtcaaagcctataccacgcgcgtcggttcgggcccgttcccgaccgaattgttcgacgaagtaggcgcaggtttggcggagcgcggacacgaattcggttctgtaaccggccgtgcgcgccgctgcggctggtttgatgccgccgccctgaaacgctccatccaaatcaacggcatttccggtatgtgtattactaaactcgatgtaatggacggcgttgaaaccatcaatatctgcgtcggctatgaattgcccgacggcggcaaaaccgacatcctgccttgcggttccgatgcggtggaaacctgcaagccgatttacgaaaccatgcccggctggcgtgaatccactttcggcgtgaaggactacggcgcattgcccgaaaacgccaaagcatatttgaaacggattgaagaagtctgcggtgcgccggtcgccatcgtctccaccggccccgaccgagaagaaacgattgtgctgcatcatccgttcgcataa

SEQ ID NO: 67609 - DNA, 270 bp, Neisseria meningitidis; identical to SEQ ID NO: 43524

SEQ ID NO: 67610 - DNA, 909 bp, Neisseria meningitidis
atgaacacgccccaatccgccatcattcccgaccacgcccaagccggcatctttatcgaagccgacttcgccgccaaccgcctcaacgatattaaagccgcctgccgcgcttcgctcgacgcgttaactgccttgaaagcccgctttccggacgatattttgggtctgaccatcgccttcggcagcaaagcctgggcaacattcggacatacggacgaaggcagtgaaatcaaacccttctccgaaatgggcaacgggcttgcgccgtccacgcagcacgatatgtccatccacatccaatccttccgccaaaacgccgcctacgcgcttgcccaatccgttttaggcgcgttcggcgacagcatatgcgtcgcgtccgaagaacacggtttgcgcctgtatcaggatcgcggactggacggtttcgtcgacggcacggaaaacccgcagggcgatgaaaatgtccgcgaagtcgccatcatccccgaaggaaaacccgatgcgggcggcagctatgtcctgctgcaaaaatacctgcacgatttgaaaaaatgggatgccgtccccgtcgccgaacaggaggcctcggtcggacgcggcaaggaaaccgacgacgaattcggccgcgatgtccgcctgcccgattcgcacctcggccgcgtcaacctgaaagaaaacggagtcggcctgaaaatcgtccgccgcagcctgcccttcggcaaaatcagcggcgaacacggtttgatgtttaccgcatactgccgcacgctgcacaatatcgaagcgcaattattgagtatgttcggcgatacggacggcaaaaccgacctgctgctccgacatctctccgccgccgtttcgggcggatactactacgcgccgtctgtcgaacgcctgcaaaacctctaa

SEQ ID NO: 67611 - DNA, 510 bp, Neisseria meningitidis
atgaaaaagaaactgctttcgggcatcaaatttgccgttcagacggcattggtgtttttattggtgtcgctgtttttggattggatacgcaagcccgaagagccggccggtgcggcagggcggcctttgaccctgctgtcggggcagcggctgactttgggacagtttagccgggataaggcggttttggtgtatttttgggggagctggtgcggcgtgtgccgttatcagtcgccgataatcgatgatttggcggcggacggcgtgccggtcgtcggcgtggcggtacgttccggcagcgtgtccgaagtggcggcgtatatggcaaaacgcggcttgggctttccgactgtcaacgatgaggacgggggtttggcaaggtcttggcggattgtcgcaacgcctgccgtcgttttggtcaaaaatgggaaaatggttcactatacgacgggaatcagcagttattggggcttgcgcgcacgaatttttcaggcggatgttttcggttaa

SEQ ID NO: 67612 - DNA, 627 bp, Neisseria meningitidis
atgtatacaggcgaacgcttcaatacttacagccatttgagcggtttgattctggcggcggcaggtttggcgctgatgctgctgaaaaccataggacacggggacggctaccgtatcttcagcgtatcggtttacggcatcagccttcttctgctctatttgagttcctcgctgtaccacggaattgcagccggaaaactgaaaagcattttgaaaaaaaccgaccactgcatgatttatgtcctgattgccggaagctacacaccgtttgcactggtttctttgagaaacgggccgggctggacggtattttcactgtcctggctgctggcggctgcaggaatcgcacaagaactcaccatcggacggaaaagcgaaaaacgtctgctgtctattgtgatttatgtcgtcatgggttggatggtcttggcggtaatgaaatccctgacagcctcactcccgtcggcaggactggcttggctggcggcaggcggtatgctgtacagcgtcggcatttactggtttgtaaacgatgaaaaaatccgacacgggcacggaatctggcatctgttcgtattgggcggcagcatcacccaatttgtcagtgtgtacggttatgtaatctga

SEQ ID NO: 67613 - DNA, 1434 bp, Neisseria meningitidis; identical to SEQ ID NO: 39392

SEQ ID NO: 67614 - DNA, 384 bp, Neisseria meningitidis; identical to SEQ ID NO: 37312

SEQ ID NO: 67615 - DNA, 390 bp, Neisseria meningitidis; identical to SEQ ID NO: 39791

SEQ ID NO: 67616 - DNA, 1131 bp, Neisseria meningitidis
atgaaacaaaccgattcaaccatcaaatctcgtgcggcggtggcattcgcccctaaccaacccttacaaattgtggaaatcgacgtagaaatgccgcgtaaaggcgaggtgttaatccgcaatacccacactggcgtgtgccatactgatgcgtttacgttatcaggaagcgatcctgaaggcgtattccctgtggtgcttggacacgaaggtgcgggtgtggtcgttgctgtgggcgaaggtgtgtcaagcgtaaaaccgggtgatcacgtgattccgctttacaccgccgaatgtggcgaatgtgagttttgttgttcaggtaaaaccaacttgtgcgtctcagtgcgtgatacacaaggtaaaggcttaatgccggacggcacgacgcgtttttcttatcaaggtcagccgatttatcactatatgggctgttcgactttcagtgaatactccgttgttgccgaagtttcactggcgaaaatcaaccctgaagccaaccatgaacaagtatgtttgctcggctgcggcgttaccacaggtattggtgcggtacataatacggcaaaagtgcaagaaggcgactctgttgccgtgtttggtttgggggcgattggtttggcggtggtgcaaggtgcgcgtcaagccaaagccggccgcattatcgccattgataccaatccatcaaaatttgagttggcaaaacagttcggtgcaacggattgtttgaacccgaacgattacgataaaccgattaaagatgtgttgttagacatcaataaatggggcattgatcacacctttgaatgtatcggcaacgtaaacgtaatgcgtcaggcattagaaagtgcgcaccgtggttggggacaatccattatcatcggcgtagcaggtgcaggacaagaaatttcaacgcgtccgttccagttggtaacaggtcgtgtttggaaaggttcagcatttggcggtgtgaaaggtcgctctgaactgccgaaaatggtggaagattcaatgaaaggcgacattgagttagaaccgtttgtaacccacacaatgacactcgatcaaatcaatgaagcctttgagttaatgcacgaaggtaaatcaatccgcgccgttattcactactaa

SEQ ID NO: 67617 - DNA, 630 bp, Neisseria meningitidis
  misc_feature 8, 9, 10, 11, 12: 'n' is a, c, g or t
gtgtgtgnnnnngcgttgggttatacggggtacggcagcgaggcggtgcggacggcggttgccgtactcgacgtactcggcgcggcaggggacgcgggccctgacgcgcccgcccgccgccgagcatcggcgaaatccggccaccgctacacaggcacggtgtccaaagtctatgacggcgacacccttcacgttatcgacggcgacggcgcgaaacacaaaatccggatggcgtatatcgacgcgccggagatgaaacaggcttacggcacgcgttcgcgcgacaacctgcgcgcggcggcggaaggcaggaaagtcagcgtgcgcgtgttcgataccgaccgctaccagcgcgaagtggcgcaggtttctgtcggcaaaaccgatttgaacctgatgcaggtgcaggacggggcggcgtggcattataaaagttatgctaaagaacagcaggataaggcggattttgccgattatgccgacgctcaaattcaggcggaaagggaacgcaaaggattgtggaaagctaaaaatccgcaagcgccgtgggcgtaccgccgagcaggcaggagcggcgggggcaataaggattggatggatgccgtgggcgaatggttgggcatttggtaa

SEQ ID NO: 67618 - DNA, 600 bp, Neisseria meningitidis
atgtctgaaaaaccggaaaaaatcgttttggcaagcggcaatgtcggcaagctcgaagaattcggcaacttattcaaaccttacggcatcaccgtattgccgcaatccgagttcggcatacccgaatgccccgaaccctatcccacctttgtcgaaaacgcgctggcaaaagcacgccatgccgccgaatacagcgggctgcccgcactcgccgacgacagcggcatctgtgccgccgccttaaacggcgcgccgggcatccattccgcacgctacgccgacgacaatcccaaatccgataccgccaacaacctgaaacttgccaccgaacttgccggcaaagccgacaaaagctgctgctacgtctgcgtattggtttttgtccgccatcaagacgacccgcgcccgattattgccgaaggtgtgtggcacggacaatggcacggcacgccgctcgggcaaaacggtttcggttacgacccgtatttttatctgcccgaacacggcaaaaccgccgccgaattggattcggaggtcaaaaaccgcgaaagccaccgcgcgcaggcactcgccgatttaatccgcaaactcgccctttaa

SEQ ID NO: 67619 - DNA, 933 bp, Neisseria meningitidis
atgtatgagataaaacagccttttcatagcggatacttgcaggtgtctgaaattcatcaaatttattgggaagagtcgggcaatcccgacggtgtgccggtcatttttttacatggcgggccgggcgcgggggcttcgcctgaatgtcggggttttttcaatcccgatgtgttccgcatcgtcatcatcgaccagcgcggttgcggacgttcgcgcccgtatgcttgtgcggaagacaatacgacttgggatttggtggcggatattgaaaaagtccgtgaaatgctgggtatcgggaaatggctggtgttcggcggttcgtggggcagtactttgtcgctggcttatgcccaaacccatccggaacgggtaaagggattggtgttgcgcgggatatttttgtgcagaccgtctgaaacggtgtggctgaacgaggcgggcggtgtgagccggatttatccggaacaatggcaaaaatttgtcgcgccgattgctgaaaatcggcggaaccggctgattgaggcgtatcacggattgctgtttcatcaagatgaagaagtgtgcctgtctgccgcgaaggcttgggcggattgggaaagctatctgatccgtttcgagccggaggatgtggatgaagatgcttatgcctcactggcgattgcgcgtttggaaaaccattattttgtcaacggcggctggttgcagggcgataaggcgattttgaacaatatcggcaaaatacggcatatcccgaccgttatcgtgcaggggcggtatgatttgtgtacgccgatgcagagtgcgtgggcgctgtcgaaagcctttcccgaagcggaattgagggtggttcaggcagggcatcgtgcgttcgatccgcctttggtggatgcgttggttcaggcagttgaggatattttgccccatttgttgtaa

SEQ ID NO: 67620 - DNA, 549 bp, Neisseria meningitidis
atgaacctctccaaccactttctcgtcgccatgcccgatatggaagacgcgtttttttcacaatcggtcgtctatatctgcaaacacgatgaagacggcgcactcggcatcgccatcaacaaaccctctccgattacgatggacatgattttttccgccaccggcaaaaacatccccatgcggatgcagcacgacagcgtgatgatgggcgggccggtgcaagtcgagcgaggttatgtcgtgcataccccgatcggcaactggcaaagcagtatcggcgtttcagacaatatcgcgctaacttcttcccgagacgtgattgaaaatatttcacgcgaaggtgcggttgacaaagccttgatcagcataggctattcaagctggggaaaaggccagctcgaacgcgaacttgccgacaatgcgtggctgactgttcccgccgacgaacatatcctgttcgacatcccctacgaacaccgttacgccgccgcattcgccaaactcggcatcgacccgctcgccctgttttcgggagccggccatgcataa

SEQ ID NO: 67621 - DNA, 837 bp, Neisseria meningitidis
atgttaccgctcaaaacacccggcgtccttcccggtttcaaactcagcctcggtctgaccgtattgtgcctgtcgctgcttgtggtcttgccgtttgcgatgatggcggcgaaggcggcggaaatcggctggggcggcttttggaacacgattgccgagccgaacgtgttggcggcggtgtggctgagtttgcggatgtcgttttatgcgatgctgaccaatgtcgtgttcggcacgctggtggcgtgggtattggtgcgttatgaattcccgggcaagggtctggcgaacgcgctggtcgatttgccgtttgcgctgccgacggcggttacgggtatcgcgttggcgaccctgtatgcgcccaacggttggataggccgttttttcgagcctttgggcatcaaaatcgcgtttacgcccgtcggcatttggattgcgctggtcgtcgtcagcctgccctttatcgtccgcgccgtgcagccggtgttggaggaattatcgggcgaatatgaggaagcggcggcgactttgggggcaaaccgcttcacgacgttccgccgcgtgctgctgccggaaatcacgccggcactcttgaccggcgcgggaatgatgttcgcgcgggcaacgggggaatacggctcggtgatttttatcgcgggcaatattccgatggtttctgaaatcctgccgctgattattacgggcaagctggaacagttcgacgtgcagggcgcgtcggcggtggcgttgtttatgctgctggtttcgtttgtgattctgtttgcgctgaacgtgatgcagtgggcgttgggcaggcgttcgggcgcgaagggttga

SEQ ID NO: 67622 - DNA, 927 bp, Neisseria meningitidis
  misc_feature 8, 9, 10, 11, 12: 'n' is a, c, g or t
gtgtgtgnnnnngacgtccactgcaccgtcaccgaaatcgccaaacagctgaaccgccacaaaagcaccatcagccgcgaaatcagacggcaccgcacccaagggcagcaatacagcgccgaaaaagcccagcggcaaagccagactatcaaacagcgtaagcgacaaccctataagctcgattcgcagctgattcagcacatcgacacccttatccgccgcaaactcagtcccgaacaagtatgcgcctacctgtgcaaacaccaccagttcacgctccaccacagtaccatttaccgctaccttcgccaagacaaaagcaacggcagcacgttgtggcaacatctcagaatatgcagcaaaccctaccgcaaacgctacggcagcacatggaccagaggcaaagtccccaaccgtgtcggcatagaaaaccgacccgctatcgtcgaccagaaatcccgtatcggcgattgggaagccgacaccattgtcggcaaaggacagaaaagcgcattattgaccttggtcgaacgcgttacccgctacaccatcatctgcaaattggatagcctcaaagccgaagacactgcccgggcagctgttagggcattaaaggcacataaagacagggtgcacaccattaccatggataacggcaaagagttctaccaacacaccaaaataaccaaagcattgaaagcggagacttatttttgtcgcccttaccattcttgggagaaagggctgaatgagaacaccaacggactcatccggcaatacttccccaaacaaaccgatttccgtaacatcagtgatcgggagatacgcagggttcaagatgagttgaaccaccgaccaagaaaaacacttggctacgaaacgccaagtgttttattcttgaatctgttccaaccactaatacactag

SEQ ID NO: 67623 - DNA, 588 bp, Neisseria meningitidis
atggaacataagctgccgcaactgccttatgaactggacgcattgtccccgcatctgagcaaagagactttggaattccactacggcaaacaccatcaaacctacatcaccaacctgaacaatcaaatcaaaggcaccgaatttgaaaacctgcctttggaagagattgtgaaaaaatcttcgggcggcgtgttcaacaacgcggcacaaacttggaaccacaccttctactggctgggtttcacgtccaaaggtcaaggcaaacctgccggcgaactggccgccgccatcgacgcgaaatggggcagcttcgagaaattccaagaagcgttcaatgcctgcgctgccggtactttcggctccggttgggcgtggctggtgaaaacccctgccggcggattggatttggtttccacttccaacgcagcaactccgctgaccactgaaaacacgccgctgctgacctgcgacgtgtgggaacacgcctattacatcgactaccgcaacagccgtcccaactacctgaaaggtttttgggaaatcgtcaactgggacgaagtcgccaaacgttttgccgccttgtcctga

SEQ ID NO: 67624 - DNA, 198 bp, Neisseria meningitidis
  misc_feature 183, 184, 185, 186, 187: 'n' is a, c, g or t
atgtttgatggcgaagtagaagcagatgaaagttattttggcggacaacgcaaaggcaaacgcggtggcggtgctgccggtaaagtcgccgtattcggtcttttgaagcgaaatggtaaggtttatacggttacagtaccgaatactcaaaccgctactttatttcctattatccgtgaacannnnncacacacttaa

SEQ ID NO: 67625 - DNA, 789 bp, Neisseria meningitidis
atgaatcccaaaatcgtgtttttcgatattgacgatacgctgtaccgcaaatatacggataccttgcgtccttccgtgaaaacggcggtggcggctttgcgcggcaaaggtatattgacggcgttggcaacggggcggtctttggcgacgattcccgaaaaggtcagggacatgatggcggaaacgggtatggatgccgtggtaacgataaacggacagtttgcgctgctgcacggaaaaattgtgcacgaagtaccgatggatgccggtttgatgggcagggtttgcgcgcatttggatggcttgggcatggattatgcgtttgtcggcggagaggggatcgccgtgtccgcgctgtcggaatgcgtgtgccgcgccttgaagcatatcgccagcgatttttttgccgataaggattatttttcaagcaaaccggtgtatcagatgctggtgttcgcggaggaagacgaaatgccgccctggtcggatattgtgaaacgggaaggcttgaaaacggtgcgctggcacgaggaagcggtcgatctgctgccggccggtgcgtcgaaaacagacggcatcagaagcgtggttgaagcattgggtttggaaatggcggacgtgatggcgttcggcgatggtttgaacgatgtggaaatgctgtctgaagtcgggttcggcgtggcaatgggcaacggggaacaggcggcgaaagaagcggcgaaatatgtttgccccggcgttgatgaagacggcgtgttgagaggcttgcaagatttgggcgtgatttga

SEQ ID NO: 67626 - DNA, 414 bp, Neisseria meningitidis
atgcggaaggctatatcgagaaactgcacgacgtcccccgccaatgcccatgagtgcaaacacctgtcgccgttgttggaagggttacccgaaggtacgaccgtctatgccgacaaaggctacgacagtgcggaaaaccggcaacatctggaagaacatcagttgttggacggcattatgcgcaaaacctgccgcaaccgtccgctgtcggaggcgcaaaccaaacgcaaccggtatttgtcgaagacccgttatgtggttgaacaaagcttcggtacgctgcaccgtaaattccgctatgcgcgggcagcctatttcggactgattaaagtgagtgcgcaaagccatctgaaggcgatgtgtttgaacctgttgaaagccgccaacaggctaagtgcgcccgctgccgcctaa

SEQ ID NO: 67627 - DNA, 987 bp, Neisseria meningitidis
atgaaaaactttctttcccttttcgcctccatactgatgtctgccctgattgccgtgtggttcagccaaaaccccatcaacgcctactggcagcagacctaccaccgcaacagtccgctcgaaccgcttgccgcctacggatggtggcggagcggtgcggcgttgcaagaaaacgcctacaccctttcagacggcatcaaagccttcctgtccggcgaaacgccgccgacgccccaagacggcggttcggcagatatgccgcctgaagccgccgcatccgaagccgcccctcaaaccggcgaaatccaagaatggaaacaggacaccgacaccgccgccgtccgcagcggcgacaaagtcttttttgtcggcgactcgctgatgcagggcgttgcccccttcgtgcaaaaaagcctgaaacagcaatacggcatcgaatccgtcaacctcagcaaacaaagcacggggctgtcctacccctcattcttcgactggccgaaaacgattgaagaaaccctgcaaaaacatcccgaaatcagcgtgctcgccgtcttcctcggcccgaacgacccgtgggatttccccgtcggcaaacgctacctcaaattcgcttccgacgaatgggcgcaagaatacctgaaacgcgtcgaccgcatccttgaagccgcacacacgcaccgcgtccaagtcgtttggctcggcatcccctacatgaaaaaagccaagctcgacgggcagatgcgctacctcgacaaactgctttcggaacacttggaaggcaaaatcatcctgattcccaccgcgcacaccctgagcggcggggaagaccgccacaccgactccgtcaacgtcaacggcaaacccgtccgctaccgcagcaaggacggcatacactttaccgccgaaggacaaaaactgctggcggcaaaaataatggaaaaaatcgtttttgaaccaagtacgcaaccatcaagtacacagccatga

SEQ ID NO: 67628 - DNA, 1005 bp, Neisseria meningitidis
atgagcattaaagtagcgattaacggtttcggccgcatcggccgcctcgcattgcgtcaaattgaaaaagcccacgacatcgaagtcgtcgccgtcaacgacctgacccctgccgaaatgctgctgcaccttttcaaatacgacagcacgcaaggccgtttccaaggtactgccgaattaaaagacgatgccatcgtggtaaacggcaaagaaatcaaagtttttgccaatccgaatcccgaagaattgccttggggcgagttgggtgtggatgtcgtcctcgaatgtaccggcttctttaccaacaaaaccaaagccgaagcccacatccgtgccggcgcgcgcaaagttgtgatttccgcacctggcggcaatgatgtgaaaaccgtcgtatatggcgtaaaccaagacattttggacggcagcgaaaccgtcatttccgccgcttcctgcaccaccaactgccttgccccgatggcggcagtcctgcaaaaagagttcggcgtagtcgaaggtctgatgaccaccatccacgcctacaccggcgaccaaaacacccttgacgcgccgcaccgcaaaggcgatttgcgccgcgcccgagccgccgcgctcaacatcgtgcccaacagcaccggtgccgccaaggccatcggtctggttatccccgaattgaacggcaaactcgacggctccgcccaacgcgtccctgttgccaccggctcgctgaccgaattggtttccgtcctcgaacgccctgtaaccaaagaagaaatcaacgccgcgatgaaagccgccgccagcgaatcttacggctacaacgaagatcaaatcgtttcttccgacgttgtcggcatcgaatacggctcgctctttgacgcaacccaaacccgcgtgatgaccgtgggcggcaaacaactggtgaaaaccgttgcctggtacgacaacgaaatgtcctacacctgccaactcgtccgcactttggaatacttcgcaggcaaaatctaa

SEQ ID NO: 67629 - DNA, 141 bp, Neisseria meningitidis
  misc_feature 122, 123, 124, 125, 126: 'n' is a, c, g or t
atgagctacacgcaactgacccaaggcgaacgataccacatccaatacctgtcccgccactgcaccgtcaccgaaatcgccaaacagctgaaccgccacaaaagcaccatcagccgcgaaannnnncacacacttaattaa

SEQ ID NO: 67630 - DNA, 684 bp, Neisseria meningitidis
atggaactggtatttatccgccacggacaaagcgaatggaacgcgaaaaacctgtttacaggctggcgcgacgtgaagctgagcgagcaggggcttgccgaggctgccgccgccggtaaaaaactgaaagaaaacggctatgagttcgacatcgccttcacatccgtcctgacccgcgcgattaagacctgcaacatcgttttggaagaatccgaccaactgttcgtaccgcaaatcaaaacatggcggctgaacgaacgccactacggccaactgcaaggtttggacaaaaaacaaaccgccgaacaatacggcgacgagcaagtccgcatctggcggcgcagctacgacaccctgccgccgcttttggacaaagacgatgagttttccgcacacaaagaccgccgctatgcccatctgcctgccgatgtcgtacccgacggcgaaaacctgaaagtaacgctggagcgcgtattaccgttttgggaagaccaaatcgcccccgcgattttgagcggcaaacgcgtcttggtggcggcgcacggcaactccctgcgcgcgctggcaaaacacatcgagggcatttccgacaaagacatcatgggcttggaaatcccgactggccagccgttggtgtacaaattggatgacaacctgaaagtcatcgaaaaattctacctgtaa

SEQ ID NO: 67631 - DNA, 531 bp, Neisseria meningitidis
  misc_feature 512, 513, 514, 515, 516: 'n' is a, c, g or t
atgagcaccttctttcaacaaaccgcgcaagccatgattgccaaacacatcgaccgtttcccactattgaagttggaccaggtgattgattggcagccgatcgagcagtacctgaaccgtcaaaaaaaccgttaccttagagaccaccgcggccgtcccgcctatcccctgctgtccatgttcaaagccgtcctgcccggacaatggcacagcctctccgatcccgaactcgaacacagcctcatcacccgcatcgatttcaacctgttttgccgtttcgacgaactgatcatccccgattacagtaccttatgccgctaccgcaactggctggcgcaagacgacaccctgtccgaattactcaaactgattaactgccaactgaccgaaaaaggcctaaaaatagagaaagcatccgccgccgtcgttgatgccaccattatccagaccgccggcagcaaacagcgtcaggccatagaagttgacgaagaaggacaaatcaggacgtcgtnnnnncacacacttaattaa

SEQ ID NO: 67632 - DNA, 771 bp, Neisseria meningitidis
  misc_feature 748, 749, 750, 751, 752: 'n' is a, c, g or t
ttgaatccgacgaatgatttgaaagcatggcagcttagggcgcaggcgcagacagagctgctgctggaacgctttttgccgtctgaaaacgaaatcccgcacacgctgcacgaagcgatgcgttatgcggctttggacggcggcaagcgtctgcgtccgatgctggtgctggcggcttcggaattaggcgaagccgtgcatgaagcagtagaacaggcaatggcggcaatcgagatgattcacgcctattcgctggttcacgacgatatgccggcgatggacaacgacagcctgcgccggggcaaaccgacctgccacatcaaatatggcgaagcaaacgcccttctgaccggcgatgctttacaaacccaagccttcgacgtattgagccgtccgacagaactgcccgccgcacgccagttggcaatgttgtcggtgctggcgaaagcgggcggcagcgcgggcatggcgggcggtcaggcaatcgatttggcaaatgtcggcaaacaaatggttcaagccgatttggaacagatgcacagcctgaaaacgggtgcgctaatccgtgcggcggttttattgggggcgatgtcctgcccgaatctgtctgaagacagtctggcggtattggacgcttacgcggcaaaactggggctggcgttccaagtcattgacgatgtgttggattgtgatgcggacacggcgactttgggctttacggcgggcaaagacgcagacaacgacaagnnnnncacacacttaattaattaa

SEQ ID NO: 67633 - DNA, 1914 bp, Neisseria meningitidis
atgttgaacattaccttgccggacggctcagtccgccaatacgaatcccccgttaccgtggctcaaattgctgcgtctatcggtgccggtttggcgaaggcggcggtggcaggcagggtaaacggcaaattggtcgatgcgtgcgacccgattgttgaagattctgctgttcaaatcattactccgaaagatcaggaaggcatcgaaatcatccgccattcctgcgcccatcttgtcgggcatgccgtcaagcaactctatcctaatgcaaaaatggttatcggccccgtcattgaagagggcttttattacgacatcgccacggaaaaaccgtttacaccggaagatgttgccgccattgaagcgcgtatgaaagaattgattgcccaagactatgatgtggtcaaaatcatgactccgcgtgcggaggcgattaaaatttttcaagagcgcggcgaagaatacaaactgcgcctgattgacgatatgtccgaagtggaagcgatggggatgtatcatcatcaggaatatgtcgatatgtgccgcggtccgcacgttccgaatacccgtttcctgaaaaacttcaaactgaccaagttggcgggcgcatactggcgcggcgacagcaacaatgaaatgctgcaacgcatatacggtacggcttgggcgacaaaagacgagttgaaagcctatattcaacgtatcgaagaagccgaaaagcgcgaccaccgcaaattgggcaagcaattggatttgttccacctgcaagacgaagcgccgggcatggtgttttggcatcctaaaggctgggctttgtggcaagtgattgaacagcatatgcgtaaagagctgaacgccgccggttataaagaggtcaaaacgcctcaaatcatggataaaaccttttgggaaaaatccggccattgggacaactacaaagacaatatgttcgtaaccagttcggaaaaacgcgaatatgcggttaaaccgatgaactgtccgggtcatgtgcaaatttttaataacggtttgcgctcatatcgcgatttgccgatgcgtttggcggaattcggttcttgccaccgcaatgaaccaagcggtgcattgcatggtctgatgcgggtccgtggatttgtgcaggatgatgcgcatattttctgtaccgaagaccaaatcgtcagcgaggcccgtgcgttcaatgaattgttggttcgcatctacaaacagttcggtttccatgatgtatccgtcaagctttctcttcgccctgaaaaacgcgcaggttcagatgacgtgtgggataaggcagagcagggtttgcgcgaggcattgactgcctgcggcgtggaatggggcgaattgcctggcgaaggtgcattctatggtcctaagattgagtatcatgtcaaagatgccttgggtcgctcttggcagtgcggtaccctgcaattggacttcgtattgccggagcgtttgaatgccgaatatgtaactgaaaacaacgaccgtgcgcgtcctgttatgttgcatcgcgccattttaggttctttggagcggtttatcggcattctgattgagaaccatgcaggctcattcccgttatggttggctccggttcaattggtaattatgaatattaccgaaaatcaggcagattattgtcgggaagtggctgccaaattgcaggcggcaggattccgcgccgagttggatttgcgtaacgaaaaaatcggttacaaaatccgcgacaacagccaataccgtttcccttatcaaatcgttgtcggcgataaggagaagcaggaaaacaaagtggcggtacgccgcaaagcagaagatttgggttctttggatttggatgatttcattgcgcaattgcagcaagaaatcactgatgccctcgtcaatcattaa

SEQ ID NO: 67634 - DNA, 1329 bp, Neisseria meningitidis
atgaaaaaagtatttatccgtaccttcggctgccagatgaacgaatacgacagcgacaaaatgctcgccgtcctcgccgaagaacacggcggcatcgagcaggttacccagcccgacgacgccgacatcatcttgttcaacacctgctccgtgcgtgaaaaagcacaggaaaaagtgttctccgatttggggcgcgtccgtccgctcaaagaaaaaaaccccggcctcatcatcggcgttgccggttgcgtcgcctcgcaagaaggcgaaaacatcgtcaaacgcgcgccgtatgtggacgtggtcttcggcccgcaaacgctgcaccgcctgcccaaaatgattgtggacaaagaaaccagcgggctgtcgcaagtcgatatttccttccccgaaatcgaaaaattcgaccacctgccgcccgcccgcgtcgaaggcggcgcggcatttgtatcgattatggaaggctgttccaaatactgctccttctgcgtcgtcccctacacgcgcggcgaagaattctcccgcccgctcaacgacgtattgacagaaatcgccaaccttgcccagcaaggcgttaaagaaatcaacctcttgggacaaaacgtcaacgcctatcgcggcgaaatggacgacggcgaaatctgcgactttgccaccttattacgcatcgtccacgaaatcccgggcatcgaacgcctgcgctttaccaccagccatccgcgcgaatttaccgacgcaattatcgagtgctaccgcgacctgcccaaattggtttcccacctgcacctgccgattcaaagcggttccgaccgcgtattgagcgcgatgaaacgcggctataccgctttggaatacaaatccatcatccgcaaactgcgcgccatccgccctgatttgtgcctcagttccgactttatcgtcggcttcccgggcgaaaccgagcgcgagttcgagcaaaccttgaaactggtgaaagacattgccttcgacttgagcttcgtctttatttacagtccgcgccctggcacgcctgccgccaacctgcacgacgacacaccgcatgaagaaaaagtgcgccgcctcgaagccttgaacgaagtcatcgaagccgaaaccgcgcacatcaaccaaaccatggtcggcacggttcaacgctgcctggtcgaaggtatctccaaaaaagaccccgaccaactgcaagcccgcaccgccaacaaccgcgtcgtcaactttaccggcacgcccgatatgatcaaccaaatgatcgatttggaaatcaccgaggcctacaccttctccctgcgcggcaaaaccgtcagcatttga

SEQ ID NO: 67635 - DNA, 609 bp, Neisseria meningitidis
atgacgattgcgggcttcagcaggatatggaatgaaggcggtctgccgaagtctgaaacattaaaaaaaatcaagcagttgaaggggtgtagtatcgattggctgctgaccggggagggtaatccgtttccggatgaagccccaaaaaaatcccttgcttacgataccttgggaaatgaagtcgatacggacgagtttgtctttgtgccgagatatgatattcgggcggctgcgggatacgggcagtttgtcgatcatgaggaaccggtatttacaatggcgttcagacggcattggattgagaattatgttacccgcgatacgaaaaacctgtctgtaatttccgtcaagggggattcgatggagggggttttgaatgacggcgattcgattttggtcaatcatggtgaaaatacgccgagggacggtctgtatgtgttgcggattaatgaaaatctgctggttaaacgtttacagattgtaccgggcgggattatcaatgtgatttctgcaaacgaggcttatcctgcttttgaaatcaatttgaacgatttgaccgatgatgtggagattatcgggcgtgtcgagtggttcggcaggacgatttga

SEQ ID NO: 67636 - DNA, 2472 bp, Neisseria meningitidis
atgaaaaaaacctgtttccactgcggtctggatgttcccgaacacctccacctgactgtccgttacgaaaacgaagaccgcgaaacctgctgcgccggctgtcaggcggtcgcacaaagcattattgacgcgggcttgggcagttattacaaacaacgcaccgccgacgcgcaaaaaaccgagctgccgccccaagaaatcctcgaccaaatccgcctgtacgacctgcccgaagtccagtccgactttgtggaaacccacggcggcacgcgcgaggcggttttaatgctcggcggcatcacctgcgccgcctgcgtctggctgatcgaacagcagcttttgcgtacagacggcatcgtccgcatcgacctcaattacagcacgcaccgctgccgcgtcgtctgggacgacggcaaaatccgcctttccgacattctgttaaaaatcaggcagataggctacaccgccgcaccctatgacgcgcaaaaaatcgaagccgccaaccaaaaagaacgcaaacaatacatcgtccgcctcgccgttgccgggctggggatgatgcagacgatgatgttcgcgctgccgacctacctttacggcggcgacatcgaacccgatttcctgcaaatcctccattggggcggctttttaatggtgctgcccgtcgtattctattgcgccgtcccgttttatcaaggcgcgctgcgcgacttgaaaaaccgccgcgtcggcatggatacgccgattaccgtcgccatcatcatgacctttatcgccggcgtttacagccttgcgacaaatgcggggcaggggatgtatttcgaatccatcgcgatgctgctgtttttcctgctgggcggacgctttatggaacacattgcccgccgtaaggcaggcgatgccgccgagaggctggtgaagctgattcctgcgttttgccatcatatgcccgattaccccgatacgcaggaaacctgcgaggcagctgtcgtcaaattgaaagcgggcgatatcgtgctggtcaaaccgggcgaaaccatccccgttgacggcacggtgctggaaggaagcagtgccgtcaacgaatctatgctgaccggcgagagcctgcccgtcgccaaaatgccgtctgaaaaagtaaccgccggcacactcaacacgcaaagccccctgattatacgcaccgaccgcaccggcggtggcacgcgactgtcgcacatcgtccgcctgctcgaccgcgccttagcgcaaaaaccgcgcactgccgagttggcggaacaatacgcctcgtctttcatattcggcgaactcctgcttgccgtccccgtcttcatcggctggacgctgtacgccgacgcgcacaccgcattgtggattaccgtcgccctgctggtcattacctgcccctgcgccttatcgcttgccacgccgaccgcgctggcagcttctaccggtacgctggcgcgcgaaggtattttaatcggcggaaagcaggcaatcgaaaccctcgcccaaaccaccgacatcatcttcgacaaaaccggcacgctgacccaaggcaaacccgccgtccgccgtatctcattgttgagaggcacagacgaagcctttgttctcgcggtggcgcaggctttagaacaacagtccgaacatccccttgcccgcgccatcctcaaacaccgtgtttcagacggcagcgtccccgacattgctattaaacaacgcctcaaccgcatcggcgaaggcgtgggcgcgcaactgaccgtcaacggcgaaacacaggtttgggcattgggcagggcatcctatgtcgccgaaatttcaggtaaagaaccgcaaacagaaggcggcggcagcgcggtttacctcggcagtcaaagcggtttccaagccgtgttctacctgaccgaccccttgaaagacagcgcggcggaggcggtgcggcagttggcaggcaaaaacctgaccctgcacatcctcagcggcgaccgcgaaaccgccgttgccgaaaccgcacgcgccctgggtgtcgcgcactactgcgcccaagccatgcccgaggacaaactggaatacgtcaaagccttgcaaaaagaagggaaaaaagtgctgatgataggcgacggcatcaacgacgcgcccgttttggcgcaggcagacgtatccgccgccgcagcgggcgggacggatattgcgagggacggcgcggacattgtgttattgaacgaagatttgcgtaccgtcgcccacctgctcgatcaggcgcggcgcacccgccatattatccggcaaaacctgatatgggcgggcgcgtacaatatcattgccgtaccgcttgccgttttgggctatgtccaaccgtggatagccgcactgggtatgagcttcagttcgctggcggttttgggcaacgccctgcgccttcacaaacgggggaaaatgcagtctgaaaaaatgccgtccgaacaatga

SEQ ID NO: 67637 - DNA, 1446 bp, Neisseria meningitidis
atgaattggtctgatttgaatttgatgcccgcactgcccgaagtcgcgctgctgtcgctgctggtgttattgttgctggcagacttgtgggtcagtgatgacaaacgccgttggacgcattacggcgcgttggcaacggtggcggttacggctgtggtgcagttggcggtgtgggaacagggcagcacgtcttcgttcaacgggatgtatattgcagacggtatgtcgcgtttggcaaaaatggttttatatgccttgacctttgccctgtttgtctatgccaagccctacaaccaagtgcgcggtattttcaaaggcgagttttacaccctgtcgctgtttgccctcttgggcatgagcgtgatggtgagcgcggggcattttttaactgcctatatcggtttggaactcttgtcgctcgccctttacgccctgattgccctgcgccgcgattccggctttgccgccgaagccgccttgaaatattttgttttgggcgcgctggcatccggcctgctgctctacggtatttctatggtttacggcgcaaccggttcgctggaatttgccggcgtgctcgcctcttccttcaatgaagaagccaacgaatggctgttgaaactgggtttggtgtttatcgtcgtcgccgtcgcgttcaaactcggtgcggtgccgttccatatgtgggtgcccgacgtgtatcacggcgcgcccacttctgttaccgccttggtcggcactgccccgaaagtcgccgccgtcgttttcgctttccgcatcctcgttaccgggctgggaaccgtgcatcatgactggtctctgatgtttgccctgcttgccgccgcctcgctgctggtcggcaaccttgccgccatcatgcagaccaatatcaaacgtatgctcgcctattccaccgtatcgcatatgggtttcatcctgttggcgtttatggcgggcgcggtcggctttgcggcgggtctctattacgccattacctacgcgctgatggcggcggcagggttcggcgtgttgatggtgttgtcggatggggacaacgagtgcgaaaacatcagcgatttggcagggctgaaccaacaccgcgtatggcttgcctttttgatgttactggttatgttctctatggcgggcattccgccgctgatgggtttttacgccaaatttggcgtgattatggcactcttaaaacaaggctatgtttggttgtcggtgtttgccgtcgtgatgtcgctgattggcgcgttctactacctgcgcgtggtcaaagtcatgtattttgacgaatccggccgcgcccgtctcgccgccggcggcaacaatgccgcaaaattcctcttgagcgtcaacgcgctgctgttggtgctgtggggcattatgccgcaaaccgttatcgactggtgcgccaaggcgttggaaaacacgctgtaa

SEQ ID NO: 67638 - DNA, 810 bp, Neisseria meningitidis
atgattcaagacacccgaccccttatccgcgtcgttgccggcatcctgctcgattcagacggcaactacctgctcagctcgcgccccgaaggcaaaccctatgccggatattgggaatttgccggcggcaaggtcgaagcgggcgaaaccgacttccaagccttgcaacgcgagtttgaagaagaactcggcatccgcatcctcgccgccacgccttggctgaccaaaatccattcctacgaacacgcccgcgtctgcctgaaattcctatgggtcaaccccgaccaatggacgggcaaaccgcaatcccgcgaagggcaggaatggtcttggcagaaggcgggtgattttaccgttgcccccatgctgcccgccaacggcgcgcttttgcgttcgctgtccgtcccgcgccgtttgtacggcagcctgaaaacgggtttgcacggagaaaacagtatgggcgcgtaccgcgtcctgcctttgggttcggcagagggaagcggtgcgaacgttttgatggaggcggcgcaatggcaggacagacccgaacacgccgacagcgtgtggatggtggtgcagacccgcgaacaatggcggcgggcgcaggaaaagggcgcggatgcggtcgtttggcgcgtgtgcgatgatgttcaggcacaagaggcggcagaagccctgcggcagggcgtatccgtgccgctcgtacttgcagcaaacggacagacggttgcacgttatggaaaactatggctcggattgggggcgcacgtggtggtaagggatgaaacaatagggaagaatcatgaataa

SEQ ID NO: 67639 - DNA, 729 bp, Neisseria meningitidis
atgtctcaaattactatgcgtcagatgattgaagccggcgttcacttcggccaccaaacccgtttctggaacccgaaaatggcacaatacattttcggtgcgcgcaacaaaatccatatcgtaaacttggaaaaaaccctgccgatgttccaagacgcgcaagaagccgtacgccgtttggttgccaacaaaggtacagtattgttcgtaggtaccaaacgccaagcccgcgacatcatccgcgaagaagcgacccgtgccggtatgcctttcgttgattaccgctggttgggcggtatgctgaccaactacaaaaccgttaagcaatccatcaaacgcctggaagaaaaaaccgcagccttggaaaatgctgccgaaagcggtttcagcaaaaaagaaattctggaaatgcaacgcgatgttgaaaaactggaacgttctttgggcggtatcaaaaacatgaaaggcctgcctgacgcgattttcgttatcgataccggctaccaaaaaggtactctggttgaagctgaaaaattgggcatccctgttatcgccgtagtcgataccaacaacagccccgacggcgtgaaatacgttatccccggcaacgacgactccgccaaagccatccgcctgtactgccgcggcatcgctgacgcagttttggaaggcaaaaaccaagcgctgcaagaaaccgtagccgctgcccaagaagccgctgccgagtaa

SEQ ID NO: 67640 - DNA, 600 bp, Neisseria meningitidis
atggcttttattacgcgcttattcaaaagcattaaacaatggcttgtactgctgccgatgctttccgttttgccggacgcggcggcggaggggatagatgtgagccgcgccgaagcgaggataaccgacggcgggcagctttccatcagcagccgcttccaaaccgagctgcccgaccagctccaacaggcgttgcgccggggcgtgccgctcaactttaccttaagctggcagctttccgccccgataatcgcttcttatcggtttaaattggggcaactgattggcgatgacgacaatattgactacaaactgagtttccatccgctgaccaaccgctaccgcgttaccgtcggcgcgttttcgacagactacgacaccttggatgcggcattgcgcgcgaccggcgcggttgccaactggaaagtcctgaacaaaggcgcgctgtccggtgcggaagcaggggaaaccaaggcggaaatccgcctgacgctgtccacttcaaaactgcccaagccttttcaaatcaatgcattgacttctcaaaactggcatttggattcgggttggaaacctctaaacatcatcgggaacaaataa

SEQ ID NO: 67641 - DNA, 1143 bp, Neisseria meningitidis
atgaaaaaatccgtattagccgttttggccgcgctgtctctggcagcctgcggcggcagcgaaaaaaacgccgtgcaacctcaagcagacgctgcgtctgctgccaatgccgaagccgctgccaccgatactctgaacatctacaactggtcgaactatgttgacgagagtacggtcgaagactttaaaaaagccaacaatctgaagctgacttacgacttgtacgaaaacaacgaaacgctggaagccaaaatgctgaccggcaaatccggttacgatttggttgtgccgggcatcgccttcctgccgcgccaaatcgaggcgggcgcgtatcaaaaagtcaacaaagacctgattcccaactataaaaacatcgatcccgaactcttgaaaatgctggaaaccgccgacccgggcaaccagtatgccgtcccctatttctccggcgtgaacacgattgcgattacggcgaaaggcaaagagcttttaggcggcaagctgcccgaaaacggctgggatttgctgttcaaacccgaatacacccacaagctgaaatcctgcggcatcgccctgtgggacaccccgagcgaaatgttcccgattttgctgaactacttgggcaaagaccccaaaggctcgaatcctgaagatttgaaggcggcggcggaagtgttgaagtctatccgtccggatgtcaaacgtttcagcccgtccatcatcgacgagctggcgcgcggcgacatctgcctggcggcaggcaacggcggcgatttgaacttggcgaaagcacgttccgaagaagtgaaaaacaacgtcggcatcgaagtgctgaatccgaaaggcatgggcttctggattgagtcttggctgattcccgccgatgcgaaaaacgtcgccaatgcccacaaatacatcaactacacgctcgaccccgaaatcgcagcgaaaaacggcatcgccgtaaccttcgcccccgccagcaaaccggcacgcgaaaaaatgcctgccgaactggtgaacacccgttccatcttcccgaacgagcaggatatgaaagacggtttcgtgatgccgcaaatgagtacggatgcgaaaaaactgtctgtcagcctgtggcagaaaatcaaagtcggcaccaactga

SEQ ID NO: 67642 - DNA, 1155 bp, Neisseria meningitidis
atgaaattcatcgacgaagcaaaaatcgaagtcgccgcaggcaaaggcggtaatggcgcaaccagtttccgccgcgaaaaattcgtaccgcgcggcggcccggacggcggcgacggcggcaaaggcggtagcgtttgggcggaagccgacgaaaacaccaacaccctcgtcgaataccgcttcgttaaacgctaccaagccaaaaacggcgaaaaaggccacggttccgaccgttacggcgcaggtgcggacgacatcgtcctcaaaatgcccgtcggcaccctcatccgcgacctcgacaccgacgaaatcgttgccgacctcacttaccacggacagcgcgtctgcctagccaaaggcggcaaaggcggcttgggcaacatccacttcaaatcctccgtcaaccgcgccccaaaacaatccacgcccggcgaagaaggcgaagcccgttccctgcaactcgaactcaaagtcctcgccgatgtcggcttattgggtatgcccaacgccggcaaatccaccctgattaccgccgtatccgccgcacgccccaaaatcgccaactaccccttcaccaccctgcatccaaacttaggcgtggtacgcatcgacgaaaaccacagcttcgtgatggccgacatccccggcctgattgaaggcgcggcagaaggcgcgggtttggggcatcgtttcctcaaacacttatcgcgcaccggattattgctgcacgtcgtcgatttggcgcccttcgacgaaaccgtcaaccctgccgaagaagcacttgctatcatcaacgaattgcgcaaatacgatgaagaactctacgacaaaccacgctggctggtgctgaacaaacttgatatgctcgatgaagaagaagcccaagcgcgtactgccgcctttctcgaagccgtcggctgggactaccccaaacccgacgaccgtttccaatttgacatggaaaccccgcgcctcttccaaatcagcgcgctgacccaccaaggcacgcaggaattggtacaccaaatcaaccaatacctgaccgagaaaaaacgtatcgaagctgaaaaagccgaagcggagaaagcagcggcaaatgttgaaattatcgaacagcagcctaaaacggatacgggcgtgtttaagccggagtga

SEQ ID NO: 67643 - DNA, 1851 bp, Neisseria meningitidis
atgtacccaccctctctgaagcattccctgccgctgctggtggccctggtgcttgccgcgtgttcttcgacaaacacactgtcagccgacaagaccccggcagacaatatagaaactgccgacctttcggcaagcgttcccacccgccctgccgaacccgaaggaaaaacgttggcagattacggcggctacccgtccgcactggatgcagtgaaacagaaaaacgatgccgccgtcgccgcctatttggaaaacgccggcgacagcgcgatggcggaaaatgtccgcaacgagtggctgaagtctttgggcgcacgcagacagtggacgctgtttgcacaggaatacgccaaactcgaaccggcagggcgcgcccaagaagtcgaatgctacgccgattcgagccgcaacgactatacgcgtgccgctgaactggttaaaaatacgggcaaactgccttcgggctgcaccaaactgttggaacaggcagccgcatccggcttgttggacggcaacgacgcctggaggcgcgtgcgcggactgctggccggccgccaaaccacagacgcacgcaaccttgccgccgcattgggcagcccgtttgacggcggtacacaaggttcgcgcgaatatgccctgttgaacgtcatcggcaaagaagcacgcaaatcgccgaatgccgccgccctgctgtccgaaatggaaagcggtttaagcctcgaacaacgcagtttcgcgtggggcgtattggggcattatcagtcgcaaaacctcaatgtgcctgccgccttggactattacggcaaggttgccgaccgccgccaactgaccgacgaccaaatcgagtggtacgcccgcgccgccttgcgcgcccgacgttgggacgagctggcttccgtaatctcgcatatgcccgaaaaactgcaaaaaagcccgacctggctctactggctggcacgcagccgcgccgcaacgggcaacacgcaagaggcggaaaaactttacaaacaggcggcagcaacgggcaggaatttttatgcggtgctggcaggggaagagttggggcgcaaaatcgatacgcgcaacaatgtgcccgatgccggcaaaaacagcgtcctccgtatggcggaagacggcgcgattaagcgcgcgctggtgctgttccgaaacagccgaaccgccggcgatgcgaaaatgcgccgtcaggctcaggcggaatggcgttttgccacacgcggcttcgacgaagacaagctgctgaccgccgcgcaaaccgcgttcgaccacggtttttacgatatggcggtcaacagcgcggaacgcaccgaccgcaaactcaactacaccttgcgctatatttcgccgtttaaagacacggtaatccgccacgcgcaaaatgttaatgtcgatccggcttgggtttatgggctgattcgtcaggaaagccgcttcgttataggcgcgcaatcccgcgtaggcgcgcaggggctgatgcaggttatgcctgccaccgcgcgcgaaatcgccggcaaaatcggtatggatgccgcacaactttacaccgccgacggcaatatccgtatggggacgtggtatatggcggacaccaaacgccgcctgcaaaacaacgaagtcctcgccaccgcaggctataacgccggtcccggcagggcgcgccgatggcaggcggacacgcccctcgaaggcgcggtatatgccgaaaccatcccgttttccgaaacgcgcgactatgtcaaaaaagtgatgaccaacgccgcctactacgccgccctcttcggcgcgccgcacatcccgctcaaacagcgtatgggcattgttcctgcacgctga

SEQ ID NO: 67644 - DNA, 1356 bp, Neisseria meningitidis
atgaaagcacccgaactcttattgcccgccggcggattggaaagaatgcgcaccgcctacgactacggcgcagatgccgtttatgccggcagcccgcgttactcactgcgcgcccgcaacaacgaatttgccaaactcgacgttctcgagcaaggcattaaagaagcgcacgagcgcaacaaaaaattctttttgaccgtcaacaccctgccgcacaactccaaactcaaaaccttcgtttccgatatggagccgctgattgccatgaaacccgacgcgctgattatggcggatccgggtttgattatgaccgtgcgcgaaaaatggccggaaatgccgatccacttgtccgtacaggccaacaccaccaactactggggcgtgaaattctggcagaatatcggcgtcgaacgcatcatcctgtcgcgcgaattgagtatggaagaaatcgccgaaatccgccaacaatgccccgacatcgaactcgaagtcttcattcacggcgcattgtgcatcgcctactccggccgttgcctactctccggctacttcaaccaccgcgaccccaaccaaggcacctgcaccaactcctgccgttgggactacaaagtccacaacgccacggaaagcgatgcaggcgatgcccaacttctgcaaggttttaactttgaaaaagcccaagaagaagccaaccaaaactttgaaggcatcaatggtcaaaaacgccatccctacgccgacaaagttttcctgattgaagagtccaaccgcccgggcgaaatgatgccgattatggaagacgaacacggcacctacatcatgaactccaaagacctgcgcggcattgaagtggttgagaaactcgccaaaatcggcgtggacagcctcaaagtcgaaggccgcaccaagtcgctttattatgttgcacgtgtcgcccagtcctaccgcaaagcgattgatgatgccgttgcaggccgtccgtttgattacagcctgttgagcgaactcgaaggcctcgccaaccgcggctacaccagcggcttcctcgaacgccaccaaacccaagactatcaaaactacctgaccggtcattccaccgccaaacaaagccaatacgtcggacacgttaccgaaatcgatgaaaacggctgggcaacagtggaagtcaaaaaccgctttgccgtcggcgattcactcgaaatcatccacccgaacggcaaccaaaccatcaaattggaacaaatgacccgcaaaggccagcctgtcgatgtcgcacccggcaacggcattcaggtcaaaatccccaatatgcagggtaaagaaaaagccctcatcgcacgcgtattgaacccctga

SEQ ID NO: 67645 - DNA, 633 bp, Neisseria meningitidis; identical to SEQ ID NO: 41416

SEQ ID NO: 67646 - DNA, 1794 bp, Neisseria meningitidis
atgaaaaacatacggaatttctccattattgcccacatcgaccacggcaaatcgacgcttgccgaccgttttatccaatactgcggcggtttggatttgcgcgaaatgagtacgcaggtgctcgactccatggacatcgaaaaagagcgcggcattaccattaaagcgcaaaccgccgcactcaactataaagcacgcgatgggcaggtgtatcagctcaatctgattgatacgccgggacacgtcgacttctcttatgaagtatcccgttcgctgtcggcttgcgaaggcgcgcttttggtggttgacgcatctcaaggcgtggaagcgcagaccgtggcgaactgttacaccgcgattgatttgggcgtggaagttgtgcctgttttgaacaaaatcgacctgcccgccgcagaacccgatcgcgtggagcaggaaattgaagacatcatcggcattgatgccgttggtgcggttcaatgttctgctaaaagcggcattggtgtggaagacgttttggaagaaatcgttgccaaaattcccgcaccgaccggtgatgaaaacgcgccgctgcaagcggtgattgtcgattcatggtttgacaactacgtcggcgtggtcatgctgatccgtgtgaaaaacggcaccatcaagctgaaagacaaagtacgctttatgagcaccaaggcggaaactcaggtcgagcagttgggcgtattcacaccgaaatcggttcaaaaacaagaactcaaagccggcgaagtgggctttttgattaccggcgtgaaagaattgggacaggcgaaagtcggcgatacggttactttggttgccaaccccgcttctgagccgctgcccggtttccaagaagtacaaagccaagtattcgcgggtctctatcctgtggaaagccacgactacgaagccttgcgtgacgctttggaaaaattgcagctgaacgatgcttcattgaaattcgaacctgaagtttctcaggcattgggcttcggcttccgttgcggtttcttgggcctgctacacttggaaatcgtgcaggaacgtttggaacgcgagttcgacatggatttgattaccaccgcgccgacggtggtttacgaagtcgtgttgaaaagcggcgagaaaatcgaagttgaaaacccttccaaactgcccgacatcggcagcatcgaaaccattctcgagccgattatcaccgcgaccatcctcgtgccgcaggaatacgtcggcaacgtcatgactttgtgtaaccaaaagcgcggcgttcaggtcaatatgcaatatatgggccgccaagtcatgctgacttatgatttgccgatgaacgaagtcgtcatggacttcttcgacaaactcaaatccacttcgcgcggttatgcttcgttggactaccatttcaaagagttccaaccgtctgatttgattaagctggatattatggtcaacggcgaaaaagtcgatgccttaagcctgattgtgcaccgtcaaagcgcggttcaccgaggccgcgagctggcatcgaaaatgcgcgagctgattccgcgccaaatgttcgacattgccgtccaagccgccatcggcagccagattatcgcccgcgaaaacgtcaaagcactgcgtaaaaacgtcttagcgaaatgttacggcggcgatattacgcgtaagaaaaaactgcttgaaaaacaaaaggcaggtaaacgccgtatgaaacaagtgggcaatgtggaaattccgcaaagcgcgttcttggcgattttgcaggtgagcgacaaataa

SEQ ID NO: 67647 - DNA, 630 bp, Neisseria meningitidis
atgaacctttttcaaaacgccaaattcttcacgacggtaaaccatctcaaagacctgccggacacaccgctcgaaattgcctttgtcggcaggagcaatgccggaaaatccagtgccatcaataccctgaccaaccatgtccgtcttgcctacgtttcaaaaacacccggacggacacagcatatcaacttcttcgagctgcagaacggcaattttatggtcgatttgcccggctacggttatgcccaagtccccgaagcagtacgcgcacattgggtcaatctgctcggcgactatctgcaacagcgcaaacagcttatcgggctggttttgattatggatgcccgccatcctttaaaagaactcgacatccgtatgctggactttttccacacgaccggcagaccggttcacatcctgctgtcaaaagccgacaaattatccaaaaacgaacagataaaaaccctgtcccaagtcaaaaaactgctcaaaccttattccgacaggcaaaacatcagcgtacagctgttttccagcctgaaaaaacaaggtattgacgaggccaaccgaactgtcggaagctggtttgacgcagcagatgccgccgcttcctctccaaaggaaaactga

SEQ ID NO: 67648 - DNA, 2835 bp, Neisseria meningitidis
atgaataagaaacacggttttcagcttaccctgaccgccttggccattgcaaccgcttttccggcttatgccgcccaagcgggggcggcggcacctgatgccgcgcagacccaatccctgaaagaggttaccgtccgtgccgccaaagtgggacggcgatcgaaagaggcgaccggtttgggcaaaatcgtcaaaacgtcggaaacgttgaacaaagaacaggtactcggtatccgcgacctgacgcgctacgatccgggcgtggcggttgtcgaacagggcaacggcgcgagcggcggctactcgatacgcggcgtggataaaaaccgtgtggcggtttcggttgacggcgttgcccaaatacaggcgtttaccgtgcagggatcgttgagcggatacggcggacgcggcggcagcggcgcaatcaacgaaatcgaatatgaaaacatcagcacggtggaaatcgacaaaggtgccggttcgtccgatcacggcagcggcgcactcggcggcgcggtcgccttccgcaccaaagaagcggcagacctgatttcagacggcaaaagctgggggatacaggcaaaaaccgcctacggcagtaaaaaccgccaatttatgaagtcgctcggcgcgggtttcagtaaagacggttgggaagggctgctaatccgaaccgaacgccaagggcgggaaacgcgcccgcacggcgatattgcggacggggtggaatacggcatagaccgtttggacgcgttccgccagacacacgatattcaaagcaaagataaaacagggcaatttttctcagtagagggcgagagtgaatccaagcccgtggcaaaattggcgggctacgggaaatatttgaacaaccagctcaaccgctgggtggaagaacgccgttcaaaaggtcaggctttaaacagtgaagaagaagcgatggtgcgggaggcgcaggcgcgccacgaaaacctgtccgcccaatcttacacgggcggcggcaggatattgcccgatccgatggattaccgcagcggttcgtggcttgccaagctgggctaccgcttcggcggcaggcattatgtcggcggcgtgtttgaggataccaaacagcgttacgacatccgcgatatgacggaaaaacagtattacggtacggacgaggcggaaaagtttagagacaagagcggggtgtacgacggcgacgatttccgcgacggtttgtattttaggccgaatatagaagagtggaagggtgatacaaatttggtcaagggcataggtttgaaatattcccgcaccaaatttattgatgaacatcaccgccgccgccgtatgggtttgctgtaccgttatgaaaatgagaaatactcggataactgggcggataaggcggtgttgtcgtttgacaaacagggcgtggcaaccgacaacaacacgctgaagctgaattgcgccgtgtatcctgctgtggacaaatcctgccgcgcgtcggcggacaaaccgtattcctacgacagcagcgaccgtttccactaccgcgaacagcacaatgttttgaatgcctcgtttgagaaatcgctgaaaaacaaatggacgaaacaccatctgactttgggcttcggttacgatgcttccaacgcgatttcccgccccgaacagctttcccacaatgcggcaaggatttcggaatccacgggattcgatgataaaaatcaagataagtatcttttgggtaagcccgaagtcgtcgaagggtcggtctgcggctacatcgaaaccctgcgttcccgcaaatgcgtgccaagaaaaatcaacggcagcaatatccacatttctttgaacgaccgtttttcaatcggcaaatatttcgatttcagcttgggcggcaggtacgaccggcaaaacttcaccacgtcggaagaactcgtccgcagcgggcggtatgttgaccgttcgtggaacagcggcatcgtgttcaaaccgaaccggcatttttccgtgtcttaccgtgcctccagcggtttcaggacgccttccttccaagaacttttcgggatagacatttatcacgattatccgaaaggctggcagcgtcccgccctgaaatcggaaaaggcagccaaccgcgaaatcggtttgcagtggaagggcgatttcggctttttggaaatcagcagtttccgcaaccgctataccgatatgattgccgttgccgatcacaaaaccaaattgccggattcaacaggacgattgacagagattgatatacgcgattattacaatgcccaaaatatgtcgcttcaaggcattaatatattgggaaaaatcgactggaacggcgtgtacggcaaactgcccgaaggtttgtacacgactttggcgtacaaccgtatcaaaccgaaatcggtatccaaccggccgggactgtccctccgcagctatgctttggatgcggtacagccgtcgcgttatgttttggggttcggatacgaccagcccgaggggaaatggggggcaaacattatgctgacctattccaaagggaaaaaccctgatgaacttgcttatctggcaggcgatcaaaaacgatattcgacaaaaagagcgtcgtcttcttggtcgacggcagacgtttccgcctatctgaatctgaaaaaacggctgaccttgagggcggctatctacaatatcggcaactaccgctacgttacttgggaatccttgcgccagactgcggaaagcacggcaaaccggcacggcggcgacagcaactatggaaggtatgccgcaccgggcaggaacttcagtctcgcgctcgaaatgaagttttaa

SEQ ID NO: 67649 - DNA, 363 bp, Neisseria meningitidis
atggcttcaagcaacgtaaacaaagaaatcaaagacaaaaaactctccctgtgggccaagcgtcaagccggttcggtaaaatggttctgcggacagccggttcagcgcgctagcaccgccaccgacgccgccatcaccgccgccagcgacgccaccgccaacatcgacacaaagcacctgccgtcaacctgccgcgacgcttcatctgccagccgtacaaaaacacccggtttcgctttcaaatacttccaaaaaatcagccgttaccgagtattgcccgaatcacggcaaatgaccaaaaaacttcgtcattcccgcgcaggcgggaatctaggtttgtcggcgcagaaacttatcgggtaa

SEQ ID NO: 67650 - DNA, 405 bp, Neisseria meningitidis
atgacacaagaaaccgctttgggcgcggcactgaaatccgccgtccaaactatgagcaaaaagaaacagaccgaaatgatcgccgaccatatctacggcaaatacgatgtattcaaacgcttcaaaccgttggcgctcggcatcgatcaggatttgattgccgctttgccgcaatacgattccgcactgattgcacgcgtcctcgccaaccactgccgacgtccgcgctatctgaaagccttggcgcgcggcggcaaacgtttcgatttgaacaaccgtttcaaaggcgaagttacccccgaagaacaggcgatcgcgcaaaaccatcctttcgtgcagcaggctttgcaacagcagtccgcccaagctgtcgccgaagcagccggatcttccgcagcagaataa

SEQ ID NO: 67651 - DNA, 477 bp, Neisseria meningitidis
atggaacacctatttgggaaatggctgcccgacttgcccacccccatttcagacggcatcagcctgccgatggtgcggctgctgcacacccggtcgctgaccgccgcattgcgcgccttgccgcatacattttcggtggaactgctgaaactgggcgaattggagacggaatgcggagggaggctggtgcgcgaagttttgttgaagctggacggtatccctgttgtcgcggcaaggagcgagtgccggataggttcggcgttttggcaaaacattttggactgcggcacgcgccctttgggcgagcgtctgtttcaagccgatttggaaggggcgcgttcggcgtttgagtttgccgtttccggcgaaggatgcggacggtactttgccgcgcggcgttctcggttttcccgtcacggcgaggaaatgctgctgaccgagtattttctgcccgaactgaaacgctttatcggataa

SEQ ID NO: 67652 - DNA, 912 bp, Neisseria meningitidis
atggacaccctgttcagcctcaaggttttccgccaagtcgtccaaagcggcggcttcacccgcgccgccgacgcgctcggcatctccaccgcaatggcaagcaaacacgtcagccacttggaaaacaccgtccaagccaaactcctgcaccgcaacagccgcaacctcagcctgaccgaagccggggaagaatactaccggcaatgcagttacgcgctcgacacgctcgacgatgccgcgcaaaaagccgccggggggacggaaaaaccgcaggggctgctgcgcgtaacgatgccactgtggtttgccggcagccagatatgcaactggctggcggaataccgcgaacgttatcccgaagtgacattagaactgattttggacaaccgccacgtcgatttgattgccgaaggcgtggatttggcgttgcgcgtttcccaaaccctgtccccgtcgctgattgcgcgcccgctggcggaaatcgaatttgccctgctcgcctcgcccgatttcctgaggcgcaacggcgtaccggaaacgccggaagaagtggcggggctgcccgccgtcctgccgacctacaccaaccagcagaaactcgacctcacccgcaaatcggacggcaaaaaataccggcttgaactgacccccgtcatccgtaccgacaacacgctgatgatgcgcgaaatgattaaggcgggcgcgtgcatcggttatcagccgctttgggcggcggaacacgatttgcgctgcggcacgctggtgaggctgctgcccggatacgccgtcccgaccgaccggctgaacgccgtttatgcggacagggcattcttaagcgcgaaagtccgcagcttcatcgattttctgaacgaaaaaatcgccagcaggaaaggctgccgaaatgccgtctga

SEQ ID NO: 67653 - DNA, 366 bp, Neisseria meningitidis; identical to SEQ ID NO: 44550

SEQ ID NO: 67654 - DNA, 888 bp, Neisseria meningitidis
atgcagaaatccaaattatcttggttcttgaaactgatgttggcactgtcgctggcgtttctgtatatcccgctggtcgttttggtcatctattcgtttaacgaatccaagctggtaaccgtttggggcggcttttcgaccaagtggtacggcgcattgttggaaaacgacaccattttggaagccgcttggctgtcgctgcggattgccgttgtgtcttcgcttgccgccgtcgttttgggcatgctggcgggctatgcgatggcgcggattaaacgttttcgcggcagtaccttgttcgccggtatgatttccgcacctatggtgatgcccgacgtgattaccggtctgtctatgctgctgctgattattcaggtacagatatttttgcagggcagcgaatggttacaacatctctacttcgatcgtggctttttcactattttcttaggacatacgacgctgtgcatggcatacattaccgttgttatccgttcgcgtctggttgagcttgaccaatcgctcgaagaagccgcaatggatttgggcgcgcgtccgctgaaaatcttttttgtcatcactttgcctttgattgcccctgccatcgtttcaggctttctgctcggcattaccctgtctttggatgatttggtgattacctcattcctctccggccccggttcatccacattgccgcaggtgattttctccaaaatcaagctgggtcttgatccgcagatgaacgttttggcaaccatcctgatcggcatcatcggaacattggtcatcatcgtcaattattggatgatgaggcaggcaaccaagcgtgaccgagaagcggcagaagcctaccgccaagaaaaattggctgccgagaaagcaaattaa

SEQ ID NO: 67655 - DNA, 408 bp, Neisseria meningitidis; identical to SEQ ID NO: 54784

SEQ ID NO: 67656 - DNA, 240 bp, Neisseria meningitidis; identical to SEQ ID NO: 43117

SEQ ID NO: 67657 - DNA, 975 bp, Neisseria meningitidis
atgccgtctgaaaacaaaattgcatttatgcaaggttccccgcgcccgttatgggcggcattcgcactcttactaatctgctgcggactgtttttaacgctcaacgtcaaaggcgattgggattttgttttgcaactgcggctgaccaaacttgccgcgctgctgatggtcgcctatgcggtcggcgtttcgacccagctttttcaaacgctgaccaacaatccgattctcacgccctcgattttgggtttcgattcgctgtatgtgtttttgcagaccttgctggtgtttacgttcggcggcgtgggctatgcttccctgccgttgacgggcaaattcggctttgaacttgccgttatgatgggcggctcgctgctgctgttttacacgctcatccgtcagggcggacgcgatttgccgcgtatgattttaatcggcgtgattttcgggattttgttccgcagcctgtcgtcgctgctttcgcgcatgatagaccccgaagaatttacggcggcgcaggcgaatatgtttgccggattcaataccgtccacagcgagcttttgggcataggcgcgctgattctgctcgtcagcgcggcggcggtttggcgcgaacgctaccgcttggacgtacaccttttggggcgcgaccaagccgtcaatttgggcatcagctacacgcgcaacaccttatggatactgctttggattgccgcattggtggcgacggcgaccgccgttgtcggcccggtaagctttttcgggcttctcgccgcctcgcttgccaaccacttttccccgtccgtgcgccattccgtccgcctgccgatgacggtttgtatcggcggtatcctcttggtcggcggacagaccgtattcgaacacttcttgggcatgaaggcggtattaagcgtggtggtcgaatttgcgggcggactcgttttcctctatctcgttttaagacacaaaaaatga

SEQ ID NO: 67658 - DNA, 369 bp, Neisseria meningitidis
atgaatccgaaaaccttgagccgtttgtcgctgtgtgcggcggtcttggctctgaccgcctgcggcggcaacgggcaaaaatccctgtattattacggcggctatcccgataccgtctatgaaggtttgaaaaacgacgacacttcgttgggcaagcagaccgaaaagatggaaaaatactttgtggaagccgtcaacaaaaaaatgaatgccgccccgggtgcgcacgcccatctgggactgctgctttcccgttcgggagacaaagagggcgcgttccgccagtttgaagaagagaaaaggctgtttcccgaatcgggcgtatttatggacttcctgatgaaaaccggtaaaggaggcaagcgatga

SEQ ID NO: 67659 - DNA, 1470 bp, Neisseria meningitidis; identical to SEQ ID NO: 58386

SEQ ID NO: 67660 - DNA, 2745 bp, Neisseria meningitidis
ttgaagccgatttgtttttaccttatgggtgttatgctatatcatcatagttatgccgaagatgcagggcgcgcgggcagcgaggcgcagatacaggttttggaagatgtgcacgtcaaggcgaagcgcgtaccgaaagacaaaaaagtgtttaccgatgcgcgtgccgtatcgacccgtcaggatatattcaaatccagcgaaaacctcgacaacatcgtacgcagcatccccggtgcgtttacacagcaagataaaagctcgggcattgtgtctttgaatattcgcggcgacagcgggttcgggcgggtcaatacgatggtggacggcatcacgcagaccttttattcgacttctaccgatgcgggcagggcaggcggttcatctcaattcggtgcatctgtcgacagcaattttattgccggactggatgtcgtcaaaggcagcttcagcggctcggcaggcatcaacagccttgccggttcggcaaacttgcggactttaggcgtggatgacgtcgttcagggcaataatacctacggcctgctgctaaaaggtctgaccggcaccaattcaaccaaaggtaatgcgatggcggcgataggtgcgcgcaaatggctggaaagcggagcatctgtcggtgtgctttacgggcacagcaggcgcagcgtggcgcaaaattaccgcgtgggcggcggcgggcagcacatcggaaattttggcgcggaatatctggaacggcgcaagcagcgatattttgtacaagagggtgctttgaaattcaattccgacagcggaaaatgggagccggatttacaaaagcaacagtggaaatacaatccgtataaaaaatacaacaaccaagaactacaaaaatacatcgaagagcatgacaaaagctggcgggaaaacctggcgccgcaatacgacattacccccatcgatccgtccagcctgaagcagcagtcggcaggcaatctgtttaaattggaatacgacggcgtattcaataaatacacggcgcaatttcgcgatttaaacaccaaaatcggcagccgcaaaatcatcaaccgcaattatcaattcaattacggtttatctttaaactcatatgccaacctcaatctgaccgcagcctacaattcgggcaggcagaaatatccgaaagggtcgaagtttacaggctgggggcttttaaaagattttgaaacctacaacaacgcgaaaatcctcgacctcaacaacaccgccaccttccggctgccccgcgaaaccgagttgcaaaccactttgggcttcaattatttccacaacgaatacggcaaaaaccgctttcctgaagaattggggctgtttttcgacggtccggatcaggacaacgggctttattcctatttggggcggtttaagggcgataaagggctgctgccccaaaaatcaaccatcgtccaaccggccggcagccaatatttcaacacgttctacttcgatgccgcgctcaaaaaagacatttaccgcttaaactacagcaccaataccgtcggctaccgtttcggcggcgaatatacgggctattacggctcggatgacgaatttaagcgggcattcggagaaaactcgccgacatacaagaaacattgcaacccgagctgcgggctttatgaacccgtattgaaaaaatacggcaaaaagcgcgccaacaaccattcggtcagcattagtgcggacttcggcgattatttcatgccgttcgccagctattcgcgcacacaccgtatgcccaacatccaagaaatgtatttttcccaaatcggcgactccggcgttcacaccgccttaaaaccagagcgcgcaaacacttggcaatttggcttcaatacctataaaaaaggactgttaaaacaggatgatacattaggattaaaactggtcggctaccgcagccgcatcgacaactacatccacaacgtttacgggaaatggtgggatttgaacgggaatattccgagctgggtcagcagcaccgggcttgcctacaccatccaacaccgcaatttcaaagacaaagtgcacaaacacggttttgagttggagctgaattacgattatgggcgttttttcaccaacctttcttacgcctatcaaaaaagcacgcaaccgaccaacttcagcgatgcgagcgaatcgcccaacaatgcgtccaaagaagaccaactcaaacaaggttatgggttgagcagggtttccgccctgccgcgagattacggacgtttggaagtcggtacgcgctggttgggcaacaaactgactttgggcggcgcgatgcgctatttcggcaagagcatccgcgcgacggctgaagaacgctatatcgacggcaccaacgggggaaatacccgcgatgtccggcaactgggcaagcgttccatcaaacaaaccgaaacccttgcccgccagcctttgatttttgatttttacgccgcttacgagccgaagaaaaaccttattttccgcgccgaagtcaaaaatctgttcgacaggcgttatatcgatccgctcgatgcgggcaatgatgcggcaacgcagcgttattacagctcgttcgacccgaaagacaaggacgaagaagtaacgtgtaatgatgatggcttgtgcaacggcaaatacggcggcacaagcaaaagcgtattgaccaattttgcacgcggacgcaccttcttgataacgatgagctacaagttttaa

SEQ ID NO: 67661 - DNA, 1479 bp, Neisseria meningitidis
atgaaatacaaagacctacgcgacttcatcgccatgctcgaacagcagggcaaactcaagcgcgtcgcgcatcccgtttccccgcatttggaaatgaccgaaatcgccgaccgcgtgctgcgtgccgaagggccggcgttgctgtttgaacacccgatcaagcctgacggtacgcgttacggttatcccgtgttggcaaacctgttcggcacgcccgaacgcgtggcgatgggtatgggggcggacagcgtgtccaagctgcgcgaaatcgggcagacgctggcgtatctgaaagaacccgaaccgcccaaaggcatcaaagacgcgttttccaaactgccattgctgaaagatatttggagcatggcaccgaacgtagtgaaaaacgcgccgtgtcaggaaatcgtgtgggaaggtgaagacattgatttgtataaacttccgattcagcattgctggccggaagacgttgcgccgctggtaacgtggggcttgaccgtcacgcgcggaccgcacaaaaaacgccaaaatttaggcatttaccgccagcaactcatcggcaaaaacaagctgattatgcgttggttgtcgcatcgcggcggcgcgctggattatcaggaattccgcaaactcaatcccgatacgccgtatcccgtcgccgtcgtgctcggctgcgaccctgccaccattttgggcgcggtaacgcccgttcccgataccttgagcgaataccagtttgccggactgctgcgtggttcgcggacggaactggtgaaatgtatcggcaacgatttgcaagtgcctgcccgcgcagaaatcgtattggaaggtgtgattcatccaaacgaaaccgcactggaaggcccatacggcgaccacaccggctattacaatgagcaggatcattttcctgtgtttacggtcgaacgcatcaccatgcgcgaaaacccgatttaccactccacctacacaggcaaaccgcccgatgaacccgccgttttgggcgtggcgttgaacgaagtgttcgtaccgcttttgcaaaagcagttccccgaaatcaccgatttttacctgccgcccgaaggctgttcctaccgcatggcggtggtcggcatgaaaaaacaatacgccggacacgccaagcgcgtgatgatgggctgctggtcgttcctgcgccagtttatgtacaccaaatttatcatcgtggtggatgacgatgtgaacgtacgcgactggaaagaagtcatctgggcggtcaccacgcgcatggaccccgtgcgcgacactgttttggtagaaaacacgcccatcgattatctcgacttcgccagccccgtcagcggactcggcggcaaaatgggtttggatgcgaccaacaaatggccgggcgaaaccgaccgcgaatggggacgcgtcatcaaaaaagaccctgcggttacggctaagattgatgggatttgggaggaattggggttgtag

SEQ ID NO: 67662 - DNA, 396 bp, Neisseria meningitidis
atggataaaaacctgcttgaagccgtcaaatttgacgaaaaaggtttggtttgcgccatcgcccaagatgccgaaaccaaacgtgttttaatggtagcgtggatgaacgccgaagccctgcaaaaaaccgtcgaaaccggctttgcccactattacagccgttcgcgccaaaaacaatggatgaagggcgaagagtcgggacacacgcaaaaagtccgcgaactgcgcctcgactgcgacggcgacgccattgtgatgctcatcgcccaaaacggcggcatcgcctgccacaccgggcgagaaagctgcttttacaaagtctggcgtggcagcgcgtgggaaaccgccgatgccgtcctgaaagacgaaaaagagatttacggcagcacgcactga

SEQ ID NO: 67663 - DNA, 465 bp, Neisseria meningitidis
atgtacaaacatctggttgttgccgttgacggcagtgaaacgtccatcaatgccctgaaacatgccgccgagcttgccggggtcaacggtgcgcgtctgactttggtacacgttgccaatcctgccgaatatatggcgctcgcccccgaatttttgcaacacgaaagctacgaagccgccgccgtcgcgcaaggcaacgaagttttggatgccgccgagcgcaccgcccgggaactgggtgtggaaaataccgtcaaacacctgctggttgccaataagggtgcgcgtgaaatggcgcaggatttggttgattatgccgatgaaaacggtgccgacctgctggtgttgggtacgcacggacgtaccgggctgatgcaccttttaatgggcagttttgccgaaacggtaatgcgccaaagccacctgccgcttttgattatccgcagcaaagccgaagaggcgtag

SEQ ID NO: 67664 - DNA, 465 bp, Neisseria meningitidis
atgaccgacatcacaccgtttgccaaccgcttgggcaaaaacatcaaacaccttatgaaatgggcgaaacgcaacggcatcgaagcctggcgcatttacgaccgcgacattccccaattcccttttgccgccgatgtttacggtgatcgaatccaccttcaggaatacgataccggctggctgatgcggcccgaagaatacgaagcgtggcttgccgaagtcttggaagccgtcgccttcgttaccggttttgaacccgaacaaatccgcctcaaacgccgcgaacgccaaaaaggtttgcagcaatacgaaaaaaccggcaaggcgggcgacgatttcgtcatcaccgaaaacggccgcaagttttgggtcaaccttgataagtatttggatacggggctttttttggatcatcgaaacacgcgcaaaaaagtcggcgaaacggcggcgggcaaacgtttttaa

SEQ ID NO: 67665 - DNA, 747 bp, Neisseria meningitidis; identical to SEQ ID NO: 39933

SEQ ID NO: 67666 - DNA, 1110 bp, Neisseria meningitidis
atgaaatacaaaagaatcgtatttaaagtcggcacatcttcgattacccattcggacggcagtctctcgcgcggcaaaatccaaaccatcacctgccagcttgccgcattgcatcatgcgggacacgagctggtcttggtgtcttccggcgcggttgcggcagggttcggtgcgctgggtttcaaaaaacgtccggtcaaaatcgccgacaaacaggcttccgccgccgtcgggcaggggctgctgatggaagaatatacggcaaacctgtcttcagacggcatcgtgtccgcgcaaatcctgctcagccgcgccgactttgccgacaaacgccgctaccaaaatgccggcggcgcactttccgtgctgctgcaacgccgcgccgtccccatcatcaatgaaaacgatacggtttcggttgaggaattgaaaatcggcgacaacgacacattgagtgcgcaagtggcggcgatgatacaggcagacctcttggtgctgctgaccgacatagacggtctttacacgggcaacccgaacagcaatcccgatgccgtacggctggacaaaatcgaacacatcaaccatgaaatcatcgaaatggcgggcggctcgggttcggcaaacggcacaggcggtatgctgaccaaaatcaaagcggcgacgattgcgaccgagtccggcgtaccggtctatatctgttcctcgctcaaacccgatgcacttgccgaagcggcagataatcaggcggacggctcgtttttcgtcccccgtgccaaaggtttgcggacgcagaagcaatggctggcgttctattccgaaagccggggcggcgtttatgtggacgaaggtgcggaacacgctttgtccgaacagggaaaaagcctgctgatgtcgggcattgccagaatcgaagggcatttttcccgtatggacaccgtaaccgtgtacagcaaggcaaccaaacagcccctgggcaaagggcgcgtcctgttcggttctgccgccgccgaagacctgctcaaatcgcgtaaggcgaaaggcgtgttcatccatcgggacgactggatttccatcacgcccgaaatacgcctgcttctgaccgaattttag

SEQ ID NO: 67667 - DNA, 516 bp, Neisseria meningitidis
atgaaacgcaccaaaaaataccctttcttaacgttgcagcggcaacgtttccatttgaactttgaaaacgcctcttccgccgccggcatcccagccgaacgcgatttctaccgctgggcgtggtctgccctgaaaagcggataccgccgcgcagacatcagcctgattcttctggacgaagaagcagcccgcgactacaaccgcgactaccggggcaaagactacgccaccaatgtcttgagtttcgcgctcaacgaaggcgaaaccctgccctgccaagtttcggaaaaactgtacggcgatttgattatctgcccgcaagtcgttttgaaagaagccgccgaacaaggcaaaacgcccgaacggcattttgcccacctgaccatacacggtgttttgcacctgatgggctacgaccacatcgaagacgatgaagccgaaataatggaagccgaagaaatccgcctgatgcgggcggcaggctatcccaacccctaccgagaggacggacattaa

SEQ ID NO: 67668 - DNA, 516 bp, Neisseria meningitidis; identical to SEQ ID NO: 54969

SEQ ID NO: 67669 - DNA, 975 bp, Neisseria meningitidis
atgctcgagaatctgccctatttccagcgacatctgcctgaagaccttgccaaagtcaatgaagtcatcaaccgtgcggtgcaatccgatgtcgcactgatttcgcaaatcggtacatatatcatcagcgcgggcggcaaacgcctgcgtccgattatgacgattttggcgggtaaggcggtcggttatgatgacgagaaactgtattcgctggcggcgatggtcgagtttatccacacttccaccctcctgcacgacgatgtcgtcgatgaaagcgatttgcgccgtgggcgggcaacggcaaacaatctgttcggcaatgcggcggcagtgttggttggcgactttttatacacgcgcgcctttcaactgatggttgcctcgggcagtatgcgcgttttggaagtgatggcggatgcaaccaacattattgccgagggcgaagtcatgcagctgatgaacatcggcaatacggatattaccgaagaacaatatatccaagtcatccaatataaaacggcaaaattgtttgaagctgccgctcaagtcggcgcaattttgggcaaggcttccccagaacacgaacgggcgttgaaagactacggtatgtatgtcggtacggcattccaaattattgacgatgtgctggactattctggcgaaaccgaagaaaccggcaaaaacgtcggcgacgatttggcggaaggaaaaccgactttgcctttgatttatctgatgcgtcagggttccgaacaggttgcgaacgatgtgcgtactgctttggaaaatgcagatcgcagctattttgagaaaatccacgattatgtcgtccgttcggatgcgttggcatattcgataggcgaggcgcgcaaagcagtcgattgtgccgttaccgccttggatgccctgcccgacagcgaagtgaaggatgccatgattcagctggcgaaggaatctttggtcagggtgtcttga

SEQ ID NO: 67670 - DNA, 2304 bp, Neisseria meningitidis
atgacgcaccgacccaccgccaaacagattttgcacgaagtattcggttatcccgaatttcgcggcaggcaggaggctatcgtcaatgctttggccggcggcgagagtttgatggtgctgatgccgacgggcgggggcaagtctttgtgttaccagattccagcgctgatgcgcgaaggcgtggcggttgtcgtatcgccgctgattgcgctgatgaacgaccaagtggcaagcctgcatgtggccggaattgaagcggcggcagtcaacagcggcacatcggcagatgaggcgcgcgagattgccgacaagcttgcccaaggccgtctgaaactgctttatgtcgcgccggaacgcttggttaccgaccgctttttgcgttttctcgaccaacaaaccgtcagcctgttcgccattgacgaagcgcactgcgtcagccagtggggacacgattttcgccccgaataccaacagctcggcatgcttgccgaacgctatccgaacgtcccgcgcatcgccctgaccgccaccgccgatgccgccacgcgcgccgacatcaagcattatctgcacttggacgacgcgcccgaatttgtctccagcttcgaccgcccgaatatttattatcaggttatcgaaaaaaacaacggcaaaaaacaactgcttgaatttatccgcaaagaaatggcggggcaaagcggcattgtgtattgcttaagccgcaaaaaagtcgaagatgtggcgcagtttttgtgtgaaaacggcttggaggcgattccgtatcatgccggtttgagcatggacgtgcgcgaagaaaaccaacgccgctttacgcgtgaagacaatattatcgtggtggcgaccgtggcgttcggcatgggcatagacaaacccgacgtgcgctttgtcgcccatctcgatatgccccaaagtgtcgaacatttctatcaggagtcggggcgcgccggcagggacgggctgcctgccgtgagttggctgtgttacggtttgaacgattgggtgttgctgcgcgaacggattgccgaaggcaacagcgacgaggtgcaaaagcaaatcgaaatgcaaaaactcgatgccatgcttgccgtctgcgaaaccgccgcctgccgccgcgtactgctgctcaaacatttcggcgaagcatccgaaccctgcggccgttgcgacaactgcctgcatccgcccgtgcggtttgacggcacggtgttggtgcaaaaattactcagctgcgtgtaccgcgccggacaacgctttgccgccggttacatcaccaaccttttgcgcggcaaaagcgacgattggatactgcgcaacggccatgacaagttatccacattcggcatcggcagcgaacagaccgacaaagaatggcgcagcgtcatccgccagtgcatcagcctcggctatctcaccgtcaacattgcccgatatcaggcattgcaactgaccgaagccgccaaaaaagtcctcaaaggcgaaaccgaagtgatgctgcgcccgctcaagcgcgacaagcctgccgcccgcaccctcaaagacaactggctgcgtaccgaacgcgaagaacgcctgtggcaggcattgcgcgtttggcgtatgaaacaggcagaagccgaaggcatccccgcctatatgattttcggcgacaaaaccctgcgcgaccttgtcgaaaaaatgccgcaagacctcaacgggctgcacgacatctacggcttgggcgaagccaaaatcgaccgtttcggacacggcatactcaaagtctgccaaaacgccgccgactttagccgcgacgcggtcatccgtccgcaaaccgaacgcgaacaacaactgcgtcaaaaactcgaaacctggcggtatgaacaggcaacggcggaaaactgcgccctgcattccgtcctctccgacgaaagccttgccgatctgcttgccgccacgcccgaaaccgaaaccgacctcgaaggcgtgcacggcttgggcagcgtacgcgccgccaaatacggacgggacatcctcaccgtctgccgtccgttttcagacggcatcgatgaagccgccaaacgcaaacgccgcctgatgcgcgccctgattcaatggtgcaacgaaacggcaaaacacgaacagtccgaaccctaccgcattctcagcaaagccgccctgcgcgccattgccgccaaacagccgaaaggtttggcggagcttgccgccgtatatggcgtaggcgaagaaaaagccgcacgttacggtgcggcggtattggcggtgttgggacaaaatgccgtctga

SEQ ID NO: 67671 - DNA, 495 bp, Neisseria meningitidis
atgaaaaagaacatattggaattttgggtcggactgtttgtcctgctcggcgtggcagcggtcggctttctcgctttccgcgtggcaggcggcgcggccttcggcaattccggcaagacttataccgtatatgccgatttcagcgacatcggcggactgaaggccaacgcgccgatcaaatccgcaggcgtattggtcggacgcgttggttccatcgagcttgacccgaaatcctatcaggcgaaagtccgtctcgatttggacagcaaatatcagttcagtagcgacgtttccgcacaaatcctgacttcgggacttttgggcgagcagtacatcgggctgcagcagggcggcgacacggaaaaccttgctgccggcgacaccatctccgtaaccagttctgcaatggttctggaaaaccttatcggcaaattcatgacgagttttgccgagaaaaatgccgacggcggcaatgcggaaaaagccgccgaataa

SEQ ID NO: 67672 - DNA, 339 bp, Neisseria meningitidis
atgaaaaaaatcgaggcgattgtcaaaccgttcaaactcgacgacgtgcgcgaggcgttgacggaaatcggcattacggggatgaccgtcagcgaggtcaaagggttcggcaggcagaaggggcatacggaaatctatcgcggtgcggaatacgccgtcgatttcctgcccaaggtcaaaatcgagctggtgttggcggatgacgctgtggaacgcgcgattgacgtgattgtcgaggtggcgcgttcgggcaaaatcggcgacggcaagatttttgtgctgccggtcgaggaggcaatccgtatccgcacgggcgaacgttcggacgcggcggtttga

SEQ ID NO: 67673 - DNA, 1653 bp, Neisseria meningitidis
atggttgcctatgttttcctatttttgtttgtaacggcggcgttggtgctgattatcaggtcgcactaccgctggacgtattttttcgcgtccgcgctgtttgtctttttggtgggcggtatgctgatgttgacggctcagtggcagcgcgccttgaatttcgcttcggtctggtttgtggtgctgatactgttccacaggctgaaaatccattattacaaacagccgctgttgatttccgactttttgctgattgccgactggcggaattgggaaacgctgttccattataaggaagcggttatcggtatggcggggctgctggctttggcggcatatgcggttttcggctggagcggtgcggattctttggatgtgccgtggcggtgggcaggcgcggttttgtttgcggcggcgttcgtgtcgatgcggcatttttccaaacatccgggcgcggtaaagacgtggctggattcgctgccggacgacgggcgcgacgtgtttttgaacctgccgatgtcctgtcgggcggtgtttttccaagtacccgtgttcgagggcgacggggaagcgtttgccaggcagatgccgtctgaaacccggccgtgcggcatgtcggatgaaaaacccgatattgtcgttaccctgatggaatcgacgctcgatccgcactgtttcgactttgccgccgccaagattcccgatttgaaaatgttcggacggcaggaagataccgtattttcctcacctttgcgcgtgcatactttcggcggcgcaacgtggaagtccgaatttgcgtttttggcgggtgttccgtccacggatttcggcgcgttggcaagcggcgtgttttactcggtcgtaccgcatttgcagaccggttttgtccgcaacctgcgcgaacacggttatttttgcgtggcactctcgccatttaccaagggcaactacaatgccaaggcagcatatgaccatttcggctttaatctgatgttccagccgcaagatttgggctatcccgcgccgatgggcaaaaacctgtggcatatttccagtgaggaaatgatgcagtatgcgcggatgattttggaaaaacgccatcccgatttggaaaacgtgcggcagccgatgttcgtatatgtgctgaccatgaaggagcacgggccgtatcggacagataccgacaatgtgtttgatttggatgcgcctgatttgaatgcgaaaaccatatccgcgcttaacgactacatcgggcgcattgccgatttggacaaagcggtggaaagtttcgaccgttatctgcacgaacgcggcaaaccctttgttttcggttatttcggcgatcatcaggtaccgtttgagggcgtgtccgtcaggaagaaatgggattacgcgcagccggattatgtaacgcagtttgccgtcaggagcaatattgccggcggattcgtacagcggcaggatttcctcgatcttgcctttgcaggcggcgtgctgatggaggcggctggtctggaagccaaagacggcttcatgcgtgcgaatatggcgatgcgcggtttgtgcggcggagggttggaagactgcccgaaccgggagttggtcggaaattaccgcaactatctgtacgacgttttgaaaattgcccgttag

SEQ ID NO: 67674 - DNA, 594 bp, Neisseria meningitidis
atggcaagcattcaaaacttatatgagaccgtcgtcggcgtgcttggcgatcaggcaagcaaagtcatttcagctttgggcgagattaccgtcgagtgtctgcccgaacactatatttcagtcatgaccgcattgcgcgatcatgaagagctgcatttcgagcttctggtcgatttgtgcggtgtcgattacagcacttacaaaaacgaagtatggcagggcaaacgctttgccgtcgtcagtcagttgctttccgttaaaaacaatcaacgcatccgcgtacgcgtctgggtttcagacgacgacttccctgtagtcgaatccgtagtcgatatttacaacagcgcggattggtacgaacgcgaagccttcgatatgtacggcatcatgttcaacaaccacccggacttgcgccgcatcctgaccgattacggctttgtcggacatccgttccgcaaagacttcccgatttccggctatgtggaaatgcgttacgacgaagagcaaaaacgcgtgatttaccaacctgttaccattgagccgcgcgagatcacgccgcgtatcgtccgtgaggagaactacggtggccaataa

SEQ ID NO: 67675 - DNA, 579 bp, Neisseria meningitidis; identical to SEQ ID NO: 36924

SEQ ID NO: 67676 - DNA, 261 bp, Neisseria meningitidis; identical to SEQ ID NO: 39662

SEQ ID NO: 67677 - DNA, 423 bp, Neisseria meningitidis; identical to SEQ ID NO: 42719

SEQ ID NO: 67678 - DNA, 621 bp, Neisseria meningitidis
atgctgaccccgaaaagttgcgatttgttcaatatcccgtttttccaattttcccagcttaaaaaataccagcctgaaagcattccgcaaatcaaagccgactacaaggaaaactggcagatatggcagcagctgattcagcaggttgccgccgaattgggtgcgccgtttgcgccgccgcacatcgaacgctggtgcaacggctggcaggttcgcgcccatttctttgcctacttcaaatacgaacaatataaaaattccgccgcgattttgtcgatactgctcaaccgccgccgtttgagtgtcagcttggactggcattgctacaaagccgacgtgtcgccgattgcgctgcctgattacaaccgttggttggataattttgatactgaaaaatacgcttctttcgatatgtggcacggcgcggaaagcgaatacgacgactaccgcactgtcgcgcagcaaaatgaatccgaccgaaggttgcaaaacgacgaagatttcttctgcatcggcaaacacatcgagcgcgacgatttgggcaggcaggatgtcgtgaaatggatagcggaaacagtggaagacttgctgtcgctttatgaagcgtgtcatggtgcttga

SEQ ID NO: 67679 - DNA, 990 bp, Neisseria meningitidis
  misc_feature 4, 5, 6, 7, 8: 'n' is a, c, g or t
gtgnnnnncaagccacgacgtcccaaacacatcgaccgtttcccactattgaagttggaccaggtgattgattggcagccgatcgagcagtacctgaaccgtcaaaaaaaccgttaccttagagaccaccgcggccgtcccgcctatcccctgctgtccatgttcaaagccgtcctgcccggacaatggcacagcctctccgatcccgaactcgaacacagcctcatcacccgcatcgatttcaacctgttttgccgtttcgacgaactgatcatccccgattacagtaccttatgccgctaccgcaactggctggcgcaagacgacaccctgtccgaattactcaaactgattaactgccaactgaccgaaaaaggcctaaaaatagagaaagcatccgccgccgtcgttgatgccaccattatccagaccgccggcagcaaacagcgtcaggccatagaagttgacgaagaaggacaaatcagcggtcaaaccacaccgagtaaggacagcgatgcccgttggataaagaaaaacggcctctacaaactcggttacaaacaacatacacgtaccgatgcggaaggctatatcgagaaactgcacattacccccgccaatgcccatgagtgcaaacacctgtcgccgttgttggaagggttacccgaaggtacgaccgtctatgccgacaaaggctacgacagtgcggaaaaccggcaacatctggaagaacatcagttgttggacggcattatgcgcaaaacctgccgcaaccgtccgctgtcggaggcgcaaaccaaacgcaaccggtatttgtcgaagacccgttatgtggttgaacaaagcttcggtacgctgcaccgtaaattccgctatgcgcgggcagcctatttcggactgattaaagtgagtgcgcaaagccatctgaaggcgatgtgtttgaacctgttgaaagccgccaacaggctaagtgcgcccgctgccgcctaa

SEQ ID NO: 67680 - DNA, 1143 bp, Neisseria meningitidis; identical to SEQ ID NO: 43813

SEQ ID NO: 67681 - DNA, 1815 bp, Neisseria meningitidis
atgcccgctgaaacgaccgtatctggcgcgcaccccgccgccaaactgccgatttacatcctgccctgcttcctttggataggcatcgtcccctttaccttcgcgctcaaactgaaaccgtcgcccgacttttaccacgatgccgccgccgcagccggactgattgtcctgttgttcctcacggcaggaaaaaaactgtttgatgtcaaaatccccgccatcagcttccttctgtttgcaatggcggcgttttggtatcttcaggcacgcctgatgaacctgatttaccccggtatgaacgacatcgtctcttggattttcatcttgctcgccgtcagcgcgtgggcctgcaagagtttggtcgcacacttcggacaagaacgcatcgtgaccctgtttgcctggtcgctgcttatcggctccctgcttcaatcctgcatcgtcgtcatccagtttgccggctgggaagacacccccctgcttcaaaacatcatcgtttacagcgggcaaggcgtaatcggacacatcgggcagcgcaacaacctcggacactacctcatgtggggcatactcgccgccgcctacctcaacggacaacgaaaaatccccgccgccctcggcgcaatctgcctgattatgcagaccgccgttttaggtttggtcaattcgcgcaccatcttgacctacatagccgccatcgccctcatccttcccttctggtatttccgttcggacaaatccaacaggcggacgatgctcggcatagccgcagccgtattccttaccgcgctgttccaattttccatgaacaccattctggaaacctttactggcatccgctacgaaactgccgtcgaacgcgtcgccaacggcggtttcacagacttgccgcgccaaatcgaatggaataaagcccttgccgccttccagtccgccccgatattcgggcacggctggaacagttttgcccaacaaaccttcctcatcaatgccgaacagcacaacatatacgacaacctcctcagcaacttgttcacccattcccacaacatcgtcctccaactccttgcagagatgggaatcagcggcacgcttctggttgccgcaaccctgctgacgggcattgccgggctgctgaaacgccccctgacccctgcatcgcttttcctgatctgcacgcttgccgtcagtatgtgccacagtatgctcgaatatcctttgtggtatgtctatttcctcatccctttcggactgatgctcttcctgtcccccgcagaggcttcagacggcatcgccttcaaaaaagccgccaatctcggcatactgaccgcctccgccgccatattcgcaggattgttgcacttggactggacatacacccggctggttaacgccttttcccccgccactgacgacagtgccaaaaccctcaaccggaaaatcaacgagttgcgctatatttccgcaaacagtccgatgctgtccttttatgccgacttctccctcgtaaacttcgccctgccggaataccccgaaacccagacttgggcggaagaagcaaccctcaaatcactaaaataccgcccccactccgccacctaccgcatcgccctctacctgatgcggcaaggcaaagttgcagaagcaaaacaatggatgcgggcgacacagtcctattacccctacctgatgccccgatacgccgacgaaatccgcaaactgcccgtatgggcaccgctgctacccgaactgctcaaagactgcaaagccttcgccgccgcgcccggtcatccggaagcaaaaccctgcaaatga

SEQ ID NO: 67682 - DNA, 447 bp, Neisseria meningitidis
atgcagcacgaagaaggcaaccgccaacgccctcaaggcgaactgctcctgcgtaccgtcgctatgccgcgcgataccaatcccaaccaagacattttcggcggctggattatgtcgcagatggatttgggcggcggcatattggcggcggaaatcgcgcggggacgcatcgttaccgtcgccgttcaggaaatgaactttatccgcccggtcaaggtcggcaacgtcgtctgctgctacgggcattgcgtccgcgtgggcaatacttccctccagcttaaaatcgaagtctgggtgaaaactttgatgaacgattgcgttaccgaagaccgccatctcgtaaccgaagcggtgttcacttatgttgccatcgatgcggaaggcaatccgcgcccgattccgaaagaaggcaaccccaaattgtcgggcttattgcctactccgtaa

SEQ ID NO: 67683 - DNA, 1185 bp, Neisseria meningitidis
atgggtaaacatattcttttaggtgtaacgggcagtattgcggcgtataagtcttgcgagttggtgcgactgctgaaaaaacaggggcattcggttacggtggttatgagccgctcggcaactgaatttgtttctccgctgacttttcaggctttgagcggcaatcccgttctgaccgacacgcacggcagcaacggttcaaacggcatggaacatatcaacctgacccggaatgcggatgtttttctgattgcgccggcaagtatgaataccgtggcaaaaatctgtaacggcgtggcagataatctactgaccaatctggcagccgcacggaaatgtcctcttgccatcgctcccgcgatgaatgtggaaatgtggctcaaccctgccaaccaacggaatatcgcacaactggtttcagacggcattactgtctatatgccgggcttgggcgaacaggcttgcggagaaaatggtatgggaaggatgccggaacctgccgaattgctggatttgcttccagacttgtggacaccgaaaattttaagggacaagaaaatcttgattaccgcaggtgcgacatttgaagccattgaccctgtcaggggcatcacaaatatttccagcgggaaaatgggcgtagctttggcgcgggcgtgtcgtgccgccggtgcggaagtcagcctgatttacgggcaacttcaaaccgaactgcctttcggtatatccaatagggttcaaaccgtcagtgctgaagatatgcatcgtgcagtgcatcgtttaatcgacaaacaagatgcttttatttctgttgccgccgtctcagactataaggttaaaaacaggagtacgcaaaaattcaaaaaagataaaaatgccaaaccattatccatcgaattggatgagaaccccgatattttggcttctattgcctcattgccgaacccgccgttctgcatcggttttgccgctgaaacggagaatgtaatggcatatgcgcgagaaaaacgtattaagaaaaaaataccagtgatcgttgccaatgatgtttcaatcgcgatgggcaaaccgaccaaccggattaccattatcggggacgacgaggaactgtcttttcccgaaacaagtaaagatgaagcggcaatgcagattgttgaaaggcttgccgtatatttgaacaaataa

SEQ ID NO: 67684 - DNA, 120 bp, Neisseria meningitidis; identical to SEQ ID NO: 39028

SEQ ID NO: 67685 - DNA, 825 bp, Neisseria meningitidis
atgaaatggctcttcacccttttggcggtactcaatattgccgtattcggcggcacggtgggctataaattagccgttaaagcgacgggcggcgtgccggaaaaccgggccgtcgaaaacacgccccccgcaacgcccgccgccgacaatgcggcggcatccgtggaggatacggcggcactgctcaaaccgggcgacatcctgaccgaagagcaggccgagcagttgcgcttgaaaaaggaagcggaacagaaaaaactgagggagaaaaaacagcgtgaagaaaaagcccgccgcgaaaaactcgccgccgaaaaggcgcaggcggaacgcgaaaacggcgcggcggatgccttatgcgccgcgcaggcaagcctcacgatggacgaagatgactaccaccgcatcaaaggacttttgggcaaatggtcgcacgttgccagcaggagcgtcgaaaaacgcaccgccaaagccaaacctgccgacaaaacctaccgcgtcgtcctgcccgtttccgccgatgccgaaaatcaggcggcggagctgtctgccaaaggtttcaaccccataccgtttgacggcgcattgagtttgggtgtcggcaacagccgggaaaacgcccaagccctgcaaaaccggcttgccggcgccggattcggcggggcgcatattgtcgaacactttgccgaagccgacaggcaggacgattctttgagcgtgtcgcgtatgacggttttgtttaccggcgtgaatgccgccgatgcggacgaaattcgtaaaatcacgtccctatacggcaaactgaacctcaagtcttgcaaatag

SEQ ID NO: 67686 - DNA, 201 bp, Neisseria meningitidis
atgagctacacgcaactgacccagggcgaacgataccacatccaatacctgtcccgccactgcaccgtcaccgaaatcgccaaacagctgaaccgccacaaaagcaccatcagccgcgaaatcagacggcaccgcacccaagggcagcaatacagcgccgaaaaagcccagcggcgaaagccagactatcaaacagcgtaa

SEQ ID NO: 67687 - DNA, 1428 bp, Neisseria meningitidis
atgatacacaccgaaccgagcgcgcagccgtcaactatggacacggctgcttttttaaagcacatcgaatccgcattccgccgcattttttcagacggtatcgacctgatgcgatacctgcccgaagacaaatggcttgccttgaagcaggcgggtttgctgttgcccttcctcgacaaaaaatacggcgggcgcaagggcagccagtttgaaattcaggaagtcttgcggattgcggggcattacggcgtgcccgttacgctgcgtaccggcatcgaaggcgcgctggtgttgcagccactgcaagagttcggcgatgaagcgcaaatcgcacagggtttggacatggttttcaaaggcgagggcggcggtttaggcgttaccgaacccgaaacctccggcgcggcgattgcccgagaaatgcagtcttactacgaatataccgacggacaaaccatttacgtcaacgccgcgaaatactggcagggcaactcgcaaagcgacttcctcctcgttgccgccaaagagcgcaaaaacggcaaactcgccaaagtcatcgacctgctgctcgtccccaaaacatacatccgctgcgaaaccctcgcatccgaaggcttgcgcgccgtccgttacgccgtcaaccgcatcgatgccgaaatgcctgcaaccgccgtgatgaaactctcccagagcgacgctgccggtttgcgcgcgttccaaaacatctttatccgcagccgcctgcaactgatcggcatgacgcacggcattatggaatacacccttgaaaacctggaacgatacgtccgcaacgacatcagattcgtcgattacgaacgccgcgaaatccggcgccgccatcaggtttccgagattctttaccgctacgtctgccattccgtttcgcccgttgcacccgtcgcccatcaactgatggaggcgaacatcgtcaaaaccctcgccacggaatacacttacgccgccgcgcaaatgttgcaaaaactcttgggcgcgaagggttttgaacgcggacacaccgccggcaatatcgctatcgacatccgccccttcacgatttttgaaggcccgaacgatatgctttatgccgaaatttacgaccagtttgtccgcgccaccgccgaagaaaaagaagcaggcatgaagttggacaaaaaccaaaccctgctcgaccgcctgcaaaccgatgcccgctttgccgccgtcgcccgcgactacactttgcccgaagacatccgcagcttcctgcaggaacacaccctgaccgatgcctgcgccctgcaaaaagtctttatcggcaaaatcatcgcccgactctttgtcttcgtacaggcggaacacgaagacaccgcagccttcctgctgaacgacatccgcaaagacatattggactgccgatattgcggatag

SEQ ID NO: 67688 - DNA, 561 bp, Neisseria meningitidis
  misc_feature 546, 547, 548, 549, 550: 'n' is a, c, g or t
atgagctacacgcaactgacccaaggcgaacgataccacatccaatacctgtcccgccactgcaccgtcaccgaaatcgccaaacagctgaaccgccacaaaagcaccatcagccgcgaaatcagacggcaccgcacccaagggcagcaatacagcgccgaaaaagcccagcggcaaagccagactatcaaacagcgtaagcgacaaccctataagctcgattcgcagctgattcagcacatcgacacccttatccgccgcaaactcagtcccgaacaagtatgcgcctacctgtgcaaacaccaccagatcacgctccaccacagcaccatttaccgctaccttcgccaagacaaaagcaacggcagcacgttgtggcaacatctcagaatatgcagcaaaccctaccgcaaacgctacggcagcacatggaccagaggcaaagtacccaaccgtgtcggcatagaaaaccgacccgctatcgtcgaccagaaatcccgtatcggcgattgggaagccgacaccattgtcggcaaaggacaggannnnncacacacttaa

SEQ ID NO: 67689 - DNA, 813 bp, Neisseria meningitidis
atggcttcaaaacccttcctaaaatgggcaggcggcaaacataaacttgtcccctttatcgaacataatctacccactcctacacgaaaacgcctgattgaacccttttgcggttctgccgctttgtctcttgcattggacttcgaacattatctgctcaatgatattaacgctgacttaatcggcttattccgtatcctaaaagaagaaaaatccggattcatcgactacgcccgctctttctttatttccgaaaacaatagcgattcaagattctatgaattgcgggaacaattcaacttcagcaaaaatctgcacgaacgctcagcactatttatttatttgaaccgtcatgcttttaacggtttatgccgttacaacagcaaaggggtattcaatgtgccgttcggacgctacaaatcgccgtactttccccaacaagaaatggaaggtttcattcagaaatctgacagagttgaattaatgtgcggagattttcaaatgattctatctcagacagacaataccgatacggtttattgcgatcccccttacgcgcctttaagcccaaccgcttcatttaccacttatgccaaagaaggtttcaatttagacaatcaaatccgtcttgcccagtcagcccaacaaattgcgcccgattcccaaggcgttttgatttcaaatcatgatactgaattcacaagggatatttattcttttgccattctgaaaacaattgaagtacaacgcaatattgccgcaaaaggcagcagccgtaaaaaagtcggagaattattggcaatttatgattga

SEQ ID NO: 67690 - DNA, 807 bp, Neisseria meningitidis; identical to SEQ ID NO: 36225

SEQ ID NO: 67691 - DNA, 2766 bp, Neisseria meningitidis
atgcgaatccgccgccgtctgaaaaacatttatctgctggacaaaaaaaaccttgcccgcaaccatgtgcagcttatcaaccagtttgagcagacgggcacgcatgcaaaccgctatgacgttaccgtgttggtaaacggcctgccgctggtgcagattgaattgaaaaaacgcggtgtggcggtgcgcgaggcattcaatcaggtgcaccgttacagcaaagagagcttcaacagcgaaaattcgttgttcaaattcctgcaaatcttcgtgatttccaacggcacggacacgcgctatttcgccaacaccaccaagcgcgacaaaaacagcttcgatttcacgatgaattgggcgcggtcggacaatcatccgattaaggatttgaaagactttaccgccacgttcctgcagaaaagcgtattgctgggcgttttgctgcattacagcgtgttcgatgcgaatgatacgctgctgattatgcggccgtaccagattgccgccgccgaacgtattttgtggaaaatcaacagttcggcgcaggcgaagaattggagtgggccggaaagcggcggctatgtttggcataccacgggcagcggcaaaacgctgaccagctttaaggcggcgcgtctggcgacggaatcggcgtttatcgacaaggttttcttcgtggtggacaggaaggatttggactatcagacgatgaaggaataccaacgtttttcgcccgacagcgtgaatggttcggaaagcacggcgggcttgaaacgcaatttggaaaaagacgacaacaaaatcatcgttaccaccatccaaaagctgaacaacctgatgaagagtgaagataatctgccggtttaccatcagcaggttgtatttattttcgacgaatgccaccgctcgcaattcggcgaagcgcaaaaaaacctgaaaaagaaatttaagaaattctgccagttcggttttaccggtacgccgatttttcccgaaaacgctttgggcgcggaaaccacggcgggcgtgttcgggcgggagctgcattcttatgtgattaccgatgccatccgcgatgaaaaagtattgaaattcaaagtggattacaacgacgtgcgcccgcagttcaaagccgtggaagcggaacaggacgagaagaaactgagtgccgccgaaaaccgccaagccctgctgcaccccgaacgcatccgcgaaatcacgcaatatatcctgaatcagttcaggcagaaaacgcaccgcctgaacgcgggcggcaaaggctttaacgccatgtttgccgtcagcagcgtggatgcggcgaagtgctattacgaagcgttcaaaacgcaacaggcaggcagcctgaacccgttgaaaacagccactattttttcctttgctgccaacgaagagcagaacgccgtcggtgaaattgtcgatgagacttttgaaccggaagcgatggacggcagcgcgaaagaatttttgcaggctgccatcaacgattacaacgcctgttttaaaaccaatttcggcacggacagcaaagcctttcaaaactactaccgcgatttggcaaaacgggtgaaaaatcaggaagtggatttgctgattgtggtcggcatgtttttgacgggttttgacgcgccgacgctgaacacgctgttcgtcgataaaaacctgcgctatcacggcctgatgcaggcgttttcgcgcaccaaccgcatttacgatgccaccaaaaccttcggcaatattgtctgcttccgcgatttggagcaggcaaccattgatgcgattaccctgttcggcgacaaacacaccaaaaacgtggtgctggaaaaaagctacgaagaatacatgaacggctataccgacagccagaccggcgaagtgcggcgcggttatttggatgtggcaaaagagttgcgtgaacgtttccccgaacccgacgaaatcgaaacggaaaaagacaaaaaagattttgccaaactcttcggcgaatacctgcgggcggaaaacgtattgcagaactacgatgaatttgccgcgctgcgcgagttgcagagtgtggacgcggcggacgaagatgcgatgaaggcgtttcaagaaaaatactacttgagcgatgaagacgtgcaggaaatgcggcaagtgccgatgccgtctgaaagggcggtgcaggactaccgttccgcctacaacgacatccgcgattggttgcgccgccaaaaagcaggcgaacaaaaagaacagtcaaaaatcgattgggacgatgtggtttttgaggtggatttgctcaaatcacaggaaatcaatctggattacatcctgcaactggttttcgaacaccacaaaaaaatcaaaggcaaagcggagctggtggaagaaatccgccgcatcatccgcgccagcatcggccaccgcgccaaagagggtctgattgtggatttcatcaacgatacggatttggacaaagtacccgacgttcccgccatactggaaaccttctacacctacgcgcaagaggtgatgcggcacgaagcggcaggattgattgccgccgaaggcctgaacgaaaccgccgccaaacgctatttaatcagctctctcaaacgcggctatgccagcgaaaacggcacggaactgaccgaaaccctgccgaaaatgagtccgatcaacccgcaatatctgacgaagaaacaaagtgtttttcaaaagattgcggcgtttgtggagaagtttgccggaatagggaccgatatttga

SEQ ID NO: 67692 - DNA, 216 bp, Neisseria meningitidis; identical to SEQ ID NO: 38426

SEQ ID NO: 67693 - DNA, 192 bp, Neisseria meningitidis; identical to SEQ ID NO: 42043

SEQ ID NO: 67694 - DNA, 288 bp, Neisseria meningitidis; identical to SEQ ID NO: 43621

SEQ ID NO: 67695 - DNA, 1002 bp, Neisseria meningitidis
atgattgacagacaaacaaacgaacccaaacaaaaaacccgaatcatccttgcccctatgcaagggctggtagacgatgtaatgcgcgacctgctgacgcggataggcggctacgacgaatgcgtcagcgaatttgtacgcattacccataccgtgcattcccgatctatatggttaaaatatgtccccgaaatcgccaacggaaacaaaacgttttccggcacgccctgcaccgtccaacttctgggcagcgatgcggacaatatggcggagaatgcgctggaagccgtccgcttcggtgcgaacaaaatcgatttgaacttcggctgccccgcgcccaccgtcaacaaacacaaaggcggcgcaatccttttaaaagagccggaactgatattccacatcgtcaaaacgctgcgcggacgtttgcccgcacatattccgctcaccgcaaaaatgcggctcggttacgaagacaaaagccgggctttggaatgcgcctgtgcgattgccgaagggggcgcatgcggactgaccgtacacgcgcgtaccaaagccgagggttacgaaccgccggcgcattgggaatggataaggaaaatccgagacagcgtcaatattcccgttaccgccaacggcgacgttttcagcctgcaagactatatcggcatcaaaacaatcagcggctgcaacagcgtgatgctcggtcgcggcgcggtcatccgccccgatttggcgcggcaaatcaagcaatacgagaacggcgggccggtcaaagacacggattttgccgaagtttctaaatggatacggcagtttttcgagctgtgcctgacaaaagaggcaaacaataaatacccgatcgcccgtcttaagcaatggttgggcatgatgaaaaaaacgttcgacccggcgcaaacgctgtttgaccgcgtccgaacggttaaggatgcggatgaagtccgccgaatcctgaacgcatttgagcatgagataaatgtttga

SEQ ID NO: 67696 - DNA, 1248 bp, Neisseria meningitidis
atgttgaaacaaacgacacttttggcggcttgcgcctcctttgccgcactgttgggcggttgtgctacccagcagcctgcccccgtcattgcaggcaattcaggtatgcaggacgcgccgtcttcggcagtttacaacaacccctatggagcaacgccgtacagcccggctcctgccggcgatgcgccttatgtgccgccggtgcaaagcgcgccggtttatacgcctcctgcttatgttccgccgtctgcacctgccgtttcgggtacatacgttctttcttacgcacccgtcgacatcaacgcggcgacgcatactattgtgcgcggcgacacggtgtacaacatttccaaacgctaccatatctctcaagacgatttccgtgcgtggaacggcatgaccgacaatacgttgagcatcggtcagattgttaaagtcaaaccggcaggatatgccgcaccgaaagccgcagccgtaaaaagcaggcccgccgtaccggctgccgcgcaaccgcccgtacagtccgcacccgtcgacatcaacgcggcgacgcatactattgtgcgcggcgacacggtgtacaacatttccaaacgctaccatatctctcaagacgatttccgtgcgtggaacggcatgaccgacaatatgttgagcatcggtcagattgttaaagtcaaaccggcaggatatgccgcaccgaaaacctcagccgtagaaagcaggcccgccgtaccggctgccgtgcaaacccctgtgaaacccgccgcgcaaccgcctgtgcagtccgcgccgcaacctgccgcgcccgctgcggaaaataaagcggttcccgcgcccgccccgcaatctcctgccgcttcgccttccggcacgcgttcggtcggcggcattgtttggcagcgtccgacgcaaggtaaagtggttgccgatttcggcggcaacaacaagggtgtcgatattgccggtaatgcgggacagcccgttttggcggcggctgacggcaaagtggtttatgcaggttccggtttgaggggatacggcaatctggtcatcatccagcataattcttccttcctgaccgcatacgggcacaaccaaaaattgctggtcggcgaaggccagcaggtcaaacgcgggcagcaggtcgctttgatgggcaataccgacgcttccagaacgcagcttcatttcgaggtgcggcaaaacggcaaaccggttaacccgaacagctatatcgcgttctga

SEQ ID NO: 67697 - DNA, 591 bp, Neisseria meningitidis; identical to SEQ ID NO: 39124

SEQ ID NO: 67698 - DNA, 1074 bp, Neisseria meningitidis
atgcgcccgtttttcgtcggcgcgacagtgcttgccatactcggcgcgttggtgtttttcatcagccccggtgccgtcgtcctgcaccgccaaatcttcttagaactcatgctacctgcggcatatggtggtttcctgactgcggctttgttggactggacgggtttttcgggtaacctgaaacctgtcgcgactttgatggcggcattattgctcgccgcatccgctatactgcccttttcgccgcaaactgcctcgtttttcgtcgccgcctattggctggtgttgctgctgttctgcgcccggctgatttggctagaccgaaacaccgacaacttcgccctgctaatgttacttgccgcgttcactgtttttcagacggcatatgccgtcagcggcgatttgaacctgttgcgcgcgcaagtgcatctaaatatggcggcggtgatgttcgtatccgtgcgcgtcagtattcttttgggcgcggaagccctgaaagaatgccgtctgaaagacccagtattcatccccaatgtcgtctataaaaacatcgccattaccttcctgctcctgcacgccgccgccgaactttggctgcctgcgcaaaccgccggttttacctcgctcgccgtcggctttatcctgcttgccaagctgcgtgagcttcaccatcacgaactcctgcgcaaacactacgtccgcacttattacctgctccaactctttgccgccgcaggctatttgtggacaggcgcggcgaaattacaaaacctgcccgcctccgcgcccctgcacctgattaccctcggtggcatgatgggcagcgtgatgatggtgtggctgactgccggactgtggcacagcggctttaccaagctcgactacccgaaactctgccgcatcgccgtcctcctgctctttatggctgccgtctcgcgtgctttcttgatgaacgtgaatccaatattcttcatcaccgtccccgcgattctgaccgccgccgtgttcgtgctttacctgctgacattcgtaccgatctttcgggcgaacgcgtttacagacgatccggaataa

SEQ ID NO: 67699 - DNA, 1458 bp, Neisseria meningitidis
atgaaaccaaccatcgcgcttgtcggccgccccaacgtcggcaaatctactttattcaaccgtttgacgcgcaccaaagacgcgctcgtgcacgacctgcccggtctgacgcgtgaccgacattacggtcatggcaaagtcggcagcaaaccttatttggtcatcgataccggcggttttgagccggttgtcgatagcggcattttgcacgaaatggcaaaacaaaccttgcaggctgtcgatgaagccgatgcggttgtgtttttggtggatggtcgcaccggtttgacaccgcaagacaagattattgccgaccgtttgcgccaaagtccgcgccctgtttatctggcggtaaacaaaggcgaaggcggcaacagggccgtgcttgctgccgagttctacgaacttgctttgggcgacccttatgttatttccggtgcgcacggcgacggcgtgtattacctgattgaagaaattttagaaaacttccccgagccggaagtcgaagaagccgatgcaaaacatcccgtttttgccgtcatcggtcgtccgaacgtcggcaaatccacgctggtaaacgccattctcggcgaagagcgcgtgattgccttcgatatggccggcacgacgcgcgacagtatccatatcgatttcgagcgcgaaggcaaaccgttcaccatcatcgataccgcaggtgtgcgccgtcgcggcaaagtcgatgaagcggtggaaaagttctccgttatcaaagcgatgcaggcggttgaagcggcaaacgtcgctgttttggtattggacgcgcagcaggacatcgccgaccaagatgcgacgattgcaggtttcgctttggaggcaggccgtgctttggtggtggcggtcaataaatgggacggcatcagcgaagaacgtcgcgagcaagtgaaacgcgatatcaaccgcaaactgtatttccttgattttgctaaattccactttatttccgcattgaaagaacgcggcatagacggattgttcgacagcattcaggctgcctacaacgcggcgatgattaagatgccaacaccgaaaatcacgcgcgtcctgcaaagcgcgatcgagcgtcagcaaccgccgcgtgctggcttggtgcgtccgaaaatgcgctatgcccaccaaggcggcatgaatccgccggtgattgtggtacacggcaattcgctgcacgcaatttccgacagctatacgcgctacctgacccaaacattccgcaaagccttcaatctgcaaggcacgccgctcagaattcaatacaatgtttcagaaaacccctatgaaaatgcggaagacaaaccgaagaaaaaaccgctgcgccgtgtcagcctgagcaaccgtattgagaaacgcgaagaccgcaaagaagagaaaaaccgcttcaagaagaaaaccaaagtcagtgtgaaaaaacaattcagcaaataa

SEQ ID NO: 67700 - DNA, 1422 bp, Neisseria meningitidis
atgaaaatcattcagatacagaacaatcacaatgtaaacgatgaccgccccgagtttgaccgcgcgctgattgccagcctgcccgccagcggcccgcgctacacttcctaccctaccgccgaccgtttccatgacggtttccgcgaaggcgaatatatcaaagctttacatttgcgcggtatgggcgcgttaaacaaaccgctttccctttacattcacattccgttctgcaacaccatctgctactactgcggctgcaacaaaatcatcaccaaagacaaaagccgcgccgatgcctacatcgaatatcttgaaaaagaaatggaactgctcgctccacatctgaacggacggcaccagcttgcccaactgcacttcggcggcggcacgccgacctttttgagcgacgaacagatcgaacgtgtcttccgcatgatacgcaaacatttcgagttaatccccaccggcgaatactccatcgaaatcgacccgcgcaaagtcagccgcgacaccgtcctcatgctcggcagactcggcttcaaccgcatgagcatcggcattcaggatttcgaccccaaagtgcaggcggcggtcaaccgcatccaaagttacgaagaaaccaaagaagtcatcgatgcggcgcgcgaagcggggttcaaatccgtcagcgtcgatttgatttacggcctgccgcaccagacttcggaaagcatcaaaaccaccatcgataccgttttgtcgctcgatcccgaccgcctcgccctttatcactacgcccacctgccgcacgtgttcaaaccgcaacgccgcatcgataccgccgccgtccccgacagcgaagagaagctcgatatgctgcaatactgcgtccaaaccctaaccgaacgcggctacgtcttcatcggcatggatcatttcgccaaacctgacgacgaactctccatcgccctcaaagaaggcttcctccagcgcaacttccaaggctattcgacctacgcggattgcgatttggtcgccatcggcgtgtcgtccatcggcaaaatcggcagcacctattcccaaaacgaacgcgacatcgatgcctactatgccgccatcgacgaaggcagactgcccatcatgcgcggttatcagctcaatcaggacgacatcctgcgccgcaacatcattcaggatttgatgtgccgtttcgcgctcgactatcggatttacgaaagtatgttcggcatcccgttcgaccgctacttcaaagacgaactggcggatttggaaaaactcgccggtttgggattggtgcgcctgaacagccacggactgaccgttaccccgaaaggacgcttcctcatccgcaacatcgccatggttttcgattaccacctgcgccataaagaaaccaaggcgaaatattcgcaaacagtgtga

SEQ ID NO: 67701 - DNA, 1338 bp, Neisseria meningitidis
atgagtaaccatacttcttggtcgtccaaaatcggtttcgtgcttgctgcggcaggttcggccatcggtttgggcgcgatttggaaatttccttatacggcaggcaccaacggcggcgcggtgtttttcctgctgtttttgatatttaccgtcttggtcgccctgcccgtccagcttgccgagttttatatcgggcgcacaggcggtaaaaatgccgtcgattccttcagggctctgcgtccgagtacgcaatggctttgggtcgggcgcatgggcgtttccgcctgctttattttgctgtcgttttacagcgtggtcggcggatgggtattaaattatgtcgtccacagtttcacgggggcggttcataccggcgcggactttgaagccttgttcggcgcgacgatttccaatccggcaggttcgctgtcctatcaggcactgtttatgctgattacggtctgggtggtcaaaggcggcatttcagacggcattgaaaaggcaaaccgttatctgatgccggggctgtttatcctctttattgcgctggcaatccgttcgctgacgctgccgggtgcaatggagggcgtgtctttcctgctcaaaccgaattggtcgtactttaaagccgatacgatgattacggctttaggccaggcgttttttgccttgagcatcggcgtttccgctatgattacctatgcttcgtatttgggaaaagatcaggatatgttccgctcggggcatacgattatgtggatgaacctcttggtttcgctgttggcaggtttggtgatttttccggcggtgttcgccttcggttttgaaccgagccaggggccgggattgatttttatcgtattgccggcggtgtttatgaaaatgccgttcggtacggttttgtttgcggtatttatgctgctggtcgttttcgccacgctgacttcggcattttcgatgttggaaacggtcattgcctcaaccatccgccaagacgagcgcaaacgcaaaaaacatacttggcttatcggcacggctatttttattgtcggcatcccgtccgcgctgtctttcggcgtatggggtgagtttaaggttttcggcaaaaccatttttgatttgtgggactaccttatttctgcagtcatcatgcctgtcggcgcattgagcgttgccgtatttaccgcctggattcaggacaagcagtctgtgttaaaagatgccggcgcgggcagcaccgtaccacgggcagtgctgctgctgtggctgaataccttgcgctacctcgccccgattgccattattattgttttcgtcaattctttggacatcctttaa

SEQ ID NO: 67702 - DNA, 2604 bp, Neisseria meningitidis
atgagcaaaaccgtccgttatctgaaagattaccaaacgcctgcctaccgtattctcgaaaccgacctgcatttcgatattgccgaaccgcaaaccgtcgtgaaatcccgtttgacggttgagccgcagagggtaggggagccgctggtgttggacggttcggcgaaactcttgtccgtcaaaatcaacggggcggcggcggattatgtgttggaaagcgaaacgctgacgattgcgggcgtgccgtccgaacgcttcaccgtcgaagtggaaaccgaaatcctgccggcggaaaacaaatcgctgatggggctgtatgcttccggcggcaacctgtttacccaatgcgagccggagggcttccgcaaaatcacgttctacatcgaccgtccggatgtgatgtccaagttcacgaccaccatcgtcgcggacaaaaaacgctatcccgttttgctttccaacggcaacaaaatcgacggcggcgagtgttcagacggccgccattgggtgaaatgggaagacccgtttgccaaaccgagctatctgtttgctttggtcgcgggcgatttggcggtcacggaagaccgtttcaccaccatgagcggcagaaacgtcaaaatcgagttttacaccaccgaagcggacaagcccaaggtcggctttgccgtggaatcgctgaaaaacgcaatgaagtgggacgaaacgcgcttcggtttggaatacgacttggatattttcatggtcgtcgccgtgggcgatttcaatatgggcgcgatggaaaacaaggggctgaacatttttaacaccaagttcgtcctcgccgacagccgtaccgccaccgataccgattttgaaggcattgaatccgtggtcggacacgaatatttccacaactggacgggcaatcgcgttacctgccgcgactggttccagctttcactgaaggaagggctgaccgtgttccgcgaccaagaattttccggcgaccgcgccagccgcgccgtgcgccgcatcgagaacatccgcctgctgcgccagcaccagttccccgaagacgcaggcccgaccgcccatccggtgcgccccgccagctatgaggagatgaacaatttctacaccatgaccgtttatgaaaaaggcgcggaagtggtgcggatgtatcacaccctgctcggcgaagagggcttccaaaaaggcatgaagctctatttccaacgccacgacgggcaagccgtgacctgcgacgatttccgcgcgacaatggcggacgcgaacggcattaatctcgaccagttcgccttgtggtacagccaggcgggcacgcccgttttggaagcggaaggtcgtctgaaaaacaatgttttcgagttgaccattaaacaaaccgtgccgcctacgcccgatatggcggacaagcagccgatgatgattcccgtcaaaatcgggctgctgaaccgcaacggcgaagcggtggcatttgattatcagggcaaacgcgcgaccgaagccgtgttgctgctggccgaagccgaacagaccttcccgctcgaaggcgtaaccgaagccgtcgttccctcgctgctgcgcgggttcagtgcgccagtgcatctgaactatccgtacagcgacgatgacctgctgctcctgcttgcccacgacagcgacgccttcacgcgctgggaagccgcgcaaacgctctaccgccgcgccgtcgccgccaaccttgccgcgctttcagacggcgtcgagttgccgaaacatgaaaaactgcttgccgccgtcgaaaaagtcatttcagacgacctcttggacaacgccttcaaagccctgcttttgggcgttccgtctgaagccgaactgtgggacggcacggaaaacatcgacccgttgcgctaccatcaggcgcacgaagccttgttggatacacttgccgtccacttcctgccgaaatggcacgaattgaaccgtcaggcggcgaagcaggaaaaccaaagctacgagtacagccccgaagccgccggctggcgcacgctgcgcaacgtctgccgcgcctttgtcctgcgcgccgaccccgcgcacatcgaaaccgttgccgagaaatacggcgaaatggcgcaaaacatgacccacgaatggggcatcctgtccgccgtcaacggcaacgaaagcgatacgcgcaaccgcctgctggcgcagtttgccgacaagttttcagacgacgcgctggtgatggacaaatatttctccctcgtcggctcaagccgccgcagcgacaccctgcaacaggttcaaaccgccttgcagcatccgaaattcagtatcgaaaaccccaacaaagcccgatcgcttatcggcagcttcagccgcaacgtcccgcattttcacgcagaagacggcagcggctaccgcttcatcgccgacaaagtcatcgaaatcgaccgcttcaatccgcaggtcgccgcccgcctagtgcaggcgttcaatctctgcaataagctcgaaccgcaccgcaaaaacttggtgaaacaagcattgcagcgcattcgggcgcaggaaggattgtcgaaagacgtgggcgaaatcgtcggcaaaattttggattga

SEQ ID NO: 67703 - DNA, 210 bp, Neisseria meningitidis
ttgacaaaaggccgtctgaaaaacagctttgacaaagacgcggttgccaaagagatcggcctacaaagggaagtaacgcaggcgttcggcaaaacgccgcccaagtcgcagcggtcgttgccgacaaactcggcaatacccgaagttacggacggtatcagacagccaaaaccctgccggaggccgaactgcaaaacaaatccgacataa

SEQ ID NO: 67704 - DNA, 381 bp, Neisseria meningitidis
atgaaacagacagtcaaatggcttgccgccgccctgattgccttgggcttgaaccaagcggtgtgggcggatgacgtatcggattttcgggaaaacttgcaggcggcagagcagggagatgctgatgcccaaaacaatttgggcgcgatgtatgccgaaagacaaggcgtgcgccgggatgatgctgaagcggtcagatggtttcgtaaggcggcggatcaggggttagcacaagcccaatttaatttgggcgcaatgtattacaaagggcacggcgtgcgccaagaccgcgcccttgcacaagaatggcttggcaaggcgtgtcaaaacggaaaccaagacggctgcgacaatgaccaacgcctgaaagcgggttattga

SEQ ID NO: 67705 - DNA, 1368 bp, Neisseria meningitidis
atgcctgaccttcataccgaattttcccgactcctgccggcagatgaaattgccgaactttctccgacgcttttaaaagaccagcgcaaccgctttacgtctgcaccagacatcattttgcagccgcgcagcgttgaaagcgtgcaaaccattatgcgtttttgttacgaacaccgtattccggttacgccgcaaggcggcaataccggtttgtgcggcgcggcagtatcggaaaacggcgtattgctgaacctttccaaactcaaccgcatccgcagcatcaatttgtcagacaactgcataaccgtcgaagcaggttccgtactccaaaccgtccaacaggcagccgaagcctcaaacaggctgttcccactcagtctcgccagcgaaggctcctgtcaaatcggcggcaacatcgcctgcaatgccggaggtttgaacgtattgcgttacggcacgatgcgcgacctggttatcggtttggaagtcgtcctccccaacggcgagctggtttcccatctccatcccctgcataaaaacaccaccggctacgacctgcgccatctgtttatcggcagcgaaggcacactgggcatcatcactgccgccacgctcaagctttttgcccgtccctcggacaaggcaacggcatgggtcggcatacccgacatcgaatccgccgtccgcctgctgaccgaaacccaagctcactttgccgaacgcctatgcagttttgagctgatcggccgttttgccgccgagttgtcttccgaattcagcaaattccccctgccgacacattcagaatggcatattttacttgagttgaccgactcattacccgacagcaatcttgatgatcggcttgtcgaatttctttataaaaaaggatttaccgacagcgtattgacacaaagcgaacaagaacgtatccatatgtgggcattgcgcgaaaacatctccgcatcgcaacgcaaactgggcaccagcatcaaacacgatattgccgtccctatcgggcgcgttgccgactttgtccgccggtgcgccaaagatttggaacaaaattttaaaggcatacaaatcgtctgcttcggacatcttggcgacggcagcctgcactacaatactttcctgcccgaaatcctcagcaatgaagtctatcgttacgaaaacgacatcaacgacgcagtttatcgcaacgttcttgcctgcaacggcacgattgccgccgaacacggcataggtatcatcaaaaaacagtggctggacaaagtacgcacgcctgccgaaatcgccctgatgaaaagcatcaaacaacaccttgatccatataacattatgaatccgggcaaactgcttccgtaa

SEQ ID NO: 67706 - DNA, 1518 bp, Neisseria meningitidis
atgttgtatttcagatacggttttttggttgtttggtgtgcggcaggtgtttctgccgcctatggggcggatgcgcctgcaattttggatgacaaagctttgtcgcaggtgtggcggtcggtgtcggataaatgggcggaatcggattggaaagttgaaaatgatgccccgcgcgtggttgacggggattttttgttggcgcacccgaaaatgttggaacatagtttgcgcgacgcgctcaacggcaatcaggcggatttgatcgcttcgttggaggatttgtatgccaagctgccggattatgacgcggttttgtacggcagggcgcgggctttgctggcgaaattagcgggaaggccggcggaggcggtggcgcggtatcgggaactgcacggggaaaatgcggcagacgagcggattttgctggatttggcggcggcggagtttgacgatttccgactgaagtcggcagaaaggcattttgcggaggcggcaaaattggatttgccggcgccggttttggaaaatgtggggcgttttcggaaaaaaacggaggggctgacgggctggcgtttttcgggcggcatcagcccggcggtcaatagaaatgccaataatgccgcgccgcagtattgccggcaaaacggaggccggcagatatgcagtgtcagctgggcggagcgggcggcagggttgaattatgaaatcgaggcggaaaaactgacggcgttggcagataatcattatttgttgttccgttccaatatcggcggcacgagctattatttcagtaaaaaatcagcttatgatgacgggttcggcagggcgtatttgggttggcagtataaaaatgcgcggcagacggcggggattttgccgttttatcaggtgcagttgtcgggcagcgacggctttgatgcgaaaacaaaacgggtaaacaaccgccgcctgccgccgtatatgctggcgcacggagtcggcgtgcagctgtcccatacttaccgcccaaacccgggatggcaattttcggtcgcgctggaacattaccgccaacgctaccgcgaacaggatagggcggaatacaataacggccggcaggacgggttttatgtttcgttggcaaaacgtttgggtgaatcggcaactgtgttcggcggctggcagtttgtgcggtttgtgccgaaacgtgaaacggtgggcggcgcggtcaataatgccgcctaccggcgcaacggtgtttatgccggttgggcgcaggagtggcggcagttgggcggtttgaacagtcgggtttctgcgtcttatgcccgccgcaactataagggcattgcggctttctcgacagaggcgcaacgcaaccgcgaatggaatgtctcgctggctttgagccacgacaagttgtcgtacaaaggtatcgtgccggcgttgaattatcgtttcggcaggacggaaagtaatgtgccgtatgcgaaacgccgcaacagcgaggtgtttgtgtcggcggattggcggttttga

SEQ ID NO: 67707 - DNA, 318 bp, Neisseria meningitidis; identical to SEQ ID NO: 39139

SEQ ID NO: 67708 - DNA, 651 bp, Neisseria meningitidis
atgatttcggttgaacatgtttccaagcagtatcaaatgcgcggcggtatgcggacggtgttagacgatatcaatttttcgctgcaaaagggtgagaaagttggtattttgggtcgaaacggtgcaggtaaatcgacgttgatccgtttgattagtggtgtcgagccgctgaccacgggtgaaatcaagcggacaatgagtatttcttggcctttggcattctccggtgcgtttcaaggtagtctgaccggtatggacaatttgcgtttcatctgccggatttacaatgtcgatatcgattatgtgaagaactttaccgaagagttttccgagttggggcaatatctttacgagccggtcaagcgttattcttcaggtatgaaggcgcgtttggcatttgctttgtcgttggcggtagagtttgattgctatttgattgacgaagtgattgcagttggtgactcgcgctttgccgataaatgtaagtacgagttgtttgaaaagcgcaaagaccgttccatcatcttggtgtcgcacagccacagcgccatgaagcaatattgcgataatgcgatggtgctggaaaaagggcatatgcaccagtttgaagatatggacaaagcctacgaatattataattcgctgccttaa

SEQ ID NO: 67709 - DNA, 291 bp, Neisseria meningitidis
atggcactgacacttgccgacgtagacaaaatcgcccgactctcccgactgcacctgactgcggcagaaaaagaaaaatcgcttcaagaattaaacgacattttcgctatggtcgaacagatgcagaacatcaacacagacggcatcgaaccgatggcgcatccgcacgaggccgccctgcgcctgcgcgaagacgaagtaaccgaaaccgaccgcgccgccgaatatcaggcggttgctccagaagtacgcaaccgtctgtacatcgtaccgcaagttatcgaagaataa

SEQ ID NO: 67710 - DNA, 534 bp, Neisseria meningitidis
atggcagacttcaaccaaatcctgacccccggcgatgtggacggcggcatcatcaacgtcgtcaacgaaatccccgccagcagcaaccacaaaatcgaatggaaccgcaaactcgccgtattccaactcgaccgtgtcgaacccgccatcttcgccaaaccgaccaactacggcttcatcccccaaacattagacgaagacggcgacgaattggacgtactgctcgttaccgaacaacctctggcaaccggcgtattcttggaagcgcgcgttatcggcgtgatgaaattcgttgacgacggcgaagttgacgacaaaatcgtctgcgtccccgccgacgaccgcaacaacggcaacgcctacaaaactttgtccgatttgccgcaacagctcatcaaacaaatcgaattccacttcaaccactacaaagacctgaaaaaagcaggtacgaccaaagtcgaatcctggggcggtgtggaagaagcgaaaaaagtcatcaaagaatccatcgaacgttggaacaaacaggcataa

SEQ ID NO: 67711 - DNA, 504 bp, Neisseria meningitidis
atgtcagaccctaatttgattgacccggaaatttttgccgccgaagggcagaacctgcaaggcagttttctgctggaagaattggatgaacgcgtcagttcgcacgattatcccgccgacaggcagaccaaaatatcgtttacactgaccggcggtcgcgaccggctgcaacgcctgttcctcgacctgaacgtcaaagccgatatgcccctgatttgccagagatgtatcaaacccatgccgttcatgcttgatgaaagcagccgtatcgtcctgttttccaacgaagagtccttggacgaatccatgcttgccgacgaagaactcgaaggcatactgattgaaaaagaactcgacgtgcgcacattggtagaagaccaaatcctgatgtccctgcccttttcgccgcgacacgaagactgcggcgacaatgggacactggaagaagtcaatcgggacaaacccaacccctttgctgttttggcaggtttgaaaagcaattga

SEQ ID NO: 67712 - DNA, 225 bp, Neisseria meningitidis; identical to SEQ ID NO: 38642

SEQ ID NO: 67713 - DNA, 1350 bp, Neisseria meningitidis
atgaaattaccggtgatgtcgcccgaacattcggcgcaacttcaggcgtttgaggcaaaaatcctgtccaatcacgccaaaatcgaggcgtggttccgcacgcagtggagcgtacaccgcccgccgttttacggttcggtcgatatacgcaatgccggttacaaaatttcgtctatcgatatgaatttgttccccggcggcttcaataatctgaatcccaactttatcccgctggcggcggttgccgcgcaagatgcggtgcaacgcgcctgcgaaacggcgaaatccgtattgattattcccgaaaaccacacgcgcaatacgttttacctgcaaaacatttacgccctcggcgagattttgcgttcggcagggtatgaagtgcgcttgggcagcctgaatccggaagtaaccgaaccgaccgaatttgaaactgcattgggcgacaaaatcctgttggaacctttattgcgtacccgcgaccgcgtccatcttgcagacggcttttcgccttgcgtggttttgttgaacaacgatttgtctgccggcattcccgacatcctcaaaggcatcagccaaaccgttttgccgccgttgcacggcggttggacgacgcgccgcaaaacaaatcatttcggcgcgtacaaccaagttaccgccgaatttgccaagttaatcggcatcgacgaatggcaaattaacccttattttgaaaaaatcggcggtttggacttccaagggcgtgaaggcgaagacgcgttggcggaagcggtagaacgtgtgctggcgaaaattcaagccaaatacgacgaatcgggcattaccgacaaacctttcgtcatcgtcaaagccgatgccggcacttacggcatgggcgtgatgagcgtcaaatccgccgacgaagtgcgcggattgaaccgtaaaaaccgcaataaaatggcgaaagtcaaagaaggcttggaagtcagcgaagtgattgtccaagaagggatttatacttatgaaaccttaaacggcgcggtgtgcgaacccgtcgtgtatatgatggaccgcttcgtcatcggcggctttttccgcgtacacgaagggcgcggtgcggacgaaaacctcaacgccggcggtatggtgtttgttccgctgtctaacagcattcctaccggtaacggcgataattcccaagaagcgcccgaagcctgcaagcgcgtattcgaacaatgggactcgctgggtatgccgcgctctgaaaaagactgcgacgtggacaacgaacacaaccgcctctacgtttacggcgtaatggcacgcctgtcgcttctggcggcttcaatcgagttggaagaaacggcgtaa

SEQ ID NO: 67714 - DNA, 378 bp, Neisseria meningitidis; identical to SEQ ID NO: 36713

SEQ ID NO: 67715 - DNA, 660 bp, Neisseria meningitidis; identical to SEQ ID NO: 44330

SEQ ID NO: 67716 - DNA, 780 bp, Neisseria meningitidis
atgttttttgtcctttcccctgcgaagaaccttaatgaaaaagaccctgcccctgtcagcgagtttacccaacccgacctgctggcagagtccgacattctaatgcagcagttgcgcgagcttgcgccgcaacagattgccgaactgatgcacgtttccgacaaaattgccctcttaaacgcgcagcgcaatgcagaatggcacacgccgtttacgccggaaaacgccaaacaggcggtctttatgttcaacggcgatgtttacgaaggtatggatgcaaacacattggatattggacagatacgctatctgcaaaaccatgtccgcctgctgtccggtctgtacggtcttcttcgcccgttagacctgatacagccctatcgtttggaaatggggacggcatttgccaatttgcgcggcaagaatttgtatgagttttggggcgacatcattaccaaccttttaaatgacacgcttgcccaagcaggcagcaatacgcttgtcaaccttgcctcacaggaatatttcaagtccgtcaacacgaaaacacttcgggcgcggctgattaccccgatatttaaagacgaaaaaaacggtaaatataaaatcatcagtttctatgccaagcgtgcgcgcggattaatggtgcgctatgcggcagaacatcatattaccgaccctgaaatgctgaaaaattttaattacgaaggctacgcattcaatgacgcggcttcaaatgaaagcgaatgggtttttatgcgttcggaacaaataaagtga

SEQ ID NO: 67717 - DNA, 1422 bp, Neisseria meningitidis
atgcgccacctacccctgttttcactaatgcttttccccgcatcggtttacgccgcagatttggacggcgcaaacctaaacctgctgtggagcctgccctttgccctgattttgctgtctatcgcattgggtcccttgtttttttcgcatacctggcatcaccattacggcaaaatcaccgccttttggacattgctcttcctcatcccgttcagtttggtttttggcgcgtccgccggtatccataccgtcgcacacgcactcgttgaagaatacatccccttcatcctgctgctgcttgccctgtacaccatttcaggcggcattttggtttggggcgacttgaacggcacacccaagctcaacaccgccctgcttgccgtcggtacggcacttgcctctatcatgggaacgaccggcgcagcaatgctgatgattcgtccgctgctgaaagccaaccaaaaccgtacccgccgcgtgcacatcgtcatcttcttcattttcctggttgcaaacatcggcggcggtctgacccctttgggcgaccccccactcttcctcggcttcctcaaaggcgtagatttcatgtggacggtcaaacatatgttcgcccccgtcctgatcagcaccgctgtcctgttgaccgccttctatttcatcgacaaccgtttcttcaaacaggaaagcattgcacaagatacgccggcacaacaggaaaaacccgaaaaaatcgccatcttcggcaaatggaacttcctcctgctttcgggcgtggtcggcgcggttctaatgtccggcctttggaaacccgaacacccgggatttgaaatcctcggcagccgttacgccctgcaaaacctcgtccgcgatgtcatcctgattgcattgaccgccgtatctatggcaatcacgcccaaacaagtccgcgcaggcaacgaattcaactttgaacccatcgccgaagtgggcaaactcttcctcggcatcttcatcaccatctttcccgtcctgagcattctgaaagcaggcgaggcaggcgcgctgggcggggtggtatcgctggttcacgatacggcaggtcatccgattaatgtgatgtatttttggatgagcggcatattgtcggcattcttggataacgcgcccacttatctcgtttttttcaatatggcaggcggcgatgcccaagccttgatgacgggtaccctgtttcattcgctgctggcggtttctatgggttcggtattcatgggcgcactaacctacatcggcaacgcaccgaacttcatggtcaaggccattgccgaacagcgcggcgtaccgatgccgactttcttcggctatatgatgtggtcggtcgccttcctgacacccgtcttcatcgtacatacccttatctttttcgttttcaaactgctgtaa

SEQ ID NO: 67718 - DNA, 210 bp, Neisseria meningitidis; identical to SEQ ID NO: 39235

SEQ ID NO: 67719 - DNA, 438 bp, Neisseria meningitidis
atggacacacccgtttacctttacaccgacggcgcgtgcaaaggcaatcccggcgcgggcggctggggcgtattaatgcgctacggcagccacgaaaaagaacttttcggcggcgaggcgcaaaccaccaacaaccgcatggagctgaccgccgtcatcgaaggactgaaatcgctcaaacgccgctgcaccgtcatcatctgcaccgactcgcaatacgtcaaaaacggcatggaaaactggatacacggttggaagcgcaacggctggaaaaccgccgccaaacagcccgtcaaaaacgacgacttgtggaaagaactcgacgttctggttgggcagcaccaagtcagctggacttgggttaaaggacacgcgggacacgcggaaaacgaacgcgccgacgatttggcaaaccgtggcgcagcgcagttttcctga

SEQ ID NO: 67720 - DNA, 669 bp, Neisseria meningitidis
atgacgacccatctgtccaatgtcgcccccgacctgcaaaactatttgaacgccatcggcgaacccgaacatcccgttttgacgcggctgcgtgagaagaccgggcatcaccgtatgggcaaaatggcgattgcgcgcgaacaggcggcggttttggtttggctggcaaagctgattcgcgcggaaaaatatctggaagtcggcgtgtttaccggatacagcagcaccgcgcttgcattggcattgcccgaacacgggcggattaccgcctgcgacatcaatgtaacctttaccgatacggcgcgtcaggtttggaacgaggcaggcgtggcacataaaatcagcctgcatctgcaacccgcattgctgacattggatgatttgattgcacagggtgaagccggaagttacgatttggcactgatagacgcagacaaaccgcccacgccgcaatatttcgagcgttgcctcaagcttgtccggcaaggcggcatcattgccatcgacaatattttgttgaacggaagggtgatgcgcgaagcggcttccgatgcgccgcccagcgtcggcatcctcaaagattttaatcaaaacctgccgaacgatacgcggattgtccccatcaccctgcccgtcggcgacggtttgaccctgcttctgaaaaaataa

SEQ ID NO: 67721 - DNA, 996 bp, Neisseria meningitidis
atgttgagaaaattgttgaaatggtctgccgtttttttgaccgtgtcggcagccgttttcgccgcgctgctttttgttcctaaggataatggcagggcataccgaatcaagattgccaaaaatcagggtatttcgtcggtcggcaggaaacttgccgaagaccgcatcgtgttcagcaggcatgttttgacggcggcggcctacgttttgggtgtgcacaacaggctgcatacggggacgtacagactgccttcggaagtgtctgcttgggatatcttgcagaaaatgcgcggcggcaggccggattccgttaccgtgcagattatcgaaggttcgcgtttttcgcatatgaggaaagtcatcgacgcaacgcccgacatcgaacacgacaccaaaggctggagcaatgaaaaactgatggcggaagttgcccctgatgccttcagcggcaatcctgaagggcagtttttccccgacagctacgaaatcgatgcgggcggcagcgatttacggatttaccaaaccgcctacaaggcgatgcaacgccgcctgaatgaggcatgggaaagcaggcaggacgggctgccttataaaaatccttatgaaatgctgattatggcgagcctgatcgaaaaggaaacagggcatgaagccgaccgcgaccatgtcgcttccgtcttcgtcaaccgcctgaaaatcggtatgcgtctgcaaaccgacccgtccgtgatttacggcatgggtgcggcatacaagggcaaaatccgtaaagccgacctgcgccgcgacacgccgtacaacacctacacgcgcggcggtctgccgccaaccccgattgcgctgcccggcaaggcggcacttgatgccgccgcccatccgtccggcgaaaaatacctgtatttcgtgtccaaaatggacggcacgggcttgagccagttcagccatgatttgaccgaacacaacgccgccgtccgcaaatatattttgaaaaaataa

SEQ ID NO: 67722 - DNA, 249 bp, Neisseria meningitidis; identical to SEQ ID NO: 43100

SEQ ID NO: 67723 - DNA, 1134 bp, Neisseria meningitidis
atgtcatacagcacctttcccaaaaccaaaaacgacgcgctgaatgagccgatgtttttcggtcagcctgtgaatgtcgcccgttatgaccagcagaaatacgaggtatttgaaaaactgattgaaaaacaattgtcgtttttttggcggccggaagaaatcgacgtgtcgcgcgaccgtatcgactacgccaacctgcctgaacacgaaaaacatattttcatcagcaatctgaaataccaaacactgctcgattccatccaagggcgcagtccgaatgttgccttgctgcctttggtttcgattcccgagctggaaacgtggattgaaacgtggagcttcagcgaaaccatacactcgcgcagctatacccacatcatccgcaatattgtgaatgatccgtcggtcgtgtttgatgatattgtcgaaaacgaatacattaccgcccgcgccgaagacattgcctgctattacgatgacttaatcgaatacacccagtattacaacctgttgggcgaagggatgcataatgtcggcggaaaacccattactgtgtctttgcgcgggttgaagaaaaaactctatctctgcctgatgtgcgtcaacgtgttggaagccatccgtttctacgtttcattcgcctgctcgtttgcttttgccgagcgcgagttgatggaaggcaacgccaaaatcatcaaactgattgcccgcgacgaagccctgcacctgaccggcacgcagcatatgcttaatctgatgcgttcgggtgttgatgattctgaaatggcagaaattgccgccgagttgcaggacgaatgtttccaactcttcaaaaaagcggcggaacaggaaaaagaatgggcggcatatttgtttaaagacggttcgatgatcggtttgaacaaagaaatcttatcccaatacgtcgaatatattaccaatctgcgtatgcaggcggtggggttgccggccggatttgaaggcgcaaatcaaaacccgattccgtggattaatgcgtggctgtcgtccgacaacgtacaggtcgcgccgcaggaagtggaaatatcctcttatttgatcggtcagatcgattctgaagtgaatacggatgatttgggcgattttgagttgtaa

SEQ ID NO: 67724 - DNA, 1419 bp, Neisseria meningitidis
atgtctattaaaaacgccgtaaaattgattgaagaaagcgaagcccgctttgtcgatttgcgctttaccgataccaaaggcaagcagcaccactttaccgtgcctgcgcgcatcgtgttggaagaccccgaagagtggtttgaaaacggtcaggcgtttgacggttcgtctatcggcggctggaaaggcattcaggcttccgatatgcagttgcgtcccgatgtgtctacagccttcgtcgatcctttttatgatgatgttaccgtcgtcattacctgcgacgtcatcgaccctgccgacggtcagggttacgaccgcgacccgcgctccatcgcacgccgcgccgaggcctatttgaaatcttccggcatcggcgacacggcatacttcggccccgagcctgaattcttcgtcttcgacggcgtagaatttgaaaccgacatgcacaaaacccgttacgaaatcacttccgaaagcggcgcatgggcaagcggcctgcacatggacggtcaaaacaccggccaccgccctgccgtcaaaggcggttacgcgcccgttgctccgattgacgcgggacaagacctgcgctccgcgatggtaaacattttggaagaactcggcatcgaagtcgaagtccaccacagtgaagtcggtaccggcagccaaatggaaatcggcacgcgtttcgccaccttggtcaaacgcgccgaccaaacccaagacatgaaatatgtgattcaaaacgttgcccacaacttcggcaaaacagccacctttatgcccaaaccgattatgggcgacaacggcagcggtatgcacgttcaccaatccatttggaaagacggtcaaaacctgttcgcaggcgacggctatgccggcttgagcgacaccgcgctctactacatcggcggcatcatcaaacacgccaaagccttgaacgcgattaccaatccgtccaccaactcctacaaacgcctcgtgccgcactttgaagcgccgaccaaactggcatactccgccaaaaaccgttccgcttccatccgcattccgtccgtgaacagcagcaaggcgcgccgcatcgaagcgcgtttccccgatccgaccgccaacccgtatttggcatttgccgccctgttgatggcgggtttggacggcattcaaaacaaaatccatccgggcgaccctgccgataaaaacctgtacgatctgccgccggaagaagatgcattggtgccgaccgtttgcgcttctttggaagaagcactggccgccctcaaagccgaccacgaattcctcctgcgcggcggcgtgttcagcaaagactggatcgacagctacatcgctttcaaagaagaagacgtacgccgcatccgcatggcgccgcacccgctggaatttgaaatgtattacagcctgtaa

SEQ ID NO: 67725 - DNA, 633 bp, Neisseria meningitidis
atggatttgcacaatattcgggaagattacagtaaacgggaattgtcggaaggcgattgcgccgacaatccgatcgagcagttcgagcggtggttggacgaggcggtacgcgcacaggtcaacgagccgacggcggttaatgtggcggcggtcgacggacgcggcagacccaacagccgtatggtgctgctgaaggaagttaattctgaaggttttgttttctttacgaattatcacagccgcaaggggcgttcgctggatgctcatccatttgcggcgatgacgtttttttggccggagctggagcgtcaggtgcgcgtggaagggcgtgttgaaaggctggcggagaagttgtcggacgaatattttgagagccgcccgtatcagagccgtttgggtgcgtgggcaagtgcgcagagcgaggttattccgaacaaggcggtattggtggcaaaggcggcggcggtcggactcaaacatcctctgcatgtgccgcgtccgccgcattggggcggctatattgtgattcccgatttgcttgagttctggcagggcagaccgagcaggctgcacgaccgcatccaataccgtttgctggatggtggctggatacgcgagcggctgtcgccttga

SEQ ID NO: 67726 - DNA, 4701 bp, Neisseria meningitidis
atgaaaaccaaacgttttaaaattaacgccatatccttatccatctttcttgcctatgcccttacaccatactcagaagcggcattggtcagagacgatgtcgattatcaaatattccgtgactttgcagaaaacaaaggcaaattttttgtcggcgcaaccgatttatcagtgaaaaacaaacaaggtcaaaacatcggcaacgcattatccaacgtaccgatgattgattttagcgttgcagatgtcaacaaacgcatagcaacggtagtcgatccccaatatgctgtcagcgtcaaacacgccaaagcagaagtccatactttttattacggtcaatacaacggtcataatgatgtagccgacaaagaaaatgaataccgcgttgtcgaacaaaataactatgaaccacataaagcttggagtgcgagcaacttaggccgtctcgaagattataatatggcgcgttttaacaagtttgtaactgaagttgcgccgattgcaccaactgatgccggcggcggattggatacctacaaagataaaaaccgtttttcctcttttgtcagagttggcgcaggcaggcaattagtttatgaaaagggggcttatcatcaagaaggaaatgaaaaaggctacgatttgcgcgatctttcacaagcctatcgttatgccattgcaggtacaccttataaagatattaatattgaccaaacaatgaataccgaaggtttgattggctttggtaatcataataaacagtattcggcagaagaacttaaacaagcactctcgcaagatgcgttaacaaattacggcgtgttgggcgatagcggctctccgttatttgcttttgacaaacaaaaaaatcaatgggtctttttgggaacttatgattattgggcagggtacggaaaaaaatcttggcaagaatggaatatctataaaaaagaatttgcagataaaatcaaacaacgcgataacgccggcaccatcaaaggtaatggcgaacatcattggaacattacttctggcacaaacagcaagattggttcgacagcggtaaggcttgccggcaatgaaaggggtgcaaacaacggacagaatgttacctttgaaaacaacggcactttggtattggatcaaaacatcaaccaaggcgcgggcggtctgtttttcaaaggcgattacacagtcaaaggtgcaaataatgacatcacttggctaggtgcggggattgatgttaccgacggcaaaaaagtcgtttggcaagtcaaaaatccgaatggcgacagattggcaaaaatcggcaaaggcactttggaagtaaacggcacaggcgttaaccaagggcaattaaaagtcggcgacggtacggttattctgaatcaacaagccgatgccgacaaaaaagtccaggctttctcccaagtcggcattgtcagcggacgcggtacattggtattaaatagttcaaatcagattaatcccgataacctatatttcggtttccgtggcggtcgtttggatgccaatggcaacgacttgacttttgaacacatccgcaacgtggatgaaggtgcgcgcattgtcaaccacaacacaggccacacctccacaatcacgctaacgggtaaatctttgattaccgatcccaaaaccatctctattcattatattcaaaataatgatgatgacgatgatggttattactattaccgccctaggaaaccgattccacaaggcaaagatctttatttcaaaaactaccgttattacgccttaaaatcaggtggcagtgttaacgcaccgatgcccgaaaacggacaaacggaaaataacgactgggtctttatgggatataagcaagaagaagcccagaaaaacgcgatgaaccacaaaaacaatcagcgtattagcggttttagcggtttctttggcgaagaaaacggaaaaggacataacggcgcattaaaccttaatttcaacggcaaaagcgcgcaaaaccgtttcttgttaacaggcggcacgaatttaaacggaaaaataagcgtaactcaaggcaatgtcttgttatcaggtcgtccaacaccacacgcaagagattttgtgaacaaatcttcagcccaaaaagacgcacatttctccaaaaacaatgaagtcgtatttgaagacgactggataaaccgcacattcaaagccacagaaattacggttaatcaatccgcatcattctcttccggcagaaatgtatccaacattaccgccaacatcaccgcaacagacaacgccaaagtaaatttgggttacaaaaacggcgatgaggtttgcgtgcgctcggactataccggttatgttacctgcaacacaggcaacttatccgataaggctttaaacagctttggagcgacacagattaacggcaatgtgaatctgaaccagaatgcggcattggtcttgggcaaggctgcattatgggggcaaattcaagggcaaggaaacagccgtgtcagcctaaatcaacatagcaaatggcatttgactggcgacagccaagtacacaatctgtcattggcggatagccatattcatttgaacaatgcctccgatgcgcaaagtgcaaatcaataccacacgctcaaaatcaatcatttatccggtaacgggcattttcattatctgacgcacttggcggaaaatcttggggataaagtgcttgtgaaggaatccgcatccggtcattatcagctccatgttcaagataaaacaggcgaacccaatcaggaagggctgaatctctttgatgcatcatccgtacaagaccgctcccgcctttctgtttccttggcgaataaccatgtagatttaggcgcattgcgttatacaatcaaaacagaaaacggtattacccgattgtacaatccttatgccgagaaccgccgccgagtcaaaccggccccgtctcctgccacaaacacggcttctcaagcacaaaaggcaacacaaacggacggtgcacaaattgccaagcctcaaaatatcgtcgtcgcaccacctagcccgcaggcaaatcaagccgaagaagccctccgccaacaagcaagggcggaacaagtgaagcgtcagcaagcagaggcagaaaaagtcgcacatcaaaaggctgaagaagcgaaacgtcagcaagatgcccttgcccgccaacaagcagagcaagaacgccaacgattggaagccgaacgccaagctgccgaaattgccaaacaaaaagcagaagccgaagaagcgaaacgccgagccgctgaaattgccgagcaaaaagcagctgccgaagaagcaaaacgccaagctgccgaacttgcacgccaacaagaagaagcacgaaaagctgcagagttggctgctaagcaaaaagcggaaactgaacgcaaagcagcagaaattgccgagcaaaaagcggaagccgaacgtgaagccgccgaacttgccaagcaaaaggcggaagaagaaggtcgccaagcagcacaatctcaacccaaacgtcgtaaccgcagggctataccaccggaactgtcatctgatgcaacaacccgagctttgcctaggatagcgagaaattcaaatcctgatgccagcgattatgaagaaatccccttggatgcgttggaagatgaagatgtatccgaatcggttgacacatcagacaaacagcctcaagacaatacggaacttcatgaaaaagttgagacagtgagtttgcaaccaagagccgctcagccgcgagcccaagccgccgcgcagccgcaagcccaagccgtcgcgcaagccgatgcagtcagcaccaataccaactcggctttatctgacgcaatggcaagcacgcaatctatcttgttggatacaggtgcttcattaacacggcacattgcacaaaaatcacgtgctgatgccgaaaaaaacagcgtttggatgtcgaacatcggttatggccgtgattatgcttccgcacaatatcgccggtttagttcgaaacgcacgcaaacacaaatcggcattgaccgcagcttgtccgaaaatatgcagataggcggcgtattgacttactctgacagtcagcatacttttgatcaggcgagcggcaaaaatacttttgtgcaagccaacctttatggtaagtattatttaaatgatgcttggtatgtggccggcgatattggtgcaggcagcttgagaagccggttacaaacacagcaaaaagcaaactttaaccgaacaagtatccaaaccggccttactttgggcaatacgctgaaaatcaatcaattcgagattgtccccagtgcgggaatccgttacagccgcctgtcatctgcagattacaagttgggtaacgacagtgttaaagtaagttctatgtcagtgaaaacactgacggccggactggattttgcttatcggtttaaagtcggcaaccttaccgtaaaacccttgttatctgcagcttactttgccaattatggcaaaggcggcgtgaatgtgggcggtaattccttcgcctataaagcagataatcaacagaaatattcagcaggtgccgcgttactgtaccgtaatgttacattaaacgtaaatggcagtattacaaaaggaaaacaattggaaaaacaaaaatccggacaaattaaaatacagattcgtttctaa

SEQ ID NO: 67727 - DNA, 909 bp, Neisseria meningitidis; identical to SEQ ID NO: 42410

SEQ ID NO: 67728 - DNA, 1341 bp, Neisseria meningitidis
ttgcacacccttctagcttttatcttcgccatcctgattttggtcagcctgcacgaattcggacactacatcgtcgccagattgtgtggcgtcaaagtcgtacgcttttccgtcggcttcggcaaaccgtttttcacccgaaaacgcggcgacaccgaatggtgcctcgccccgattccgttgggcggttacgtcaaaatggtcgacacgcgcgaaggcgaagtatcagaagccgatttaccctacgcttttgacaaacaacaccccgccaaacgcatcgccatcgtcgccgccggtccgctgaccaacctcgcactggcggttttgctgtacggactgagcttttccttcggcgtaaccgaactgcgcccctacgtcggtacagtcgaacccgacaccattgccgcccgcgccggcttccaaagcggcgacaaaatacaatccgtcaacggcacacccgttgcagattggggcggcgcgcaaaccgaaatcgtcctcaacctcgaagccggcaaagtcgccgtcggcgttcagacggcatcgggcgcgcaaaccgtccgtaccatcgatgccgcaggcacgccggaagccggtaaaatcgcaaaaaaccaaggctacatcggactgatgccctttaaaatcacaaccgttgccggcggcgtggaaaaaggcagccccgccgaaaaagcaggcctgaaaccgggcgacaggctgactgccgccgacggcaaacccatcgcctcatggcaggaatgggcaaacctgacccgccaaagccccggcaaaaaaatcaccctgacctacgaacgcgccggacaaacccataccgccgacatccgccccgatactgtcgaacagcccgaccacaccctgatcgggcgcgtcggcctccgtccgcagccggacagggcgtgggacgcgcaaatccgccgcagctaccgtccgtctgttgtccgcgcattcggcatgggctgggaaaaaaccgtttcccactcgtggacaaccctcaaatttttcggcaaactaatcagcggcaacgcctccgtcagccatatttccgggccgctgaccattgccgacattgccggacagtccgccgaactcggcttgcaaagttatttggaatttttagcactggtcagcatcagcctcggcgtgctgaacctgctgcccgtccccgttttggacggcgggcacctcgtgttttatactgccgaatggatacgcggcaaacctttgggcgaacgcgtccaaaacatcggtttgcgcttcgggctcgccctgatgatgctgatgatggcggtcgccttcttcaacgacgttacccggctgctcggttag

SEQ ID NO: 67729 - DNA, 1194 bp, Neisseria meningitidis
atgcaaaactatctgacccccaatttcgcctttgccccgatgattcccgaacgcgcttcaggcagccgcgtttgggatacggaagggcgtgaatatattgatttttcaggcggtatcgccgtcaatgcgctgggacactgccaccctgcccttgccgatgctttaaacacgcagatgcacaagctgtggcacatttccaatatctatacgacgcggccggcgcaggagttggcgcaaaaattggttgcaaacagttttgccgacaaggtttttttctgcaactcgggcgcggaagcgaatgaggcggcgttgaagctggcgaggaaatacgcccgcgaccgtttcggcggaggaaaaagcgaaatcgtcgcctgtatcaacagtttccacgggcgcacactgtttaccgtgtccgtcggcggccagccgaaatacagcaaggattatgcaccgctgccgcaaggcattacgcacgttccgttcaacgatattgccgcgctggaagctgccgtcggcgaacagacctgcgcggtcatcatcgagccgatacagggcgaaagcggcatcctgcccgccactgcggaatatttgcaaaccgcgcgccgtctgtgcgaccggcacaatgcgttgttgattttggacgaagttcaaaccgggatggggcatacgggcaggctgtttgcctatgaacattacggcattgttcccgatattttgagttcggcaaaagccttgggctgcggctttccgatcggcgcgatgctggcgacagaaaagattgccgccgccttccaaccgggcacgcacggctcgactttcggcggcaacccgatggcgtgtgcggtcggcagccgcgccttcgacatcatcaacgcgccggaaaccttgcacaacgtctgcagtcaggggcagaaacttcagacggcattgcggtctttgggagaacaaacgggcgtgtttaagcaagttcgcggcatggggctgctgctcggctgcgtgttggacgcgccttatcgcggacgcgcatccgaaataaccgccgccgccttgaaacacggcgtgatgattttggttgcgggtgcggacgtattgcgtttcgcgccttcgctgctgttggacgatgaggatacggcggaaggtttgcggcgtttggaacacgtgctgacggaatttgccgccgcaaaccgcccctag

SEQ ID NO: 67730 - DNA, 780 bp, Neisseria meningitidis
atgcatatcatcgattcgcactgccacctcaattttgaaggtttgaaagaacgcctgcccgaagttttgtccaacatggaagcaaacggcgtggggcaggcgcttgctatcagcgtcagtagggaaagcttctccgaagtctttgccgtcgccgaagcgcacgaacacatctattgcaccataggcgtacatcccgacagcagggaagccgaagaattttccattgcggaaatggtcgaagccgccgcccatccgaaagtggtcggcatcggcgagacgggtttggattattactggtgcaaaggcgatttgtcctggcagcacaaacgctttgcagaccacatcgaggcagccaaccaaaccgggctgcccgttatcgtccatacgcgcgatgcggcggcggacaccttggcgattttgaaagaatgtaaaaccaattcgggtgtgatccactgtttttccgaagacacagcctttgcccgggctgccatggatttggggctttatatttctttctcaggaatcgttacgtttaaaaacgcccctttggttcaggaggcggcaaaatacgttccggacgaccgcattttggtggaaaccgatgcgccgttcctcgctcccgttcccaagcgcggcaggcagaacgagccggcttttgtgcgttataccgcagagcatatcgccaaattgcggaaccagaccttggaacaggttgcggcatacacgacggaaaacttttaccggctgtttaaaaaagtacccgatatgcgggccgtctga

SEQ ID NO: 67731 - DNA, 225 bp, Neisseria meningitidis
atgaacagcgaaactttggacgttatcgggctgaaatgccctttgcctattttgcgtgccaaaaaggctttggcgcaaatgcagcagggcgacgtgttgaccgttctggcaaccgacggcggcgcgccgggggactttgaggctttttgccgccaaaccggtcatgtgctgttggattcttccgaacaggacggcgtgttcaggctggtcgtcaagcacaaataa

SEQ ID NO: 67732 - DNA, 309 bp, Neisseria meningitidis; identical to SEQ ID NO: 39572

SEQ ID NO: 67733 - DNA, 384 bp, Neisseria meningitidis; identical to SEQ ID NO: 38550

SEQ ID NO: 67734 - DNA, 312 bp, Neisseria meningitidis; identical to SEQ ID NO: 38411

SEQ ID NO: 67735 - DNA, 663 bp, Neisseria meningitidis; identical to SEQ ID NO: 45178

SEQ ID NO: 67736 - DNA, 1185 bp, Neisseria meningitidis
atgagtttacacagcgacatcctcgtcgtcggcgcaggcccggcgggtttaagttttgcagccgaacttgccggcagcggtttgaaagttaccctgatcgaacgcagcccactgactgttctgcaaaatcctccatatgacggacgcgaaatcgccctgacccatttttcccgcgaaatcatgcagcgtttgggtatgtgggacaaaattcccgaaaacgaaatctaccctttgcgcgatgccaaagtgctgaacggacgttccgactaccagctccactttccccaaccgaccgaggcgcgcggcgagcctgccgactgtttgggctatctgatttccaaccacaatatccgccgcgctgcctacgaagtcgtatcccaactcgacaacattaccattctgaccgatacggccgttaaagaagtcaaaacatctgacaacgaagcacaagtcattttagaaaacggcaaaatcctgaccgcccgcctgcttttggcggcagacagccgtttttcgcaaacccgccgacaactcggcatttcttcagatatgcacgactacagccgaaccatgttcgtctgccgcatgaaacatactctttccaaccaacataccgcttacgaatgcttccattacgggcgcaccatcgcactgctgccgctggaagaacacctgaccaataccgtcattaccgtcgataccgataaaatcaacagcgttcaaaacctttcgcccgaagaattggcggcaagcgtaaaagaacagctcaagggcaggctcggcgatatggaattggtcagcagcatccaccattacccccttgtcggtatgattgccaaacgtttctacggcaaacgcagcgcgctgattggcgatgcggcggtcggtatgcaccctgtaacggcacacggcttcaacttgggtctttccagcgcagatattctggcaaaactgatactcgaagccgaacaacgcggtcaggacatcggcgcatcttccttgttggaaaaatacagcaacaaacatatgctgcacgcccatccgctttatcacggaaccaatatgatgctgaaactgtttaccaacgaaaccgcgccggcaaaactgctgcgcggtttggtattgcgtgccggcaacaacttcccgccgctgaaaaagctgattaccaaacaactgaccggttga

SEQ ID NO: 67737 - DNA, 2262 bp, Neisseria meningitidis
ttgaaagtaaccaaacgagacggaagattagaagccattgatttggataagattcaccgtgtcgtcacttgggcggcggacggattggaaaatgtttccgtatctcaggtcgagttgaaatcgcacatccagttctacaacggcatccgcaccgacgacatccacgaaaccatcatcaaagccgctgccgatttaatttcggaagataccccggactaccaataccttgccgcgcgtttggcgattttccatctgcgtaaaatagcctacggcgagtacgagccgccgcacctttacgaccacgttaaaaaacttaccgatgccgcaaaatacgacaggcatatccttgaggattacagccgcgaagaatttgacgagctgaacgcctatatcgaccacgaacgcgatatgtccttttcctatgccgctgtcaaacagctcgaaggcaaatatctggtacagaaccgcgttacccgccagatttatgaaacaccgcagttcttatatgttctggtggcgatgtgtcttttcagcaaatatcccaaagaaacacgcctcgattacgtcaaacggttttacgatgccgtttccacatttaaagtatcgctgccgaccccgattatgagcggcgtgcgtacgcctacgcgccagttctcaagctgcgtattgatcgaatgcgacgatagcctggattccatcaacgccaccaccagcgcgattgtgaaatacgtttcccagcgtgcgggcatcggcatcaatgccggacgtatccgcggactggacagcgaaatccggggcggcgaagcacggcataccggctgcattcccttctttaaaatgtttcaggcggcagtcaaatcctgttcgcaaggtggcgtgcgcggcggcgcggcaaccttgttctaccccttgtggcatatcgaagccgaaagcctgctggtgttgaaaaacaaccggggcgtggaagacaaccgtatccgtcagcttgattacggcgtgcaaatcaaccgcctgctgtacacccgcctgattaagggcggcaacattacgctgttttcgcccaacgaggttccgggattgtacgaagcgttttttgccgaccaagacgaatttgagcggctctatacgaaatacgagcaagaccctgatatccgcaagcgcatcattccggctgccgacctgttttccacgctgatgcaggagcgtgccggaaccgggcgcatctacattcaaaacgtcgatcactgcaatacgcacagcccgttcgatccgcgcgttgcgcctgttcatcagtccaacttgtgtatggaaatcgcgctgccgaccaaacctttggacaatatcaacgacccgaacggcgaaatcgccctgtgtaccctgtctgccttcaacttgggggcattaaacagcttggacgaattggaagggcttgccgatttgaccgtgcgcgcgctcgatgcacttttagattatcagggatatccggtagaagccgcgcgtacctccactatgggccgccgttcgctcggtatcggcgtgatcaactatgcgtattatttggcgaaaaacggtgtccgctacagcgacggctccgcgctcggtctgacccaccgtacctttgaagccatacagtattacctgctcaaagcatcggcaaaccttgccaaagaatacggtgcgtgcacgctctttaaccaaaccgtttattcgcaaggcaaactgcccatcgacacctacaaaaaagatttggatgccgtgtgtaacgagcctttgcattacgactgggaaagcctgcgtgccgacatcgtcaaatacggcctgcgtaactctactctaaccgcactcatgccgtctgaaaccagttcgcaaatcgccaacgccaccaacggtatcgagccgccgcgcggattggtaacggtcaaagcatcgaaagacggcattttgaaacaagtcgtgccggagtttgaaaccctgaaaaatgcctatgaaaccctgtggcagcttcccggcaacgaaggctacctgaaacttgtcggcgtgatgcaaaaattcgtcgatcaatcgatttccgccaataccgcctacgacccgaacaaattcgaaggcagcaaagtttccatgaaacaaatgctgaaagacctgctgaccgcctacaaatacggcgtcaaaaccctgtactaccacaacacccgcgacggcgcggacgatacgcaagccgatattcaggatgacggctgcgctggtggggcttgtaagatttaa

SEQ ID NO: 67738 - DNA, 780 bp, Neisseria meningitidis; identical to SEQ ID NO: 36766

SEQ ID NO: 67739 - DNA, 696 bp, Neisseria meningitidis
atgcacgataccgccagtcttattaagtttgtacaaaaacacaaacaggacggcacacaaatctacattgatgccgatttcaaatcagggcgtattgatgtcaccgccgtcatcaatggccatacgcaacaagctccgggctggctcgatttttatgccgtatacaccccgcaacacactacatcggcatccaactggctgaacaacaatgcgcaccgcatgaatcagatggagttttcccatttcctgaccaacaatgcccgcaacatcgtatccaaaaatcccggtaacgaaaattccgtttacccgaccgccgccgaagtattggatttcgcgctcaatctcgagtacaccgaaaaaaccaccttcaaacaaggctatcgtgaacaggacggcagaatcaactttaccttccaatccgaagactcagggcaaacagagaaaaacctcaaaatgtttgaacgtttcggcatcgagttcaccccgcatcaaggcggtgcatcctactttgttgaagccctgttgaaattccgcatcgacaaaaacagcggcgcactcgtcctgtggtacgaattgcagcaaatcgatgctgtaatcgaacaagcggcaaaagacatttccgaagccgtacaaaaagccttccctgaaatcgacatctatttcggcataatcgacctaaaaaaaaaggtcgtctga

SEQ ID NO: 67740 - DNA, 615 bp, Neisseria meningitidis
atgaagaataatgattgcttccgcctgaaagattcccagtccggtatggcgctgatagaagtcttggttgctatgctcgttctgaccatcggtattttggcgttactgtctgtgcagttgcggacagtcgcttccgtcagggaggcggagacacaaaccatcgtcagccaaatcacgcaaaacctgatggaaggaatgttgatgaatccgaccattgattcggacagcaacaagaaaaactataatctttacatgggaaaccatcatgcactatcagttgtggatggcgattttcaggttggtgtcataaaaactaagacgcagttggcagaggcacaattgaagagatttagttatgagctgaaaaatgccttgccggatgcggcagccatctattacgccatctgcaaggattcgttgggtgttgcgccgacattgtccgccggtagtactttttcttcaaattgcgatgctagtgcaaatggggatactttgattaaagtattgtgggtaaatgattcggcaggggattcggatatcgcccatacgaatcttgagacgaacggcaacaatatcgtatatacctatcaggcaagggtcggaggtcgtgaatga

SEQ ID NO: 67741 - DNA, 1389 bp, Neisseria meningitidis
atgagcacccgtaccgaacacgacacgatgggcaatgtcgaagtcccgtccgaagcctattggggcgcgcagacccagcgcagccgcaacaatttcaaaatcggcggcgaaaccctgccgcagccgctgatttatgctttggcgctggtgaaaaaagccgccgccgcgaccaatgtttccctcggcaggattaagccggaacaggcggatttgattacgcaggcggcggatgatgtgttgaacggcaggcttgacggacagtttcctttagtggtttggcagaccggctccggcacgcagtccaatatgaacatgaacgaagtgctggcaaaccgcgccaacgaaatcgccggtacgggtttggcggcttatcagcccgtccatcccaacgaccatgtgaaccacgcgcaatcgaccaacgacgcattcccgaccgctatccacgttgccgccgcgattgaaatcaaccgccacctcatccccgccgtaaaagccctgcgcgataccttggacaaaaaagcccaagctttcgcccccattgttaaaatcggccgcacccacttgcaagacgcgacgccgctgactttgggacaggaattttccggctacgtttcccagcttgatcacggcttaggccgtctgaacgatgcgcttaaagacttgtatgaacttgctttgggcggtacggcggtcggcacgggtttgaacagccatcccgaatacgccgaaaaagccgccgccaaactcgccgaactgtccggcttgccgtttgtcagcgcgccgaacaaatttgaagccttaggcggacgcgatgccgccgttgccgcttcgggcgcattgaaaacactggcggcaagcctgaacaaaatcgccaacgacatccgctggctggcaagcggcccgcgttgcggtttgggcgaaatcaaaatccccgaaaacgagccgggttcgtccatcatgccgggcaaagtcaacccgacccaatgcgaagcaatgacgatggtgtgctgccaagtgttcggcaacgacgttaccatcggcatggcgggcgcgtcgggcaatttcgagctgaacgtctatatgcccgttatcgcctacaacctcttgcaatccatccgcctgttgggcgacgcgtgcaacagcttcaacgaacactgcgccgtcggcatcgaacccgtaccggaaaaaatcgactatttcctgcaccattccctgatgctcgttaccgcgttgaaccgcaaaatcggttacgaaaacgccgccaaagtcgccaaaaccgcctacaaaaacaacaaatcgttgcgcgaaaccgccgttgagttgggcttgctgacgggcgaagaatttgacgaactggtcgttcctgccgatatggttcatccgcgctaa

SEQ ID NO: 67742 - DNA, 177 bp, Neisseria meningitidis; identical to SEQ ID NO: 55652

SEQ ID NO: 67743 - DNA, 276 bp, Neisseria meningitidis; identical to SEQ ID NO: 42734

SEQ ID NO: 67744 - DNA, 2847 bp, Neisseria meningitidis
atgtgcaaccatcgtccccaacattcgcacgacaacgacaccatccgcatacgcggcgcgcgcacgcataatttgaaaaacatcgatttggacattccgcgccacaagctggtggtggtaacaggattgtcgggcagcggcaaatcgtcgctggcatttgatactttatatgccgaaggtcaacgccgttatgtcgagagcctttccgcctatgcgcggcagtttttgcagatgatggacaaacccgatgtcgatttgattgaaggtctgtcgcctgcgatttctatcgagcaaaaatccaccagccacaatccgcgttccaccgtcggcacggttacggaaatccacgactacctgcgccttttgtacgcccgcgtcggcacgccgtattgccccgaacacaatctgccgttgtcgagccaaaccgtatcgcagatggtcgatgccgtgttgaagctgccggaagacacgcgcgtgatgattctggcgccggcggtgcgcgagcgtaagggcgagtttgtcgatttctttgccgacttgcaggcgcagggttttgcgcgcgtgtgcgtggacggcgaggtctatcagcttgacgaagtgccgaagctggaaaaaaacatcaagcacaacatcgacgtggtcatcgaccgcgtgaaagtgaaggcggacatcaagcagcggctggcggaaagttttgaaaccgcgctgcgccacggcaacgagcgcgcgctggcgatggagatggacagcggcgaagaacattggttttccgcgcgtttcgcctgccccgtatgttcgtacagcctgcccgaattggagccgcgcctcttttcgttcaacaacccgatgggctcctgcccgacttgcgacggcttgggtaacaccaatttcttcgactccgaaaaagtggtcgcgcatcccgaattgtcgctggcttcgggcgcgattgacggctgggacaagcgcaaccagttctatttccaaatgattcagtcgctggcacggcattacggtttcgacgtgcaggctgcttgggaaaccctacctgcaaaaatcaaaaaagtcgtgttgcacggctcgggcaaagaagtcattgatttcacttacctgtccgaacgcggcaccaccttcaaccgcagccacgccttcgaaggcatcatccccaatctcgaacgccgctaccgcgaaaccgacagcgaaaccgtgcgcgaaaaactgcgcgaataccaaaaccaccgcgcttgcccgagctgcggcggcgcacgtttgcgcaaagaagcccgctacgtttacgtcggcggcgagccgttgcacgaagtttccgcctggccgctgaccaaaacccaccgattctttgaaacgctggatttggacggcaacaaaaaacaaatcgccgaaaaaatcctcaaagaaatcaccgaacgtctcggctttttgattaatgtcgggctggattacctgaatctctcccgttccgccgaaaccctttccggcggcgaagcccagcgcatccgcctcgccagccaaatcggcagcggcctgaccggcgtgatgtacgttttggacgaaccctccatcggcctgcaccagcgcgacaacgaccgcctgcttgccaccctcaaacgcctgcgcgatttgggcaacagcgtcatcgtggtcgaacacgacgaagacgccatccgcgaagccgatttcgtcgtcgatatgggcccgggcgcaggcgaacacggcggcaacgtattgattgccgacacgcccgaaaacgtcgccaaatgtgaaaactccgttaccggacaatacctcagcggcaaaaaatccattgccgtgccgtctgaacgcacgcccgtcaatcccggccgaatgctcgtcctcaaaggcgcgcgcggcaacaacctcaaaaacgttaccctcgaactgccgctcggtttaattacctgcatcaccggcgtatccggcagcggcaagtccaccctgattaacgacaccctcgccaaaatcaccgcccgcgaactcaaccgcgcccaagaagaacccgccccatacgacgacatccgcggcctcgaacacctcgacaaagtcatcaacgtcgaccaatcccccatcggtcgcaccccgcgctccaaccccgccacctacaccggcctgttcacccccatccgcgaactcttcgccggcgtacccctctcgcgcgaacgcggctacaacgtcggcagattctccttcaacgtcaaaggcggccgctgcgaagcctgccaaggcgacggcgtgattaaagtcgaaatgcacttcctgcccgacgtgtacgtcccctgcgaagtctgccacggcaaacgctacaaccgcgaaaccctcgaaatccaatacaaaggtaaaaacatcagccaagtcctcgacatgaccgtcgaagaagcctgcgaatttttcgacgccgtccccaccgtatcgcgcaaactgcaaaccctgatggacgtaggtctcggctacatccgcctcggccaatccgccaccaccctctccggcggcgaagcccagcgcgtcaaactcgccttggaactctccaaacgcgacaccggcagaacgctctacatcctcgacgaacccaccaccggcctgcacttcgccgacatcgccctgctgctggaagtcatagaccgtctgaaaggcaaaggcaactcgatagtgattatcgagcataatctggatgtgattaaaaccgccgattggattgtggacttagggccagaaggcggcgacggcggagggaggattattgcttcaggtagcccggaggaagtggcgaaggttaaggggagttatactgggaagtatttgaagaatatactttaa

SEQ ID NO: 67745 - DNA, 1509 bp, Neisseria meningitidis
atgaccaccaatcccgcaaacgttcttgcctccgtcgatttgggttctaacagtttccgcctccagatttgcgaaaacaacaacggacagttgaaagtcatcgattcgttcaaacagatggtgcgcttcgccgccggtctggacgaacagaaaaacctcagcgcatcctcacaggaacaggctttagactgcctagcaaaattcggcgaacgcctgcgcggcttccgccctgaacaggtacgcgccgtggcaaccaatacattccgcgtcgccaaaaacatcgcagatttccttcccaaagccgaagcggcactgggtttccccatcgaaatcatcgccgggcgcgaagaggcacggctgatttataccggcgtgatccacaccctcccccccggcggcggcaaaatgctggttatcgacatcggcggcggttcgacagaatttgtcatcggttcgacgctgaatcccgacattactgaaagcctgcccttgggctgcgtaacctacagcctgcgcttcttccaaaacaaaatcaccgccaaagacttccaatctgccatttccgccgcccgcaacgaaatccagcgcatcagcaaaaatatgaggcgcgaaggttgggatttcgccgtcggcacatcgggttcggcaaaatccatccgcgacgtgcttgccgccgaaatgccccaagaggcggacattacctacaaaggcatgcgcgccctcgccgaacgcatcatcgaagccggttcggtcaaaaaagccaaatttgaaaacctgaaaccggaacgcatcgaagtttttgccggcggacttgccgtgatgatggcggtgtttgaggaaatgaaactcgacaggatgaccgtaaccgaagccgccctgcgcgacggcgtgttttacgatttgatcgggcgcggtttaaacgaagatatgcgcagacaaacggttgccgagttccaacaccgctaccacgtcagcctcaatcaggcgaaacgcaccgccgagaccgcgcaaacctttatggacagcctctgccacgccaaaaatgttacggttcaagagcttgccttgtggcaacagtatctcggacgcgccgccgcgctgcacgaaatcggtttggacatcgcccacaccggctatcacaagcattccgcctacatcctcgaaaacgccgatatgccgggtttctcacgcaaagaacagaccatacttgcccaactggtcatcggtcatcgcggcgatatgaaaaaaatgggcggcattatcggcaccaacgaaatgttgtggtatgccgttttgtcgctgcgccttgccgccctgttctgccgttcgcgccaagacctgtctttcccgaaaaatatgcagttgcgtacggacacggaaagttgcggcttcatcctgcgtattgacagggaatggctggaacgccatcccctgattgccgacgcattggaatatgaaagcgtccaatggcaaaaaatcaatatgccgtttaaagtcgaggccgtctga

SEQ ID NO: 67746 - DNA, 351 bp, Neisseria meningitidis; identical to SEQ ID NO: 41719

SEQ ID NO: 67747 - DNA, 624 bp, Neisseria meningitidis
atgaacagaagaaccttcctcctcggcgcaggcgcgttgctccttaccgcctgcggcagaaaatccgcccgaacccacgccaaaattcccgaaggaagcaccgtacttgccttgggcgattcgcttaccttcggctacggcgcaaaccccggcgaatcctaccccgcgcaactgcaaaaactgacgggttggaatattgtcaacggcggcgtatcgggcgatacatccgcccaagccctgtcgcgcctgcccgcgctgttggcacgcaaacccaagcttgtgattgtcggcataggcggcaacgactttctgcgcaaagttcccaaggagcagacccgcgccaatatcgcgaaaatcatcgaaaccgtgcagaaggaaaacatccccgccgtcctcgtcggcgtgccgcacattaccttgggcgcgttgttcgggcatttgagcgatcatccgctgtatgaggatttgtccgaggaatacggcattccgctgttcggcggcgcgtgggcggaaattttgggcgataataatctgaaatccgaccaaatccacgccaacggcaaaggctatcggaaatttgccgaagatttgaatcaatttttgagaaaacaggggtttagataa

SEQ ID NO: 67748 - DNA, 1284 bp, Neisseria meningitidis
atgtccaaatcaattaaactcaacgtaccgggtcaggcaggtttggagctgccggtattggaagccagcatcgggcacgatgtggttgacattcgggggctgacaaaaaatacaggtttgttttccttcgaccccggatttgtttcaaccgcaagctgtgagtctaaaattacttacatcgacggcgatcaaggcttgctttattatcgcggataccccatcgagcagctggccgaaaagtccgattatttggaagtctgctacctgttgatttacggcgaactgccgactcccgagcaaaaggcagaatttgacaataccgtccgccgccacacgatggtgcatgaacagctgacttggttcttccgggggttccgccgcgacgcgcatccgatggcgatgatggtcggcgtggtcggcgcgctgtctgcgttctaccaagacagcttggacattagcaatcccgaacaccgcaaaatcgcgatttaccgcctgatttccaaaatcccgaccattgcggcaatgtgctaccgctattcaaacggtctgccgttcaattatccgaagaataatctttcttattccgaaaacttccttcatatgatgttcgccacgccgtgtgaagactacaaacccaatcccgttttggcacgcgcgctcgaccgcatctttattttgcatgccgaccacgagcaaaacgcctcaacttcaaccgtccgtctggcagggtcttcgggtgcgaatccgtttgcctgtattgctgccggtatcgcctgcctgtggggtgcttcgcacggcggtgcgaacgaagccgtgttgaaaatgttggacgaaatcggcgatgtgtctaatgttgccgcatacatggaaggtgtgaaacaacgcaaataccgtctgatgggcttcggtcaccgcgtgtaccgcaatatggatccgcgtgccagcattatgcgcgaaacctgctatgaagttttgaaggaattgggcttggaagacagtccgaaattcaaactggcgatggaattggaacagattgcgctgaaagacccgttctttatcgaacgcaagctgtatccaaacgtcgatttctattccggcatcgtcctgtccgcgctgggcatcccgaccgaaatgtttaccgtcatcttcgccctgtcgcgcagcgtaggttggatttcgcactggcacgagatgatcagcgatccttcgctgaaaatcggccgcccgcgccagctttataccggttcggaacgccgcgattatgtgccggcaggagagaggtaa

SEQ ID NO: 67749 - DNA, 939 bp, Neisseria meningitidis; identical to SEQ ID NO: 55450

SEQ ID NO: 67750 - DNA, 3204 bp, Neisseria meningitidis
atgcgaacgaccccaaccttccttacaaaaactttcaaaccggctgccatggcgttagctgttgcaacaacactttctgcctgcttaggcggcggcggcggcacttctgcgcccgacttcaatgcaggcggcaccggtatcggcagcaacagcagagcaacaacagcgaaatcagcagcagtatcttacgccggtatcaagaacgaaatgtgcaaagacagaagcatgctctgtgccggtcgggatgacgttgcggttacagacagggatgccaaaatcaatgccccccccccgaatctgcataccggagactttacaaacccaaatgacgcatacaagaatttgatcaacctcaaacctgcaattgaagcaggctatacaggacgcggggtagaggtaggtatcgtcgatacaggcgaatccgtcggcagcatatcctttcccgaactgtatggcagaaaagaacacggctataacgaaaattacaaaaactatacggcgtatatgcggaaggaagcgcctgaagacggaggcggtaaagacattaaagcttctttcgacgatgaggccgttatagagactgaagcaaagccgacggatatccgccacgtaaaagaaatcggacacatcgatgtggtctcccatattattggcgggcgttccgtggacggcagacctgcaggcggtattgcgcccgatgcgacgctacacataatgaatacgcatgatggaaccaagaacgaaataatgtctgcagccatccgcaatgcatgggtcaagctgggcgaacgtggcgtgcgcatcgtcaataacagttttggaacaacatcgagggcaggcactgccgaccatttccaaatagccaattcggaggagcagtaccgccaagcgttgctcgcctattccggcggtgataaaacagacgagggtatccgcctgatgcaacagagcgattacggcaacttgtcctaccacatccgtaataaaaacatgcttttcattttttcggcaagcaatgacgcacaagctcagcccaacacactgaccctattgccattttatgaaaaagatgctcaaaaaggcattatcacagtcgcaggcgtagaccgcagtggagaaaagttcaatggctccaaccattgcggaattactgccatgtggtgcctatcggcaccctatgaagcaagcgtccgtttcacccgtacaaacccgattcaaattgccggaacatccttttccgcacccatcgtaaccggcacggcggctctgctgctgcagaaatacccgtggatgagcaacgacaacctgcgtaccacgctgctgacaacggctcaggacatcggtgcagtcggcgtggacagcaagttcggctggggactgctggatgcgggtaaggccatgaacggacccgcgtcctttccgttcggcgactttaccgccgatacgaaaggtacatccgatattgcctactccttccgtaacgacatttcaggcacgggcggcctgatcaaaaaaggcggcagccaactgcaactgcacggcaacaacacctatacgggcaaaaccattatcgaaggcggttcgctggtgttgtacggcaacaacaaatcggatatgcgcgtcgaaaccaaaggtgcgctgatttataacggggcggcatccggcggtagcctgaacagcgacggcattgtctatctggcagataccgaccgatccggcgcaaacgaaaccgtgcacatcaaaggcgatctgcagctgggcggcgaaggtacgctgtacacacgtttgggcaaactgctgaaagtggacggtacggcgatgaccggcggcaagctgtacatgtcggcacgcggcaaaggggcaggctatctcaaccgtaccggacaacgtgttcccttcctgagtgccgccaaaatcgggcgggattattctttcttcacaaacatcgaaaccgacggtggtctgctggcttccctcgacagcgtcgaaaaaacagcgggcagtgaaggcgacacgctgtcctattatgtccgtcgcggcaatgcggcacggactgcttcggcagcggcacattccgcgcccgccggtctgaaacacgccgtagaacagggcggcagcaatctggaaaacctgatggtcgaactggatgcctccgaatcatccgcaacacccgagacggttgaaactgcggccgccgaccgcacagatatgccgggcatccgcccctacggcgcaactttccgcgcagcggcagccgtacagcatgcgaatgccgccgacggtgtacgcatcttcaacagtctcgccgctaccgtctatgccgacagtaccgccgcccatgccgatatgcagggacgccggctgaaagccgtatcggacgggttggaccacaacgctacgggtctgcgcgtcatcgcgcaaacccaacaggacggtggaacgtgggaacagggcggtgttgaaggcaaaatgcgcggcagtacccaaaccgtcggcattgccgcgaaaaccggcgaaaatacgacagcagccgccacactgggcatgggacacagcacatggagcgaaaacagtgcaaatgcaaaaaccgacagcattagtctgtttgcaggcatacggcacgatgcgggcgatatcggctatctcaaaggcctgttctcctacggacgctacaaaaacagcatcagccgcagcaccggtgcggacgaacatgcggaaggcagcgtcaacggcacgctgatgcagctgggcgcactgggcggtgtcaacgttccgtttgccgcaacgggagatttgacggtcgaaggcggtctgcgctacgacctgctcaaacaggatgcattcgccgaaaaaggcagtgctttgggctggagcggcaacagcctcactgaaggcacactggtcggactcgcgggtctgaagctgtcgcaacccttgagcgataaagccgtcctgtttgcaacggcgggcgtggaacgcgacctgaacggacgcgactacacggtaacgggcggctttaccggcgcgactgcagcaaccggcaagacgggggcacgcaatatgccgcacacccgcctggttgccggtctgggcgcggatgtcgaattcggcaacggctggaacggcttggcacgttacagctacgccggttccaaacagtacggcaaccacagcggacgagtcggcgtaggctaccggttctga

SEQ ID NO: 67751 - DNA, 1137 bp, Neisseria meningitidis
atgggcttgaaaaaggcttgtttgaccgtgttgtgcctgattgttttttgtttcgggatattttatacatttgaccgggtaaatcagggggaaaggaatgcggtttccctgctgaaggacaaactcttcaatgaagagggggaaccggtcaatctgattttctgctataccatattgcagatgaaggtggcggaaaggattatggcgcagcatccgggggagcggttttatgtggtgctgatgtctgagaacaggaatgaaaaatacgattattatttcaatcagataaaggataaggcggagcgggcgtattttttccacctgccctacggtttgaacaaatcgtttaatttcattccgacgatggcggagctgaaggtgaaggcaatgctgctgccgaaggtcaagcggatttatttggcaagtttggaaaaagtcagcattgccgcctttttgagcacttacccggatgcggaaatcaaaacctttgacgacgggacaatcaatttaattcaaagcagcagctatttgggcgatgagttttctgtaaacgggacgatcaagcggaattttgcccggatgatgatcggagattggagcatcgccaaaacccgtaatgcttccgacgagcattacacgatattcaagggtttgaaaaacattatggatgacggccgccgcaagatgacttacctgccgctgttcgatgcgtccgaactgaaggcgggggatgaaacgggcggcacggtgcggatacttttgggttcgcccgacaaggagatgaaggaaatttcggaaaaggcggcaaaaaacttcaacatacaatatgtcgcaccgcacccccgccaaacctacgggctttccggcgtaaccacattaaattcgccctatgtcatcgaagactatattttgcgcgaaattaagaaaaacccgcatacgaggtatgaaatttatacctttttcagcggtgcggcgttgacgatgaaggattttcccaatgtgcacgtttacgcattgaaaccggcttcccttccggaagattattggctcaagccggtgtatgccctgtttacccaatccggcatcccgattttgacatttgacgataaaaatcaatcgcatagcaaatcaaaatag

SEQ ID NO: 67752 - DNA, 441 bp, Neisseria meningitidis
atgcctacccaatcaaaacatgcgtctatcaatatcggtctgatacaggcaagggaagccctgatgacccaattcaggcctattctgaatcaggcgaatattaccgatcagcaatggcggattatccgtcttttggcggaaaacggcacgctggactttcaagatttggcgaatcaggcgtgtattctgcgccccagcctgaccggtatcctgacccgccttgaaaaagcgggtttggtcgtccgcctgaaaccttccaacgaccaacgccgcgtttttctgaagctgactgccgagggcgagaagctgtatgaggaaatcggcgaagaagtggacgagcgttacgacgctatcgaggaagtgctgggccgcgagaaaatgctgctgcttaaagacctgttggcagaacttgccaaaatcgaggatgcgttgaactcgtaa

SEQ ID NO: 67753 - DNA, 987 bp, Neisseria meningitidis; identical to SEQ ID NO: 44315

SEQ ID NO: 67754 - DNA, 1593 bp, Neisseria meningitidis; identical to SEQ ID NO: 36867

SEQ ID NO: 67755 - DNA, 1005 bp, Neisseria meningitidis
atgaccatcatcgtaacaggcgcggccggctttatcggcagcaacatcgtcaaagcacttaatcaacgcggtattactgacattgttgccgtcgataatttgagcaaaggcgaaaaattcaaaaaccttgccgagtgcgaaatcgcccattatctcgacaaacatgaattcatccgccaagtgagggaacacattttaccttatcaaaacatcgaagccgttttccatcaaggcgcgtgttccgacaccatgaatcacgacggtttgtatatgatggaaaacaactaccagtacacgctggatttgttggactggtgtcaggacgaacgcattcccttcctttatgcctccagtgcggcggtttacggcaaaggcgaaatcttccgcgaagagcgcgaactcgaaaaaccgctcaacgtctacggctactccaaattcctgtttgaccaagtattgcgccgccgcatgaaagaaggtctcaccgcccaagtcgtcggcttccgctacttcaacgtttacggacaacacgaacaacacaaaggccgcatggcatccgtcaccttccaccatttccaccaataccgcgaacacggttacgtcaacctgttcggcagcaatgacggttacggcaacggcgaacaaacccgcgactttgtcagcgtcgaagacgttgccaaagtcaacctctacttcttcgaccatcccgaactttccggcatctacaacctcggtaccggccgcagccaacagttcaacgaactcgccgccgccaccgtcaacgcatgccgcgccgccgaaggcaaacctgaaatgagcttgaaagagttggtagaagaagaacttatccgctacattcccttccccgacgcgctcaaaggcaaataccaaagcttcacccaagccgacatcaccaaattgcgcgaagccggatataaggaagaatttttcgatgtcaaatcaggcgtcgaccgctacgtcaaatggatgctggaaaatttggcttaa

SEQ ID NO: 67756 - DNA, 1167 bp, Neisseria meningitidis
atgagaaaattcaatttgaccgcattgtccgtgatgcttgccttaggtttgaccgcgtgccagccgccggaggcggagaaagctgcgccggcagcgtccggtgaggcgcaaaccgccaacgagggcggttcggtcagtatcgccgtcaacgacaatgcctgcgaaccgatggaactgaccgtgccgagcggacaggttgtgttcaatattaaaaacaacagcggccgcaagctcgaatgggaaatcctgaaaggcgtgatggtggtggacgagcgcgaaaacatcgcccccggactttccgataaaatgaccgtcaccctgttgccgggcgaatacgaaatgacttgcggtcttttgaccaatccgcgcggcaagctggtggtaaccgacagcggctttaaagacaccgccaacgaagcggatttggaaaaactgtcccaaccgctcgccgactataaagcctatgttcaaggcgaagtcaaagagctggtggcgaaaaccaaaacctttaccgaagccgtcaaagcaggcgacattgaaaaggcgaaatccctgtttgccgacacccgcgtccattacgaacgcatcgaaccgattgccgagcttttcagcgaactcgaccccgtcatcgatgcgcgtgaagacgacttcaaagacggcgcgaaagatgccggatttaccggcttccaccgtatcgaatacgccctttgggtggaaaaagacgtgtccggcgtgaaggaaattgcagcgaaactgatgaccgatgtcgaagccctgcaaaaagaaatcgacgcattggcgtttcctccgggcaaggtggtcggcggcgcgtccgaactgattgaagaagtggcgggcagtaaaatcagcggcgaagaagaccggtacagccacaccgatttgagcgacttccaagccaatgtggacggatcgaaaaaaatcgtcgatttgttccgtccgttgatcgagaccaaaaacaaagccttgttggaaaaaaccgataccaacttcaaacaggtcaacgaaattctggcgaaataccggactaaagacggttttgaaacctacgacaagctgggcgaagccgaccgcaaagcgttacaggcctctattaacgcgcttgccgaagaccttgcccaacttcgcggcatactcggcttgaaataa

SEQ ID NO: 67757 - DNA, 1332 bp, Neisseria meningitidis
atgagcggatggcataccttattgcaggacgcatcttacaagggcgtcggctttgatattgaggtggtggacgagagcaacggcaaggcattggccgagcatgcgcggccgtttgtgcagggtatcgaccttgaagacatgggcatgaccgggcggcaggtgcagattaatgcggtgttttggggcaagggctatgcaggccgtctgaaaaagctgctggatgcgctggagcagccgggcggcggcgtgctggtgcaccctgtttgggggcggatgcacaacatgattgcggcatcatggagttaccgacatgaggccgattatgtggattatgcgggcatcgatattactttccgcgaggcggccgaagcgcaggaaatctttgtttttgaaaacgcctttttggtcgagcttgaggcgttgattgctgatatcgacacctaccgcgaggcggctatcggctttgttgatgcggtgttggcggtggatgcgggcgtatcggctttatggggcagcgcgctgggcatttggagtgcggcatcgggtacgtttggcgcggtgcgccgtttgtttgatttggacaaaattgcctttcccgatcggggcggatacagcgcagcggcgtttaaaaacggctcggccaagctgtttgcggatatatcggtcatggtagatactggcatacgccgtgaggcgggtttggccgataatgccatgcaccatgccggttggtcgccgcgacagcggtttgacggggctgcggctgttgccgaccgtgccgccgctatccctgataatttgctgaccggccgcttttcagacggcctgcaaaaccgcctgaaccgtttaaccgccaaacaggtgcagccggtagcgcaggcggtgcgcctgttatccacgtcatcgctgttgtcggtggcaacggcattaatcgaggcgcatggcgaagagatgaccgcgcccgatttgattgaggttaaccgcgccatgcgccgccgtatgcaggccgagattgccgccttacgggcggtgcagacggctgctgccgagtctggtgggctgacggccaacgccgtgtataccgaggcttaccaaacggcagaatccctgcgcgcggcggcaggccgtctgaatgcgttggttgcggcggtcatcaaccaaaagccgccgctgattgtgcgccaagccccaatcgacggtacgatacaccaaatcgcccacgagttttacggcgatatagcccgcgcagcagagctggtgcggctcaatccccatatccaccaccccgcgtttatcaagcgcggcactttggtcaacagctatgcaaaataa

SEQ ID NO: 67758 - DNA, 354 bp, Neisseria meningitidis; identical to SEQ ID NO: 66194

SEQ ID NO: 67759 - DNA, 657 bp, Neisseria meningitidis
atgaacagacaaaaagtcatcgccatcgacggcccgggcgcatcgggcaaaggcacggttgccgcccgcgttgccgccgcattgggatacgattatctcgataccggcgcactctaccgcctgaccgccctatatgcacaaaaacaaggcgtggaatggcacgatgaagaaaacgtttccaaactggcaaaaaaactgcccgccgtattttcaggcagccgcatcctgctcgacggcgaagacgtttcagacggcatccggacagaagccatcggcatgggcgcatccgcagtcgcacagttgcctaaagtccgcgcctccctgctgcaacgccaacgcgattttctgaccgaaaaaggactggtcgccgacggacgggacaccggatcggtcgtcttcccccaggccgaactcaaaatttttctgacagccgaatccaaaatcagggccgaacgccgcgccaaacaaatcggcatcccctgcgaaggtttggcattcgagcgcatcctgtccgacatcgaagccagagacgaggcagaccgaaaccgcaaggttgcccccctgaaacaacaacccgatgccctgcttttggatacgagccgcctgactatagaagaaactgtaaaaaaagtgcttgattggtatcgtaaagtttaa

SEQ ID NO: 67760 - DNA, 1281 bp, Neisseria meningitidis
ttgaaggattgttttcctcaaggtctgaatggaaaaaaaacagcggtggcattaagcggcggcttggattccgtcgttttgctgcatctgcttgtccgcgccggaaaaaagggcggttttattccggatgcattgcatatccatcacggcttgagtccccgtgccgacgattgggcagatttctgccaaaactattgcgatatgctcggggtggggctggaaacggttaaggtctgcgtggaaaaaaacggtttgggcatcgaggcggcggcgcggcaaaagcgttatgccgcgtttgccgaaaaaggctttgacgttttggcgttggcgcaccacagggacgatcaaatcgaaacctttatgctggcagtcgctcgcggcggcggtttgcgcgctttggcggctatgcccaccgtccgcccttttggggaaaaaggcatcatctggcggcctttgctgcctttttcgcgccaagacatatgggattatgcccaaaaacacggtttgccgaatatcgaggacgaaagcaatagcgatacggcttatttgcgaaaccgcttccggcaccgtattttgcccgaactttcggcgcagattccccatttcgggcggcatgtactgaacaatgtccgcgctttgcaggaagatttggctttgttggacgaaatcatcggtcaggactgccgttgggtctgtgaggaaggcagtttcgatacggtgcgttggcaggcgttttccccacgccggaaaacccatattttgcggtattttttgaaggaaaacggcatccccatgccgaatcagaatgcccttgccgacattgcccgggttttgacggaggcaaaaaccggacgttggaacttgcaaggctttgaattgcatcattatgcaggcaggctgtttgtgttccgactggaaaaaacggataaactgcggtttttgaaagacaggcagataagcggaaatttaagggaaatattgacggggcagggatttgttttaaaacgtcatccgtttgggcttcctgagcatcttttggagcaggacggaattttgaggacggtagcggtatcggatacgttggctgtcggcggcatccataaggatgtgaaaaaaatccttcaggggaaacgggttttgcctgtcctgcgcccaatttggccgcttgttgccgacagcggaaaccgtccattggcgttggcaaactgttgtgcggatttccaatactcggtttcagacggcattttgcccgtccatcctgactttcccattttattttga

SEQ ID NO: 67761 - DNA, 348 bp, Neisseria meningitidis; identical to SEQ ID NO: 51281

SEQ ID NO: 67762 - DNA, 900 bp, Neisseria meningitidis
  misc_feature 4, 5, 6, 7, 8: 'n' is a, c, g or t
gtgnnnnnaatcaaaaatctcgacaacttcagcaacgccgcccaactggttgtcgacggcattatgattccgctcctgcccaaggattccgaaagcgggaacaatcaagccaatcaaggtacaaatggcggaacagcctttacccgcaaatttgaccacacgccgaaaagcgatgaaaaagacacccaagcaggtacggcggcgaatggcaatcaagccgcttcaaatacggcaggtgatgccaatggcaaaacaaaaacctatgcagtcgaagtctgctgttccaacctcaattatctgaaatacgggttgctgacacgcaaaaccgccggcaacacgggggaaggcggcaacggcagcccaaccgccgccgcccaaacggacgcgcagagtatgttccttcaaggcgagcgcaccgatgaaaaagagattccaaaagagcaacaaaacatcgtttatcgggggtcttggtacgggcatattgccaacggcacaagctggagcggcaatgcttccaatgcaacgagtggcaacaaggcggactttaccgtgaattttggcgagaaaaaaattaacggaacgttaaccgctgaaaacaggcaggcggcaacctttaccattgagggaacgattcaggacaacggtttttccggtacggcgaaaactgctgacttaggttttgatctcgatcaaagcaataccaccggcacgcctaaggcatatatcacagatgccaaggtgcagggcggtttttacgggcctaaagccgaagagttgggcggatggtttgcctatccgggcgacaagcaggcgcagccgtccgcttcggggtcaggcgcatcagccgccaacagcgcgaccgtggtattcggtgcgaaacgccaacagcttgcgcaataa

SEQ ID NO: 67763 - DNA, 1584 bp, Neisseria meningitidis
atgccgaacaaaaagaaaaaagccgcctttgcgcgtgctgcaacggagaacggtgtgccggacgtgtccaacatcaaaaattcatatgatgatttgatgtatgaatccaaagcattttcccaaaccgccatcaacgccttggaggctcgcgcccgcatgatgggtctgaagcctgcagcagcggcaaaagccaaggtcttggagctgggctgttcgatgggcggcaacatcatcacgcaggctctttattacccggatgcggaatttgtcggtatcgacttgtccggcaggcaggttgcgcagggcaacgccatcattgaaaaaatgggcttgaaaaatgtgcgtctggaagaaaaagatattttgaccgtcgatgagtcattcgggaagtttgactatatcatcgtccacggcatttggtcgtgggtgcctgacgcagttaaagacaaaattttttcgatttgccggaacaacctgaccgaacacggcattgcctatatttcatacaatgtttaccccggctggaaacggcaggagcagttgcgcgaaattatgtactttgccggcagggatgtgcttgaagaacccttggaagcgcggacgcggaaaggcttggacgcgctcaaggcgctggcggaaattttggaaaacgacaaaggcttgggcggcggcggcaaacttccggcgattcaaaaaatattgaatcacaatacttattatgtcgcacacgaatatatggaaatattcaacgacccgatttacgttaacggcttcatcgaatgggcaaaccgccaccggctggcgtatatcggggataccgatttgcacgtgtcttttgtttcttggatggcggagcatacgcgggagcggattttggcattggcaggggatgattatattgccaaagaattttatagcgatattttatccgaccgccaattccgccgttcgcttttatgccgtgaggaagtcggggacaatatcaggcgcgatgagtcggttgccgtcgaagtgatagaaagtttgaatttccgcccggcaagaggggaaacaatcaactttgatgaaaacgataccctgctttcgggcatacgcgatgtgatgaaaaccggagagccgtttaaaacggaagatgttgcggaaaatctcgcccgccgatttcccggtctggaatttgaccgcatgaaaatcaattcccagcttttattgcaaaccattctcgggcgtttttctgtttcatcagacaatgcgggcaaacaattttttgaagaccataaaacctatgtgccggcgcgttttacagattatgccgccgcctttgtggaacacggcgcggaagcgtttgtccagcctgccaaccgttacaacgaaagcaccccctcattcgggtacgggcatttgtacattatgcggcaattgtcgcggccgacgagcaaacaggcattgattgaaacggttgccgaaaacttgaacatcgtcagcaccacgcccgacggtttgacattccatccgcctgccgaagtgtatgtggaagaaatattggcagacttggcagacaggcattttctcgtttcggcggattga

SEQ ID NO: 67764 - DNA, 2787 bp, Neisseria meningitidis
atggcgaataataaaactttgtttgaagtaattgaaaaccgcaaagctgtgtatttggaagacggagatgatgaaaaatacaggctgcctaaatttgtttcaaataatttgaaatatccgttttttgaatggcaaaaatcggctttagaaaactttgtgatttttgaccgcacttcaaaattaaaggattttcccgatatcaaaaaccgccctactcatttgctatttaatatggcaacaggtgcaggcaaaacgatgatgatggcggcattgattttgtattattttgaaaaagggtatcggcattttctgttttttgtgaatcaaaacaatatcgtggataaaacggaaaataattttattgacccgacacacgcaaaatttttatttaccgagaagattttgcagggcgatacggtaattcccattcgcaaagtggaaacgttcagcccacattcagacggcattgaaattaaatttaccagcattcaaaagctgtataacgatattcacaccgaacgggaaaaccaaaccacattggcggatttgcacgaattgaatcttgtgatgctgggcgatgaagcacaccatttaaacgcgcaaaccaaaggcaaaaaacaaggcgagttggatttggaagtggaattaaaagccaatgcaggcaatgccgaaattgaacgcaaaggctgggagcatatggttttggaattgttactcaataaaaatggcaatcccagccaaaatgtgctgttggaatttaccgccacgctgcctgaaaatgctgacgtgcaacaaaaatacgcggataaaatcatcacaaaatttggcttaaaagaatttttgcaaaaaggttataccaaagaaatcaatttggtatccagtacgctgggcaagaaagagcgggtgttgcacgctttattatttgcttggtatcgccatcaaatcgctttgaaatatggcattgccaatttcaagcctgtgatgttgtttagaagtaagacgattgatgaatcaaaagcggattatctggcatttttaaattgggcagaaaatgtgcaggcggttgatttttcgtttttaactacattttcaacaagcttgaacgatagcgatagcgataacgccaacgaacaaggcaaaacccgcactgaacaagccctaaaatttatgcaggaaaaaggcgttgagtttgcacatttggcagattgggtaaaacaaaattatcaaaaacacaatgtgattattaccaactccgaaaccaacaaaaccaaaaccgaaaaaaccgacagcgaaacagaaaaattgctgaataatttggaagcggctgataatccgattcgtgccatttttacggtggacagattaaccgaaggttgggacgttctgaatttgtttgatattgtgcgtttgtatgaagggcaaaacggcggcggttcaaataaaaaatcaggcaaaacggctgccgccaccgtatcggaaaagcagttgattggtcgtggcgtgcgttattttccatttgcgtttgaaggtaaacagccgaataaacgcaaatttgacaacgatatgcaacacgaattgcgtatcttggaagaattgttttattacacgcacgatgagcaatcccgctatatttcagaactgaaaaacgagttgcgaaaagacggttatttgcctgaaaaagacgatgataaggtattggcaacatttaaactcaaatctgaatttgccgctaataaggattttagagaattgttaatttgggcgaataaaaaaatccccaacccaaacgccaaaaccaataatgcaaacagcctgcaagccaatccgcaaacgctttcattccaagttcacggcaatcaactgttgcaggaaacgcaatttacagccgatgaaaatgatgaaaaagtcaagcaacttggcacgcaaaataattttactcaaaccataaaaatgagtgaaatggagcggcacattttcaataaagccctgcatatcaaagggaaaaatagtcaatctttattccattttgaccgcctgcaaagcaaactcaatattcaaaatcgcaatgaattgcaaaataaattgttgaaagactggcaaattgaatttttaggattagggcaagacaaacaggtttgcccggacgataaacttgcaggctgcctgaaaatcttggaaatggttgaaaagcatttgaatgaaagtgataagccatttatcggtacaaaagaatttacgcctaaaaaattatgggaaattttcggcacgccaaaacaaaaatgggtcaaaaaagatgatgtaaaaacgactattgccacgcaaaatgattggtatgtgatgaataattttgccggaacgggtttggaagaagcgttaattcaatttatttcagcgcgtttgggcgatttgaaatctaaatatgacgttcatttaatccgtaatgaagaagtgtttaaattgaataactttgccgatggtgaaggatttatgccggactttattttattgctgaaagataaacaaaaatcttcttccaatggcgtgaaggactttttgcattaccaaattttcattgagcccaaaggtgagcatttagtggaaactgatggatggaaagaagaatttttagaagccatcactgtggaatatgggatggataagatcctgcaaaaagatacaccgcattatcgtttgatcggtttaccgttttttactgatcatcagaaaaatggacaatttacggagtcattccctttaggtgcggcatcgcttgaaaaaatgaagtag

SEQ ID NO: 67765 - DNA, 1662 bp, Neisseria meningitidis
atgacagaatccatcacccgcgacagtatgcaatacgatgtcgtgattgtcggcgcaggcccatcgggtttgtccgccgccatcaaactcaagcagcttgccgaacagaacgggcgcgaaatcagcgtttgcgtggtggagaaaggttcggaggcgggcgcgcattcgctggctggcgcggtcattgacccgattgcgctgaatgagttgattcccgactggaaagaaaaaggcgcgccgctgacgcgcacggtaacgcaggacaaggtgttgttcctgacggagaaaaaagcgttcaatctgcccattacccccaatttcgacaatcacggcaactacatcgtcagcttgggcgaagtcgtgcgctggttggcggagcaggcggaaaatatgggcgtggaaatctatcctggctttgccgctgccgaagtgctgtatcacgaagacggttcggtcaaaggcattgcgaccggcaatatgggcgtgggcaaaaacggcgagccgaccgattcattccagcccggcatggagctttgggcacagcaaaccctgtttgccgaaggttgccgaggttcgctttccaagcaaatcatcgaacgcttcaaactcgaccaaaacagccagccgcaaacttacggcttgggcattaaagaagtttgggaagtgccgtccgaacagcatcagcccggtttggtgatgcacagcgcaggctggccgctggacagcaaaacctacggcggcgcgtttgtttaccatttcgacgacaacaaagttgccgtcggcttcgtggtcggtttggactatcaaaatccttatctgtcgccgtttgaagagttccaacgtttcaaaacccatcccgaaatccgcaaaacctttgaaggcggccgccgcattgcttacggtgcgcgttcgctgattgaaggcggtttgcaaagtttgccgaagctctcgttcaaaggcggcgttttggtcggcgatgcggcaggtttcctcaatatgccgcgcatcaaaggcatccataccgcgatgaagtccgccatgatcgccgccgaagccgtgttccccttgttgggaaaccttgaagaagtggaaaactttaacagcggcaaagaagtggaaaactatcaaaaactgtttgaacaaagctggctgtatcaagagctttacaccgcgcgcaacgtccgtccgtcattcaaatggggcgtttacctcggctcgctttataccggcatcgaccagatgattttcagaggcaaagccccgtggaccttgaaacatcacggcaaagacaacgagcagctcaaaaaagccgccgcgtgcaagccgattgattatccgaaacccgacggcgtgttgaccttcgaccgcttgagcagcgtcttccttgccaatctcgcgcacgaagaaaaccagcccgaccatttggtgctgaacaatccgcaaacgatgatagacgtgaactacaaagaatacgcctcgcccgaaacgcgctattgtccggcgggtgtgtacgaaattgttgaagaaaacggcaatccgcgcctgcaaatcaacgcggcaaactgcgtgcactgcaaaacctgcgacatcaaagacccgacgcaaaacatcacttggatttgccccgaaggcgcgagcgggccgaattacggcgggatgtga

SEQ ID NO: 67766 - DNA, 1911 bp, Neisseria meningitidis
atgaatatattatctgtagaaaacgcttcttttgccatcggccacgttgccttgctcgacaaaacttcttttcaactcgacagcggcgaaaaagtcggcttaatcggacgcaacggtgcgggtaagtcttcgtttttaaaaatcctcgccggtttgcaaaagctcgacgacgggcagattattgttcaaaacaacctcaaaatcgtttatgtaccgcaggaatccttttttgataaggacgcaaccgtatttgataccgttgccgaaggtttgggtaaaattcgcgatttattgcgccgttaccaccgcgtcggtcatgagttggaaaacggttcgggtgaggctttgttgaaagaactcaacgaattacaacttgaaatcgaagcgaaggacggctggaagctggatgcggcagtcaagcagactttgggcgaactcggtttgccggaaaacgaaaaaatcggcaacctttccggcggtcagaaaaagcgtgtcgccttggcgcaggcttgggtgcagaagcccgacgtattgctgctggacgaaccgaccaaccatttggatattgacgcgattatctggttggaaaacctgctcaaggcgtttgaaggcagcttggtcgtgattacccacgaccgccgttttttggataatatcgctacgcggattgtcgaacttgaccgcggcattctacgttcctatcccggctcgttctccaaatatagcgagaaaaaagcgcaagagttggcagtcgaagcggaacacaaccgcctcttcgacaaattccacgcgcaggaagaagcgtggatacgcaaaggcatcgaagcgcgccgtacccgcaacgaaggccgcgtgcgccgtttggaagaactgcgccgccagcgtgccgaacgccgcaacgtacaagggcaggtcaatttcaagctcgacagcggcgagaaaagcggcaaaatcattgccgaactggaacatgcctcgtttacctatggcgacaaagtcatcatggacaaattctccgccatcttgcagcgtggcgacaaaatcggcttaatcggcccaaacggtatcggcaaaaccaccttcctcaagctgattttgggcgaattgcagccgacctacggcagaatccgcattggtagtaagcaggaagttgcttattttgaccagttccgcagcgcgttaaatgaaaacgacaccatgttttacacgctcggacagggcaatgattacgttgaagtcagcggtaagaaaaagcatgtgatgagctatttggaagatttcctgttcccccctgcccgcgcgcaaagtcctgtttcttcactctccggcggcgaacgcaaccgccttttgctggcaaaactctttacctgtcccgccaatattttggtcttggacgaaccgaccaatgacttggacatcgacacccaagagctgctcgaagacctgttgcgcgattatcaaggcacggtattccttgtctcgcacgaccgtatgttcctcgataacgtgattacccaaagcattgtttttgaaggaaatggaaggttaaaagaatatatcggcggctatcaggactacatcgacgcaaaatcacgcgaagcgaagattcagacggcatccgcacccaaaacagccgatgccgaaccggtgaaagaaaaacccaaagccaaccgcacggtcaaactgtcctacaaagaacagcgcgaactcgatgccctgcccgacgaaatcgccgccttggaagccgaacaggcagaaatcaacgcgcagctttccgatcccgaaatcttcaaagattacgaaaaagccggcgcactgcaaagccgcgccgaagaaatcgaaatgctgcttttggaaaagctggaacgctgggagctgctggaaaccaaacggaacggcaatgccgtctga

SEQ ID NO: 67767 - DNA, 1977 bp, Neisseria meningitidis
atgaacgaattttcgcttgcccctattgtgattgttttgctggtgtcggtcattacggtgatcctgtgccgcaagttcaacattccctccatgctgggctacctgctggtgggctttttggcggggcccggtatgctcagcctgattccgaaaagccatgcgacggattatttgggtgaaatcgggattgtgttcctgatgttcagcatcggtttggagttctcgctgcccaagttgagggcgatgaggcggctggtgttcgggctgggcggtttgcaggtcggcgttacgatgctgtcggtaatgggcatactgatgctgacgggcgtgccgttcaattgggcgtttgccgtgtcgggcgcgttggcgatgtcgtccacggcgattgtgagccggattttgtcggaaaagacggaattggggcagccgcacggtcagatggcgatgggcgtgctgctgatgcaggacatcgccgtcgtgccgctgatgattctgattcccgcgctggcgggcggaggggacggaaatatttgggcggccttgggtttggcgtttgcaaaaatgctgctgacgctggggctgctgtttttcgtcggcagcaaaattatgtcgcgatggttcaggatggtggcaaaacgcaaatcgtccgaactctttatgatcaatgtgctgctggtaaccttgggtgtggcttatctgactgagctggaaggtttgtctatggcgttgggcgcattcgttgccggcatgctgctttcggaaacggaataccgtttccaagtcgaagacgacatccgcccgttccgcgatatcttgctcggctttttctttatcacggtcggcatgaagctggacattcaggcattaatcggcggctggcggcaggtattgatgctgttggcaatgctgctggtgttgaaggcactggttgtgtttgccattgccttcaaaatgaaacattcggtcggcgacagcctcaaaacggctttgtatctcgcacaaggcggcgagttcggcttcgtgatgctggccattgccggacagcttgatatggtttcgcccgaactggaacaggcggcgacggcggcggtgctgctgtcgatgattgccgccccgctgatgatgggcggaggggacgcgctggtcggacgcttcatcaagtcaagctgggacatgaagtcgctcgatctgcacagtatgctggtagaaaccatgagcaagtccgaccatgtgctgattgtcggcttcggcaggggcgggcagacggtcggacgcgtcctctcccaagaagacatcccgtatttcgcactcgatttggacatcgcgcgcgtgcaggttgccaaaaatgccggcgagccggtgtcgttcggcgatgcgaaaaggcgtgaagtgttggaggcggccggtttgggacgggcgaaaatggtggtggttacgctcaacaatatgcacgaaacgcaacacgttttagacaatgtgctgtccatgtatcccaatatgcccgtatatgtgcgcgccaccaatgacgattatgtgaaaacgtttaccgatatgggcgcggaagaagccgtgtcggacaccaaagaaaccggactcgtgctggcaggctatgcgatgttgggcaacggcgcgtcgtaccggcacgtctatcagacgatggcaaatatccgccacagccgttatgccgcgttggagggactgtttgtcggcagcgacgacgaagcgggattcggtgaaaacggcgaaaccgtccgtcacgcctttcctttggctgcagaagcatacgccgtcggcaaaacagtcggcacgcttccgatggcggcttacggcatcaaactcttgttcgtccgccgccgcaccggccggattgaaaacccggatgcctcgtttacattggaaggcggtgacgtgttggtggtcgcaggcaaaaaagaagaaattatctcttttgaaaactggagtttgcagggaatataa

SEQ ID NO: 67768 - DNA, 1344 bp, Neisseria meningitidis
atgtttcacagtgtcaatgtatttacgggcgaaacgctttaccgccgtccagctcaagattatgcggagtttgaacggcggctggcggatttgaaaatgcgcggcggggcgttcgcgcaactgggcgtaaccgaacgtgccgcgcgtctgcaaaaatttgccgaccgtttggaggcggagaaagagtgttttgcggaaatggtgtgcgaagaagtcggacgctgcttgcacgaatgccgtgcggaaatcggcaagtctatcgaactgatacgctattacgcccgccttgcccccgaactgcttgcccacaaaaccatcgcgacgcaggcgagtttgagtcaggtgcgcttcgagcctttgggcgtggtgtttgccgtcatgccttggaactaccccgtctggcaggtattgcgctttgccgtacctgccgtttgcgcgggcaacgcgtgcgccgtcaaacccgcgcccagcgtggcgcgcgtcagtcaggcactgttcgatttggcttcagacggcattcctttggcaggcgtgtggctggatgaggcggacacgctcaaagccatcgaacacaccgacgcaatggcgtttaccggctcgacgcatacggggcgcatccttgcggcacatgcgggcgcaaacctcaagaaaaccgtcttggaactcggcggcagcaacgcctttatcgtgatgcccgatgccgatttggaacgcgccgccgcagaagcctgttattcccgtttccgcgatgcggggcaatcgtgcaacgccgccaaacgcatcatcgtaaccgaagccgcagccgatcgttttatcacgctgtttcttgccgaatgcgccaaattgaaaatgggcgaccccaaacatcccgatactacgcttgcaccgctgcaccgcgaagatttgcgggacagggttcacgggcaggttgaagatgccgtttcaaacggcgcggtatgcctgaccggcggaaaaatcccacaagggcgaggctggttttatcccgcgacggttttagacagggtaaatcctgcctgccgcgtctggagagaagaagtattcgggccggccgccctgattttgcgcgccgaaaacgaagaacatgccatcgcccttgccaatgattccccgttcgggctaggtgcctgcatttataccgccgataccgaacgcgcttggcggtttgccgaaaaaatacaggcgggatcggtgtttatcaaccgccataccagcagcgatttgcgcctgcctttcggcggagtcaaagattccggttacgggcgcgaattgtccgaattcgggctgtacgagttcgtcaacgtcaaaacctactggcagaaatga

SEQ ID NO: 67769 - DNA, 417 bp, Neisseria meningitidis
atgattgatgtcaaaatagacaatatctttgtcgtcctaaaccaaatcgagcggcttggcaacgggatcgaaaaccgctacctgctgatgcgccgactgtccgaaaccatgcacacggcggtcaagctcaatttccgctacgcaggccgtccgaaatggttggggctaaaataccgcgacggcaagccgctttcggattcgggtcgtctgaaagacagtttttccacactgtcagacaacgataccgcccttgtcggtacgaatatcgtctatgccgccatccacaacttcggcggtatggcggggcgcaaccgcaaagttcggattccgcaacgggaatttttgacgctgacggacgacgacaaacaggctttgatggacgatgtgcaggattatttttcgggtctgataccgtga

SEQ ID NO: 67770 - DNA, 3039 bp, Neisseria meningitidis
atgttttggatagttttgatcgttattttgttgcttgcgcttgccggcttgttttttgtccgcgcacaatccgaacgcgagtggatgcgcgaggtttctgcgtggcaggaaaagaaaggggaaaaacaggcggagctgcctgaaatcaaagacggtatgcccgattttcccgagtttgccctgatgcttttccatgccgtcaaaacggcagtgtattggctgtttgtcggtgtcgtccgtttctgccgaaactatttggcgcacgaatccgaaccggacaggcctgttccgcctgcttctgcaaaccgtgcggatgttccgaacgcattcgacggatattcagacagtggaaacgggacggaagaagcggaaacggaagcagcagaagcagaaactgcggaggaagaggctgccgatacggaagacattgcaactgccgtaatcgacaaccgccgcatcccattcgaccggagtattgctgaagggttgatgccgtctgaaagcgaaatttcgcccgtccgtccggtttttaaggaaatcactttggaagaagcaacgcgtgctttaaacagcgcggctttaagggaaacgaaaaaacgctatatcgatgcatttgagaaaaacgaaacagcggtccccaaagtccgcgtgtccgataccccgatggaagggctgcagattatcggtttggacgaccctgtgcttcaacgcacgtattcccgtatgttcgatgcggacaaagaagcgttttccgagtctgcggattacggatttgagccgtattttgagaagcagcatccgtctgccttttctgcagtcaaagccgaaaatgcacggaatgcgccgttccgccgtcatgcagggcaggcggaggcaaaatccccggatgtttcccaaggacagtccgtttcagacggcacagccgtccgcgatgcctgccgccgcgtttccgtcaatttgaaagaaccgaacaaggcaacggtttctgcggaggcgcggatttcgcgcctgattccggaaagtcggacggttgtcgggaaacgggatgtcgaaatgccgtctgaaaccgaaaatgttttcacggaaactgtttcgtctgtgggatacggcggtccggtttatgatgaaactgccgatatccatattgaagaacctgccgcgcccgatgcttgggtggtcgaaccacccgaagtgccgaaagttcccatgcccgcaatcgatattccgccgccgcctcccgtatcggaaatctacaaccgtacctatgaaccgccgtcaggattcgagcaggtgcaacgcagccgcattgccgagaccgaccatcttgccgatgatgttttgaatggaggttggcaggaggaaaccgccgctattgcggatgacggcagtgagggtgcggcagagcggtcaagcgggcaatatctgtcggaaaccgaagcgttcgggcatgacagtcaggcgatttgtccgtttgaagatgtgccgtctgaacgcccgtcctgccgggtatcggatacggaagcggatgaaggggcgttccaatctgaagaaaccgatgcggtatacgaacacctgccgacaaccgacctgcttctgccgccgctgttcaatcccgaggcgacgcaaaccgaagaagaactgttggaaaacagcatcaccatcgaagaaaaattggcggagttcaaagtcaaggtcaaggttgtcgattcttattccggccccgtgattacgcgttatgaaatcgaacccgatgtcggcgtgcgcggcaattccgttctaaatctggaaaaagacttggcgcgttcgctcggcgtggcttccatccgcgttgtcgaaaccatcctcggcaaaacctgtatgggtttggaacttccgaacccgaaacgccaaatgatacgcctgagcgaaatcttcaattcgcccgagtttgccgaatccaaatccaagctgacgctcgcgctcggtcaggacatcaccggacagcccgtcgtaaccgacttgagcaaagcaccgcatttgttggttgccggcacgaccggttcgggcaaatcggtgggtgtcaacgcgatgattctgtctatgcttttcaaagccgcgccggaagacgtgcgtatgattatgatcgatccgaaaatgctggaattgagcatttacgaaggcatcccgcacctgctcgcccctgtcgttaccgatatgaagctggcggcaaacgcgctgaactggtgtgttaacgaaatggaaaaacgctaccgcctgatgagctttatgggcgtgcgcaatcttgcgggtttcaatcaaaaaatcgccgaagccgcagcaaggggagaaaaaattggcaatccgttcagcctcacgcccgacgatcccgaacctttggaaaaactgccgtttatcgtggtcgtggtcgatgagtttgccgatttgatgatgacggcaggcaagaaaatcgaggaactgattgcccgcctcgcccaaaaagcccgcgcggcaggcatccatttgattcttgccacacaacgccccagcgtcgatgtcatcacgggtctgattaaggcgaacatcccgacgcgtatcgcgttccaagtgtccagcaaaatcgacagccgcacgattctcgaccaaatgggcgcggaaaacctgctcggtcagggcgatatgctgttcctgccgccgggtactgcctatccgcagcgcgttcacggcgcgtttgcctcggatgaagaggtgcaccgcgtggtcgaatatttgaaacagtttggcgagccggactatgttgacgatattttgagcggcggcggcagcgaagagctgcccggcatcgggcgcagcggcgacggcgaaaccgatccgatgtatgatgaagccgtatccgttgtcctgaaaacgcgcaaagccagtatttcgggcgtacagcgcgccttgcgtatcggctacaatcgcgccgcgcgtctgattgaccagatggaggcggaaggcattgtgtccgcaccggaacacaacggcaaccgtacgattctcgtccccttggacaatgcttga

SEQ ID NO: 67771 - DNA, 2559 bp, Neisseria meningitidis
atgcctgcaaacctgtcttcagcactggaaaccttcaaacagcagcgcgatgccgccgaagcgcattatttgaaagccaaccgcgtgtcggtatttttcagagaatacacggcggcagtcgaaaccttactggcggcattgtgggcagagtattttcaaaacagcgcgttatgcctgatggcggtgggcggcttcgggcgcggcgaactgtatccctgttcggatgtggatttggcggttgtctcccctgccccgctttcagacggcattcaggaacagattgcccggtttgttcaaaccctatgggactgcaaactgatgccgtctgtaaaaagcggcggcattggcgaactgtgcgaaagcgtgcgcgacgatattacgggggacacggcgtttttagaggcccgttttttgttcggcaaccgccaaacggcggacgaactggcgaaaaaaatgaacgcgcagcgcaatgtgccggcgtttgtcgaggcaaaactggtggagatggaacaccgccacgccaaatcgcaaggctcaggggcggtattggaaccaaacatcaaaagctgtccgggcggtctgcgcgacatccacaccctgctttggatagcgaaagcacaaggcttggcgaccaacctgcccgacctgctcaaacagcggattttgacgcgtgccgaagccggtatgctttcgcacggctaccgccgcctcgcccacatccgcatccatctgcatttaaacgccaatcgcgccgaagaccgcctgctgttcgatttgcagccgcaagtcgccgaaagcatgggttatgaaggcttgaacctccgccgccaaagcgaagaactgatgcgcgtgttttaccgcgcgattaaaaccgtcaaacaactgggcggcatcctcacgcctatgctgcaaagccgcgtttcctccaccccgttgcgcgttaccctgcggattgacgacgactacatccaagtcaacaaccaaatcgccgcgcggcacaccgatatttttttcagacggcccgaacacattttcaaaatcgtcgaaatcatgcagcagcgcaacgatattaccgcgctcgaaccgcaaaccctgcgcgcatggtggggcgcgacgcgcaaaatcaaccgcagcttctaccaaaattctgaaaaccgccaccgcttcgccggctttttccgcaacggcaacggactgacccaaaccctgcgcttcctcaacctctacggcgtattgggacgctacctgcccgcgtgggaaaaaatcgtcggcctgctccagcacgacctgttccacatctatcccgtggacgaccacatcctcaccgtcgtccgcaacgtccgccgccttgccttggatatgcacagccacgagctgccctacgcctctgcactgatgcagtcctttgaaaaacaagacatcctctaccttgccgcctttttccatgacatcgccaaaggacgcggcggcgaccatgccatacaaggcatcgcagacgcgcgccaatttgccgccgaccacttcctgaccgaagaagaaagcgacctgctcgcctggctggttgaaaaccatcttcttatgtccaccgtcgcccaaaaagaagacatccaagaccccagcgtactcgatgccttctgcaaacgcgtccaaacccacgaacgcctcagcgcgctctactttctgaccatttccgacatacgcggcaccaatcccaagctgtggaacgcatggcgcgccagcctgctggaaagcctcttccatgccgccggacgctaccttacaggcaacggcggcaacccgcacaccctcttcggccgccgccggcaggaagccgccgacttactcacccgcgccgccgtccccgaaaaacagcagaaaaaactatggaacgcgctcggttccgcctacttcgcccgccaccagtcccgcgaaatcctgtggcacgccgccaacctagtccacgactttgaaacccccatcgtccgcagccgcatcctgcccaaaagcgacagctttcaagtcatggtttttatgcccaacggcccgcgcctgttcgcccgcctctgccgcattttcagccgccacggcttcgatatcctcgccgcccgcgcctttatcaccgaacacgactacatcctcgacaccttcatcgtgcaaatcccctcgcagcacgctcccgaagactaccccgacatccaaagcgcgctcgaagccgaactcaacaactttatccacggacacaccgttgccgaaatctccagccatagccgccgcatcagccgccgcagccgctatatgccgatcgcgccaagcatcaccatcacccccgaagaagactaccccgattggtactccgtcgaaatcaccgccgtcaaccgccccttcctgctcgccgatatggcggaagtctttttcgcccacaacgtcagcctgcgctatgccaaaatctccacactggatgaacgcgccgaagacagttttaccgtttttagccccgacctgaaaaacccaaaaatccagtcctcattgaaacaggctttgctggaacagttggcataa

SEQ ID NO: 67772 - DNA, 711 bp, Neisseria meningitidis
atgaatgcagccatcgaacacgtccaagccgtcgccttcgatttggacggcacactgtgcgattccgtccccgaccttgccgccgccgcagaagcgatgttggagcaactcggtatgaaaccgctgcccgccaaagtggtcgaaagctatgtgggcgacggcatcggcaaactggttcaccgcgtcctcaccaacgaccgcgaccgcgaagccgattccgaactgtgggaaaaaggtttcgtgtcctatatgaaatactaccgcgaccatttgagcgtcttcacccgcccctatcccgaaaccgaagccgggctggcattgctcaaatctttgggcatcccgctggcagtcattaccaacaaaaacgaaatccttgccgtcgaactgttgaaacagctcggacttgccgactacttcagcctgatactcggcggcgacagcctgcccgaaaaaaaacccagccccctgccgctgcggcacgccgccgaagttttgggtatcgatgttgcaaacatggttatggtcggcgactcgcgcaacgacatcatcgccgccaaagccgccggctgcctgagcgtcggcgttaccttcggttacggcgatatgacgctgctctcgcaagacgatgcgacccgccccgactggattatcggctcgctgcccgaaatttacgaaaacctgcaaccgcagaaaaataaagacgaagaataa

SEQ ID NO: 67773 - DNA, 687 bp, Neisseria meningitidis
atgtttgatttcggtttgggcgagctggtttttgtcggcattatcgccctgattgtcctcggccccgaacgcctgcccgaggccgcccgcaccgccggacggctcatcggcaggctgcaacgctttgtcggcagcgtcaaacaggaatttgacactcaaatcgaactggaagaactgaggaaggccaagcaggaattcgaagctgccgccgctcaggttcgagacagcctcaaagaaatcggtacggatatggagggtaatctgcacgacatttccaatggtctgaagccttgggaaaaactgcccgaacagcgcacgcctgccgatttcggtgtcgatgaaaacggcaatccccttcccgatgcggcaaacaccctatcagacggcatttccgacgttatgccgtccgaacgttcctacgcttccgccgaaacccttggggacgacaggcaaaccggcagtacagccgaacccgcggaaaccgaccaagaccgcgcatggcgggaatacctgactgcttctgccgccgcacccgtcgtacagaccgtcgaagtcagctatatcgataccgctgttgaaacccctgttccgcataccacttcgctgcgtaaacaggcaataagccgcaaacgcgatttgcgtcccaaatcccgcgccaaacctaaattgcgcgtccgtaaatcataa

SEQ ID NO: 67774 - DNA, 816 bp, Neisseria meningitidis
gtggcaaaaattattgtagtaacttcaggtaagggcggtgtcggtaaaacgactaccagtgccagtattgcgacaggtttggcattacgcggatataaaactgcggtaattgattttgatgtgggtttgcgtaacctcgacctcattatgggttgcgagcgtcgtgtcgtttatgacctgatcaatgtcattcagggggaggcgacgctcaaccaagctttgattaaagataaaaattgtgaaaacctgtttattttgccggcttcccagactcgggataaagacgctttgacacgcgagggcgtagaaaaagtgatgcaggagctgtccggcaagaaaatgggctttgagtatattatttgcgactctcctgccggtattgagcagggtgcattgatggcgttgtattttgctgatgaagccattgtaacgaccaatcctgaggtttccagtgtgcgtgactccgacaggattttgggaattttgcaaagcaaatcccataaggcagagcaaggcggttcggttaaagaacatctgttgattacgcgttattctcccgaacgtgtggcaaaaggcgaaatgctgtctgtacaggatatttgcgatattctgcatatccctttgctgggtgtgattcctgaatcccaaaacgtcttgcaggcatccaattccggagaaccggtcatccatcaggacagcgtggcggcttccgaggcatataaggacgttattgcccgtcttttgggcgagaaccgtgaaatgcgtttcttggaagctgagaaaaaaagcttcttcaaacgtctgtttggaggataa

SEQ ID NO: 67775 - DNA, 588 bp, Neisseria meningitidis
atgaacaatatgtttgccgcaaaattgtccaaactggtttataccgcttccgaccatcccgaccccctgtcggagatgggggagtttgaccgcctgattttgctgatacgcaaactgtatcaaatattggacgggcagcatatcctctccagagtaacggtttgccttcactaccggagcaggcgcggcctgattgccttggataaagcggctgccggttgcgatgcggcaatgttgcgcgcccaacgttggcgtatctacacgcagattgcggaacgcctttccgggtcgggcggcggcttcacggttacggcagaaagcgtgtccgccgcctgcccggagcttgaaggacgctatctcgagcttgtccgccgcgccgccgtctctttcggtttcacgcaaggacaggaaaatccggcaggcgggcaggaaaaaacacaagccgtcccggatgccgcatcgagtcattccgtcagaaaaccaatcaaaatcaatatagaagcgaaagtggaacgctatctggcataccgcccgaccgccgccctgaaagtaacccgccggcggtttttccggctgcaaaaccggtaa

SEQ ID NO: 67776 - DNA, 474 bp, Neisseria meningitidis; identical to SEQ ID NO: 36318

SEQ ID NO: 67777 - DNA, 309 bp, Neisseria meningitidis; identical to SEQ ID NO: 38004

SEQ ID NO: 67778 - DNA, 960 bp, Neisseria meningitidis
atgaaacctgtttttttggattttgaacaacccatagccgaactgaccaacaaaatcgatgagctgcgtttcgtccaagacgagtctgccgtcgatatttcggacgaaatacaccgtttgcagaaaaaaagcaacgacctgaccaaatcgattttcagcaaacttacgcccgcccaggtttcacaggtttcccggcatccgcagcgtccctatactttggattacattgaggcactgtttactgattttgaagagctgcacggcgaccgccactttgccgacgatcatgcgattgtcggcggattggcgcgtttcaacggacaaagcgtgatggtcgtcgggcatcagaaagggcgcgacaccaaagaaaaaatccgccgcaacttcggtatgccgcgccccgagggctaccgcaaagccctgcgcctgatgaaaacggcagaaaaattcggcttgcccgtcatgacctttatcgatacaccgggcgcgtatcccggcatcggcgcggaagaacgcgggcagtcggaagccatcggcaaaaacctgtacgaactgacacgcctgcgcgttcctgttttgtgtaccgtcatcggcgaaggcggttcgggcggtgcgttggcggtcgccgtgggcgattacgtcaatatgctgcaatactcgacctattccgttatttcccccgaaggctgcgcttcgattttgtggaaaaccgccgaaaaggcggcggatgcggctcaggctttgggcattactgctgaccgcctgcaaaagctggacttggtcgataccgtcatcaaagaaccattgggcggcgcgcatcgggattttgggcaaaccatgaaaaacgtgaaagccgttttggaaaaacaactgcacgaagcgcaaagcatcccgcttgccgatttgctttcgcgccgtttcgaccgcattatggcttacggcaaattttcggaacaataa

SEQ ID NO: 67779 - DNA, 726 bp, Neisseria meningitidis
atggattttctctcttgttggcggcgcatcgcagacgcgcccactatcaggcgttgcgtattatgccacggttcgtccggcgtttcagacggcatctgcgccggctgccgcaacgatttggcggcataccgcaccgacgcggcaaacagctgccccctgtgtttcaggcacgttcaaggcggcgcggtatgcggcggctgtcagaaaaaaccgcccgcattcgaccggatgtgggcatcgctgcattacgaaccgcccgtcagcaatatgatacgcgcgctgaagcacttggctgatttgggcatggtgcagccgctggcagacctgatgatgcagaatccgcccgaccggcttgcagacgaatgtttcgatttcgtcctgcccgttccgctaagcagggagcggctgctgcaacgcgggttcaaccaaagcgagggcatcgtcgggttgttggcgcaacgctacggctggcggatactgccccgacacaccgtattccgacaccaccgtccgccgcaaagcacgctcaaaggcggcgaacggcggcgaaatatcaaaaacgcctttgaaatccgcacaccgccgccgaaaaactgtaatattttgttaatcgacgatgtctttaccaccggcgcgacgctggacgaattggcaaagacgctgaaaaaatcgggcgcaaaccgaatctgctgctggacgctggcacgcacgccaatgaaaaaataa

SEQ ID NO: 67780 - DNA, 699 bp, Neisseria meningitidis; identical to SEQ ID NO: 58898

SEQ ID NO: 67781 - DNA, 582 bp, Neisseria meningitidis
atgaaacacactgtatccgcatcggtcatcctgcttttgaccgcttgcgcgcaattacctcaaaataacgaaaacctgtggcagccgtccgaacacacccgcagtttcacggcggaagggcggttggcagtgaaagcggaagggaaaggttcgtatgcaaatttcgattggacataccaaccgcccgtggaaaccatcaatatcaatacccctttgggcagtacgctcgggcagttgtgtcaagacagggacggcgcattggcagtggacggcaaaggaaatgtctatcaggcggaaagtgcggaagaattgagcaggcagctggtcggtttcaaactgccaatccaatatctgcatatctgggcagatggcaggcgtgtggcgggcgcgccttaccgcatcctgccggacggcatattggaacaatacggttggactgtcggcagaaccgccgacagtggggggcaagtccgaacgttgcaactgaataacggaaatttgaacatcaggctggttttcaccgaaatcggtatgccgtctgaaaccgaaaccccggaacgctgtgcggcgcgcacgagataa
